United States Patent Application Publication US 2011/0177960 A1 - sequence listing, part 6

SEQ ID NO: 69391 - DNA, 25 bp, Artificial
  probe
  misc_feature (1)..(25): SEQ ID NO: 913; WAN024AY3_at; Start 568; Stop 592
agtcctcgcggagaattagaaatca

SEQ ID NO: 69392 - DNA, 25 bp, Artificial
  probe
  misc_feature (1)..(25): SEQ ID NO: 913; WAN024AY3_at; Start 563; Stop 587
aaccaagtcctcgcggagaattaga

SEQ ID NO: 69393 - DNA, 25 bp, Artificial
  probe
  misc_feature (1)..(25): SEQ ID NO: 913; WAN024AY3_at; Start 566; Stop 590
caagtcctcgcggagaattagaaat

SEQ ID NO: 69394 - DNA, 25 bp, Artificial
  probe
  misc_feature (1)..(25): SEQ ID NO: 4306; WAN024AY4_at; Start 45; Stop 69
ttgtgtattgggtgaaacgaaagga

SEQ ID NO: 69395 - DNA, 25 bp, Artificial
  probe
  misc_feature (1)..(25): SEQ ID NO: 4306; WAN024AY4_at; Start 7; Stop 31
ttgattaaaataaagaacacaacac

SEQ ID NO: 69396 - DNA, 25 bp, Artificial
  probe
  misc_feature (1)..(25): SEQ ID NO: 4306; WAN024AY4_at; Start 65; Stop 89
aaggaacgattgtacttatgaaagg

SEQ ID NO: 69397 - DNA, 25 bp, Artificial
  probe
  misc_feature (1)..(25): SEQ ID NO: 4306; WAN024AY4_at; Start 60; Stop 84
aacgaaaggaacgattgtacttatg

SEQ ID NO: 69398 - DNA, 25 bp, Artificial
  probe
  misc_feature (1)..(25): SEQ ID NO: 4306; WAN024AY4_at; Start 8; Stop 32
tgattaaaataaagaacacaacact

SEQ ID NO: 69399 - DNA, 25 bp, Artificial
  probe
  misc_feature (1)..(25): SEQ ID NO: 4306; WAN024AY4_at; Start 35; Stop 59
ttattcagtgttgtgtattgggtga

SEQ ID NO: 69400 - DNA, 25 bp, Artificial
  probe
  misc_feature (1)..(25): SEQ ID NO: 4306; WAN024AY4_at; Start 68; Stop 92
gaacgattgtacttatgaaaggtat

SEQ ID NO: 69401 - DNA, 25 bp, Artificial
  probe
  misc_feature (1)..(25): SEQ ID NO: 4306; WAN024AY4_at; Start 20; Stop 44
agaacacaacactttttattcagtg

SEQ ID NO: 69402 - DNA, 25 bp, Artificial
  probe
  misc_feature (1)..(25): SEQ ID NO: 4306; WAN024AY4_at; Start 39; Stop 63
tcagtgttgtgtattgggtgaaacg

SEQ ID NO: 69403 - DNA, 25 bp, Artificial
  probe
  misc_feature (1)..(25): SEQ ID NO: 4306; WAN024AY4_at; Start 61; Stop 85
acgaaaggaacgattgtacttatga

SEQ ID NO: 69404 - DNA, 25 bp, Artificial
  probe
  misc_feature (1)..(25): SEQ ID NO: 4306; WAN024AY4_at; Start 64; Stop 88
aaaggaacgattgtacttatgaaag

SEQ ID NO: 69405 - DNA, 25 bp, Artificial
  probe
  misc_feature (1)..(25): SEQ ID NO: 4306; WAN024AY4_at; Start 34; Stop 58
tttattcagtgttgtgtattgggtg

SEQ ID NO: 69406 - DNA, 25 bp, Artificial
  probe
  misc_feature (1)..(25): SEQ ID NO: 4306; WAN024AY4_at; Start 63; Stop 87
gaaaggaacgattgtacttatgaaa

SEQ ID NO: 69407 - DNA, 25 bp, Artificial
  probe
  misc_feature (1)..(25): SEQ ID NO: 4306; WAN024AY4_at; Start 36; Stop 60
tattcagtgttgtgtattgggtgaa

SEQ ID NO: 69408 - DNA, 25 bp, Artificial
  probe
  misc_feature (1)..(25): SEQ ID NO: 4306; WAN024AY4_at; Start 62; Stop 86
cgaaaggaacgattgtacttatgaa

SEQ ID NO: 69409 - DNA, 25 bp, Artificial
  probe
  misc_feature (1)..(25): SEQ ID NO: 4306; WAN024AY4_at; Start 37; Stop 61
attcagtgttgtgtattgggtgaaa

SEQ ID NO: 69410 - DNA, 25 bp, Artificial
  probe
  misc_feature (1)..(25): SEQ ID NO: 4306; WAN024AY4_at; Start 40; Stop 64
cagtgttgtgtattgggtgaaacga

SEQ ID NO: 69411 - DNA, 25 bp, Artificial
  probe
  misc_feature (1)..(25): SEQ ID NO: 4306; WAN024AY4_at; Start 23; Stop 47
acacaacactttttattcagtgttg

SEQ ID NO: 69412 - DNA, 25 bp, Artificial
  probe
  misc_feature (1)..(25): SEQ ID NO: 4306; WAN024AY4_at; Start 67; Stop 91
ggaacgattgtacttatgaaaggta

SEQ ID NO: 69413 - DNA, 25 bp, Artificial
  probe
  misc_feature (1)..(25): SEQ ID NO: 4306; WAN024AY4_at; Start 19; Stop 43
aagaacacaacactttttattcagt

SEQ ID NO: 69414 - DNA, 25 bp, Artificial
  probe
  misc_feature (1)..(25): SEQ ID NO: 4306; WAN024AY4_at; Start 27; Stop 51
aacactttttattcagtgttgtgta

SEQ ID NO: 69415 - DNA, 25 bp, Artificial
  probe
  misc_feature (1)..(25): SEQ ID NO: 4306; WAN024AY4_at; Start 38; Stop 62
ttcagtgttgtgtattgggtgaaac

SEQ ID NO: 69416 - DNA, 25 bp, Artificial
  probe
  misc_feature (1)..(25): SEQ ID NO: 4306; WAN024AY4_at; Start 42; Stop 66
gtgttgtgtattgggtgaaacgaaa

SEQ ID NO: 69417 - DNA, 25 bp, Artificial
  probe
  misc_feature (1)..(25): SEQ ID NO: 4306; WAN024AY4_at; Start 69; Stop 93
aacgattgtacttatgaaaggtatt

SEQ ID NO: 69418 - DNA, 25 bp, Artificial
  probe
  misc_feature (1)..(25): SEQ ID NO: 4306; WAN024AY4_at; Start 66; Stop 90
aggaacgattgtacttatgaaaggt

SEQ ID NO: 69419 - DNA, 25 bp, Artificial
  probe
  misc_feature (1)..(25): SEQ ID NO: 4306; WAN024AY4_at; Start 32; Stop 56
tttttattcagtgttgtgtattggg

SEQ ID NO: 69420 - DNA, 25 bp, Artificial
  probe
  misc_feature (1)..(25): SEQ ID NO: 4306; WAN024AY4_at; Start 21; Stop 45
gaacacaacactttttattcagtgt

SEQ ID NO: 69421 - DNA, 25 bp, Artificial
  probe
  misc_feature (1)..(25): SEQ ID NO: 4306; WAN024AY4_at; Start 33; Stop 57
ttttattcagtgttgtgtattgggt

SEQ ID NO: 69422 - DNA, 25 bp, Artificial
  probe
  misc_feature (1)..(25): SEQ ID NO: 4306; WAN024AY4_at; Start 70; Stop 94
acgattgtacttatgaaaggtatta

SEQ ID NO: 69423 - DNA, 25 bp, Artificial
  probe
  misc_feature (1)..(25): SEQ ID NO: 4306; WAN024AY4_at; Start 31; Stop 55
ctttttattcagtgttgtgtattgg

SEQ ID NO: 69424 - DNA, 25 bp, Artificial
  probe
  misc_feature (1)..(25): SEQ ID NO: 4306; WAN024AY4_at; Start 18; Stop 42
aaagaacacaacactttttattcag

SEQ ID NO: 69425 - DNA, 25 bp, Artificial
  probe
  misc_feature (1)..(25): SEQ ID NO: 4306; WAN024AY4_at; Start 41; Stop 65
agtgttgtgtattgggtgaaacgaa

SEQ ID NO: 69426 - DNA, 25 bp, Artificial
  probe
  misc_feature (1)..(25): SEQ ID NO: 4306; WAN024AY4_at; Start 46; Stop 70
tgtgtattgggtgaaacgaaaggaa

SEQ ID NO: 69427 - DNA, 25 bp, Artificial
  probe
  misc_feature (1)..(25): SEQ ID NO: 4306; WAN024AY4_at; Start 6; Stop 30
cttgattaaaataaagaacacaaca

SEQ ID NO: 69428 - DNA, 25 bp, Artificial
  probe
  misc_feature (1)..(25): SEQ ID NO: 3880; WAN024AY5_s_at; Start 11; Stop 35
agtactcatcaacaaagaaaggtac

SEQ ID NO: 69429 - DNA, 25 bp, Artificial
  probe
  misc_feature (1)..(25): SEQ ID NO: 3880; WAN024AY5_s_at; Start 2; Stop 26
tgaacgtaaagtactcatcaacaaa

SEQ ID NO: 69430 - DNA, 25 bp, Artificial
  probe
  misc_feature (1)..(25): SEQ ID NO: 3880; WAN024AY5_s_at; Start 15; Stop 39
ctcatcaacaaagaaaggtacccct

SEQ ID NO: 69431 - DNA, 25 bp, Artificial
  probe
  misc_feature (1)..(25): SEQ ID NO: 3880; WAN024AY5_s_at; Start 13; Stop 37
tactcatcaacaaagaaaggtaccc

SEQ ID NO: 69432 - DNA, 25 bp, Artificial
  probe
  misc_feature (1)..(25): SEQ ID NO: 3880; WAN024AY5_s_at; Start 8; Stop 32
taaagtactcatcaacaaagaaagg

SEQ ID NO: 69433 - DNA, 25 bp, Artificial
  probe
  misc_feature (1)..(25): SEQ ID NO: 3880; WAN024AY5_s_at; Start 9; Stop 33
aaagtactcatcaacaaagaaaggt

SEQ ID NO: 69434 - DNA, 25 bp, Artificial
  probe
  misc_feature (1)..(25): SEQ ID NO: 3880; WAN024AY5_s_at; Start 12; Stop 36
gtactcatcaacaaagaaaggtacc

SEQ ID NO: 69435 - DNA, 25 bp, Artificial
  probe
  misc_feature (1)..(25): SEQ ID NO: 3880; WAN024AY5_s_at; Start 6; Stop 30
cgtaaagtactcatcaacaaagaaa

SEQ ID NO: 69436 - DNA, 25 bp, Artificial
  probe
  misc_feature (1)..(25): SEQ ID NO: 3880; WAN024AY5_s_at; Start 4; Stop 28
aacgtaaagtactcatcaacaaaga

SEQ ID NO: 69437 - DNA, 25 bp, Artificial
  probe
  misc_feature (1)..(25): SEQ ID NO: 3880; WAN024AY5_s_at; Start 10; Stop 34
aagtactcatcaacaaagaaaggta

SEQ ID NO: 69438 - DNA, 25 bp, Artificial
  probe
  misc_feature (1)..(25): SEQ ID NO: 3880; WAN024AY5_s_at; Start 1; Stop 25
gtgaacgtaaagtactcatcaacaa

SEQ ID NO: 69439 - DNA, 25 bp, Artificial
  probe
  misc_feature (1)..(25): SEQ ID NO: 3880; WAN024AY5_s_at; Start 5; Stop 29
acgtaaagtactcatcaacaaagaa

SEQ ID NO: 69440 - DNA, 25 bp, Artificial
  probe
  misc_feature (1)..(25): SEQ ID NO: 3880; WAN024AY5_s_at; Start 7; Stop 31
gtaaagtactcatcaacaaagaaag

SEQ ID NO: 69441 - DNA, 25 bp, Artificial
  probe
  misc_feature (1)..(25): SEQ ID NO: 3880; WAN024AY5_s_at; Start 3; Stop 27
gaacgtaaagtactcatcaacaaag

SEQ ID NO: 69442 - DNA, 25 bp, Artificial
  probe
  misc_feature (1)..(25): SEQ ID NO: 3879; WAN024AY6_at; Start 328; Stop 352
tttatttctgatgatagcgttgcgc

SEQ ID NO: 69443 - DNA, 25 bp, Artificial
  probe
  misc_feature (1)..(25): SEQ ID NO: 3879; WAN024AY6_at; Start 329; Stop 353
ttatttctgatgatagcgttgcgct

SEQ ID NO: 69444 - DNA, 25 bp, Artificial
  probe
  misc_feature (1)..(25): SEQ ID NO: 3879; WAN024AY6_at; Start 397; Stop 421
atgctacaaaaggcagcgagtaagg

SEQ ID NO: 69445 - DNA, 25 bp, Artificial
  probe
  misc_feature (1)..(25): SEQ ID NO: 6445; WAN024AY7_at; Start 783; Stop 807
tgttcttgattttcataatttcatg

SEQ ID NO: 69446 - DNA, 25 bp, Artificial
  probe
  misc_feature (1)..(25): SEQ ID NO: 6445; WAN024AY7_at; Start 490; Stop 514
gtttatgtaactggaaatacagtta

SEQ ID NO: 69447 - DNA, 25 bp, Artificial
  probe
  misc_feature (1)..(25): SEQ ID NO: 6445; WAN024AY7_at; Start 578; Stop 602
acactcgtcttattctactgactgc

SEQ ID NO: 69448 - DNA, 25 bp, Artificial
  probe
  misc_feature (1)..(25): SEQ ID NO: 6445; WAN024AY7_at; Start 713; Stop 737
ccttggtgcgtgaaacagctacaga

SEQ ID NO: 69449 - DNA, 25 bp, Artificial
  probe
  misc_feature (1)..(25): SEQ ID NO: 6445; WAN024AY7_at; Start 577; Stop 601
aacactcgtcttattctactgactg

SEQ ID NO: 69450 - DNA, 25 bp, Artificial
  probe
  misc_feature (1)..(25): SEQ ID NO: 6445; WAN024AY7_at; Start 714; Stop 738
cttggtgcgtgaaacagctacagaa

SEQ ID NO: 69451 - DNA, 25 bp, Artificial
  probe
  misc_feature (1)..(25): SEQ ID NO: 6445; WAN024AY7_at; Start 489; Stop 513
tgtttatgtaactggaaatacagtt

SEQ ID NO: 69452 - DNA, 25 bp, Artificial
  probe
  misc_feature (1)..(25): SEQ ID NO: 6445; WAN024AY7_at; Start 1055; Stop 1079
aacagattgttcatattttaagcgg

SEQ ID NO: 69453 - DNA, 25 bp, Artificial
  probe
  misc_feature (1)..(25): SEQ ID NO: 6445; WAN024AY7_at; Start 1057; Stop 1081
cagattgttcatattttaagcggaa

SEQ ID NO: 69454 - DNA, 25 bp, Artificial
  probe
  misc_feature (1)..(25): SEQ ID NO: 6445; WAN024AY7_at; Start 798; Stop 822
taatttcatgaatcatagttacatg

SEQ ID NO: 69455 - DNA, 25 bp, Artificial
  probe
  misc_feature (1)..(25): SEQ ID NO: 6445; WAN024AY7_at; Start 1061; Stop 1085
ttgttcatattttaagcggaattta

SEQ ID NO: 69456 - DNA, 25 bp, Artificial
  probe
  misc_feature (1)..(25): SEQ ID NO: 6445; WAN024AY7_at; Start 801; Stop 825
tttcatgaatcatagttacatgatt

SEQ ID NO: 69457 - DNA, 25 bp, Artificial
  probe
  misc_feature (1)..(25): SEQ ID NO: 6445; WAN024AY7_at; Start 581; Stop 605
ctcgtcttattctactgactgctca

SEQ ID NO: 69458 - DNA, 25 bp, Artificial
  probe
  misc_feature (1)..(25): SEQ ID NO: 6445; WAN024AY7_at; Start 795; Stop 819
tcataatttcatgaatcatagttac

SEQ ID NO: 69459 - DNA, 25 bp, Artificial
  probe
  misc_feature (1)..(25): SEQ ID NO: 6445; WAN024AY7_at; Start 710; Stop 734
atcccttggtgcgtgaaacagctac

SEQ ID NO: 69460 - DNA, 25 bp, Artificial
  probe
  misc_feature (1)..(25): SEQ ID NO: 6445; WAN024AY7_at; Start 1056; Stop 1080
acagattgttcatattttaagcgga

SEQ ID NO: 69461 - DNA, 25 bp, Artificial
  probe
  misc_feature (1)..(25): SEQ ID NO: 6445; WAN024AY7_at; Start 799; Stop 823
aatttcatgaatcatagttacatga

SEQ ID NO: 69462 - DNA, 25 bp, Artificial
  probe
  misc_feature (1)..(25): SEQ ID NO: 6445; WAN024AY7_at; Start 796; Stop 820
cataatttcatgaatcatagttaca

SEQ ID NO: 69463 - DNA, 25 bp, Artificial
  probe
  misc_feature (1)..(25): SEQ ID NO: 6445; WAN024AY7_at; Start 579; Stop 603
cactcgtcttattctactgactgct

SEQ ID NO: 69464 - DNA, 25 bp, Artificial
  probe
  misc_feature (1)..(25): SEQ ID NO: 6445; WAN024AY7_at; Start 784; Stop 808
gttcttgattttcataatttcatga

SEQ ID NO: 69465 - DNA, 25 bp, Artificial
  probe
  misc_feature (1)..(25): SEQ ID NO: 6445; WAN024AY7_at; Start 491; Stop 515
tttatgtaactggaaatacagttat

SEQ ID NO: 69466 - DNA, 25 bp, Artificial
  probe
  misc_feature (1)..(25): SEQ ID NO: 6445; WAN024AY7_at; Start 800; Stop 824
atttcatgaatcatagttacatgat

SEQ ID NO: 69467 - DNA, 25 bp, Artificial
  probe
  misc_feature (1)..(25): SEQ ID NO: 6445; WAN024AY7_at; Start 575; Stop 599
ttaacactcgtcttattctactgac

SEQ ID NO: 69468 - DNA, 25 bp, Artificial
  probe
  misc_feature (1)..(25): SEQ ID NO: 6445; WAN024AY7_at; Start 574; Stop 598
gttaacactcgtcttattctactga

SEQ ID NO: 69469 - DNA, 25 bp, Artificial
  probe
  misc_feature (1)..(25): SEQ ID NO: 6445; WAN024AY7_at; Start 1062; Stop 1086
tgttcatattttaagcggaatttaa

SEQ ID NO: 69470 - DNA, 25 bp, Artificial
  probe
  misc_feature (1)..(25): SEQ ID NO: 6445; WAN024AY7_at; Start 711; Stop 735
tcccttggtgcgtgaaacagctaca

SEQ ID NO: 69471 - DNA, 25 bp, Artificial
  probe
  misc_feature (1)..(25): SEQ ID NO: 6445; WAN024AY7_at; Start 580; Stop 604
actcgtcttattctactgactgctc

SEQ ID NO: 69472 - DNA, 25 bp, Artificial
  probe
  misc_feature (1)..(25): SEQ ID NO: 6445; WAN024AY7_at; Start 1058; Stop 1082
agattgttcatattttaagcggaat

SEQ ID NO: 69473 - DNA, 25 bp, Artificial
  probe
  misc_feature (1)..(25): SEQ ID NO: 6445; WAN024AY7_at; Start 576; Stop 600
taacactcgtcttattctactgact

SEQ ID NO: 69474 - DNA, 25 bp, Artificial
  probe
  misc_feature (1)..(25): SEQ ID NO: 6445; WAN024AY7_at; Start 573; Stop 597
cgttaacactcgtcttattctactg

SEQ ID NO: 69475 - DNA, 25 bp, Artificial
  probe
  misc_feature (1)..(25): SEQ ID NO: 6445; WAN024AY7_at; Start 712; Stop 736
cccttggtgcgtgaaacagctacag

SEQ ID NO: 69476 - DNA, 25 bp, Artificial
  probe
  misc_feature (1)..(25): SEQ ID NO: 6445; WAN024AY7_at; Start 1054; Stop 1078
aaacagattgttcatattttaagcg

SEQ ID NO: 69477 - DNA, 25 bp, Artificial
  probe
  misc_feature (1)..(25): SEQ ID NO: 6445; WAN024AY7_at; Start 492; Stop 516
ttatgtaactggaaatacagttatt

SEQ ID NO: 69478 - DNA, 25 bp, Artificial
  probe
  misc_feature (1)..(25): SEQ ID NO: 6445; WAN024AY7_at; Start 1059; Stop 1083
gattgttcatattttaagcggaatt

SEQ ID NO: 69479 - DNA, 25 bp, Artificial
  probe
  misc_feature (1)..(25): SEQ ID NO: 1092; WAN024AY8_s_at; Start 416; Stop 440
ctattattgcaaattatcattttgc

SEQ ID NO: 69480 - DNA, 25 bp, Artificial
  probe
  misc_feature (1)..(25): SEQ ID NO: 1092; WAN024AY8_s_at; Start 874; Stop 898
cctgtattggtcatgcgagatacga

SEQ ID NO: 69481 - DNA, 25 bp, Artificial
  probe
  misc_feature (1)..(25): SEQ ID NO: 1092; WAN024AY8_s_at; Start 104; Stop 128
taactggtcaacacaaggagatggt

SEQ ID NO: 69482 - DNA, 25 bp, Artificial
  probe
  misc_feature (1)..(25): SEQ ID NO: 1092; WAN024AY8_s_at; Start 875; Stop 899
ctgtattggtcatgcgagatacgac

SEQ ID NO: 69483 - DNA, 25 bp, Artificial
  probe
  misc_feature (1)..(25): SEQ ID NO: 1092; WAN024AY8_s_at; Start 879; Stop 903
attggtcatgcgagatacgacagaa

SEQ ID NO: 69484 - DNA, 25 bp, Artificial
  probe
  misc_feature (1)..(25): SEQ ID NO: 1092; WAN024AY8_s_at; Start 531; Stop 555
tacagtacaaaaggattatacacac

SEQ ID NO: 69485 - DNA, 25 bp, Artificial
  probe
  misc_feature (1)..(25): SEQ ID NO: 1092; WAN024AY8_s_at; Start 946; Stop 970
actgatgaggagactatttatcaaa

SEQ ID NO: 69486 - DNA, 25 bp, Artificial
  probe
  misc_feature (1)..(25): SEQ ID NO: 1092; WAN024AY8_s_at; Start 891; Stop 915
agatacgacagaaagacctgaagga

SEQ ID NO: 69487 - DNA, 25 bp, Artificial
  probe
  misc_feature (1)..(25): SEQ ID NO: 1092; WAN024AY8_s_at; Start 109; Stop 133
ggtcaacacaaggagatggttagcc

SEQ ID NO: 69488 - DNA, 25 bp, Artificial
  probe
  misc_feature (1)..(25): SEQ ID NO: 1092; WAN024AY8_s_at; Start 886; Stop 910
atgcgagatacgacagaaagacctg

SEQ ID NO: 69489 - DNA, 25 bp, Artificial
  probe
  misc_feature (1)..(25): SEQ ID NO: 1092; WAN024AY8_s_at; Start 878; Stop 902
tattggtcatgcgagatacgacaga

SEQ ID NO: 69490 - DNA, 25 bp, Artificial
  probe
  misc_feature (1)..(25): SEQ ID NO: 1092; WAN024AY8_s_at; Start 890; Stop 914
gagatacgacagaaagacctgaagg

SEQ ID NO: 69491 - DNA, 25 bp, Artificial
  probe
  misc_feature (1)..(25): SEQ ID NO: 1092; WAN024AY8_s_at; Start 876; Stop 900
tgtattggtcatgcgagatacgaca

SEQ ID NO: 69492 - DNA, 25 bp, Artificial
  probe
  misc_feature (1)..(25): SEQ ID NO: 1092; WAN024AY8_s_at; Start 888; Stop 912
gcgagatacgacagaaagacctgaa

SEQ ID NO: 69493 - DNA, 25 bp, Artificial
  probe
  misc_feature (1)..(25): SEQ ID NO: 1092; WAN024AY8_s_at; Start 881; Stop 905
tggtcatgcgagatacgacagaaag

SEQ ID NO: 69494 - DNA, 25 bp, Artificial
  probe
  misc_feature (1)..(25): SEQ ID NO: 1092; WAN024AY8_s_at; Start 89; Stop 113
aaacagttgtttgtgtaactggtca

SEQ ID NO: 69495 - DNA, 25 bp, Artificial
  probe
  misc_feature (1)..(25): SEQ ID NO: 1092; WAN024AY8_s_at; Start 108; Stop 132
tggtcaacacaaggagatggttagc

SEQ ID NO: 69496 - DNA, 25 bp, Artificial
  probe
  misc_feature (1)..(25): SEQ ID NO: 1092; WAN024AY8_s_at; Start 358; Stop 382
ttacgaacttacaacctgcaaagtc

SEQ ID NO: 69497 - DNA, 25 bp, Artificial
  probe
  misc_feature (1)..(25): SEQ ID NO: 1092; WAN024AY8_s_at; Start 887; Stop 911
tgcgagatacgacagaaagacctga

SEQ ID NO: 69498 - DNA, 25 bp, Artificial
  probe
  misc_feature (1)..(25): SEQ ID NO: 1092; WAN024AY8_s_at; Start 404; Stop 428
gacaatcgacttctattattgcaaa

SEQ ID NO: 69499 - DNA, 25 bp, Artificial
  probe
  misc_feature (1)..(25): SEQ ID NO: 1092; WAN024AY8_s_at; Start 947; Stop 971
ctgatgaggagactatttatcaaaa

SEQ ID NO: 69500 - DNA, 25 bp, Artificial
  probe
  misc_feature (1)..(25): SEQ ID NO: 1092; WAN024AY8_s_at; Start 882; Stop 906
ggtcatgcgagatacgacagaaaga

SEQ ID NO: 69501 - DNA, 25 bp, Artificial
  probe
  misc_feature (1)..(25): SEQ ID NO: 1092; WAN024AY8_s_at; Start 110; Stop 134
gtcaacacaaggagatggttagccc

SEQ ID NO: 69502 - DNA, 25 bp, Artificial
  probe
  misc_feature (1)..(25): SEQ ID NO: 1092; WAN024AY8_s_at; Start 529; Stop 553
actacagtacaaaaggattatacac

SEQ ID NO: 69503 - DNA, 25 bp, Artificial
  probe
  misc_feature (1)..(25): SEQ ID NO: 1092; WAN024AY8_s_at; Start 359; Stop 383
tacgaacttacaacctgcaaagtcc

SEQ ID NO: 69504 - DNA, 25 bp, Artificial
  probe
  misc_feature (1)..(25): SEQ ID NO: 1092; WAN024AY8_s_at; Start 111; Stop 135
tcaacacaaggagatggttagccct

SEQ ID NO: 69505 - DNA, 25 bp, Artificial
  probe
  misc_feature (1)..(25): SEQ ID NO: 1092; WAN024AY8_s_at; Start 889; Stop 913
cgagatacgacagaaagacctgaag

SEQ ID NO: 69506 - DNA, 25 bp, Artificial
  probe
  misc_feature (1)..(25): SEQ ID NO: 1092; WAN024AY8_s_at; Start 105; Stop 129
aactggtcaacacaaggagatggtt

SEQ ID NO: 69507 - DNA, 25 bp, Artificial
  probe
  misc_feature (1)..(25): SEQ ID NO: 1092; WAN024AY8_s_at; Start 90; Stop 114
aacagttgtttgtgtaactggtcaa

SEQ ID NO: 69508 - DNA, 25 bp, Artificial
  probe
  misc_feature (1)..(25): SEQ ID NO: 1092; WAN024AY8_s_at; Start 884; Stop 908
tcatgcgagatacgacagaaagacc

SEQ ID NO: 69509 - DNA, 25 bp, Artificial
  probe
  misc_feature (1)..(25): SEQ ID NO: 1092; WAN024AY8_s_at; Start 410; Stop 434
cgacttctattattgcaaattatca

SEQ ID NO: 69510 - DNA, 25 bp, Artificial
  probe
  misc_feature (1)..(25): SEQ ID NO: 1092; WAN024AY8_s_at; Start 103; Stop 127
gtaactggtcaacacaaggagatgg

SEQ ID NO: 69511 - DNA, 25 bp, Artificial
  probe
  misc_feature (1)..(25): SEQ ID NO: 1092; WAN024AY8_s_at; Start 885; Stop 909
catgcgagatacgacagaaagacct

SEQ ID NO: 69512 - DNA, 25 bp, Artificial
  probe
  misc_feature (1)..(25): SEQ ID NO: 1092; WAN024AY8_s_at; Start 533; Stop 557
cagtacaaaaggattatacacaccc

SEQ ID NO: 69513 - DNA, 25 bp, Artificial
  probe
  misc_feature (1)..(25): SEQ ID NO: 677; WAN024AY9_at; Start 394; Stop 418
gaagagttcaacagacaatcgactt

SEQ ID NO: 69514 - DNA, 25 bp, Artificial
  probe
  misc_feature (1)..(25): SEQ ID NO: 677; WAN024AY9_at; Start 389; Stop 413
tcccagaagagttcaacagacaatc

SEQ ID NO: 69515 - DNA, 25 bp, Artificial
  probe
  misc_feature (1)..(25): SEQ ID NO: 677; WAN024AY9_at; Start 793; Stop 817
gattttcacaactttatgaatcata

SEQ ID NO: 69516 - DNA, 25 bp, Artificial
  probe
  misc_feature (1)..(25): SEQ ID NO: 677; WAN024AY9_at; Start 822; Stop 846
tatgattctaactgactcaggaggg

SEQ ID NO: 69517 - DNA, 25 bp, Artificial
  probe
  misc_feature (1)..(25): SEQ ID NO: 677; WAN024AY9_at; Start 276; Stop 300
ggttcacggtgatactactacgaca

SEQ ID NO: 69518 - DNA, 25 bp, Artificial
  probe
  misc_feature (1)..(25): SEQ ID NO: 677; WAN024AY9_at; Start 396; Stop 420
agagttcaacagacaatcgacttct

SEQ ID NO: 69519 - DNA, 25 bp, Artificial
  probe
  misc_feature (1)..(25): SEQ ID NO: 677; WAN024AY9_at; Start 579; Stop 603
tggaaatcgcctcatcttattgact

SEQ ID NO: 69520 - DNA, 25 bp, Artificial
  probe
  misc_feature (1)..(25): SEQ ID NO: 677; WAN024AY9_at; Start 572; Stop 596
taaacgatggaaatcgcctcatctt

SEQ ID NO: 69521 - DNA, 25 bp, Artificial
  probe
  misc_feature (1)..(25): SEQ ID NO: 677; WAN024AY9_at; Start 554; Stop 578
cacaccccgatctagatttaaacga

SEQ ID NO: 69522 - DNA, 25 bp, Artificial
  probe
  misc_feature (1)..(25): SEQ ID NO: 677; WAN024AY9_at; Start 568; Stop 592
gatttaaacgatggaaatcgcctca

SEQ ID NO: 69523 - DNA, 25 bp, Artificial
  probe
  misc_feature (1)..(25): SEQ ID NO: 677; WAN024AY9_at; Start 702; Stop 726
aattcataaaaatccattggtacgg

SEQ ID NO: 69524 - DNA, 25 bp, Artificial
  probe
  misc_feature (1)..(25): SEQ ID NO: 677; WAN024AY9_at; Start 858; Stop 882
ggcaccttcgttaggaaagcctgta

SEQ ID NO: 69525 - DNA, 25 bp, Artificial
  probe
  misc_feature (1)..(25): SEQ ID NO: 677; WAN024AY9_at; Start 717; Stop 741
attggtacgggaaacagctacagaa

SEQ ID NO: 69526 - DNA, 25 bp, Artificial
  probe
  misc_feature (1)..(25): SEQ ID NO: 677; WAN024AY9_at; Start 1058; Stop 1082
aacagattgttcgaattttacgtgg

SEQ ID NO: 69527 - DNA, 25 bp, Artificial
  probe
  misc_feature (1)..(25): SEQ ID NO: 677; WAN024AY9_at; Start 433; Stop 457
tatcattttgctcctacagaattag

SEQ ID NO: 69528 - DNA, 25 bp, Artificial
  probe
  misc_feature (1)..(25): SEQ ID NO: 677; WAN024AY9_at; Start 711; Stop 735
aaatccattggtacgggaaacagct

SEQ ID NO: 69529 - DNA, 25 bp, Artificial
  probe
  misc_feature (1)..(25): SEQ ID NO: 677; WAN024AY9_at; Start 1065; Stop 1089
tgttcgaattttacgtggaatttga

SEQ ID NO: 69530 - DNA, 25 bp, Artificial
  probe
  misc_feature (1)..(25): SEQ ID NO: 677; WAN024AY9_at; Start 282; Stop 306
cggtgatactactacgacatatgca

SEQ ID NO: 69531 - DNA, 25 bp, Artificial
  probe
  misc_feature (1)..(25): SEQ ID NO: 677; WAN024AY9_at; Start 715; Stop 739
ccattggtacgggaaacagctacag

SEQ ID NO: 69532 - DNA, 25 bp, Artificial
  probe
  misc_feature (1)..(25): SEQ ID NO: 677; WAN024AY9_at; Start 383; Stop 407
gtcctttcccagaagagttcaacag

SEQ ID NO: 69533 - DNA, 25 bp, Artificial
  probe
  misc_feature (1)..(25): SEQ ID NO: 677; WAN024AY9_at; Start 141; Stop 165
tttagatttatttggagttcaacca

SEQ ID NO: 69534 - DNA, 25 bp, Artificial
  probe
  misc_feature (1)..(25): SEQ ID NO: 677; WAN024AY9_at; Start 314; Stop 338
tagcggcattttatctaggaattaa

SEQ ID NO: 69535 - DNA, 25 bp, Artificial
  probe
  misc_feature (1)..(25): SEQ ID NO: 677; WAN024AY9_at; Start 74; Stop 98
gaaaacaggaagatatgaaaacagt

SEQ ID NO: 69536 - DNA, 25 bp, Artificial
  probe
  misc_feature (1)..(25): SEQ ID NO: 677; WAN024AY9_at; Start 308; Stop 332
cagctttagcggcattttatctagg

SEQ ID NO: 69537 - DNA, 25 bp, Artificial
  probe
  misc_feature (1)..(25): SEQ ID NO: 677; WAN024AY9_at; Start 442; Stop 466
gctcctacagaattagctaaagaaa

SEQ ID NO: 69538 - DNA, 25 bp, Artificial
  probe
  misc_feature (1)..(25): SEQ ID NO: 677; WAN024AY9_at; Start 820; Stop 844
tatatgattctaactgactcaggag

SEQ ID NO: 69539 - DNA, 25 bp, Artificial
  probe
  misc_feature (1)..(25): SEQ ID NO: 677; WAN024AY9_at; Start 850; Stop 874
caagaagaggcaccttcgttaggaa

SEQ ID NO: 69540 - DNA, 25 bp, Artificial
  probe
  misc_feature (1)..(25): SEQ ID NO: 677; WAN024AY9_at; Start 67; Stop 91
gagttgagaaaacaggaagatatga

SEQ ID NO: 69541 - DNA, 25 bp, Artificial
  probe
  misc_feature (1)..(25): SEQ ID NO: 677; WAN024AY9_at; Start 378; Stop 402
gcaaagtcctttcccagaagagttc

SEQ ID NO: 69542 - DNA, 25 bp, Artificial
  probe
  misc_feature (1)..(25): SEQ ID NO: 677; WAN024AY9_at; Start 263; Stop 287
cagatattgttttggttcacggtga

SEQ ID NO: 69543 - DNA, 25 bp, Artificial
  probe
  misc_feature (1)..(25): SEQ ID NO: 677; WAN024AY9_at; Start 330; Stop 354
aggaattaaagttggtcatgttgaa

SEQ ID NO: 69544 - DNA, 25 bp, Artificial
  probe
  misc_feature (1)..(25): SEQ ID NO: 677; WAN024AY9_at; Start 325; Stop 349
tatctaggaattaaagttggtcatg

SEQ ID NO: 69545 - DNA, 25 bp, Artificial
  probe
  misc_feature (1)..(25): SEQ ID NO: 677; WAN024AY9_at; Start 473; Stop 497
taaaagagggtagaaataatatcta

SEQ ID NO: 69546 - DNA, 25 bp, Artificial
  probe
  misc_feature (1)..(25): SEQ ID NO: 677; WAN024AY9_at; Start 558; Stop 582
ccccgatctagatttaaacgatgga

SEQ ID NO: 69547 - DNA, 25 bp, Artificial
  probe
  misc_feature (1)..(25): SEQ ID NO: 7729; WAN024AYA_at; Start 535; Stop 559
caaaataggcgtaaaaagaaatcag

SEQ ID NO: 69548 - DNA, 25 bp, Artificial
  probe
  misc_feature (1)..(25): SEQ ID NO: 7729; WAN024AYA_at; Start 356; Stop 380
gaccagatatcttttcgacgacgta

SEQ ID NO: 69549 - DNA, 25 bp, Artificial
  probe
  misc_feature (1)..(25): SEQ ID NO: 7729; WAN024AYA_at; Start 75; Stop 99
caattccaatacaaagcagatcgtt

SEQ ID NO: 69550 - DNA, 25 bp, Artificial
  probe
  misc_feature (1)..(25): SEQ ID NO: 7729; WAN024AYA_at; Start 485; Stop 509
aaattaaatgttggttgaagtctag

SEQ ID NO: 69551 - DNA, 25 bp, Artificial
  probe
  misc_feature (1)..(25): SEQ ID NO: 7729; WAN024AYA_at; Start 425; Stop 449
aagaggttaaggctctcaatgaaaa

SEQ ID NO: 69552 - DNA, 25 bp, Artificial
  probe
  misc_feature (1)..(25): SEQ ID NO: 7729; WAN024AYA_at; Start 191; Stop 215
aaaatgctggtttcgctcgaggtaa

SEQ ID NO: 69553 - DNA, 25 bp, Artificial
  probe
  misc_feature (1)..(25): SEQ ID NO: 7729; WAN024AYA_at; Start 212; Stop 236
gtaataatgtagcatatcagtttgc

SEQ ID NO: 69554 - DNA, 25 bp, Artificial
  probe
  misc_feature (1)..(25): SEQ ID NO: 7729; WAN024AYA_at; Start 375; Stop 399
gacgtatcagcttcaccaaaaccca

SEQ ID NO: 69555 - DNA, 25 bp, Artificial
  probe
  misc_feature (1)..(25): SEQ ID NO: 7729; WAN024AYA_at; Start 73; Stop 97
ggcaattccaatacaaagcagatcg

SEQ ID NO: 69556 - DNA, 25 bp, Artificial
  probe
  misc_feature (1)..(25): SEQ ID NO: 7729; WAN024AYA_at; Start 70; Stop 94
gaaggcaattccaatacaaagcaga

SEQ ID NO: 69557 - DNA, 25 bp, Artificial
  probe
  misc_feature (1)..(25): SEQ ID NO: 7729; WAN024AYA_at; Start 771; Stop 795
caatcaagtctatacaaacttagta

SEQ ID NO: 69558 - DNA, 25 bp, Artificial
  probe
  misc_feature (1)..(25): SEQ ID NO: 7729; WAN024AYA_at; Start 353; Stop 377
taggaccagatatcttttcgacgac

SEQ ID NO: 69559 - DNA, 25 bp, Artificial
  probe
  misc_feature (1)..(25): SEQ ID NO: 7729; WAN024AYA_at; Start 145; Stop 169
gagctgtatgagtcagattcagaga

SEQ ID NO: 69560 - DNA, 25 bp, Artificial
  probe
  misc_feature (1)..(25): SEQ ID NO: 7729; WAN024AYA_at; Start 149; Stop 173
tgtatgagtcagattcagagattga

SEQ ID NO: 69561 - DNA, 25 bp, Artificial
  probe
  misc_feature (1)..(25): SEQ ID NO: 7729; WAN024AYA_at; Start 361; Stop 385
gatatcttttcgacgacgtatcagc

SEQ ID NO: 69562 - DNA, 25 bp, Artificial
  probe
  misc_feature (1)..(25): SEQ ID NO: 7729; WAN024AYA_at; Start 199; Stop 223
ggtttcgctcgaggtaataatgtag

SEQ ID NO: 69563 - DNA, 25 bp, Artificial
  probe
  misc_feature (1)..(25): SEQ ID NO: 7729; WAN024AYA_at; Start 204; Stop 228
cgctcgaggtaataatgtagcatat

SEQ ID NO: 69564 - DNA, 25 bp, Artificial
  probe
  misc_feature (1)..(25): SEQ ID NO: 7729; WAN024AYA_at; Start 234; Stop 258
tgctaaggaaaagtacaaacctgat

SEQ ID NO: 69565 - DNA, 25 bp, Artificial
  probe
  misc_feature (1)..(25): SEQ ID NO: 7729; WAN024AYA_at; Start 339; Stop 363
aaaattccatttgttaggaccagat

SEQ ID NO: 69566 - DNA, 25 bp, Artificial
  probe
  misc_feature (1)..(25): SEQ ID NO: 7729; WAN024AYA_at; Start 251; Stop 275
aacctgattttatggttatcatgaa

SEQ ID NO: 69567 - DNA, 25 bp, Artificial
  probe
  misc_feature (1)..(25): SEQ ID NO: 7729; WAN024AYA_at; Start 645; Stop 669
tgcttttaatcccaataccttcttc

SEQ ID NO: 69568 - DNA, 25 bp, Artificial
  probe
  misc_feature (1)..(25): SEQ ID NO: 7729; WAN024AYA_at; Start 189; Stop 213
tgaaaatgctggtttcgctcgaggt

SEQ ID NO: 69569 - DNA, 25 bp, Artificial
  probe
  misc_feature (1)..(25): SEQ ID NO: 7729; WAN024AYA_at; Start 80; Stop 104
ccaatacaaagcagatcgttattat

SEQ ID NO: 69570 - DNA, 25 bp, Artificial
  probe
  misc_feature (1)..(25): SEQ ID NO: 7729; WAN024AYA_at; Start 140; Stop 164
tacaagagctgtatgagtcagattc

SEQ ID NO: 69571 - DNA, 25 bp, Artificial
  probe
  misc_feature (1)..(25): SEQ ID NO: 7729; WAN024AYA_at; Start 760; Stop 784
aatgttgcaaccaatcaagtctata

SEQ ID NO: 69572 - DNA, 25 bp, Artificial
  probe
  misc_feature (1)..(25): SEQ ID NO: 7729; WAN024AYA_at; Start 617; Stop 641
ctagagatttaattgagaaagagga

SEQ ID NO: 69573 - DNA, 25 bp, Artificial
  probe
  misc_feature (1)..(25): SEQ ID NO: 7729; WAN024AYA_at; Start 371; Stop 395
cgacgacgtatcagcttcaccaaaa

SEQ ID NO: 69574 - DNA, 25 bp, Artificial
  probe
  misc_feature (1)..(25): SEQ ID NO: 7729; WAN024AYA_at; Start 368; Stop 392
tttcgacgacgtatcagcttcacca

SEQ ID NO: 69575 - DNA, 25 bp, Artificial
  probe
  misc_feature (1)..(25): SEQ ID NO: 7729; WAN024AYA_at; Start 156; Stop 180
gtcagattcagagattgatgtcttg

SEQ ID NO: 69576 - DNA, 25 bp, Artificial
  probe
  misc_feature (1)..(25): SEQ ID NO: 7729; WAN024AYA_at; Start 345; Stop 369
ccatttgttaggaccagatatcttt

SEQ ID NO: 69577 - DNA, 25 bp, Artificial
  probe
  misc_feature (1)..(25): SEQ ID NO: 7729; WAN024AYA_at; Start 658; Stop 682
aataccttcttctattatgaaacag

SEQ ID NO: 69578 - DNA, 25 bp, Artificial
  probe
  misc_feature (1)..(25): SEQ ID NO: 7729; WAN024AYA_at; Start 417; Stop 441
tacttatgaagaggttaaggctctc

SEQ ID NO: 69579 - DNA, 25 bp, Artificial
  probe
  misc_feature (1)..(25): SEQ ID NO: 7729; WAN024AYA_at; Start 639; Stop 663
ggagtatgcttttaatcccaatacc

SEQ ID NO: 69580 - DNA, 25 bp, Artificial
  probe
  misc_feature (1)..(25): SEQ ID NO: 7729; WAN024AYA_at; Start 766; Stop 790
gcaaccaatcaagtctatacaaact

SEQ ID NO: 69581 - DNA, 25 bp, Artificial
  probe
  misc_feature (1)..(25): SEQ ID NO: 5876; WAN024AYB_at; Start 738; Stop 762
aattagagttttgcaccatcaaaat

SEQ ID NO: 69582 - DNA, 25 bp, Artificial
  probe
  misc_feature (1)..(25): SEQ ID NO: 5876; WAN024AYB_at; Start 70; Stop 94
gaaggcaattataatgcaaagcaaa

SEQ ID NO: 69583 - DNA, 25 bp, Artificial
  probe
  misc_feature (1)..(25): SEQ ID NO: 5876; WAN024AYB_at; Start 354; Stop 378
cgggccagatatcttctcgactact

SEQ ID NO: 69584 - DNA, 25 bp, Artificial
  probe
  misc_feature (1)..(25): SEQ ID NO: 5876; WAN024AYB_at; Start 352; Stop 376
ctcgggccagatatcttctcgacta

SEQ ID NO: 69585 - DNA, 25 bp, Artificial
  probe
  misc_feature (1)..(25): SEQ ID NO: 5876; WAN024AYB_at; Start 816; Stop 840
taaatgcaactttaaatccaccagt

SEQ ID NO: 69586 - DNA, 25 bp, Artificial
  probe
  misc_feature (1)..(25): SEQ ID NO: 5876; WAN024AYB_at; Start 200; Stop 224
gttttgctcgtggaaataatgtggc

SEQ ID NO: 69587 - DNA, 25 bp, Artificial
  probe
  misc_feature (1)..(25): SEQ ID NO: 5876; WAN024AYB_at; Start 415; Stop 439
tatacttatggagaagttaaagctc

SEQ ID NO: 69588 - DNA, 25 bp, Artificial
  probe
  misc_feature (1)..(25): SEQ ID NO: 5876; WAN024AYB_at; Start 733; Stop 757
cctaaaattagagttttgcaccatc

SEQ ID NO: 69589 - DNA, 25 bp, Artificial
  probe
  misc_feature (1)..(25): SEQ ID NO: 5876; WAN024AYB_at; Start 720; Stop 744
gagaatttatacacctaaaattaga

SEQ ID NO: 69590 - DNA, 25 bp, Artificial
  probe
  misc_feature (1)..(25): SEQ ID NO: 5876; WAN024AYB_at; Start 340; Stop 364
aaattccatttgctcgggccagata

SEQ ID NO: 69591 - DNA, 25 bp, Artificial
  probe
  misc_feature (1)..(25): SEQ ID NO: 5876; WAN024AYB_at; Start 201; Stop 225
ttttgctcgtggaaataatgtggct

SEQ ID NO: 69592 - DNA, 25 bp, Artificial
  probe
  misc_feature (1)..(25): SEQ ID NO: 5876; WAN024AYB_at; Start 421; Stop 445
tatggagaagttaaagctctaaatg

SEQ ID NO: 69593 - DNA, 25 bp, Artificial
  probe
  misc_feature (1)..(25): SEQ ID NO: 5876; WAN024AYB_at; Start 77; Stop 101
attataatgcaaagcaaatcgttat

SEQ ID NO: 69594 - DNA, 25 bp, Artificial
  probe
  misc_feature (1)..(25): SEQ ID NO: 5876; WAN024AYB_at; Start 339; Stop 363
aaaattccatttgctcgggccagat

SEQ ID NO: 69595 - DNA, 25 bp, Artificial
  probe
  misc_feature (1)..(25): SEQ ID NO: 5876; WAN024AYB_at; Start 365; Stop 389
tcttctcgactacttaccaacttca

SEQ ID NO: 69596 - DNA, 25 bp, Artificial
  probe
  misc_feature (1)..(25): SEQ ID NO: 5876; WAN024AYB_at; Start 348; Stop 372
tttgctcgggccagatatcttctcg

SEQ ID NO: 69597 - DNA, 25 bp, Artificial
  probe
  misc_feature (1)..(25): SEQ ID NO: 5876; WAN024AYB_at; Start 67; Stop 91
aaagaaggcaattataatgcaaagc

SEQ ID NO: 69598 - DNA, 25 bp, Artificial
  probe
  misc_feature (1)..(25): SEQ ID NO: 5876; WAN024AYB_at; Start 762; Stop 786
tgttgcaactaatcaagtttacacg

SEQ ID NO: 69599 - DNA, 25 bp, Artificial
  probe
  misc_feature (1)..(25): SEQ ID NO: 5876; WAN024AYB_at; Start 73; Stop 97
ggcaattataatgcaaagcaaatcg

SEQ ID NO: 69600 - DNA, 25 bp, Artificial
  probe
  misc_feature (1)..(25): SEQ ID NO: 5876; WAN024AYB_at; Start 731; Stop 755
cacctaaaattagagttttgcacca

SEQ ID NO: 69601 - DNA, 25 bp, Artificial
  probe
  misc_feature (1)..(25): SEQ ID NO: 5876; WAN024AYB_at; Start 189; Stop 213
tgaaaatgctggttttgctcgtgga

SEQ ID NO: 69602 - DNA, 25 bp, Artificial
  probe
  misc_feature (1)..(25): SEQ ID NO: 5876; WAN024AYB_at; Start 370; Stop 394
tcgactacttaccaacttcaccaaa

SEQ ID NO: 69603 - DNA, 25 bp, Artificial
  probe
  misc_feature (1)..(25): SEQ ID NO: 5876; WAN024AYB_at; Start 766; Stop 790
gcaactaatcaagtttacacgaact

SEQ ID NO: 69604 - DNA, 25 bp, Artificial
  probe
  misc_feature (1)..(25): SEQ ID NO: 5876; WAN024AYB_at; Start 361; Stop 385
gatatcttctcgactacttaccaac

SEQ ID NO: 69605 - DNA, 25 bp, Artificial
  probe
  misc_feature (1)..(25): SEQ ID NO: 5876; WAN024AYB_at; Start 425; Stop 449
gagaagttaaagctctaaatgaaaa

SEQ ID NO: 69606 - DNA, 25 bp, Artificial
  probe
  misc_feature (1)..(25): SEQ ID NO: 5876; WAN024AYB_at; Start 735; Stop 759
taaaattagagttttgcaccatcaa

SEQ ID NO: 69607 - DNA, 25 bp, Artificial
  probe
  misc_feature (1)..(25): SEQ ID NO: 5876; WAN024AYB_at; Start 774; Stop 798
tcaagtttacacgaacttgttagaa

SEQ ID NO: 69608 - DNA, 25 bp, Artificial
  probe
  misc_feature (1)..(25): SEQ ID NO: 5876; WAN024AYB_at; Start 75; Stop 99
caattataatgcaaagcaaatcgtt

SEQ ID NO: 69609 - DNA, 25 bp, Artificial
  probe
  misc_feature (1)..(25): SEQ ID NO: 5876; WAN024AYB_at; Start 341; Stop 365
aattccatttgctcgggccagatat

SEQ ID NO: 69610 - DNA, 25 bp, Artificial
  probe
  misc_feature (1)..(25): SEQ ID NO: 5876; WAN024AYB_at; Start 359; Stop 383
cagatatcttctcgactacttacca

SEQ ID NO: 69611 - DNA, 25 bp, Artificial
  probe
  misc_feature (1)..(25): SEQ ID NO: 5876; WAN024AYB_at; Start 356; Stop 380
ggccagatatcttctcgactactta

SEQ ID NO: 69612 - DNA, 25 bp, Artificial
  probe
  misc_feature (1)..(25): SEQ ID NO: 5876; WAN024AYB_at; Start 350; Stop 374
tgctcgggccagatatcttctcgac

SEQ ID NO: 69613 - DNA, 25 bp, Artificial
  probe
  misc_feature (1)..(25): SEQ ID NO: 5876; WAN024AYB_at; Start 417; Stop 441
tacttatggagaagttaaagctcta

SEQ ID NO: 69614 - DNA, 25 bp, Artificial
  probe
  misc_feature (1)..(25): SEQ ID NO: 5876; WAN024AYB_at; Start 410; Stop 434
cacattatacttatggagaagttaa

SEQ ID NO: 69615 - DNA, 25 bp, Artificial
  probe
  misc_feature (1)..(25): SEQ ID NO: 5875; WAN024AYC_at; Start 770; Stop 794
caaatcaggtttatacaaacttagt

SEQ ID NO: 69616 - DNA, 25 bp, Artificial
  probe
  misc_feature (1)..(25): SEQ ID NO: 5875; WAN024AYC_at; Start 741; Stop 765
taaggttttacaccatcaaaatgtg

SEQ ID NO: 69617 - DNA, 25 bp, Artificial
  probe
  misc_feature (1)..(25): SEQ ID NO: 5875; WAN024AYC_at; Start 324; Stop 348
tatctatcacaaagaaaaatttcat

SEQ ID NO: 69618 - DNA, 25 bp, Artificial
  probe
  misc_feature (1)..(25): SEQ ID NO: 5875; WAN024AYC_at; Start 749; Stop 773
tacaccatcaaaatgtggcaacaaa

SEQ ID NO: 69619 - DNA, 25 bp, Artificial
  probe
  misc_feature (1)..(25): SEQ ID NO: 5875; WAN024AYC_at; Start 77; Stop 101
attccaatgaaaagcaaatcgttat

SEQ ID NO: 69620 - DNA, 25 bp, Artificial
  probe
  misc_feature (1)..(25): SEQ ID NO: 5875; WAN024AYC_at; Start 361; Stop 385
gacattttttcgacaacatatcagc

SEQ ID NO: 69621 - DNA, 25 bp, Artificial
  probe
  misc_feature (1)..(25): SEQ ID NO: 5875; WAN024AYC_at; Start 765; Stop 789
ggcaacaaatcaggtttatacaaac

SEQ ID NO: 69622 - DNA, 25 bp, Artificial
  probe
  misc_feature (1)..(25): SEQ ID NO: 5875; WAN024AYC_at; Start 372; Stop 396
gacaacatatcagctacatcaaaat

SEQ ID NO: 69623 - DNA, 25 bp, Artificial
  probe
  misc_feature (1)..(25): SEQ ID NO: 5875; WAN024AYC_at; Start 70; Stop 94
gaaggcaattccaatgaaaagcaaa

SEQ ID NO: 69624 - DNA, 25 bp, Artificial
  probe
  misc_feature (1)..(25): SEQ ID NO: 5875; WAN024AYC_at; Start 425; Stop 449
aagaggtagtggctctcaatgaaaa

SEQ ID NO: 69625 - DNA, 25 bp, Artificial
  probe
  misc_feature (1)..(25): SEQ ID NO: 5875; WAN024AYC_at; Start 381; Stop 405
tcagctacatcaaaatcctaaacgc

SEQ ID NO: 69626 - DNA, 25 bp, Artificial
  probe
  misc_feature (1)..(25): SEQ ID NO: 5875; WAN024AYC_at; Start 353; Stop 377
tagggccagacattttttcgacaac

SEQ ID NO: 69627 - DNA, 25 bp, Artificial
  probe
  misc_feature (1)..(25): SEQ ID NO: 5875; WAN024AYC_at; Start 397; Stop 421
cctaaacgcctgacacattatactt

SEQ ID NO: 69628 - DNA, 25 bp, Artificial
  probe
  misc_feature (1)..(25): SEQ ID NO: 5875; WAN024AYC_at; Start 351; Stop 375
gctagggccagacattttttcgaca

SEQ ID NO: 69629 - DNA, 25 bp, Artificial
  probe
  misc_feature (1)..(25): SEQ ID NO: 5875; WAN024AYC_at; Start 73; Stop 97
ggcaattccaatgaaaagcaaatcg

SEQ ID NO: 69630 - DNA, 25 bp, Artificial
  probe
  misc_feature (1)..(25): SEQ ID NO: 5875; WAN024AYC_at; Start 349; Stop 373
ttgctagggccagacattttttcga

SEQ ID NO: 69631 - DNA, 25 bp, Artificial
  probe
  misc_feature (1)..(25): SEQ ID NO: 5875; WAN024AYC_at; Start 384; Stop 408
gctacatcaaaatcctaaacgcctg

SEQ ID NO: 69632 - DNA, 25 bp, Artificial
  probe
  misc_feature (1)..(25): SEQ ID NO: 5875; WAN024AYC_at; Start 200; Stop 224
gatttgctcgaggaaataatgtagc

SEQ ID NO: 69633 - DNA, 25 bp, Artificial
  probe
  misc_feature (1)..(25): SEQ ID NO: 5875; WAN024AYC_at; Start 339; Stop 363
aaaatttcatttgctagggccagac

SEQ ID NO: 69634 - DNA, 25 bp, Artificial
  probe
  misc_feature (1)..(25): SEQ ID NO: 5875; WAN024AYC_at; Start 177; Stop 201
attgattaaccacgaaaatgctgga

SEQ ID NO: 69635 - DNA, 25 bp, Artificial
  probe
  misc_feature (1)..(25): SEQ ID NO: 5875; WAN024AYC_at; Start 341; Stop 365
aatttcatttgctagggccagacat

SEQ ID NO: 69636 - DNA, 25 bp, Artificial
  probe
  misc_feature (1)..(25): SEQ ID NO: 5875; WAN024AYC_at; Start 421; Stop 445
tatgaagaggtagtggctctcaatg

SEQ ID NO: 69637 - DNA, 25 bp, Artificial
  probe
  misc_feature (1)..(25): SEQ ID NO: 5875; WAN024AYC_at; Start 356; Stop 380
ggccagacattttttcgacaacata

SEQ ID NO: 69638 - DNA, 25 bp, Artificial
  probe
  misc_feature (1)..(25): SEQ ID NO: 5875; WAN024AYC_at; Start 762; Stop 786
tgtggcaacaaatcaggtttataca

SEQ ID NO: 69639 - DNA, 25 bp, Artificial
  probe
  misc_feature (1)..(25): SEQ ID NO: 5875; WAN024AYC_at; Start 744; Stop 768
ggttttacaccatcaaaatgtggca

SEQ ID NO: 69640 - DNA, 25 bp, Artificial
  probe
  misc_feature (1)..(25): SEQ ID NO: 5875; WAN024AYC_at; Start 848; Stop 872
taactttaatggagaaaaatgaata

SEQ ID NO: 69641 - DNA, 25 bp, Artificial
  probe
  misc_feature (1)..(25): SEQ ID NO: 5875; WAN024AYC_at; Start 186; Stop 210
ccacgaaaatgctggatttgctcga

SEQ ID NO: 69642 - DNA, 25 bp, Artificial
  probe
  misc_feature (1)..(25): SEQ ID NO: 5875; WAN024AYC_at; Start 317; Stop 341
tgacagatatctatcacaaagaaaa

SEQ ID NO: 69643 - DNA, 25 bp, Artificial
  probe
  misc_feature (1)..(25): SEQ ID NO: 5875; WAN024AYC_at; Start 756; Stop 780
tcaaaatgtggcaacaaatcaggtt

SEQ ID NO: 69644 - DNA, 25 bp, Artificial
  probe
  misc_feature (1)..(25): SEQ ID NO: 5875; WAN024AYC_at; Start 390; Stop 414
tcaaaatcctaaacgcctgacacat

SEQ ID NO: 69645 - DNA, 25 bp, Artificial
  probe
  misc_feature (1)..(25): SEQ ID NO: 5875; WAN024AYC_at; Start 189; Stop 213
cgaaaatgctggatttgctcgagga

SEQ ID NO: 69646 - DNA, 25 bp, Artificial
  probe
  misc_feature (1)..(25): SEQ ID NO: 5875; WAN024AYC_at; Start 367; Stop 391
ttttcgacaacatatcagctacatc

SEQ ID NO: 69647 - DNA, 25 bp, Artificial
  probe
  misc_feature (1)..(25): SEQ ID NO: 5875; WAN024AYC_at; Start 417; Stop 441
tacttatgaagaggtagtggctctc

SEQ ID NO: 69648 - DNA, 25 bp, Artificial
  probe
  misc_feature (1)..(25): SEQ ID NO: 5875; WAN024AYC_at; Start 456; Stop 480
aagagggagccaacttagtctaact

SEQ ID NO: 69649 - DNA, 25 bp, Artificial
  probe
  misc_feature (1)..(25): SEQ ID NO: 4924; WAN024AYD_at; Start 210; Stop 234
tttcaaagatagaattatcgctggg

SEQ ID NO: 69650 - DNA, 25 bp, Artificial
  probe
  misc_feature (1)..(25): SEQ ID NO: 4924; WAN024AYD_at; Start 98; Stop 122
tcctccgcggtggtagtgtacttgg

SEQ ID NO: 69651 - DNA, 25 bp, Artificial
  probe
  misc_feature (1)..(25): SEQ ID NO: 4924; WAN024AYD_at; Start 242; Stop 266
aggttcttacttatcaatactgtga

SEQ ID NO: 69652 - DNA, 25 bp, Artificial
  probe
  misc_feature (1)..(25): SEQ ID NO: 4924; WAN024AYD_at; Start 67; Stop 91
aaaatctgtgaagagaatgatatag

SEQ ID NO: 69653 - DNA, 25 bp, Artificial
  probe
  misc_feature (1)..(25): SEQ ID NO: 4924; WAN024AYD_at; Start 368; Stop 392
tcattcctttagatggagcaccaaa

SEQ ID NO: 69654 - DNA, 25 bp, Artificial
  probe
  misc_feature (1)..(25): SEQ ID NO: 4924; WAN024AYD_at; Start 552; Stop 576
tcctcaaaattctgtatacagacgc

SEQ ID NO: 69655 - DNA, 25 bp, Artificial
  probe
  misc_feature (1)..(25): SEQ ID NO: 4924; WAN024AYD_at; Start 7; Stop 31
cagacagagatgattcgcttaattc

SEQ ID NO: 69656 - DNA, 25 bp, Artificial
  probe
  misc_feature (1)..(25): SEQ ID NO: 4924; WAN024AYD_at; Start 162; Stop 186
tatggatatcgctgtccctcgtgaa

SEQ ID NO: 69657 - DNA, 25 bp, Artificial
  probe
  misc_feature (1)..(25): SEQ ID NO: 4924; WAN024AYD_at; Start 251; Stop 275
cttatcaatactgtgatacgttgca

SEQ ID NO: 69658 - DNA, 25 bp, Artificial
  probe
  misc_feature (1)..(25): SEQ ID NO: 4924; WAN024AYD_at; Start 376; Stop 400
ttagatggagcaccaaatcattcgg

SEQ ID NO: 69659 - DNA, 25 bp, Artificial
  probe
  misc_feature (1)..(25): SEQ ID NO: 4924; WAN024AYD_at; Start 165; Stop 189
ggatatcgctgtccctcgtgaagca

SEQ ID NO: 69660 - DNA, 25 bp, Artificial
  probe
  misc_feature (1)..(25): SEQ ID NO: 4924; WAN024AYD_at; Start 17; Stop 41
tgattcgcttaattcaaaaagttga

SEQ ID NO: 69661 - DNA, 25 bp, Artificial
  probe
  misc_feature (1)..(25): SEQ ID NO: 4924; WAN024AYD_at; Start 195; Stop 219
caaacttccaagtgttttcaaagat

SEQ ID NO: 69662 - DNA, 25 bp, Artificial
  probe
  misc_feature (1)..(25): SEQ ID NO: 4924; WAN024AYD_at; Start 228; Stop 252
cgctgggaaatatcaggttcttact

SEQ ID NO: 69663 - DNA, 25 bp, Artificial
  probe
  misc_feature (1)..(25): SEQ ID NO: 4924; WAN024AYD_at; Start 379; Stop 403
gatggagcaccaaatcattcggttt

SEQ ID NO: 69664 - DNA, 25 bp, Artificial
  probe
  misc_feature (1)..(25): SEQ ID NO: 4924; WAN024AYD_at; Start 36; Stop 60
agttgaattagatgctataaaagag

SEQ ID NO: 69665 - DNA, 25 bp, Artificial
  probe
  misc_feature (1)..(25): SEQ ID NO: 4924; WAN024AYD_at; Start 159; Stop 183
tgatatggatatcgctgtccctcgt

SEQ ID NO: 69666 - DNA, 25 bp, Artificial
  probe
  misc_feature (1)..(25): SEQ ID NO: 4924; WAN024AYD_at; Start 178; Stop 202
cctcgtgaagcatacgacaaacttc

SEQ ID NO: 69667 - DNA, 25 bp, Artificial
  probe
  misc_feature (1)..(25): SEQ ID NO: 4924; WAN024AYD_at; Start 154; Stop 178
gatgatgatatggatatcgctgtcc

SEQ ID NO: 69668 - DNA, 25 bp, Artificial
  probe
  misc_feature (1)..(25): SEQ ID NO: 4924; WAN024AYD_at; Start 1; Stop 25
ttgaaccagacagagatgattcgct

SEQ ID NO: 69669 - DNA, 25 bp, Artificial
  probe
  misc_feature (1)..(25): SEQ ID NO: 4924; WAN024AYD_at; Start 625; Stop 649
gggactatcaatgcttctttatttg

SEQ ID NO: 69670 - DNA, 25 bp, Artificial
  probe
  misc_feature (1)..(25): SEQ ID NO: 4924; WAN024AYD_at; Start 460; Stop 484
acaacttatgttggcgaccatgtgg

SEQ ID NO: 69671 - DNA, 25 bp, Artificial
  probe
  misc_feature (1)..(25): SEQ ID NO: 4924; WAN024AYD_at; Start 383; Stop 407
gagcaccaaatcattcggttttaag

SEQ ID NO: 69672 - DNA, 25 bp, Artificial
  probe
  misc_feature (1)..(25): SEQ ID NO: 4924; WAN024AYD_at; Start 364; Stop 388
gatatcattcctttagatggagcac

SEQ ID NO: 69673 - DNA, 25 bp, Artificial
  probe
  misc_feature (1)..(25): SEQ ID NO: 4924; WAN024AYD_at; Start 170; Stop 194
tcgctgtccctcgtgaagcatacga

SEQ ID NO: 69674 - DNA, 25 bp, Artificial
  probe
  misc_feature (1)..(25): SEQ ID NO: 4924; WAN024AYD_at; Start 213; Stop 237
caaagatagaattatcgctgggaaa

SEQ ID NO: 69675 - DNA, 25 bp, Artificial
  probe
  misc_feature (1)..(25): SEQ ID NO: 4924; WAN024AYD_at; Start 31; Stop 55
caaaaagttgaattagatgctataa

SEQ ID NO: 69676 - DNA, 25 bp, Artificial
  probe
  misc_feature (1)..(25): SEQ ID NO: 4924; WAN024AYD_at; Start 184; Stop 208
gaagcatacgacaaacttccaagtg

SEQ ID NO: 69677 - DNA, 25 bp, Artificial
  probe
  misc_feature (1)..(25): SEQ ID NO: 4924; WAN024AYD_at; Start 174; Stop 198
tgtccctcgtgaagcatacgacaaa

SEQ ID NO: 69678 - DNA, 25 bp, Artificial
  probe
  misc_feature (1)..(25): SEQ ID NO: 4924; WAN024AYD_at; Start 13; Stop 37
gagatgattcgcttaattcaaaaag

SEQ ID NO: 69679 - DNA, 25 bp, Artificial
  probe
  misc_feature (1)..(25): SEQ ID NO: 4924; WAN024AYD_at; Start 82; Stop 106
aatgatatagattttttcctccgcg

SEQ ID NO: 69680 - DNA, 25 bp, Artificial
  probe
  misc_feature (1)..(25): SEQ ID NO: 4924; WAN024AYD_at; Start 86; Stop 110
atatagattttttcctccgcggtgg

SEQ ID NO: 69681 - DNA, 25 bp, Artificial
  probe
  misc_feature (1)..(25): SEQ ID NO: 4924; WAN024AYD_at; Start 389; Stop 413
caaatcattcggttttaagaaagat

SEQ ID NO: 69682 - DNA, 25 bp, Artificial
  probe
  misc_feature (1)..(25): SEQ ID NO: 4924; WAN024AYD_at; Start 454; Stop 478
ttaggaacaacttatgttggcgacc

SEQ ID NO: 69683 - DNA, 25 bp, Artificial
  probe
  misc_feature (1)..(25): SEQ ID NO: 7536; WAN024AYH_x_at; Start 45; Stop 69
tataataaaacaaatatttaaagca

SEQ ID NO: 69684 - DNA, 25 bp, Artificial
  probe
  misc_feature (1)..(25): SEQ ID NO: 7536; WAN024AYH_x_at; Start 56; Stop 80
aaatatttaaagcaggaggttctgg

SEQ ID NO: 69685 - DNA, 25 bp, Artificial
  probe
  misc_feature (1)..(25): SEQ ID NO: 7536; WAN024AYH_x_at; Start 66; Stop 90
agcaggaggttctggaaatgaaaaa

SEQ ID NO: 69686 - DNA, 25 bp, Artificial
  probe
  misc_feature (1)..(25): SEQ ID NO: 7536; WAN024AYH_x_at; Start 17; Stop 41
aacaattgactaaacaaaccaagag

SEQ ID NO: 69687 - DNA, 25 bp, Artificial
  probe
  misc_feature (1)..(25): SEQ ID NO: 7536; WAN024AYH_x_at; Start 55; Stop 79
caaatatttaaagcaggaggttctg

SEQ ID NO: 69688 - DNA, 25 bp, Artificial
  probe
  misc_feature (1)..(25): SEQ ID NO: 7536; WAN024AYH_x_at; Start 54; Stop 78
acaaatatttaaagcaggaggttct

SEQ ID NO: 69689 - DNA, 25 bp, Artificial
  probe
  misc_feature (1)..(25): SEQ ID NO: 7536; WAN024AYH_x_at; Start 68; Stop 92
caggaggttctggaaatgaaaaagt

SEQ ID NO: 69690 - DNA, 25 bp, Artificial
  probe
  misc_feature (1)..(25): SEQ ID NO: 7536; WAN024AYH_x_at; Start 20; Stop 44
aattgactaaacaaaccaagagttg

SEQ ID NO: 69691 - DNA, 25 bp, Artificial
  probe
  misc_feature (1)..(25): SEQ ID NO: 7536; WAN024AYH_x_at; Start 59; Stop 83
tatttaaagcaggaggttctggaaa

SEQ ID NO: 69692 - DNA, 25 bp, Artificial
  probe
  misc_feature (1)..(25): SEQ ID NO: 7536; WAN024AYH_x_at; Start 37; Stop 61
aagagttgtataataaaacaaatat

SEQ ID NO: 69693 - DNA, 25 bp, Artificial
  probe
  misc_feature (1)..(25): SEQ ID NO: 7536; WAN024AYH_x_at; Start 26; Stop 50
ctaaacaaaccaagagttgtataat

SEQ ID NO: 69694 - DNA, 25 bp, Artificial
  probe
  misc_feature (1)..(25): SEQ ID NO: 7536; WAN024AYH_x_at; Start 64; Stop 88
aaagcaggaggttctggaaatgaaa

SEQ ID NO: 69695 - DNA, 25 bp, Artificial
  probe
  misc_feature (1)..(25): SEQ ID NO: 7536; WAN024AYH_x_at; Start 22; Stop 46
ttgactaaacaaaccaagagttgta

SEQ ID NO: 69696 - DNA, 25 bp, Artificial
  probe
  misc_feature (1)..(25): SEQ ID NO: 7536; WAN024AYH_x_at; Start 23; Stop 47
tgactaaacaaaccaagagttgtat

SEQ ID NO: 69697 - DNA, 25 bp, Artificial
  probe
  misc_feature (1)..(25): SEQ ID NO: 7536; WAN024AYH_x_at; Start 27; Stop 51
taaacaaaccaagagttgtataata

SEQ ID NO: 69698 - DNA, 25 bp, Artificial
  probe
  misc_feature (1)..(25): SEQ ID NO: 7536; WAN024AYH_x_at; Start 60; Stop 84
atttaaagcaggaggttctggaaat

SEQ ID NO: 69699 - DNA, 25 bp, Artificial
  probe
  misc_feature (1)..(25): SEQ ID NO: 7536; WAN024AYH_x_at; Start 58; Stop 82
atatttaaagcaggaggttctggaa

SEQ ID NO: 69700 - DNA, 25 bp, Artificial
  probe
  misc_feature (1)..(25): SEQ ID NO: 7536; WAN024AYH_x_at; Start 21; Stop 45
attgactaaacaaaccaagagttgt

SEQ ID NO: 69701 - DNA, 25 bp, Artificial
  probe
  misc_feature (1)..(25): SEQ ID NO: 7536; WAN024AYH_x_at; Start 18; Stop 42
acaattgactaaacaaaccaagagt

SEQ ID NO: 69702 - DNA, 25 bp, Artificial
  probe
  misc_feature (1)..(25): SEQ ID NO: 7536; WAN024AYH_x_at; Start 46; Stop 70
ataataaaacaaatatttaaagcag

SEQ ID NO: 69703 - DNA, 25 bp, Artificial
  probe
  misc_feature (1)..(25): SEQ ID NO: 7536; WAN024AYH_x_at; Start 36; Stop 60
caagagttgtataataaaacaaata

SEQ ID NO: 69704 - DNA, 25 bp, Artificial
  probe
  misc_feature (1)..(25): SEQ ID NO: 7536; WAN024AYH_x_at; Start 49; Stop 73
ataaaacaaatatttaaagcaggag

SEQ ID NO: 69705 - DNA, 25 bp, Artificial
  probe
  misc_feature (1)..(25): SEQ ID NO: 7536; WAN024AYH_x_at; Start 61; Stop 85
tttaaagcaggaggttctggaaatg

SEQ ID NO: 69706 - DNA, 25 bp, Artificial
  probe
  misc_feature (1)..(25): SEQ ID NO: 7536; WAN024AYH_x_at; Start 57; Stop 81
aatatttaaagcaggaggttctgga

SEQ ID NO: 69707 - DNA, 25 bp, Artificial
  probe
  misc_feature (1)..(25): SEQ ID NO: 7536; WAN024AYH_x_at; Start 62; Stop 86
ttaaagcaggaggttctggaaatga

SEQ ID NO: 69708 - DNA, 25 bp, Artificial
  probe
  misc_feature (1)..(25): SEQ ID NO: 7536; WAN024AYH_x_at; Start 38; Stop 62
agagttgtataataaaacaaatatt

SEQ ID NO: 69709 - DNA, 25 bp, Artificial
  probe
  misc_feature (1)..(25): SEQ ID NO: 7536; WAN024AYH_x_at; Start 24; Stop 48
gactaaacaaaccaagagttgtata

SEQ ID NO: 69710 - DNA, 25 bp, Artificial
  probe
  misc_feature (1)..(25): SEQ ID NO: 7536; WAN024AYH_x_at; Start 67; Stop 91
gcaggaggttctggaaatgaaaaag

SEQ ID NO: 69711 - DNA, 25 bp, Artificial
  probe
  misc_feature (1)..(25): SEQ ID NO: 7536; WAN024AYH_x_at; Start 65; Stop 89
aagcaggaggttctggaaatgaaaa

SEQ ID NO: 69712 - DNA, 25 bp, Artificial
  probe
  misc_feature (1)..(25): SEQ ID NO: 7536; WAN024AYH_x_at; Start 19; Stop 43
caattgactaaacaaaccaagagtt

SEQ ID NO: 69713 - DNA, 25 bp, Artificial
  probe
  misc_feature (1)..(25): SEQ ID NO: 7536; WAN024AYH_x_at; Start 63; Stop 87
taaagcaggaggttctggaaatgaa

SEQ ID NO: 69714 - DNA, 25 bp, Artificial
  probe
  misc_feature (1)..(25): SEQ ID NO: 7536; WAN024AYH_x_at; Start 35; Stop 59
ccaagagttgtataataaaacaaat

SEQ ID NO: 69715 - DNA, 25 bp, Artificial
  probe
  misc_feature (1)..(25): SEQ ID NO: 7537; WAN024AYI_x_at; Start 56; Stop 80
aaatatttaaagcaggaggttctgg

SEQ ID NO: 69716 - DNA, 25 bp, Artificial
  probe
  misc_feature (1)..(25): SEQ ID NO: 7537; WAN024AYI_x_at; Start 45; Stop 69
tataataaaacaaatatttaaagca

SEQ ID NO: 69717 - DNA, 25 bp, Artificial
  probe
  misc_feature (1)..(25): SEQ ID NO: 7537; WAN024AYI_x_at; Start 37; Stop 61
cagagttgtataataaaacaaatat

SEQ ID NO: 69718 - DNA, 25 bp, Artificial
  probe
  misc_feature (1)..(25): SEQ ID NO: 7537; WAN024AYI_x_at; Start 17; Stop 41
aacaattgactaaacaaacccagag

SEQ ID NO: 69719 - DNA, 25 bp, Artificial
  probe
  misc_feature (1)..(25): SEQ ID NO: 7537; WAN024AYI_x_at; Start 66; Stop 90
agcaggaggttctggaaatgaaaaa

SEQ ID NO: 69720 - DNA, 25 bp, Artificial
  probe
  misc_feature (1)..(25): SEQ ID NO: 7537; WAN024AYI_x_at; Start 55; Stop 79
caaatatttaaagcaggaggttctg

SEQ ID NO: 69721 - DNA, 25 bp, Artificial
  probe
  misc_feature (1)..(25): SEQ ID NO: 7537; WAN024AYI_x_at; Start 54; Stop 78
acaaatatttaaagcaggaggttct

SEQ ID NO: 69722 - DNA, 25 bp, Artificial
  probe
  misc_feature (1)..(25): SEQ ID NO: 7537; WAN024AYI_x_at; Start 68; Stop 92
caggaggttctggaaatgaaaaagt

SEQ ID NO: 69723 - DNA, 25 bp, Artificial
  probe
  misc_feature (1)..(25): SEQ ID NO: 7537; WAN024AYI_x_at; Start 20; Stop 44
aattgactaaacaaacccagagttg

SEQ ID NO: 69724 - DNA, 25 bp, Artificial
  probe
  misc_feature (1)..(25): SEQ ID NO: 7537; WAN024AYI_x_at; Start 35; Stop 59
cccagagttgtataataaaacaaat

SEQ ID NO: 69725 - DNA, 25 bp, Artificial
  probe
  misc_feature (1)..(25): SEQ ID NO: 7537; WAN024AYI_x_at; Start 59; Stop 83
tatttaaagcaggaggttctggaaa

SEQ ID NO: 69726 - DNA, 25 bp, Artificial
  probe
  misc_feature (1)..(25): SEQ ID NO: 7537; WAN024AYI_x_at; Start 64; Stop 88
aaagcaggaggttctggaaatgaaa

SEQ ID NO: 69727 - DNA, 25 bp, Artificial
  probe
  misc_feature (1)..(25): SEQ ID NO: 7537; WAN024AYI_x_at; Start 22; Stop 46
ttgactaaacaaacccagagttgta

SEQ ID NO: 69728 - DNA, 25 bp, Artificial
  probe
  misc_feature (1)..(25): SEQ ID NO: 7537; WAN024AYI_x_at; Start 23; Stop 47
tgactaaacaaacccagagttgtat

SEQ ID NO: 69729 - DNA, 25 bp, Artificial
  probe
  misc_feature (1)..(25): SEQ ID NO: 7537; WAN024AYI_x_at; Start 27; Stop 51
taaacaaacccagagttgtataata

SEQ ID NO: 69730 - DNA, 25 bp, Artificial
  probe
  misc_feature (1)..(25): SEQ ID NO: 7537; WAN024AYI_x_at; Start 60; Stop 84
atttaaagcaggaggttctggaaat

SEQ ID NO: 69731 - DNA, 25 bp, Artificial
  probe
  misc_feature (1)..(25): SEQ ID NO: 7537; WAN024AYI_x_at; Start 58; Stop 82
atatttaaagcaggaggttctggaa

SEQ ID NO: 69732 - DNA, 25 bp, Artificial
  probe
  misc_feature (1)..(25): SEQ ID NO: 7537; WAN024AYI_x_at; Start 21; Stop 45
attgactaaacaaacccagagttgt

SEQ ID NO: 69733 - DNA, 25 bp, Artificial
  probe
  misc_feature (1)..(25): SEQ ID NO: 7537; WAN024AYI_x_at; Start 18; Stop 42
acaattgactaaacaaacccagagt

SEQ ID NO: 69734 - DNA, 25 bp, Artificial
  probe
  misc_feature (1)..(25): SEQ ID NO: 7537; WAN024AYI_x_at; Start 46; Stop 70
ataataaaacaaatatttaaagcag

SEQ ID NO: 69735 - DNA, 25 bp, Artificial
  probe
  misc_feature (1)..(25): SEQ ID NO: 7537; WAN024AYI_x_at; Start 36; Stop 60
ccagagttgtataataaaacaaata

SEQ ID NO: 69736 - DNA, 25 bp, Artificial
  probe
  misc_feature (1)..(25): SEQ ID NO: 7537; WAN024AYI_x_at; Start 26; Stop 50
ctaaacaaacccagagttgtataat

SEQ ID NO: 69737 - DNA, 25 bp, Artificial
  probe
  misc_feature (1)..(25): SEQ ID NO: 7537; WAN024AYI_x_at; Start 61; Stop 85
tttaaagcaggaggttctggaaatg

SEQ ID NO: 69738 - DNA, 25 bp, Artificial
  probe
  misc_feature (1)..(25): SEQ ID NO: 7537; WAN024AYI_x_at; Start 57; Stop 81
aatatttaaagcaggaggttctgga

SEQ ID NO: 69739 - DNA, 25 bp, Artificial
  probe
  misc_feature (1)..(25): SEQ ID NO: 7537; WAN024AYI_x_at; Start 62; Stop 86
ttaaagcaggaggttctggaaatga

SEQ ID NO: 69740 - DNA, 25 bp, Artificial
  probe
  misc_feature (1)..(25): SEQ ID NO: 7537; WAN024AYI_x_at; Start 38; Stop 62
agagttgtataataaaacaaatatt

SEQ ID NO: 69741 - DNA, 25 bp, Artificial
  probe
  misc_feature (1)..(25): SEQ ID NO: 7537; WAN024AYI_x_at; Start 24; Stop 48
gactaaacaaacccagagttgtata

SEQ ID NO: 69742 - DNA, 25 bp, Artificial
  probe
  misc_feature (1)..(25): SEQ ID NO: 7537; WAN024AYI_x_at; Start 49; Stop 73
ataaaacaaatatttaaagcaggag

SEQ ID NO: 69743 - DNA, 25 bp, Artificial
  probe
  misc_feature (1)..(25): SEQ ID NO: 7537; WAN024AYI_x_at; Start 67; Stop 91
gcaggaggttctggaaatgaaaaag

SEQ ID NO: 69744 - DNA, 25 bp, Artificial
  probe
  misc_feature (1)..(25): SEQ ID NO: 7537; WAN024AYI_x_at; Start 65; Stop 89
aagcaggaggttctggaaatgaaaa

SEQ ID NO: 69745 - DNA, 25 bp, Artificial
  probe
  misc_feature (1)..(25): SEQ ID NO: 7537; WAN024AYI_x_at; Start 19; Stop 43
caattgactaaacaaacccagagtt

SEQ ID NO: 69746 - DNA, 25 bp, Artificial
  probe
  misc_feature (1)..(25): SEQ ID NO: 7537; WAN024AYI_x_at; Start 63; Stop 87
taaagcaggaggttctggaaatgaa

SEQ ID NO: 69747 - DNA, 25 bp, Artificial
  probe
  misc_feature (1)..(25): SEQ ID NO: 33; WAN024AYJ_x_at; Start 45; Stop 69
tataataaaacaaatatttaaagca

SEQ ID NO: 69748 - DNA, 25 bp, Artificial
  probe
  misc_feature (1)..(25): SEQ ID NO: 33; WAN024AYJ_x_at; Start 17; Stop 41
aacaattgactaaacaaaccaagag

SEQ ID NO: 69749 - DNA, 25 bp, Artificial
  probe
  misc_feature (1)..(25): SEQ ID NO: 33; WAN024AYJ_x_at; Start 55; Stop 79
caaatatttaaagcaggaggttccg

SEQ ID NO: 69750 - DNA, 25 bp, Artificial
  probe
  misc_feature (1)..(25): SEQ ID NO: 33; WAN024AYJ_x_at; Start 20; Stop 44
aattgactaaacaaaccaagagttg

SEQ ID NO: 69751 - DNA, 25 bp, Artificial
  probe
  misc_feature (1)..(25): SEQ ID NO: 33; WAN024AYJ_x_at; Start 37; Stop 61
aagagttgtataataaaacaaatat

SEQ ID NO: 69752 - DNA, 25 bp, Artificial
  probe
  misc_feature (1)..(25): SEQ ID NO: 33; WAN024AYJ_x_at; Start 26; Stop 50
ctaaacaaaccaagagttgtataat

SEQ ID NO: 69753 - DNA, 25 bp, Artificial
  probe
  misc_feature (1)..(25): SEQ ID NO: 33; WAN024AYJ_x_at; Start 22; Stop 46
ttgactaaacaaaccaagagttgta

SEQ ID NO: 69754 - DNA, 25 bp, Artificial
  probe
  misc_feature (1)..(25): SEQ ID NO: 33; WAN024AYJ_x_at; Start 23; Stop 47
tgactaaacaaaccaagagttgtat

SEQ ID NO: 69755 - DNA, 25 bp, Artificial
  probe
  misc_feature (1)..(25): SEQ ID NO: 33; WAN024AYJ_x_at; Start 27; Stop 51
taaacaaaccaagagttgtataata

SEQ ID NO: 69756 - DNA, 25 bp, Artificial
  probe
  misc_feature (1)..(25): SEQ ID NO: 33; WAN024AYJ_x_at; Start 21; Stop 45
attgactaaacaaaccaagagttgt

SEQ ID NO: 69757 - DNA, 25 bp, Artificial
  probe
  misc_feature (1)..(25): SEQ ID NO: 33; WAN024AYJ_x_at; Start 18; Stop 42
acaattgactaaacaaaccaagagt

SEQ ID NO: 69758 - DNA, 25 bp, Artificial
  probe
  misc_feature (1)..(25): SEQ ID NO: 33; WAN024AYJ_x_at; Start 49; Stop 73
ataaaacaaatatttaaagcaggag

SEQ ID NO: 69759 - DNA, 25 bp, Artificial
  probe
  misc_feature (1)..(25): SEQ ID NO: 33; WAN024AYJ_x_at; Start 46; Stop 70
ataataaaacaaatatttaaagcag

SEQ ID NO: 69760 - DNA, 25 bp, Artificial
  probe
  misc_feature (1)..(25): SEQ ID NO: 33; WAN024AYJ_x_at; Start 36; Stop 60
caagagttgtataataaaacaaata

SEQ ID NO: 69761 - DNA, 25 bp, Artificial
  probe
  misc_feature (1)..(25): SEQ ID NO: 33; WAN024AYJ_x_at; Start 62; Stop 86
ttaaagcaggaggttccggaaatga

SEQ ID NO: 69762 - DNA, 25 bp, Artificial
  probe
  misc_feature (1)..(25): SEQ ID NO: 33; WAN024AYJ_x_at; Start 38; Stop 62
agagttgtataataaaacaaatatt

SEQ ID NO: 69763 - DNA, 25 bp, Artificial
  probe
  misc_feature (1)..(25): SEQ ID NO: 33; WAN024AYJ_x_at; Start 24; Stop 48
gactaaacaaaccaagagttgtata

SEQ ID NO: 69764 - DNA, 25 bp, Artificial
  probe
  misc_feature (1)..(25): SEQ ID NO: 33; WAN024AYJ_x_at; Start 19; Stop 43
caattgactaaacaaaccaagagtt

SEQ ID NO: 69765 - DNA, 25 bp, Artificial
  probe
  misc_feature (1)..(25): SEQ ID NO: 33; WAN024AYJ_x_at; Start 63; Stop 87
taaagcaggaggttccggaaatgaa

SEQ ID NO: 69766 - DNA, 25 bp, Artificial
  probe
  misc_feature (1)..(25): SEQ ID NO: 33; WAN024AYJ_x_at; Start 35; Stop 59
ccaagagttgtataataaaacaaat

SEQ ID NO: 69767 - DNA, 25 bp, Artificial
  probe
  misc_feature (1)..(25): SEQ ID NO: 9; WAN024AYQ_s_at; Start 65; Stop 89
taggcccaggatttggtgtgataat

SEQ ID NO: 69768 - DNA, 25 bp, Artificial
  probe
  misc_feature (1)..(25): SEQ ID NO: 9; WAN024AYQ_s_at; Start 31; Stop 55
tatttagagtccattacaggttctg

SEQ ID NO: 69769 - DNA, 25 bp, Artificial
  probe
  misc_feature (1)..(25): SEQ ID NO: 9; WAN024AYQ_s_at; Start 62; Stop 86
acttaggcccaggatttggtgtgat

SEQ ID NO: 69770 - DNA, 25 bp, Artificial
  probe
  misc_feature (1)..(25): SEQ ID NO: 9; WAN024AYQ_s_at; Start 15; Stop 39
aattctttcagataaatatttagag

SEQ ID NO: 69771 - DNA, 25 bp, Artificial
  probe
  misc_feature (1)..(25): SEQ ID NO: 9; WAN024AYQ_s_at; Start 20; Stop 44
tttcagataaatatttagagtccat

SEQ ID NO: 69772 - DNA, 25 bp, Artificial
  probe
  misc_feature (1)..(25): SEQ ID NO: 9; WAN024AYQ_s_at; Start 24; Stop 48
agataaatatttagagtccattaca

SEQ ID NO: 69773 - DNA, 25 bp, Artificial
  probe
  misc_feature (1)..(25): SEQ ID NO: 9; WAN024AYQ_s_at; Start 19; Stop 43
ctttcagataaatatttagagtcca

SEQ ID NO: 69774 - DNA, 25 bp, Artificial
  probe
  misc_feature (1)..(25): SEQ ID NO: 9; WAN024AYQ_s_at; Start 30; Stop 54
atatttagagtccattacaggttct

SEQ ID NO: 69775 - DNA, 25 bp, Artificial
  probe
  misc_feature (1)..(25): SEQ ID NO: 9; WAN024AYQ_s_at; Start 27; Stop 51
taaatatttagagtccattacaggt

SEQ ID NO: 69776 - DNA, 25 bp, Artificial
  probe
  misc_feature (1)..(25): SEQ ID NO: 9; WAN024AYQ_s_at; Start 67; Stop 91
ggcccaggatttggtgtgataattc

SEQ ID NO: 69777 - DNA, 25 bp, Artificial
  probe
  misc_feature (1)..(25): SEQ ID NO: 9; WAN024AYQ_s_at; Start 29; Stop 53
aatatttagagtccattacaggttc

SEQ ID NO: 69778 - DNA, 25 bp, Artificial
  probe
  misc_feature (1)..(25): SEQ ID NO: 9; WAN024AYQ_s_at; Start 25; Stop 49
gataaatatttagagtccattacag

SEQ ID NO: 69779 - DNA, 25 bp, Artificial
  probe
  misc_feature (1)..(25): SEQ ID NO: 9; WAN024AYQ_s_at; Start 22; Stop 46
tcagataaatatttagagtccatta

SEQ ID NO: 69780 - DNA, 25 bp, Artificial
  probe
  misc_feature (1)..(25): SEQ ID NO: 9; WAN024AYQ_s_at; Start 17; Stop 41
ttctttcagataaatatttagagtc

SEQ ID NO: 69781 - DNA, 25 bp, Artificial
  probe
  misc_feature (1)..(25): SEQ ID NO: 9; WAN024AYQ_s_at; Start 18; Stop 42
tctttcagataaatatttagagtcc

SEQ ID NO: 69782 - DNA, 25 bp, Artificial
  probe
  misc_feature (1)..(25): SEQ ID NO: 9; WAN024AYQ_s_at; Start 63; Stop 87
cttaggcccaggatttggtgtgata

SEQ ID NO: 69783 - DNA, 25 bp, Artificial
  probe
  misc_feature (1)..(25): SEQ ID NO: 9; WAN024AYQ_s_at; Start 68; Stop 92
gcccaggatttggtgtgataattcc

SEQ ID NO: 69784 - DNA, 25 bp, Artificial
  probe
  misc_feature (1)..(25): SEQ ID NO: 9; WAN024AYQ_s_at; Start 60; Stop 84
gaacttaggcccaggatttggtgtg

SEQ ID NO: 69785 - DNA, 25 bp, Artificial
  probe
  misc_feature (1)..(25): SEQ ID NO: 9; WAN024AYQ_s_at; Start 61; Stop 85
aacttaggcccaggatttggtgtga

SEQ ID NO: 69786 - DNA, 25 bp, Artificial
  probe
  misc_feature (1)..(25): SEQ ID NO: 9; WAN024AYQ_s_at; Start 26; Stop 50
ataaatatttagagtccattacagg

SEQ ID NO: 69787 - DNA, 25 bp, Artificial
  probe
  misc_feature (1)..(25): SEQ ID NO: 9; WAN024AYQ_s_at; Start 16; Stop 40
attctttcagataaatatttagagt

SEQ ID NO: 69788 - DNA, 25 bp, Artificial
  probe
  misc_feature (1)..(25): SEQ ID NO: 9; WAN024AYQ_s_at; Start 66; Stop 90
aggcccaggatttggtgtgataatt

SEQ ID NO: 69789 - DNA, 25 bp, Artificial
  probe
  misc_feature (1)..(25): SEQ ID NO: 9; WAN024AYQ_s_at; Start 64; Stop 88
ttaggcccaggatttggtgtgataa

SEQ ID NO: 69790 - DNA, 25 bp, Artificial
  probe
  misc_feature (1)..(25): SEQ ID NO: 9; WAN024AYQ_s_at; Start 23; Stop 47
cagataaatatttagagtccattac

SEQ ID NO: 69791 - DNA, 25 bp, Artificial
  probe
  misc_feature (1)..(25): SEQ ID NO: 9; WAN024AYQ_s_at; Start 21; Stop 45
ttcagataaatatttagagtccatt

SEQ ID NO: 69792 - DNA, 25 bp, Artificial
  probe
  misc_feature (1)..(25): SEQ ID NO: 9; WAN024AYQ_s_at; Start 69; Stop 93
cccaggatttggtgtgataattcca

SEQ ID NO: 69793 - DNA, 25 bp, Artificial
  probe
  misc_feature (1)..(25): SEQ ID NO: 9; WAN024AYQ_s_at; Start 28; Stop 52
aaatatttagagtccattacaggtt

SEQ ID NO: 69794 - DNA, 25 bp, Artificial
  probe
  misc_feature (1)..(25): SEQ ID NO: 5312; WAN024AYR_at; Start 44; Stop 68
acttcacccagtggaatctgctgga

SEQ ID NO: 69795 - DNA, 25 bp, Artificial
  probe
  misc_feature (1)..(25): SEQ ID NO: 5312; WAN024AYR_at; Start 43; Stop 67
cacttcacccagtggaatctgctgg

SEQ ID NO: 69796 - DNA, 25 bp, Artificial
  probe
  misc_feature (1)..(25): SEQ ID NO: 5312; WAN024AYR_at; Start 36; Stop 60
aggagcgcacttcacccagtggaat

SEQ ID NO: 69797 - DNA, 25 bp, Artificial
  probe
  misc_feature (1)..(25): SEQ ID NO: 5312; WAN024AYR_at; Start 42; Stop 66
gcacttcacccagtggaatctgctg

SEQ ID NO: 69798 - DNA, 25 bp, Artificial
  probe
  misc_feature (1)..(25): SEQ ID NO: 5312; WAN024AYR_at; Start 45; Stop 69
cttcacccagtggaatctgctggac

SEQ ID NO: 69799 - DNA, 25 bp, Artificial
  probe
  misc_feature (1)..(25): SEQ ID NO: 5312; WAN024AYR_at; Start 34; Stop 58
ccaggagcgcacttcacccagtgga

SEQ ID NO: 69800 - DNA, 25 bp, Artificial
  probe
  misc_feature (1)..(25): SEQ ID NO: 5312; WAN024AYR_at; Start 35; Stop 59
caggagcgcacttcacccagtggaa

SEQ ID NO: 69801 - DNA, 25 bp, Artificial
  probe
  misc_feature (1)..(25): SEQ ID NO: 5312; WAN024AYR_at; Start 39; Stop 63
agcgcacttcacccagtggaatctg

SEQ ID NO: 69802 - DNA, 25 bp, Artificial
  probe
  misc_feature (1)..(25): SEQ ID NO: 5312; WAN024AYR_at; Start 49; Stop 73
acccagtggaatctgctggacgata

SEQ ID NO: 69803 - DNA, 25 bp, Artificial
  probe
  misc_feature (1)..(25): SEQ ID NO: 5312; WAN024AYR_at; Start 47; Stop 71
tcacccagtggaatctgctggacga

SEQ ID NO: 69804 - DNA, 25 bp, Artificial
  probe
  misc_feature (1)..(25): SEQ ID NO: 5312; WAN024AYR_at; Start 40; Stop 64
gcgcacttcacccagtggaatctgc

SEQ ID NO: 69805 - DNA, 25 bp, Artificial
  probe
  misc_feature (1)..(25): SEQ ID NO: 5312; WAN024AYR_at; Start 38; Stop 62
gagcgcacttcacccagtggaatct

SEQ ID NO: 69806 - DNA, 25 bp, Artificial
  probe
  misc_feature (1)..(25): SEQ ID NO: 5312; WAN024AYR_at; Start 51; Stop 75
ccagtggaatctgctggacgatata

SEQ ID NO: 69807 - DNA, 25 bp, Artificial
  probe
  misc_feature (1)..(25): SEQ ID NO: 5312; WAN024AYR_at; Start 78; Stop 102
atttgaccaactgatccagcccaat

SEQ ID NO: 69808 - DNA, 25 bp, Artificial
  probe
  misc_feature (1)..(25): SEQ ID NO: 5312; WAN024AYR_at; Start 32; Stop 56
atccaggagcgcacttcacccagtg

SEQ ID NO: 69809 - DNA, 25 bp, Artificial
  probe
  misc_feature (1)..(25): SEQ ID NO: 5312; WAN024AYR_at; Start 1; Stop 25
ttgcaggtaggtcaagctaacgaaa

SEQ ID NO: 69810 - DNA, 25 bp, Artificial
  probe
  misc_feature (1)..(25): SEQ ID NO: 5312; WAN024AYR_at; Start 41; Stop 65
cgcacttcacccagtggaatctgct

SEQ ID NO: 69811 - DNA, 25 bp, Artificial
  probe
  misc_feature (1)..(25): SEQ ID NO: 5312; WAN024AYR_at; Start 37; Stop 61
ggagcgcacttcacccagtggaatc

SEQ ID NO: 69812 - DNA, 25 bp, Artificial
  probe
  misc_feature (1)..(25): SEQ ID NO: 5312; WAN024AYR_at; Start 3; Stop 27
gcaggtaggtcaagctaacgaaatt

SEQ ID NO: 69813 - DNA, 25 bp, Artificial
  probe
  misc_feature (1)..(25): SEQ ID NO: 5312; WAN024AYR_at; Start 48; Stop 72
cacccagtggaatctgctggacgat

SEQ ID NO: 69814 - DNA, 25 bp, Artificial
  probe
  misc_feature (1)..(25): SEQ ID NO: 5312; WAN024AYR_at; Start 50; Stop 74
cccagtggaatctgctggacgatat

SEQ ID NO: 69815 - DNA, 25 bp, Artificial
  probe
  misc_feature (1)..(25): SEQ ID NO: 5312; WAN024AYR_at; Start 5; Stop 29
aggtaggtcaagctaacgaaattgg

SEQ ID NO: 69816 - DNA, 25 bp, Artificial
  probe
  misc_feature (1)..(25): SEQ ID NO: 5312; WAN024AYR_at; Start 77; Stop 101
gatttgaccaactgatccagcccaa

SEQ ID NO: 69817 - DNA, 25 bp, Artificial
  probe
  misc_feature (1)..(25): SEQ ID NO: 5312; WAN024AYR_at; Start 33; Stop 57
tccaggagcgcacttcacccagtgg

SEQ ID NO: 69818 - DNA, 25 bp, Artificial
  probe
  misc_feature (1)..(25): SEQ ID NO: 5312; WAN024AYR_at; Start 46; Stop 70
ttcacccagtggaatctgctggacg

SEQ ID NO: 69819 - DNA, 25 bp, Artificial
  probe
  misc_feature (1)..(25): SEQ ID NO: 5312; WAN024AYR_at; Start 2; Stop 26
tgcaggtaggtcaagctaacgaaat

SEQ ID NO: 69820 - DNA, 25 bp, Artificial
  probe
  misc_feature (1)..(25): SEQ ID NO: 5312; WAN024AYR_at; Start 4; Stop 28
caggtaggtcaagctaacgaaattg

SEQ ID NO: 69821 - DNA, 25 bp, Artificial
  probe
  misc_feature (1)..(25): SEQ ID NO: 1688; WAN024AYS_at; Start 16; Stop 40
ctagctcttgtcaagataaaaagtt

SEQ ID NO: 69822 - DNA, 25 bp, Artificial
  probe
  misc_feature (1)..(25): SEQ ID NO: 1688; WAN024AYS_at; Start 4; Stop 28
ataccaagttttctagctcttgtca

SEQ ID NO: 69823 - DNA, 25 bp, Artificial
  probe
  misc_feature (1)..(25): SEQ ID NO: 1688; WAN024AYS_at; Start 3; Stop 27
gataccaagttttctagctcttgtc

SEQ ID NO: 69824 - DNA, 25 bp, Artificial
  probe
  misc_feature (1)..(25): SEQ ID NO: 1688; WAN024AYS_at; Start 11; Stop 35
gttttctagctcttgtcaagataaa

SEQ ID NO: 69825 - DNA, 25 bp, Artificial
  probe
  misc_feature (1)..(25): SEQ ID NO: 1688; WAN024AYS_at; Start 6; Stop 30
accaagttttctagctcttgtcaag

SEQ ID NO: 69826 - DNA, 25 bp, Artificial
  probe
  misc_feature (1)..(25): SEQ ID NO: 1688; WAN024AYS_at; Start 13; Stop 37
tttctagctcttgtcaagataaaaa

SEQ ID NO: 69827 - DNA, 25 bp, Artificial
  probe
  misc_feature (1)..(25): SEQ ID NO: 1688; WAN024AYS_at; Start 5; Stop 29
taccaagttttctagctcttgtcaa

SEQ ID NO: 69828 - DNA, 25 bp, Artificial
  probe
  misc_feature (1)..(25): SEQ ID NO: 1688; WAN024AYS_at; Start 14; Stop 38
ttctagctcttgtcaagataaaaag

SEQ ID NO: 69829 - DNA, 25 bp, Artificial
  probe
  misc_feature (1)..(25): SEQ ID NO: 1688; WAN024AYS_at; Start 12; Stop 36
ttttctagctcttgtcaagataaaa

SEQ ID NO: 69830 - DNA, 25 bp, Artificial
  probe
  misc_feature (1)..(25): SEQ ID NO: 1688; WAN024AYS_at; Start 20; Stop 44
ctcttgtcaagataaaaagttattt

SEQ ID NO: 69831 - DNA, 25 bp, Artificial
  probe
  misc_feature (1)..(25): SEQ ID NO: 1688; WAN024AYS_at; Start 7; Stop 31
ccaagttttctagctcttgtcaaga

SEQ ID NO: 69832 - DNA, 25 bp, Artificial
  probe
  misc_feature (1)..(25): SEQ ID NO: 1688; WAN024AYS_at; Start 18; Stop 42
agctcttgtcaagataaaaagttat

SEQ ID NO: 69833 - DNA, 25 bp, Artificial
  probe
  misc_feature (1)..(25): SEQ ID NO: 1688; WAN024AYS_at; Start 8; Stop 32
caagttttctagctcttgtcaagat

SEQ ID NO: 69834 - DNA, 25 bp, Artificial
  probe
  misc_feature (1)..(25): SEQ ID NO: 1688; WAN024AYS_at; Start 15; Stop 39
tctagctcttgtcaagataaaaagt

SEQ ID NO: 69835 - DNA, 25 bp, Artificial
  probe
  misc_feature (1)..(25): SEQ ID NO: 1688; WAN024AYS_at; Start 9; Stop 33
aagttttctagctcttgtcaagata

SEQ ID NO: 69836 - DNA, 25 bp, Artificial
  probe
  misc_feature (1)..(25): SEQ ID NO: 1688; WAN024AYS_at; Start 1; Stop 25
atgataccaagttttctagctcttg

SEQ ID NO: 69837 - DNA, 25 bp, Artificial
  probe
  misc_feature (1)..(25): SEQ ID NO: 1688; WAN024AYS_at; Start 19; Stop 43
gctcttgtcaagataaaaagttatt

SEQ ID NO: 69838 - DNA, 25 bp, Artificial
  probe
  misc_feature (1)..(25): SEQ ID NO: 1688; WAN024AYS_at; Start 10; Stop 34
agttttctagctcttgtcaagataa

SEQ ID NO: 69839 - DNA, 25 bp, Artificial
  probe
  misc_feature (1)..(25): SEQ ID NO: 1688; WAN024AYS_at; Start 2; Stop 26
tgataccaagttttctagctcttgt

SEQ ID NO: 69840 - DNA, 25 bp, Artificial
  probe
  misc_feature (1)..(25): SEQ ID NO: 1688; WAN024AYS_at; Start 17; Stop 41
tagctcttgtcaagataaaaagtta

SEQ ID NO: 69841 - DNA, 25 bp, Artificial
  probe
  misc_feature (1)..(25): SEQ ID NO: 6383; WAN024AYT_at; Start 56; Stop 80
aattggaacttgctgatcaaacaat

SEQ ID NO: 69842 - DNA, 25 bp, Artificial
  probe
  misc_feature (1)..(25): SEQ ID NO: 6383; WAN024AYT_at; Start 55; Stop 79
caattggaacttgctgatcaaacaa

SEQ ID NO: 69843 - DNA, 25 bp, Artificial
  probe
  misc_feature (1)..(25): SEQ ID NO: 6383; WAN024AYT_at; Start 113; Stop 137
ttgctttagcaggattattctctgc

SEQ ID NO: 69844 - DNA, 25 bp, Artificial
  probe
  misc_feature (1)..(25): SEQ ID NO: 6383; WAN024AYT_at; Start 68; Stop 92
ctgatcaaacaattcttctatcaac

SEQ ID NO: 69845 - DNA, 25 bp, Artificial
  probe
  misc_feature (1)..(25): SEQ ID NO: 6383; WAN024AYT_at; Start 120; Stop 144
agcaggattattctctgctttgaaa

SEQ ID NO: 69846 - DNA, 25 bp, Artificial
  probe
  misc_feature (1)..(25): SEQ ID NO: 6383; WAN024AYT_at; Start 117; Stop 141
tttagcaggattattctctgctttg

SEQ ID NO: 69847 - DNA, 25 bp, Artificial
  probe
  misc_feature (1)..(25): SEQ ID NO: 6383; WAN024AYT_at; Start 57; Stop 81
attggaacttgctgatcaaacaatt

SEQ ID NO: 69848 - DNA, 25 bp, Artificial
  probe
  misc_feature (1)..(25): SEQ ID NO: 6383; WAN024AYT_at; Start 73; Stop 97
caaacaattcttctatcaacagcac

SEQ ID NO: 69849 - DNA, 25 bp, Artificial
  probe
  misc_feature (1)..(25): SEQ ID NO: 6383; WAN024AYT_at; Start 122; Stop 146
caggattattctctgctttgaaaga

SEQ ID NO: 69850 - DNA, 25 bp, Artificial
  probe
  misc_feature (1)..(25): SEQ ID NO: 6383; WAN024AYT_at; Start 112; Stop 136
attgctttagcaggattattctctg

SEQ ID NO: 69851 - DNA, 25 bp, Artificial
  probe
  misc_feature (1)..(25): SEQ ID NO: 6383; WAN024AYT_at; Start 58; Stop 82
ttggaacttgctgatcaaacaattc

SEQ ID NO: 69852 - DNA, 25 bp, Artificial
  probe
  misc_feature (1)..(25): SEQ ID NO: 6383; WAN024AYT_at; Start 116; Stop 140
ctttagcaggattattctctgcttt

SEQ ID NO: 69853 - DNA, 25 bp, Artificial
  probe
  misc_feature (1)..(25): SEQ ID NO: 6383; WAN024AYT_at; Start 118; Stop 142
ttagcaggattattctctgctttga

SEQ ID NO: 69854 - DNA, 25 bp, Artificial
  probe
  misc_feature (1)..(25): SEQ ID NO: 6383; WAN024AYT_at; Start 115; Stop 139
gctttagcaggattattctctgctt

SEQ ID NO: 69855 - DNA, 25 bp, Artificial
  probe
  misc_feature (1)..(25): SEQ ID NO: 6383; WAN024AYT_at; Start 67; Stop 91
gctgatcaaacaattcttctatcaa

SEQ ID NO: 69856 - DNA, 25 bp, Artificial
  probe
  misc_feature (1)..(25): SEQ ID NO: 6383; WAN024AYT_at; Start 119; Stop 143
tagcaggattattctctgctttgaa

SEQ ID NO: 69857 - DNA, 25 bp, Artificial
  probe
  misc_feature (1)..(25): SEQ ID NO: 6383; WAN024AYT_at; Start 123; Stop 147
aggattattctctgctttgaaagaa

SEQ ID NO: 69858 - DNA, 25 bp, Artificial
  probe
  misc_feature (1)..(25): SEQ ID NO: 6383; WAN024AYT_at; Start 53; Stop 77
atcaattggaacttgctgatcaaac

SEQ ID NO: 69859 - DNA, 25 bp, Artificial
  probe
  misc_feature (1)..(25): SEQ ID NO: 6383; WAN024AYT_at; Start 71; Stop 95
atcaaacaattcttctatcaacagc

SEQ ID NO: 69860 - DNA, 25 bp, Artificial
  probe
  misc_feature (1)..(25): SEQ ID NO: 6383; WAN024AYT_at; Start 70; Stop 94
gatcaaacaattcttctatcaacag

SEQ ID NO: 69861 - DNA, 25 bp, Artificial
  probe
  misc_feature (1)..(25): SEQ ID NO: 6383; WAN024AYT_at; Start 121; Stop 145
gcaggattattctctgctttgaaag

SEQ ID NO: 69862 - DNA, 25 bp, Artificial
  probe
  misc_feature (1)..(25): SEQ ID NO: 6383; WAN024AYT_at; Start 72; Stop 96
tcaaacaattcttctatcaacagca

SEQ ID NO: 69863 - DNA, 25 bp, Artificial
  probe
  misc_feature (1)..(25): SEQ ID NO: 6383; WAN024AYT_at; Start 54; Stop 78
tcaattggaacttgctgatcaaaca

SEQ ID NO: 69864 - DNA, 25 bp, Artificial
  probe
  misc_feature (1)..(25): SEQ ID NO: 6383; WAN024AYT_at; Start 69; Stop 93
tgatcaaacaattcttctatcaaca

SEQ ID NO: 69865 - DNA, 25 bp, Artificial
  probe
  misc_feature (1)..(25): SEQ ID NO: 6383; WAN024AYT_at; Start 114; Stop 138
tgctttagcaggattattctctgct

SEQ ID NO: 69866 - DNA, 25 bp, Artificial
  probe
  misc_feature (1)..(25): SEQ ID NO: 855; WAN024AYU_at; Start 118; Stop 142
ttagcaggaatcttttctgctttga

SEQ ID NO: 69867 - DNA, 25 bp, Artificial
  probe
  misc_feature (1)..(25): SEQ ID NO: 855; WAN024AYU_at; Start 56; Stop 80
aattagaacttgctgatcgtacaat

SEQ ID NO: 69868 - DNA, 25 bp, Artificial
  probe
  misc_feature (1)..(25): SEQ ID NO: 855; WAN024AYU_at; Start 55; Stop 79
caattagaacttgctgatcgtacaa

SEQ ID NO: 69869 - DNA, 25 bp, Artificial
  probe
  misc_feature (1)..(25): SEQ ID NO: 855; WAN024AYU_at; Start 113; Stop 137
ttgctttagcaggaatcttttctgc

SEQ ID NO: 69870 - DNA, 25 bp, Artificial
  probe
  misc_feature (1)..(25): SEQ ID NO: 855; WAN024AYU_at; Start 68; Stop 92
ctgatcgtacaattcttctatcgac

SEQ ID NO: 69871 - DNA, 25 bp, Artificial
  probe
  misc_feature (1)..(25): SEQ ID NO: 855; WAN024AYU_at; Start 116; Stop 140
ctttagcaggaatcttttctgcttt

SEQ ID NO: 69872 - DNA, 25 bp, Artificial
  probe
  misc_feature (1)..(25): SEQ ID NO: 855; WAN024AYU_at; Start 120; Stop 144
agcaggaatcttttctgctttgaaa

SEQ ID NO: 69873 - DNA, 25 bp, Artificial
  probe
  misc_feature (1)..(25): SEQ ID NO: 855; WAN024AYU_at; Start 117; Stop 141
tttagcaggaatcttttctgctttg

SEQ ID NO: 69874 - DNA, 25 bp, Artificial
  probe
  misc_feature (1)..(25): SEQ ID NO: 855; WAN024AYU_at; Start 72; Stop 96
tcgtacaattcttctatcgacagca

SEQ ID NO: 69875 - DNA, 25 bp, Artificial
  probe
  misc_feature (1)..(25): SEQ ID NO: 855; WAN024AYU_at; Start 58; Stop 82
ttagaacttgctgatcgtacaattc

SEQ ID NO: 69876 - DNA, 25 bp, Artificial
  probe
  misc_feature (1)..(25): SEQ ID NO: 855; WAN024AYU_at; Start 115; Stop 139
gctttagcaggaatcttttctgctt

SEQ ID NO: 69877 - DNA, 25 bp, Artificial
  probe
  misc_feature (1)..(25): SEQ ID NO: 855; WAN024AYU_at; Start 67; Stop 91
gctgatcgtacaattcttctatcga

SEQ ID NO: 69878 - DNA, 25 bp, Artificial
  probe
  misc_feature (1)..(25): SEQ ID NO: 855; WAN024AYU_at; Start 53; Stop 77
atcaattagaacttgctgatcgtac

SEQ ID NO: 69879 - DNA, 25 bp, Artificial
  probe
  misc_feature (1)..(25): SEQ ID NO: 855; WAN024AYU_at; Start 70; Stop 94
gatcgtacaattcttctatcgacag

SEQ ID NO: 69880 - DNA, 25 bp, Artificial
  probe
  misc_feature (1)..(25): SEQ ID NO: 855; WAN024AYU_at; Start 121; Stop 145
gcaggaatcttttctgctttgaaag

SEQ ID NO: 69881 - DNA, 25 bp, Artificial
  probe
  misc_feature (1)..(25): SEQ ID NO: 855; WAN024AYU_at; Start 71; Stop 95
atcgtacaattcttctatcgacagc

SEQ ID NO: 69882 - DNA, 25 bp, Artificial
  probe
  misc_feature (1)..(25): SEQ ID NO: 855; WAN024AYU_at; Start 119; Stop 143
tagcaggaatcttttctgctttgaa

SEQ ID NO: 69883 - DNA, 25 bp, Artificial
  probe
  misc_feature (1)..(25): SEQ ID NO: 855; WAN024AYU_at; Start 54; Stop 78
tcaattagaacttgctgatcgtaca

SEQ ID NO: 69884 - DNA, 25 bp, Artificial
  probe
  misc_feature (1)..(25): SEQ ID NO: 855; WAN024AYU_at; Start 73; Stop 97
cgtacaattcttctatcgacagcac

SEQ ID NO: 69885 - DNA, 25 bp, Artificial
  probe
  misc_feature (1)..(25): SEQ ID NO: 855; WAN024AYU_at; Start 69; Stop 93
tgatcgtacaattcttctatcgaca

SEQ ID NO: 69886 - DNA, 25 bp, Artificial
  probe
  misc_feature (1)..(25): SEQ ID NO: 855; WAN024AYU_at; Start 114; Stop 138
tgctttagcaggaatcttttctgct

SEQ ID NO: 69887 - DNA, 25 bp, Artificial
  probe
  misc_feature (1)..(25): SEQ ID NO: 855; WAN024AYU_at; Start 122; Stop 146
caggaatcttttctgctttgaaaga

SEQ ID NO: 69888 - DNA, 25 bp, Artificial
  probe
  misc_feature (1)..(25): SEQ ID NO: 855; WAN024AYU_at; Start 112; Stop 136
attgctttagcaggaatcttttctg

SEQ ID NO: 69889 - DNA, 25 bp, Artificial
  probe
  misc_feature (1)..(25): SEQ ID NO: 855; WAN024AYU_at; Start 57; Stop 81
attagaacttgctgatcgtacaatt

SEQ ID NO: 69890 - DNA, 25 bp, Artificial
  probe
  misc_feature (1)..(25): SEQ ID NO: 855; WAN024AYU_at; Start 123; Stop 147
aggaatcttttctgctttgaaagaa

SEQ ID NO: 69891 - DNA, 25 bp, Artificial
  probe
  misc_feature (1)..(25): SEQ ID NO: 6450; WAN024AYV_at; Start 60; Stop 84
ttatctatttttgggagtagaagct

SEQ ID NO: 69892 - DNA, 25 bp, Artificial
  probe
  misc_feature (1)..(25): SEQ ID NO: 6450; WAN024AYV_at; Start 62; Stop 86
atctatttttgggagtagaagctta

SEQ ID NO: 69893 - DNA, 25 bp, Artificial
  probe
  misc_feature (1)..(25): SEQ ID NO: 6450; WAN024AYV_at; Start 86; Stop 110
atgatatagaaatttgtaacaaaaa

SEQ ID NO: 69894 - DNA, 25 bp, Artificial
  probe
  misc_feature (1)..(25): SEQ ID NO: 6450; WAN024AYV_at; Start 55; Stop 79
atcttttatctatttttgggagtag

SEQ ID NO: 69895 - DNA, 25 bp, Artificial
  probe
  misc_feature (1)..(25): SEQ ID NO: 6450; WAN024AYV_at; Start 76; Stop 100
gtagaagcttatgatatagaaattt

SEQ ID NO: 69896 - DNA, 25 bp, Artificial
  probe
  misc_feature (1)..(25): SEQ ID NO: 6450; WAN024AYV_at; Start 90; Stop 114
tatagaaatttgtaacaaaaatgta

SEQ ID NO: 69897 - DNA, 25 bp, Artificial
  probe
  misc_feature (1)..(25): SEQ ID NO: 6450; WAN024AYV_at; Start 71; Stop 95
tgggagtagaagcttatgatataga

SEQ ID NO: 69898 - DNA, 25 bp, Artificial
  probe
  misc_feature (1)..(25): SEQ ID NO: 6450; WAN024AYV_at; Start 65; Stop 89
tatttttgggagtagaagcttatga

SEQ ID NO: 69899 - DNA, 25 bp, Artificial
  probe
  misc_feature (1)..(25): SEQ ID NO: 6450; WAN024AYV_at; Start 72; Stop 96
gggagtagaagcttatgatatagaa

SEQ ID NO: 69900 - DNA, 25 bp, Artificial
  probe
  misc_feature (1)..(25): SEQ ID NO: 6450; WAN024AYV_at; Start 54; Stop 78
tatcttttatctatttttgggagta

SEQ ID NO: 69901 - DNA, 25 bp, Artificial
  probe
  misc_feature (1)..(25): SEQ ID NO: 6450; WAN024AYV_at; Start 77; Stop 101
tagaagcttatgatatagaaatttg

SEQ ID NO: 69902 - DNA, 25 bp, Artificial
  probe
  misc_feature (1)..(25): SEQ ID NO: 6450; WAN024AYV_at; Start 68; Stop 92
ttttgggagtagaagcttatgatat

SEQ ID NO: 69903 - DNA, 25 bp, Artificial
  probe
  misc_feature (1)..(25): SEQ ID NO: 6450; WAN024AYV_at; Start 88; Stop 112
gatatagaaatttgtaacaaaaatg

SEQ ID NO: 69904 - DNA, 25 bp, Artificial
  probe
  misc_feature (1)..(25): SEQ ID NO: 6450; WAN024AYV_at; Start 83; Stop 107
cttatgatatagaaatttgtaacaa

SEQ ID NO: 69905 - DNA, 25 bp, Artificial
  probe
  misc_feature (1)..(25): SEQ ID NO: 6450; WAN024AYV_at; Start 79; Stop 103
gaagcttatgatatagaaatttgta

SEQ ID NO: 69906 - DNA, 25 bp, Artificial
  probe
  misc_feature (1)..(25): SEQ ID NO: 6450; WAN024AYV_at; Start 82; Stop 106
gcttatgatatagaaatttgtaaca

SEQ ID NO: 69907 - DNA, 25 bp, Artificial
  probe
  misc_feature (1)..(25): SEQ ID NO: 6450; WAN024AYV_at; Start 67; Stop 91
tttttgggagtagaagcttatgata

SEQ ID NO: 69908 - DNA, 25 bp, Artificial
  probe
  misc_feature (1)..(25): SEQ ID NO: 6450; WAN024AYV_at; Start 64; Stop 88
ctatttttgggagtagaagcttatg

SEQ ID NO: 69909 - DNA, 25 bp, Artificial
  probe
  misc_feature (1)..(25): SEQ ID NO: 6450; WAN024AYV_at; Start 66; Stop 90
atttttgggagtagaagcttatgat

SEQ ID NO: 69910 - DNA, 25 bp, Artificial
  probe
  misc_feature (1)..(25): SEQ ID NO: 6450; WAN024AYV_at; Start 78; Stop 102
agaagcttatgatatagaaatttgt

SEQ ID NO: 69911 - DNA, 25 bp, Artificial
  probe
  misc_feature (1)..(25): SEQ ID NO: 6450; WAN024AYV_at; Start 70; Stop 94
ttgggagtagaagcttatgatatag

SEQ ID NO: 69912 - DNA, 25 bp, Artificial
  probe
  misc_feature (1)..(25): SEQ ID NO: 6450; WAN024AYV_at; Start 75; Stop 99
agtagaagcttatgatatagaaatt

SEQ ID NO: 69913 - DNA, 25 bp, Artificial
  probe
  misc_feature (1)..(25): SEQ ID NO: 6450; WAN024AYV_at; Start 52; Stop 76
agtatcttttatctatttttgggag

SEQ ID NO: 69914 - DNA, 25 bp, Artificial
  probe
  misc_feature (1)..(25): SEQ ID NO: 6450; WAN024AYV_at; Start 61; Stop 85
tatctatttttgggagtagaagctt

SEQ ID NO: 69915 - DNA, 25 bp, Artificial
  probe
  misc_feature (1)..(25): SEQ ID NO: 6450; WAN024AYV_at; Start 73; Stop 97
ggagtagaagcttatgatatagaaa

SEQ ID NO: 69916 - DNA, 25 bp, Artificial
  probe
  misc_feature (1)..(25): SEQ ID NO: 6450; WAN024AYV_at; Start 69; Stop 93
tttgggagtagaagcttatgatata

SEQ ID NO: 69917 - DNA, 25 bp, Artificial
  probe
  misc_feature (1)..(25): SEQ ID NO: 6450; WAN024AYV_at; Start 74; Stop 98
gagtagaagcttatgatatagaaat

SEQ ID NO: 69918 - DNA, 25 bp, Artificial
  probe
  misc_feature (1)..(25): SEQ ID NO: 6450; WAN024AYV_at; Start 63; Stop 87
tctatttttgggagtagaagcttat

SEQ ID NO: 69919 - DNA, 25 bp, Artificial
  probe
  misc_feature (1)..(25): SEQ ID NO: 6450; WAN024AYV_at; Start 80; Stop 104
aagcttatgatatagaaatttgtaa

SEQ ID NO: 69920 - DNA, 25 bp, Artificial
  probe
  misc_feature (1)..(25): SEQ ID NO: 6450; WAN024AYV_at; Start 56; Stop 80
tcttttatctatttttgggagtaga

SEQ ID NO: 69921 - DNA, 25 bp, Artificial
  probe
  misc_feature (1)..(25): SEQ ID NO: 6450; WAN024AYV_at; Start 87; Stop 111
tgatatagaaatttgtaacaaaaat

SEQ ID NO: 69922 - DNA, 25 bp, Artificial
  probe
  misc_feature (1)..(25): SEQ ID NO: 6450; WAN024AYV_at; Start 81; Stop 105
agcttatgatatagaaatttgtaac

SEQ ID NO: 69923 - DNA, 25 bp, Artificial
  probe
  misc_feature (1)..(25): SEQ ID NO: 6450; WAN024AYV_at; Start 85; Stop 109
tatgatatagaaatttgtaacaaaa

SEQ ID NO: 69924 - DNA, 25 bp, Artificial
  probe
  misc_feature (1)..(25): SEQ ID NO: 6450; WAN024AYV_at; Start 59; Stop 83
tttatctatttttgggagtagaagc

SEQ ID NO: 69925 - DNA, 25 bp, Artificial
  probe
  misc_feature (1)..(25): SEQ ID NO: 10; WAN024AYX_s_at; Start 11; Stop 35
atgatgctatgtttaaaaagagaat

SEQ ID NO: 69926 - DNA, 25 bp, Artificial
  probe
  misc_feature (1)..(25): SEQ ID NO: 10; WAN024AYX_s_at; Start 4; Stop 28
aaggaagatgatgctatgtttaaaa

SEQ ID NO: 69927 - DNA, 25 bp, Artificial
  probe
  misc_feature (1)..(25): SEQ ID NO: 10; WAN024AYX_s_at; Start 2; Stop 26
tgaaggaagatgatgctatgtttaa

SEQ ID NO: 69928 - DNA, 25 bp, Artificial
  probe
  misc_feature (1)..(25): SEQ ID NO: 10; WAN024AYX_s_at; Start 1; Stop 25
atgaaggaagatgatgctatgttta

SEQ ID NO: 69929 - DNA, 25 bp, Artificial
  probe
  misc_feature (1)..(25): SEQ ID NO: 10; WAN024AYX_s_at; Start 9; Stop 33
agatgatgctatgtttaaaaagaga

SEQ ID NO: 69930 - DNA, 25 bp, Artificial
  probe
  misc_feature (1)..(25): SEQ ID NO: 10; WAN024AYX_s_at; Start 7; Stop 31
gaagatgatgctatgtttaaaaaga

SEQ ID NO: 69931 - DNA, 25 bp, Artificial
  probe
  misc_feature (1)..(25): SEQ ID NO: 10; WAN024AYX_s_at; Start 10; Stop 34
gatgatgctatgtttaaaaagagaa

SEQ ID NO: 69932 - DNA, 25 bp, Artificial
  probe
  misc_feature (1)..(25): SEQ ID NO: 10; WAN024AYX_s_at; Start 5; Stop 29
aggaagatgatgctatgtttaaaaa

SEQ ID NO: 69933 - DNA, 25 bp, Artificial
  probe
  misc_feature (1)..(25): SEQ ID NO: 10; WAN024AYX_s_at; Start 3; Stop 27
gaaggaagatgatgctatgtttaaa

SEQ ID NO: 69934 - DNA, 25 bp, Artificial
  probe
  misc_feature (1)..(25): SEQ ID NO: 10; WAN024AYX_s_at; Start 8; Stop 32
aagatgatgctatgtttaaaaagag

SEQ ID NO: 69935 - DNA, 25 bp, Artificial
  probe
  misc_feature (1)..(25): SEQ ID NO: 10; WAN024AYX_s_at; Start 6; Stop 30
ggaagatgatgctatgtttaaaaag

SEQ ID NO: 69936 - DNA, 25 bp, Artificial
  probe
  misc_feature (1)..(25): SEQ ID NO: 733; WAN024AYZ_at; Start 673; Stop 697
caaattttaggcaatcacggcgttc

SEQ ID NO: 69937 - DNA, 25 bp, Artificial
  probe
  misc_feature (1)..(25): SEQ ID NO: 733; WAN024AYZ_at; Start 671; Stop 695
aacaaattttaggcaatcacggcgt

SEQ ID NO: 69938 - DNA, 25 bp, Artificial
  probe
  misc_feature (1)..(25): SEQ ID NO: 733; WAN024AYZ_at; Start 735; Stop 759
ctatatcaagcctccaactcgaaga

SEQ ID NO: 69939 - DNA, 25 bp, Artificial
  probe
  misc_feature (1)..(25): SEQ ID NO: 733; WAN024AYZ_at; Start 729; Stop 753
ctttacctatatcaagcctccaact

SEQ ID NO: 69940 - DNA, 25 bp, Artificial
  probe
  misc_feature (1)..(25): SEQ ID NO: 733; WAN024AYZ_at; Start 670; Stop 694
gaacaaattttaggcaatcacggcg

SEQ ID NO: 69941 - DNA, 25 bp, Artificial
  probe
  misc_feature (1)..(25): SEQ ID NO: 733; WAN024AYZ_at; Start 732; Stop 756
tacctatatcaagcctccaactcga

SEQ ID NO: 69942 - DNA, 25 bp, Artificial
  probe
  misc_feature (1)..(25): SEQ ID NO: 733; WAN024AYZ_at; Start 734; Stop 758
cctatatcaagcctccaactcgaag

SEQ ID NO: 69943 - DNA, 25 bp, Artificial
  probe
  misc_feature (1)..(25): SEQ ID NO: 733; WAN024AYZ_at; Start 672; Stop 696
acaaattttaggcaatcacggcgtt

SEQ ID NO: 69944 - DNA, 25 bp, Artificial
  probe
  misc_feature (1)..(25): SEQ ID NO: 733; WAN024AYZ_at; Start 733; Stop 757
acctatatcaagcctccaactcgaa

SEQ ID NO: 69945 - DNA, 25 bp, Artificial
  probe
  misc_feature (1)..(25): SEQ ID NO: 733; WAN024AYZ_at; Start 731; Stop 755
ttacctatatcaagcctccaactcg

SEQ ID NO: 69946 - DNA, 25 bp, Artificial
  probe
  misc_feature (1)..(25): SEQ ID NO: 733; WAN024AYZ_at; Start 730; Stop 754
tttacctatatcaagcctccaactc

SEQ ID NO: 69947 - DNA, 25 bp, Artificial
  probe
  misc_feature (1)..(25): SEQ ID NO: 733; WAN024AYZ_at; Start 736; Stop 760
tatatcaagcctccaactcgaagaa

SEQ ID NO: 69948 - DNA, 25 bp, Artificial
  probe
  misc_feature (1)..(25): SEQ ID NO: 733; WAN024AYZ_at; Start 728; Stop 752
tctttacctatatcaagcctccaac

SEQ ID NO: 69949 - DNA, 25 bp, Artificial
  probe
  misc_feature (1)..(25): SEQ ID NO: 733; WAN024AYZ_at; Start 737; Stop 761
atatcaagcctccaactcgaagaaa

SEQ ID NO: 69950 - DNA, 25 bp, Artificial
  probe
  misc_feature (1)..(25): SEQ ID NO: 726; WAN024AZ2_at; Start 415; Stop 439
ctgaacctgaatcaacccctagaca

SEQ ID NO: 69951 - DNA, 25 bp, Artificial
  probe
  misc_feature (1)..(25): SEQ ID NO: 726; WAN024AZ2_at; Start 289; Stop 313
ttactagctgaagaagagggaatta

SEQ ID NO: 69952 - DNA, 25 bp, Artificial
  probe
  misc_feature (1)..(25): SEQ ID NO: 726; WAN024AZ2_at; Start 409; Stop 433
gctaaactgaacctgaatcaacccc

SEQ ID NO: 69953 - DNA, 25 bp, Artificial
  probe
  misc_feature (1)..(25): SEQ ID NO: 726; WAN024AZ2_at; Start 566; Stop 590
cagaaaccaccaacttacacttagc

SEQ ID NO: 69954 - DNA, 25 bp, Artificial
  probe
  misc_feature (1)..(25): SEQ ID NO: 726; WAN024AZ2_at; Start 356; Stop 380
acatcctttctcctaagtctcacag

SEQ ID NO: 69955 - DNA, 25 bp, Artificial
  probe
  misc_feature (1)..(25): SEQ ID NO: 726; WAN024AZ2_at; Start 560; Stop 584
ttggaccagaaaccaccaacttaca

SEQ ID NO: 69956 - DNA, 25 bp, Artificial
  probe
  misc_feature (1)..(25): SEQ ID NO: 726; WAN024AZ2_at; Start 86; Stop 110
gggcctgtgtcgaactcaatctttc

SEQ ID NO: 69957 - DNA, 25 bp, Artificial
  probe
  misc_feature (1)..(25): SEQ ID NO: 726; WAN024AZ2_at; Start 80; Stop 104
agaaacgggcctgtgtcgaactcaa

SEQ ID NO: 69958 - DNA, 25 bp, Artificial
  probe
  misc_feature (1)..(25): SEQ ID NO: 726; WAN024AZ2_at; Start 354; Stop 378
aaacatcctttctcctaagtctcac

SEQ ID NO: 69959 - DNA, 25 bp, Artificial
  probe
  misc_feature (1)..(25): SEQ ID NO: 726; WAN024AZ2_at; Start 82; Stop 106
aaacgggcctgtgtcgaactcaatc

SEQ ID NO: 69960 - DNA, 25 bp, Artificial
  probe
  misc_feature (1)..(25): SEQ ID NO: 726; WAN024AZ2_at; Start 412; Stop 436
aaactgaacctgaatcaacccctag

SEQ ID NO: 69961 - DNA, 25 bp, Artificial
  probe
  misc_feature (1)..(25): SEQ ID NO: 726; WAN024AZ2_at; Start 346; Stop 370
tataagaaaaacatcctttctccta

SEQ ID NO: 69962 - DNA, 25 bp, Artificial
  probe
  misc_feature (1)..(25): SEQ ID NO: 726; WAN024AZ2_at; Start 411; Stop 435
taaactgaacctgaatcaaccccta

SEQ ID NO: 69963 - DNA, 25 bp, Artificial
  probe
  misc_feature (1)..(25): SEQ ID NO: 726; WAN024AZ2_at; Start 407; Stop 431
aagctaaactgaacctgaatcaacc

SEQ ID NO: 69964 - DNA, 25 bp, Artificial
  probe
  misc_feature (1)..(25): SEQ ID NO: 726; WAN024AZ2_at; Start 417; Stop 441
gaacctgaatcaacccctagacaat

SEQ ID NO: 69965 - DNA, 25 bp, Artificial
  probe
  misc_feature (1)..(25): SEQ ID NO: 726; WAN024AZ2_at; Start 408; Stop 432
agctaaactgaacctgaatcaaccc

SEQ ID NO: 69966 - DNA, 25 bp, Artificial
  probe
  misc_feature (1)..(25): SEQ ID NO: 726; WAN024AZ2_at; Start 83; Stop 107
aacgggcctgtgtcgaactcaatct

SEQ ID NO: 69967 - DNA, 25 bp, Artificial
  probe
  misc_feature (1)..(25): SEQ ID NO: 726; WAN024AZ2_at; Start 81; Stop 105
gaaacgggcctgtgtcgaactcaat

SEQ ID NO: 69968 - DNA, 25 bp, Artificial
  probe
  misc_feature (1)..(25): SEQ ID NO: 726; WAN024AZ2_at; Start 565; Stop 589
ccagaaaccaccaacttacacttag

SEQ ID NO: 69969 - DNA, 25 bp, Artificial
  probe
  misc_feature (1)..(25): SEQ ID NO: 726; WAN024AZ2_at; Start 84; Stop 108
acgggcctgtgtcgaactcaatctt

SEQ ID NO: 69970 - DNA, 25 bp, Artificial
  probe
  misc_feature (1)..(25): SEQ ID NO: 726; WAN024AZ2_at; Start 363; Stop 387
ttctcctaagtctcacagaaagaca

SEQ ID NO: 69971 - DNA, 25 bp, Artificial
  probe
  misc_feature (1)..(25): SEQ ID NO: 726; WAN024AZ2_at; Start 362; Stop 386
tttctcctaagtctcacagaaagac

SEQ ID NO: 69972 - DNA, 25 bp, Artificial
  probe
  misc_feature (1)..(25): SEQ ID NO: 726; WAN024AZ2_at; Start 416; Stop 440
tgaacctgaatcaacccctagacaa

SEQ ID NO: 69973 - DNA, 25 bp, Artificial
  probe
  misc_feature (1)..(25): SEQ ID NO: 726; WAN024AZ2_at; Start 344; Stop 368
tctataagaaaaacatcctttctcc

SEQ ID NO: 69974 - DNA, 25 bp, Artificial
  probe
  misc_feature (1)..(25): SEQ ID NO: 726; WAN024AZ2_at; Start 413; Stop 437
aactgaacctgaatcaacccctaga

SEQ ID NO: 69975 - DNA, 25 bp, Artificial
  probe
  misc_feature (1)..(25): SEQ ID NO: 726; WAN024AZ2_at; Start 79; Stop 103
aagaaacgggcctgtgtcgaactca

SEQ ID NO: 69976 - DNA, 25 bp, Artificial
  probe
  misc_feature (1)..(25): SEQ ID NO: 726; WAN024AZ2_at; Start 699; Stop 723
ccttcaaatgaaaactgataagaga

SEQ ID NO: 69977 - DNA, 25 bp, Artificial
  probe
  misc_feature (1)..(25): SEQ ID NO: 726; WAN024AZ2_at; Start 290; Stop 314
tactagctgaagaagagggaattaa

SEQ ID NO: 69978 - DNA, 25 bp, Artificial
  probe
  misc_feature (1)..(25): SEQ ID NO: 726; WAN024AZ2_at; Start 357; Stop 381
catcctttctcctaagtctcacaga

SEQ ID NO: 69979 - DNA, 25 bp, Artificial
  probe
  misc_feature (1)..(25): SEQ ID NO: 726; WAN024AZ2_at; Start 698; Stop 722
cccttcaaatgaaaactgataagag

SEQ ID NO: 69980 - DNA, 25 bp, Artificial
  probe
  misc_feature (1)..(25): SEQ ID NO: 726; WAN024AZ2_at; Start 291; Stop 315
actagctgaagaagagggaattaag

SEQ ID NO: 69981 - DNA, 25 bp, Artificial
  probe
  misc_feature (1)..(25): SEQ ID NO: 726; WAN024AZ2_at; Start 359; Stop 383
tcctttctcctaagtctcacagaaa

SEQ ID NO: 69982 - DNA, 25 bp, Artificial
  probe
  misc_feature (1)..(25): SEQ ID NO: 726; WAN024AZ2_at; Start 561; Stop 585
tggaccagaaaccaccaacttacac

SEQ ID NO: 69983 - DNA, 25 bp, Artificial
  probe
  misc_feature (1)..(25): SEQ ID NO: 726; WAN024AZ2_at; Start 85; Stop 109
cgggcctgtgtcgaactcaatcttt

SEQ ID NO: 69984 - DNA, 25 bp, Artificial
  probe
  misc_feature (1)..(25): SEQ ID NO: 727; WAN024AZ3_s_at; Start 827; Stop 851
cctctatccctcaagctaaagggag

SEQ ID NO: 69985 - DNA, 25 bp, Artificial
  probe
  misc_feature (1)..(25): SEQ ID NO: 727; WAN024AZ3_s_at; Start 1188; Stop 1212
ctacctcaatatcgctgacaaaatc

SEQ ID NO: 69986 - DNA, 25 bp, Artificial
  probe
  misc_feature (1)..(25): SEQ ID NO: 727; WAN024AZ3_s_at; Start 1191; Stop 1215
cctcaatatcgctgacaaaatctat

SEQ ID NO: 69987 - DNA, 25 bp, Artificial
  probe
  misc_feature (1)..(25): SEQ ID NO: 727; WAN024AZ3_s_at; Start 826; Stop 850
acctctatccctcaagctaaaggga

SEQ ID NO: 69988 - DNA, 25 bp, Artificial
  probe
  misc_feature (1)..(25): SEQ ID NO: 727; WAN024AZ3_s_at; Start 1186; Stop 1210
atctacctcaatatcgctgacaaaa

SEQ ID NO: 69989 - DNA, 25 bp, Artificial
  probe
  misc_feature (1)..(25): SEQ ID NO: 727; WAN024AZ3_s_at; Start 1187; Stop 1211
tctacctcaatatcgctgacaaaat

SEQ ID NO: 69990 - DNA, 25 bp, Artificial
  probe
  misc_feature (1)..(25): SEQ ID NO: 727; WAN024AZ3_s_at; Start 1192; Stop 1216
ctcaatatcgctgacaaaatctatc

SEQ ID NO: 69991 - DNA, 25 bp, Artificial
  probe
  misc_feature (1)..(25): SEQ ID NO: 727; WAN024AZ3_s_at; Start 1189; Stop 1213
tacctcaatatcgctgacaaaatct

SEQ ID NO: 69992 - DNA, 25 bp, Artificial
  probe
  misc_feature (1)..(25): SEQ ID NO: 727; WAN024AZ3_s_at; Start 1190; Stop 1214
acctcaatatcgctgacaaaatcta

SEQ ID NO: 69993 - DNA, 25 bp, Artificial
  probe
  misc_feature (1)..(25): SEQ ID NO: 728; WAN024AZ4_at; Start 614; Stop 638
atcttaggcgcttattttttaggcg

SEQ ID NO: 69994 - DNA, 25 bp, Artificial
  probe
  misc_feature (1)..(25): SEQ ID NO: 728; WAN024AZ4_at; Start 612; Stop 636
atatcttaggcgcttattttttagg

SEQ ID NO: 69995 - DNA, 25 bp, Artificial
  probe
  misc_feature (1)..(25): SEQ ID NO: 728; WAN024AZ4_at; Start 618; Stop 642
taggcgcttattttttaggcgctta

SEQ ID NO: 69996 - DNA, 25 bp, Artificial
  probe
  misc_feature (1)..(25): SEQ ID NO: 728; WAN024AZ4_at; Start 613; Stop 637
tatcttaggcgcttattttttaggc

SEQ ID NO: 69997 - DNA, 25 bp, Artificial
  probe
  misc_feature (1)..(25): SEQ ID NO: 728; WAN024AZ4_at; Start 619; Stop 643
aggcgcttattttttaggcgcttat

SEQ ID NO: 69998 - DNA, 25 bp, Artificial
  probe
  misc_feature (1)..(25): SEQ ID NO: 728; WAN024AZ4_at; Start 611; Stop 635
aatatcttaggcgcttattttttag

SEQ ID NO: 69999 - DNA, 25 bp, Artificial
  probe
  misc_feature (1)..(25): SEQ ID NO: 728; WAN024AZ4_at; Start 610; Stop 634
caatatcttaggcgcttatttttta

SEQ ID NO: 70000 - DNA, 25 bp, Artificial
  probe
  misc_feature (1)..(25): SEQ ID NO: 728; WAN024AZ4_at; Start 616; Stop 640
cttaggcgcttattttttaggcgct

SEQ ID NO: 70001 - DNA, 25 bp, Artificial
  probe
  misc_feature (1)..(25): SEQ ID NO: 728; WAN024AZ4_at; Start 615; Stop 639
tcttaggcgcttattttttaggcgc

SEQ ID NO: 70002 - DNA, 25 bp, Artificial
  probe
  misc_feature (1)..(25): SEQ ID NO: 3878; WAN024AZ5_at; Start 73; Stop 97
gttagtgcaatagctatttttataa

SEQ ID NO: 70003 - DNA, 25 bp, Artificial
  probe
  misc_feature (1)..(25): SEQ ID NO: 3878; WAN024AZ5_at; Start 2; Stop 26
tgaacgctaagaggttggggcgaaa

SEQ ID NO: 70004 - DNA, 25 bp, Artificial
  probe
  misc_feature (1)..(25): SEQ ID NO: 3878; WAN024AZ5_at; Start 70; Stop 94
atggttagtgcaatagctattttta

SEQ ID NO: 70005 - DNA, 25 bp, Artificial
  probe
  misc_feature (1)..(25): SEQ ID NO: 3878; WAN024AZ5_at; Start 71; Stop 95
tggttagtgcaatagctatttttat

SEQ ID NO: 70006 - DNA, 25 bp, Artificial
  probe
  misc_feature (1)..(25): SEQ ID NO: 3878; WAN024AZ5_at; Start 72; Stop 96
ggttagtgcaatagctatttttata

SEQ ID NO: 70007 - DNA, 25 bp, Artificial
  probe
  misc_feature (1)..(25): SEQ ID NO: 3878; WAN024AZ5_at; Start 75; Stop 99
tagtgcaatagctatttttataatt

SEQ ID NO: 70008 - DNA, 25 bp, Artificial
  probe
  misc_feature (1)..(25): SEQ ID NO: 3878; WAN024AZ5_at; Start 76; Stop 100
agtgcaatagctatttttataattg

SEQ ID NO: 70009 - DNA, 25 bp, Artificial
  probe
  misc_feature (1)..(25): SEQ ID NO: 3878; WAN024AZ5_at; Start 1; Stop 25
gtgaacgctaagaggttggggcgaa

SEQ ID NO: 70010 - DNA, 25 bp, Artificial
  probe
  misc_feature (1)..(25): SEQ ID NO: 3878; WAN024AZ5_at; Start 77; Stop 101
gtgcaatagctatttttataattgc

SEQ ID NO: 70011 - DNA, 25 bp, Artificial
  probe
  misc_feature (1)..(25): SEQ ID NO: 3878; WAN024AZ5_at; Start 69; Stop 93
aatggttagtgcaatagctattttt

SEQ ID NO: 70012 - DNA, 25 bp, Artificial
  probe
  misc_feature (1)..(25): SEQ ID NO: 3878; WAN024AZ5_at; Start 74; Stop 98
ttagtgcaatagctatttttataat

SEQ ID NO: 70013 - DNA, 25 bp, Artificial
  probe
  misc_feature (1)..(25): SEQ ID NO: 3878; WAN024AZ5_at; Start 67; Stop 91
gcaatggttagtgcaatagctattt

SEQ ID NO: 70014 - DNA, 25 bp, Artificial
  probe
  misc_feature (1)..(25): SEQ ID NO: 3878; WAN024AZ5_at; Start 68; Stop 92
caatggttagtgcaatagctatttt

SEQ ID NO: 70015 - DNA, 25 bp, Artificial
  probe
  misc_feature (1)..(25): SEQ ID NO: 7356; WAN024AZ6_at; Start 1; Stop 25
tatttagatgtcatcttatcaggcc

SEQ ID NO: 70016 - DNA, 25 bp, Artificial
  probe
  misc_feature (1)..(25): SEQ ID NO: 7356; WAN024AZ6_at; Start 14; Stop 38
tcttatcaggccttatctttgggct

SEQ ID NO: 70017 - DNA, 25 bp, Artificial
  probe
  misc_feature (1)..(25): SEQ ID NO: 7356; WAN024AZ6_at; Start 25; Stop 49
cttatctttgggcttagtcatttga

SEQ ID NO: 70018 - DNA, 25 bp, Artificial
  probe
  misc_feature (1)..(25): SEQ ID NO: 7356; WAN024AZ6_at; Start 10; Stop 34
gtcatcttatcaggccttatctttg

SEQ ID NO: 70019 - DNA, 25 bp, Artificial
  probe
  misc_feature (1)..(25): SEQ ID NO: 7356; WAN024AZ6_at; Start 9; Stop 33
tgtcatcttatcaggccttatcttt

SEQ ID NO: 70020 - DNA, 25 bp, Artificial
  probe
  misc_feature (1)..(25): SEQ ID NO: 7356; WAN024AZ6_at; Start 19; Stop 43
tcaggccttatctttgggcttagtc

SEQ ID NO: 70021 - DNA, 25 bp, Artificial
  probe
  misc_feature (1)..(25): SEQ ID NO: 7356; WAN024AZ6_at; Start 23; Stop 47
gccttatctttgggcttagtcattt

SEQ ID NO: 70022 - DNA, 25 bp, Artificial
  probe
  misc_feature (1)..(25): SEQ ID NO: 7356; WAN024AZ6_at; Start 8; Stop 32
atgtcatcttatcaggccttatctt

SEQ ID NO: 70023 - DNA, 25 bp, Artificial
  probe
  misc_feature (1)..(25): SEQ ID NO: 7356; WAN024AZ6_at; Start 2; Stop 26
atttagatgtcatcttatcaggcct

SEQ ID NO: 70024 - DNA, 25 bp, Artificial
  probe
  misc_feature (1)..(25): SEQ ID NO: 7356; WAN024AZ6_at; Start 12; Stop 36
catcttatcaggccttatctttggg

SEQ ID NO: 70025 - DNA, 25 bp, Artificial
  probe
  misc_feature (1)..(25): SEQ ID NO: 7356; WAN024AZ6_at; Start 6; Stop 30
agatgtcatcttatcaggccttatc

SEQ ID NO: 70026 - DNA, 25 bp, Artificial
  probe
  misc_feature (1)..(25): SEQ ID NO: 7356; WAN024AZ6_at; Start 27; Stop 51
tatctttgggcttagtcatttgata

SEQ ID NO: 70027 - DNA, 25 bp, Artificial
  probe
  misc_feature (1)..(25): SEQ ID NO: 7356; WAN024AZ6_at; Start 16; Stop 40
ttatcaggccttatctttgggctta

SEQ ID NO: 70028 - DNA, 25 bp, Artificial
  probe
  misc_feature (1)..(25): SEQ ID NO: 7356; WAN024AZ6_at; Start 3; Stop 27
tttagatgtcatcttatcaggcctt

SEQ ID NO: 70029 - DNA, 25 bp, Artificial
  probe
  misc_feature (1)..(25): SEQ ID NO: 7356; WAN024AZ6_at; Start 21; Stop 45
aggccttatctttgggcttagtcat

SEQ ID NO: 70030 - DNA, 25 bp, Artificial
  probe
  misc_feature (1)..(25): SEQ ID NO: 7356; WAN024AZ6_at; Start 24; Stop 48
ccttatctttgggcttagtcatttg

SEQ ID NO: 70031 - DNA, 25 bp, Artificial
  probe
  misc_feature (1)..(25): SEQ ID NO: 7356; WAN024AZ6_at; Start 20; Stop 44
caggccttatctttgggcttagtca

SEQ ID NO: 70032 - DNA, 25 bp, Artificial
  probe
  misc_feature (1)..(25): SEQ ID NO: 7356; WAN024AZ6_at; Start 11; Stop 35
tcatcttatcaggccttatctttgg

SEQ ID NO: 70033 - DNA, 25 bp, Artificial
  probe
  misc_feature (1)..(25): SEQ ID NO: 7356; WAN024AZ6_at; Start 5; Stop 29
tagatgtcatcttatcaggccttat

SEQ ID NO: 70034 - DNA, 25 bp, Artificial
  probe
  misc_feature (1)..(25): SEQ ID NO: 7356; WAN024AZ6_at; Start 22; Stop 46
ggccttatctttgggcttagtcatt

SEQ ID NO: 70035 - DNA, 25 bp, Artificial
  probe
  misc_feature (1)..(25): SEQ ID NO: 7356; WAN024AZ6_at; Start 13; Stop 37
atcttatcaggccttatctttgggc

SEQ ID NO: 70036 - DNA, 25 bp, Artificial
  probe
  misc_feature (1)..(25): SEQ ID NO: 7356; WAN024AZ6_at; Start 17; Stop 41
tatcaggccttatctttgggcttag

SEQ ID NO: 70037 - DNA, 25 bp, Artificial
  probe
  misc_feature (1)..(25): SEQ ID NO: 7356; WAN024AZ6_at; Start 7; Stop 31
gatgtcatcttatcaggccttatct

SEQ ID NO: 70038 - DNA, 25 bp, Artificial
  probe
  misc_feature (1)..(25): SEQ ID NO: 7356; WAN024AZ6_at; Start 18; Stop 42
atcaggccttatctttgggcttagt

SEQ ID NO: 70039 - DNA, 25 bp, Artificial
  probe
  misc_feature (1)..(25): SEQ ID NO: 7356; WAN024AZ6_at; Start 15; Stop 39
cttatcaggccttatctttgggctt

SEQ ID NO: 70040 - DNA, 25 bp, Artificial
  probe
  misc_feature (1)..(25): SEQ ID NO: 7356; WAN024AZ6_at; Start 26; Stop 50
ttatctttgggcttagtcatttgat

SEQ ID NO: 70041 - DNA, 25 bp, Artificial
  probe
  misc_feature (1)..(25): SEQ ID NO: 7356; WAN024AZ6_at; Start 4; Stop 28
ttagatgtcatcttatcaggcctta

SEQ ID NO: 70042 - DNA, 25 bp, Artificial
  probe
  misc_feature (1)..(25): SEQ ID NO: 4575; WAN024AZ7_s_at; Start 174; Stop 198
tctcaatcatgcaaaacctatctgg

SEQ ID NO: 70043 - DNA, 25 bp, Artificial
  probe
  misc_feature (1)..(25): SEQ ID NO: 4575; WAN024AZ7_s_at; Start 176; Stop 200
tcaatcatgcaaaacctatctggat

SEQ ID NO: 70044 - DNA, 25 bp, Artificial
  probe
  misc_feature (1)..(25): SEQ ID NO: 4575; WAN024AZ7_s_at; Start 53; Stop 77
tatctcacagagatccaattagttt

SEQ ID NO: 70045 - DNA, 25 bp, Artificial
  probe
  misc_feature (1)..(25): SEQ ID NO: 4575; WAN024AZ7_s_at; Start 133; Stop 157
aatctgagattaacgattctctgcc

SEQ ID NO: 70046 - DNA, 25 bp, Artificial
  probe
  misc_feature (1)..(25): SEQ ID NO: 4575; WAN024AZ7_s_at; Start 128; Stop 152
ccgacaatctgagattaacgattct

SEQ ID NO: 70047 - DNA, 25 bp, Artificial
  probe
  misc_feature (1)..(25): SEQ ID NO: 4575; WAN024AZ7_s_at; Start 107; Stop 131
ttgcccttgtttatcgttctaccga

SEQ ID NO: 70048 - DNA, 25 bp, Artificial
  probe
  misc_feature (1)..(25): SEQ ID NO: 4575; WAN024AZ7_s_at; Start 143; Stop 167
taacgattctctgccatagtttttt

SEQ ID NO: 70049 - DNA, 25 bp, Artificial
  probe
  misc_feature (1)..(25): SEQ ID NO: 4575; WAN024AZ7_s_at; Start 60; Stop 84
cagagatccaattagtttattatat

SEQ ID NO: 70050 - DNA, 25 bp, Artificial
  probe
  misc_feature (1)..(25): SEQ ID NO: 4575; WAN024AZ7_s_at; Start 109; Stop 133
gcccttgtttatcgttctaccgaca

SEQ ID NO: 70051 - DNA, 25 bp, Artificial
  probe
  misc_feature (1)..(25): SEQ ID NO: 4575; WAN024AZ7_s_at; Start 123; Stop 147
ttctaccgacaatctgagattaacg

SEQ ID NO: 70052 - DNA, 25 bp, Artificial
  probe
  misc_feature (1)..(25): SEQ ID NO: 4575; WAN024AZ7_s_at; Start 58; Stop 82
cacagagatccaattagtttattat

SEQ ID NO: 70053 - DNA, 25 bp, Artificial
  probe
  misc_feature (1)..(25): SEQ ID NO: 4575; WAN024AZ7_s_at; Start 121; Stop 145
cgttctaccgacaatctgagattaa

SEQ ID NO: 70054 - DNA, 25 bp, Artificial
  probe
  misc_feature (1)..(25): SEQ ID NO: 4575; WAN024AZ7_s_at; Start 118; Stop 142
tatcgttctaccgacaatctgagat

SEQ ID NO: 70055 - DNA, 25 bp, Artificial
  probe
  misc_feature (1)..(25): SEQ ID NO: 4575; WAN024AZ7_s_at; Start 55; Stop 79
tctcacagagatccaattagtttat

SEQ ID NO: 70056 - DNA, 25 bp, Artificial
  probe
  misc_feature (1)..(25): SEQ ID NO: 4575; WAN024AZ7_s_at; Start 137; Stop 161
tgagattaacgattctctgccatag

SEQ ID NO: 70057 - DNA, 25 bp, Artificial
  probe
  misc_feature (1)..(25): SEQ ID NO: 4575; WAN024AZ7_s_at; Start 45; Stop 69
tttgatactatctcacagagatcca

SEQ ID NO: 70058 - DNA, 25 bp, Artificial
  probe
  misc_feature (1)..(25): SEQ ID NO: 4575; WAN024AZ7_s_at; Start 124; Stop 148
tctaccgacaatctgagattaacga

SEQ ID NO: 70059 - DNA, 25 bp, Artificial
  probe
  misc_feature (1)..(25): SEQ ID NO: 4575; WAN024AZ7_s_at; Start 43; Stop 67
catttgatactatctcacagagatc

SEQ ID NO: 70060 - DNA, 25 bp, Artificial
  probe
  misc_feature (1)..(25): SEQ ID NO: 4575; WAN024AZ7_s_at; Start 177; Stop 201
caatcatgcaaaacctatctggatt

SEQ ID NO: 70061 - DNA, 25 bp, Artificial
  probe
  misc_feature (1)..(25): SEQ ID NO: 4575; WAN024AZ7_s_at; Start 130; Stop 154
gacaatctgagattaacgattctct

SEQ ID NO: 70062 - DNA, 25 bp, Artificial
  probe
  misc_feature (1)..(25): SEQ ID NO: 4575; WAN024AZ7_s_at; Start 126; Stop 150
taccgacaatctgagattaacgatt

SEQ ID NO: 70063 - DNA, 25 bp, Artificial
  probe
  misc_feature (1)..(25): SEQ ID NO: 4575; WAN024AZ7_s_at; Start 181; Stop 205
catgcaaaacctatctggatttttg

SEQ ID NO: 70064 - DNA, 25 bp, Artificial
  probe
  misc_feature (1)..(25): SEQ ID NO: 4575; WAN024AZ7_s_at; Start 120; Stop 144
tcgttctaccgacaatctgagatta

SEQ ID NO: 70065 - DNA, 25 bp, Artificial
  probe
  misc_feature (1)..(25): SEQ ID NO: 4575; WAN024AZ7_s_at; Start 163; Stop 187
ttttttaactttctcaatcatgcaa

SEQ ID NO: 70066 - DNA, 25 bp, Artificial
  probe
  misc_feature (1)..(25): SEQ ID NO: 4575; WAN024AZ7_s_at; Start 189; Stop 213
acctatctggatttttgtttacaat

SEQ ID NO: 70067 - DNA, 25 bp, Artificial
  probe
  misc_feature (1)..(25): SEQ ID NO: 4575; WAN024AZ7_s_at; Start 116; Stop 140
tttatcgttctaccgacaatctgag

SEQ ID NO: 70068 - DNA, 25 bp, Artificial
  probe
  misc_feature (1)..(25): SEQ ID NO: 4575; WAN024AZ7_s_at; Start 140; Stop 164
gattaacgattctctgccatagttt

SEQ ID NO: 70069 - DNA, 25 bp, Artificial
  probe
  misc_feature (1)..(25): SEQ ID NO: 4575; WAN024AZ7_s_at; Start 111; Stop 135
ccttgtttatcgttctaccgacaat

SEQ ID NO: 70070 - DNA, 25 bp, Artificial
  probe
  misc_feature (1)..(25): SEQ ID NO: 4575; WAN024AZ7_s_at; Start 114; Stop 138
tgtttatcgttctaccgacaatctg

SEQ ID NO: 70071 - DNA, 25 bp, Artificial
  probe
  misc_feature (1)..(25): SEQ ID NO: 4575; WAN024AZ7_s_at; Start 135; Stop 159
tctgagattaacgattctctgccat

SEQ ID NO: 70072 - DNA, 25 bp, Artificial
  probe
  misc_feature (1)..(25): SEQ ID NO: 4575; WAN024AZ7_s_at; Start 167; Stop 191
ttaactttctcaatcatgcaaaacc

SEQ ID NO: 70073 - DNA, 25 bp, Artificial
  probe
  misc_feature (1)..(25): SEQ ID NO: 4575; WAN024AZ7_s_at; Start 47; Stop 71
tgatactatctcacagagatccaat

SEQ ID NO: 70074 - DNA, 25 bp, Artificial
  probe
  misc_feature (1)..(25): SEQ ID NO: 4575; WAN024AZ7_s_at; Start 50; Stop 74
tactatctcacagagatccaattag

SEQ ID NO: 70075 - DNA, 25 bp, Artificial
  probe
  misc_feature (1)..(25): SEQ ID NO: 4575; WAN024AZ7_s_at; Start 138; Stop 162
gagattaacgattctctgccatagt

SEQ ID NO: 70076 - DNA, 25 bp, Artificial
  probe
  misc_feature (1)..(25): SEQ ID NO: 6855; WAN024AZ8_at; Start 33; Stop 57
gactactgttgctgaagtcttctca

SEQ ID NO: 70077 - DNA, 25 bp, Artificial
  probe
  misc_feature (1)..(25): SEQ ID NO: 6855; WAN024AZ8_at; Start 28; Stop 52
attgcgactactgttgctgaagtct

SEQ ID NO: 70078 - DNA, 25 bp, Artificial
  probe
  misc_feature (1)..(25): SEQ ID NO: 6855; WAN024AZ8_at; Start 32; Stop 56
cgactactgttgctgaagtcttctc

SEQ ID NO: 70079 - DNA, 25 bp, Artificial
  probe
  misc_feature (1)..(25): SEQ ID NO: 6855; WAN024AZ8_at; Start 31; Stop 55
gcgactactgttgctgaagtcttct

SEQ ID NO: 70080 - DNA, 25 bp, Artificial
  probe
  misc_feature (1)..(25): SEQ ID NO: 6855; WAN024AZ8_at; Start 29; Stop 53
ttgcgactactgttgctgaagtctt

SEQ ID NO: 70081 - DNA, 25 bp, Artificial
  probe
  misc_feature (1)..(25): SEQ ID NO: 6855; WAN024AZ8_at; Start 34; Stop 58
actactgttgctgaagtcttctcat

SEQ ID NO: 70082 - DNA, 25 bp, Artificial
  probe
  misc_feature (1)..(25): SEQ ID NO: 6855; WAN024AZ8_at; Start 27; Stop 51
tattgcgactactgttgctgaagtc

SEQ ID NO: 70083 - DNA, 25 bp, Artificial
  probe
  misc_feature (1)..(25): SEQ ID NO: 6855; WAN024AZ8_at; Start 30; Stop 54
tgcgactactgttgctgaagtcttc

SEQ ID NO: 70084 - DNA, 25 bp, Artificial
  probe
  misc_feature (1)..(25): SEQ ID NO: 2400; WAN024AZ9_at; Start 87; Stop 111
tatcgtagacggtaaatttgatgga

SEQ ID NO: 70085 - DNA, 25 bp, Artificial
  probe
  misc_feature (1)..(25): SEQ ID NO: 2400; WAN024AZ9_at; Start 83; Stop 107
tagatatcgtagacggtaaatttga

SEQ ID NO: 70086 - DNA, 25 bp, Artificial
  probe
  misc_feature (1)..(25): SEQ ID NO: 2400; WAN024AZ9_at; Start 86; Stop 110
atatcgtagacggtaaatttgatgg

SEQ ID NO: 70087 - DNA, 25 bp, Artificial
  probe
  misc_feature (1)..(25): SEQ ID NO: 2400; WAN024AZ9_at; Start 91; Stop 115
gtagacggtaaatttgatggatatt

SEQ ID NO: 70088 - DNA, 25 bp, Artificial
  probe
  misc_feature (1)..(25): SEQ ID NO: 2400; WAN024AZ9_at; Start 94; Stop 118
gacggtaaatttgatggatatttat

SEQ ID NO: 70089 - DNA, 25 bp, Artificial
  probe
  misc_feature (1)..(25): SEQ ID NO: 2400; WAN024AZ9_at; Start 82; Stop 106
ttagatatcgtagacggtaaatttg

SEQ ID NO: 70090 - DNA, 25 bp, Artificial
  probe
  misc_feature (1)..(25): SEQ ID NO: 2400; WAN024AZ9_at; Start 84; Stop 108
agatatcgtagacggtaaatttgat

SEQ ID NO: 70091 - DNA, 25 bp, Artificial
  probe
  misc_feature (1)..(25): SEQ ID NO: 2400; WAN024AZ9_at; Start 78; Stop 102
tggtttagatatcgtagacggtaaa

SEQ ID NO: 70092 - DNA, 25 bp, Artificial
  probe
  misc_feature (1)..(25): SEQ ID NO: 2400; WAN024AZ9_at; Start 85; Stop 109
gatatcgtagacggtaaatttgatg

SEQ ID NO: 70093 - DNA, 25 bp, Artificial
  probe
  misc_feature (1)..(25): SEQ ID NO: 2400; WAN024AZ9_at; Start 77; Stop 101
atggtttagatatcgtagacggtaa

SEQ ID NO: 70094 - DNA, 25 bp, Artificial
  probe
  misc_feature (1)..(25): SEQ ID NO: 2400; WAN024AZ9_at; Start 89; Stop 113
tcgtagacggtaaatttgatggata

SEQ ID NO: 70095 - DNA, 25 bp, Artificial
  probe
  misc_feature (1)..(25): SEQ ID NO: 2400; WAN024AZ9_at; Start 93; Stop 117
agacggtaaatttgatggatattta

SEQ ID NO: 70096 - DNA, 25 bp, Artificial
  probe
  misc_feature (1)..(25): SEQ ID NO: 2400; WAN024AZ9_at; Start 92; Stop 116
tagacggtaaatttgatggatattt

SEQ ID NO: 70097 - DNA, 25 bp, Artificial
  probe
  misc_feature (1)..(25): SEQ ID NO: 2400; WAN024AZ9_at; Start 90; Stop 114
cgtagacggtaaatttgatggatat

SEQ ID NO: 70098 - DNA, 25 bp, Artificial
  probe
  misc_feature (1)..(25): SEQ ID NO: 2400; WAN024AZ9_at; Start 75; Stop 99
atatggtttagatatcgtagacggt

SEQ ID NO: 70099 - DNA, 25 bp, Artificial
  probe
  misc_feature (1)..(25): SEQ ID NO: 2400; WAN024AZ9_at; Start 88; Stop 112
atcgtagacggtaaatttgatggat

SEQ ID NO: 70100 - DNA, 25 bp, Artificial
  probe
  misc_feature (1)..(25): SEQ ID NO: 2400; WAN024AZ9_at; Start 76; Stop 100
tatggtttagatatcgtagacggta

SEQ ID NO: 70101 - DNA, 25 bp, Artificial
  probe
  misc_feature (1)..(25): SEQ ID NO: 4945; WAN024AZA_at; Start 11; Stop 35
tttcgaaaagtatcatcatctattt

SEQ ID NO: 70102 - DNA, 25 bp, Artificial
  probe
  misc_feature (1)..(25): SEQ ID NO: 4945; WAN024AZA_at; Start 19; Stop 43
agtatcatcatctatttcagaccat

SEQ ID NO: 70103 - DNA, 25 bp, Artificial
  probe
  misc_feature (1)..(25): SEQ ID NO: 4945; WAN024AZA_at; Start 68; Stop 92
tatttgtcaaggtctttgaattctt

SEQ ID NO: 70104 - DNA, 25 bp, Artificial
  probe
  misc_feature (1)..(25): SEQ ID NO: 4945; WAN024AZA_at; Start 8; Stop 32
gattttcgaaaagtatcatcatcta

SEQ ID NO: 70105 - DNA, 25 bp, Artificial
  probe
  misc_feature (1)..(25): SEQ ID NO: 4945; WAN024AZA_at; Start 27; Stop 51
catctatttcagaccattttttata

SEQ ID NO: 70106 - DNA, 25 bp, Artificial
  probe
  misc_feature (1)..(25): SEQ ID NO: 4945; WAN024AZA_at; Start 72; Stop 96
tgtcaaggtctttgaattctttctt

SEQ ID NO: 70107 - DNA, 25 bp, Artificial
  probe
  misc_feature (1)..(25): SEQ ID NO: 4945; WAN024AZA_at; Start 12; Stop 36
ttcgaaaagtatcatcatctatttc

SEQ ID NO: 70108 - DNA, 25 bp, Artificial
  probe
  misc_feature (1)..(25): SEQ ID NO: 4945; WAN024AZA_at; Start 73; Stop 97
gtcaaggtctttgaattctttctta

SEQ ID NO: 70109 - DNA, 25 bp, Artificial
  probe
  misc_feature (1)..(25): SEQ ID NO: 4945; WAN024AZA_at; Start 22; Stop 46
atcatcatctatttcagaccatttt

SEQ ID NO: 70110 - DNA, 25 bp, Artificial
  probe
  misc_feature (1)..(25): SEQ ID NO: 4945; WAN024AZA_at; Start 25; Stop 49
atcatctatttcagaccatttttta

SEQ ID NO: 70111 - DNA, 25 bp, Artificial
  probe
  misc_feature (1)..(25): SEQ ID NO: 4945; WAN024AZA_at; Start 66; Stop 90
tttatttgtcaaggtctttgaattc

SEQ ID NO: 70112 - DNA, 25 bp, Artificial
  probe
  misc_feature (1)..(25): SEQ ID NO: 4945; WAN024AZA_at; Start 24; Stop 48
catcatctatttcagaccatttttt

SEQ ID NO: 70113 - DNA, 25 bp, Artificial
  probe
  misc_feature (1)..(25): SEQ ID NO: 4945; WAN024AZA_at; Start 18; Stop 42
aagtatcatcatctatttcagacca

SEQ ID NO: 70114 - DNA, 25 bp, Artificial
  probe
  misc_feature (1)..(25): SEQ ID NO: 4945; WAN024AZA_at; Start 21; Stop 45
tatcatcatctatttcagaccattt

SEQ ID NO: 70115 - DNA, 25 bp, Artificial
  probe
  misc_feature (1)..(25): SEQ ID NO: 4945; WAN024AZA_at; Start 35; Stop 59
tcagaccattttttataataaccat

SEQ ID NO: 70116 - DNA, 25 bp, Artificial
  probe
  misc_feature (1)..(25): SEQ ID NO: 4945; WAN024AZA_at; Start 20; Stop 44
gtatcatcatctatttcagaccatt

SEQ ID NO: 70117 - DNA, 25 bp, Artificial
  probe
  misc_feature (1)..(25): SEQ ID NO: 4945; WAN024AZA_at; Start 13; Stop 37
tcgaaaagtatcatcatctatttca

SEQ ID NO: 70118 - DNA, 25 bp, Artificial
  probe
  misc_feature (1)..(25): SEQ ID NO: 4945; WAN024AZA_at; Start 67; Stop 91
ttatttgtcaaggtctttgaattct

SEQ ID NO: 70119 - DNA, 25 bp, Artificial
  probe
  misc_feature (1)..(25): SEQ ID NO: 4945; WAN024AZA_at; Start 74; Stop 98
tcaaggtctttgaattctttcttaa

SEQ ID NO: 70120 - DNA, 25 bp, Artificial
  probe
  misc_feature (1)..(25): SEQ ID NO: 4945; WAN024AZA_at; Start 16; Stop 40
aaaagtatcatcatctatttcagac

SEQ ID NO: 70121 - DNA, 25 bp, Artificial
  probe
  misc_feature (1)..(25): SEQ ID NO: 4945; WAN024AZA_at; Start 15; Stop 39
gaaaagtatcatcatctatttcaga

SEQ ID NO: 70122 - DNA, 25 bp, Artificial
  probe
  misc_feature (1)..(25): SEQ ID NO: 4945; WAN024AZA_at; Start 71; Stop 95
ttgtcaaggtctttgaattctttct

SEQ ID NO: 70123 - DNA, 25 bp, Artificial
  probe
  misc_feature (1)..(25): SEQ ID NO: 4945; WAN024AZA_at; Start 9; Stop 33
attttcgaaaagtatcatcatctat

SEQ ID NO: 70124 - DNA, 25 bp, Artificial
  probe
  misc_feature (1)..(25): SEQ ID NO: 4945; WAN024AZA_at; Start 62; Stop 86
tatttttatttgtcaaggtctttga

SEQ ID NO: 70125 - DNA, 25 bp, Artificial
  probe
  misc_feature (1)..(25): SEQ ID NO: 4945; WAN024AZA_at; Start 84; Stop 108
tgaattctttcttaaacaagccttg

SEQ ID NO: 70126 - DNA, 25 bp, Artificial
  probe
  misc_feature (1)..(25): SEQ ID NO: 4945; WAN024AZA_at; Start 14; Stop 38
cgaaaagtatcatcatctatttcag

SEQ ID NO: 70127 - DNA, 25 bp, Artificial
  probe
  misc_feature (1)..(25): SEQ ID NO: 4945; WAN024AZA_at; Start 26; Stop 50
tcatctatttcagaccattttttat

SEQ ID NO: 70128 - DNA, 25 bp, Artificial
  probe
  misc_feature (1)..(25): SEQ ID NO: 4945; WAN024AZA_at; Start 10; Stop 34
ttttcgaaaagtatcatcatctatt

SEQ ID NO: 70129 - DNA, 25 bp, Artificial
  probe
  misc_feature (1)..(25): SEQ ID NO: 4945; WAN024AZA_at; Start 80; Stop 104
tctttgaattctttcttaaacaagc

SEQ ID NO: 70130 - DNA, 25 bp, Artificial
  probe
  misc_feature (1)..(25): SEQ ID NO: 4945; WAN024AZA_at; Start 23; Stop 47
tcatcatctatttcagaccattttt

SEQ ID NO: 70131 - DNA, 25 bp, Artificial
  probe
  misc_feature (1)..(25): SEQ ID NO: 4945; WAN024AZA_at; Start 36; Stop 60
cagaccattttttataataaccatt

SEQ ID NO: 70132 - DNA, 25 bp, Artificial
  probe
  misc_feature (1)..(25): SEQ ID NO: 4945; WAN024AZA_at; Start 17; Stop 41
aaagtatcatcatctatttcagacc

SEQ ID NO: 70133 - DNA, 25 bp, Artificial
  probe
  misc_feature (1)..(25): SEQ ID NO: 4945; WAN024AZA_at; Start 70; Stop 94
tttgtcaaggtctttgaattctttc

SEQ ID NO: 70134 - DNA, 25 bp, Artificial
  probe
  misc_feature (1)..(25): SEQ ID NO: 4945; WAN024AZA_at; Start 34; Stop 58
ttcagaccattttttataataacca

SEQ ID NO: 70135 - DNA, 25 bp, Artificial
  probe
  misc_feature (1)..(25): SEQ ID NO: 1745; WAN024AZB_at; Start 79; Stop 103
gcttccgagtttgattttcatttac

SEQ ID NO: 70136 - DNA, 25 bp, Artificial
  probe
  misc_feature (1)..(25): SEQ ID NO: 1745; WAN024AZB_at; Start 124; Stop 148
gatatcagtagacatttgagtcagg

SEQ ID NO: 70137 - DNA, 25 bp, Artificial
  probe
  misc_feature (1)..(25): SEQ ID NO: 1745; WAN024AZB_at; Start 48; Stop 72
gccttgctgtgttttgagcaagcta

SEQ ID NO: 70138 - DNA, 25 bp, Artificial
  probe
  misc_feature (1)..(25): SEQ ID NO: 1745; WAN024AZB_at; Start 35; Stop 59
tcagctcagctttgccttgctgtgt

SEQ ID NO: 70139 - DNA, 25 bp, Artificial
  probe
  misc_feature (1)..(25): SEQ ID NO: 1745; WAN024AZB_at; Start 155; Stop 179
tggaaaatgataaaaagagctcgct

SEQ ID NO: 70140 - DNA, 25 bp, Artificial
  probe
  misc_feature (1)..(25): SEQ ID NO: 1745; WAN024AZB_at; Start 65; Stop 89
gcaagctacggttagcttccgagtt

SEQ ID NO: 70141 - DNA, 25 bp, Artificial
  probe
  misc_feature (1)..(25): SEQ ID NO: 1745; WAN024AZB_at; Start 63; Stop 87
gagcaagctacggttagcttccgag

SEQ ID NO: 70142 - DNA, 25 bp, Artificial
  probe
  misc_feature (1)..(25): SEQ ID NO: 1745; WAN024AZB_at; Start 97; Stop 121
catttactagaaatgaaactgatga

SEQ ID NO: 70143 - DNA, 25 bp, Artificial
  probe
  misc_feature (1)..(25): SEQ ID NO: 1745; WAN024AZB_at; Start 159; Stop 183
aaatgataaaaagagctcgctaact

SEQ ID NO: 70144 - DNA, 25 bp, Artificial
  probe
  misc_feature (1)..(25): SEQ ID NO: 1745; WAN024AZB_at; Start 112; Stop 136
aaactgatgagagatatcagtagac

SEQ ID NO: 70145 - DNA, 25 bp, Artificial
  probe
  misc_feature (1)..(25): SEQ ID NO: 1745; WAN024AZB_at; Start 26; Stop 50
tcaaatacgtcagctcagctttgcc

SEQ ID NO: 70146 - DNA, 25 bp, Artificial
  probe
  misc_feature (1)..(25): SEQ ID NO: 1745; WAN024AZB_at; Start 69; Stop 93
gctacggttagcttccgagtttgat

SEQ ID NO: 70147 - DNA, 25 bp, Artificial
  probe
  misc_feature (1)..(25): SEQ ID NO: 1745; WAN024AZB_at; Start 140; Stop 164
tgagtcaggatattatggaaaatga

SEQ ID NO: 70148 - DNA, 25 bp, Artificial
  probe
  misc_feature (1)..(25): SEQ ID NO: 1745; WAN024AZB_at; Start 134; Stop 158
gacatttgagtcaggatattatgga

SEQ ID NO: 70149 - DNA, 25 bp, Artificial
  probe
  misc_feature (1)..(25): SEQ ID NO: 1745; WAN024AZB_at; Start 1; Stop 25
atgatgatacttttcgaaaatctct

SEQ ID NO: 70150 - DNA, 25 bp, Artificial
  probe
  misc_feature (1)..(25): SEQ ID NO: 1745; WAN024AZB_at; Start 157; Stop 181
gaaaatgataaaaagagctcgctaa

SEQ ID NO: 70151 - DNA, 25 bp, Artificial
  probe
  misc_feature (1)..(25): SEQ ID NO: 1745; WAN024AZB_at; Start 83; Stop 107
ccgagtttgattttcatttactaga

SEQ ID NO: 70152 - DNA, 25 bp, Artificial
  probe
  misc_feature (1)..(25): SEQ ID NO: 1745; WAN024AZB_at; Start 136; Stop 160
catttgagtcaggatattatggaaa

SEQ ID NO: 70153 - DNA, 25 bp, Artificial
  probe
  misc_feature (1)..(25): SEQ ID NO: 1745; WAN024AZB_at; Start 31; Stop 55
tacgtcagctcagctttgccttgct

SEQ ID NO: 70154 - DNA, 25 bp, Artificial
  probe
  misc_feature (1)..(25): SEQ ID NO: 1745; WAN024AZB_at; Start 20; Stop 44
atctcttcaaatacgtcagctcagc

SEQ ID NO: 70155 - DNA, 25 bp, Artificial
  probe
  misc_feature (1)..(25): SEQ ID NO: 1745; WAN024AZB_at; Start 162; Stop 186
tgataaaaagagctcgctaactaat

SEQ ID NO: 70156 - DNA, 25 bp, Artificial
  probe
  misc_feature (1)..(25): SEQ ID NO: 1745; WAN024AZB_at; Start 101; Stop 125
tactagaaatgaaactgatgagaga

SEQ ID NO: 70157 - DNA, 25 bp, Artificial
  probe
  misc_feature (1)..(25): SEQ ID NO: 1745; WAN024AZB_at; Start 22; Stop 46
ctcttcaaatacgtcagctcagctt

SEQ ID NO: 70158 - DNA, 25 bp, Artificial
  probe
  misc_feature (1)..(25): SEQ ID NO: 1745; WAN024AZB_at; Start 106; Stop 130
gaaatgaaactgatgagagatatca

SEQ ID NO: 70159 - DNA, 25 bp, Artificial
  probe
  misc_feature (1)..(25): SEQ ID NO: 1745; WAN024AZB_at; Start 29; Stop 53
aatacgtcagctcagctttgccttg

SEQ ID NO: 70160 - DNA, 25 bp, Artificial
  probe
  misc_feature (1)..(25): SEQ ID NO: 1745; WAN024AZB_at; Start 117; Stop 141
gatgagagatatcagtagacatttg

SEQ ID NO: 70161 - DNA, 25 bp, Artificial
  probe
  misc_feature (1)..(25): SEQ ID NO: 1745; WAN024AZB_at; Start 55; Stop 79
tgtgttttgagcaagctacggttag

SEQ ID NO: 70162 - DNA, 25 bp, Artificial
  probe
  misc_feature (1)..(25): SEQ ID NO: 1745; WAN024AZB_at; Start 43; Stop 67
gctttgccttgctgtgttttgagca

SEQ ID NO: 70163 - DNA, 25 bp, Artificial
  probe
  misc_feature (1)..(25): SEQ ID NO: 1745; WAN024AZB_at; Start 128; Stop 152
tcagtagacatttgagtcaggatat

SEQ ID NO: 70164 - DNA, 25 bp, Artificial
  probe
  misc_feature (1)..(25): SEQ ID NO: 1745; WAN024AZB_at; Start 122; Stop 146
gagatatcagtagacatttgagtca

SEQ ID NO: 70165 - DNA, 25 bp, Artificial
  probe
  misc_feature (1)..(25): SEQ ID NO: 1745; WAN024AZB_at; Start 74; Stop 98
ggttagcttccgagtttgattttca

SEQ ID NO: 70166 - DNA, 25 bp, Artificial
  probe
  misc_feature (1)..(25): SEQ ID NO: 1745; WAN024AZB_at; Start 103; Stop 127
ctagaaatgaaactgatgagagata

SEQ ID NO: 70167 - DNA, 25 bp, Artificial
  probe
  misc_feature (1)..(25): SEQ ID NO: 1745; WAN024AZB_at; Start 52; Stop 76
tgctgtgttttgagcaagctacggt

SEQ ID NO: 70168 - DNA, 25 bp, Artificial
  probe
  misc_feature (1)..(25): SEQ ID NO: 1745; WAN024AZB_at; Start 41; Stop 65
cagctttgccttgctgtgttttgag

SEQ ID NO: 70169 - DNA, 25 bp, Artificial
  probe
  misc_feature (1)..(25): SEQ ID NO: 6835; WAN024AZC_at; Start 77; Stop 101
tgtgggaagatatcttatacagcct

SEQ ID NO: 70170 - DNA, 25 bp, Artificial
  probe
  misc_feature (1)..(25): SEQ ID NO: 6835; WAN024AZC_at; Start 74; Stop 98
gactgtgggaagatatcttatacag

SEQ ID NO: 70171 - DNA, 25 bp, Artificial
  probe
  misc_feature (1)..(25): SEQ ID NO: 6835; WAN024AZC_at; Start 76; Stop 100
ctgtgggaagatatcttatacagcc

SEQ ID NO: 70172 - DNA, 25 bp, Artificial
  probe
  misc_feature (1)..(25): SEQ ID NO: 6835; WAN024AZC_at; Start 71; Stop 95
gaggactgtgggaagatatcttata

SEQ ID NO: 70173 - DNA, 25 bp, Artificial
  probe
  misc_feature (1)..(25): SEQ ID NO: 6835; WAN024AZC_at; Start 70; Stop 94
ggaggactgtgggaagatatcttat

SEQ ID NO: 70174 - DNA, 25 bp, Artificial
  probe
  misc_feature (1)..(25): SEQ ID NO: 6835; WAN024AZC_at; Start 107; Stop 131
taattaagcataacaatacgaaagg

SEQ ID NO: 70175 - DNA, 25 bp, Artificial
  probe
  misc_feature (1)..(25): SEQ ID NO: 6835; WAN024AZC_at; Start 121; Stop 145
aatacgaaaggacttcatcatccaa

SEQ ID NO: 70176 - DNA, 25 bp, Artificial
  probe
  misc_feature (1)..(25): SEQ ID NO: 6835; WAN024AZC_at; Start 110; Stop 134
ttaagcataacaatacgaaaggact

SEQ ID NO: 70177 - DNA, 25 bp, Artificial
  probe
  misc_feature (1)..(25): SEQ ID NO: 6835; WAN024AZC_at; Start 131; Stop 155
gacttcatcatccaatacaactata

SEQ ID NO: 70178 - DNA, 25 bp, Artificial
  probe
  misc_feature (1)..(25): SEQ ID NO: 6835; WAN024AZC_at; Start 127; Stop 151
aaaggacttcatcatccaatacaac

SEQ ID NO: 70179 - DNA, 25 bp, Artificial
  probe
  misc_feature (1)..(25): SEQ ID NO: 6835; WAN024AZC_at; Start 120; Stop 144
caatacgaaaggacttcatcatcca

SEQ ID NO: 70180 - DNA, 25 bp, Artificial
  probe
  misc_feature (1)..(25): SEQ ID NO: 6835; WAN024AZC_at; Start 73; Stop 97
ggactgtgggaagatatcttataca

SEQ ID NO: 70181 - DNA, 25 bp, Artificial
  probe
  misc_feature (1)..(25): SEQ ID NO: 6835; WAN024AZC_at; Start 119; Stop 143
acaatacgaaaggacttcatcatcc

SEQ ID NO: 70182 - DNA, 25 bp, Artificial
  probe
  misc_feature (1)..(25): SEQ ID NO: 6835; WAN024AZC_at; Start 130; Stop 154
ggacttcatcatccaatacaactat

SEQ ID NO: 70183 - DNA, 25 bp, Artificial
  probe
  misc_feature (1)..(25): SEQ ID NO: 6835; WAN024AZC_at; Start 78; Stop 102
gtgggaagatatcttatacagcctt

SEQ ID NO: 70184 - DNA, 25 bp, Artificial
  probe
  misc_feature (1)..(25): SEQ ID NO: 6835; WAN024AZC_at; Start 123; Stop 147
tacgaaaggacttcatcatccaata

SEQ ID NO: 70185 - DNA, 25 bp, Artificial
  probe
  misc_feature (1)..(25): SEQ ID NO: 6835; WAN024AZC_at; Start 132; Stop 156
acttcatcatccaatacaactataa

SEQ ID NO: 70186 - DNA, 25 bp, Artificial
  probe
  misc_feature (1)..(25): SEQ ID NO: 6835; WAN024AZC_at; Start 81; Stop 105
ggaagatatcttatacagccttaat

SEQ ID NO: 70187 - DNA, 25 bp, Artificial
  probe
  misc_feature (1)..(25): SEQ ID NO: 6835; WAN024AZC_at; Start 117; Stop 141
taacaatacgaaaggacttcatcat

SEQ ID NO: 70188 - DNA, 25 bp, Artificial
  probe
  misc_feature (1)..(25): SEQ ID NO: 6835; WAN024AZC_at; Start 113; Stop 137
agcataacaatacgaaaggacttca

SEQ ID NO: 70189 - DNA, 25 bp, Artificial
  probe
  misc_feature (1)..(25): SEQ ID NO: 6835; WAN024AZC_at; Start 79; Stop 103
tgggaagatatcttatacagcctta

SEQ ID NO: 70190 - DNA, 25 bp, Artificial
  probe
  misc_feature (1)..(25): SEQ ID NO: 6835; WAN024AZC_at; Start 125; Stop 149
cgaaaggacttcatcatccaataca

SEQ ID NO: 70191 - DNA, 25 bp, Artificial
  probe
  misc_feature (1)..(25): SEQ ID NO: 6835; WAN024AZC_at; Start 85; Stop 109
gatatcttatacagccttaatataa

SEQ ID NO: 70192 - DNA, 25 bp, Artificial
  probe
  misc_feature (1)..(25): SEQ ID NO: 6835; WAN024AZC_at; Start 80; Stop 104
gggaagatatcttatacagccttaa

SEQ ID NO: 70193 - DNA, 25 bp, Artificial
  probe
  misc_feature (1)..(25): SEQ ID NO: 6835; WAN024AZC_at; Start 115; Stop 139
cataacaatacgaaaggacttcatc

SEQ ID NO: 70194 - DNA, 25 bp, Artificial
  probe
  misc_feature (1)..(25): SEQ ID NO: 6835; WAN024AZC_at; Start 82; Stop 106
gaagatatcttatacagccttaata

SEQ ID NO: 70195 - DNA, 25 bp, Artificial
  probe
  misc_feature (1)..(25): SEQ ID NO: 6835; WAN024AZC_at; Start 112; Stop 136
aagcataacaatacgaaaggacttc

SEQ ID NO: 70196 - DNA, 25 bp, Artificial
  probe
  misc_feature (1)..(25): SEQ ID NO: 6835; WAN024AZC_at; Start 126; Stop 150
gaaaggacttcatcatccaatacaa

SEQ ID NO: 70197 - DNA, 25 bp, Artificial
  probe
  misc_feature (1)..(25): SEQ ID NO: 6835; WAN024AZC_at; Start 92; Stop 116
tatacagccttaatataattaagca

SEQ ID NO: 70198 - DNA, 25 bp, Artificial
  probe
  misc_feature (1)..(25): SEQ ID NO: 6835; WAN024AZC_at; Start 72; Stop 96
aggactgtgggaagatatcttatac

SEQ ID NO: 70199 - DNA, 25 bp, Artificial
  probe
  misc_feature (1)..(25): SEQ ID NO: 6835; WAN024AZC_at; Start 109; Stop 133
attaagcataacaatacgaaaggac

SEQ ID NO: 70200 - DNA, 25 bp, Artificial
  probe
  misc_feature (1)..(25): SEQ ID NO: 6835; WAN024AZC_at; Start 111; Stop 135
taagcataacaatacgaaaggactt

SEQ ID NO: 70201 - DNA, 25 bp, Artificial
  probe
  misc_feature (1)..(25): SEQ ID NO: 6835; WAN024AZC_at; Start 118; Stop 142
aacaatacgaaaggacttcatcatc

SEQ ID NO: 70202 - DNA, 25 bp, Artificial
  probe
  misc_feature (1)..(25): SEQ ID NO: 6835; WAN024AZC_at; Start 114; Stop 138
gcataacaatacgaaaggacttcat

SEQ ID NO: 70203 - DNA, 25 bp, Artificial
  probe
  misc_feature (1)..(25): SEQ ID NO: 2313; WAN024AZD_at; Start 123; Stop 147
tacaaaaggattttatcagccaata

SEQ ID NO: 70204 - DNA, 25 bp, Artificial
  probe
  misc_feature (1)..(25): SEQ ID NO: 2313; WAN024AZD_at; Start 102; Stop 126
taatataattgaacaaaaaaataca

SEQ ID NO: 70205 - DNA, 25 bp, Artificial
  probe
  misc_feature (1)..(25): SEQ ID NO: 2313; WAN024AZD_at; Start 74; Stop 98
gatggtgggaagatttcttatatag

SEQ ID NO: 70206 - DNA, 25 bp, Artificial
  probe
  misc_feature (1)..(25): SEQ ID NO: 2313; WAN024AZD_at; Start 130; Stop 154
ggattttatcagccaatacaactat

SEQ ID NO: 70207 - DNA, 25 bp, Artificial
  probe
  misc_feature (1)..(25): SEQ ID NO: 2313; WAN024AZD_at; Start 127; Stop 151
aaaggattttatcagccaatacaac

SEQ ID NO: 70208 - DNA, 25 bp, Artificial
  probe
  misc_feature (1)..(25): SEQ ID NO: 2313; WAN024AZD_at; Start 124; Stop 148
acaaaaggattttatcagccaatac

SEQ ID NO: 70209 - DNA, 25 bp, Artificial
  probe
  misc_feature (1)..(25): SEQ ID NO: 2313; WAN024AZD_at; Start 132; Stop 156
attttatcagccaatacaactataa

SEQ ID NO: 70210 - DNA, 25 bp, Artificial
  probe
  misc_feature (1)..(25): SEQ ID NO: 2313; WAN024AZD_at; Start 122; Stop 146
atacaaaaggattttatcagccaat

SEQ ID NO: 70211 - DNA, 25 bp, Artificial
  probe
  misc_feature (1)..(25): SEQ ID NO: 2313; WAN024AZD_at; Start 121; Stop 145
aatacaaaaggattttatcagccaa

SEQ ID NO: 70212 - DNA, 25 bp, Artificial
  probe
  misc_feature (1)..(25): SEQ ID NO: 2313; WAN024AZD_at; Start 126; Stop 150
aaaaggattttatcagccaatacaa

SEQ ID NO: 70213 - DNA, 25 bp, Artificial
  probe
  misc_feature (1)..(25): SEQ ID NO: 2313; WAN024AZD_at; Start 94; Stop 118
tatagatttaatataattgaacaaa

SEQ ID NO: 70214 - DNA, 25 bp, Artificial
  probe
  misc_feature (1)..(25): SEQ ID NO: 2313; WAN024AZD_at; Start 131; Stop 155
gattttatcagccaatacaactata

SEQ ID NO: 70215 - DNA, 25 bp, Artificial
  probe
  misc_feature (1)..(25): SEQ ID NO: 2313; WAN024AZD_at; Start 125; Stop 149
caaaaggattttatcagccaataca

SEQ ID NO: 70216 - DNA, 25 bp, Artificial
  probe
  misc_feature (1)..(25): SEQ ID NO: 2313; WAN024AZD_at; Start 129; Stop 153
aggattttatcagccaatacaacta

SEQ ID NO: 70217 - DNA, 25 bp, Artificial
  probe
  misc_feature (1)..(25): SEQ ID NO: 2313; WAN024AZD_at; Start 120; Stop 144
aaatacaaaaggattttatcagcca

SEQ ID NO: 70218 - DNA, 25 bp, Artificial
  probe
  misc_feature (1)..(25): SEQ ID NO: 2313; WAN024AZD_at; Start 96; Stop 120
tagatttaatataattgaacaaaaa

SEQ ID NO: 70219 - DNA, 25 bp, Artificial
  probe
  misc_feature (1)..(25): SEQ ID NO: 2313; WAN024AZD_at; Start 128; Stop 152
aaggattttatcagccaatacaact

SEQ ID NO: 70220 - DNA, 25 bp, Artificial
  probe
  misc_feature (1)..(25): SEQ ID NO: 6769; WAN024AZE_at; Start 37; Stop 61
attgaaactaaactgattcaagaac

SEQ ID NO: 70221 - DNA, 25 bp, Artificial
  probe
  misc_feature (1)..(25): SEQ ID NO: 6769; WAN024AZE_at; Start 28; Stop 52
aatgatacgattgaaactaaactga

SEQ ID NO: 70222 - DNA, 25 bp, Artificial
  probe
  misc_feature (1)..(25): SEQ ID NO: 6769; WAN024AZE_at; Start 36; Stop 60
gattgaaactaaactgattcaagaa

SEQ ID NO: 70223 - DNA, 25 bp, Artificial
  probe
  misc_feature (1)..(25): SEQ ID NO: 6769; WAN024AZE_at; Start 40; Stop 64
gaaactaaactgattcaagaactac

SEQ ID NO: 70224 - DNA, 25 bp, Artificial
  probe
  misc_feature (1)..(25): SEQ ID NO: 6769; WAN024AZE_at; Start 30; Stop 54
tgatacgattgaaactaaactgatt

SEQ ID NO: 70225 - DNA, 25 bp, Artificial
  probe
  misc_feature (1)..(25): SEQ ID NO: 6769; WAN024AZE_at; Start 42; Stop 66
aactaaactgattcaagaactactg

SEQ ID NO: 70226 - DNA, 25 bp, Artificial
  probe
  misc_feature (1)..(25): SEQ ID NO: 6769; WAN024AZE_at; Start 25; Stop 49
aagaatgatacgattgaaactaaac

SEQ ID NO: 70227 - DNA, 25 bp, Artificial
  probe
  misc_feature (1)..(25): SEQ ID NO: 6769; WAN024AZE_at; Start 31; Stop 55
gatacgattgaaactaaactgattc

SEQ ID NO: 70228 - DNA, 25 bp, Artificial
  probe
  misc_feature (1)..(25): SEQ ID NO: 6769; WAN024AZE_at; Start 38; Stop 62
ttgaaactaaactgattcaagaact

SEQ ID NO: 70229 - DNA, 25 bp, Artificial
  probe
  misc_feature (1)..(25): SEQ ID NO: 6769; WAN024AZE_at; Start 27; Stop 51
gaatgatacgattgaaactaaactg

SEQ ID NO: 70230 - DNA, 25 bp, Artificial
  probe
  misc_feature (1)..(25): SEQ ID NO: 6769; WAN024AZE_at; Start 34; Stop 58
acgattgaaactaaactgattcaag

SEQ ID NO: 70231 - DNA, 25 bp, Artificial
  probe
  misc_feature (1)..(25): SEQ ID NO: 6769; WAN024AZE_at; Start 32; Stop 56
atacgattgaaactaaactgattca

SEQ ID NO: 70232 - DNA, 25 bp, Artificial
  probe
  misc_feature (1)..(25): SEQ ID NO: 6769; WAN024AZE_at; Start 35; Stop 59
cgattgaaactaaactgattcaaga

SEQ ID NO: 70233 - DNA, 25 bp, Artificial
  probe
  misc_feature (1)..(25): SEQ ID NO: 6769; WAN024AZE_at; Start 26; Stop 50
agaatgatacgattgaaactaaact

SEQ ID NO: 70234 - DNA, 25 bp, Artificial
  probe
  misc_feature (1)..(25): SEQ ID NO: 6769; WAN024AZE_at; Start 41; Stop 65
aaactaaactgattcaagaactact

SEQ ID NO: 70235 - DNA, 25 bp, Artificial
  probe
  misc_feature (1)..(25): SEQ ID NO: 6769; WAN024AZE_at; Start 39; Stop 63
tgaaactaaactgattcaagaacta

SEQ ID NO: 70236 - DNA, 25 bp, Artificial
  probe
  misc_feature (1)..(25): SEQ ID NO: 6769; WAN024AZE_at; Start 29; Stop 53
atgatacgattgaaactaaactgat

SEQ ID NO: 70237 - DNA, 25 bp, Artificial
  probe
  misc_feature (1)..(25): SEQ ID NO: 6769; WAN024AZE_at; Start 33; Stop 57
tacgattgaaactaaactgattcaa

SEQ ID NO: 70238 - DNA, 25 bp, Artificial
  probe
  misc_feature (1)..(25): SEQ ID NO: 6770; WAN024AZF_at; Start 25; Stop 49
aagaatgatacggttgaaaataaat

SEQ ID NO: 70239 - DNA, 25 bp, Artificial
  probe
  misc_feature (1)..(25): SEQ ID NO: 6770; WAN024AZF_at; Start 27; Stop 51
gaatgatacggttgaaaataaatta

SEQ ID NO: 70240 - DNA, 25 bp, Artificial
  probe
  misc_feature (1)..(25): SEQ ID NO: 6770; WAN024AZF_at; Start 42; Stop 66
aaataaattaattcaagaactactg

SEQ ID NO: 70241 - DNA, 25 bp, Artificial
  probe
  misc_feature (1)..(25): SEQ ID NO: 6770; WAN024AZF_at; Start 26; Stop 50
agaatgatacggttgaaaataaatt

SEQ ID NO: 70242 - DNA, 25 bp, Artificial
  probe
  misc_feature (1)..(25): SEQ ID NO: 6770; WAN024AZF_at; Start 39; Stop 63
tgaaaataaattaattcaagaacta

SEQ ID NO: 70243 - DNA, 25 bp, Artificial
  probe
  misc_feature (1)..(25): SEQ ID NO: 6770; WAN024AZF_at; Start 29; Stop 53
atgatacggttgaaaataaattaat

SEQ ID NO: 70244 - DNA, 25 bp, Artificial
  probe
  misc_feature (1)..(25): SEQ ID NO: 5429; WAN024AZG_at; Start 16; Stop 40
caaaagaatcaaaggacagttgcat

SEQ ID NO: 70245 - DNA, 25 bp, Artificial
  probe
  misc_feature (1)..(25): SEQ ID NO: 5429; WAN024AZG_at; Start 134; Stop 158
tccgtgacccgaacgagaaatctct

SEQ ID NO: 70246 - DNA, 25 bp, Artificial
  probe
  misc_feature (1)..(25): SEQ ID NO: 5429; WAN024AZG_at; Start 65; Stop 89
cagtttctttccaaacaagcgagcc

SEQ ID NO: 70247 - DNA, 25 bp, Artificial
  probe
  misc_feature (1)..(25): SEQ ID NO: 5429; WAN024AZG_at; Start 11; Stop 35
gcgatcaaaagaatcaaaggacagt

SEQ ID NO: 70248 - DNA, 25 bp, Artificial
  probe
  misc_feature (1)..(25): SEQ ID NO: 5429; WAN024AZG_at; Start 92; Stop 116
tcgactcggaatcgcttcctcaaag

SEQ ID NO: 70249 - DNA, 25 bp, Artificial
  probe
  misc_feature (1)..(25): SEQ ID NO: 5429; WAN024AZG_at; Start 123; Stop 147
caaatatggagtccgtgacccgaac

SEQ ID NO: 70250 - DNA, 25 bp, Artificial
  probe
  misc_feature (1)..(25): SEQ ID NO: 5429; WAN024AZG_at; Start 121; Stop 145
accaaatatggagtccgtgacccga

SEQ ID NO: 70251 - DNA, 25 bp, Artificial
  probe
  misc_feature (1)..(25): SEQ ID NO: 5429; WAN024AZG_at; Start 85; Stop 109
gagcctctcgactcggaatcgcttc

SEQ ID NO: 70252 - DNA, 25 bp, Artificial
  probe
  misc_feature (1)..(25): SEQ ID NO: 5429; WAN024AZG_at; Start 62; Stop 86
tatcagtttctttccaaacaagcga

SEQ ID NO: 70253 - DNA, 25 bp, Artificial
  probe
  misc_feature (1)..(25): SEQ ID NO: 5429; WAN024AZG_at; Start 38; Stop 62
catactttcctgcattgccagttct

SEQ ID NO: 70254 - DNA, 25 bp, Artificial
  probe
  misc_feature (1)..(25): SEQ ID NO: 5429; WAN024AZG_at; Start 44; Stop 68
ttcctgcattgccagttctatcagt

SEQ ID NO: 70255 - DNA, 25 bp, Artificial
  probe
  misc_feature (1)..(25): SEQ ID NO: 5429; WAN024AZG_at; Start 26; Stop 50
aaaggacagttgcatactttcctgc

SEQ ID NO: 70256 - DNA, 25 bp, Artificial
  probe
  misc_feature (1)..(25): SEQ ID NO: 5429; WAN024AZG_at; Start 54; Stop 78
gccagttctatcagtttctttccaa

SEQ ID NO: 70257 - DNA, 25 bp, Artificial
  probe
  misc_feature (1)..(25): SEQ ID NO: 5429; WAN024AZG_at; Start 111; Stop 135
tcaaagaagaaccaaatatggagtc

SEQ ID NO: 70258 - DNA, 25 bp, Artificial
  probe
  misc_feature (1)..(25): SEQ ID NO: 5429; WAN024AZG_at; Start 8; Stop 32
catgcgatcaaaagaatcaaaggac

SEQ ID NO: 70259 - DNA, 25 bp, Artificial
  probe
  misc_feature (1)..(25): SEQ ID NO: 5429; WAN024AZG_at; Start 94; Stop 118
gactcggaatcgcttcctcaaagaa

SEQ ID NO: 70260 - DNA, 25 bp, Artificial
  probe
  misc_feature (1)..(25): SEQ ID NO: 5429; WAN024AZG_at; Start 77; Stop 101
aaacaagcgagcctctcgactcgga

SEQ ID NO: 70261 - DNA, 25 bp, Artificial
  probe
  misc_feature (1)..(25): SEQ ID NO: 5429; WAN024AZG_at; Start 116; Stop 140
gaagaaccaaatatggagtccgtga

SEQ ID NO: 70262 - DNA, 25 bp, Artificial
  probe
  misc_feature (1)..(25): SEQ ID NO: 5429; WAN024AZG_at; Start 1; Stop 25
ttggaaacatgcgatcaaaagaatc

SEQ ID NO: 70263 - DNA, 25 bp, Artificial
  probe
  misc_feature (1)..(25): SEQ ID NO: 5429; WAN024AZG_at; Start 107; Stop 131
ttcctcaaagaagaaccaaatatgg

SEQ ID NO: 70264 - DNA, 25 bp, Artificial
  probe
  misc_feature (1)..(25): SEQ ID NO: 5429; WAN024AZG_at; Start 70; Stop 94
tctttccaaacaagcgagcctctcg

SEQ ID NO: 70265 - DNA, 25 bp, Artificial
  probe
  misc_feature (1)..(25): SEQ ID NO: 5429; WAN024AZG_at; Start 3; Stop 27
ggaaacatgcgatcaaaagaatcaa

SEQ ID NO: 70266 - DNA, 25 bp, Artificial
  probe
  misc_feature (1)..(25): SEQ ID NO: 5429; WAN024AZG_at; Start 34; Stop 58
gttgcatactttcctgcattgccag

SEQ ID NO: 70267 - DNA, 25 bp, Artificial
  probe
  misc_feature (1)..(25): SEQ ID NO: 5429; WAN024AZG_at; Start 125; Stop 149
aatatggagtccgtgacccgaacga

SEQ ID NO: 70268 - DNA, 25 bp, Artificial
  probe
  misc_feature (1)..(25): SEQ ID NO: 5429; WAN024AZG_at; Start 128; Stop 152
atggagtccgtgacccgaacgagaa

SEQ ID NO: 70269 - DNA, 25 bp, Artificial
  probe
  misc_feature (1)..(25): SEQ ID NO: 5429; WAN024AZG_at; Start 30; Stop 54
gacagttgcatactttcctgcattg

SEQ ID NO: 70270 - DNA, 25 bp, Artificial
  probe
  misc_feature (1)..(25): SEQ ID NO: 5429; WAN024AZG_at; Start 68; Stop 92
tttctttccaaacaagcgagcctct

SEQ ID NO: 70271 - DNA, 25 bp, Artificial
  probe
  misc_feature (1)..(25): SEQ ID NO: 5429; WAN024AZG_at; Start 21; Stop 45
gaatcaaaggacagttgcatacttt

SEQ ID NO: 70272 - DNA, 25 bp, Artificial
  probe
  misc_feature (1)..(25): SEQ ID NO: 5429; WAN024AZG_at; Start 48; Stop 72
tgcattgccagttctatcagtttct

SEQ ID NO: 70273 - DNA, 25 bp, Artificial
  probe
  misc_feature (1)..(25): SEQ ID NO: 5429; WAN024AZG_at; Start 119; Stop 143
gaaccaaatatggagtccgtgaccc

SEQ ID NO: 70274 - DNA, 25 bp, Artificial
  probe
  misc_feature (1)..(25): SEQ ID NO: 5429; WAN024AZG_at; Start 100; Stop 124
gaatcgcttcctcaaagaagaacca

SEQ ID NO: 70275 - DNA, 25 bp, Artificial
  probe
  misc_feature (1)..(25): SEQ ID NO: 5429; WAN024AZG_at; Start 97; Stop 121
tcggaatcgcttcctcaaagaagaa

SEQ ID NO: 70276 - DNA, 25 bp, Artificial
  probe
  misc_feature (1)..(25): SEQ ID NO: 5429; WAN024AZG_at; Start 80; Stop 104
caagcgagcctctcgactcggaatc

SEQ ID NO: 70277 - DNA, 25 bp, Artificial
  probe
  misc_feature (1)..(25): SEQ ID NO: 5429; WAN024AZG_at; Start 136; Stop 160
cgtgacccgaacgagaaatctctaa

SEQ ID NO: 70278 - DNA, 25 bp, Artificial
  probe
  misc_feature (1)..(25): SEQ ID NO: 6380; WAN024AZH_at; Start 193; Stop 217
tcgacaactatcctctcatttccag

SEQ ID NO: 70279 - DNA, 25 bp, Artificial
  probe
  misc_feature (1)..(25): SEQ ID NO: 6380; WAN024AZH_at; Start 184; Stop 208
tccatgatgtcgacaactatcctct

SEQ ID NO: 70280 - DNA, 25 bp, Artificial
  probe
  misc_feature (1)..(25): SEQ ID NO: 6380; WAN024AZH_at; Start 105; Stop 129
tttttctggtatctatcaggacaca

SEQ ID NO: 70281 - DNA, 25 bp, Artificial
  probe
  misc_feature (1)..(25): SEQ ID NO: 6380; WAN024AZH_at; Start 107; Stop 131
tttctggtatctatcaggacacacc

SEQ ID NO: 70282 - DNA, 25 bp, Artificial
  probe
  misc_feature (1)..(25): SEQ ID NO: 6380; WAN024AZH_at; Start 108; Stop 132
ttctggtatctatcaggacacacca

SEQ ID NO: 70283 - DNA, 25 bp, Artificial
  probe
  misc_feature (1)..(25): SEQ ID NO: 6380; WAN024AZH_at; Start 204; Stop 228
cctctcatttccagctgttttacat

SEQ ID NO: 70284 - DNA, 25 bp, Artificial
  probe
  misc_feature (1)..(25): SEQ ID NO: 6380; WAN024AZH_at; Start 188; Stop 212
tgatgtcgacaactatcctctcatt

SEQ ID NO: 70285 - DNA, 25 bp, Artificial
  probe
  misc_feature (1)..(25): SEQ ID NO: 6380; WAN024AZH_at; Start 198; Stop 222
aactatcctctcatttccagctgtt

SEQ ID NO: 70286 - DNA, 25 bp, Artificial
  probe
  misc_feature (1)..(25): SEQ ID NO: 6380; WAN024AZH_at; Start 212; Stop 236
ttccagctgttttacataccgataa

SEQ ID NO: 70287 - DNA, 25 bp, Artificial
  probe
  misc_feature (1)..(25): SEQ ID NO: 6380; WAN024AZH_at; Start 201; Stop 225
tatcctctcatttccagctgtttta

SEQ ID NO: 70288 - DNA, 25 bp, Artificial
  probe
  misc_feature (1)..(25): SEQ ID NO: 6380; WAN024AZH_at; Start 110; Stop 134
ctggtatctatcaggacacaccagg

SEQ ID NO: 70289 - DNA, 25 bp, Artificial
  probe
  misc_feature (1)..(25): SEQ ID NO: 6380; WAN024AZH_at; Start 104; Stop 128
ttttttctggtatctatcaggacac

SEQ ID NO: 70290 - DNA, 25 bp, Artificial
  probe
  misc_feature (1)..(25): SEQ ID NO: 6380; WAN024AZH_at; Start 82; Stop 106
atgccgacggctttctatttatttt

SEQ ID NO: 70291 - DNA, 25 bp, Artificial
  probe
  misc_feature (1)..(25): SEQ ID NO: 6380; WAN024AZH_at; Start 69; Stop 93
attgtcggtagggatgccgacggct

SEQ ID NO: 70292 - DNA, 25 bp, Artificial
  probe
  misc_feature (1)..(25): SEQ ID NO: 6380; WAN024AZH_at; Start 111; Stop 135
tggtatctatcaggacacaccaggt

SEQ ID NO: 70293 - DNA, 25 bp, Artificial
  probe
  misc_feature (1)..(25): SEQ ID NO: 6380; WAN024AZH_at; Start 196; Stop 220
acaactatcctctcatttccagctg

SEQ ID NO: 70294 - DNA, 25 bp, Artificial
  probe
  misc_feature (1)..(25): SEQ ID NO: 6380; WAN024AZH_at; Start 197; Stop 221
caactatcctctcatttccagctgt

SEQ ID NO: 70295 - DNA, 25 bp, Artificial
  probe
  misc_feature (1)..(25): SEQ ID NO: 6380; WAN024AZH_at; Start 185; Stop 209
ccatgatgtcgacaactatcctctc

SEQ ID NO: 70296 - DNA, 25 bp, Artificial
  probe
  misc_feature (1)..(25): SEQ ID NO: 6380; WAN024AZH_at; Start 195; Stop 219
gacaactatcctctcatttccagct

SEQ ID NO: 70297 - DNA, 25 bp, Artificial
  probe
  misc_feature (1)..(25): SEQ ID NO: 6380; WAN024AZH_at; Start 186; Stop 210
catgatgtcgacaactatcctctca

SEQ ID NO: 70298 - DNA, 25 bp, Artificial
  probe
  misc_feature (1)..(25): SEQ ID NO: 6380; WAN024AZH_at; Start 183; Stop 207
ttccatgatgtcgacaactatcctc

SEQ ID NO: 70299 - DNA, 25 bp, Artificial
  probe
  misc_feature (1)..(25): SEQ ID NO: 6380; WAN024AZH_at; Start 106; Stop 130
ttttctggtatctatcaggacacac

SEQ ID NO: 70300 - DNA, 25 bp, Artificial
  probe
  misc_feature (1)..(25): SEQ ID NO: 6380; WAN024AZH_at; Start 213; Stop 237
tccagctgttttacataccgataag

SEQ ID NO: 70301 - DNA, 25 bp, Artificial
  probe
  misc_feature (1)..(25): SEQ ID NO: 6380; WAN024AZH_at; Start 205; Stop 229
ctctcatttccagctgttttacata

SEQ ID NO: 70302 - DNA, 25 bp, Artificial
  probe
  misc_feature (1)..(25): SEQ ID NO: 6380; WAN024AZH_at; Start 81; Stop 105
gatgccgacggctttctatttattt

SEQ ID NO: 70303 - DNA, 25 bp, Artificial
  probe
  misc_feature (1)..(25): SEQ ID NO: 6380; WAN024AZH_at; Start 75; Stop 99
ggtagggatgccgacggctttctat

SEQ ID NO: 70304 - DNA, 25 bp, Artificial
  probe
  misc_feature (1)..(25): SEQ ID NO: 6380; WAN024AZH_at; Start 189; Stop 213
gatgtcgacaactatcctctcattt

SEQ ID NO: 70305 - DNA, 25 bp, Artificial
  probe
  misc_feature (1)..(25): SEQ ID NO: 6380; WAN024AZH_at; Start 210; Stop 234
atttccagctgttttacataccgat

SEQ ID NO: 70306 - DNA, 25 bp, Artificial
  probe
  misc_feature (1)..(25): SEQ ID NO: 6380; WAN024AZH_at; Start 192; Stop 216
gtcgacaactatcctctcatttcca

SEQ ID NO: 70307 - DNA, 25 bp, Artificial
  probe
  misc_feature (1)..(25): SEQ ID NO: 6380; WAN024AZH_at; Start 203; Stop 227
tcctctcatttccagctgttttaca

SEQ ID NO: 70308 - DNA, 25 bp, Artificial
  probe
  misc_feature (1)..(25): SEQ ID NO: 6380; WAN024AZH_at; Start 211; Stop 235
tttccagctgttttacataccgata

SEQ ID NO: 70309 - DNA, 25 bp, Artificial
  probe
  misc_feature (1)..(25): SEQ ID NO: 6380; WAN024AZH_at; Start 109; Stop 133
tctggtatctatcaggacacaccag

SEQ ID NO: 70310 - DNA, 25 bp, Artificial
  probe
  misc_feature (1)..(25): SEQ ID NO: 6380; WAN024AZH_at; Start 191; Stop 215
tgtcgacaactatcctctcatttcc

SEQ ID NO: 70311 - DNA, 25 bp, Artificial
  probe
  misc_feature (1)..(25): SEQ ID NO: 6380; WAN024AZH_at; Start 199; Stop 223
actatcctctcatttccagctgttt

SEQ ID NO: 70312 - DNA, 25 bp, Artificial
  probe
  misc_feature (1)..(25): SEQ ID NO: 7138; WAN024AZI_s_at; Start 55; Stop 79
accaagttatcagttgatggaatta

SEQ ID NO: 70313 - DNA, 25 bp, Artificial
  probe
  misc_feature (1)..(25): SEQ ID NO: 7138; WAN024AZI_s_at; Start 58; Stop 82
aagttatcagttgatggaattaatc

SEQ ID NO: 70314 - DNA, 25 bp, Artificial
  probe
  misc_feature (1)..(25): SEQ ID NO: 7138; WAN024AZI_s_at; Start 30; Stop 54
ggatgcaagcaatcgggaagcgttt

SEQ ID NO: 70315 - DNA, 25 bp, Artificial
  probe
  misc_feature (1)..(25): SEQ ID NO: 7138; WAN024AZI_s_at; Start 60; Stop 84
gttatcagttgatggaattaatcaa

SEQ ID NO: 70316 - DNA, 25 bp, Artificial
  probe
  misc_feature (1)..(25): SEQ ID NO: 7138; WAN024AZI_s_at; Start 70; Stop 94
gatggaattaatcaagaccttctta

SEQ ID NO: 70317 - DNA, 25 bp, Artificial
  probe
  misc_feature (1)..(25): SEQ ID NO: 7138; WAN024AZI_s_at; Start 62; Stop 86
tatcagttgatggaattaatcaaga

SEQ ID NO: 70318 - DNA, 25 bp, Artificial
  probe
  misc_feature (1)..(25): SEQ ID NO: 7138; WAN024AZI_s_at; Start 59; Stop 83
agttatcagttgatggaattaatca

SEQ ID NO: 70319 - DNA, 25 bp, Artificial
  probe
  misc_feature (1)..(25): SEQ ID NO: 7138; WAN024AZI_s_at; Start 57; Stop 81
caagttatcagttgatggaattaat

SEQ ID NO: 70320 - DNA, 25 bp, Artificial
  probe
  misc_feature (1)..(25): SEQ ID NO: 7138; WAN024AZI_s_at; Start 31; Stop 55
gatgcaagcaatcgggaagcgttta

SEQ ID NO: 70321 - DNA, 25 bp, Artificial
  probe
  misc_feature (1)..(25): SEQ ID NO: 7138; WAN024AZI_s_at; Start 34; Stop 58
gcaagcaatcgggaagcgtttacca

SEQ ID NO: 70322 - DNA, 25 bp, Artificial
  probe
  misc_feature (1)..(25): SEQ ID NO: 7138; WAN024AZI_s_at; Start 69; Stop 93
tgatggaattaatcaagaccttctt

SEQ ID NO: 70323 - DNA, 25 bp, Artificial
  probe
  misc_feature (1)..(25): SEQ ID NO: 7138; WAN024AZI_s_at; Start 66; Stop 90
agttgatggaattaatcaagacctt

SEQ ID NO: 70324 - DNA, 25 bp, Artificial
  probe
  misc_feature (1)..(25): SEQ ID NO: 7138; WAN024AZI_s_at; Start 65; Stop 89
cagttgatggaattaatcaagacct

SEQ ID NO: 70325 - DNA, 25 bp, Artificial
  probe
  misc_feature (1)..(25): SEQ ID NO: 7138; WAN024AZI_s_at; Start 67; Stop 91
gttgatggaattaatcaagaccttc

SEQ ID NO: 70326 - DNA, 25 bp, Artificial
  probe
  misc_feature (1)..(25): SEQ ID NO: 7138; WAN024AZI_s_at; Start 26; Stop 50
gactggatgcaagcaatcgggaagc

SEQ ID NO: 70327 - DNA, 25 bp, Artificial
  probe
  misc_feature (1)..(25): SEQ ID NO: 7138; WAN024AZI_s_at; Start 29; Stop 53
tggatgcaagcaatcgggaagcgtt

SEQ ID NO: 70328 - DNA, 25 bp, Artificial
  probe
  misc_feature (1)..(25): SEQ ID NO: 7138; WAN024AZI_s_at; Start 36; Stop 60
aagcaatcgggaagcgtttaccaag

SEQ ID NO: 70329 - DNA, 25 bp, Artificial
  probe
  misc_feature (1)..(25): SEQ ID NO: 7138; WAN024AZI_s_at; Start 42; Stop 66
tcgggaagcgtttaccaagttatca

SEQ ID NO: 70330 - DNA, 25 bp, Artificial
  probe
  misc_feature (1)..(25): SEQ ID NO: 7138; WAN024AZI_s_at; Start 56; Stop 80
ccaagttatcagttgatggaattaa

SEQ ID NO: 70331 - DNA, 25 bp, Artificial
  probe
  misc_feature (1)..(25): SEQ ID NO: 7138; WAN024AZI_s_at; Start 37; Stop 61
agcaatcgggaagcgtttaccaagt

SEQ ID NO: 70332 - DNA, 25 bp, Artificial
  probe
  misc_feature (1)..(25): SEQ ID NO: 7138; WAN024AZI_s_at; Start 33; Stop 57
tgcaagcaatcgggaagcgtttacc

SEQ ID NO: 70333 - DNA, 25 bp, Artificial
  probe
  misc_feature (1)..(25): SEQ ID NO: 7138; WAN024AZI_s_at; Start 32; Stop 56
atgcaagcaatcgggaagcgtttac

SEQ ID NO: 70334 - DNA, 25 bp, Artificial
  probe
  misc_feature (1)..(25): SEQ ID NO: 7138; WAN024AZI_s_at; Start 27; Stop 51
actggatgcaagcaatcgggaagcg

SEQ ID NO: 70335 - DNA, 25 bp, Artificial
  probe
  misc_feature (1)..(25): SEQ ID NO: 7138; WAN024AZI_s_at; Start 35; Stop 59
caagcaatcgggaagcgtttaccaa

SEQ ID NO: 70336 - DNA, 25 bp, Artificial
  probe
  misc_feature (1)..(25): SEQ ID NO: 7138; WAN024AZI_s_at; Start 28; Stop 52
ctggatgcaagcaatcgggaagcgt

SEQ ID NO: 70337 - DNA, 25 bp, Artificial
  probe
  misc_feature (1)..(25): SEQ ID NO: 7138; WAN024AZI_s_at; Start 54; Stop 78
taccaagttatcagttgatggaatt

SEQ ID NO: 70338 - DNA, 25 bp, Artificial
  probe
  misc_feature (1)..(25): SEQ ID NO: 7138; WAN024AZI_s_at; Start 53; Stop 77
ttaccaagttatcagttgatggaat

SEQ ID NO: 70339 - DNA, 25 bp, Artificial
  probe
  misc_feature (1)..(25): SEQ ID NO: 7138; WAN024AZI_s_at; Start 61; Stop 85
ttatcagttgatggaattaatcaag

SEQ ID NO: 70340 - DNA, 25 bp, Artificial
  probe
  misc_feature (1)..(25): SEQ ID NO: 7138; WAN024AZI_s_at; Start 63; Stop 87
atcagttgatggaattaatcaagac

SEQ ID NO: 70341 - DNA, 25 bp, Artificial
  probe
  misc_feature (1)..(25): SEQ ID NO: 7138; WAN024AZI_s_at; Start 71; Stop 95
atggaattaatcaagaccttcttaa

SEQ ID NO: 70342 - DNA, 25 bp, Artificial
  probe
  misc_feature (1)..(25): SEQ ID NO: 6381; WAN024AZJ_at; Start 184; Stop 208
tccatgatgtcgaccgctatctttt

SEQ ID NO: 70343 - DNA, 25 bp, Artificial
  probe
  misc_feature (1)..(25): SEQ ID NO: 6381; WAN024AZJ_at; Start 72; Stop 96
gtcagtagggatgccgacagccttc

SEQ ID NO: 70344 - DNA, 25 bp, Artificial
  probe
  misc_feature (1)..(25): SEQ ID NO: 6381; WAN024AZJ_at; Start 189; Stop 213
gatgtcgaccgctatcttttcattc

SEQ ID NO: 70345 - DNA, 25 bp, Artificial
  probe
  misc_feature (1)..(25): SEQ ID NO: 6381; WAN024AZJ_at; Start 257; Stop 281
tattacgtcatagcccagtaaatat

SEQ ID NO: 70346 - DNA, 25 bp, Artificial
  probe
  misc_feature (1)..(25): SEQ ID NO: 6381; WAN024AZJ_at; Start 198; Stop 222
cgctatcttttcattcccagctgtc

SEQ ID NO: 70347 - DNA, 25 bp, Artificial
  probe
  misc_feature (1)..(25): SEQ ID NO: 6381; WAN024AZJ_at; Start 193; Stop 217
tcgaccgctatcttttcattcccag

SEQ ID NO: 70348 - DNA, 25 bp, Artificial
  probe
  misc_feature (1)..(25): SEQ ID NO: 6381; WAN024AZJ_at; Start 93; Stop 117
cttctatctattcttttctggcatg

SEQ ID NO: 70349 - DNA, 25 bp, Artificial
  probe
  misc_feature (1)..(25): SEQ ID NO: 6381; WAN024AZJ_at; Start 89; Stop 113
cagccttctatctattcttttctgg

SEQ ID NO: 70350 - DNA, 25 bp, Artificial
  probe
  misc_feature (1)..(25): SEQ ID NO: 6381; WAN024AZJ_at; Start 69; Stop 93
attgtcagtagggatgccgacagcc

SEQ ID NO: 70351 - DNA, 25 bp, Artificial
  probe
  misc_feature (1)..(25): SEQ ID NO: 6381; WAN024AZJ_at; Start 109; Stop 133
tctggcatgtaccaggacacaccag

SEQ ID NO: 70352 - DNA, 25 bp, Artificial
  probe
  misc_feature (1)..(25): SEQ ID NO: 6381; WAN024AZJ_at; Start 78; Stop 102
agggatgccgacagccttctatcta

SEQ ID NO: 70353 - DNA, 25 bp, Artificial
  probe
  misc_feature (1)..(25): SEQ ID NO: 6381; WAN024AZJ_at; Start 108; Stop 132
ttctggcatgtaccaggacacacca

SEQ ID NO: 70354 - DNA, 25 bp, Artificial
  probe
  misc_feature (1)..(25): SEQ ID NO: 6381; WAN024AZJ_at; Start 185; Stop 209
ccatgatgtcgaccgctatcttttc

SEQ ID NO: 70355 - DNA, 25 bp, Artificial
  probe
  misc_feature (1)..(25): SEQ ID NO: 6381; WAN024AZJ_at; Start 111; Stop 135
tggcatgtaccaggacacaccaggt

SEQ ID NO: 70356 - DNA, 25 bp, Artificial
  probe
  misc_feature (1)..(25): SEQ ID NO: 6381; WAN024AZJ_at; Start 203; Stop 227
tcttttcattcccagctgtcttaca

SEQ ID NO: 70357 - DNA, 25 bp, Artificial
  probe
  misc_feature (1)..(25): SEQ ID NO: 6381; WAN024AZJ_at; Start 97; Stop 121
tatctattcttttctggcatgtacc

SEQ ID NO: 70358 - DNA, 25 bp, Artificial
  probe
  misc_feature (1)..(25): SEQ ID NO: 6381; WAN024AZJ_at; Start 249; Stop 273
gcagaaaatattacgtcatagccca

SEQ ID NO: 70359 - DNA, 25 bp, Artificial
  probe
  misc_feature (1)..(25): SEQ ID NO: 6381; WAN024AZJ_at; Start 195; Stop 219
gaccgctatcttttcattcccagct

SEQ ID NO: 70360 - DNA, 25 bp, Artificial
  probe
  misc_feature (1)..(25): SEQ ID NO: 6381; WAN024AZJ_at; Start 201; Stop 225
tatcttttcattcccagctgtctta

SEQ ID NO: 70361 - DNA, 25 bp, Artificial
  probe
  misc_feature (1)..(25): SEQ ID NO: 6381; WAN024AZJ_at; Start 79; Stop 103
gggatgccgacagccttctatctat

SEQ ID NO: 70362 - DNA, 25 bp, Artificial
  probe
  misc_feature (1)..(25): SEQ ID NO: 6381; WAN024AZJ_at; Start 207; Stop 231
ttcattcccagctgtcttacatacc

SEQ ID NO: 70363 - DNA, 25 bp, Artificial
  probe
  misc_feature (1)..(25): SEQ ID NO: 6381; WAN024AZJ_at; Start 252; Stop 276
gaaaatattacgtcatagcccagta

SEQ ID NO: 70364 - DNA, 25 bp, Artificial
  probe
  misc_feature (1)..(25): SEQ ID NO: 6381; WAN024AZJ_at; Start 84; Stop 108
gccgacagccttctatctattcttt

SEQ ID NO: 70365 - DNA, 25 bp, Artificial
  probe
  misc_feature (1)..(25): SEQ ID NO: 6381; WAN024AZJ_at; Start 100; Stop 124
ctattcttttctggcatgtaccagg

SEQ ID NO: 70366 - DNA, 25 bp, Artificial
  probe
  misc_feature (1)..(25): SEQ ID NO: 6381; WAN024AZJ_at; Start 254; Stop 278
aaatattacgtcatagcccagtaaa

SEQ ID NO: 70367 - DNA, 25 bp, Artificial
  probe
  misc_feature (1)..(25): SEQ ID NO: 6381; WAN024AZJ_at; Start 106; Stop 130
ttttctggcatgtaccaggacacac

SEQ ID NO: 70368 - DNA, 25 bp, Artificial
  probe
  misc_feature (1)..(25): SEQ ID NO: 6381; WAN024AZJ_at; Start 70; Stop 94
ttgtcagtagggatgccgacagcct

SEQ ID NO: 70369 - DNA, 25 bp, Artificial
  probe
  misc_feature (1)..(25): SEQ ID NO: 6381; WAN024AZJ_at; Start 450; Stop 474
tggcttaaccttgacgctgttacca

SEQ ID NO: 70370 - DNA, 25 bp, Artificial
  probe
  misc_feature (1)..(25): SEQ ID NO: 6381; WAN024AZJ_at; Start 104; Stop 128
tcttttctggcatgtaccaggacac

SEQ ID NO: 70371 - DNA, 25 bp, Artificial
  probe
  misc_feature (1)..(25): SEQ ID NO: 6381; WAN024AZJ_at; Start 81; Stop 105
gatgccgacagccttctatctattc

SEQ ID NO: 70372 - DNA, 25 bp, Artificial
  probe
  misc_feature (1)..(25): SEQ ID NO: 6381; WAN024AZJ_at; Start 250; Stop 274
cagaaaatattacgtcatagcccag

SEQ ID NO: 70373 - DNA, 25 bp, Artificial
  probe
  misc_feature (1)..(25): SEQ ID NO: 6381; WAN024AZJ_at; Start 191; Stop 215
tgtcgaccgctatcttttcattccc

SEQ ID NO: 70374 - DNA, 25 bp, Artificial
  probe
  misc_feature (1)..(25): SEQ ID NO: 6381; WAN024AZJ_at; Start 71; Stop 95
tgtcagtagggatgccgacagcctt

SEQ ID NO: 70375 - DNA, 25 bp, Artificial
  probe
  misc_feature (1)..(25): SEQ ID NO: 6381; WAN024AZJ_at; Start 449; Stop 473
ttggcttaaccttgacgctgttacc

SEQ ID NO: 70376 - DNA, 25 bp, Artificial
  probe
  misc_feature (1)..(25): SEQ ID NO: 4944; WAN024AZK_at; Start 229; Stop 253
gctatcttctcattcccagttgttt

SEQ ID NO: 70377 - DNA, 25 bp, Artificial
  probe
  misc_feature (1)..(25): SEQ ID NO: 4944; WAN024AZK_at; Start 187; Stop 211
gattatcttatctccatgactgcat

SEQ ID NO: 70378 - DNA, 25 bp, Artificial
  probe
  misc_feature (1)..(25): SEQ ID NO: 4944; WAN024AZK_at; Start 208; Stop 232
gcattttccatgatgtcaacagcta

SEQ ID NO: 70379 - DNA, 25 bp, Artificial
  probe
  misc_feature (1)..(25): SEQ ID NO: 4944; WAN024AZK_at; Start 235; Stop 259
ttctcattcccagttgttttacata

SEQ ID NO: 70380 - DNA, 25 bp, Artificial
  probe
  misc_feature (1)..(25): SEQ ID NO: 4944; WAN024AZK_at; Start 368; Stop 392
tcttggtggttttctcagttgggca

SEQ ID NO: 70381 - DNA, 25 bp, Artificial
  probe
  misc_feature (1)..(25): SEQ ID NO: 4944; WAN024AZK_at; Start 361; Stop 385
gtttcaatcttggtggttttctcag

SEQ ID NO: 70382 - DNA, 25 bp, Artificial
  probe
  misc_feature (1)..(25): SEQ ID NO: 4944; WAN024AZK_at; Start 560; Stop 584
taggtggactctggatgcctatctc

SEQ ID NO: 70383 - DNA, 25 bp, Artificial
  probe
  misc_feature (1)..(25): SEQ ID NO: 4944; WAN024AZK_at; Start 396; Stop 420
tgtaagaggtgtggacatgtctctt

SEQ ID NO: 70384 - DNA, 25 bp, Artificial
  probe
  misc_feature (1)..(25): SEQ ID NO: 4944; WAN024AZK_at; Start 411; Stop 435
catgtctcttggaaattggattggg

SEQ ID NO: 70385 - DNA, 25 bp, Artificial
  probe
  misc_feature (1)..(25): SEQ ID NO: 4944; WAN024AZK_at; Start 352; Stop 376
gattatttggtttcaatcttggtgg

SEQ ID NO: 70386 - DNA, 25 bp, Artificial
  probe
  misc_feature (1)..(25): SEQ ID NO: 4944; WAN024AZK_at; Start 452; Stop 476
tagtaggaagtattgccttcgtagc

SEQ ID NO: 70387 - DNA, 25 bp, Artificial
  probe
  misc_feature (1)..(25): SEQ ID NO: 4944; WAN024AZK_at; Start 381; Stop 405
ctcagttgggcattttgtaagaggt

SEQ ID NO: 70388 - DNA, 25 bp, Artificial
  probe
  misc_feature (1)..(25): SEQ ID NO: 4944; WAN024AZK_at; Start 444; Stop 468
tttgctgatagtaggaagtattgcc

SEQ ID NO: 70389 - DNA, 25 bp, Artificial
  probe
  misc_feature (1)..(25): SEQ ID NO: 4944; WAN024AZK_at; Start 375; Stop 399
ggttttctcagttgggcattttgta

SEQ ID NO: 70390 - DNA, 25 bp, Artificial
  probe
  misc_feature (1)..(25): SEQ ID NO: 4944; WAN024AZK_at; Start 15; Stop 39
aagggagataactaagatgaaacga

SEQ ID NO: 70391 - DNA, 25 bp, Artificial
  probe
  misc_feature (1)..(25): SEQ ID NO: 4944; WAN024AZK_at; Start 458; Stop 482
gaagtattgccttcgtagcgcttgg

SEQ ID NO: 70392 - DNA, 25 bp, Artificial
  probe
  misc_feature (1)..(25): SEQ ID NO: 4944; WAN024AZK_at; Start 407; Stop 431
tggacatgtctcttggaaattggat

SEQ ID NO: 70393 - DNA, 25 bp, Artificial
  probe
  misc_feature (1)..(25): SEQ ID NO: 4944; WAN024AZK_at; Start 205; Stop 229
actgcattttccatgatgtcaacag

SEQ ID NO: 70394 - DNA, 25 bp, Artificial
  probe
  misc_feature (1)..(25): SEQ ID NO: 4944; WAN024AZK_at; Start 468; Stop 492
cttcgtagcgcttggtttgaccttg

SEQ ID NO: 70395 - DNA, 25 bp, Artificial
  probe
  misc_feature (1)..(25): SEQ ID NO: 4944; WAN024AZK_at; Start 471; Stop 495
cgtagcgcttggtttgaccttgact

SEQ ID NO: 70396 - DNA, 25 bp, Artificial
  probe
  misc_feature (1)..(25): SEQ ID NO: 4944; WAN024AZK_at; Start 216; Stop 240
catgatgtcaacagctatcttctca

SEQ ID NO: 70397 - DNA, 25 bp, Artificial
  probe
  misc_feature (1)..(25): SEQ ID NO: 4944; WAN024AZK_at; Start 558; Stop 582
tttaggtggactctggatgcctatc

SEQ ID NO: 70398 - DNA, 25 bp, Artificial
  probe
  misc_feature (1)..(25): SEQ ID NO: 4944; WAN024AZK_at; Start 462; Stop 486
tattgccttcgtagcgcttggtttg

SEQ ID NO: 70399 - DNA, 25 bp, Artificial
  probe
  misc_feature (1)..(25): SEQ ID NO: 4944; WAN024AZK_at; Start 447; Stop 471
gctgatagtaggaagtattgccttc

SEQ ID NO: 70400 - DNA, 25 bp, Artificial
  probe
  misc_feature (1)..(25): SEQ ID NO: 4944; WAN024AZK_at; Start 466; Stop 490
gccttcgtagcgcttggtttgacct

SEQ ID NO: 70401 - DNA, 25 bp, Artificial
  probe
  misc_feature (1)..(25): SEQ ID NO: 4944; WAN024AZK_at; Start 563; Stop 587
gtggactctggatgcctatctcttt

SEQ ID NO: 70402 - DNA, 25 bp, Artificial
  probe
  misc_feature (1)..(25): SEQ ID NO: 4944; WAN024AZK_at; Start 435; Stop 459
ggctgcacttttgctgatagtagga

SEQ ID NO: 70403 - DNA, 25 bp, Artificial
  probe
  misc_feature (1)..(25): SEQ ID NO: 4944; WAN024AZK_at; Start 226; Stop 250
acagctatcttctcattcccagttg

SEQ ID NO: 70404 - DNA, 25 bp, Artificial
  probe
  misc_feature (1)..(25): SEQ ID NO: 4944; WAN024AZK_at; Start 192; Stop 216
tcttatctccatgactgcattttcc

SEQ ID NO: 70405 - DNA, 25 bp, Artificial
  probe
  misc_feature (1)..(25): SEQ ID NO: 4944; WAN024AZK_at; Start 405; Stop 429
tgtggacatgtctcttggaaattgg

SEQ ID NO: 70406 - DNA, 25 bp, Artificial
  probe
  misc_feature (1)..(25): SEQ ID NO: 4944; WAN024AZK_at; Start 420; Stop 444
tggaaattggattggggctgcactt

SEQ ID NO: 70407 - DNA, 25 bp, Artificial
  probe
  misc_feature (1)..(25): SEQ ID NO: 4944; WAN024AZK_at; Start 439; Stop 463
gcacttttgctgatagtaggaagta

SEQ ID NO: 70408 - DNA, 25 bp, Artificial
  probe
  misc_feature (1)..(25): SEQ ID NO: 4944; WAN024AZK_at; Start 401; Stop 425
gaggtgtggacatgtctcttggaaa

SEQ ID NO: 70409 - DNA, 25 bp, Artificial
  probe
  misc_feature (1)..(25): SEQ ID NO: 4944; WAN024AZK_at; Start 223; Stop 247
tcaacagctatcttctcattcccag

SEQ ID NO: 70410 - DNA, 25 bp, Artificial
  probe
  misc_feature (1)..(25): SEQ ID NO: 1671; WAN024AZL_at; Start 92; Stop 116
ccagcacaagtaccttacgtcgtga

SEQ ID NO: 70411 - DNA, 25 bp, Artificial
  probe
  misc_feature (1)..(25): SEQ ID NO: 1671; WAN024AZL_at; Start 77; Stop 101
cagaaatcactttctccagcacaag

SEQ ID NO: 70412 - DNA, 25 bp, Artificial
  probe
  misc_feature (1)..(25): SEQ ID NO: 1671; WAN024AZL_at; Start 415; Stop 439
aaaatctttatcacatctggcgagg

SEQ ID NO: 70413 - DNA, 25 bp, Artificial
  probe
  misc_feature (1)..(25): SEQ ID NO: 1671; WAN024AZL_at; Start 144; Stop 168
tatcaaaagaaagcacggatacgtg

SEQ ID NO: 70414 - DNA, 25 bp, Artificial
  probe
  misc_feature (1)..(25): SEQ ID NO: 1671; WAN024AZL_at; Start 630; Stop 654
tagttctaaattttacaagactgga

SEQ ID NO: 70415 - DNA, 25 bp, Artificial
  probe
  misc_feature (1)..(25): SEQ ID NO: 1671; WAN024AZL_at; Start 52; Stop 76
aaaagaattgccgtaaaagagctgg

SEQ ID NO: 70416 - DNA, 25 bp, Artificial
  probe
  misc_feature (1)..(25): SEQ ID NO: 1671; WAN024AZL_at; Start 425; Stop 449
tcacatctggcgaggtcaaacatca

SEQ ID NO: 70417 - DNA, 25 bp, Artificial
  probe
  misc_feature (1)..(25): SEQ ID NO: 1671; WAN024AZL_at; Start 188; Stop 212
caattgaactttctcatcaaatacg

SEQ ID NO: 70418 - DNA, 25 bp, Artificial
  probe
  misc_feature (1)..(25): SEQ ID NO: 1671; WAN024AZL_at; Start 747; Stop 771
tggagaatgggtttctgatattcaa

SEQ ID NO: 70419 - DNA, 25 bp, Artificial
  probe
  misc_feature (1)..(25): SEQ ID NO: 1671; WAN024AZL_at; Start 135; Stop 159
tcaaggtcttatcaaaagaaagcac

SEQ ID NO: 70420 - DNA, 25 bp, Artificial
  probe
  misc_feature (1)..(25): SEQ ID NO: 1671; WAN024AZL_at; Start 223; Stop 247
agtactaggcaaaaaagactaatcg

SEQ ID NO: 70421 - DNA, 25 bp, Artificial
  probe
  misc_feature (1)..(25): SEQ ID NO: 1671; WAN024AZL_at; Start 249; Stop 273
tagtctcgctaaagactttattcgg

SEQ ID NO: 70422 - DNA, 25 bp, Artificial
  probe
  misc_feature (1)..(25): SEQ ID NO: 1671; WAN024AZL_at; Start 550; Stop 574
gtttatgaagcttctctcagccaag

SEQ ID NO: 70423 - DNA, 25 bp, Artificial
  probe
  misc_feature (1)..(25): SEQ ID NO: 1671; WAN024AZL_at; Start 462; Stop 486
ggtcaactatgataaggaaaattct

SEQ ID NO: 70424 - DNA, 25 bp, Artificial
  probe
  misc_feature (1)..(25): SEQ ID NO: 1671; WAN024AZL_at; Start 379; Stop 403
gcacaaaccctatctgaaactgtta

SEQ ID NO: 70425 - DNA, 25 bp, Artificial
  probe
  misc_feature (1)..(25): SEQ ID NO: 1671; WAN024AZL_at; Start 604; Stop 628
gcccatgaaaccatcttactgattg

SEQ ID NO: 70426 - DNA, 25 bp, Artificial
  probe
  misc_feature (1)..(25): SEQ ID NO: 1671; WAN024AZL_at; Start 565; Stop 589
ctcagccaagctatttcaaaaaaga

SEQ ID NO: 70427 - DNA, 25 bp, Artificial
  probe
  misc_feature (1)..(25): SEQ ID NO: 1671; WAN024AZL_at; Start 614; Stop 638
ccatcttactgattgatagttctaa

SEQ ID NO: 70428 - DNA, 25 bp, Artificial
  probe
  misc_feature (1)..(25): SEQ ID NO: 1671; WAN024AZL_at; Start 2; Stop 26
tgataaaagatgaacgtgtacttga

SEQ ID NO: 70429 - DNA, 25 bp, Artificial
  probe
  misc_feature (1)..(25): SEQ ID NO: 1671; WAN024AZL_at; Start 152; Stop 176
gaaagcacggatacgtgaccctgtc

SEQ ID NO: 70430 - DNA, 25 bp, Artificial
  probe
  misc_feature (1)..(25): SEQ ID NO: 1671; WAN024AZL_at; Start 432; Stop 456
tggcgaggtcaaacatcaatcctgt

SEQ ID NO: 70431 - DNA, 25 bp, Artificial
  probe
  misc_feature (1)..(25): SEQ ID NO: 1671; WAN024AZL_at; Start 537; Stop 561
tgatgaccaatatgtttatgaagct

SEQ ID NO: 70432 - DNA, 25 bp, Artificial
  probe
  misc_feature (1)..(25): SEQ ID NO: 1671; WAN024AZL_at; Start 173; Stop 197
tgtcctctatgaacacaattgaact

SEQ ID NO: 70433 - DNA, 25 bp, Artificial
  probe
  misc_feature (1)..(25): SEQ ID NO: 1671; WAN024AZL_at; Start 508; Stop 532
gatttagcattttgttcagcaagag

SEQ ID NO: 70434 - DNA, 25 bp, Artificial
  probe
  misc_feature (1)..(25): SEQ ID NO: 1671; WAN024AZL_at; Start 63; Stop 87
cgtaaaagagctggcagaaatcact

SEQ ID NO: 70435 - DNA, 25 bp, Artificial
  probe
  misc_feature (1)..(25): SEQ ID NO: 1671; WAN024AZL_at; Start 322; Stop 346
tgtccctatctttctgaacttgata

SEQ ID NO: 70436 - DNA, 25 bp, Artificial
  probe
  misc_feature (1)..(25): SEQ ID NO: 1671; WAN024AZL_at; Start 13; Stop 37
gaacgtgtacttgaattgattgaaa

SEQ ID NO: 70437 - DNA, 25 bp, Artificial
  probe
  misc_feature (1)..(25): SEQ ID NO: 1671; WAN024AZL_at; Start 523; Stop 547
tcagcaagaggtattgatgaccaat

SEQ ID NO: 70438 - DNA, 25 bp, Artificial
  probe
  misc_feature (1)..(25): SEQ ID NO: 1671; WAN024AZL_at; Start 163; Stop 187
tacgtgaccctgtcctctatgaaca

SEQ ID NO: 70439 - DNA, 25 bp, Artificial
  probe
  misc_feature (1)..(25): SEQ ID NO: 1671; WAN024AZL_at; Start 360; Stop 384
tacaaatggtttacatactgcacaa

SEQ ID NO: 70440 - DNA, 25 bp, Artificial
  probe
  misc_feature (1)..(25): SEQ ID NO: 1671; WAN024AZL_at; Start 394; Stop 418
gaaactgttaaagatagctccaaaa

SEQ ID NO: 70441 - DNA, 25 bp, Artificial
  probe
  misc_feature (1)..(25): SEQ ID NO: 1671; WAN024AZL_at; Start 107; Stop 131
tacgtcgtgatttaattttcttaga

SEQ ID NO: 70442 - DNA, 25 bp, Artificial
  probe
  misc_feature (1)..(25): SEQ ID NO: 1671; WAN024AZL_at; Start 591; Stop 615
tattattgacaaagcccatgaaacc

SEQ ID NO: 70443 - DNA, 25 bp, Artificial
  probe
  misc_feature (1)..(25): SEQ ID NO: 1671; WAN024AZL_at; Start 371; Stop 395
tacatactgcacaaaccctatctga

SEQ ID NO: 70444 - DNA, 25 bp, Artificial
  probe
  misc_feature (1)..(25): SEQ ID NO: 6726; WAN024AZM_at; Start 450; Stop 474
gatacccctagttagtttgacaaca

SEQ ID NO: 70445 - DNA, 25 bp, Artificial
  probe
  misc_feature (1)..(25): SEQ ID NO: 6726; WAN024AZM_at; Start 374; Stop 398
gcttgattatcccagacctgcctca

SEQ ID NO: 70446 - DNA, 25 bp, Artificial
  probe
  misc_feature (1)..(25): SEQ ID NO: 6726; WAN024AZM_at; Start 160; Stop 184
ggcattcccttttcagatcctgtcg

SEQ ID NO: 70447 - DNA, 25 bp, Artificial
  probe
  misc_feature (1)..(25): SEQ ID NO: 6726; WAN024AZM_at; Start 17; Stop 41
cagaaaaattgaatgctataaaagc

SEQ ID NO: 70448 - DNA, 25 bp, Artificial
  probe
  misc_feature (1)..(25): SEQ ID NO: 6726; WAN024AZM_at; Start 60; Stop 84
cgttccttatatcatggctggtgac

SEQ ID NO: 70449 - DNA, 25 bp, Artificial
  probe
  misc_feature (1)..(25): SEQ ID NO: 6726; WAN024AZM_at; Start 649; Stop 673
caagctgatgtagaacgctttaatg

SEQ ID NO: 70450 - DNA, 25 bp, Artificial
  probe
  misc_feature (1)..(25): SEQ ID NO: 6726; WAN024AZM_at; Start 490; Stop 514
aaagagttgattgaaggagcagaag

SEQ ID NO: 70451 - DNA, 25 bp, Artificial
  probe
  misc_feature (1)..(25): SEQ ID NO: 6726; WAN024AZM_at; Start 511; Stop 535
gaaggatttgtctatgctgttgcca

SEQ ID NO: 70452 - DNA, 25 bp, Artificial
  probe
  misc_feature (1)..(25): SEQ ID NO: 6726; WAN024AZM_at; Start 267; Stop 291
aaccattgaaacagaggttccgctg

SEQ ID NO: 70453 - DNA, 25 bp, Artificial
  probe
  misc_feature (1)..(25): SEQ ID NO: 6726; WAN024AZM_at; Start 643; Stop 667
tctagtcaagctgatgtagaacgct

SEQ ID NO: 70454 - DNA, 25 bp, Artificial
  probe
  misc_feature (1)..(25): SEQ ID NO: 6726; WAN024AZM_at; Start 498; Stop 522
gattgaaggagcagaaggatttgtc

SEQ ID NO: 70455 - DNA, 25 bp, Artificial
  probe
  misc_feature (1)..(25): SEQ ID NO: 6726; WAN024AZM_at; Start 462; Stop 486
tagtttgacaacaggacttgagcgc

SEQ ID NO: 70456 - DNA, 25 bp, Artificial
  probe
  misc_feature (1)..(25): SEQ ID NO: 6726; WAN024AZM_at; Start 582; Stop 606
taagcacttggcacaattgcatcaa

SEQ ID NO: 70457 - DNA, 25 bp, Artificial
  probe
  misc_feature (1)..(25): SEQ ID NO: 6726; WAN024AZM_at; Start 274; Stop 298
gaaacagaggttccgctggtcatca

SEQ ID NO: 70458 - DNA, 25 bp, Artificial
  probe
  misc_feature (1)..(25): SEQ ID NO: 6726; WAN024AZM_at; Start 351; Stop 375
tttggtagatacagcggttaagggc

SEQ ID NO: 70459 - DNA, 25 bp, Artificial
  probe
  misc_feature (1)..(25): SEQ ID NO: 6726; WAN024AZM_at; Start 94; Stop 118
ggtttggacggtcttgctgaaacaa

SEQ ID NO: 70460 - DNA, 25 bp, Artificial
  probe
  misc_feature (1)..(25): SEQ ID NO: 6726; WAN024AZM_at; Start 638; Stop 662
gggtatctagtcaagctgatgtaga

SEQ ID NO: 70461 - DNA, 25 bp, Artificial
  probe
  misc_feature (1)..(25): SEQ ID NO: 6726; WAN024AZM_at; Start 162; Stop 186
cattcccttttcagatcctgtcgca

SEQ ID NO: 70462 - DNA, 25 bp, Artificial
  probe
  misc_feature (1)..(25): SEQ ID NO: 6726; WAN024AZM_at; Start 100; Stop 124
gacggtcttgctgaaacaattcact

SEQ ID NO: 70463 - DNA, 25 bp, Artificial
  probe
  misc_feature (1)..(25): SEQ ID NO: 6726; WAN024AZM_at; Start 369; Stop 393
taagggcttgattatcccagacctg

SEQ ID NO: 70464 - DNA, 25 bp, Artificial
  probe
  misc_feature (1)..(25): SEQ ID NO: 6726; WAN024AZM_at; Start 519; Stop 543
tgtctatgctgttgccatcaatggg

SEQ ID NO: 70465 - DNA, 25 bp, Artificial
  probe
  misc_feature (1)..(25): SEQ ID NO: 6726; WAN024AZM_at; Start 445; Stop 469
gccttgatacccctagttagtttga

SEQ ID NO: 70466 - DNA, 25 bp, Artificial
  probe
  misc_feature (1)..(25): SEQ ID NO: 6726; WAN024AZM_at; Start 570; Stop 594
cgcagatttggataagcacttggca

SEQ ID NO: 70467 - DNA, 25 bp, Artificial
  probe
  misc_feature (1)..(25): SEQ ID NO: 6726; WAN024AZM_at; Start 31; Stop 55
gctataaaagcaactggaaaaggaa

SEQ ID NO: 70468 - DNA, 25 bp, Artificial
  probe
  misc_feature (1)..(25): SEQ ID NO: 6726; WAN024AZM_at; Start 591; Stop 615
ggcacaattgcatcaagtggctgac

SEQ ID NO: 70469 - DNA, 25 bp, Artificial
  probe
  misc_feature (1)..(25): SEQ ID NO: 6726; WAN024AZM_at; Start 578; Stop 602
tggataagcacttggcacaattgca

SEQ ID NO: 70470 - DNA, 25 bp, Artificial
  probe
  misc_feature (1)..(25): SEQ ID NO: 6726; WAN024AZM_at; Start 342; Stop 366
tgtcaaagatttggtagatacagcg

SEQ ID NO: 70471 - DNA, 25 bp, Artificial
  probe
  misc_feature (1)..(25): SEQ ID NO: 6726; WAN024AZM_at; Start 109; Stop 133
gctgaaacaattcactttttagaag

SEQ ID NO: 70472 - DNA, 25 bp, Artificial
  probe
  misc_feature (1)..(25): SEQ ID NO: 6726; WAN024AZM_at; Start 597; Stop 621
attgcatcaagtggctgacatccca

SEQ ID NO: 70473 - DNA, 25 bp, Artificial
  probe
  misc_feature (1)..(25): SEQ ID NO: 6726; WAN024AZM_at; Start 433; Stop 457
gatacagacattgccttgatacccc

SEQ ID NO: 70474 - DNA, 25 bp, Artificial
  probe
  misc_feature (1)..(25): SEQ ID NO: 6726; WAN024AZM_at; Start 360; Stop 384
tacagcggttaagggcttgattatc

SEQ ID NO: 70475 - DNA, 25 bp, Artificial
  probe
  misc_feature (1)..(25): SEQ ID NO: 6726; WAN024AZM_at; Start 439; Stop 463
gacattgccttgatacccctagtta

SEQ ID NO: 70476 - DNA, 25 bp, Artificial
  probe
  misc_feature (1)..(25): SEQ ID NO: 6726; WAN024AZM_at; Start 421; Stop 445
ccatttttggcagatacagacattg

SEQ ID NO: 70477 - DNA, 25 bp, Artificial
  probe
  misc_feature (1)..(25): SEQ ID NO: 6726; WAN024AZM_at; Start 465; Stop 489
tttgacaacaggacttgagcgccag

SEQ ID NO: 70478 - DNA, 25 bp, Artificial
  probe
  misc_feature (1)..(25): SEQ ID NO: 2011; WAN024AZN_at; Start 342; Stop 366
tgtcaaagatctggctgatacagct

SEQ ID NO: 70479 - DNA, 25 bp, Artificial
  probe
  misc_feature (1)..(25): SEQ ID NO: 2011; WAN024AZN_at; Start 461; Stop 485
taagcttgaccacaggaattgagcg

SEQ ID NO: 70480 - DNA, 25 bp, Artificial
  probe
  misc_feature (1)..(25): SEQ ID NO: 2011; WAN024AZN_at; Start 707; Stop 731
tagtaaaagctctccaccaaggaga

SEQ ID NO: 70481 - DNA, 25 bp, Artificial
  probe
  misc_feature (1)..(25): SEQ ID NO: 2011; WAN024AZN_at; Start 446; Stop 470
ccttgattcctttagtaagcttgac

SEQ ID NO: 70482 - DNA, 25 bp, Artificial
  probe
  misc_feature (1)..(25): SEQ ID NO: 2011; WAN024AZN_at; Start 687; Stop 711
tgttatcgtcggttcgaaaatagta

SEQ ID NO: 70483 - DNA, 25 bp, Artificial
  probe
  misc_feature (1)..(25): SEQ ID NO: 2011; WAN024AZN_at; Start 672; Stop 696
tgcggtgtcagatggtgttatcgtc

SEQ ID NO: 70484 - DNA, 25 bp, Artificial
  probe
  misc_feature (1)..(25): SEQ ID NO: 2011; WAN024AZN_at; Start 698; Stop 722
gttcgaaaatagtaaaagctctcca

SEQ ID NO: 70485 - DNA, 25 bp, Artificial
  probe
  misc_feature (1)..(25): SEQ ID NO: 2011; WAN024AZN_at; Start 680; Stop 704
cagatggtgttatcgtcggttcgaa

SEQ ID NO: 70486 - DNA, 25 bp, Artificial
  probe
  misc_feature (1)..(25): SEQ ID NO: 2011; WAN024AZN_at; Start 719; Stop 743
tccaccaaggagagccgattcagga

SEQ ID NO: 70487 - DNA, 25 bp, Artificial
  probe
  misc_feature (1)..(25): SEQ ID NO: 2011; WAN024AZN_at; Start 579; Stop 603
ggacaagcacttggcgcaacttcat

SEQ ID NO: 70488 - DNA, 25 bp, Artificial
  probe
  misc_feature (1)..(25): SEQ ID NO: 2011; WAN024AZN_at; Start 465; Stop 489
cttgaccacaggaattgagcgccag

SEQ ID NO: 70489 - DNA, 25 bp, Artificial
  probe
  misc_feature (1)..(25): SEQ ID NO: 2011; WAN024AZN_at; Start 701; Stop 725
cgaaaatagtaaaagctctccacca

SEQ ID NO: 70490 - DNA, 25 bp, Artificial
  probe
  misc_feature (1)..(25): SEQ ID NO: 2011; WAN024AZN_at; Start 596; Stop 620
aacttcatcaagtggccgacatccc

SEQ ID NO: 70491 - DNA, 25 bp, Artificial
  probe
  misc_feature (1)..(25): SEQ ID NO: 2011; WAN024AZN_at; Start 454; Stop 478
cctttagtaagcttgaccacaggaa

SEQ ID NO: 70492 - DNA, 25 bp, Artificial
  probe
  misc_feature (1)..(25): SEQ ID NO: 2011; WAN024AZN_at; Start 704; Stop 728
aaatagtaaaagctctccaccaagg

SEQ ID NO: 70493 - DNA, 25 bp, Artificial
  probe
  misc_feature (1)..(25): SEQ ID NO: 2011; WAN024AZN_at; Start 337; Stop 361
aactttgtcaaagatctggctgata

SEQ ID NO: 70494 - DNA, 25 bp, Artificial
  probe
  misc_feature (1)..(25): SEQ ID NO: 2011; WAN024AZN_at; Start 717; Stop 741
tctccaccaaggagagccgattcag

SEQ ID NO: 70495 - DNA, 25 bp, Artificial
  probe
  misc_feature (1)..(25): SEQ ID NO: 2011; WAN024AZN_at; Start 669; Stop 693
caatgcggtgtcagatggtgttatc

SEQ ID NO: 70496 - DNA, 25 bp, Artificial
  probe
  misc_feature (1)..(25): SEQ ID NO: 2011; WAN024AZN_at; Start 570; Stop 594
tgcagatttggacaagcacttggcg

SEQ ID NO: 70497 - DNA, 25 bp, Artificial
  probe
  misc_feature (1)..(25): SEQ ID NO: 2011; WAN024AZN_at; Start 592; Stop 616
gcgcaacttcatcaagtggccgaca

SEQ ID NO: 70498 - DNA, 25 bp, Artificial
  probe
  misc_feature (1)..(25): SEQ ID NO: 2011; WAN024AZN_at; Start 574; Stop 598
gatttggacaagcacttggcgcaac

SEQ ID NO: 70499 - DNA, 25 bp, Artificial
  probe
  misc_feature (1)..(25): SEQ ID NO: 2011; WAN024AZN_at; Start 677; Stop 701
tgtcagatggtgttatcgtcggttc

SEQ ID NO: 70500 - DNA, 25 bp, Artificial
  probe
  misc_feature (1)..(25): SEQ ID NO: 2011; WAN024AZN_at; Start 589; Stop 613
ttggcgcaacttcatcaagtggccg

SEQ ID NO: 70501 - DNA, 25 bp, Artificial
  probe
  misc_feature (1)..(25): SEQ ID NO: 2011; WAN024AZN_at; Start 754; Stop 778
caagcagtagcttaccaaaaataac

SEQ ID NO: 70502 - DNA, 25 bp, Artificial
  probe
  misc_feature (1)..(25): SEQ ID NO: 2011; WAN024AZN_at; Start 450; Stop 474
gattcctttagtaagcttgaccaca

SEQ ID NO: 70503 - DNA, 25 bp, Artificial
  probe
  misc_feature (1)..(25): SEQ ID NO: 2011; WAN024AZN_at; Start 665; Stop 689
gcttcaatgcggtgtcagatggtgt

SEQ ID NO: 70504 - DNA, 25 bp, Artificial
  probe
  misc_feature (1)..(25): SEQ ID NO: 2011; WAN024AZN_at; Start 345; Stop 369
caaagatctggctgatacagctgtg

SEQ ID NO: 70505 - DNA, 25 bp, Artificial
  probe
  misc_feature (1)..(25): SEQ ID NO: 2011; WAN024AZN_at; Start 347; Stop 371
aagatctggctgatacagctgtgaa

SEQ ID NO: 70506 - DNA, 25 bp, Artificial
  probe
  misc_feature (1)..(25): SEQ ID NO: 2011; WAN024AZN_at; Start 661; Stop 685
gaacgcttcaatgcggtgtcagatg

SEQ ID NO: 70507 - DNA, 25 bp, Artificial
  probe
  misc_feature (1)..(25): SEQ ID NO: 2011; WAN024AZN_at; Start 162; Stop 186
tattcccttttcagaccctgttgca

SEQ ID NO: 70508 - DNA, 25 bp, Artificial
  probe
  misc_feature (1)..(25): SEQ ID NO: 2011; WAN024AZN_at; Start 457; Stop 481
ttagtaagcttgaccacaggaattg

SEQ ID NO: 70509 - DNA, 25 bp, Artificial
  probe
  misc_feature (1)..(25): SEQ ID NO: 2011; WAN024AZN_at; Start 658; Stop 682
ctggaacgcttcaatgcggtgtcag

SEQ ID NO: 70510 - DNA, 25 bp, Artificial
  probe
  misc_feature (1)..(25): SEQ ID NO: 2011; WAN024AZN_at; Start 583; Stop 607
aagcacttggcgcaacttcatcaag

SEQ ID NO: 70511 - DNA, 25 bp, Artificial
  probe
  misc_feature (1)..(25): SEQ ID NO: 2011; WAN024AZN_at; Start 757; Stop 781
gcagtagcttaccaaaaataactaa

SEQ ID NO: 70512 - DNA, 25 bp, Artificial
  probe
  misc_feature (1)..(25): SEQ ID NO: 7419; WAN024AZO_x_at; Start 1; Stop 25
ttgaactacaagtcccccagagaag

SEQ ID NO: 70513 - DNA, 25 bp, Artificial
  probe
  misc_feature (1)..(25): SEQ ID NO: 7419; WAN024AZO_x_at; Start 30; Stop 54
ctggatgactaacttgaacttgaaa

SEQ ID NO: 70514 - DNA, 25 bp, Artificial
  probe
  misc_feature (1)..(25): SEQ ID NO: 7419; WAN024AZO_x_at; Start 5; Stop 29
actacaagtcccccagagaagactt

SEQ ID NO: 70515 - DNA, 25 bp, Artificial
  probe
  misc_feature (1)..(25): SEQ ID NO: 7419; WAN024AZO_x_at; Start 50; Stop 74
tgaaatttagcaataatctaactaa

SEQ ID NO: 70516 - DNA, 25 bp, Artificial
  probe
  misc_feature (1)..(25): SEQ ID NO: 7419; WAN024AZO_x_at; Start 8; Stop 32
acaagtcccccagagaagacttctg

SEQ ID NO: 70517 - DNA, 25 bp, Artificial
  probe
  misc_feature (1)..(25): SEQ ID NO: 7419; WAN024AZO_x_at; Start 26; Stop 50
acttctggatgactaacttgaactt

SEQ ID NO: 70518 - DNA, 25 bp, Artificial
  probe
  misc_feature (1)..(25): SEQ ID NO: 7419; WAN024AZO_x_at; Start 4; Stop 28
aactacaagtcccccagagaagact

SEQ ID NO: 70519 - DNA, 25 bp, Artificial
  probe
  misc_feature (1)..(25): SEQ ID NO: 7419; WAN024AZO_x_at; Start 48; Stop 72
cttgaaatttagcaataatctaact

SEQ ID NO: 70520 - DNA, 25 bp, Artificial
  probe
  misc_feature (1)..(25): SEQ ID NO: 7419; WAN024AZO_x_at; Start 28; Stop 52
ttctggatgactaacttgaacttga

SEQ ID NO: 70521 - DNA, 25 bp, Artificial
  probe
  misc_feature (1)..(25): SEQ ID NO: 7419; WAN024AZO_x_at; Start 11; Stop 35
agtcccccagagaagacttctggat

SEQ ID NO: 70522 - DNA, 25 bp, Artificial
  probe
  misc_feature (1)..(25): SEQ ID NO: 7419; WAN024AZO_x_at; Start 29; Stop 53
tctggatgactaacttgaacttgaa

SEQ ID NO: 70523 - DNA, 25 bp, Artificial
  probe
  misc_feature (1)..(25): SEQ ID NO: 7419; WAN024AZO_x_at; Start 10; Stop 34
aagtcccccagagaagacttctgga

SEQ ID NO: 70524 - DNA, 25 bp, Artificial
  probe
  misc_feature (1)..(25): SEQ ID NO: 7419; WAN024AZO_x_at; Start 49; Stop 73
ttgaaatttagcaataatctaacta

SEQ ID NO: 70525 - DNA, 25 bp, Artificial
  probe
  misc_feature (1)..(25): SEQ ID NO: 7419; WAN024AZO_x_at; Start 24; Stop 48
agacttctggatgactaacttgaac

SEQ ID NO: 70526 - DNA, 25 bp, Artificial
  probe
  misc_feature (1)..(25): SEQ ID NO: 7419; WAN024AZO_x_at; Start 32; Stop 56
ggatgactaacttgaacttgaaatt

SEQ ID NO: 70527 - DNA, 25 bp, Artificial
  probe
  misc_feature (1)..(25): SEQ ID NO: 7419; WAN024AZO_x_at; Start 6; Stop 30
ctacaagtcccccagagaagacttc

SEQ ID NO: 70528 - DNA, 25 bp, Artificial
  probe
  misc_feature (1)..(25): SEQ ID NO: 7419; WAN024AZO_x_at; Start 17; Stop 41
ccagagaagacttctggatgactaa

SEQ ID NO: 70529 - DNA, 25 bp, Artificial
  probe
  misc_feature (1)..(25): SEQ ID NO: 7419; WAN024AZO_x_at; Start 7; Stop 31
tacaagtcccccagagaagacttct

SEQ ID NO: 70530 - DNA, 25 bp, Artificial
  probe
  misc_feature (1)..(25): SEQ ID NO: 7419; WAN024AZO_x_at; Start 21; Stop 45
agaagacttctggatgactaacttg

SEQ ID NO: 70531 - DNA, 25 bp, Artificial
  probe
  misc_feature (1)..(25): SEQ ID NO: 7419; WAN024AZO_x_at; Start 25; Stop 49
gacttctggatgactaacttgaact

SEQ ID NO: 70532 - DNA, 25 bp, Artificial
  probe
  misc_feature (1)..(25): SEQ ID NO: 7419; WAN024AZO_x_at; Start 51; Stop 75
gaaatttagcaataatctaactaat

SEQ ID NO: 70533 - DNA, 25 bp, Artificial
  probe
  misc_feature (1)..(25): SEQ ID NO: 7419; WAN024AZO_x_at; Start 2; Stop 26
tgaactacaagtcccccagagaaga

SEQ ID NO: 70534 - DNA, 25 bp, Artificial
  probe
  misc_feature (1)..(25): SEQ ID NO: 7419; WAN024AZO_x_at; Start 16; Stop 40
cccagagaagacttctggatgacta

SEQ ID NO: 70535 - DNA, 25 bp, Artificial
  probe
  misc_feature (1)..(25): SEQ ID NO: 7419; WAN024AZO_x_at; Start 18; Stop 42
cagagaagacttctggatgactaac

SEQ ID NO: 70536 - DNA, 25 bp, Artificial
  probe
  misc_feature (1)..(25): SEQ ID NO: 7419; WAN024AZO_x_at; Start 3; Stop 27
gaactacaagtcccccagagaagac

SEQ ID NO: 70537 - DNA, 25 bp, Artificial
  probe
  misc_feature (1)..(25): SEQ ID NO: 7419; WAN024AZO_x_at; Start 9; Stop 33
caagtcccccagagaagacttctgg

SEQ ID NO: 70538 - DNA, 25 bp, Artificial
  probe
  misc_feature (1)..(25): SEQ ID NO: 7419; WAN024AZO_x_at; Start 12; Stop 36
gtcccccagagaagacttctggatg

SEQ ID NO: 70539 - DNA, 25 bp, Artificial
  probe
  misc_feature (1)..(25): SEQ ID NO: 7419; WAN024AZO_x_at; Start 20; Stop 44
gagaagacttctggatgactaactt

SEQ ID NO: 70540 - DNA, 25 bp, Artificial
  probe
  misc_feature (1)..(25): SEQ ID NO: 7419; WAN024AZO_x_at; Start 31; Stop 55
tggatgactaacttgaacttgaaat

SEQ ID NO: 70541 - DNA, 25 bp, Artificial
  probe
  misc_feature (1)..(25): SEQ ID NO: 7419; WAN024AZO_x_at; Start 23; Stop 47
aagacttctggatgactaacttgaa

SEQ ID NO: 70542 - DNA, 25 bp, Artificial
  probe
  misc_feature (1)..(25): SEQ ID NO: 7419; WAN024AZO_x_at; Start 33; Stop 57
gatgactaacttgaacttgaaattt

SEQ ID NO: 70543 - DNA, 25 bp, Artificial
  probe
  misc_feature (1)..(25): SEQ ID NO: 7419; WAN024AZO_x_at; Start 27; Stop 51
cttctggatgactaacttgaacttg

SEQ ID NO: 70544 - DNA, 25 bp, Artificial
  probe
  misc_feature (1)..(25): SEQ ID NO: 7419; WAN024AZO_x_at; Start 22; Stop 46
gaagacttctggatgactaacttga

SEQ ID NO: 70545 - DNA, 25 bp, Artificial
  probe
  misc_feature (1)..(25): SEQ ID NO: 7419; WAN024AZO_x_at; Start 19; Stop 43
agagaagacttctggatgactaact

SEQ ID NO: 70546 - DNA, 25 bp, Artificial
  probe
  misc_feature (1)..(25): SEQ ID NO: 1450; WAN024AZQ_at; Start 110; Stop 134
tgaaatttagcaaaatggaaataat

SEQ ID NO: 70547 - DNA, 25 bp, Artificial
  probe
  misc_feature (1)..(25): SEQ ID NO: 1450; WAN024AZQ_at; Start 108; Stop 132
cttgaaatttagcaaaatggaaata

SEQ ID NO: 70548 - DNA, 25 bp, Artificial
  probe
  misc_feature (1)..(25): SEQ ID NO: 1450; WAN024AZQ_at; Start 109; Stop 133
ttgaaatttagcaaaatggaaataa

SEQ ID NO: 70549 - DNA, 25 bp, Artificial
  probe
  misc_feature (1)..(25): SEQ ID NO: 1936; WAN024AZR_s_at; Start 11; Stop 35
ctataggatctaatgaaaatcacaa

SEQ ID NO: 70550 - DNA, 25 bp, Artificial
  probe
  misc_feature (1)..(25): SEQ ID NO: 1936; WAN024AZR_s_at; Start 12; Stop 36
tataggatctaatgaaaatcacaac

SEQ ID NO: 70551 - DNA, 25 bp, Artificial
  probe
  misc_feature (1)..(25): SEQ ID NO: 1936; WAN024AZR_s_at; Start 13; Stop 37
ataggatctaatgaaaatcacaaca

SEQ ID NO: 70552 - DNA, 25 bp, Artificial
  probe
  misc_feature (1)..(25): SEQ ID NO: 1936; WAN024AZR_s_at; Start 14; Stop 38
taggatctaatgaaaatcacaacag

SEQ ID NO: 70553 - DNA, 25 bp, Artificial
  probe
  misc_feature (1)..(25): SEQ ID NO: 5244; WAN024AZS_at; Start 111; Stop 135
gagtcctgcattccctatcgataag

SEQ ID NO: 70554 - DNA, 25 bp, Artificial
  probe
  misc_feature (1)..(25): SEQ ID NO: 5244; WAN024AZS_at; Start 113; Stop 137
gtcctgcattccctatcgataagat

SEQ ID NO: 70555 - DNA, 25 bp, Artificial
  probe
  misc_feature (1)..(25): SEQ ID NO: 5244; WAN024AZS_at; Start 119; Stop 143
cattccctatcgataagattatcct

SEQ ID NO: 70556 - DNA, 25 bp, Artificial
  probe
  misc_feature (1)..(25): SEQ ID NO: 5244; WAN024AZS_at; Start 115; Stop 139
cctgcattccctatcgataagatta

SEQ ID NO: 70557 - DNA, 25 bp, Artificial
  probe
  misc_feature (1)..(25): SEQ ID NO: 5244; WAN024AZS_at; Start 105; Stop 129
tggtgtgagtcctgcattccctatc

SEQ ID NO: 70558 - DNA, 25 bp, Artificial
  probe
  misc_feature (1)..(25): SEQ ID NO: 5244; WAN024AZS_at; Start 108; Stop 132
tgtgagtcctgcattccctatcgat

SEQ ID NO: 70559 - DNA, 25 bp, Artificial
  probe
  misc_feature (1)..(25): SEQ ID NO: 5244; WAN024AZS_at; Start 110; Stop 134
tgagtcctgcattccctatcgataa

SEQ ID NO: 70560 - DNA, 25 bp, Artificial
  probe
  misc_feature (1)..(25): SEQ ID NO: 5244; WAN024AZS_at; Start 106; Stop 130
ggtgtgagtcctgcattccctatcg

SEQ ID NO: 70561 - DNA, 25 bp, Artificial
  probe
  misc_feature (1)..(25): SEQ ID NO: 5244; WAN024AZS_at; Start 112; Stop 136
agtcctgcattccctatcgataaga

SEQ ID NO: 70562 - DNA, 25 bp, Artificial
  probe
  misc_feature (1)..(25): SEQ ID NO: 5244; WAN024AZS_at; Start 114; Stop 138
tcctgcattccctatcgataagatt

SEQ ID NO: 70563 - DNA, 25 bp, Artificial
  probe
  misc_feature (1)..(25): SEQ ID NO: 5244; WAN024AZS_at; Start 118; Stop 142
gcattccctatcgataagattatcc

SEQ ID NO: 70564 - DNA, 25 bp, Artificial
  probe
  misc_feature (1)..(25): SEQ ID NO: 5244; WAN024AZS_at; Start 116; Stop 140
ctgcattccctatcgataagattat

SEQ ID NO: 70565 - DNA, 25 bp, Artificial
  probe
  misc_feature (1)..(25): SEQ ID NO: 5244; WAN024AZS_at; Start 107; Stop 131
gtgtgagtcctgcattccctatcga

SEQ ID NO: 70566 - DNA, 25 bp, Artificial
  probe
  misc_feature (1)..(25): SEQ ID NO: 5244; WAN024AZS_at; Start 109; Stop 133
gtgagtcctgcattccctatcgata

SEQ ID NO: 70567 - DNA, 25 bp, Artificial
  probe
  misc_feature (1)..(25): SEQ ID NO: 5244; WAN024AZS_at; Start 117; Stop 141
tgcattccctatcgataagattatc

SEQ ID NO: 70568 - DNA, 25 bp, Artificial
  probe
  misc_feature (1)..(25): SEQ ID NO: 3463; WAN024AZT_at; Start 114; Stop 138
gagtcctgtaatccctattgataag

SEQ ID NO: 70569 - DNA, 25 bp, Artificial
  probe
  misc_feature (1)..(25): SEQ ID NO: 3463; WAN024AZT_at; Start 113; Stop 137
tgagtcctgtaatccctattgataa

SEQ ID NO: 70570 - DNA, 25 bp, Artificial
  probe
  misc_feature (1)..(25): SEQ ID NO: 3463; WAN024AZT_at; Start 118; Stop 142
cctgtaatccctattgataagatta

SEQ ID NO: 70571 - DNA, 25 bp, Artificial
  probe
  misc_feature (1)..(25): SEQ ID NO: 3463; WAN024AZT_at; Start 109; Stop 133
ggtgtgagtcctgtaatccctattg

SEQ ID NO: 70572 - DNA, 25 bp, Artificial
  probe
  misc_feature (1)..(25): SEQ ID NO: 3463; WAN024AZT_at; Start 111; Stop 135
tgtgagtcctgtaatccctattgat

SEQ ID NO: 70573 - DNA, 25 bp, Artificial
  probe
  misc_feature (1)..(25): SEQ ID NO: 3463; WAN024AZT_at; Start 117; Stop 141
tcctgtaatccctattgataagatt

SEQ ID NO: 70574 - DNA, 25 bp, Artificial
  probe
  misc_feature (1)..(25): SEQ ID NO: 3463; WAN024AZT_at; Start 115; Stop 139
agtcctgtaatccctattgataaga

SEQ ID NO: 70575 - DNA, 25 bp, Artificial
  probe
  misc_feature (1)..(25): SEQ ID NO: 3463; WAN024AZT_at; Start 120; Stop 144
tgtaatccctattgataagattatc

SEQ ID NO: 70576 - DNA, 25 bp, Artificial
  probe
  misc_feature (1)..(25): SEQ ID NO: 3463; WAN024AZT_at; Start 138; Stop 162
gattatcctctcaaaaactcaagtc

SEQ ID NO: 70577 - DNA, 25 bp, Artificial
  probe
  misc_feature (1)..(25): SEQ ID NO: 3463; WAN024AZT_at; Start 108; Stop 132
tggtgtgagtcctgtaatccctatt

SEQ ID NO: 70578 - DNA, 25 bp, Artificial
  probe
  misc_feature (1)..(25): SEQ ID NO: 3463; WAN024AZT_at; Start 116; Stop 140
gtcctgtaatccctattgataagat

SEQ ID NO: 70579 - DNA, 25 bp, Artificial
  probe
  misc_feature (1)..(25): SEQ ID NO: 3463; WAN024AZT_at; Start 110; Stop 134
gtgtgagtcctgtaatccctattga

SEQ ID NO: 70580 - DNA, 25 bp, Artificial
  probe
  misc_feature (1)..(25): SEQ ID NO: 3463; WAN024AZT_at; Start 112; Stop 136
gtgagtcctgtaatccctattgata

SEQ ID NO: 70581 - DNA, 25 bp, Artificial
  probe
  misc_feature (1)..(25): SEQ ID NO: 3463; WAN024AZT_at; Start 121; Stop 145
gtaatccctattgataagattatcc

SEQ ID NO: 70582 - DNA, 25 bp, Artificial
  probe
  misc_feature (1)..(25): SEQ ID NO: 3463; WAN024AZT_at; Start 119; Stop 143
ctgtaatccctattgataagattat

SEQ ID NO: 70583 - DNA, 25 bp, Artificial
  probe
  misc_feature (1)..(25): SEQ ID NO: 3463; WAN024AZT_at; Start 122; Stop 146
taatccctattgataagattatcct

SEQ ID NO: 70584 - DNA, 25 bp, Artificial
  probe
  misc_feature (1)..(25): SEQ ID NO: 2801; WAN024AZU_at; Start 42; Stop 66
tccaacaccagctacagaaactgtt

SEQ ID NO: 70585 - DNA, 25 bp, Artificial
  probe
  misc_feature (1)..(25): SEQ ID NO: 2801; WAN024AZU_at; Start 44; Stop 68
caacaccagctacagaaactgttga

SEQ ID NO: 70586 - DNA, 25 bp, Artificial
  probe
  misc_feature (1)..(25): SEQ ID NO: 2801; WAN024AZU_at; Start 46; Stop 70
acaccagctacagaaactgttgatt

SEQ ID NO: 70587 - DNA, 25 bp, Artificial
  probe
  misc_feature (1)..(25): SEQ ID NO: 2801; WAN024AZU_at; Start 41; Stop 65
gtccaacaccagctacagaaactgt

SEQ ID NO: 70588 - DNA, 25 bp, Artificial
  probe
  misc_feature (1)..(25): SEQ ID NO: 2801; WAN024AZU_at; Start 48; Stop 72
accagctacagaaactgttgattca

SEQ ID NO: 70589 - DNA, 25 bp, Artificial
  probe
  misc_feature (1)..(25): SEQ ID NO: 2801; WAN024AZU_at; Start 47; Stop 71
caccagctacagaaactgttgattc

SEQ ID NO: 70590 - DNA, 25 bp, Artificial
  probe
  misc_feature (1)..(25): SEQ ID NO: 2801; WAN024AZU_at; Start 43; Stop 67
ccaacaccagctacagaaactgttg

SEQ ID NO: 70591 - DNA, 25 bp, Artificial
  probe
  misc_feature (1)..(25): SEQ ID NO: 2801; WAN024AZU_at; Start 39; Stop 63
aggtccaacaccagctacagaaact

SEQ ID NO: 70592 - DNA, 25 bp, Artificial
  probe
  misc_feature (1)..(25): SEQ ID NO: 2801; WAN024AZU_at; Start 40; Stop 64
ggtccaacaccagctacagaaactg

SEQ ID NO: 70593 - DNA, 25 bp, Artificial
  probe
  misc_feature (1)..(25): SEQ ID NO: 2801; WAN024AZU_at; Start 45; Stop 69
aacaccagctacagaaactgttgat

SEQ ID NO: 70594 - DNA, 25 bp, Artificial
  probe
  misc_feature (1)..(25): SEQ ID NO: 2896; WAN024AZV_s_at; Start 12; Stop 36
atcaactaatttctcaagtccccta

SEQ ID NO: 70595 - DNA, 25 bp, Artificial
  probe
  misc_feature (1)..(25): SEQ ID NO: 2896; WAN024AZV_s_at; Start 7; Stop 31
agaaaatcaactaatttctcaagtc

SEQ ID NO: 70596 - DNA, 25 bp, Artificial
  probe
  misc_feature (1)..(25): SEQ ID NO: 2896; WAN024AZV_s_at; Start 23; Stop 47
tctcaagtcccctaccaaccctgaa

SEQ ID NO: 70597 - DNA, 25 bp, Artificial
  probe
  misc_feature (1)..(25): SEQ ID NO: 2896; WAN024AZV_s_at; Start 8; Stop 32
gaaaatcaactaatttctcaagtcc

SEQ ID NO: 70598 - DNA, 25 bp, Artificial
  probe
  misc_feature (1)..(25): SEQ ID NO: 2896; WAN024AZV_s_at; Start 11; Stop 35
aatcaactaatttctcaagtcccct

SEQ ID NO: 70599 - DNA, 25 bp, Artificial
  probe
  misc_feature (1)..(25): SEQ ID NO: 2896; WAN024AZV_s_at; Start 13; Stop 37
tcaactaatttctcaagtcccctac

SEQ ID NO: 70600 - DNA, 25 bp, Artificial
  probe
  misc_feature (1)..(25): SEQ ID NO: 2896; WAN024AZV_s_at; Start 6; Stop 30
gagaaaatcaactaatttctcaagt

SEQ ID NO: 70601 - DNA, 25 bp, Artificial
  probe
  misc_feature (1)..(25): SEQ ID NO: 2896; WAN024AZV_s_at; Start 22; Stop 46
ttctcaagtcccctaccaaccctga

SEQ ID NO: 70602 - DNA, 25 bp, Artificial
  probe
  misc_feature (1)..(25): SEQ ID NO: 7516; WAN024AZW_s_at; Start 62; Stop 86
atctgacctactattggaccttttt

SEQ ID NO: 70603 - DNA, 25 bp, Artificial
  probe
  misc_feature (1)..(25): SEQ ID NO: 7516; WAN024AZW_s_at; Start 99; Stop 123
tgagaatcaagcaatcacgctgtac

SEQ ID NO: 70604 - DNA, 25 bp, Artificial
  probe
  misc_feature (1)..(25): SEQ ID NO: 7516; WAN024AZW_s_at; Start 63; Stop 87
tctgacctactattggacctttttg

SEQ ID NO: 70605 - DNA, 25 bp, Artificial
  probe
  misc_feature (1)..(25): SEQ ID NO: 7516; WAN024AZW_s_at; Start 61; Stop 85
catctgacctactattggacctttt

SEQ ID NO: 70606 - DNA, 25 bp, Artificial
  probe
  misc_feature (1)..(25): SEQ ID NO: 7516; WAN024AZW_s_at; Start 56; Stop 80
atagccatctgacctactattggac

SEQ ID NO: 70607 - DNA, 25 bp, Artificial
  probe
  misc_feature (1)..(25): SEQ ID NO: 7516; WAN024AZW_s_at; Start 59; Stop 83
gccatctgacctactattggacctt

SEQ ID NO: 70608 - DNA, 25 bp, Artificial
  probe
  misc_feature (1)..(25): SEQ ID NO: 7516; WAN024AZW_s_at; Start 101; Stop 125
agaatcaagcaatcacgctgtacca

SEQ ID NO: 70609 - DNA, 25 bp, Artificial
  probe
  misc_feature (1)..(25): SEQ ID NO: 7516; WAN024AZW_s_at; Start 58; Stop 82
agccatctgacctactattggacct

SEQ ID NO: 70610 - DNA, 25 bp, Artificial
  probe
  misc_feature (1)..(25): SEQ ID NO: 7516; WAN024AZW_s_at; Start 100; Stop 124
gagaatcaagcaatcacgctgtacc

SEQ ID NO: 70611 - DNA, 25 bp, Artificial
  probe
  misc_feature (1)..(25): SEQ ID NO: 7516; WAN024AZW_s_at; Start 57; Stop 81
tagccatctgacctactattggacc

SEQ ID NO: 70612 - DNA, 25 bp, Artificial
  probe
  misc_feature (1)..(25): SEQ ID NO: 7516; WAN024AZW_s_at; Start 60; Stop 84
ccatctgacctactattggaccttt

SEQ ID NO: 70613 - DNA, 25 bp, Artificial
  probe
  misc_feature (1)..(25): SEQ ID NO: 7180; WAN024AZX_at; Start 23; Stop 47
aacaagctcttcttcatgcagatga

SEQ ID NO: 70614 - DNA, 25 bp, Artificial
  probe
  misc_feature (1)..(25): SEQ ID NO: 7180; WAN024AZX_at; Start 10; Stop 34
gaaaagttgttagaacaagctcttc

SEQ ID NO: 70615 - DNA, 25 bp, Artificial
  probe
  misc_feature (1)..(25): SEQ ID NO: 7180; WAN024AZX_at; Start 8; Stop 32
gagaaaagttgttagaacaagctct

SEQ ID NO: 70616 - DNA, 25 bp, Artificial
  probe
  misc_feature (1)..(25): SEQ ID NO: 7180; WAN024AZX_at; Start 21; Stop 45
agaacaagctcttcttcatgcagat

SEQ ID NO: 70617 - DNA, 25 bp, Artificial
  probe
  misc_feature (1)..(25): SEQ ID NO: 7180; WAN024AZX_at; Start 7; Stop 31
cgagaaaagttgttagaacaagctc

SEQ ID NO: 70618 - DNA, 25 bp, Artificial
  probe
  misc_feature (1)..(25): SEQ ID NO: 7180; WAN024AZX_at; Start 9; Stop 33
agaaaagttgttagaacaagctctt

SEQ ID NO: 70619 - DNA, 25 bp, Artificial
  probe
  misc_feature (1)..(25): SEQ ID NO: 7180; WAN024AZX_at; Start 15; Stop 39
gttgttagaacaagctcttcttcat

SEQ ID NO: 70620 - DNA, 25 bp, Artificial
  probe
  misc_feature (1)..(25): SEQ ID NO: 7180; WAN024AZX_at; Start 24; Stop 48
acaagctcttcttcatgcagatgaa

SEQ ID NO: 70621 - DNA, 25 bp, Artificial
  probe
  misc_feature (1)..(25): SEQ ID NO: 7180; WAN024AZX_at; Start 22; Stop 46
gaacaagctcttcttcatgcagatg

SEQ ID NO: 70622 - DNA, 25 bp, Artificial
  probe
  misc_feature (1)..(25): SEQ ID NO: 7180; WAN024AZX_at; Start 20; Stop 44
tagaacaagctcttcttcatgcaga

SEQ ID NO: 70623 - DNA, 25 bp, Artificial
  probe
  misc_feature (1)..(25): SEQ ID NO: 7180; WAN024AZX_at; Start 17; Stop 41
tgttagaacaagctcttcttcatgc

SEQ ID NO: 70624 - DNA, 25 bp, Artificial
  probe
  misc_feature (1)..(25): SEQ ID NO: 7180; WAN024AZX_at; Start 12; Stop 36
aaagttgttagaacaagctcttctt

SEQ ID NO: 70625 - DNA, 25 bp, Artificial
  probe
  misc_feature (1)..(25): SEQ ID NO: 7180; WAN024AZX_at; Start 14; Stop 38
agttgttagaacaagctcttcttca

SEQ ID NO: 70626 - DNA, 25 bp, Artificial
  probe
  misc_feature (1)..(25): SEQ ID NO: 7180; WAN024AZX_at; Start 16; Stop 40
ttgttagaacaagctcttcttcatg

SEQ ID NO: 70627 - DNA, 25 bp, Artificial
  probe
  misc_feature (1)..(25): SEQ ID NO: 7180; WAN024AZX_at; Start 19; Stop 43
ttagaacaagctcttcttcatgcag

SEQ ID NO: 70628 - DNA, 25 bp, Artificial
  probe
  misc_feature (1)..(25): SEQ ID NO: 7180; WAN024AZX_at; Start 13; Stop 37
aagttgttagaacaagctcttcttc

SEQ ID NO: 70629 - DNA, 25 bp, Artificial
  probe
  misc_feature (1)..(25): SEQ ID NO: 7180; WAN024AZX_at; Start 11; Stop 35
aaaagttgttagaacaagctcttct

SEQ ID NO: 70630 - DNA, 25 bp, Artificial
  probe
  misc_feature (1)..(25): SEQ ID NO: 7180; WAN024AZX_at; Start 6; Stop 30
acgagaaaagttgttagaacaagct

SEQ ID NO: 70631 - DNA, 25 bp, Artificial
  probe
  misc_feature (1)..(25): SEQ ID NO: 7180; WAN024AZX_at; Start 18; Stop 42
gttagaacaagctcttcttcatgca

SEQ ID NO: 70632 - DNA, 25 bp, Artificial
  probe
  misc_feature (1)..(25): SEQ ID NO: 3864; WAN024AZZ_at; Start 379; Stop 403
tcttatttcaatccattataactaa

SEQ ID NO: 70633 - DNA, 25 bp, Artificial
  probe
  misc_feature (1)..(25): SEQ ID NO: 3864; WAN024AZZ_at; Start 380; Stop 404
cttatttcaatccattataactaat

SEQ ID NO: 70634 - DNA, 25 bp, Artificial
  probe
  misc_feature (1)..(25): SEQ ID NO: 3864; WAN024AZZ_at; Start 378; Stop 402
atcttatttcaatccattataacta

SEQ ID NO: 70635 - DNA, 25 bp, Artificial
  probe
  misc_feature (1)..(25): SEQ ID NO: 3864; WAN024AZZ_at; Start 318; Stop 342
tgggaaagctgagaaacaagggatt

SEQ ID NO: 70636 - DNA, 25 bp, Artificial
  probe
  misc_feature (1)..(25): SEQ ID NO: 3864; WAN024AZZ_at; Start 377; Stop 401
tatcttatttcaatccattataact

SEQ ID NO: 70637 - DNA, 25 bp, Artificial
  probe
  misc_feature (1)..(25): SEQ ID NO: 2141; WAN024B22-5_at; Start 374; Stop 398
atagctatggctcagtttctattat

SEQ ID NO: 70638 - DNA, 25 bp, Artificial
  probe
  misc_feature (1)..(25): SEQ ID NO: 2141; WAN024B22-5_at; Start 373; Stop 397
catagctatggctcagtttctatta

SEQ ID NO: 70639 - DNA, 25 bp, Artificial
  probe
  misc_feature (1)..(25): SEQ ID NO: 2141; WAN024B22-5_at; Start 372; Stop 396
gcatagctatggctcagtttctatt

SEQ ID NO: 70640 - DNA, 25 bp, Artificial
  probe
  misc_feature (1)..(25): SEQ ID NO: 2141; WAN024B22-5_at; Start 375; Stop 399
tagctatggctcagtttctattatc

SEQ ID NO: 70641 - DNA, 25 bp, Artificial
  probe
  misc_feature (1)..(25): SEQ ID NO: 2141; WAN024B22-5_at; Start 376; Stop 400
agctatggctcagtttctattatcg

SEQ ID NO: 70642 - DNA, 25 bp, Artificial
  probe
  misc_feature (1)..(25): SEQ ID NO: 3415; WAN024B23_s_at; Start 328; Stop 352
tcaggtaaagcagagaaacaaggga

SEQ ID NO: 70643 - DNA, 25 bp, Artificial
  probe
  misc_feature (1)..(25): SEQ ID NO: 3415; WAN024B23_s_at; Start 323; Stop 347
ttttgtcaggtaaagcagagaaaca

SEQ ID NO: 70644 - DNA, 25 bp, Artificial
  probe
  misc_feature (1)..(25): SEQ ID NO: 3415; WAN024B23_s_at; Start 1; Stop 25
ctggataagcttgtgaaatctccta

SEQ ID NO: 70645 - DNA, 25 bp, Artificial
  probe
  misc_feature (1)..(25): SEQ ID NO: 3415; WAN024B23_s_at; Start 7; Stop 31
aagcttgtgaaatctcctattccta

SEQ ID NO: 70646 - DNA, 25 bp, Artificial
  probe
  misc_feature (1)..(25): SEQ ID NO: 3415; WAN024B23_s_at; Start 322; Stop 346
tttttgtcaggtaaagcagagaaac

SEQ ID NO: 70647 - DNA, 25 bp, Artificial
  probe
  misc_feature (1)..(25): SEQ ID NO: 3415; WAN024B23_s_at; Start 4; Stop 28
gataagcttgtgaaatctcctattc

SEQ ID NO: 70648 - DNA, 25 bp, Artificial
  probe
  misc_feature (1)..(25): SEQ ID NO: 3415; WAN024B23_s_at; Start 8; Stop 32
agcttgtgaaatctcctattcctaa

SEQ ID NO: 70649 - DNA, 25 bp, Artificial
  probe
  misc_feature (1)..(25): SEQ ID NO: 3415; WAN024B23_s_at; Start 330; Stop 354
aggtaaagcagagaaacaagggatt

SEQ ID NO: 70650 - DNA, 25 bp, Artificial
  probe
  misc_feature (1)..(25): SEQ ID NO: 3415; WAN024B23_s_at; Start 325; Stop 349
ttgtcaggtaaagcagagaaacaag

SEQ ID NO: 70651 - DNA, 25 bp, Artificial
  probe
  misc_feature (1)..(25): SEQ ID NO: 3415; WAN024B23_s_at; Start 10; Stop 34
cttgtgaaatctcctattcctaaag

SEQ ID NO: 70652 - DNA, 25 bp, Artificial
  probe
  misc_feature (1)..(25): SEQ ID NO: 3415; WAN024B23_s_at; Start 6; Stop 30
taagcttgtgaaatctcctattcct

SEQ ID NO: 70653 - DNA, 25 bp, Artificial
  probe
  misc_feature (1)..(25): SEQ ID NO: 3415; WAN024B23_s_at; Start 2; Stop 26
tggataagcttgtgaaatctcctat

SEQ ID NO: 70654 - DNA, 25 bp, Artificial
  probe
  misc_feature (1)..(25): SEQ ID NO: 3415; WAN024B23_s_at; Start 326; Stop 350
tgtcaggtaaagcagagaaacaagg

SEQ ID NO: 70655 - DNA, 25 bp, Artificial
  probe
  misc_feature (1)..(25): SEQ ID NO: 3415; WAN024B23_s_at; Start 9; Stop 33
gcttgtgaaatctcctattcctaaa

SEQ ID NO: 70656 - DNA, 25 bp, Artificial
  probe
  misc_feature (1)..(25): SEQ ID NO: 3415; WAN024B23_s_at; Start 329; Stop 353
caggtaaagcagagaaacaagggat

SEQ ID NO: 70657 - DNA, 25 bp, Artificial
  probe
  misc_feature (1)..(25): SEQ ID NO: 3415; WAN024B23_s_at; Start 5; Stop 29
ataagcttgtgaaatctcctattcc

SEQ ID NO: 70658 - DNA, 25 bp, Artificial
  probe
  misc_feature (1)..(25): SEQ ID NO: 3415; WAN024B23_s_at; Start 324; Stop 348
tttgtcaggtaaagcagagaaacaa

SEQ ID NO: 70659 - DNA, 25 bp, Artificial
  probe
  misc_feature (1)..(25): SEQ ID NO: 3415; WAN024B23_s_at; Start 3; Stop 27
ggataagcttgtgaaatctcctatt

SEQ ID NO: 70660 - DNA, 25 bp, Artificial
  probe
  misc_feature (1)..(25): SEQ ID NO: 3415; WAN024B23_s_at; Start 327; Stop 351
gtcaggtaaagcagagaaacaaggg

SEQ ID NO: 70661 - DNA, 25 bp, Artificial
  probe
  misc_feature (1)..(25): SEQ ID NO: 5334; WAN024B24_at; Start 34; Stop 58
cgtaccatttctcgtacatatctag

SEQ ID NO: 70662 - DNA, 25 bp, Artificial
  probe
  misc_feature (1)..(25): SEQ ID NO: 5334; WAN024B24_at; Start 88; Stop 112
ctgactgaaaataaattgagttcac

SEQ ID NO: 70663 - DNA, 25 bp, Artificial
  probe
  misc_feature (1)..(25): SEQ ID NO: 5334; WAN024B24_at; Start 2; Stop 26
tgccagacatttccattagaaaatc

SEQ ID NO: 70664 - DNA, 25 bp, Artificial
  probe
  misc_feature (1)..(25): SEQ ID NO: 5334; WAN024B24_at; Start 36; Stop 60
taccatttctcgtacatatctagta

SEQ ID NO: 70665 - DNA, 25 bp, Artificial
  probe
  misc_feature (1)..(25): SEQ ID NO: 5334; WAN024B24_at; Start 78; Stop 102
aaatggagaactgactgaaaataaa

SEQ ID NO: 70666 - DNA, 25 bp, Artificial
  probe
  misc_feature (1)..(25): SEQ ID NO: 5334; WAN024B24_at; Start 89; Stop 113
tgactgaaaataaattgagttcact

SEQ ID NO: 70667 - DNA, 25 bp, Artificial
  probe
  misc_feature (1)..(25): SEQ ID NO: 5334; WAN024B24_at; Start 47; Stop 71
gtacatatctagtaaaaagagaaac

SEQ ID NO: 70668 - DNA, 25 bp, Artificial
  probe
  misc_feature (1)..(25): SEQ ID NO: 5334; WAN024B24_at; Start 35; Stop 59
gtaccatttctcgtacatatctagt

SEQ ID NO: 70669 - DNA, 25 bp, Artificial
  probe
  misc_feature (1)..(25): SEQ ID NO: 5334; WAN024B24_at; Start 94; Stop 118
gaaaataaattgagttcactaacta

SEQ ID NO: 70670 - DNA, 25 bp, Artificial
  probe
  misc_feature (1)..(25): SEQ ID NO: 5334; WAN024B24_at; Start 42; Stop 66
ttctcgtacatatctagtaaaaaga

SEQ ID NO: 70671 - DNA, 25 bp, Artificial
  probe
  misc_feature (1)..(25): SEQ ID NO: 5334; WAN024B24_at; Start 44; Stop 68
ctcgtacatatctagtaaaaagaga

SEQ ID NO: 70672 - DNA, 25 bp, Artificial
  probe
  misc_feature (1)..(25): SEQ ID NO: 5334; WAN024B24_at; Start 86; Stop 110
aactgactgaaaataaattgagttc

SEQ ID NO: 70673 - DNA, 25 bp, Artificial
  probe
  misc_feature (1)..(25): SEQ ID NO: 5334; WAN024B24_at; Start 82; Stop 106
ggagaactgactgaaaataaattga

SEQ ID NO: 70674 - DNA, 25 bp, Artificial
  probe
  misc_feature (1)..(25): SEQ ID NO: 5334; WAN024B24_at; Start 73; Stop 97
gataaaaatggagaactgactgaaa

SEQ ID NO: 70675 - DNA, 25 bp, Artificial
  probe
  misc_feature (1)..(25): SEQ ID NO: 5334; WAN024B24_at; Start 75; Stop 99
taaaaatggagaactgactgaaaat

SEQ ID NO: 70676 - DNA, 25 bp, Artificial
  probe
  misc_feature (1)..(25): SEQ ID NO: 5334; WAN024B24_at; Start 83; Stop 107
gagaactgactgaaaataaattgag

SEQ ID NO: 70677 - DNA, 25 bp, Artificial
  probe
  misc_feature (1)..(25): SEQ ID NO: 5334; WAN024B24_at; Start 38; Stop 62
ccatttctcgtacatatctagtaaa

SEQ ID NO: 70678 - DNA, 25 bp, Artificial
  probe
  misc_feature (1)..(25): SEQ ID NO: 5334; WAN024B24_at; Start 31; Stop 55
ttacgtaccatttctcgtacatatc

SEQ ID NO: 70679 - DNA, 25 bp, Artificial
  probe
  misc_feature (1)..(25): SEQ ID NO: 5334; WAN024B24_at; Start 43; Stop 67
tctcgtacatatctagtaaaaagag

SEQ ID NO: 70680 - DNA, 25 bp, Artificial
  probe
  misc_feature (1)..(25): SEQ ID NO: 5334; WAN024B24_at; Start 92; Stop 116
ctgaaaataaattgagttcactaac

SEQ ID NO: 70681 - DNA, 25 bp, Artificial
  probe
  misc_feature (1)..(25): SEQ ID NO: 5334; WAN024B24_at; Start 77; Stop 101
aaaatggagaactgactgaaaataa

SEQ ID NO: 70682 - DNA, 25 bp, Artificial
  probe
  misc_feature (1)..(25): SEQ ID NO: 5334; WAN024B24_at; Start 96; Stop 120
aaataaattgagttcactaactaat

SEQ ID NO: 70683 - DNA, 25 bp, Artificial
  probe
  misc_feature (1)..(25): SEQ ID NO: 5334; WAN024B24_at; Start 46; Stop 70
cgtacatatctagtaaaaagagaaa

SEQ ID NO: 70684 - DNA, 25 bp, Artificial
  probe
  misc_feature (1)..(25): SEQ ID NO: 5334; WAN024B24_at; Start 1; Stop 25
ttgccagacatttccattagaaaat

SEQ ID NO: 70685 - DNA, 25 bp, Artificial
  probe
  misc_feature (1)..(25): SEQ ID NO: 5334; WAN024B24_at; Start 45; Stop 69
tcgtacatatctagtaaaaagagaa

SEQ ID NO: 70686 - DNA, 25 bp, Artificial
  probe
  misc_feature (1)..(25): SEQ ID NO: 5334; WAN024B24_at; Start 32; Stop 56
tacgtaccatttctcgtacatatct

SEQ ID NO: 70687 - DNA, 25 bp, Artificial
  probe
  misc_feature (1)..(25): SEQ ID NO: 5334; WAN024B24_at; Start 39; Stop 63
catttctcgtacatatctagtaaaa

SEQ ID NO: 70688 - DNA, 25 bp, Artificial
  probe
  misc_feature (1)..(25): SEQ ID NO: 5334; WAN024B24_at; Start 29; Stop 53
atttacgtaccatttctcgtacata

SEQ ID NO: 70689 - DNA, 25 bp, Artificial
  probe
  misc_feature (1)..(25): SEQ ID NO: 5334; WAN024B24_at; Start 37; Stop 61
accatttctcgtacatatctagtaa

SEQ ID NO: 70690 - DNA, 25 bp, Artificial
  probe
  misc_feature (1)..(25): SEQ ID NO: 5334; WAN024B24_at; Start 79; Stop 103
aatggagaactgactgaaaataaat

SEQ ID NO: 70691 - DNA, 25 bp, Artificial
  probe
  misc_feature (1)..(25): SEQ ID NO: 5334; WAN024B24_at; Start 81; Stop 105
tggagaactgactgaaaataaattg

SEQ ID NO: 70692 - DNA, 25 bp, Artificial
  probe
  misc_feature (1)..(25): SEQ ID NO: 5334; WAN024B24_at; Start 90; Stop 114
gactgaaaataaattgagttcacta

SEQ ID NO: 70693 - DNA, 25 bp, Artificial
  probe
  misc_feature (1)..(25): SEQ ID NO: 5334; WAN024B24_at; Start 84; Stop 108
agaactgactgaaaataaattgagt

SEQ ID NO: 70694 - DNA, 25 bp, Artificial
  probe
  misc_feature (1)..(25): SEQ ID NO: 5334; WAN024B24_at; Start 76; Stop 100
aaaaatggagaactgactgaaaata

SEQ ID NO: 70695 - DNA, 25 bp, Artificial
  probe
  misc_feature (1)..(25): SEQ ID NO: 27; WAN024B26_x_at; Start 58; Stop 82
gaaaaagagaaagaagaaagacaga

SEQ ID NO: 70696 - DNA, 25 bp, Artificial
  probe
  misc_feature (1)..(25): SEQ ID NO: 27; WAN024B26_x_at; Start 64; Stop 88
gagaaagaagaaagacagaaattgt

SEQ ID NO: 70697 - DNA, 25 bp, Artificial
  probe
  misc_feature (1)..(25): SEQ ID NO: 27; WAN024B26_x_at; Start 30; Stop 54
aaagttaagagaactccgattgaag

SEQ ID NO: 70698 - DNA, 25 bp, Artificial
  probe
  misc_feature (1)..(25): SEQ ID NO: 27; WAN024B26_x_at; Start 50; Stop 74
tgaaggaggaaaaagagaaagaaga

SEQ ID NO: 70699 - DNA, 25 bp, Artificial
  probe
  misc_feature (1)..(25): SEQ ID NO: 27; WAN024B26_x_at; Start 47; Stop 71
gattgaaggaggaaaaagagaaaga

SEQ ID NO: 70700 - DNA, 25 bp, Artificial
  probe
  misc_feature (1)..(25): SEQ ID NO: 27; WAN024B26_x_at; Start 36; Stop 60
aagagaactccgattgaaggaggaa

SEQ ID NO: 70701 - DNA, 25 bp, Artificial
  probe
  misc_feature (1)..(25): SEQ ID NO: 27; WAN024B26_x_at; Start 63; Stop 87
agagaaagaagaaagacagaaattg

SEQ ID NO: 70702 - DNA, 25 bp, Artificial
  probe
  misc_feature (1)..(25): SEQ ID NO: 27; WAN024B26_x_at; Start 12; Stop 36
ggagaatgccatcctaaaaaagtta

SEQ ID NO: 70703 - DNA, 25 bp, Artificial
  probe
  misc_feature (1)..(25): SEQ ID NO: 27; WAN024B26_x_at; Start 33; Stop 57
gttaagagaactccgattgaaggag

SEQ ID NO: 70704 - DNA, 25 bp, Artificial
  probe
  misc_feature (1)..(25): SEQ ID NO: 27; WAN024B26_x_at; Start 5; Stop 29
tgagagcggagaatgccatcctaaa

SEQ ID NO: 70705 - DNA, 25 bp, Artificial
  probe
  misc_feature (1)..(25): SEQ ID NO: 27; WAN024B26_x_at; Start 35; Stop 59
taagagaactccgattgaaggagga

SEQ ID NO: 70706 - DNA, 25 bp, Artificial
  probe
  misc_feature (1)..(25): SEQ ID NO: 27; WAN024B26_x_at; Start 46; Stop 70
cgattgaaggaggaaaaagagaaag

SEQ ID NO: 70707 - DNA, 25 bp, Artificial
  probe
  misc_feature (1)..(25): SEQ ID NO: 27; WAN024B26_x_at; Start 31; Stop 55
aagttaagagaactccgattgaagg

SEQ ID NO: 70708 - DNA, 25 bp, Artificial
  probe
  misc_feature (1)..(25): SEQ ID NO: 27; WAN024B26_x_at; Start 69; Stop 93
agaagaaagacagaaattgtttaag

SEQ ID NO: 70709 - DNA, 25 bp, Artificial
  probe
  misc_feature (1)..(25): SEQ ID NO: 27; WAN024B26_x_at; Start 1; Stop 25
tacctgagagcggagaatgccatcc

SEQ ID NO: 70710 - DNA, 25 bp, Artificial
  probe
  misc_feature (1)..(25): SEQ ID NO: 27; WAN024B26_x_at; Start 65; Stop 89
agaaagaagaaagacagaaattgtt

SEQ ID NO: 70711 - DNA, 25 bp, Artificial
  probe
  misc_feature (1)..(25): SEQ ID NO: 27; WAN024B26_x_at; Start 38; Stop 62
gagaactccgattgaaggaggaaaa

SEQ ID NO: 70712 - DNA, 25 bp, Artificial
  probe
  misc_feature (1)..(25): SEQ ID NO: 27; WAN024B26_x_at; Start 7; Stop 31
agagcggagaatgccatcctaaaaa

SEQ ID NO: 70713 - DNA, 25 bp, Artificial
  probe
  misc_feature (1)..(25): SEQ ID NO: 27; WAN024B26_x_at; Start 37; Stop 61
agagaactccgattgaaggaggaaa

SEQ ID NO: 70714 - DNA, 25 bp, Artificial
  probe
  misc_feature (1)..(25): SEQ ID NO: 27; WAN024B26_x_at; Start 16; Stop 40
aatgccatcctaaaaaagttaagag

SEQ ID NO: 70715 - DNA, 25 bp, Artificial
  probe
  misc_feature (1)..(25): SEQ ID NO: 27; WAN024B26_x_at; Start 10; Stop 34
gcggagaatgccatcctaaaaaagt

SEQ ID NO: 70716 - DNA, 25 bp, Artificial
  probe
  misc_feature (1)..(25): SEQ ID NO: 27; WAN024B26_x_at; Start 70; Stop 94
gaagaaagacagaaattgtttaaga

SEQ ID NO: 70717 - DNA, 25 bp, Artificial
  probe
  misc_feature (1)..(25): SEQ ID NO: 27; WAN024B26_x_at; Start 2; Stop 26
acctgagagcggagaatgccatcct

SEQ ID NO: 70718 - DNA, 25 bp, Artificial
  probe
  misc_feature (1)..(25): SEQ ID NO: 27; WAN024B26_x_at; Start 13; Stop 37
gagaatgccatcctaaaaaagttaa

SEQ ID NO: 70719 - DNA, 25 bp, Artificial
  probe
  misc_feature (1)..(25): SEQ ID NO: 27; WAN024B26_x_at; Start 18; Stop 42
tgccatcctaaaaaagttaagagaa

SEQ ID NO: 70720 - DNA, 25 bp, Artificial
  probe
  misc_feature (1)..(25): SEQ ID NO: 27; WAN024B26_x_at; Start 72; Stop 96
agaaagacagaaattgtttaagaat

SEQ ID NO: 70721 - DNA, 25 bp, Artificial
  probe
  misc_feature (1)..(25): SEQ ID NO: 27; WAN024B26_x_at; Start 11; Stop 35
cggagaatgccatcctaaaaaagtt

SEQ ID NO: 70722 - DNA, 25 bp, Artificial
  probe
  misc_feature (1)..(25): SEQ ID NO: 27; WAN024B26_x_at; Start 6; Stop 30
gagagcggagaatgccatcctaaaa

SEQ ID NO: 70723 - DNA, 25 bp, Artificial
  probe
  misc_feature (1)..(25): SEQ ID NO: 27; WAN024B26_x_at; Start 9; Stop 33
agcggagaatgccatcctaaaaaag

SEQ ID NO: 70724 - DNA, 25 bp, Artificial
  probe
  misc_feature (1)..(25): SEQ ID NO: 27; WAN024B26_x_at; Start 32; Stop 56
agttaagagaactccgattgaagga

SEQ ID NO: 70725 - DNA, 25 bp, Artificial
  probe
  misc_feature (1)..(25): SEQ ID NO: 27; WAN024B26_x_at; Start 3; Stop 27
cctgagagcggagaatgccatccta

SEQ ID NO: 70726 - DNA, 25 bp, Artificial
  probe
  misc_feature (1)..(25): SEQ ID NO: 27; WAN024B26_x_at; Start 15; Stop 39
gaatgccatcctaaaaaagttaaga

SEQ ID NO: 70727 - DNA, 25 bp, Artificial
  probe
  misc_feature (1)..(25): SEQ ID NO: 27; WAN024B26_x_at; Start 17; Stop 41
atgccatcctaaaaaagttaagaga

SEQ ID NO: 70728 - DNA, 25 bp, Artificial
  probe
  misc_feature (1)..(25): SEQ ID NO: 27; WAN024B26_x_at; Start 4; Stop 28
ctgagagcggagaatgccatcctaa

SEQ ID NO: 70729 - DNA, 25 bp, Artificial
  probe
  misc_feature (1)..(25): SEQ ID NO: 26; WAN024B2B_x_at; Start 30; Stop 54
aaagttaagagaactccgattgaag

SEQ ID NO: 70730 - DNA, 25 bp, Artificial
  probe
  misc_feature (1)..(25): SEQ ID NO: 26; WAN024B2B_x_at; Start 8; Stop 32
gagcggagaatgccatcctaaaaaa

SEQ ID NO: 70731 - DNA, 25 bp, Artificial
  probe
  misc_feature (1)..(25): SEQ ID NO: 26; WAN024B2B_x_at; Start 36; Stop 60
aagagaactccgattgaaggaggaa

SEQ ID NO: 70732 - DNA, 25 bp, Artificial
  probe
  misc_feature (1)..(25): SEQ ID NO: 26; WAN024B2B_x_at; Start 12; Stop 36
ggagaatgccatcctaaaaaagtta

SEQ ID NO: 70733 - DNA, 25 bp, Artificial
  probe
  misc_feature (1)..(25): SEQ ID NO: 26; WAN024B2B_x_at; Start 44; Stop 68
tccgattgaaggaggaaaaagagaa

SEQ ID NO: 70734 - DNA, 25 bp, Artificial
  probe
  misc_feature (1)..(25): SEQ ID NO: 26; WAN024B2B_x_at; Start 33; Stop 57
gttaagagaactccgattgaaggag

SEQ ID NO: 70735 - DNA, 25 bp, Artificial
  probe
  misc_feature (1)..(25): SEQ ID NO: 26; WAN024B2B_x_at; Start 5; Stop 29
tgagagcggagaatgccatcctaaa

SEQ ID NO: 70736 - DNA, 25 bp, Artificial
  probe
  misc_feature (1)..(25): SEQ ID NO: 26; WAN024B2B_x_at; Start 35; Stop 59
taagagaactccgattgaaggagga

SEQ ID NO: 70737 - DNA, 25 bp, Artificial
  probe
  misc_feature (1)..(25): SEQ ID NO: 26; WAN024B2B_x_at; Start 31; Stop 55
aagttaagagaactccgattgaagg

SEQ ID NO: 70738 - DNA, 25 bp, Artificial
  probe
  misc_feature (1)..(25): SEQ ID NO: 26; WAN024B2B_x_at; Start 14; Stop 38
agaatgccatcctaaaaaagttaag

SEQ ID NO: 70739 - DNA, 25 bp, Artificial
  probe
  misc_feature (1)..(25): SEQ ID NO: 26; WAN024B2B_x_at; Start 1; Stop 25
tacctgagagcggagaatgccatcc

SEQ ID NO: 70740 - DNA, 25 bp, Artificial
  probe
  misc_feature (1)..(25): SEQ ID NO: 26; WAN024B2B_x_at; Start 34; Stop 58
ttaagagaactccgattgaaggagg

SEQ ID NO: 70741 - DNA, 25 bp, Artificial
  probe
  misc_feature (1)..(25): SEQ ID NO: 26; WAN024B2B_x_at; Start 38; Stop 62
gagaactccgattgaaggaggaaaa

SEQ ID NO: 70742 - DNA, 25 bp, Artificial
  probe
  misc_feature (1)..(25): SEQ ID NO: 26; WAN024B2B_x_at; Start 7; Stop 31
agagcggagaatgccatcctaaaaa

SEQ ID NO: 70743 - DNA, 25 bp, Artificial
  probe
  misc_feature (1)..(25): SEQ ID NO: 26; WAN024B2B_x_at; Start 37; Stop 61
agagaactccgattgaaggaggaaa

SEQ ID NO: 70744 - DNA, 25 bp, Artificial
  probe
  misc_feature (1)..(25): SEQ ID NO: 26; WAN024B2B_x_at; Start 16; Stop 40
aatgccatcctaaaaaagttaagag

SEQ ID NO: 70745 - DNA, 25 bp, Artificial
  probe
  misc_feature (1)..(25): SEQ ID NO: 26; WAN024B2B_x_at; Start 10; Stop 34
gcggagaatgccatcctaaaaaagt

SEQ ID NO: 70746 - DNA, 25 bp, Artificial
  probe
  misc_feature (1)..(25): SEQ ID NO: 26; WAN024B2B_x_at; Start 2; Stop 26
acctgagagcggagaatgccatcct

SEQ ID NO: 70747 - DNA, 25 bp, Artificial
  probe
  misc_feature (1)..(25): SEQ ID NO: 26; WAN024B2B_x_at; Start 42; Stop 66
actccgattgaaggaggaaaaagag

SEQ ID NO: 70748 - DNA, 25 bp, Artificial
  probe
  misc_feature (1)..(25): SEQ ID NO: 26; WAN024B2B_x_at; Start 13; Stop 37
gagaatgccatcctaaaaaagttaa

SEQ ID NO: 70749 - DNA, 25 bp, Artificial
  probe
  misc_feature (1)..(25): SEQ ID NO: 26; WAN024B2B_x_at; Start 18; Stop 42
tgccatcctaaaaaagttaagagaa

SEQ ID NO: 70750 - DNA, 25 bp, Artificial
  probe
  misc_feature (1)..(25): SEQ ID NO: 26; WAN024B2B_x_at; Start 43; Stop 67
ctccgattgaaggaggaaaaagaga

SEQ ID NO: 70751 - DNA, 25 bp, Artificial
  probe
  misc_feature (1)..(25): SEQ ID NO: 26; WAN024B2B_x_at; Start 11; Stop 35
cggagaatgccatcctaaaaaagtt

SEQ ID NO: 70752 - DNA, 25 bp, Artificial
  probe
  misc_feature (1)..(25): SEQ ID NO: 26; WAN024B2B_x_at; Start 6; Stop 30
gagagcggagaatgccatcctaaaa

SEQ ID NO: 70753 - DNA, 25 bp, Artificial
  probe
  misc_feature (1)..(25): SEQ ID NO: 26; WAN024B2B_x_at; Start 32; Stop 56
agttaagagaactccgattgaagga

SEQ ID NO: 70754 - DNA, 25 bp, Artificial
  probe
  misc_feature (1)..(25): SEQ ID NO: 26; WAN024B2B_x_at; Start 3; Stop 27
cctgagagcggagaatgccatccta

SEQ ID NO: 70755 - DNA, 25 bp, Artificial
  probe
  misc_feature (1)..(25): SEQ ID NO: 26; WAN024B2B_x_at; Start 17; Stop 41
atgccatcctaaaaaagttaagaga

SEQ ID NO: 70756 - DNA, 25 bp, Artificial
  probe
  misc_feature (1)..(25): SEQ ID NO: 26; WAN024B2B_x_at; Start 9; Stop 33
agcggagaatgccatcctaaaaaag

SEQ ID NO: 70757 - DNA, 25 bp, Artificial
  probe
  misc_feature (1)..(25): SEQ ID NO: 26; WAN024B2B_x_at; Start 4; Stop 28
ctgagagcggagaatgccatcctaa

SEQ ID NO: 70758 - DNA, 25 bp, Artificial
  probe
  misc_feature (1)..(25): SEQ ID NO: 26; WAN024B2B_x_at; Start 15; Stop 39
gaatgccatcctaaaaaagttaaga

SEQ ID NO: 70759 - DNA, 25 bp, Artificial
  probe
  misc_feature (1)..(25): SEQ ID NO: 5826; WAN024B2C_at; Start 6; Stop 30
gagaaaacaagagggagagtacctg

SEQ ID NO: 70760 - DNA, 25 bp, Artificial
  probe
  misc_feature (1)..(25): SEQ ID NO: 5826; WAN024B2C_at; Start 9; Stop 33
aaaacaagagggagagtacctgaga

SEQ ID NO: 70761 - DNA, 25 bp, Artificial
  probe
  misc_feature (1)..(25): SEQ ID NO: 5826; WAN024B2C_at; Start 11; Stop 35
aacaagagggagagtacctgagagc

SEQ ID NO: 70762 - DNA, 25 bp, Artificial
  probe
  misc_feature (1)..(25): SEQ ID NO: 5826; WAN024B2C_at; Start 7; Stop 31
agaaaacaagagggagagtacctga

SEQ ID NO: 70763 - DNA, 25 bp, Artificial
  probe
  misc_feature (1)..(25): SEQ ID NO: 5826; WAN024B2C_at; Start 3; Stop 27
gttgagaaaacaagagggagagtac

SEQ ID NO: 70764 - DNA, 25 bp, Artificial
  probe
  misc_feature (1)..(25): SEQ ID NO: 5826; WAN024B2C_at; Start 12; Stop 36
acaagagggagagtacctgagagcg

SEQ ID NO: 70765 - DNA, 25 bp, Artificial
  probe
  misc_feature (1)..(25): SEQ ID NO: 5826; WAN024B2C_at; Start 10; Stop 34
aaacaagagggagagtacctgagag

SEQ ID NO: 70766 - DNA, 25 bp, Artificial
  probe
  misc_feature (1)..(25): SEQ ID NO: 5826; WAN024B2C_at; Start 8; Stop 32
gaaaacaagagggagagtacctgag

SEQ ID NO: 70767 - DNA, 25 bp, Artificial
  probe
  misc_feature (1)..(25): SEQ ID NO: 5826; WAN024B2C_at; Start 5; Stop 29
tgagaaaacaagagggagagtacct

SEQ ID NO: 70768 - DNA, 25 bp, Artificial
  probe
  misc_feature (1)..(25): SEQ ID NO: 5826; WAN024B2C_at; Start 1; Stop 25
ttgttgagaaaacaagagggagagt

SEQ ID NO: 70769 - DNA, 25 bp, Artificial
  probe
  misc_feature (1)..(25): SEQ ID NO: 5826; WAN024B2C_at; Start 4; Stop 28
ttgagaaaacaagagggagagtacc

SEQ ID NO: 70770 - DNA, 25 bp, Artificial
  probe
  misc_feature (1)..(25): SEQ ID NO: 5826; WAN024B2C_at; Start 2; Stop 26
tgttgagaaaacaagagggagagta

SEQ ID NO: 70771 - DNA, 25 bp, Artificial
  probe
  misc_feature (1)..(25): SEQ ID NO: 2549; WAN024B2D_s_at; Start 55; Stop 79
caagcagaaaatgagtacctgagag

SEQ ID NO: 70772 - DNA, 25 bp, Artificial
  probe
  misc_feature (1)..(25): SEQ ID NO: 2549; WAN024B2D_s_at; Start 53; Stop 77
ttcaagcagaaaatgagtacctgag

SEQ ID NO: 70773 - DNA, 25 bp, Artificial
  probe
  misc_feature (1)..(25): SEQ ID NO: 2549; WAN024B2D_s_at; Start 51; Stop 75
tcttcaagcagaaaatgagtacctg

SEQ ID NO: 70774 - DNA, 25 bp, Artificial
  probe
  misc_feature (1)..(25): SEQ ID NO: 2549; WAN024B2D_s_at; Start 54; Stop 78
tcaagcagaaaatgagtacctgaga

SEQ ID NO: 70775 - DNA, 25 bp, Artificial
  probe
  misc_feature (1)..(25): SEQ ID NO: 2549; WAN024B2D_s_at; Start 56; Stop 80
aagcagaaaatgagtacctgagagc

SEQ ID NO: 70776 - DNA, 25 bp, Artificial
  probe
  misc_feature (1)..(25): SEQ ID NO: 2549; WAN024B2D_s_at; Start 52; Stop 76
cttcaagcagaaaatgagtacctga

SEQ ID NO: 70777 - DNA, 25 bp, Artificial
  probe
  misc_feature (1)..(25): SEQ ID NO: 2549; WAN024B2D_s_at; Start 57; Stop 81
agcagaaaatgagtacctgagagcg

SEQ ID NO: 70778 - DNA, 25 bp, Artificial
  probe
  misc_feature (1)..(25): SEQ ID NO: 6298; WAN024B2F_at; Start 138; Stop 162
taaggacatcgtcaagcgcgtgatt

SEQ ID NO: 70779 - DNA, 25 bp, Artificial
  probe
  misc_feature (1)..(25): SEQ ID NO: 6298; WAN024B2F_at; Start 409; Stop 433
gaataccttctccttggagacgatc

SEQ ID NO: 70780 - DNA, 25 bp, Artificial
  probe
  misc_feature (1)..(25): SEQ ID NO: 6298; WAN024B2F_at; Start 75; Stop 99
tgtcgttaagcaccttcctattgac

SEQ ID NO: 70781 - DNA, 25 bp, Artificial
  probe
  misc_feature (1)..(25): SEQ ID NO: 6298; WAN024B2F_at; Start 213; Stop 237
tgacaaagagacagatgagccttac

SEQ ID NO: 70782 - DNA, 25 bp, Artificial
  probe
  misc_feature (1)..(25): SEQ ID NO: 6298; WAN024B2F_at; Start 224; Stop 248
cagatgagccttacctagcagacta

SEQ ID NO: 70783 - DNA, 25 bp, Artificial
  probe
  misc_feature (1)..(25): SEQ ID NO: 6298; WAN024B2F_at; Start 141; Stop 165
ggacatcgtcaagcgcgtgattgga

SEQ ID NO: 70784 - DNA, 25 bp, Artificial
  probe
  misc_feature (1)..(25): SEQ ID NO: 6298; WAN024B2F_at; Start 135; Stop 159
caataaggacatcgtcaagcgcgtg

SEQ ID NO: 70785 - DNA, 25 bp, Artificial
  probe
  misc_feature (1)..(25): SEQ ID NO: 6298; WAN024B2F_at; Start 64; Stop 88
gaaatcctctttgtcgttaagcacc

SEQ ID NO: 70786 - DNA, 25 bp, Artificial
  probe
  misc_feature (1)..(25): SEQ ID NO: 6298; WAN024B2F_at; Start 134; Stop 158
gcaataaggacatcgtcaagcgcgt

SEQ ID NO: 70787 - DNA, 25 bp, Artificial
  probe
  misc_feature (1)..(25): SEQ ID NO: 6298; WAN024B2F_at; Start 417; Stop 441
tctccttggagacgatcgcttggtt

SEQ ID NO: 70788 - DNA, 25 bp, Artificial
  probe
  misc_feature (1)..(25): SEQ ID NO: 6298; WAN024B2F_at; Start 228; Stop 252
tgagccttacctagcagactacatc

SEQ ID NO: 70789 - DNA, 25 bp, Artificial
  probe
  misc_feature (1)..(25): SEQ ID NO: 6298; WAN024B2F_at; Start 218; Stop 242
aagagacagatgagccttacctagc

SEQ ID NO: 70790 - DNA, 25 bp, Artificial
  probe
  misc_feature (1)..(25): SEQ ID NO: 6298; WAN024B2F_at; Start 68; Stop 92
tcctctttgtcgttaagcaccttcc

SEQ ID NO: 70791 - DNA, 25 bp, Artificial
  probe
  misc_feature (1)..(25): SEQ ID NO: 6298; WAN024B2F_at; Start 214; Stop 238
gacaaagagacagatgagccttacc

SEQ ID NO: 70792 - DNA, 25 bp, Artificial
  probe
  misc_feature (1)..(25): SEQ ID NO: 6298; WAN024B2F_at; Start 216; Stop 240
caaagagacagatgagccttaccta

SEQ ID NO: 70793 - DNA, 25 bp, Artificial
  probe
  misc_feature (1)..(25): SEQ ID NO: 6298; WAN024B2F_at; Start 147; Stop 171
cgtcaagcgcgtgattggaatgcct

SEQ ID NO: 70794 - DNA, 25 bp, Artificial
  probe
  misc_feature (1)..(25): SEQ ID NO: 6298; WAN024B2F_at; Start 209; Stop 233
tcaatgacaaagagacagatgagcc

SEQ ID NO: 70795 - DNA, 25 bp, Artificial
  probe
  misc_feature (1)..(25): SEQ ID NO: 6298; WAN024B2F_at; Start 222; Stop 246
gacagatgagccttacctagcagac

SEQ ID NO: 70796 - DNA, 25 bp, Artificial
  probe
  misc_feature (1)..(25): SEQ ID NO: 6298; WAN024B2F_at; Start 153; Stop 177
gcgcgtgattggaatgcctggcgac

SEQ ID NO: 70797 - DNA, 25 bp, Artificial
  probe
  misc_feature (1)..(25): SEQ ID NO: 6298; WAN024B2F_at; Start 419; Stop 443
tccttggagacgatcgcttggtttc

SEQ ID NO: 70798 - DNA, 25 bp, Artificial
  probe
  misc_feature (1)..(25): SEQ ID NO: 6298; WAN024B2F_at; Start 132; Stop 156
tggcaataaggacatcgtcaagcgc

SEQ ID NO: 70799 - DNA, 25 bp, Artificial
  probe
  misc_feature (1)..(25): SEQ ID NO: 6298; WAN024B2F_at; Start 219; Stop 243
agagacagatgagccttacctagca

SEQ ID NO: 70800 - DNA, 25 bp, Artificial
  probe
  misc_feature (1)..(25): SEQ ID NO: 6298; WAN024B2F_at; Start 226; Stop 250
gatgagccttacctagcagactaca

SEQ ID NO: 70801 - DNA, 25 bp, Artificial
  probe
  misc_feature (1)..(25): SEQ ID NO: 6298; WAN024B2F_at; Start 71; Stop 95
tctttgtcgttaagcaccttcctat

SEQ ID NO: 70802 - DNA, 25 bp, Artificial
  probe
  misc_feature (1)..(25): SEQ ID NO: 6298; WAN024B2F_at; Start 210; Stop 234
caatgacaaagagacagatgagcct

SEQ ID NO: 70803 - DNA, 25 bp, Artificial
  probe
  misc_feature (1)..(25): SEQ ID NO: 6298; WAN024B2F_at; Start 421; Stop 445
cttggagacgatcgcttggtttcga

SEQ ID NO: 70804 - DNA, 25 bp, Artificial
  probe
  misc_feature (1)..(25): SEQ ID NO: 6298; WAN024B2F_at; Start 205; Stop 229
tacatcaatgacaaagagacagatg

SEQ ID NO: 70805 - DNA, 25 bp, Artificial
  probe
  misc_feature (1)..(25): SEQ ID NO: 6298; WAN024B2F_at; Start 146; Stop 170
tcgtcaagcgcgtgattggaatgcc

SEQ ID NO: 70806 - DNA, 25 bp, Artificial
  probe
  misc_feature (1)..(25): SEQ ID NO: 6298; WAN024B2F_at; Start 423; Stop 447
tggagacgatcgcttggtttcgagc

SEQ ID NO: 70807 - DNA, 25 bp, Artificial
  probe
  misc_feature (1)..(25): SEQ ID NO: 6298; WAN024B2F_at; Start 412; Stop 436
taccttctccttggagacgatcgct

SEQ ID NO: 70808 - DNA, 25 bp, Artificial
  probe
  misc_feature (1)..(25): SEQ ID NO: 6298; WAN024B2F_at; Start 78; Stop 102
cgttaagcaccttcctattgaccgt

SEQ ID NO: 70809 - DNA, 25 bp, Artificial
  probe
  misc_feature (1)..(25): SEQ ID NO: 6298; WAN024B2F_at; Start 150; Stop 174
caagcgcgtgattggaatgcctggc

SEQ ID NO: 70810 - DNA, 25 bp, Artificial
  probe
  misc_feature (1)..(25): SEQ ID NO: 6298; WAN024B2F_at; Start 415; Stop 439
cttctccttggagacgatcgcttgg

SEQ ID NO: 70811 - DNA, 25 bp, Artificial
  probe
  misc_feature (1)..(25): SEQ ID NO: 6298; WAN024B2F_at; Start 136; Stop 160
aataaggacatcgtcaagcgcgtga

SEQ ID NO: 70812 - DNA, 25 bp, Artificial
  probe
  misc_feature (1)..(25): SEQ ID NO: 600; WAN024B2G_at; Start 210; Stop 234
caatgataaagagacggacgaacct

SEQ ID NO: 70813 - DNA, 25 bp, Artificial
  probe
  misc_feature (1)..(25): SEQ ID NO: 600; WAN024B2G_at; Start 212; Stop 236
atgataaagagacggacgaacctta

SEQ ID NO: 70814 - DNA, 25 bp, Artificial
  probe
  misc_feature (1)..(25): SEQ ID NO: 600; WAN024B2G_at; Start 228; Stop 252
cgaaccttacctagctgactacatc

SEQ ID NO: 70815 - DNA, 25 bp, Artificial
  probe
  misc_feature (1)..(25): SEQ ID NO: 600; WAN024B2G_at; Start 220; Stop 244
gagacggacgaaccttacctagctg

SEQ ID NO: 70816 - DNA, 25 bp, Artificial
  probe
  misc_feature (1)..(25): SEQ ID NO: 600; WAN024B2G_at; Start 213; Stop 237
tgataaagagacggacgaaccttac

SEQ ID NO: 70817 - DNA, 25 bp, Artificial
  probe
  misc_feature (1)..(25): SEQ ID NO: 600; WAN024B2G_at; Start 208; Stop 232
atcaatgataaagagacggacgaac

SEQ ID NO: 70818 - DNA, 25 bp, Artificial
  probe
  misc_feature (1)..(25): SEQ ID NO: 600; WAN024B2G_at; Start 219; Stop 243
agagacggacgaaccttacctagct

SEQ ID NO: 70819 - DNA, 25 bp, Artificial
  probe
  misc_feature (1)..(25): SEQ ID NO: 600; WAN024B2G_at; Start 221; Stop 245
agacggacgaaccttacctagctga

SEQ ID NO: 70820 - DNA, 25 bp, Artificial
  probe
  misc_feature (1)..(25): SEQ ID NO: 600; WAN024B2G_at; Start 211; Stop 235
aatgataaagagacggacgaacctt

SEQ ID NO: 70821 - DNA, 25 bp, Artificial
  probe
  misc_feature (1)..(25): SEQ ID NO: 600; WAN024B2G_at; Start 224; Stop 248
cggacgaaccttacctagctgacta

SEQ ID NO: 70822 - DNA, 25 bp, Artificial
  probe
  misc_feature (1)..(25): SEQ ID NO: 600; WAN024B2G_at; Start 207; Stop 231
catcaatgataaagagacggacgaa

SEQ ID NO: 70823 - DNA, 25 bp, Artificial
  probe
  misc_feature (1)..(25): SEQ ID NO: 600; WAN024B2G_at; Start 226; Stop 250
gacgaaccttacctagctgactaca

SEQ ID NO: 70824 - DNA, 25 bp, Artificial
  probe
  misc_feature (1)..(25): SEQ ID NO: 600; WAN024B2G_at; Start 227; Stop 251
acgaaccttacctagctgactacat

SEQ ID NO: 70825 - DNA, 25 bp, Artificial
  probe
  misc_feature (1)..(25): SEQ ID NO: 600; WAN024B2G_at; Start 225; Stop 249
ggacgaaccttacctagctgactac

SEQ ID NO: 70826 - DNA, 25 bp, Artificial
  probe
  misc_feature (1)..(25): SEQ ID NO: 600; WAN024B2G_at; Start 222; Stop 246
gacggacgaaccttacctagctgac

SEQ ID NO: 70827 - DNA, 25 bp, Artificial
  probe
  misc_feature (1)..(25): SEQ ID NO: 600; WAN024B2G_at; Start 206; Stop 230
acatcaatgataaagagacggacga

SEQ ID NO: 70828 - DNA, 25 bp, Artificial
  probe
  misc_feature (1)..(25): SEQ ID NO: 600; WAN024B2G_at; Start 205; Stop 229
tacatcaatgataaagagacggacg

SEQ ID NO: 70829 - DNA, 25 bp, Artificial
  probe
  misc_feature (1)..(25): SEQ ID NO: 600; WAN024B2G_at; Start 223; Stop 247
acggacgaaccttacctagctgact

SEQ ID NO: 70830 - DNA, 25 bp, Artificial
  probe
  misc_feature (1)..(25): SEQ ID NO: 600; WAN024B2G_at; Start 209; Stop 233
tcaatgataaagagacggacgaacc

SEQ ID NO: 70831 - DNA, 25 bp, Artificial
  probe
  misc_feature (1)..(25): SEQ ID NO: 1288; WAN024B2H_at; Start 590; Stop 614
caatcacccgtatcggaacatttta

SEQ ID NO: 70832 - DNA, 25 bp, Artificial
  probe
  misc_feature (1)..(25): SEQ ID NO: 1288; WAN024B2H_at; Start 556; Stop 580
gatatcacaggggaagctaaattcc

SEQ ID NO: 70833 - DNA, 25 bp, Artificial
  probe
  misc_feature (1)..(25): SEQ ID NO: 1288; WAN024B2H_at; Start 588; Stop 612
gccaatcacccgtatcggaacattt

SEQ ID NO: 70834 - DNA, 25 bp, Artificial
  probe
  misc_feature (1)..(25): SEQ ID NO: 1288; WAN024B2H_at; Start 555; Stop 579
agatatcacaggggaagctaaattc

SEQ ID NO: 70835 - DNA, 25 bp, Artificial
  probe
  misc_feature (1)..(25): SEQ ID NO: 1288; WAN024B2H_at; Start 73; Stop 97
cgtatctttttttggagcaatgttc

SEQ ID NO: 70836 - DNA, 25 bp, Artificial
  probe
  misc_feature (1)..(25): SEQ ID NO: 1288; WAN024B2H_at; Start 559; Stop 583
atcacaggggaagctaaattccgct

SEQ ID NO: 70837 - DNA, 25 bp, Artificial
  probe
  misc_feature (1)..(25): SEQ ID NO: 1288; WAN024B2H_at; Start 557; Stop 581
atatcacaggggaagctaaattccg

SEQ ID NO: 70838 - DNA, 25 bp, Artificial
  probe
  misc_feature (1)..(25): SEQ ID NO: 1288; WAN024B2H_at; Start 587; Stop 611
ggccaatcacccgtatcggaacatt

SEQ ID NO: 70839 - DNA, 25 bp, Artificial
  probe
  misc_feature (1)..(25): SEQ ID NO: 1288; WAN024B2H_at; Start 586; Stop 610
tggccaatcacccgtatcggaacat

SEQ ID NO: 70840 - DNA, 25 bp, Artificial
  probe
  misc_feature (1)..(25): SEQ ID NO: 1288; WAN024B2H_at; Start 75; Stop 99
tatctttttttggagcaatgttcgc

SEQ ID NO: 70841 - DNA, 25 bp, Artificial
  probe
  misc_feature (1)..(25): SEQ ID NO: 1288; WAN024B2H_at; Start 589; Stop 613
ccaatcacccgtatcggaacatttt

SEQ ID NO: 70842 - DNA, 25 bp, Artificial
  probe
  misc_feature (1)..(25): SEQ ID NO: 1288; WAN024B2H_at; Start 554; Stop 578
aagatatcacaggggaagctaaatt

SEQ ID NO: 70843 - DNA, 25 bp, Artificial
  probe
  misc_feature (1)..(25): SEQ ID NO: 1288; WAN024B2H_at; Start 558; Stop 582
tatcacaggggaagctaaattccgc

SEQ ID NO: 70844 - DNA, 25 bp, Artificial
  probe
  misc_feature (1)..(25): SEQ ID NO: 1288; WAN024B2H_at; Start 560; Stop 584
tcacaggggaagctaaattccgctt

SEQ ID NO: 70845 - DNA, 25 bp, Artificial
  probe
  misc_feature (1)..(25): SEQ ID NO: 1288; WAN024B2H_at; Start 74; Stop 98
gtatctttttttggagcaatgttcg

SEQ ID NO: 70846 - DNA, 25 bp, Artificial
  probe
  misc_feature (1)..(25): SEQ ID NO: 7008; WAN024B2I_at; Start 258; Stop 282
cattgattactacaacaacaaacga

SEQ ID NO: 70847 - DNA, 25 bp, Artificial
  probe
  misc_feature (1)..(25): SEQ ID NO: 7008; WAN024B2I_at; Start 2; Stop 26
tgttagaacaggcctttacagagaa

SEQ ID NO: 70848 - DNA, 25 bp, Artificial
  probe
  misc_feature (1)..(25): SEQ ID NO: 7008; WAN024B2I_at; Start 6; Stop 30
agaacaggcctttacagagaaatac

SEQ ID NO: 70849 - DNA, 25 bp, Artificial
  probe
  misc_feature (1)..(25): SEQ ID NO: 7008; WAN024B2I_at; Start 16; Stop 40
tttacagagaaatactatgagaata

SEQ ID NO: 70850 - DNA, 25 bp, Artificial
  probe
  misc_feature (1)..(25): SEQ ID NO: 7008; WAN024B2I_at; Start 18; Stop 42
tacagagaaatactatgagaatacg

SEQ ID NO: 70851 - DNA, 25 bp, Artificial
  probe
  misc_feature (1)..(25): SEQ ID NO: 7008; WAN024B2I_at; Start 15; Stop 39
ctttacagagaaatactatgagaat

SEQ ID NO: 70852 - DNA, 25 bp, Artificial
  probe
  misc_feature (1)..(25): SEQ ID NO: 7008; WAN024B2I_at; Start 9; Stop 33
acaggcctttacagagaaatactat

SEQ ID NO: 70853 - DNA, 25 bp, Artificial
  probe
  misc_feature (1)..(25): SEQ ID NO: 7008; WAN024B2I_at; Start 13; Stop 37
gcctttacagagaaatactatgaga

SEQ ID NO: 70854 - DNA, 25 bp, Artificial
  probe
  misc_feature (1)..(25): SEQ ID NO: 7008; WAN024B2I_at; Start 7; Stop 31
gaacaggcctttacagagaaatact

SEQ ID NO: 70855 - DNA, 25 bp, Artificial
  probe
  misc_feature (1)..(25): SEQ ID NO: 7008; WAN024B2I_at; Start 256; Stop 280
tacattgattactacaacaacaaac

SEQ ID NO: 70856 - DNA, 25 bp, Artificial
  probe
  misc_feature (1)..(25): SEQ ID NO: 7008; WAN024B2I_at; Start 11; Stop 35
aggcctttacagagaaatactatga

SEQ ID NO: 70857 - DNA, 25 bp, Artificial
  probe
  misc_feature (1)..(25): SEQ ID NO: 7008; WAN024B2I_at; Start 261; Stop 285
tgattactacaacaacaaacgaatt

SEQ ID NO: 70858 - DNA, 25 bp, Artificial
  probe
  misc_feature (1)..(25): SEQ ID NO: 7008; WAN024B2I_at; Start 1; Stop 25
atgttagaacaggcctttacagaga

SEQ ID NO: 70859 - DNA, 25 bp, Artificial
  probe
  misc_feature (1)..(25): SEQ ID NO: 7008; WAN024B2I_at; Start 257; Stop 281
acattgattactacaacaacaaacg

SEQ ID NO: 70860 - DNA, 25 bp, Artificial
  probe
  misc_feature (1)..(25): SEQ ID NO: 7008; WAN024B2I_at; Start 12; Stop 36
ggcctttacagagaaatactatgag

SEQ ID NO: 70861 - DNA, 25 bp, Artificial
  probe
  misc_feature (1)..(25): SEQ ID NO: 7008; WAN024B2I_at; Start 5; Stop 29
tagaacaggcctttacagagaaata

SEQ ID NO: 70862 - DNA, 25 bp, Artificial
  probe
  misc_feature (1)..(25): SEQ ID NO: 7008; WAN024B2I_at; Start 10; Stop 34
caggcctttacagagaaatactatg

SEQ ID NO: 70863 - DNA, 25 bp, Artificial
  probe
  misc_feature (1)..(25): SEQ ID NO: 7008; WAN024B2I_at; Start 8; Stop 32
aacaggcctttacagagaaatacta

SEQ ID NO: 70864 - DNA, 25 bp, Artificial
  probe
  misc_feature (1)..(25): SEQ ID NO: 7008; WAN024B2I_at; Start 14; Stop 38
cctttacagagaaatactatgagaa

SEQ ID NO: 70865 - DNA, 25 bp, Artificial
  probe
  misc_feature (1)..(25): SEQ ID NO: 7008; WAN024B2I_at; Start 17; Stop 41
ttacagagaaatactatgagaatac

SEQ ID NO: 70866 - DNA, 25 bp, Artificial
  probe
  misc_feature (1)..(25): SEQ ID NO: 7008; WAN024B2I_at; Start 4; Stop 28
ttagaacaggcctttacagagaaat

SEQ ID NO: 70867 - DNA, 25 bp, Artificial
  probe
  misc_feature (1)..(25): SEQ ID NO: 7008; WAN024B2I_at; Start 262; Stop 286
gattactacaacaacaaacgaatta

SEQ ID NO: 70868 - DNA, 25 bp, Artificial
  probe
  misc_feature (1)..(25): SEQ ID NO: 7008; WAN024B2I_at; Start 259; Stop 283
attgattactacaacaacaaacgaa

SEQ ID NO: 70869 - DNA, 25 bp, Artificial
  probe
  misc_feature (1)..(25): SEQ ID NO: 7008; WAN024B2I_at; Start 3; Stop 27
gttagaacaggcctttacagagaaa

SEQ ID NO: 70870 - DNA, 25 bp, Artificial
  probe
  misc_feature (1)..(25): SEQ ID NO: 7008; WAN024B2I_at; Start 260; Stop 284
ttgattactacaacaacaaacgaat

SEQ ID NO: 70871 - DNA, 25 bp, Artificial
  probe
  misc_feature (1)..(25): SEQ ID NO: 11; WAN024B2J_at; Start 18; Stop 42
agctcttcttctaaaagtcattaaa

SEQ ID NO: 70872 - DNA, 25 bp, Artificial
  probe
  misc_feature (1)..(25): SEQ ID NO: 11; WAN024B2J_at; Start 14; Stop 38
cgttagctcttcttctaaaagtcat

SEQ ID NO: 70873 - DNA, 25 bp, Artificial
  probe
  misc_feature (1)..(25): SEQ ID NO: 11; WAN024B2J_at; Start 15; Stop 39
gttagctcttcttctaaaagtcatt

SEQ ID NO: 70874 - DNA, 25 bp, Artificial
  probe
  misc_feature (1)..(25): SEQ ID NO: 11; WAN024B2J_at; Start 13; Stop 37
tcgttagctcttcttctaaaagtca

SEQ ID NO: 70875 - DNA, 25 bp, Artificial
  probe
  misc_feature (1)..(25): SEQ ID NO: 11; WAN024B2J_at; Start 7; Stop 31
gaattttcgttagctcttcttctaa

SEQ ID NO: 70876 - DNA, 25 bp, Artificial
  probe
  misc_feature (1)..(25): SEQ ID NO: 11; WAN024B2J_at; Start 16; Stop 40
ttagctcttcttctaaaagtcatta

SEQ ID NO: 70877 - DNA, 25 bp, Artificial
  probe
  misc_feature (1)..(25): SEQ ID NO: 11; WAN024B2J_at; Start 17; Stop 41
tagctcttcttctaaaagtcattaa

SEQ ID NO: 70878 - DNA, 25 bp, Artificial
  probe
  misc_feature (1)..(25): SEQ ID NO: 6781; WAN024B2K_at; Start 38; Stop 62
ttccagcagtactcaaaaactttac

SEQ ID NO: 70879 - DNA, 25 bp, Artificial
  probe
  misc_feature (1)..(25): SEQ ID NO: 6781; WAN024B2K_at; Start 41; Stop 65
cagcagtactcaaaaactttactta

SEQ ID NO: 70880 - DNA, 25 bp, Artificial
  probe
  misc_feature (1)..(25): SEQ ID NO: 6781; WAN024B2K_at; Start 40; Stop 64
ccagcagtactcaaaaactttactt

SEQ ID NO: 70881 - DNA, 25 bp, Artificial
  probe
  misc_feature (1)..(25): SEQ ID NO: 6781; WAN024B2K_at; Start 43; Stop 67
gcagtactcaaaaactttacttatc

SEQ ID NO: 70882 - DNA, 25 bp, Artificial
  probe
  misc_feature (1)..(25): SEQ ID NO: 6781; WAN024B2K_at; Start 36; Stop 60
cattccagcagtactcaaaaacttt

SEQ ID NO: 70883 - DNA, 25 bp, Artificial
  probe
  misc_feature (1)..(25): SEQ ID NO: 6781; WAN024B2K_at; Start 39; Stop 63
tccagcagtactcaaaaactttact

SEQ ID NO: 70884 - DNA, 25 bp, Artificial
  probe
  misc_feature (1)..(25): SEQ ID NO: 6781; WAN024B2K_at; Start 35; Stop 59
ccattccagcagtactcaaaaactt

SEQ ID NO: 70885 - DNA, 25 bp, Artificial
  probe
  misc_feature (1)..(25): SEQ ID NO: 6781; WAN024B2K_at; Start 37; Stop 61
attccagcagtactcaaaaacttta

SEQ ID NO: 70886 - DNA, 25 bp, Artificial
  probe
  misc_feature (1)..(25): SEQ ID NO: 6781; WAN024B2K_at; Start 42; Stop 66
agcagtactcaaaaactttacttat

SEQ ID NO: 70887 - DNA, 25 bp, Artificial
  probe
  misc_feature (1)..(25): SEQ ID NO: 2678; WAN024B2M_s_at; Start 108; Stop 132
ttattacaacaacaagagaattaag

SEQ ID NO: 70888 - DNA, 25 bp, Artificial
  probe
  misc_feature (1)..(25): SEQ ID NO: 2678; WAN024B2M_s_at; Start 110; Stop 134
attacaacaacaagagaattaaggt

SEQ ID NO: 70889 - DNA, 25 bp, Artificial
  probe
  misc_feature (1)..(25): SEQ ID NO: 2678; WAN024B2M_s_at; Start 105; Stop 129
tgattattacaacaacaagagaatt

SEQ ID NO: 70890 - DNA, 25 bp, Artificial
  probe
  misc_feature (1)..(25): SEQ ID NO: 2678; WAN024B2M_s_at; Start 111; Stop 135
ttacaacaacaagagaattaaggta

SEQ ID NO: 70891 - DNA, 25 bp, Artificial
  probe
  misc_feature (1)..(25): SEQ ID NO: 2678; WAN024B2M_s_at; Start 109; Stop 133
tattacaacaacaagagaattaagg

SEQ ID NO: 70892 - DNA, 25 bp, Artificial
  probe
  misc_feature (1)..(25): SEQ ID NO: 2678; WAN024B2M_s_at; Start 107; Stop 131
attattacaacaacaagagaattaa

SEQ ID NO: 70893 - DNA, 25 bp, Artificial
  probe
  misc_feature (1)..(25): SEQ ID NO: 2678; WAN024B2M_s_at; Start 106; Stop 130
gattattacaacaacaagagaatta

SEQ ID NO: 70894 - DNA, 25 bp, Artificial
  probe
  misc_feature (1)..(25): SEQ ID NO: 2678; WAN024B2M_s_at; Start 103; Stop 127
attgattattacaacaacaagagaa

SEQ ID NO: 70895 - DNA, 25 bp, Artificial
  probe
  misc_feature (1)..(25): SEQ ID NO: 2678; WAN024B2M_s_at; Start 104; Stop 128
ttgattattacaacaacaagagaat

SEQ ID NO: 70896 - DNA, 25 bp, Artificial
  probe
  misc_feature (1)..(25): SEQ ID NO: 1463; WAN024B2N_at; Start 429; Stop 453
tttaacagcgaaattatcgcctata

SEQ ID NO: 70897 - DNA, 25 bp, Artificial
  probe
  misc_feature (1)..(25): SEQ ID NO: 1463; WAN024B2N_at; Start 642; Stop 666
aacggtatgatggagtccttctttg

SEQ ID NO: 70898 - DNA, 25 bp, Artificial
  probe
  misc_feature (1)..(25): SEQ ID NO: 1463; WAN024B2N_at; Start 440; Stop 464
aattatcgcctataatctttcaact

SEQ ID NO: 70899 - DNA, 25 bp, Artificial
  probe
  misc_feature (1)..(25): SEQ ID NO: 1463; WAN024B2N_at; Start 666; Stop 690
gggattctgaaatttatggctatga

SEQ ID NO: 70900 - DNA, 25 bp, Artificial
  probe
  misc_feature (1)..(25): SEQ ID NO: 1463; WAN024B2N_at; Start 447; Stop 471
gcctataatctttcaacttcaccca

SEQ ID NO: 70901 - DNA, 25 bp, Artificial
  probe
  misc_feature (1)..(25): SEQ ID NO: 1463; WAN024B2N_at; Start 667; Stop 691
ggattctgaaatttatggctatgag

SEQ ID NO: 70902 - DNA, 25 bp, Artificial
  probe
  misc_feature (1)..(25): SEQ ID NO: 1463; WAN024B2N_at; Start 450; Stop 474
tataatctttcaacttcacccaact

SEQ ID NO: 70903 - DNA, 25 bp, Artificial
  probe
  misc_feature (1)..(25): SEQ ID NO: 1463; WAN024B2N_at; Start 433; Stop 457
acagcgaaattatcgcctataatct

SEQ ID NO: 70904 - DNA, 25 bp, Artificial
  probe
  misc_feature (1)..(25): SEQ ID NO: 1463; WAN024B2N_at; Start 635; Stop 659
ccaagacaacggtatgatggagtcc

SEQ ID NO: 70905 - DNA, 25 bp, Artificial
  probe
  misc_feature (1)..(25): SEQ ID NO: 1463; WAN024B2N_at; Start 431; Stop 455
taacagcgaaattatcgcctataat

SEQ ID NO: 70906 - DNA, 25 bp, Artificial
  probe
  misc_feature (1)..(25): SEQ ID NO: 1463; WAN024B2N_at; Start 434; Stop 458
cagcgaaattatcgcctataatctt

SEQ ID NO: 70907 - DNA, 25 bp, Artificial
  probe
  misc_feature (1)..(25): SEQ ID NO: 1463; WAN024B2N_at; Start 430; Stop 454
ttaacagcgaaattatcgcctataa

SEQ ID NO: 70908 - DNA, 25 bp, Artificial
  probe
  misc_feature (1)..(25): SEQ ID NO: 1463; WAN024B2N_at; Start 640; Stop 664
acaacggtatgatggagtccttctt

SEQ ID NO: 70909 - DNA, 25 bp, Artificial
  probe
  misc_feature (1)..(25): SEQ ID NO: 1463; WAN024B2N_at; Start 445; Stop 469
tcgcctataatctttcaacttcacc

SEQ ID NO: 70910 - DNA, 25 bp, Artificial
  probe
  misc_feature (1)..(25): SEQ ID NO: 1463; WAN024B2N_at; Start 636; Stop 660
caagacaacggtatgatggagtcct

SEQ ID NO: 70911 - DNA, 25 bp, Artificial
  probe
  misc_feature (1)..(25): SEQ ID NO: 1463; WAN024B2N_at; Start 432; Stop 456
aacagcgaaattatcgcctataatc

SEQ ID NO: 70912 - DNA, 25 bp, Artificial
  probe
  misc_feature (1)..(25): SEQ ID NO: 1463; WAN024B2N_at; Start 668; Stop 692
gattctgaaatttatggctatgaga

SEQ ID NO: 70913 - DNA, 25 bp, Artificial
  probe
  misc_feature (1)..(25): SEQ ID NO: 1463; WAN024B2N_at; Start 437; Stop 461
cgaaattatcgcctataatctttca

SEQ ID NO: 70914 - DNA, 25 bp, Artificial
  probe
  misc_feature (1)..(25): SEQ ID NO: 1463; WAN024B2N_at; Start 637; Stop 661
aagacaacggtatgatggagtcctt

SEQ ID NO: 70915 - DNA, 25 bp, Artificial
  probe
  misc_feature (1)..(25): SEQ ID NO: 1463; WAN024B2N_at; Start 665; Stop 689
tgggattctgaaatttatggctatg

SEQ ID NO: 70916 - DNA, 25 bp, Artificial
  probe
  misc_feature (1)..(25): SEQ ID NO: 1463; WAN024B2N_at; Start 448; Stop 472
cctataatctttcaacttcacccaa

SEQ ID NO: 70917 - DNA, 25 bp, Artificial
  probe
  misc_feature (1)..(25): SEQ ID NO: 1463; WAN024B2N_at; Start 639; Stop 663
gacaacggtatgatggagtccttct

SEQ ID NO: 70918 - DNA, 25 bp, Artificial
  probe
  misc_feature (1)..(25): SEQ ID NO: 1463; WAN024B2N_at; Start 453; Stop 477
aatctttcaacttcacccaacttag

SEQ ID NO: 70919 - DNA, 25 bp, Artificial
  probe
  misc_feature (1)..(25): SEQ ID NO: 1463; WAN024B2N_at; Start 428; Stop 452
ctttaacagcgaaattatcgcctat

SEQ ID NO: 70920 - DNA, 25 bp, Artificial
  probe
  misc_feature (1)..(25): SEQ ID NO: 1463; WAN024B2N_at; Start 459; Stop 483
tcaacttcacccaacttagaacaag

SEQ ID NO: 70921 - DNA, 25 bp, Artificial
  probe
  misc_feature (1)..(25): SEQ ID NO: 1463; WAN024B2N_at; Start 444; Stop 468
atcgcctataatctttcaacttcac

SEQ ID NO: 70922 - DNA, 25 bp, Artificial
  probe
  misc_feature (1)..(25): SEQ ID NO: 1463; WAN024B2N_at; Start 443; Stop 467
tatcgcctataatctttcaacttca

SEQ ID NO: 70923 - DNA, 25 bp, Artificial
  probe
  misc_feature (1)..(25): SEQ ID NO: 1463; WAN024B2N_at; Start 460; Stop 484
caacttcacccaacttagaacaagt

SEQ ID NO: 70924 - DNA, 25 bp, Artificial
  probe
  misc_feature (1)..(25): SEQ ID NO: 1463; WAN024B2N_at; Start 438; Stop 462
gaaattatcgcctataatctttcaa

SEQ ID NO: 70925 - DNA, 25 bp, Artificial
  probe
  misc_feature (1)..(25): SEQ ID NO: 1463; WAN024B2N_at; Start 426; Stop 450
ggctttaacagcgaaattatcgcct

SEQ ID NO: 70926 - DNA, 25 bp, Artificial
  probe
  misc_feature (1)..(25): SEQ ID NO: 1463; WAN024B2N_at; Start 638; Stop 662
agacaacggtatgatggagtccttc

SEQ ID NO: 70927 - DNA, 25 bp, Artificial
  probe
  misc_feature (1)..(25): SEQ ID NO: 1463; WAN024B2N_at; Start 641; Stop 665
caacggtatgatggagtccttcttt

SEQ ID NO: 70928 - DNA, 25 bp, Artificial
  probe
  misc_feature (1)..(25): SEQ ID NO: 1463; WAN024B2N_at; Start 427; Stop 451
gctttaacagcgaaattatcgccta

SEQ ID NO: 70929 - DNA, 25 bp, Artificial
  probe
  misc_feature (1)..(25): SEQ ID NO: 1463; WAN024B2N_at; Start 455; Stop 479
tctttcaacttcacccaacttagaa

SEQ ID NO: 70930 - DNA, 25 bp, Artificial
  probe
  misc_feature (1)..(25): SEQ ID NO: 3061; WAN024B2O_at; Start 177; Stop 201
cattttgaaatcggagatgttttat

SEQ ID NO: 70931 - DNA, 25 bp, Artificial
  probe
  misc_feature (1)..(25): SEQ ID NO: 3061; WAN024B2O_at; Start 181; Stop 205
ttgaaatcggagatgttttatggtt

SEQ ID NO: 70932 - DNA, 25 bp, Artificial
  probe
  misc_feature (1)..(25): SEQ ID NO: 3061; WAN024B2O_at; Start 169; Stop 193
ttctttggcattttgaaatcggaga

SEQ ID NO: 70933 - DNA, 25 bp, Artificial
  probe
  misc_feature (1)..(25): SEQ ID NO: 3061; WAN024B2O_at; Start 180; Stop 204
tttgaaatcggagatgttttatggt

SEQ ID NO: 70934 - DNA, 25 bp, Artificial
  probe
  misc_feature (1)..(25): SEQ ID NO: 3061; WAN024B2O_at; Start 176; Stop 200
gcattttgaaatcggagatgtttta

SEQ ID NO: 70935 - DNA, 25 bp, Artificial
  probe
  misc_feature (1)..(25): SEQ ID NO: 3061; WAN024B2O_at; Start 170; Stop 194
tctttggcattttgaaatcggagat

SEQ ID NO: 70936 - DNA, 25 bp, Artificial
  probe
  misc_feature (1)..(25): SEQ ID NO: 3061; WAN024B2O_at; Start 168; Stop 192
tttctttggcattttgaaatcggag

SEQ ID NO: 70937 - DNA, 25 bp, Artificial
  probe
  misc_feature (1)..(25): SEQ ID NO: 3061; WAN024B2O_at; Start 171; Stop 195
ctttggcattttgaaatcggagatg

SEQ ID NO: 70938 - DNA, 25 bp, Artificial
  probe
  misc_feature (1)..(25): SEQ ID NO: 3061; WAN024B2O_at; Start 172; Stop 196
tttggcattttgaaatcggagatgt

SEQ ID NO: 70939 - DNA, 25 bp, Artificial
  probe
  misc_feature (1)..(25): SEQ ID NO: 3061; WAN024B2O_at; Start 175; Stop 199
ggcattttgaaatcggagatgtttt

SEQ ID NO: 70940 - DNA, 25 bp, Artificial
  probe
  misc_feature (1)..(25): SEQ ID NO: 3061; WAN024B2O_at; Start 173; Stop 197
ttggcattttgaaatcggagatgtt

SEQ ID NO: 70941 - DNA, 25 bp, Artificial
  probe
  misc_feature (1)..(25): SEQ ID NO: 3061; WAN024B2O_at; Start 189; Stop 213
ggagatgttttatggttatgagaag

SEQ ID NO: 70942 - DNA, 25 bp, Artificial
  probe
  misc_feature (1)..(25): SEQ ID NO: 3061; WAN024B2O_at; Start 174; Stop 198
tggcattttgaaatcggagatgttt

SEQ ID NO: 70943 - DNA, 25 bp, Artificial
  probe
  misc_feature (1)..(25): SEQ ID NO: 2222; WAN024B2P_x_at; Start 347; Stop 371
atggctatgagaaaacatttaaatc

SEQ ID NO: 70944 - DNA, 25 bp, Artificial
  probe
  misc_feature (1)..(25): SEQ ID NO: 2222; WAN024B2P_x_at; Start 178; Stop 202
tacgagaatacgattctccatagtg

SEQ ID NO: 70945 - DNA, 25 bp, Artificial
  probe
  misc_feature (1)..(25): SEQ ID NO: 2222; WAN024B2P_x_at; Start 330; Stop 354
aaaatccgaaatgttttatggctat

SEQ ID NO: 70946 - DNA, 25 bp, Artificial
  probe
  misc_feature (1)..(25): SEQ ID NO: 2222; WAN024B2P_x_at; Start 225; Stop 249
cgattcttatcatcggttcctagag

SEQ ID NO: 70947 - DNA, 25 bp, Artificial
  probe
  misc_feature (1)..(25): SEQ ID NO: 2222; WAN024B2P_x_at; Start 259; Stop 283
attcaagcatctatgtcacgcaagg

SEQ ID NO: 70948 - DNA, 25 bp, Artificial
  probe
  misc_feature (1)..(25): SEQ ID NO: 2222; WAN024B2P_x_at; Start 351; Stop 375
ctatgagaaaacatttaaatcactt

SEQ ID NO: 70949 - DNA, 25 bp, Artificial
  probe
  misc_feature (1)..(25): SEQ ID NO: 2222; WAN024B2P_x_at; Start 350; Stop 374
gctatgagaaaacatttaaatcact

SEQ ID NO: 70950 - DNA, 25 bp, Artificial
  probe
  misc_feature (1)..(25): SEQ ID NO: 2222; WAN024B2P_x_at; Start 352; Stop 376
tatgagaaaacatttaaatcactta

SEQ ID NO: 70951 - DNA, 25 bp, Artificial
  probe
  misc_feature (1)..(25): SEQ ID NO: 2222; WAN024B2P_x_at; Start 63; Stop 87
cttatcaccagttttagatggcttt

SEQ ID NO: 70952 - DNA, 25 bp, Artificial
  probe
  misc_feature (1)..(25): SEQ ID NO: 2222; WAN024B2P_x_at; Start 349; Stop 373
ggctatgagaaaacatttaaatcac

SEQ ID NO: 70953 - DNA, 25 bp, Artificial
  probe
  misc_feature (1)..(25): SEQ ID NO: 2222; WAN024B2P_x_at; Start 62; Stop 86
acttatcaccagttttagatggctt

SEQ ID NO: 70954 - DNA, 25 bp, Artificial
  probe
  misc_feature (1)..(25): SEQ ID NO: 2222; WAN024B2P_x_at; Start 345; Stop 369
ttatggctatgagaaaacatttaaa

SEQ ID NO: 70955 - DNA, 25 bp, Artificial
  probe
  misc_feature (1)..(25): SEQ ID NO: 2222; WAN024B2P_x_at; Start 335; Stop 359
ccgaaatgttttatggctatgagaa

SEQ ID NO: 70956 - DNA, 25 bp, Artificial
  probe
  misc_feature (1)..(25): SEQ ID NO: 2222; WAN024B2P_x_at; Start 334; Stop 358
tccgaaatgttttatggctatgaga

SEQ ID NO: 70957 - DNA, 25 bp, Artificial
  probe
  misc_feature (1)..(25): SEQ ID NO: 2222; WAN024B2P_x_at; Start 64; Stop 88
ttatcaccagttttagatggcttta

SEQ ID NO: 70958 - DNA, 25 bp, Artificial
  probe
  misc_feature (1)..(25): SEQ ID NO: 2222; WAN024B2P_x_at; Start 171; Stop 195
gaagcactacgagaatacgattctc

SEQ ID NO: 70959 - DNA, 25 bp, Artificial
  probe
  misc_feature (1)..(25): SEQ ID NO: 2222; WAN024B2P_x_at; Start 65; Stop 89
tatcaccagttttagatggctttaa

SEQ ID NO: 70960 - DNA, 25 bp, Artificial
  probe
  misc_feature (1)..(25): SEQ ID NO: 2222; WAN024B2P_x_at; Start 224; Stop 248
acgattcttatcatcggttcctaga

SEQ ID NO: 70961 - DNA, 25 bp, Artificial
  probe
  misc_feature (1)..(25): SEQ ID NO: 2222; WAN024B2P_x_at; Start 47; Stop 71
gtactcaaaagctttacttatcacc

SEQ ID NO: 70962 - DNA, 25 bp, Artificial
  probe
  misc_feature (1)..(25): SEQ ID NO: 2222; WAN024B2P_x_at; Start 329; Stop 353
taaaatccgaaatgttttatggcta

SEQ ID NO: 70963 - DNA, 25 bp, Artificial
  probe
  misc_feature (1)..(25): SEQ ID NO: 2222; WAN024B2P_x_at; Start 346; Stop 370
tatggctatgagaaaacatttaaat

SEQ ID NO: 70964 - DNA, 25 bp, Artificial
  probe
  misc_feature (1)..(25): SEQ ID NO: 2222; WAN024B2P_x_at; Start 170; Stop 194
agaagcactacgagaatacgattct

SEQ ID NO: 70965 - DNA, 25 bp, Artificial
  probe
  misc_feature (1)..(25): SEQ ID NO: 2222; WAN024B2P_x_at; Start 260; Stop 284
ttcaagcatctatgtcacgcaaggg

SEQ ID NO: 70966 - DNA, 25 bp, Artificial
  probe
  misc_feature (1)..(25): SEQ ID NO: 2222; WAN024B2P_x_at; Start 180; Stop 204
cgagaatacgattctccatagtgac

SEQ ID NO: 70967 - DNA, 25 bp, Artificial
  probe
  misc_feature (1)..(25): SEQ ID NO: 2222; WAN024B2P_x_at; Start 332; Stop 356
aatccgaaatgttttatggctatga

SEQ ID NO: 70968 - DNA, 25 bp, Artificial
  probe
  misc_feature (1)..(25): SEQ ID NO: 2222; WAN024B2P_x_at; Start 184; Stop 208
aatacgattctccatagtgaccaag

SEQ ID NO: 70969 - DNA, 25 bp, Artificial
  probe
  misc_feature (1)..(25): SEQ ID NO: 2222; WAN024B2P_x_at; Start 331; Stop 355
aaatccgaaatgttttatggctatg

SEQ ID NO: 70970 - DNA, 25 bp, Artificial
  probe
  misc_feature (1)..(25): SEQ ID NO: 2222; WAN024B2P_x_at; Start 348; Stop 372
tggctatgagaaaacatttaaatca

SEQ ID NO: 70971 - DNA, 25 bp, Artificial
  probe
  misc_feature (1)..(25): SEQ ID NO: 2222; WAN024B2P_x_at; Start 333; Stop 357
atccgaaatgttttatggctatgag

SEQ ID NO: 70972 - DNA, 25 bp, Artificial
  probe
  misc_feature (1)..(25): SEQ ID NO: 2222; WAN024B2P_x_at; Start 174; Stop 198
gcactacgagaatacgattctccat

SEQ ID NO: 70973 - DNA, 25 bp, Artificial
  probe
  misc_feature (1)..(25): SEQ ID NO: 2222; WAN024B2P_x_at; Start 169; Stop 193
gagaagcactacgagaatacgattc

SEQ ID NO: 70974 - DNA, 25 bp, Artificial
  probe
  misc_feature (1)..(25): SEQ ID NO: 2222; WAN024B2P_x_at; Start 353; Stop 377
atgagaaaacatttaaatcacttaa

SEQ ID NO: 70975 - DNA, 25 bp, Artificial
  probe
  misc_feature (1)..(25): SEQ ID NO: 2222; WAN024B2P_x_at; Start 226; Stop 250
gattcttatcatcggttcctagaga

SEQ ID NO: 70976 - DNA, 25 bp, Artificial
  probe
  misc_feature (1)..(25): SEQ ID NO: 2222; WAN024B2P_x_at; Start 168; Stop 192
agagaagcactacgagaatacgatt

SEQ ID NO: 70977 - DNA, 25 bp, Artificial
  probe
  misc_feature (1)..(25): SEQ ID NO: 1464; WAN024B2R_s_at; Start 327; Stop 351
atttgaaggctctaaaacaatggaa

SEQ ID NO: 70978 - DNA, 25 bp, Artificial
  probe
  misc_feature (1)..(25): SEQ ID NO: 1464; WAN024B2R_s_at; Start 326; Stop 350
aatttgaaggctctaaaacaatgga

SEQ ID NO: 70979 - DNA, 25 bp, Artificial
  probe
  misc_feature (1)..(25): SEQ ID NO: 1464; WAN024B2R_s_at; Start 325; Stop 349
caatttgaaggctctaaaacaatgg

SEQ ID NO: 70980 - DNA, 25 bp, Artificial
  probe
  misc_feature (1)..(25): SEQ ID NO: 5606; WAN024B2S_at; Start 162; Stop 186
ctcgatcttaagtagggtagctgca

SEQ ID NO: 70981 - DNA, 25 bp, Artificial
  probe
  misc_feature (1)..(25): SEQ ID NO: 5606; WAN024B2S_at; Start 200; Stop 224
gagtaggattactgaccaagatttc

SEQ ID NO: 70982 - DNA, 25 bp, Artificial
  probe
  misc_feature (1)..(25): SEQ ID NO: 5606; WAN024B2S_at; Start 144; Stop 168
tggtattagtatggcacgctcgatc

SEQ ID NO: 70983 - DNA, 25 bp, Artificial
  probe
  misc_feature (1)..(25): SEQ ID NO: 5606; WAN024B2S_at; Start 3; Stop 27
ggtatcttctaagtatgctgcaaga

SEQ ID NO: 70984 - DNA, 25 bp, Artificial
  probe
  misc_feature (1)..(25): SEQ ID NO: 5606; WAN024B2S_at; Start 84; Stop 108
gggcattgtgaatgcattgattggt

SEQ ID NO: 70985 - DNA, 25 bp, Artificial
  probe
  misc_feature (1)..(25): SEQ ID NO: 5606; WAN024B2S_at; Start 169; Stop 193
ttaagtagggtagctgcaactgcag

SEQ ID NO: 70986 - DNA, 25 bp, Artificial
  probe
  misc_feature (1)..(25): SEQ ID NO: 5606; WAN024B2S_at; Start 172; Stop 196
agtagggtagctgcaactgcagcag

SEQ ID NO: 70987 - DNA, 25 bp, Artificial
  probe
  misc_feature (1)..(25): SEQ ID NO: 5606; WAN024B2S_at; Start 168; Stop 192
cttaagtagggtagctgcaactgca

SEQ ID NO: 70988 - DNA, 25 bp, Artificial
  probe
  misc_feature (1)..(25): SEQ ID NO: 5606; WAN024B2S_at; Start 154; Stop 178
atggcacgctcgatcttaagtaggg

SEQ ID NO: 70989 - DNA, 25 bp, Artificial
  probe
  misc_feature (1)..(25): SEQ ID NO: 5606; WAN024B2S_at; Start 152; Stop 176
gtatggcacgctcgatcttaagtag

SEQ ID NO: 70990 - DNA, 25 bp, Artificial
  probe
  misc_feature (1)..(25): SEQ ID NO: 5606; WAN024B2S_at; Start 7; Stop 31
tcttctaagtatgctgcaagagcta

SEQ ID NO: 70991 - DNA, 25 bp, Artificial
  probe
  misc_feature (1)..(25): SEQ ID NO: 5606; WAN024B2S_at; Start 8; Stop 32
cttctaagtatgctgcaagagctag

SEQ ID NO: 70992 - DNA, 25 bp, Artificial
  probe
  misc_feature (1)..(25): SEQ ID NO: 5606; WAN024B2S_at; Start 12; Stop 36
taagtatgctgcaagagctagtttc

SEQ ID NO: 70993 - DNA, 25 bp, Artificial
  probe
  misc_feature (1)..(25): SEQ ID NO: 5606; WAN024B2S_at; Start 157; Stop 181
gcacgctcgatcttaagtagggtag

SEQ ID NO: 70994 - DNA, 25 bp, Artificial
  probe
  misc_feature (1)..(25): SEQ ID NO: 5606; WAN024B2S_at; Start 156; Stop 180
ggcacgctcgatcttaagtagggta

SEQ ID NO: 70995 - DNA, 25 bp, Artificial
  probe
  misc_feature (1)..(25): SEQ ID NO: 5606; WAN024B2S_at; Start 160; Stop 184
cgctcgatcttaagtagggtagctg

SEQ ID NO: 70996 - DNA, 25 bp, Artificial
  probe
  misc_feature (1)..(25): SEQ ID NO: 5606; WAN024B2S_at; Start 147; Stop 171
tattagtatggcacgctcgatctta

SEQ ID NO: 70997 - DNA, 25 bp, Artificial
  probe
  misc_feature (1)..(25): SEQ ID NO: 5606; WAN024B2S_at; Start 150; Stop 174
tagtatggcacgctcgatcttaagt

SEQ ID NO: 70998 - DNA, 25 bp, Artificial
  probe
  misc_feature (1)..(25): SEQ ID NO: 5606; WAN024B2S_at; Start 148; Stop 172
attagtatggcacgctcgatcttaa

SEQ ID NO: 70999 - DNA, 25 bp, Artificial
  probe
  misc_feature (1)..(25): SEQ ID NO: 5606; WAN024B2S_at; Start 161; Stop 185
gctcgatcttaagtagggtagctgc

SEQ ID NO: 71000 - DNA, 25 bp, Artificial
  probe
  misc_feature (1)..(25): SEQ ID NO: 5606; WAN024B2S_at; Start 13; Stop 37
aagtatgctgcaagagctagtttct

SEQ ID NO: 71001 - DNA, 25 bp, Artificial
  probe
  misc_feature (1)..(25): SEQ ID NO: 5606; WAN024B2S_at; Start 171; Stop 195
aagtagggtagctgcaactgcagca

SEQ ID NO: 71002 - DNA, 25 bp, Artificial
  probe
  misc_feature (1)..(25): SEQ ID NO: 5606; WAN024B2S_at; Start 5; Stop 29
tatcttctaagtatgctgcaagagc

SEQ ID NO: 71003 - DNA, 25 bp, Artificial
  probe
  misc_feature (1)..(25): SEQ ID NO: 5606; WAN024B2S_at; Start 2; Stop 26
tggtatcttctaagtatgctgcaag

SEQ ID NO: 71004 - DNA, 25 bp, Artificial
  probe
  misc_feature (1)..(25): SEQ ID NO: 5606; WAN024B2S_at; Start 146; Stop 170
gtattagtatggcacgctcgatctt

SEQ ID NO: 71005 - DNA, 25 bp, Artificial
  probe
  misc_feature (1)..(25): SEQ ID NO: 5606; WAN024B2S_at; Start 201; Stop 225
agtaggattactgaccaagatttct

SEQ ID NO: 71006 - DNA, 25 bp, Artificial
  probe
  misc_feature (1)..(25): SEQ ID NO: 5606; WAN024B2S_at; Start 155; Stop 179
tggcacgctcgatcttaagtagggt

SEQ ID NO: 71007 - DNA, 25 bp, Artificial
  probe
  misc_feature (1)..(25): SEQ ID NO: 5606; WAN024B2S_at; Start 164; Stop 188
cgatcttaagtagggtagctgcaac

SEQ ID NO: 71008 - DNA, 25 bp, Artificial
  probe
  misc_feature (1)..(25): SEQ ID NO: 5606; WAN024B2S_at; Start 158; Stop 182
cacgctcgatcttaagtagggtagc

SEQ ID NO: 71009 - DNA, 25 bp, Artificial
  probe
  misc_feature (1)..(25): SEQ ID NO: 5606; WAN024B2S_at; Start 170; Stop 194
taagtagggtagctgcaactgcagc

SEQ ID NO: 71010 - DNA, 25 bp, Artificial
  probe
  misc_feature (1)..(25): SEQ ID NO: 5606; WAN024B2S_at; Start 163; Stop 187
tcgatcttaagtagggtagctgcaa

SEQ ID NO: 71011 - DNA, 25 bp, Artificial
  probe
  misc_feature (1)..(25): SEQ ID NO: 5606; WAN024B2S_at; Start 151; Stop 175
agtatggcacgctcgatcttaagta

SEQ ID NO: 71012 - DNA, 25 bp, Artificial
  probe
  misc_feature (1)..(25): SEQ ID NO: 5606; WAN024B2S_at; Start 153; Stop 177
tatggcacgctcgatcttaagtagg

SEQ ID NO: 71013 - DNA, 25 bp, Artificial
  probe
  misc_feature (1)..(25): SEQ ID NO: 5606; WAN024B2S_at; Start 10; Stop 34
tctaagtatgctgcaagagctagtt

SEQ ID NO: 71014 - DNA, 25 bp, Artificial
  probe
  misc_feature (1)..(25): SEQ ID NO: 5608; WAN024B2T_at; Start 219; Stop 243
attgactaagatttttggatggatt

SEQ ID NO: 71015 - DNA, 25 bp, Artificial
  probe
  misc_feature (1)..(25): SEQ ID NO: 5608; WAN024B2T_at; Start 213; Stop 237
aggattattgactaagatttttgga

SEQ ID NO: 71016 - DNA, 25 bp, Artificial
  probe
  misc_feature (1)..(25): SEQ ID NO: 5608; WAN024B2T_at; Start 217; Stop 241
ttattgactaagatttttggatgga

SEQ ID NO: 71017 - DNA, 25 bp, Artificial
  probe
  misc_feature (1)..(25): SEQ ID NO: 5608; WAN024B2T_at; Start 214; Stop 238
ggattattgactaagatttttggat

SEQ ID NO: 71018 - DNA, 25 bp, Artificial
  probe
  misc_feature (1)..(25): SEQ ID NO: 5608; WAN024B2T_at; Start 215; Stop 239
gattattgactaagatttttggatg

SEQ ID NO: 71019 - DNA, 25 bp, Artificial
  probe
  misc_feature (1)..(25): SEQ ID NO: 5608; WAN024B2T_at; Start 212; Stop 236
taggattattgactaagatttttgg

SEQ ID NO: 71020 - DNA, 25 bp, Artificial
  probe
  misc_feature (1)..(25): SEQ ID NO: 5608; WAN024B2T_at; Start 211; Stop 235
gtaggattattgactaagatttttg

SEQ ID NO: 71021 - DNA, 25 bp, Artificial
  probe
  misc_feature (1)..(25): SEQ ID NO: 5608; WAN024B2T_at; Start 210; Stop 234
agtaggattattgactaagattttt

SEQ ID NO: 71022 - DNA, 25 bp, Artificial
  probe
  misc_feature (1)..(25): SEQ ID NO: 5608; WAN024B2T_at; Start 216; Stop 240
attattgactaagatttttggatgg

SEQ ID NO: 71023 - DNA, 25 bp, Artificial
  probe
  misc_feature (1)..(25): SEQ ID NO: 5608; WAN024B2T_at; Start 209; Stop 233
gagtaggattattgactaagatttt

SEQ ID NO: 71024 - DNA, 25 bp, Artificial
  probe
  misc_feature (1)..(25): SEQ ID NO: 5608; WAN024B2T_at; Start 220; Stop 244
ttgactaagatttttggatggattt

SEQ ID NO: 71025 - DNA, 25 bp, Artificial
  probe
  misc_feature (1)..(25): SEQ ID NO: 5608; WAN024B2T_at; Start 218; Stop 242
tattgactaagatttttggatggat

SEQ ID NO: 71026 - DNA, 25 bp, Artificial
  probe
  misc_feature (1)..(25): SEQ ID NO: 7197; WAN024B2U_at; Start 131; Stop 155
tccgatatgacagccgagttttggt

SEQ ID NO: 71027 - DNA, 25 bp, Artificial
  probe
  misc_feature (1)..(25): SEQ ID NO: 7197; WAN024B2U_at; Start 130; Stop 154
ttccgatatgacagccgagttttgg

SEQ ID NO: 71028 - DNA, 25 bp, Artificial
  probe
  misc_feature (1)..(25): SEQ ID NO: 7197; WAN024B2U_at; Start 132; Stop 156
ccgatatgacagccgagttttggta

SEQ ID NO: 71029 - DNA, 25 bp, Artificial
  probe
  misc_feature (1)..(25): SEQ ID NO: 7197; WAN024B2U_at; Start 133; Stop 157
cgatatgacagccgagttttggtag

SEQ ID NO: 71030 - DNA, 25 bp, Artificial
  probe
  misc_feature (1)..(25): SEQ ID NO: 7197; WAN024B2U_at; Start 129; Stop 153
cttccgatatgacagccgagttttg

SEQ ID NO: 71031 - DNA, 25 bp, Artificial
  probe
  misc_feature (1)..(25): SEQ ID NO: 6367; WAN024B2V_at; Start 247; Stop 271
gaagaagaggcagtggtcttcccag

SEQ ID NO: 71032 - DNA, 25 bp, Artificial
  probe
  misc_feature (1)..(25): SEQ ID NO: 6367; WAN024B2V_at; Start 239; Stop 263
ccatctacgaagaagaggcagtggt

SEQ ID NO: 71033 - DNA, 25 bp, Artificial
  probe
  misc_feature (1)..(25): SEQ ID NO: 6367; WAN024B2V_at; Start 249; Stop 273
agaagaggcagtggtcttcccagtt

SEQ ID NO: 71034 - DNA, 25 bp, Artificial
  probe
  misc_feature (1)..(25): SEQ ID NO: 6367; WAN024B2V_at; Start 245; Stop 269
acgaagaagaggcagtggtcttccc

SEQ ID NO: 71035 - DNA, 25 bp, Artificial
  probe
  misc_feature (1)..(25): SEQ ID NO: 6367; WAN024B2V_at; Start 246; Stop 270
cgaagaagaggcagtggtcttccca

SEQ ID NO: 71036 - DNA, 25 bp, Artificial
  probe
  misc_feature (1)..(25): SEQ ID NO: 6367; WAN024B2V_at; Start 252; Stop 276
agaggcagtggtcttcccagttctt

SEQ ID NO: 71037 - DNA, 25 bp, Artificial
  probe
  misc_feature (1)..(25): SEQ ID NO: 6367; WAN024B2V_at; Start 243; Stop 267
ctacgaagaagaggcagtggtcttc

SEQ ID NO: 71038 - DNA, 25 bp, Artificial
  probe
  misc_feature (1)..(25): SEQ ID NO: 6367; WAN024B2V_at; Start 254; Stop 278
aggcagtggtcttcccagttcttca

SEQ ID NO: 71039 - DNA, 25 bp, Artificial
  probe
  misc_feature (1)..(25): SEQ ID NO: 6367; WAN024B2V_at; Start 233; Stop 257
caagtgccatctacgaagaagaggc

SEQ ID NO: 71040 - DNA, 25 bp, Artificial
  probe
  misc_feature (1)..(25): SEQ ID NO: 6367; WAN024B2V_at; Start 244; Stop 268
tacgaagaagaggcagtggtcttcc

SEQ ID NO: 71041 - DNA, 25 bp, Artificial
  probe
  misc_feature (1)..(25): SEQ ID NO: 6367; WAN024B2V_at; Start 251; Stop 275
aagaggcagtggtcttcccagttct

SEQ ID NO: 71042 - DNA, 25 bp, Artificial
  probe
  misc_feature (1)..(25): SEQ ID NO: 6367; WAN024B2V_at; Start 238; Stop 262
gccatctacgaagaagaggcagtgg

SEQ ID NO: 71043 - DNA, 25 bp, Artificial
  probe
  misc_feature (1)..(25): SEQ ID NO: 6367; WAN024B2V_at; Start 242; Stop 266
tctacgaagaagaggcagtggtctt

SEQ ID NO: 71044 - DNA, 25 bp, Artificial
  probe
  misc_feature (1)..(25): SEQ ID NO: 6367; WAN024B2V_at; Start 235; Stop 259
agtgccatctacgaagaagaggcag

SEQ ID NO: 71045 - DNA, 25 bp, Artificial
  probe
  misc_feature (1)..(25): SEQ ID NO: 6367; WAN024B2V_at; Start 237; Stop 261
tgccatctacgaagaagaggcagtg

SEQ ID NO: 71046 - DNA, 25 bp, Artificial
  probe
  misc_feature (1)..(25): SEQ ID NO: 6367; WAN024B2V_at; Start 236; Stop 260
gtgccatctacgaagaagaggcagt

SEQ ID NO: 71047 - DNA, 25 bp, Artificial
  probe
  misc_feature (1)..(25): SEQ ID NO: 6367; WAN024B2V_at; Start 253; Stop 277
gaggcagtggtcttcccagttcttc

SEQ ID NO: 71048 - DNA, 25 bp, Artificial
  probe
  misc_feature (1)..(25): SEQ ID NO: 6367; WAN024B2V_at; Start 248; Stop 272
aagaagaggcagtggtcttcccagt

SEQ ID NO: 71049 - DNA, 25 bp, Artificial
  probe
  misc_feature (1)..(25): SEQ ID NO: 6367; WAN024B2V_at; Start 234; Stop 258
aagtgccatctacgaagaagaggca

SEQ ID NO: 71050 - DNA, 25 bp, Artificial
  probe
  misc_feature (1)..(25): SEQ ID NO: 6367; WAN024B2V_at; Start 255; Stop 279
ggcagtggtcttcccagttcttcac

SEQ ID NO: 71051 - DNA, 25 bp, Artificial
  probe
  misc_feature (1)..(25): SEQ ID NO: 6367; WAN024B2V_at; Start 232; Stop 256
ccaagtgccatctacgaagaagagg

SEQ ID NO: 71052 - DNA, 25 bp, Artificial
  probe
  misc_feature (1)..(25): SEQ ID NO: 6367; WAN024B2V_at; Start 240; Stop 264
catctacgaagaagaggcagtggtc

SEQ ID NO: 71053 - DNA, 25 bp, Artificial
  probe
  misc_feature (1)..(25): SEQ ID NO: 6367; WAN024B2V_at; Start 241; Stop 265
atctacgaagaagaggcagtggtct

SEQ ID NO: 71054 - DNA, 25 bp, Artificial
  probe
  misc_feature (1)..(25): SEQ ID NO: 6367; WAN024B2V_at; Start 250; Stop 274
gaagaggcagtggtcttcccagttc

SEQ ID NO: 71055 - DNA, 25 bp, Artificial
  probe
  misc_feature (1)..(25): SEQ ID NO: 6265; WAN024B2W_at; Start 61; Stop 85
atcacctacccagatttaatcgagc

SEQ ID NO: 71056 - DNA, 25 bp, Artificial
  probe
  misc_feature (1)..(25): SEQ ID NO: 6265; WAN024B2W_at; Start 67; Stop 91
tacccagatttaatcgagctactgg

SEQ ID NO: 71057 - DNA, 25 bp, Artificial
  probe
  misc_feature (1)..(25): SEQ ID NO: 6265; WAN024B2W_at; Start 48; Stop 72
ggacaatatggggatcacctaccca

SEQ ID NO: 71058 - DNA, 25 bp, Artificial
  probe
  misc_feature (1)..(25): SEQ ID NO: 6265; WAN024B2W_at; Start 85; Stop 109
ctactggttgaccttgccaaggaaa

SEQ ID NO: 71059 - DNA, 25 bp, Artificial
  probe
  misc_feature (1)..(25): SEQ ID NO: 6265; WAN024B2W_at; Start 62; Stop 86
tcacctacccagatttaatcgagct

SEQ ID NO: 71060 - DNA, 25 bp, Artificial
  probe
  misc_feature (1)..(25): SEQ ID NO: 6265; WAN024B2W_at; Start 79; Stop 103
atcgagctactggttgaccttgcca

SEQ ID NO: 71061 - DNA, 25 bp, Artificial
  probe
  misc_feature (1)..(25): SEQ ID NO: 6265; WAN024B2W_at; Start 74; Stop 98
atttaatcgagctactggttgacct

SEQ ID NO: 71062 - DNA, 25 bp, Artificial
  probe
  misc_feature (1)..(25): SEQ ID NO: 6265; WAN024B2W_at; Start 83; Stop 107
agctactggttgaccttgccaagga

SEQ ID NO: 71063 - DNA, 25 bp, Artificial
  probe
  misc_feature (1)..(25): SEQ ID NO: 6265; WAN024B2W_at; Start 77; Stop 101
taatcgagctactggttgaccttgc

SEQ ID NO: 71064 - DNA, 25 bp, Artificial
  probe
  misc_feature (1)..(25): SEQ ID NO: 6265; WAN024B2W_at; Start 80; Stop 104
tcgagctactggttgaccttgccaa

SEQ ID NO: 71065 - DNA, 25 bp, Artificial
  probe
  misc_feature (1)..(25): SEQ ID NO: 6265; WAN024B2W_at; Start 68; Stop 92
acccagatttaatcgagctactggt

SEQ ID NO: 71066 - DNA, 25 bp, Artificial
  probe
  misc_feature (1)..(25): SEQ ID NO: 6265; WAN024B2W_at; Start 72; Stop 96
agatttaatcgagctactggttgac

SEQ ID NO: 71067 - DNA, 25 bp, Artificial
  probe
  misc_feature (1)..(25): SEQ ID NO: 6265; WAN024B2W_at; Start 63; Stop 87
cacctacccagatttaatcgagcta

SEQ ID NO: 71068 - DNA, 25 bp, Artificial
  probe
  misc_feature (1)..(25): SEQ ID NO: 6265; WAN024B2W_at; Start 86; Stop 110
tactggttgaccttgccaaggaaag

SEQ ID NO: 71069 - DNA, 25 bp, Artificial
  probe
  misc_feature (1)..(25): SEQ ID NO: 6265; WAN024B2W_at; Start 64; Stop 88
acctacccagatttaatcgagctac

SEQ ID NO: 71070 - DNA, 25 bp, Artificial
  probe
  misc_feature (1)..(25): SEQ ID NO: 6265; WAN024B2W_at; Start 76; Stop 100
ttaatcgagctactggttgaccttg

SEQ ID NO: 71071 - DNA, 25 bp, Artificial
  probe
  misc_feature (1)..(25): SEQ ID NO: 6265; WAN024B2W_at; Start 69; Stop 93
cccagatttaatcgagctactggtt

SEQ ID NO: 71072 - DNA, 25 bp, Artificial
  probe
  misc_feature (1)..(25): SEQ ID NO: 6265; WAN024B2W_at; Start 50; Stop 74
acaatatggggatcacctacccaga

SEQ ID NO: 71073 - DNA, 25 bp, Artificial
  probe
  misc_feature (1)..(25): SEQ ID NO: 6265; WAN024B2W_at; Start 78; Stop 102
aatcgagctactggttgaccttgcc

SEQ ID NO: 71074 - DNA, 25 bp, Artificial
  probe
  misc_feature (1)..(25): SEQ ID NO: 6265; WAN024B2W_at; Start 82; Stop 106
gagctactggttgaccttgccaagg

SEQ ID NO: 71075 - DNA, 25 bp, Artificial
  probe
  misc_feature (1)..(25): SEQ ID NO: 6265; WAN024B2W_at; Start 59; Stop 83
ggatcacctacccagatttaatcga

SEQ ID NO: 71076 - DNA, 25 bp, Artificial
  probe
  misc_feature (1)..(25): SEQ ID NO: 6265; WAN024B2W_at; Start 49; Stop 73
gacaatatggggatcacctacccag

SEQ ID NO: 71077 - DNA, 25 bp, Artificial
  probe
  misc_feature (1)..(25): SEQ ID NO: 6265; WAN024B2W_at; Start 84; Stop 108
gctactggttgaccttgccaaggaa

SEQ ID NO: 71078 - DNA, 25 bp, Artificial
  probe
  misc_feature (1)..(25): SEQ ID NO: 6265; WAN024B2W_at; Start 73; Stop 97
gatttaatcgagctactggttgacc

SEQ ID NO: 71079 - DNA, 25 bp, Artificial
  probe
  misc_feature (1)..(25): SEQ ID NO: 6265; WAN024B2W_at; Start 71; Stop 95
cagatttaatcgagctactggttga

SEQ ID NO: 71080 - DNA, 25 bp, Artificial
  probe
  misc_feature (1)..(25): SEQ ID NO: 6265; WAN024B2W_at; Start 65; Stop 89
cctacccagatttaatcgagctact

SEQ ID NO: 71081 - DNA, 25 bp, Artificial
  probe
  misc_feature (1)..(25): SEQ ID NO: 6265; WAN024B2W_at; Start 66; Stop 90
ctacccagatttaatcgagctactg

SEQ ID NO: 71082 - DNA, 25 bp, Artificial
  probe
  misc_feature (1)..(25): SEQ ID NO: 6265; WAN024B2W_at; Start 45; Stop 69
ttgggacaatatggggatcacctac

SEQ ID NO: 71083 - DNA, 25 bp, Artificial
  probe
  misc_feature (1)..(25): SEQ ID NO: 6265; WAN024B2W_at; Start 60; Stop 84
gatcacctacccagatttaatcgag

SEQ ID NO: 71084 - DNA, 25 bp, Artificial
  probe
  misc_feature (1)..(25): SEQ ID NO: 6265; WAN024B2W_at; Start 51; Stop 75
caatatggggatcacctacccagat

SEQ ID NO: 71085 - DNA, 25 bp, Artificial
  probe
  misc_feature (1)..(25): SEQ ID NO: 6265; WAN024B2W_at; Start 81; Stop 105
cgagctactggttgaccttgccaag

SEQ ID NO: 71086 - DNA, 25 bp, Artificial
  probe
  misc_feature (1)..(25): SEQ ID NO: 6265; WAN024B2W_at; Start 52; Stop 76
aatatggggatcacctacccagatt

SEQ ID NO: 71087 - DNA, 25 bp, Artificial
  probe
  misc_feature (1)..(25): SEQ ID NO: 6265; WAN024B2W_at; Start 70; Stop 94
ccagatttaatcgagctactggttg

SEQ ID NO: 71088 - DNA, 25 bp, Artificial
  probe
  misc_feature (1)..(25): SEQ ID NO: 6265; WAN024B2W_at; Start 75; Stop 99
tttaatcgagctactggttgacctt

SEQ ID NO: 71089 - DNA, 25 bp, Artificial
  probe
  misc_feature (1)..(25): SEQ ID NO: 7199; WAN024B2X_at; Start 306; Stop 330
agctaacatcagtgatgaggtgata

SEQ ID NO: 71090 - DNA, 25 bp, Artificial
  probe
  misc_feature (1)..(25): SEQ ID NO: 7199; WAN024B2X_at; Start 321; Stop 345
tgaggtgatagctgtcatgcgtcga

SEQ ID NO: 71091 - DNA, 25 bp, Artificial
  probe
  misc_feature (1)..(25): SEQ ID NO: 7199; WAN024B2X_at; Start 307; Stop 331
gctaacatcagtgatgaggtgatag

SEQ ID NO: 71092 - DNA, 25 bp, Artificial
  probe
  misc_feature (1)..(25): SEQ ID NO: 7199; WAN024B2X_at; Start 311; Stop 335
acatcagtgatgaggtgatagctgt

SEQ ID NO: 71093 - DNA, 25 bp, Artificial
  probe
  misc_feature (1)..(25): SEQ ID NO: 7199; WAN024B2X_at; Start 65; Stop 89
ggtctagtgtgggtatttccaaatc

SEQ ID NO: 71094 - DNA, 25 bp, Artificial
  probe
  misc_feature (1)..(25): SEQ ID NO: 7199; WAN024B2X_at; Start 323; Stop 347
aggtgatagctgtcatgcgtcgaaa

SEQ ID NO: 71095 - DNA, 25 bp, Artificial
  probe
  misc_feature (1)..(25): SEQ ID NO: 7199; WAN024B2X_at; Start 289; Stop 313
attagcatggatattccagctaaca

SEQ ID NO: 71096 - DNA, 25 bp, Artificial
  probe
  misc_feature (1)..(25): SEQ ID NO: 7199; WAN024B2X_at; Start 324; Stop 348
ggtgatagctgtcatgcgtcgaaat

SEQ ID NO: 71097 - DNA, 25 bp, Artificial
  probe
  misc_feature (1)..(25): SEQ ID NO: 7199; WAN024B2X_at; Start 303; Stop 327
tccagctaacatcagtgatgaggtg

SEQ ID NO: 71098 - DNA, 25 bp, Artificial
  probe
  misc_feature (1)..(25): SEQ ID NO: 7199; WAN024B2X_at; Start 308; Stop 332
ctaacatcagtgatgaggtgatagc

SEQ ID NO: 71099 - DNA, 25 bp, Artificial
  probe
  misc_feature (1)..(25): SEQ ID NO: 7199; WAN024B2X_at; Start 300; Stop 324
tattccagctaacatcagtgatgag

SEQ ID NO: 71100 - DNA, 25 bp, Artificial
  probe
  misc_feature (1)..(25): SEQ ID NO: 7199; WAN024B2X_at; Start 322; Stop 346
gaggtgatagctgtcatgcgtcgaa

SEQ ID NO: 71101 - DNA, 25 bp, Artificial
  probe
  misc_feature (1)..(25): SEQ ID NO: 7199; WAN024B2X_at; Start 301; Stop 325
attccagctaacatcagtgatgagg

SEQ ID NO: 71102 - DNA, 25 bp, Artificial
  probe
  misc_feature (1)..(25): SEQ ID NO: 7199; WAN024B2X_at; Start 305; Stop 329
cagctaacatcagtgatgaggtgat

SEQ ID NO: 71103 - DNA, 25 bp, Artificial
  probe
  misc_feature (1)..(25): SEQ ID NO: 7199; WAN024B2X_at; Start 312; Stop 336
catcagtgatgaggtgatagctgtc

SEQ ID NO: 71104 - DNA, 25 bp, Artificial
  probe
  misc_feature (1)..(25): SEQ ID NO: 7199; WAN024B2X_at; Start 292; Stop 316
agcatggatattccagctaacatca

SEQ ID NO: 71105 - DNA, 25 bp, Artificial
  probe
  misc_feature (1)..(25): SEQ ID NO: 7199; WAN024B2X_at; Start 320; Stop 344
atgaggtgatagctgtcatgcgtcg

SEQ ID NO: 71106 - DNA, 25 bp, Artificial
  probe
  misc_feature (1)..(25): SEQ ID NO: 7199; WAN024B2X_at; Start 302; Stop 326
ttccagctaacatcagtgatgaggt

SEQ ID NO: 71107 - DNA, 25 bp, Artificial
  probe
  misc_feature (1)..(25): SEQ ID NO: 7199; WAN024B2X_at; Start 310; Stop 334
aacatcagtgatgaggtgatagctg

SEQ ID NO: 71108 - DNA, 25 bp, Artificial
  probe
  misc_feature (1)..(25): SEQ ID NO: 7199; WAN024B2X_at; Start 293; Stop 317
gcatggatattccagctaacatcag

SEQ ID NO: 71109 - DNA, 25 bp, Artificial
  probe
  misc_feature (1)..(25): SEQ ID NO: 7199; WAN024B2X_at; Start 285; Stop 309
taagattagcatggatattccagct

SEQ ID NO: 71110 - DNA, 25 bp, Artificial
  probe
  misc_feature (1)..(25): SEQ ID NO: 7199; WAN024B2X_at; Start 66; Stop 90
gtctagtgtgggtatttccaaatct

SEQ ID NO: 71111 - DNA, 25 bp, Artificial
  probe
  misc_feature (1)..(25): SEQ ID NO: 7199; WAN024B2X_at; Start 290; Stop 314
ttagcatggatattccagctaacat

SEQ ID NO: 71112 - DNA, 25 bp, Artificial
  probe
  misc_feature (1)..(25): SEQ ID NO: 7199; WAN024B2X_at; Start 309; Stop 333
taacatcagtgatgaggtgatagct

SEQ ID NO: 71113 - DNA, 25 bp, Artificial
  probe
  misc_feature (1)..(25): SEQ ID NO: 7199; WAN024B2X_at; Start 288; Stop 312
gattagcatggatattccagctaac

SEQ ID NO: 71114 - DNA, 25 bp, Artificial
  probe
  misc_feature (1)..(25): SEQ ID NO: 7199; WAN024B2X_at; Start 304; Stop 328
ccagctaacatcagtgatgaggtga

SEQ ID NO: 71115 - DNA, 25 bp, Artificial
  probe
  misc_feature (1)..(25): SEQ ID NO: 7199; WAN024B2X_at; Start 291; Stop 315
tagcatggatattccagctaacatc

SEQ ID NO: 71116 - DNA, 25 bp, Artificial
  probe
  misc_feature (1)..(25): SEQ ID NO: 6266; WAN024B2Y_at; Start 28; Stop 52
tcaatgtatccacttctttgggaca

SEQ ID NO: 71117 - DNA, 25 bp, Artificial
  probe
  misc_feature (1)..(25): SEQ ID NO: 6266; WAN024B2Y_at; Start 60; Stop 84
aatcagctatccagacttaatcgag

SEQ ID NO: 71118 - DNA, 25 bp, Artificial
  probe
  misc_feature (1)..(25): SEQ ID NO: 6266; WAN024B2Y_at; Start 26; Stop 50
ggtcaatgtatccacttctttggga

SEQ ID NO: 71119 - DNA, 25 bp, Artificial
  probe
  misc_feature (1)..(25): SEQ ID NO: 6266; WAN024B2Y_at; Start 55; Stop 79
atgggaatcagctatccagacttaa

SEQ ID NO: 71120 - DNA, 25 bp, Artificial
  probe
  misc_feature (1)..(25): SEQ ID NO: 6266; WAN024B2Y_at; Start 62; Stop 86
tcagctatccagacttaatcgagcg

SEQ ID NO: 71121 - DNA, 25 bp, Artificial
  probe
  misc_feature (1)..(25): SEQ ID NO: 6266; WAN024B2Y_at; Start 57; Stop 81
gggaatcagctatccagacttaatc

SEQ ID NO: 71122 - DNA, 25 bp, Artificial
  probe
  misc_feature (1)..(25): SEQ ID NO: 6266; WAN024B2Y_at; Start 16; Stop 40
tttacccagtggtcaatgtatccac

SEQ ID NO: 71123 - DNA, 25 bp, Artificial
  probe
  misc_feature (1)..(25): SEQ ID NO: 6266; WAN024B2Y_at; Start 71; Stop 95
cagacttaatcgagcgattggttga

SEQ ID NO: 71124 - DNA, 25 bp, Artificial
  probe
  misc_feature (1)..(25): SEQ ID NO: 6266; WAN024B2Y_at; Start 64; Stop 88
agctatccagacttaatcgagcgat

SEQ ID NO: 71125 - DNA, 25 bp, Artificial
  probe
  misc_feature (1)..(25): SEQ ID NO: 6266; WAN024B2Y_at; Start 13; Stop 37
ggttttacccagtggtcaatgtatc

SEQ ID NO: 71126 - DNA, 25 bp, Artificial
  probe
  misc_feature (1)..(25): SEQ ID NO: 6266; WAN024B2Y_at; Start 29; Stop 53
caatgtatccacttctttgggacaa

SEQ ID NO: 71127 - DNA, 25 bp, Artificial
  probe
  misc_feature (1)..(25): SEQ ID NO: 6266; WAN024B2Y_at; Start 25; Stop 49
tggtcaatgtatccacttctttggg

SEQ ID NO: 71128 - DNA, 25 bp, Artificial
  probe
  misc_feature (1)..(25): SEQ ID NO: 6266; WAN024B2Y_at; Start 69; Stop 93
tccagacttaatcgagcgattggtt

SEQ ID NO: 71129 - DNA, 25 bp, Artificial
  probe
  misc_feature (1)..(25): SEQ ID NO: 6266; WAN024B2Y_at; Start 54; Stop 78
tatgggaatcagctatccagactta

SEQ ID NO: 71130 - DNA, 25 bp, Artificial
  probe
  misc_feature (1)..(25): SEQ ID NO: 6266; WAN024B2Y_at; Start 27; Stop 51
gtcaatgtatccacttctttgggac

SEQ ID NO: 71131 - DNA, 25 bp, Artificial
  probe
  misc_feature (1)..(25): SEQ ID NO: 6266; WAN024B2Y_at; Start 76; Stop 100
ttaatcgagcgattggttgatcttg

SEQ ID NO: 71132 - DNA, 25 bp, Artificial
  probe
  misc_feature (1)..(25): SEQ ID NO: 6266; WAN024B2Y_at; Start 14; Stop 38
gttttacccagtggtcaatgtatcc

SEQ ID NO: 71133 - DNA, 25 bp, Artificial
  probe
  misc_feature (1)..(25): SEQ ID NO: 6266; WAN024B2Y_at; Start 68; Stop 92
atccagacttaatcgagcgattggt

SEQ ID NO: 71134 - DNA, 25 bp, Artificial
  probe
  misc_feature (1)..(25): SEQ ID NO: 6266; WAN024B2Y_at; Start 15; Stop 39
ttttacccagtggtcaatgtatcca

SEQ ID NO: 71135 - DNA, 25 bp, Artificial
  probe
  misc_feature (1)..(25): SEQ ID NO: 6266; WAN024B2Y_at; Start 56; Stop 80
tgggaatcagctatccagacttaat

SEQ ID NO: 71136 - DNA, 25 bp, Artificial
  probe
  misc_feature (1)..(25): SEQ ID NO: 6266; WAN024B2Y_at; Start 30; Stop 54
aatgtatccacttctttgggacaat

SEQ ID NO: 71137 - DNA, 25 bp, Artificial
  probe
  misc_feature (1)..(25): SEQ ID NO: 6266; WAN024B2Y_at; Start 65; Stop 89
gctatccagacttaatcgagcgatt

SEQ ID NO: 71138 - DNA, 25 bp, Artificial
  probe
  misc_feature (1)..(25): SEQ ID NO: 6266; WAN024B2Y_at; Start 21; Stop 45
ccagtggtcaatgtatccacttctt

SEQ ID NO: 71139 - DNA, 25 bp, Artificial
  probe
  misc_feature (1)..(25): SEQ ID NO: 6266; WAN024B2Y_at; Start 18; Stop 42
tacccagtggtcaatgtatccactt

SEQ ID NO: 71140 - DNA, 25 bp, Artificial
  probe
  misc_feature (1)..(25): SEQ ID NO: 6266; WAN024B2Y_at; Start 74; Stop 98
acttaatcgagcgattggttgatct

SEQ ID NO: 71141 - DNA, 25 bp, Artificial
  probe
  misc_feature (1)..(25): SEQ ID NO: 6266; WAN024B2Y_at; Start 70; Stop 94
ccagacttaatcgagcgattggttg

SEQ ID NO: 71142 - DNA, 25 bp, Artificial
  probe
  misc_feature (1)..(25): SEQ ID NO: 6266; WAN024B2Y_at; Start 63; Stop 87
cagctatccagacttaatcgagcga

SEQ ID NO: 71143 - DNA, 25 bp, Artificial
  probe
  misc_feature (1)..(25): SEQ ID NO: 6266; WAN024B2Y_at; Start 59; Stop 83
gaatcagctatccagacttaatcga

SEQ ID NO: 71144 - DNA, 25 bp, Artificial
  probe
  misc_feature (1)..(25): SEQ ID NO: 6266; WAN024B2Y_at; Start 20; Stop 44
cccagtggtcaatgtatccacttct

SEQ ID NO: 71145 - DNA, 25 bp, Artificial
  probe
  misc_feature (1)..(25): SEQ ID NO: 6266; WAN024B2Y_at; Start 66; Stop 90
ctatccagacttaatcgagcgattg

SEQ ID NO: 71146 - DNA, 25 bp, Artificial
  probe
  misc_feature (1)..(25): SEQ ID NO: 6266; WAN024B2Y_at; Start 17; Stop 41
ttacccagtggtcaatgtatccact

SEQ ID NO: 71147 - DNA, 25 bp, Artificial
  probe
  misc_feature (1)..(25): SEQ ID NO: 6266; WAN024B2Y_at; Start 61; Stop 85
atcagctatccagacttaatcgagc

SEQ ID NO: 71148 - DNA, 25 bp, Artificial
  probe
  misc_feature (1)..(25): SEQ ID NO: 6266; WAN024B2Y_at; Start 58; Stop 82
ggaatcagctatccagacttaatcg

SEQ ID NO: 71149 - DNA, 25 bp, Artificial
  probe
  misc_feature (1)..(25): SEQ ID NO: 6266; WAN024B2Y_at; Start 67; Stop 91
tatccagacttaatcgagcgattgg

SEQ ID NO: 71150 - DNA, 25 bp, Artificial
  probe
  misc_feature (1)..(25): SEQ ID NO: 7359; WAN024B2Z_x_at; Start 72; Stop 96
tgttggtatttccaaatctgaaaat

SEQ ID NO: 71151 - DNA, 25 bp, Artificial
  probe
  misc_feature (1)..(25): SEQ ID NO: 7359; WAN024B2Z_x_at; Start 102; Stop 126
agaactccgccaagctttggaactt

SEQ ID NO: 71152 - DNA, 25 bp, Artificial
  probe
  misc_feature (1)..(25): SEQ ID NO: 7359; WAN024B2Z_x_at; Start 73; Stop 97
gttggtatttccaaatctgaaaatc

SEQ ID NO: 71153 - DNA, 25 bp, Artificial
  probe
  misc_feature (1)..(25): SEQ ID NO: 7359; WAN024B2Z_x_at; Start 141; Stop 165
cagtcgtatcttggtagagcaaggg

SEQ ID NO: 71154 - DNA, 25 bp, Artificial
  probe
  misc_feature (1)..(25): SEQ ID NO: 7359; WAN024B2Z_x_at; Start 203; Stop 227
actatgatgtcaagagtacgcttcc

SEQ ID NO: 71155 - DNA, 25 bp, Artificial
  probe
  misc_feature (1)..(25): SEQ ID NO: 7359; WAN024B2Z_x_at; Start 206; Stop 230
atgatgtcaagagtacgcttccagg

SEQ ID NO: 71156 - DNA, 25 bp, Artificial
  probe
  misc_feature (1)..(25): SEQ ID NO: 7359; WAN024B2Z_x_at; Start 363; Stop 387
ccgtgccattggaggcctcggtctc

SEQ ID NO: 71157 - DNA, 25 bp, Artificial
  probe
  misc_feature (1)..(25): SEQ ID NO: 7359; WAN024B2Z_x_at; Start 131; Stop 155
ttcaatatgacagtcgtatcttggt

SEQ ID NO: 71158 - DNA, 25 bp, Artificial
  probe
  misc_feature (1)..(25): SEQ ID NO: 7359; WAN024B2Z_x_at; Start 103; Stop 127
gaactccgccaagctttggaacttg

SEQ ID NO: 71159 - DNA, 25 bp, Artificial
  probe
  misc_feature (1)..(25): SEQ ID NO: 7359; WAN024B2Z_x_at; Start 71; Stop 95
gtgttggtatttccaaatctgaaaa

SEQ ID NO: 71160 - DNA, 25 bp, Artificial
  probe
  misc_feature (1)..(25): SEQ ID NO: 7359; WAN024B2Z_x_at; Start 132; Stop 156
tcaatatgacagtcgtatcttggta

SEQ ID NO: 71161 - DNA, 25 bp, Artificial
  probe
  misc_feature (1)..(25): SEQ ID NO: 7359; WAN024B2Z_x_at; Start 201; Stop 225
caactatgatgtcaagagtacgctt

SEQ ID NO: 71162 - DNA, 25 bp, Artificial
  probe
  misc_feature (1)..(25): SEQ ID NO: 7359; WAN024B2Z_x_at; Start 207; Stop 231
tgatgtcaagagtacgcttccagga

SEQ ID NO: 71163 - DNA, 25 bp, Artificial
  probe
  misc_feature (1)..(25): SEQ ID NO: 7359; WAN024B2Z_x_at; Start 205; Stop 229
tatgatgtcaagagtacgcttccag

SEQ ID NO: 71164 - DNA, 25 bp, Artificial
  probe
  misc_feature (1)..(25): SEQ ID NO: 7359; WAN024B2Z_x_at; Start 369; Stop 393
cattggaggcctcggtctctctcgt

SEQ ID NO: 71165 - DNA, 25 bp, Artificial
  probe
  misc_feature (1)..(25): SEQ ID NO: 7359; WAN024B2Z_x_at; Start 202; Stop 226
aactatgatgtcaagagtacgcttc

SEQ ID NO: 71166 - DNA, 25 bp, Artificial
  probe
  misc_feature (1)..(25): SEQ ID NO: 7359; WAN024B2Z_x_at; Start 105; Stop 129
actccgccaagctttggaacttgcc

SEQ ID NO: 71167 - DNA, 25 bp, Artificial
  probe
  misc_feature (1)..(25): SEQ ID NO: 7359; WAN024B2Z_x_at; Start 130; Stop 154
tttcaatatgacagtcgtatcttgg

SEQ ID NO: 71168 - DNA, 25 bp, Artificial
  probe
  misc_feature (1)..(25): SEQ ID NO: 7359; WAN024B2Z_x_at; Start 68; Stop 92
caagtgttggtatttccaaatctga

SEQ ID NO: 71169 - DNA, 25 bp, Artificial
  probe
  misc_feature (1)..(25): SEQ ID NO: 7359; WAN024B2Z_x_at; Start 129; Stop 153
ctttcaatatgacagtcgtatcttg

SEQ ID NO: 71170 - DNA, 25 bp, Artificial
  probe
  misc_feature (1)..(25): SEQ ID NO: 7359; WAN024B2Z_x_at; Start 44; Stop 68
tcacaaaaccgtcaaacatgggttc

SEQ ID NO: 71171 - DNA, 25 bp, Artificial
  probe
  misc_feature (1)..(25): SEQ ID NO: 7359; WAN024B2Z_x_at; Start 100; Stop 124
gaagaactccgccaagctttggaac

SEQ ID NO: 71172 - DNA, 25 bp, Artificial
  probe
  misc_feature (1)..(25): SEQ ID NO: 7359; WAN024B2Z_x_at; Start 101; Stop 125
aagaactccgccaagctttggaact

SEQ ID NO: 71173 - DNA, 25 bp, Artificial
  probe
  misc_feature (1)..(25): SEQ ID NO: 7359; WAN024B2Z_x_at; Start 66; Stop 90
ttcaagtgttggtatttccaaatct

SEQ ID NO: 71174 - DNA, 25 bp, Artificial
  probe
  misc_feature (1)..(25): SEQ ID NO: 7359; WAN024B2Z_x_at; Start 213; Stop 237
caagagtacgcttccaggagaagta

SEQ ID NO: 71175 - DNA, 25 bp, Artificial
  probe
  misc_feature (1)..(25): SEQ ID NO: 7359; WAN024B2Z_x_at; Start 67; Stop 91
tcaagtgttggtatttccaaatctg

SEQ ID NO: 71176 - DNA, 25 bp, Artificial
  probe
  misc_feature (1)..(25): SEQ ID NO: 7359; WAN024B2Z_x_at; Start 417; Stop 441
gggagagatcttcctaaatgagctt

SEQ ID NO: 71177 - DNA, 25 bp, Artificial
  probe
  misc_feature (1)..(25): SEQ ID NO: 7359; WAN024B2Z_x_at; Start 70; Stop 94
agtgttggtatttccaaatctgaaa

SEQ ID NO: 71178 - DNA, 25 bp, Artificial
  probe
  misc_feature (1)..(25): SEQ ID NO: 7359; WAN024B2Z_x_at; Start 74; Stop 98
ttggtatttccaaatctgaaaatca

SEQ ID NO: 71179 - DNA, 25 bp, Artificial
  probe
  misc_feature (1)..(25): SEQ ID NO: 7359; WAN024B2Z_x_at; Start 204; Stop 228
ctatgatgtcaagagtacgcttcca

SEQ ID NO: 71180 - DNA, 25 bp, Artificial
  probe
  misc_feature (1)..(25): SEQ ID NO: 7359; WAN024B2Z_x_at; Start 196; Stop 220
ctgggcaactatgatgtcaagagta

SEQ ID NO: 71181 - DNA, 25 bp, Artificial
  probe
  misc_feature (1)..(25): SEQ ID NO: 7359; WAN024B2Z_x_at; Start 69; Stop 93
aagtgttggtatttccaaatctgaa

SEQ ID NO: 71182 - DNA, 25 bp, Artificial
  probe
  misc_feature (1)..(25): SEQ ID NO: 7359; WAN024B2Z_x_at; Start 65; Stop 89
gttcaagtgttggtatttccaaatc

SEQ ID NO: 71183 - DNA, 25 bp, Artificial
  probe
  misc_feature (1)..(25): SEQ ID NO: 7359; WAN024B2Z_x_at; Start 104; Stop 128
aactccgccaagctttggaacttgc

SEQ ID NO: 71184 - DNA, 25 bp, Artificial
  probe
  misc_feature (1)..(25): SEQ ID NO: 7198; WAN024B32_x_at; Start 291; Stop 315
taccatggatatcccagccaaaatc

SEQ ID NO: 71185 - DNA, 25 bp, Artificial
  probe
  misc_feature (1)..(25): SEQ ID NO: 7198; WAN024B32_x_at; Start 102; Stop 126
agaactccgccaagctttggaactt

SEQ ID NO: 71186 - DNA, 25 bp, Artificial
  probe
  misc_feature (1)..(25): SEQ ID NO: 7198; WAN024B32_x_at; Start 270; Stop 294
aaagtatattgacaacaagattacc

SEQ ID NO: 71187 - DNA, 25 bp, Artificial
  probe
  misc_feature (1)..(25): SEQ ID NO: 7198; WAN024B32_x_at; Start 414; Stop 438
taagggagagatcttcctcaacgag

SEQ ID NO: 71188 - DNA, 25 bp, Artificial
  probe
  misc_feature (1)..(25): SEQ ID NO: 7198; WAN024B32_x_at; Start 290; Stop 314
ttaccatggatatcccagccaaaat

SEQ ID NO: 71189 - DNA, 25 bp, Artificial
  probe
  misc_feature (1)..(25): SEQ ID NO: 7198; WAN024B32_x_at; Start 103; Stop 127
gaactccgccaagctttggaacttg

SEQ ID NO: 71190 - DNA, 25 bp, Artificial
  probe
  misc_feature (1)..(25): SEQ ID NO: 7198; WAN024B32_x_at; Start 355; Stop 379
acggcctttcgtgccattggtgggc

SEQ ID NO: 71191 - DNA, 25 bp, Artificial
  probe
  misc_feature (1)..(25): SEQ ID NO: 7198; WAN024B32_x_at; Start 289; Stop 313
attaccatggatatcccagccaaaa

SEQ ID NO: 71192 - DNA, 25 bp, Artificial
  probe
  misc_feature (1)..(25): SEQ ID NO: 7198; WAN024B32_x_at; Start 364; Stop 388
cgtgccattggtgggctcggtctat

SEQ ID NO: 71193 - DNA, 25 bp, Artificial
  probe
  misc_feature (1)..(25): SEQ ID NO: 7198; WAN024B32_x_at; Start 131; Stop 155
tccgatatgacagtcgtgtcttggt

SEQ ID NO: 71194 - DNA, 25 bp, Artificial
  probe
  misc_feature (1)..(25): SEQ ID NO: 7198; WAN024B32_x_at; Start 144; Stop 168
tcgtgtcttggtagagcaaggggta

SEQ ID NO: 71195 - DNA, 25 bp, Artificial
  probe
  misc_feature (1)..(25): SEQ ID NO: 7198; WAN024B32_x_at; Start 368; Stop 392
ccattggtgggctcggtctatctcg

SEQ ID NO: 71196 - DNA, 25 bp, Artificial
  probe
  misc_feature (1)..(25): SEQ ID NO: 7198; WAN024B32_x_at; Start 372; Stop 396
tggtgggctcggtctatctcgttgc

SEQ ID NO: 71197 - DNA, 25 bp, Artificial
  probe
  misc_feature (1)..(25): SEQ ID NO: 7198; WAN024B32_x_at; Start 105; Stop 129
actccgccaagctttggaacttgcc

SEQ ID NO: 71198 - DNA, 25 bp, Artificial
  probe
  misc_feature (1)..(25): SEQ ID NO: 7198; WAN024B32_x_at; Start 357; Stop 381
ggcctttcgtgccattggtgggctc

SEQ ID NO: 71199 - DNA, 25 bp, Artificial
  probe
  misc_feature (1)..(25): SEQ ID NO: 7198; WAN024B32_x_at; Start 359; Stop 383
cctttcgtgccattggtgggctcgg

SEQ ID NO: 71200 - DNA, 25 bp, Artificial
  probe
  misc_feature (1)..(25): SEQ ID NO: 7198; WAN024B32_x_at; Start 288; Stop 312
gattaccatggatatcccagccaaa

SEQ ID NO: 71201 - DNA, 25 bp, Artificial
  probe
  misc_feature (1)..(25): SEQ ID NO: 7198; WAN024B32_x_at; Start 130; Stop 154
ttccgatatgacagtcgtgtcttgg

SEQ ID NO: 71202 - DNA, 25 bp, Artificial
  probe
  misc_feature (1)..(25): SEQ ID NO: 7198; WAN024B32_x_at; Start 100; Stop 124
gaagaactccgccaagctttggaac

SEQ ID NO: 71203 - DNA, 25 bp, Artificial
  probe
  misc_feature (1)..(25): SEQ ID NO: 7198; WAN024B32_x_at; Start 132; Stop 156
ccgatatgacagtcgtgtcttggta

SEQ ID NO: 71204 - DNA, 25 bp, Artificial
  probe
  misc_feature (1)..(25): SEQ ID NO: 7198; WAN024B32_x_at; Start 101; Stop 125
aagaactccgccaagctttggaact

SEQ ID NO: 71205 - DNA, 25 bp, Artificial
  probe
  misc_feature (1)..(25): SEQ ID NO: 7198; WAN024B32_x_at; Start 412; Stop 436
gataagggagagatcttcctcaacg

SEQ ID NO: 71206 - DNA, 25 bp, Artificial
  probe
  misc_feature (1)..(25): SEQ ID NO: 7198; WAN024B32_x_at; Start 298; Stop 322
gatatcccagccaaaatcagtgatg

SEQ ID NO: 71207 - DNA, 25 bp, Artificial
  probe
  misc_feature (1)..(25): SEQ ID NO: 7198; WAN024B32_x_at; Start 339; Stop 363
gcgtcagaatgcagaaacggccttt

SEQ ID NO: 71208 - DNA, 25 bp, Artificial
  probe
  misc_feature (1)..(25): SEQ ID NO: 7198; WAN024B32_x_at; Start 133; Stop 157
cgatatgacagtcgtgtcttggtag

SEQ ID NO: 71209 - DNA, 25 bp, Artificial
  probe
  misc_feature (1)..(25): SEQ ID NO: 7198; WAN024B32_x_at; Start 356; Stop 380
cggcctttcgtgccattggtgggct

SEQ ID NO: 71210 - DNA, 25 bp, Artificial
  probe
  misc_feature (1)..(25): SEQ ID NO: 7198; WAN024B32_x_at; Start 363; Stop 387
tcgtgccattggtgggctcggtcta

SEQ ID NO: 71211 - DNA, 25 bp, Artificial
  probe
  misc_feature (1)..(25): SEQ ID NO: 7198; WAN024B32_x_at; Start 354; Stop 378
aacggcctttcgtgccattggtggg

SEQ ID NO: 71212 - DNA, 25 bp, Artificial
  probe
  misc_feature (1)..(25): SEQ ID NO: 7198; WAN024B32_x_at; Start 374; Stop 398
gtgggctcggtctatctcgttgcga

SEQ ID NO: 71213 - DNA, 25 bp, Artificial
  probe
  misc_feature (1)..(25): SEQ ID NO: 7198; WAN024B32_x_at; Start 134; Stop 158
gatatgacagtcgtgtcttggtaga

SEQ ID NO: 71214 - DNA, 25 bp, Artificial
  probe
  misc_feature (1)..(25): SEQ ID NO: 7198; WAN024B32_x_at; Start 293; Stop 317
ccatggatatcccagccaaaatcag

SEQ ID NO: 71215 - DNA, 25 bp, Artificial
  probe
  misc_feature (1)..(25): SEQ ID NO: 7198; WAN024B32_x_at; Start 104; Stop 128
aactccgccaagctttggaacttgc

SEQ ID NO: 71216 - DNA, 25 bp, Artificial
  probe
  misc_feature (1)..(25): SEQ ID NO: 7198; WAN024B32_x_at; Start 358; Stop 382
gcctttcgtgccattggtgggctcg

SEQ ID NO: 71217 - DNA, 25 bp, Artificial
  probe
  misc_feature (1)..(25): SEQ ID NO: 7198; WAN024B32_x_at; Start 129; Stop 153
cttccgatatgacagtcgtgtcttg

SEQ ID NO: 71218 - DNA, 25 bp, Artificial
  probe
  misc_feature (1)..(25): SEQ ID NO: 7196; WAN024B33_at; Start 372; Stop 396
tggtggtttaggtctatctcgttgc

SEQ ID NO: 71219 - DNA, 25 bp, Artificial
  probe
  misc_feature (1)..(25): SEQ ID NO: 7196; WAN024B33_at; Start 368; Stop 392
ccattggtggtttaggtctatctcg

SEQ ID NO: 71220 - DNA, 25 bp, Artificial
  probe
  misc_feature (1)..(25): SEQ ID NO: 7196; WAN024B33_at; Start 367; Stop 391
gccattggtggtttaggtctatctc

SEQ ID NO: 71221 - DNA, 25 bp, Artificial
  probe
  misc_feature (1)..(25): SEQ ID NO: 7196; WAN024B33_at; Start 364; Stop 388
cgtgccattggtggtttaggtctat

SEQ ID NO: 71222 - DNA, 25 bp, Artificial
  probe
  misc_feature (1)..(25): SEQ ID NO: 7196; WAN024B33_at; Start 371; Stop 395
ttggtggtttaggtctatctcgttg

SEQ ID NO: 71223 - DNA, 25 bp, Artificial
  probe
  misc_feature (1)..(25): SEQ ID NO: 3781; WAN024B34_s_at; Start 102; Stop 126
agaacttcgtcaggctttggaactt

SEQ ID NO: 71224 - DNA, 25 bp, Artificial
  probe
  misc_feature (1)..(25): SEQ ID NO: 3781; WAN024B34_s_at; Start 98; Stop 122
aagaagaacttcgtcaggctttgga

SEQ ID NO: 71225 - DNA, 25 bp, Artificial
  probe
  misc_feature (1)..(25): SEQ ID NO: 3781; WAN024B34_s_at; Start 99; Stop 123
agaagaacttcgtcaggctttggaa

SEQ ID NO: 71226 - DNA, 25 bp, Artificial
  probe
  misc_feature (1)..(25): SEQ ID NO: 3781; WAN024B34_s_at; Start 105; Stop 129
acttcgtcaggctttggaacttgcc

SEQ ID NO: 71227 - DNA, 25 bp, Artificial
  probe
  misc_feature (1)..(25): SEQ ID NO: 3781; WAN024B34_s_at; Start 100; Stop 124
gaagaacttcgtcaggctttggaac

SEQ ID NO: 71228 - DNA, 25 bp, Artificial
  probe
  misc_feature (1)..(25): SEQ ID NO: 3781; WAN024B34_s_at; Start 103; Stop 127
gaacttcgtcaggctttggaacttg

SEQ ID NO: 71229 - DNA, 25 bp, Artificial
  probe
  misc_feature (1)..(25): SEQ ID NO: 3781; WAN024B34_s_at; Start 101; Stop 125
aagaacttcgtcaggctttggaact

SEQ ID NO: 71230 - DNA, 25 bp, Artificial
  probe
  misc_feature (1)..(25): SEQ ID NO: 3781; WAN024B34_s_at; Start 97; Stop 121
caagaagaacttcgtcaggctttgg

SEQ ID NO: 71231 - DNA, 25 bp, Artificial
  probe
  misc_feature (1)..(25): SEQ ID NO: 3781; WAN024B34_s_at; Start 104; Stop 128
aacttcgtcaggctttggaacttgc

SEQ ID NO: 71232 - DNA, 25 bp, Artificial
  probe
  misc_feature (1)..(25): SEQ ID NO: 3697; WAN024B35_at; Start 290; Stop 314
ttaccatggacattcctgccaagat

SEQ ID NO: 71233 - DNA, 25 bp, Artificial
  probe
  misc_feature (1)..(25): SEQ ID NO: 3697; WAN024B35_at; Start 291; Stop 315
taccatggacattcctgccaagatc

SEQ ID NO: 71234 - DNA, 25 bp, Artificial
  probe
  misc_feature (1)..(25): SEQ ID NO: 3697; WAN024B35_at; Start 289; Stop 313
attaccatggacattcctgccaaga

SEQ ID NO: 71235 - DNA, 25 bp, Artificial
  probe
  misc_feature (1)..(25): SEQ ID NO: 3697; WAN024B35_at; Start 288; Stop 312
gattaccatggacattcctgccaag

SEQ ID NO: 71236 - DNA, 25 bp, Artificial
  probe
  misc_feature (1)..(25): SEQ ID NO: 3697; WAN024B35_at; Start 292; Stop 316
accatggacattcctgccaagatca

SEQ ID NO: 71237 - DNA, 25 bp, Artificial
  probe
  misc_feature (1)..(25): SEQ ID NO: 3697; WAN024B35_at; Start 293; Stop 317
ccatggacattcctgccaagatcag

SEQ ID NO: 71238 - DNA, 25 bp, Artificial
  probe
  misc_feature (1)..(25): SEQ ID NO: 3697; WAN024B35_at; Start 294; Stop 318
catggacattcctgccaagatcagt

SEQ ID NO: 71239 - DNA, 25 bp, Artificial
  probe
  misc_feature (1)..(25): SEQ ID NO: 3701; WAN024B36_x_at; Start 201; Stop 225
taactacgatgtcaagagcacgcta

SEQ ID NO: 71240 - DNA, 25 bp, Artificial
  probe
  misc_feature (1)..(25): SEQ ID NO: 3701; WAN024B36_x_at; Start 198; Stop 222
gggtaactacgatgtcaagagcacg

SEQ ID NO: 71241 - DNA, 25 bp, Artificial
  probe
  misc_feature (1)..(25): SEQ ID NO: 3701; WAN024B36_x_at; Start 225; Stop 249
acctggagaagttgtcaaggacgtt

SEQ ID NO: 71242 - DNA, 25 bp, Artificial
  probe
  misc_feature (1)..(25): SEQ ID NO: 3701; WAN024B36_x_at; Start 200; Stop 224
gtaactacgatgtcaagagcacgct

SEQ ID NO: 71243 - DNA, 25 bp, Artificial
  probe
  misc_feature (1)..(25): SEQ ID NO: 3701; WAN024B36_x_at; Start 183; Stop 207
tgaggttggcctcttgggtaactac

SEQ ID NO: 71244 - DNA, 25 bp, Artificial
  probe
  misc_feature (1)..(25): SEQ ID NO: 3701; WAN024B36_x_at; Start 203; Stop 227
actacgatgtcaagagcacgctacc

SEQ ID NO: 71245 - DNA, 25 bp, Artificial
  probe
  misc_feature (1)..(25): SEQ ID NO: 3701; WAN024B36_x_at; Start 160; Stop 184
caaggagtaaatgcccgtgaaattg

SEQ ID NO: 71246 - DNA, 25 bp, Artificial
  probe
  misc_feature (1)..(25): SEQ ID NO: 3701; WAN024B36_x_at; Start 189; Stop 213
tggcctcttgggtaactacgatgtc

SEQ ID NO: 71247 - DNA, 25 bp, Artificial
  probe
  misc_feature (1)..(25): SEQ ID NO: 3701; WAN024B36_x_at; Start 162; Stop 186
aggagtaaatgcccgtgaaattgag

SEQ ID NO: 71248 - DNA, 25 bp, Artificial
  probe
  misc_feature (1)..(25): SEQ ID NO: 3701; WAN024B36_x_at; Start 159; Stop 183
gcaaggagtaaatgcccgtgaaatt

SEQ ID NO: 71249 - DNA, 25 bp, Artificial
  probe
  misc_feature (1)..(25): SEQ ID NO: 3701; WAN024B36_x_at; Start 292; Stop 316
actatggatattcctgccaaaatca

SEQ ID NO: 71250 - DNA, 25 bp, Artificial
  probe
  misc_feature (1)..(25): SEQ ID NO: 3701; WAN024B36_x_at; Start 202; Stop 226
aactacgatgtcaagagcacgctac

SEQ ID NO: 71251 - DNA, 25 bp, Artificial
  probe
  misc_feature (1)..(25): SEQ ID NO: 3701; WAN024B36_x_at; Start 227; Stop 251
ctggagaagttgtcaaggacgttgc

SEQ ID NO: 71252 - DNA, 25 bp, Artificial
  probe
  misc_feature (1)..(25): SEQ ID NO: 3701; WAN024B36_x_at; Start 190; Stop 214
ggcctcttgggtaactacgatgtca

SEQ ID NO: 71253 - DNA, 25 bp, Artificial
  probe
  misc_feature (1)..(25): SEQ ID NO: 3701; WAN024B36_x_at; Start 226; Stop 250
cctggagaagttgtcaaggacgttg

SEQ ID NO: 71254 - DNA, 25 bp, Artificial
  probe
  misc_feature (1)..(25): SEQ ID NO: 3701; WAN024B36_x_at; Start 228; Stop 252
tggagaagttgtcaaggacgttgcc

SEQ ID NO: 71255 - DNA, 25 bp, Artificial
  probe
  misc_feature (1)..(25): SEQ ID NO: 3701; WAN024B36_x_at; Start 188; Stop 212
ttggcctcttgggtaactacgatgt

SEQ ID NO: 71256 - DNA, 25 bp, Artificial
  probe
  misc_feature (1)..(25): SEQ ID NO: 3701; WAN024B36_x_at; Start 224; Stop 248
tacctggagaagttgtcaaggacgt

SEQ ID NO: 71257 - DNA, 25 bp, Artificial
  probe
  misc_feature (1)..(25): SEQ ID NO: 3701; WAN024B36_x_at; Start 181; Stop 205
attgaggttggcctcttgggtaact

SEQ ID NO: 71258 - DNA, 25 bp, Artificial
  probe
  misc_feature (1)..(25): SEQ ID NO: 3701; WAN024B36_x_at; Start 300; Stop 324
tattcctgccaaaatcagtgatgat

SEQ ID NO: 71259 - DNA, 25 bp, Artificial
  probe
  misc_feature (1)..(25): SEQ ID NO: 3701; WAN024B36_x_at; Start 219; Stop 243
cacgctacctggagaagttgtcaag

SEQ ID NO: 71260 - DNA, 25 bp, Artificial
  probe
  misc_feature (1)..(25): SEQ ID NO: 3701; WAN024B36_x_at; Start 223; Stop 247
ctacctggagaagttgtcaaggacg

SEQ ID NO: 71261 - DNA, 25 bp, Artificial
  probe
  misc_feature (1)..(25): SEQ ID NO: 3701; WAN024B36_x_at; Start 191; Stop 215
gcctcttgggtaactacgatgtcaa

SEQ ID NO: 71262 - DNA, 25 bp, Artificial
  probe
  misc_feature (1)..(25): SEQ ID NO: 3701; WAN024B36_x_at; Start 199; Stop 223
ggtaactacgatgtcaagagcacgc

SEQ ID NO: 71263 - DNA, 25 bp, Artificial
  probe
  misc_feature (1)..(25): SEQ ID NO: 3701; WAN024B36_x_at; Start 220; Stop 244
acgctacctggagaagttgtcaagg

SEQ ID NO: 71264 - DNA, 25 bp, Artificial
  probe
  misc_feature (1)..(25): SEQ ID NO: 3701; WAN024B36_x_at; Start 177; Stop 201
tgaaattgaggttggcctcttgggt

SEQ ID NO: 71265 - DNA, 25 bp, Artificial
  probe
  misc_feature (1)..(25): SEQ ID NO: 3701; WAN024B36_x_at; Start 293; Stop 317
ctatggatattcctgccaaaatcag

SEQ ID NO: 71266 - DNA, 25 bp, Artificial
  probe
  misc_feature (1)..(25): SEQ ID NO: 3701; WAN024B36_x_at; Start 182; Stop 206
ttgaggttggcctcttgggtaacta

SEQ ID NO: 71267 - DNA, 25 bp, Artificial
  probe
  misc_feature (1)..(25): SEQ ID NO: 3701; WAN024B36_x_at; Start 298; Stop 322
gatattcctgccaaaatcagtgatg

SEQ ID NO: 71268 - DNA, 25 bp, Artificial
  probe
  misc_feature (1)..(25): SEQ ID NO: 3701; WAN024B36_x_at; Start 125; Stop 149
ttgcctttcaatatgacagccgtgt

SEQ ID NO: 71269 - DNA, 25 bp, Artificial
  probe
  misc_feature (1)..(25): SEQ ID NO: 3701; WAN024B36_x_at; Start 222; Stop 246
gctacctggagaagttgtcaaggac

SEQ ID NO: 71270 - DNA, 25 bp, Artificial
  probe
  misc_feature (1)..(25): SEQ ID NO: 3701; WAN024B36_x_at; Start 178; Stop 202
gaaattgaggttggcctcttgggta

SEQ ID NO: 71271 - DNA, 25 bp, Artificial
  probe
  misc_feature (1)..(25): SEQ ID NO: 3701; WAN024B36_x_at; Start 294; Stop 318
tatggatattcctgccaaaatcagt

SEQ ID NO: 71272 - DNA, 25 bp, Artificial
  probe
  misc_feature (1)..(25): SEQ ID NO: 3701; WAN024B36_x_at; Start 204; Stop 228
ctacgatgtcaagagcacgctacct

SEQ ID NO: 71273 - DNA, 25 bp, Artificial
  probe
  misc_feature (1)..(25): SEQ ID NO: 3700; WAN024B37_at; Start 170; Stop 194
atgctcgtgaaattgaagttggtct

SEQ ID NO: 71274 - DNA, 25 bp, Artificial
  probe
  misc_feature (1)..(25): SEQ ID NO: 3700; WAN024B37_at; Start 172; Stop 196
gctcgtgaaattgaagttggtctac

SEQ ID NO: 71275 - DNA, 25 bp, Artificial
  probe
  misc_feature (1)..(25): SEQ ID NO: 3700; WAN024B37_at; Start 171; Stop 195
tgctcgtgaaattgaagttggtcta

SEQ ID NO: 71276 - DNA, 25 bp, Artificial
  probe
  misc_feature (1)..(25): SEQ ID NO: 3700; WAN024B37_at; Start 165; Stop 189
ggtgaatgctcgtgaaattgaagtt

SEQ ID NO: 71277 - DNA, 25 bp, Artificial
  probe
  misc_feature (1)..(25): SEQ ID NO: 3700; WAN024B37_at; Start 163; Stop 187
ggggtgaatgctcgtgaaattgaag

SEQ ID NO: 71278 - DNA, 25 bp, Artificial
  probe
  misc_feature (1)..(25): SEQ ID NO: 3700; WAN024B37_at; Start 173; Stop 197
ctcgtgaaattgaagttggtctact

SEQ ID NO: 71279 - DNA, 25 bp, Artificial
  probe
  misc_feature (1)..(25): SEQ ID NO: 3700; WAN024B37_at; Start 164; Stop 188
gggtgaatgctcgtgaaattgaagt

SEQ ID NO: 71280 - DNA, 25 bp, Artificial
  probe
  misc_feature (1)..(25): SEQ ID NO: 3700; WAN024B37_at; Start 169; Stop 193
aatgctcgtgaaattgaagttggtc

SEQ ID NO: 71281 - DNA, 25 bp, Artificial
  probe
  misc_feature (1)..(25): SEQ ID NO: 3700; WAN024B37_at; Start 417; Stop 441
gggagaaatcttcctaaatgaactc

SEQ ID NO: 71282 - DNA, 25 bp, Artificial
  probe
  misc_feature (1)..(25): SEQ ID NO: 3700; WAN024B37_at; Start 168; Stop 192
gaatgctcgtgaaattgaagttggt

SEQ ID NO: 71283 - DNA, 25 bp, Artificial
  probe
  misc_feature (1)..(25): SEQ ID NO: 3698; WAN024B38_s_at; Start 102; Stop 126
agaacttcgtcaggctttggaactt

SEQ ID NO: 71284 - DNA, 25 bp, Artificial
  probe
  misc_feature (1)..(25): SEQ ID NO: 3698; WAN024B38_s_at; Start 98; Stop 122
aagaagaacttcgtcaggctttgga

SEQ ID NO: 71285 - DNA, 25 bp, Artificial
  probe
  misc_feature (1)..(25): SEQ ID NO: 3698; WAN024B38_s_at; Start 99; Stop 123
agaagaacttcgtcaggctttggaa

SEQ ID NO: 71286 - DNA, 25 bp, Artificial
  probe
  misc_feature (1)..(25): SEQ ID NO: 3698; WAN024B38_s_at; Start 105; Stop 129
acttcgtcaggctttggaacttgcc

SEQ ID NO: 71287 - DNA, 25 bp, Artificial
  probe
  misc_feature (1)..(25): SEQ ID NO: 3698; WAN024B38_s_at; Start 100; Stop 124
gaagaacttcgtcaggctttggaac

SEQ ID NO: 71288 - DNA, 25 bp, Artificial
  probe
  misc_feature (1)..(25): SEQ ID NO: 3698; WAN024B38_s_at; Start 103; Stop 127
gaacttcgtcaggctttggaacttg

SEQ ID NO: 71289 - DNA, 25 bp, Artificial
  probe
  misc_feature (1)..(25): SEQ ID NO: 3698; WAN024B38_s_at; Start 101; Stop 125
aagaacttcgtcaggctttggaact

SEQ ID NO: 71290 - DNA, 25 bp, Artificial
  probe
  misc_feature (1)..(25): SEQ ID NO: 3698; WAN024B38_s_at; Start 97; Stop 121
caagaagaacttcgtcaggctttgg

SEQ ID NO: 71291 - DNA, 25 bp, Artificial
  probe
  misc_feature (1)..(25): SEQ ID NO: 3698; WAN024B38_s_at; Start 104; Stop 128
aacttcgtcaggctttggaacttgc

SEQ ID NO: 71292 - DNA, 25 bp, Artificial
  probe
  misc_feature (1)..(25): SEQ ID NO: 3699; WAN024B39_x_at; Start 181; Stop 205
atcgaggttggactcttgggaaatt

SEQ ID NO: 71293 - DNA, 25 bp, Artificial
  probe
  misc_feature (1)..(25): SEQ ID NO: 3699; WAN024B39_x_at; Start 295; Stop 319
atggatattcctgccaaaatcagtg

SEQ ID NO: 71294 - DNA, 25 bp, Artificial
  probe
  misc_feature (1)..(25): SEQ ID NO: 3699; WAN024B39_x_at; Start 145; Stop 169
cgtgtcttggttgagcaaggggtga

SEQ ID NO: 71295 - DNA, 25 bp, Artificial
  probe
  misc_feature (1)..(25): SEQ ID NO: 3699; WAN024B39_x_at; Start 354; Stop 378
aacagccttccgtgccattggtggc

SEQ ID NO: 71296 - DNA, 25 bp, Artificial
  probe
  misc_feature (1)..(25): SEQ ID NO: 3699; WAN024B39_x_at; Start 355; Stop 379
acagccttccgtgccattggtggcc

SEQ ID NO: 71297 - DNA, 25 bp, Artificial
  probe
  misc_feature (1)..(25): SEQ ID NO: 3699; WAN024B39_x_at; Start 150; Stop 174
cttggttgagcaaggggtgaatgcc

SEQ ID NO: 71298 - DNA, 25 bp, Artificial
  probe
  misc_feature (1)..(25): SEQ ID NO: 3699; WAN024B39_x_at; Start 292; Stop 316
actatggatattcctgccaaaatca

SEQ ID NO: 71299 - DNA, 25 bp, Artificial
  probe
  misc_feature (1)..(25): SEQ ID NO: 3699; WAN024B39_x_at; Start 146; Stop 170
gtgtcttggttgagcaaggggtgaa

SEQ ID NO: 71300 - DNA, 25 bp, Artificial
  probe
  misc_feature (1)..(25): SEQ ID NO: 3699; WAN024B39_x_at; Start 356; Stop 380
cagccttccgtgccattggtggcct

SEQ ID NO: 71301 - DNA, 25 bp, Artificial
  probe
  misc_feature (1)..(25): SEQ ID NO: 3699; WAN024B39_x_at; Start 281; Stop 305
ataacaagattactatggatattcc

SEQ ID NO: 71302 - DNA, 25 bp, Artificial
  probe
  misc_feature (1)..(25): SEQ ID NO: 3699; WAN024B39_x_at; Start 297; Stop 321
ggatattcctgccaaaatcagtgat

SEQ ID NO: 71303 - DNA, 25 bp, Artificial
  probe
  misc_feature (1)..(25): SEQ ID NO: 3699; WAN024B39_x_at; Start 223; Stop 247
cttccaggagaagtagtcaaggatg

SEQ ID NO: 71304 - DNA, 25 bp, Artificial
  probe
  misc_feature (1)..(25): SEQ ID NO: 3699; WAN024B39_x_at; Start 154; Stop 178
gttgagcaaggggtgaatgcccgtg

SEQ ID NO: 71305 - DNA, 25 bp, Artificial
  probe
  misc_feature (1)..(25): SEQ ID NO: 3699; WAN024B39_x_at; Start 300; Stop 324
tattcctgccaaaatcagtgatgat

SEQ ID NO: 71306 - DNA, 25 bp, Artificial
  probe
  misc_feature (1)..(25): SEQ ID NO: 3699; WAN024B39_x_at; Start 282; Stop 306
taacaagattactatggatattcct

SEQ ID NO: 71307 - DNA, 25 bp, Artificial
  probe
  misc_feature (1)..(25): SEQ ID NO: 3699; WAN024B39_x_at; Start 280; Stop 304
gataacaagattactatggatattc

SEQ ID NO: 71308 - DNA, 25 bp, Artificial
  probe
  misc_feature (1)..(25): SEQ ID NO: 3699; WAN024B39_x_at; Start 147; Stop 171
tgtcttggttgagcaaggggtgaat

SEQ ID NO: 71309 - DNA, 25 bp, Artificial
  probe
  misc_feature (1)..(25): SEQ ID NO: 3699; WAN024B39_x_at; Start 299; Stop 323
atattcctgccaaaatcagtgatga

SEQ ID NO: 71310 - DNA, 25 bp, Artificial
  probe
  misc_feature (1)..(25): SEQ ID NO: 3699; WAN024B39_x_at; Start 293; Stop 317
ctatggatattcctgccaaaatcag

SEQ ID NO: 71311 - DNA, 25 bp, Artificial
  probe
  misc_feature (1)..(25): SEQ ID NO: 3699; WAN024B39_x_at; Start 165; Stop 189
ggtgaatgcccgtgaaatcgaggtt

SEQ ID NO: 71312 - DNA, 25 bp, Artificial
  probe
  misc_feature (1)..(25): SEQ ID NO: 3699; WAN024B39_x_at; Start 182; Stop 206
tcgaggttggactcttgggaaatta

SEQ ID NO: 71313 - DNA, 25 bp, Artificial
  probe
  misc_feature (1)..(25): SEQ ID NO: 3699; WAN024B39_x_at; Start 279; Stop 303
tgataacaagattactatggatatt

SEQ ID NO: 71314 - DNA, 25 bp, Artificial
  probe
  misc_feature (1)..(25): SEQ ID NO: 3699; WAN024B39_x_at; Start 298; Stop 322
gatattcctgccaaaatcagtgatg

SEQ ID NO: 71315 - DNA, 25 bp, Artificial
  probe
  misc_feature (1)..(25): SEQ ID NO: 3699; WAN024B39_x_at; Start 148; Stop 172
gtcttggttgagcaaggggtgaatg

SEQ ID NO: 71316 - DNA, 25 bp, Artificial
  probe
  misc_feature (1)..(25): SEQ ID NO: 3699; WAN024B39_x_at; Start 132; Stop 156
ccaatatgacagccgtgtcttggtt

SEQ ID NO: 71317 - DNA, 25 bp, Artificial
  probe
  misc_feature (1)..(25): SEQ ID NO: 3699; WAN024B39_x_at; Start 133; Stop 157
caatatgacagccgtgtcttggttg

SEQ ID NO: 71318 - DNA, 25 bp, Artificial
  probe
  misc_feature (1)..(25): SEQ ID NO: 3699; WAN024B39_x_at; Start 303; Stop 327
tcctgccaaaatcagtgatgatgtg

SEQ ID NO: 71319 - DNA, 25 bp, Artificial
  probe
  misc_feature (1)..(25): SEQ ID NO: 3699; WAN024B39_x_at; Start 339; Stop 363
gcgtcaaaatgcagaaacagccttc

SEQ ID NO: 71320 - DNA, 25 bp, Artificial
  probe
  misc_feature (1)..(25): SEQ ID NO: 3699; WAN024B39_x_at; Start 144; Stop 168
ccgtgtcttggttgagcaaggggtg

SEQ ID NO: 71321 - DNA, 25 bp, Artificial
  probe
  misc_feature (1)..(25): SEQ ID NO: 3699; WAN024B39_x_at; Start 141; Stop 165
cagccgtgtcttggttgagcaaggg

SEQ ID NO: 71322 - DNA, 25 bp, Artificial
  probe
  misc_feature (1)..(25): SEQ ID NO: 3699; WAN024B39_x_at; Start 151; Stop 175
ttggttgagcaaggggtgaatgccc

SEQ ID NO: 71323 - DNA, 25 bp, Artificial
  probe
  misc_feature (1)..(25): SEQ ID NO: 3699; WAN024B39_x_at; Start 134; Stop 158
aatatgacagccgtgtcttggttga

SEQ ID NO: 71324 - DNA, 25 bp, Artificial
  probe
  misc_feature (1)..(25): SEQ ID NO: 3699; WAN024B39_x_at; Start 294; Stop 318
tatggatattcctgccaaaatcagt

SEQ ID NO: 71325 - DNA, 25 bp, Artificial
  probe
  misc_feature (1)..(25): SEQ ID NO: 3699; WAN024B39_x_at; Start 155; Stop 179
ttgagcaaggggtgaatgcccgtga

SEQ ID NO: 71326 - DNA, 25 bp, Artificial
  probe
  misc_feature (1)..(25): SEQ ID NO: 804; WAN024B3A_at; Start 220; Stop 244
aagcaagttgtaccaagtgctattt

SEQ ID NO: 71327 - DNA, 25 bp, Artificial
  probe
  misc_feature (1)..(25): SEQ ID NO: 804; WAN024B3A_at; Start 163; Stop 187
agtcagactccggggcaagaggatc

SEQ ID NO: 71328 - DNA, 25 bp, Artificial
  probe
  misc_feature (1)..(25): SEQ ID NO: 804; WAN024B3A_at; Start 224; Stop 248
aagttgtaccaagtgctatttacga

SEQ ID NO: 71329 - DNA, 25 bp, Artificial
  probe
  misc_feature (1)..(25): SEQ ID NO: 804; WAN024B3A_at; Start 216; Stop 240
ggataagcaagttgtaccaagtgct

SEQ ID NO: 71330 - DNA, 25 bp, Artificial
  probe
  misc_feature (1)..(25): SEQ ID NO: 804; WAN024B3A_at; Start 171; Stop 195
tccggggcaagaggatcgtctcatg

SEQ ID NO: 71331 - DNA, 25 bp, Artificial
  probe
  misc_feature (1)..(25): SEQ ID NO: 804; WAN024B3A_at; Start 222; Stop 246
gcaagttgtaccaagtgctatttac

SEQ ID NO: 71332 - DNA, 25 bp, Artificial
  probe
  misc_feature (1)..(25): SEQ ID NO: 804; WAN024B3A_at; Start 223; Stop 247
caagttgtaccaagtgctatttacg

SEQ ID NO: 71333 - DNA, 25 bp, Artificial
  probe
  misc_feature (1)..(25): SEQ ID NO: 804; WAN024B3A_at; Start 167; Stop 191
agactccggggcaagaggatcgtct

SEQ ID NO: 71334 - DNA, 25 bp, Artificial
  probe
  misc_feature (1)..(25): SEQ ID NO: 804; WAN024B3A_at; Start 217; Stop 241
gataagcaagttgtaccaagtgcta

SEQ ID NO: 71335 - DNA, 25 bp, Artificial
  probe
  misc_feature (1)..(25): SEQ ID NO: 804; WAN024B3A_at; Start 166; Stop 190
cagactccggggcaagaggatcgtc

SEQ ID NO: 71336 - DNA, 25 bp, Artificial
  probe
  misc_feature (1)..(25): SEQ ID NO: 804; WAN024B3A_at; Start 225; Stop 249
agttgtaccaagtgctatttacgaa

SEQ ID NO: 71337 - DNA, 25 bp, Artificial
  probe
  misc_feature (1)..(25): SEQ ID NO: 804; WAN024B3A_at; Start 170; Stop 194
ctccggggcaagaggatcgtctcat

SEQ ID NO: 71338 - DNA, 25 bp, Artificial
  probe
  misc_feature (1)..(25): SEQ ID NO: 804; WAN024B3A_at; Start 218; Stop 242
ataagcaagttgtaccaagtgctat

SEQ ID NO: 71339 - DNA, 25 bp, Artificial
  probe
  misc_feature (1)..(25): SEQ ID NO: 804; WAN024B3A_at; Start 164; Stop 188
gtcagactccggggcaagaggatcg

SEQ ID NO: 71340 - DNA, 25 bp, Artificial
  probe
  misc_feature (1)..(25): SEQ ID NO: 804; WAN024B3A_at; Start 173; Stop 197
cggggcaagaggatcgtctcatgac

SEQ ID NO: 71341 - DNA, 25 bp, Artificial
  probe
  misc_feature (1)..(25): SEQ ID NO: 804; WAN024B3A_at; Start 219; Stop 243
taagcaagttgtaccaagtgctatt

SEQ ID NO: 71342 - DNA, 25 bp, Artificial
  probe
  misc_feature (1)..(25): SEQ ID NO: 804; WAN024B3A_at; Start 172; Stop 196
ccggggcaagaggatcgtctcatga

SEQ ID NO: 71343 - DNA, 25 bp, Artificial
  probe
  misc_feature (1)..(25): SEQ ID NO: 804; WAN024B3A_at; Start 221; Stop 245
agcaagttgtaccaagtgctattta

SEQ ID NO: 71344 - DNA, 25 bp, Artificial
  probe
  misc_feature (1)..(25): SEQ ID NO: 804; WAN024B3A_at; Start 169; Stop 193
actccggggcaagaggatcgtctca

SEQ ID NO: 71345 - DNA, 25 bp, Artificial
  probe
  misc_feature (1)..(25): SEQ ID NO: 804; WAN024B3A_at; Start 165; Stop 189
tcagactccggggcaagaggatcgt

SEQ ID NO: 71346 - DNA, 25 bp, Artificial
  probe
  misc_feature (1)..(25): SEQ ID NO: 804; WAN024B3A_at; Start 168; Stop 192
gactccggggcaagaggatcgtctc

SEQ ID NO: 71347 - DNA, 25 bp, Artificial
  probe
  misc_feature (1)..(25): SEQ ID NO: 803; WAN024B3B_at; Start 33; Stop 57
acggagtgcagagcgtgaagtctct

SEQ ID NO: 71348 - DNA, 25 bp, Artificial
  probe
  misc_feature (1)..(25): SEQ ID NO: 803; WAN024B3B_at; Start 37; Stop 61
agtgcagagcgtgaagtctctgtcc

SEQ ID NO: 71349 - DNA, 25 bp, Artificial
  probe
  misc_feature (1)..(25): SEQ ID NO: 803; WAN024B3B_at; Start 39; Stop 63
tgcagagcgtgaagtctctgtcctt

SEQ ID NO: 71350 - DNA, 25 bp, Artificial
  probe
  misc_feature (1)..(25): SEQ ID NO: 803; WAN024B3B_at; Start 757; Stop 781
atggatattccggcaaagatcagtg

SEQ ID NO: 71351 - DNA, 25 bp, Artificial
  probe
  misc_feature (1)..(25): SEQ ID NO: 803; WAN024B3B_at; Start 35; Stop 59
ggagtgcagagcgtgaagtctctgt

SEQ ID NO: 71352 - DNA, 25 bp, Artificial
  probe
  misc_feature (1)..(25): SEQ ID NO: 803; WAN024B3B_at; Start 684; Stop 708
gctgccaggagaagttgtcaaagat

SEQ ID NO: 71353 - DNA, 25 bp, Artificial
  probe
  misc_feature (1)..(25): SEQ ID NO: 803; WAN024B3B_at; Start 28; Stop 52
ggtggacggagtgcagagcgtgaag

SEQ ID NO: 71354 - DNA, 25 bp, Artificial
  probe
  misc_feature (1)..(25): SEQ ID NO: 803; WAN024B3B_at; Start 683; Stop 707
cgctgccaggagaagttgtcaaaga

SEQ ID NO: 71355 - DNA, 25 bp, Artificial
  probe
  misc_feature (1)..(25): SEQ ID NO: 803; WAN024B3B_at; Start 32; Stop 56
gacggagtgcagagcgtgaagtctc

SEQ ID NO: 71356 - DNA, 25 bp, Artificial
  probe
  misc_feature (1)..(25): SEQ ID NO: 803; WAN024B3B_at; Start 681; Stop 705
cacgctgccaggagaagttgtcaaa

SEQ ID NO: 71357 - DNA, 25 bp, Artificial
  probe
  misc_feature (1)..(25): SEQ ID NO: 803; WAN024B3B_at; Start 29; Stop 53
gtggacggagtgcagagcgtgaagt

SEQ ID NO: 71358 - DNA, 25 bp, Artificial
  probe
  misc_feature (1)..(25): SEQ ID NO: 803; WAN024B3B_at; Start 685; Stop 709
ctgccaggagaagttgtcaaagatg

SEQ ID NO: 71359 - DNA, 25 bp, Artificial
  probe
  misc_feature (1)..(25): SEQ ID NO: 803; WAN024B3B_at; Start 759; Stop 783
ggatattccggcaaagatcagtgat

SEQ ID NO: 71360 - DNA, 25 bp, Artificial
  probe
  misc_feature (1)..(25): SEQ ID NO: 803; WAN024B3B_at; Start 762; Stop 786
tattccggcaaagatcagtgatgat

SEQ ID NO: 71361 - DNA, 25 bp, Artificial
  probe
  misc_feature (1)..(25): SEQ ID NO: 803; WAN024B3B_at; Start 31; Stop 55
ggacggagtgcagagcgtgaagtct

SEQ ID NO: 71362 - DNA, 25 bp, Artificial
  probe
  misc_feature (1)..(25): SEQ ID NO: 803; WAN024B3B_at; Start 687; Stop 711
gccaggagaagttgtcaaagatgtt

SEQ ID NO: 71363 - DNA, 25 bp, Artificial
  probe
  misc_feature (1)..(25): SEQ ID NO: 803; WAN024B3B_at; Start 34; Stop 58
cggagtgcagagcgtgaagtctctg

SEQ ID NO: 71364 - DNA, 25 bp, Artificial
  probe
  misc_feature (1)..(25): SEQ ID NO: 803; WAN024B3B_at; Start 754; Stop 778
accatggatattccggcaaagatca

SEQ ID NO: 71365 - DNA, 25 bp, Artificial
  probe
  misc_feature (1)..(25): SEQ ID NO: 803; WAN024B3B_at; Start 761; Stop 785
atattccggcaaagatcagtgatga

SEQ ID NO: 71366 - DNA, 25 bp, Artificial
  probe
  misc_feature (1)..(25): SEQ ID NO: 803; WAN024B3B_at; Start 38; Stop 62
gtgcagagcgtgaagtctctgtcct

SEQ ID NO: 71367 - DNA, 25 bp, Artificial
  probe
  misc_feature (1)..(25): SEQ ID NO: 803; WAN024B3B_at; Start 760; Stop 784
gatattccggcaaagatcagtgatg

SEQ ID NO: 71368 - DNA, 25 bp, Artificial
  probe
  misc_feature (1)..(25): SEQ ID NO: 803; WAN024B3B_at; Start 30; Stop 54
tggacggagtgcagagcgtgaagtc

SEQ ID NO: 71369 - DNA, 25 bp, Artificial
  probe
  misc_feature (1)..(25): SEQ ID NO: 803; WAN024B3B_at; Start 758; Stop 782
tggatattccggcaaagatcagtga

SEQ ID NO: 71370 - DNA, 25 bp, Artificial
  probe
  misc_feature (1)..(25): SEQ ID NO: 803; WAN024B3B_at; Start 682; Stop 706
acgctgccaggagaagttgtcaaag

SEQ ID NO: 71371 - DNA, 25 bp, Artificial
  probe
  misc_feature (1)..(25): SEQ ID NO: 803; WAN024B3B_at; Start 756; Stop 780
catggatattccggcaaagatcagt

SEQ ID NO: 71372 - DNA, 25 bp, Artificial
  probe
  misc_feature (1)..(25): SEQ ID NO: 803; WAN024B3B_at; Start 36; Stop 60
gagtgcagagcgtgaagtctctgtc

SEQ ID NO: 71373 - DNA, 25 bp, Artificial
  probe
  misc_feature (1)..(25): SEQ ID NO: 803; WAN024B3B_at; Start 686; Stop 710
tgccaggagaagttgtcaaagatgt

SEQ ID NO: 71374 - DNA, 25 bp, Artificial
  probe
  misc_feature (1)..(25): SEQ ID NO: 803; WAN024B3B_at; Start 755; Stop 779
ccatggatattccggcaaagatcag

SEQ ID NO: 71375 - DNA, 25 bp, Artificial
  probe
  misc_feature (1)..(25): SEQ ID NO: 803; WAN024B3B_at; Start 27; Stop 51
tggtggacggagtgcagagcgtgaa

SEQ ID NO: 71376 - DNA, 25 bp, Artificial
  probe
  misc_feature (1)..(25): SEQ ID NO: 803; WAN024B3B_at; Start 450; Stop 474
ggatgatttgactgctaaaattgct

SEQ ID NO: 71377 - DNA, 25 bp, Artificial
  probe
  misc_feature (1)..(25): SEQ ID NO: 803; WAN024B3B_at; Start 753; Stop 777
taccatggatattccggcaaagatc

SEQ ID NO: 71378 - DNA, 25 bp, Artificial
  probe
  misc_feature (1)..(25): SEQ ID NO: 805; WAN024B3C_s_at; Start 31; Stop 55
ggacggagtgcggaacgcgaagtct

SEQ ID NO: 71379 - DNA, 25 bp, Artificial
  probe
  misc_feature (1)..(25): SEQ ID NO: 805; WAN024B3C_s_at; Start 27; Stop 51
tggtggacggagtgcggaacgcgaa

SEQ ID NO: 71380 - DNA, 25 bp, Artificial
  probe
  misc_feature (1)..(25): SEQ ID NO: 805; WAN024B3C_s_at; Start 38; Stop 62
gtgcggaacgcgaagtctctgtcct

SEQ ID NO: 71381 - DNA, 25 bp, Artificial
  probe
  misc_feature (1)..(25): SEQ ID NO: 805; WAN024B3C_s_at; Start 29; Stop 53
gtggacggagtgcggaacgcgaagt

SEQ ID NO: 71382 - DNA, 25 bp, Artificial
  probe
  misc_feature (1)..(25): SEQ ID NO: 805; WAN024B3C_s_at; Start 39; Stop 63
tgcggaacgcgaagtctctgtcctt

SEQ ID NO: 71383 - DNA, 25 bp, Artificial
  probe
  misc_feature (1)..(25): SEQ ID NO: 805; WAN024B3C_s_at; Start 28; Stop 52
ggtggacggagtgcggaacgcgaag

SEQ ID NO: 71384 - DNA, 25 bp, Artificial
  probe
  misc_feature (1)..(25): SEQ ID NO: 805; WAN024B3C_s_at; Start 30; Stop 54
tggacggagtgcggaacgcgaagtc

SEQ ID NO: 71385 - DNA, 25 bp, Artificial
  probe
  misc_feature (1)..(25): SEQ ID NO: 805; WAN024B3C_s_at; Start 33; Stop 57
acggagtgcggaacgcgaagtctct

SEQ ID NO: 71386 - DNA, 25 bp, Artificial
  probe
  misc_feature (1)..(25): SEQ ID NO: 805; WAN024B3C_s_at; Start 37; Stop 61
agtgcggaacgcgaagtctctgtcc

SEQ ID NO: 71387 - DNA, 25 bp, Artificial
  probe
  misc_feature (1)..(25): SEQ ID NO: 805; WAN024B3C_s_at; Start 32; Stop 56
gacggagtgcggaacgcgaagtctc

SEQ ID NO: 71388 - DNA, 25 bp, Artificial
  probe
  misc_feature (1)..(25): SEQ ID NO: 805; WAN024B3C_s_at; Start 34; Stop 58
cggagtgcggaacgcgaagtctctg

SEQ ID NO: 71389 - DNA, 25 bp, Artificial
  probe
  misc_feature (1)..(25): SEQ ID NO: 1682; WAN024B3D_at; Start 71; Stop 95
tggctaaaaatgattattttgcgtt

SEQ ID NO: 71390 - DNA, 25 bp, Artificial
  probe
  misc_feature (1)..(25): SEQ ID NO: 1682; WAN024B3D_at; Start 505; Stop 529
gcacgaaatgagtctgtcaataaca

SEQ ID NO: 71391 - DNA, 25 bp, Artificial
  probe
  misc_feature (1)..(25): SEQ ID NO: 1682; WAN024B3D_at; Start 599; Stop 623
ctcaggttttactactagtaacgat

SEQ ID NO: 71392 - DNA, 25 bp, Artificial
  probe
  misc_feature (1)..(25): SEQ ID NO: 1682; WAN024B3D_at; Start 234; Stop 258
tctattattgctggcatggtttcta

SEQ ID NO: 71393 - DNA, 25 bp, Artificial
  probe
  misc_feature (1)..(25): SEQ ID NO: 1682; WAN024B3D_at; Start 494; Stop 518
tcaacacagtagcacgaaatgagtc

SEQ ID NO: 71394 - DNA, 25 bp, Artificial
  probe
  misc_feature (1)..(25): SEQ ID NO: 1682; WAN024B3D_at; Start 184; Stop 208
gcccctttgattcttggatttctga

SEQ ID NO: 71395 - DNA, 25 bp, Artificial
  probe
  misc_feature (1)..(25): SEQ ID NO: 1682; WAN024B3D_at; Start 561; Stop 585
actactggctttaaatatgacatca

SEQ ID NO: 71396 - DNA, 25 bp, Artificial
  probe
  misc_feature (1)..(25): SEQ ID NO: 1682; WAN024B3D_at; Start 192; Stop 216
gattcttggatttctgacaatgaca

SEQ ID NO: 71397 - DNA, 25 bp, Artificial
  probe
  misc_feature (1)..(25): SEQ ID NO: 1682; WAN024B3D_at; Start 457; Stop 481
tctttgatttttccaagattggtga

SEQ ID NO: 71398 - DNA, 25 bp, Artificial
  probe
  misc_feature (1)..(25): SEQ ID NO: 1682; WAN024B3D_at; Start 176; Stop 200
tatctatagcccctttgattcttgg

SEQ ID NO: 71399 - DNA, 25 bp, Artificial
  probe
  misc_feature (1)..(25): SEQ ID NO: 1682; WAN024B3D_at; Start 388; Stop 412
gcaggaatagtagcaactcatctaa

SEQ ID NO: 71400 - DNA, 25 bp, Artificial
  probe
  misc_feature (1)..(25): SEQ ID NO: 1682; WAN024B3D_at; Start 362; Stop 386
tggctatggtgctgacgtattttgg

SEQ ID NO: 71401 - DNA, 25 bp, Artificial
  probe
  misc_feature (1)..(25): SEQ ID NO: 1682; WAN024B3D_at; Start 198; Stop 222
tggatttctgacaatgacatttaca

SEQ ID NO: 71402 - DNA, 25 bp, Artificial
  probe
  misc_feature (1)..(25): SEQ ID NO: 1682; WAN024B3D_at; Start 500; Stop 524
cagtagcacgaaatgagtctgtcaa

SEQ ID NO: 71403 - DNA, 25 bp, Artificial
  probe
  misc_feature (1)..(25): SEQ ID NO: 1682; WAN024B3D_at; Start 408; Stop 432
tctaaatggctcagatatgtatgtg

SEQ ID NO: 71404 - DNA, 25 bp, Artificial
  probe
  misc_feature (1)..(25): SEQ ID NO: 1682; WAN024B3D_at; Start 419; Stop 443
cagatatgtatgtgattttgggtgc

SEQ ID NO: 71405 - DNA, 25 bp, Artificial
  probe
  misc_feature (1)..(25): SEQ ID NO: 1682; WAN024B3D_at; Start 225; Stop 249
taatttcattctattattgctggca

SEQ ID NO: 71406 - DNA, 25 bp, Artificial
  probe
  misc_feature (1)..(25): SEQ ID NO: 1682; WAN024B3D_at; Start 588; Stop 612
tacaggtattcctcaggttttacta

SEQ ID NO: 71407 - DNA, 25 bp, Artificial
  probe
  misc_feature (1)..(25): SEQ ID NO: 1682; WAN024B3D_at; Start 439; Stop 463
ggtgctttatctggaatttctttga

SEQ ID NO: 71408 - DNA, 25 bp, Artificial
  probe
  misc_feature (1)..(25): SEQ ID NO: 1682; WAN024B3D_at; Start 347; Stop 371
caatggcaggctatgtggctatggt

SEQ ID NO: 71409 - DNA, 25 bp, Artificial
  probe
  misc_feature (1)..(25): SEQ ID NO: 1682; WAN024B3D_at; Start 356; Stop 380
gctatgtggctatggtgctgacgta

SEQ ID NO: 71410 - DNA, 25 bp, Artificial
  probe
  misc_feature (1)..(25): SEQ ID NO: 1682; WAN024B3D_at; Start 431; Stop 455
tgattttgggtgctttatctggaat

SEQ ID NO: 71411 - DNA, 25 bp, Artificial
  probe
  misc_feature (1)..(25): SEQ ID NO: 1682; WAN024B3D_at; Start 549; Stop 573
tagtactataaaactactggcttta

SEQ ID NO: 71412 - DNA, 25 bp, Artificial
  probe
  misc_feature (1)..(25): SEQ ID NO: 1682; WAN024B3D_at; Start 487; Stop 511
aagtatatcaacacagtagcacgaa

SEQ ID NO: 71413 - DNA, 25 bp, Artificial
  probe
  misc_feature (1)..(25): SEQ ID NO: 1682; WAN024B3D_at; Start 558; Stop 582
aaaactactggctttaaatatgaca

SEQ ID NO: 71414 - DNA, 25 bp, Artificial
  probe
  misc_feature (1)..(25): SEQ ID NO: 1682; WAN024B3D_at; Start 169; Stop 193
tcttatttatctatagcccctttga

SEQ ID NO: 71415 - DNA, 25 bp, Artificial
  probe
  misc_feature (1)..(25): SEQ ID NO: 1682; WAN024B3D_at; Start 366; Stop 390
tatggtgctgacgtattttggtgca

SEQ ID NO: 71416 - DNA, 25 bp, Artificial
  probe
  misc_feature (1)..(25): SEQ ID NO: 1682; WAN024B3D_at; Start 400; Stop 424
gcaactcatctaaatggctcagata

SEQ ID NO: 71417 - DNA, 25 bp, Artificial
  probe
  misc_feature (1)..(25): SEQ ID NO: 1682; WAN024B3D_at; Start 395; Stop 419
tagtagcaactcatctaaatggctc

SEQ ID NO: 71418 - DNA, 25 bp, Artificial
  probe
  misc_feature (1)..(25): SEQ ID NO: 1682; WAN024B3D_at; Start 594; Stop 618
tattcctcaggttttactactagta

SEQ ID NO: 71419 - DNA, 25 bp, Artificial
  probe
  misc_feature (1)..(25): SEQ ID NO: 1682; WAN024B3D_at; Start 612; Stop 636
actagtaacgattttaacaaatcag

SEQ ID NO: 71420 - DNA, 25 bp, Artificial
  probe
  misc_feature (1)..(25): SEQ ID NO: 1682; WAN024B3D_at; Start 490; Stop 514
tatatcaacacagtagcacgaaatg

SEQ ID NO: 71421 - DNA, 25 bp, Artificial
  probe
  misc_feature (1)..(25): SEQ ID NO: 1682; WAN024B3D_at; Start 207; Stop 231
gacaatgacatttacaactaatttc

SEQ ID NO: 71422 - DNA, 25 bp, Artificial
  probe
  misc_feature (1)..(25): SEQ ID NO: 1682; WAN024B3D_at; Start 514; Stop 538
gagtctgtcaataacattaaagata

SEQ ID NO: 71423 - DNA, 25 bp, Artificial
  probe
  misc_feature (1)..(25): SEQ ID NO: 2838; WAN024B3E_at; Start 606; Stop 630
gctattaactattttaacaaatcag

SEQ ID NO: 71424 - DNA, 25 bp, Artificial
  probe
  misc_feature (1)..(25): SEQ ID NO: 2838; WAN024B3E_at; Start 360; Stop 384
catggtgttgacgtatttcggtgca

SEQ ID NO: 71425 - DNA, 25 bp, Artificial
  probe
  misc_feature (1)..(25): SEQ ID NO: 2838; WAN024B3E_at; Start 65; Stop 89
tggctaaaaacgactattttgcatt

SEQ ID NO: 71426 - DNA, 25 bp, Artificial
  probe
  misc_feature (1)..(25): SEQ ID NO: 2838; WAN024B3E_at; Start 481; Stop 505
aagtatatcaatacagtagctcaag

SEQ ID NO: 71427 - DNA, 25 bp, Artificial
  probe
  misc_feature (1)..(25): SEQ ID NO: 2838; WAN024B3E_at; Start 433; Stop 457
ggtgcattatctgggatttcattga

SEQ ID NO: 71428 - DNA, 25 bp, Artificial
  probe
  misc_feature (1)..(25): SEQ ID NO: 2838; WAN024B3E_at; Start 225; Stop 249
cgttgtattattactggcatggttt

SEQ ID NO: 71429 - DNA, 25 bp, Artificial
  probe
  misc_feature (1)..(25): SEQ ID NO: 2838; WAN024B3E_at; Start 122; Stop 146
cagttcctttcgtgaaaacaaatat

SEQ ID NO: 71430 - DNA, 25 bp, Artificial
  probe
  misc_feature (1)..(25): SEQ ID NO: 2838; WAN024B3E_at; Start 452; Stop 476
cattgatttttccaaggttagtgat

SEQ ID NO: 71431 - DNA, 25 bp, Artificial
  probe
  misc_feature (1)..(25): SEQ ID NO: 2838; WAN024B3E_at; Start 381; Stop 405
tgcaggaatagtagctgctcattta

SEQ ID NO: 71432 - DNA, 25 bp, Artificial
  probe
  misc_feature (1)..(25): SEQ ID NO: 2838; WAN024B3E_at; Start 356; Stop 380
tagccatggtgttgacgtatttcgg

SEQ ID NO: 71433 - DNA, 25 bp, Artificial
  probe
  misc_feature (1)..(25): SEQ ID NO: 2838; WAN024B3E_at; Start 583; Stop 607
acaggaattccgcaggttttactgc

SEQ ID NO: 71434 - DNA, 25 bp, Artificial
  probe
  misc_feature (1)..(25): SEQ ID NO: 2838; WAN024B3E_at; Start 170; Stop 194
tatctataattcctttgattgttgg

SEQ ID NO: 71435 - DNA, 25 bp, Artificial
  probe
  misc_feature (1)..(25): SEQ ID NO: 2838; WAN024B3E_at; Start 2; Stop 26
tgtcaatatatagaatctgtaaaga

SEQ ID NO: 71436 - DNA, 25 bp, Artificial
  probe
  misc_feature (1)..(25): SEQ ID NO: 2838; WAN024B3E_at; Start 488; Stop 512
tcaatacagtagctcaagatgagtc

SEQ ID NO: 71437 - DNA, 25 bp, Artificial
  probe
  misc_feature (1)..(25): SEQ ID NO: 2838; WAN024B3E_at; Start 218; Stop 242
ctgatttcgttgtattattactggc

SEQ ID NO: 71438 - DNA, 25 bp, Artificial
  probe
  misc_feature (1)..(25): SEQ ID NO: 2838; WAN024B3E_at; Start 592; Stop 616
ccgcaggttttactgctattaacta

SEQ ID NO: 71439 - DNA, 25 bp, Artificial
  probe
  misc_feature (1)..(25): SEQ ID NO: 2838; WAN024B3E_at; Start 444; Stop 468
tgggatttcattgatttttccaagg

SEQ ID NO: 71440 - DNA, 25 bp, Artificial
  probe
  misc_feature (1)..(25): SEQ ID NO: 2838; WAN024B3E_at; Start 400; Stop 424
catttaaacgactcagatatctata

SEQ ID NO: 71441 - DNA, 25 bp, Artificial
  probe
  misc_feature (1)..(25): SEQ ID NO: 2838; WAN024B3E_at; Start 337; Stop 361
gatgcaatggctggctatgtagcca

SEQ ID NO: 71442 - DNA, 25 bp, Artificial
  probe
  misc_feature (1)..(25): SEQ ID NO: 2838; WAN024B3E_at; Start 396; Stop 420
tgctcatttaaacgactcagatatc

SEQ ID NO: 71443 - DNA, 25 bp, Artificial
  probe
  misc_feature (1)..(25): SEQ ID NO: 2838; WAN024B3E_at; Start 341; Stop 365
caatggctggctatgtagccatggt

SEQ ID NO: 71444 - DNA, 25 bp, Artificial
  probe
  misc_feature (1)..(25): SEQ ID NO: 2838; WAN024B3E_at; Start 413; Stop 437
cagatatctatataattttgggtgc

SEQ ID NO: 71445 - DNA, 25 bp, Artificial
  probe
  misc_feature (1)..(25): SEQ ID NO: 2838; WAN024B3E_at; Start 392; Stop 416
tagctgctcatttaaacgactcaga

SEQ ID NO: 71446 - DNA, 25 bp, Artificial
  probe
  misc_feature (1)..(25): SEQ ID NO: 2838; WAN024B3E_at; Start 350; Stop 374
gctatgtagccatggtgttgacgta

SEQ ID NO: 71447 - DNA, 25 bp, Artificial
  probe
  misc_feature (1)..(25): SEQ ID NO: 2838; WAN024B3E_at; Start 132; Stop 156
cgtgaaaacaaatattactcccaat

SEQ ID NO: 71448 - DNA, 25 bp, Artificial
  probe
  misc_feature (1)..(25): SEQ ID NO: 2838; WAN024B3E_at; Start 181; Stop 205
cctttgattgttggatttataataa

SEQ ID NO: 71449 - DNA, 25 bp, Artificial
  probe
  misc_feature (1)..(25): SEQ ID NO: 2838; WAN024B3E_at; Start 425; Stop 449
taattttgggtgcattatctgggat

SEQ ID NO: 71450 - DNA, 25 bp, Artificial
  probe
  misc_feature (1)..(25): SEQ ID NO: 2838; WAN024B3E_at; Start 555; Stop 579
aatactggctctaaacatgacatca

SEQ ID NO: 71451 - DNA, 25 bp, Artificial
  probe
  misc_feature (1)..(25): SEQ ID NO: 2838; WAN024B3E_at; Start 74; Stop 98
acgactattttgcattttatgttgg

SEQ ID NO: 71452 - DNA, 25 bp, Artificial
  probe
  misc_feature (1)..(25): SEQ ID NO: 2838; WAN024B3E_at; Start 385; Stop 409
ggaatagtagctgctcatttaaacg

SEQ ID NO: 71453 - DNA, 25 bp, Artificial
  probe
  misc_feature (1)..(25): SEQ ID NO: 2838; WAN024B3E_at; Start 586; Stop 610
ggaattccgcaggttttactgctat

SEQ ID NO: 71454 - DNA, 25 bp, Artificial
  probe
  misc_feature (1)..(25): SEQ ID NO: 2838; WAN024B3E_at; Start 429; Stop 453
tttgggtgcattatctgggatttca

SEQ ID NO: 71455 - DNA, 25 bp, Artificial
  probe
  misc_feature (1)..(25): SEQ ID NO: 2838; WAN024B3E_at; Start 389; Stop 413
tagtagctgctcatttaaacgactc

SEQ ID NO: 71456 - DNA, 25 bp, Artificial
  probe
  misc_feature (1)..(25): SEQ ID NO: 2838; WAN024B3E_at; Start 687; Stop 711
tttgtattcattattcaaaaaggag

SEQ ID NO: 71457 - DNA, 25 bp, Artificial
  probe
  misc_feature (1)..(25): SEQ ID NO: 6843; WAN024B3F_at; Start 1205; Stop 1229
gaattacaggactttggcagattag

SEQ ID NO: 71458 - DNA, 25 bp, Artificial
  probe
  misc_feature (1)..(25): SEQ ID NO: 6843; WAN024B3F_at; Start 1213; Stop 1237
ggactttggcagattagtggtagaa

SEQ ID NO: 71459 - DNA, 25 bp, Artificial
  probe
  misc_feature (1)..(25): SEQ ID NO: 6843; WAN024B3F_at; Start 1041; Stop 1065
gacaaagattggacactttattaga

SEQ ID NO: 71460 - DNA, 25 bp, Artificial
  probe
  misc_feature (1)..(25): SEQ ID NO: 6843; WAN024B3F_at; Start 1251; Stop 1275
ctttgatgatgtagtaaaattagac

SEQ ID NO: 71461 - DNA, 25 bp, Artificial
  probe
  misc_feature (1)..(25): SEQ ID NO: 6843; WAN024B3F_at; Start 1020; Stop 1044
gattgaaaatgatccacgcgtgaca

SEQ ID NO: 71462 - DNA, 25 bp, Artificial
  probe
  misc_feature (1)..(25): SEQ ID NO: 6843; WAN024B3F_at; Start 818; Stop 842
gccttattctttttgctatagctag

SEQ ID NO: 71463 - DNA, 25 bp, Artificial
  probe
  misc_feature (1)..(25): SEQ ID NO: 6843; WAN024B3F_at; Start 1118; Stop 1142
tgagtttagttggtactagaccacc

SEQ ID NO: 71464 - DNA, 25 bp, Artificial
  probe
  misc_feature (1)..(25): SEQ ID NO: 6843; WAN024B3F_at; Start 1002; Stop 1026
gcaaggtggaatgtttaagattgaa

SEQ ID NO: 71465 - DNA, 25 bp, Artificial
  probe
  misc_feature (1)..(25): SEQ ID NO: 6843; WAN024B3F_at; Start 1273; Stop 1297
gacgttacttatttagatggttgga

SEQ ID NO: 71466 - DNA, 25 bp, Artificial
  probe
  misc_feature (1)..(25): SEQ ID NO: 6843; WAN024B3F_at; Start 762; Stop 786
taaaactagtcatgtgatttcaaag

SEQ ID NO: 71467 - DNA, 25 bp, Artificial
  probe
  misc_feature (1)..(25): SEQ ID NO: 6843; WAN024B3F_at; Start 1129; Stop 1153
ggtactagaccaccgactatagatg

SEQ ID NO: 71468 - DNA, 25 bp, Artificial
  probe
  misc_feature (1)..(25): SEQ ID NO: 6843; WAN024B3F_at; Start 951; Stop 975
gcgaatcgatgctgaagctatcaaa

SEQ ID NO: 71469 - DNA, 25 bp, Artificial
  probe
  misc_feature (1)..(25): SEQ ID NO: 6843; WAN024B3F_at; Start 1064; Stop 1088
gaaaaacgagtctagatgaattgcc

SEQ ID NO: 71470 - DNA, 25 bp, Artificial
  probe
  misc_feature (1)..(25): SEQ ID NO: 6843; WAN024B3F_at; Start 887; Stop 911
tttttgctcaaactcgtatagggaa

SEQ ID NO: 71471 - DNA, 25 bp, Artificial
  probe
  misc_feature (1)..(25): SEQ ID NO: 6843; WAN024B3F_at; Start 960; Stop 984
tgctgaagctatcaaagaacagttg

SEQ ID NO: 71472 - DNA, 25 bp, Artificial
  probe
  misc_feature (1)..(25): SEQ ID NO: 6843; WAN024B3F_at; Start 1222; Stop 1246
cagattagtggtagaagtaatatta

SEQ ID NO: 71473 - DNA, 25 bp, Artificial
  probe
  misc_feature (1)..(25): SEQ ID NO: 6843; WAN024B3F_at; Start 1321; Stop 1345
ttattgaagactataaaagttgtag

SEQ ID NO: 71474 - DNA, 25 bp, Artificial
  probe
  misc_feature (1)..(25): SEQ ID NO: 6843; WAN024B3F_at; Start 1341; Stop 1365
tgtagtaatgaaagatggagcgaag

SEQ ID NO: 71475 - DNA, 25 bp, Artificial
  probe
  misc_feature (1)..(25): SEQ ID NO: 6843; WAN024B3F_at; Start 900; Stop 924
tcgtatagggaaaaatggtcgacat

SEQ ID NO: 71476 - DNA, 25 bp, Artificial
  probe
  misc_feature (1)..(25): SEQ ID NO: 6843; WAN024B3F_at; Start 893; Stop 917
ctcaaactcgtatagggaaaaatgg

SEQ ID NO: 71477 - DNA, 25 bp, Artificial
  probe
  misc_feature (1)..(25): SEQ ID NO: 6843; WAN024B3F_at; Start 1156; Stop 1180
tatatgaagtatacgccggaacaaa

SEQ ID NO: 71478 - DNA, 25 bp, Artificial
  probe
  misc_feature (1)..(25): SEQ ID NO: 6843; WAN024B3F_at; Start 1285; Stop 1309
ttagatggttggacaatttggaaag

SEQ ID NO: 71479 - DNA, 25 bp, Artificial
  probe
  misc_feature (1)..(25): SEQ ID NO: 6843; WAN024B3F_at; Start 1199; Stop 1223
aacctggaattacaggactttggca

SEQ ID NO: 71480 - DNA, 25 bp, Artificial
  probe
  misc_feature (1)..(25): SEQ ID NO: 6843; WAN024B3F_at; Start 873; Stop 897
tggcggaccagctatttttgctcaa

SEQ ID NO: 71481 - DNA, 25 bp, Artificial
  probe
  misc_feature (1)..(25): SEQ ID NO: 6843; WAN024B3F_at; Start 1068; Stop 1092
aacgagtctagatgaattgccacaa

SEQ ID NO: 71482 - DNA, 25 bp, Artificial
  probe
  misc_feature (1)..(25): SEQ ID NO: 6843; WAN024B3F_at; Start 1054; Stop 1078
cactttattagaaaaacgagtctag

SEQ ID NO: 71483 - DNA, 25 bp, Artificial
  probe
  misc_feature (1)..(25): SEQ ID NO: 6843; WAN024B3F_at; Start 1153; Stop 1177
gagtatatgaagtatacgccggaac

SEQ ID NO: 71484 - DNA, 25 bp, Artificial
  probe
  misc_feature (1)..(25): SEQ ID NO: 6843; WAN024B3F_at; Start 1034; Stop 1058
cacgcgtgacaaagattggacactt

SEQ ID NO: 71485 - DNA, 25 bp, Artificial
  probe
  misc_feature (1)..(25): SEQ ID NO: 6843; WAN024B3F_at; Start 1015; Stop 1039
tttaagattgaaaatgatccacgcg

SEQ ID NO: 71486 - DNA, 25 bp, Artificial
  probe
  misc_feature (1)..(25): SEQ ID NO: 6843; WAN024B3F_at; Start 1337; Stop 1361
aagttgtagtaatgaaagatggagc

SEQ ID NO: 71487 - DNA, 25 bp, Artificial
  probe
  misc_feature (1)..(25): SEQ ID NO: 6843; WAN024B3F_at; Start 1138; Stop 1162
ccaccgactatagatgagtatatga

SEQ ID NO: 71488 - DNA, 25 bp, Artificial
  probe
  misc_feature (1)..(25): SEQ ID NO: 6843; WAN024B3F_at; Start 934; Stop 958
tataaattccgttcaatgcgaatcg

SEQ ID NO: 71489 - DNA, 25 bp, Artificial
  probe
  misc_feature (1)..(25): SEQ ID NO: 6843; WAN024B3F_at; Start 947; Stop 971
caatgcgaatcgatgctgaagctat

SEQ ID NO: 71490 - DNA, 25 bp, Artificial
  probe
  misc_feature (1)..(25): SEQ ID NO: 6843; WAN024B3F_at; Start 1029; Stop 1053
tgatccacgcgtgacaaagattgga

SEQ ID NO: 71491 - DNA, 25 bp, Artificial
  probe
  misc_feature (1)..(25): SEQ ID NO: 2351; WAN024B3G_at; Start 1026; Stop 1050
cgatgatcctcgtatcacgaaaatt

SEQ ID NO: 71492 - DNA, 25 bp, Artificial
  probe
  misc_feature (1)..(25): SEQ ID NO: 2351; WAN024B3G_at; Start 1116; Stop 1140
tatgagtttggttggcacacggcca

SEQ ID NO: 71493 - DNA, 25 bp, Artificial
  probe
  misc_feature (1)..(25): SEQ ID NO: 2351; WAN024B3G_at; Start 1217; Stop 1241
tatggcaggttagcggccgtagtaa

SEQ ID NO: 71494 - DNA, 25 bp, Artificial
  probe
  misc_feature (1)..(25): SEQ ID NO: 2351; WAN024B3G_at; Start 1170; Stop 1194
ttcagaacagaaacgtcgactcagc

SEQ ID NO: 71495 - DNA, 25 bp, Artificial
  probe
  misc_feature (1)..(25): SEQ ID NO: 2351; WAN024B3G_at; Start 1017; Stop 1041
taaggtggacgatgatcctcgtatc

SEQ ID NO: 71496 - DNA, 25 bp, Artificial
  probe
  misc_feature (1)..(25): SEQ ID NO: 2351; WAN024B3G_at; Start 833; Stop 857
gtttagtcagtattgtattggttcc

SEQ ID NO: 71497 - DNA, 25 bp, Artificial
  probe
  misc_feature (1)..(25): SEQ ID NO: 2351; WAN024B3G_at; Start 1023; Stop 1047
ggacgatgatcctcgtatcacgaaa

SEQ ID NO: 71498 - DNA, 25 bp, Artificial
  probe
  misc_feature (1)..(25): SEQ ID NO: 2351; WAN024B3G_at; Start 1114; Stop 1138
gatatgagtttggttggcacacggc

SEQ ID NO: 71499 - DNA, 25 bp, Artificial
  probe
  misc_feature (1)..(25): SEQ ID NO: 2351; WAN024B3G_at; Start 1122; Stop 1146
tttggttggcacacggccacctaca

SEQ ID NO: 71500 - DNA, 25 bp, Artificial
  probe
  misc_feature (1)..(25): SEQ ID NO: 2351; WAN024B3G_at; Start 817; Stop 841
gggctgatactatgtggtttagtca

SEQ ID NO: 71501 - DNA, 25 bp, Artificial
  probe
  misc_feature (1)..(25): SEQ ID NO: 2351; WAN024B3G_at; Start 1119; Stop 1143
gagtttggttggcacacggccacct

SEQ ID NO: 71502 - DNA, 25 bp, Artificial
  probe
  misc_feature (1)..(25): SEQ ID NO: 2351; WAN024B3G_at; Start 1145; Stop 1169
cagtggacgagtatgttcagtatac

SEQ ID NO: 71503 - DNA, 25 bp, Artificial
  probe
  misc_feature (1)..(25): SEQ ID NO: 2351; WAN024B3G_at; Start 1127; Stop 1151
ttggcacacggccacctacagtgga

SEQ ID NO: 71504 - DNA, 25 bp, Artificial
  probe
  misc_feature (1)..(25): SEQ ID NO: 2351; WAN024B3G_at; Start 768; Stop 792
tagtcatgtaattgctaagcggatt

SEQ ID NO: 71505 - DNA, 25 bp, Artificial
  probe
  misc_feature (1)..(25): SEQ ID NO: 2351; WAN024B3G_at; Start 1244; Stop 1268
taaccgattttgacgatgttgtaaa

SEQ ID NO: 71506 - DNA, 25 bp, Artificial
  probe
  misc_feature (1)..(25): SEQ ID NO: 2351; WAN024B3G_at; Start 1165; Stop 1189
tatacttcagaacagaaacgtcgac

SEQ ID NO: 71507 - DNA, 25 bp, Artificial
  probe
  misc_feature (1)..(25): SEQ ID NO: 2351; WAN024B3G_at; Start 1013; Stop 1037
tgtttaaggtggacgatgatcctcg

SEQ ID NO: 71508 - DNA, 25 bp, Artificial
  probe
  misc_feature (1)..(25): SEQ ID NO: 2351; WAN024B3G_at; Start 774; Stop 798
tgtaattgctaagcggattattgat

SEQ ID NO: 71509 - DNA, 25 bp, Artificial
  probe
  misc_feature (1)..(25): SEQ ID NO: 2351; WAN024B3G_at; Start 948; Stop 972
tatgtgtgtagatgccgaggcgaaa

SEQ ID NO: 71510 - DNA, 25 bp, Artificial
  probe
  misc_feature (1)..(25): SEQ ID NO: 2351; WAN024B3G_at; Start 809; Stop 833
cattggtagggctgatactatgtgg

SEQ ID NO: 71511 - DNA, 25 bp, Artificial
  probe
  misc_feature (1)..(25): SEQ ID NO: 2351; WAN024B3G_at; Start 913; Stop 937
aatggtcgtcagttcactttttata

SEQ ID NO: 71512 - DNA, 25 bp, Artificial
  probe
  misc_feature (1)..(25): SEQ ID NO: 2351; WAN024B3G_at; Start 1131; Stop 1155
cacacggccacctacagtggacgag

SEQ ID NO: 71513 - DNA, 25 bp, Artificial
  probe
  misc_feature (1)..(25): SEQ ID NO: 2351; WAN024B3G_at; Start 895; Stop 919
cagacgcgtataggaaaaaatggtc

SEQ ID NO: 71514 - DNA, 25 bp, Artificial
  probe
  misc_feature (1)..(25): SEQ ID NO: 2351; WAN024B3G_at; Start 765; Stop 789
aactagtcatgtaattgctaagcgg

SEQ ID NO: 71515 - DNA, 25 bp, Artificial
  probe
  misc_feature (1)..(25): SEQ ID NO: 2351; WAN024B3G_at; Start 805; Stop 829
ggtgcattggtagggctgatactat

SEQ ID NO: 71516 - DNA, 25 bp, Artificial
  probe
  misc_feature (1)..(25): SEQ ID NO: 2351; WAN024B3G_at; Start 1153; Stop 1177
gagtatgttcagtatacttcagaac

SEQ ID NO: 71517 - DNA, 25 bp, Artificial
  probe
  misc_feature (1)..(25): SEQ ID NO: 2351; WAN024B3G_at; Start 1010; Stop 1034
gaatgtttaaggtggacgatgatcc

SEQ ID NO: 71518 - DNA, 25 bp, Artificial
  probe
  misc_feature (1)..(25): SEQ ID NO: 2351; WAN024B3G_at; Start 960; Stop 984
tgccgaggcgaaaaaaagagaactc

SEQ ID NO: 71519 - DNA, 25 bp, Artificial
  probe
  misc_feature (1)..(25): SEQ ID NO: 2351; WAN024B3G_at; Start 945; Stop 969
ctctatgtgtgtagatgccgaggcg

SEQ ID NO: 71520 - DNA, 25 bp, Artificial
  probe
  misc_feature (1)..(25): SEQ ID NO: 2351; WAN024B3G_at; Start 1221; Stop 1245
gcaggttagcggccgtagtaaaata

SEQ ID NO: 71521 - DNA, 25 bp, Artificial
  probe
  misc_feature (1)..(25): SEQ ID NO: 2351; WAN024B3G_at; Start 921; Stop 945
tcagttcactttttataagtttcgc

SEQ ID NO: 71522 - DNA, 25 bp, Artificial
  probe
  misc_feature (1)..(25): SEQ ID NO: 2351; WAN024B3G_at; Start 934; Stop 958
tataagtttcgctctatgtgtgtag

SEQ ID NO: 71523 - DNA, 25 bp, Artificial
  probe
  misc_feature (1)..(25): SEQ ID NO: 2351; WAN024B3G_at; Start 1206; Stop 1230
tattacaggtttatggcaggttagc

SEQ ID NO: 71524 - DNA, 25 bp, Artificial
  probe
  misc_feature (1)..(25): SEQ ID NO: 2351; WAN024B3G_at; Start 1240; Stop 1264
aaaataaccgattttgacgatgttg

SEQ ID NO: 71525 - DNA, 25 bp, Artificial
  probe
  misc_feature (1)..(25): SEQ ID NO: 1664; WAN024B3H_at; Start 225; Stop 249
attctttgcgctagcgattagtatt

SEQ ID NO: 71526 - DNA, 25 bp, Artificial
  probe
  misc_feature (1)..(25): SEQ ID NO: 1664; WAN024B3H_at; Start 624; Stop 648
agagcttgtctctcagtttgaaacg

SEQ ID NO: 71527 - DNA, 25 bp, Artificial
  probe
  misc_feature (1)..(25): SEQ ID NO: 1664; WAN024B3H_at; Start 108; Stop 132
aacagctattgtactttatatcctc

SEQ ID NO: 71528 - DNA, 25 bp, Artificial
  probe
  misc_feature (1)..(25): SEQ ID NO: 1664; WAN024B3H_at; Start 484; Stop 508
gccgtcagtgttttagataaaccag

SEQ ID NO: 71529 - DNA, 25 bp, Artificial
  probe
  misc_feature (1)..(25): SEQ ID NO: 1664; WAN024B3H_at; Start 100; Stop 124
gtttcaacaacagctattgtacttt

SEQ ID NO: 71530 - DNA, 25 bp, Artificial
  probe
  misc_feature (1)..(25): SEQ ID NO: 1664; WAN024B3H_at; Start 98; Stop 122
ttgtttcaacaacagctattgtact

SEQ ID NO: 71531 - DNA, 25 bp, Artificial
  probe
  misc_feature (1)..(25): SEQ ID NO: 1664; WAN024B3H_at; Start 480; Stop 504
ggtagccgtcagtgttttagataaa

SEQ ID NO: 71532 - DNA, 25 bp, Artificial
  probe
  misc_feature (1)..(25): SEQ ID NO: 1664; WAN024B3H_at; Start 615; Stop 639
caatattggagagcttgtctctcag

SEQ ID NO: 71533 - DNA, 25 bp, Artificial
  probe
  misc_feature (1)..(25): SEQ ID NO: 1664; WAN024B3H_at; Start 598; Stop 622
cttccaagtgaaaaatacaatattg

SEQ ID NO: 71534 - DNA, 25 bp, Artificial
  probe
  misc_feature (1)..(25): SEQ ID NO: 1664; WAN024B3H_at; Start 232; Stop 256
gcgctagcgattagtatttctaatt

SEQ ID NO: 71535 - DNA, 25 bp, Artificial
  probe
  misc_feature (1)..(25): SEQ ID NO: 1664; WAN024B3H_at; Start 527; Stop 551
taaaggttgtagcagagggggagat

SEQ ID NO: 71536 - DNA, 25 bp, Artificial
  probe
  misc_feature (1)..(25): SEQ ID NO: 1664; WAN024B3H_at; Start 477; Stop 501
gttggtagccgtcagtgttttagat

SEQ ID NO: 71537 - DNA, 25 bp, Artificial
  probe
  misc_feature (1)..(25): SEQ ID NO: 1664; WAN024B3H_at; Start 620; Stop 644
ttggagagcttgtctctcagtttga

SEQ ID NO: 71538 - DNA, 25 bp, Artificial
  probe
  misc_feature (1)..(25): SEQ ID NO: 1664; WAN024B3H_at; Start 229; Stop 253
tttgcgctagcgattagtatttcta

SEQ ID NO: 71539 - DNA, 25 bp, Artificial
  probe
  misc_feature (1)..(25): SEQ ID NO: 1664; WAN024B3H_at; Start 96; Stop 120
gattgtttcaacaacagctattgta

SEQ ID NO: 71540 - DNA, 25 bp, Artificial
  probe
  misc_feature (1)..(25): SEQ ID NO: 1664; WAN024B3H_at; Start 665; Stop 689
cagtcaatctaaatgctttcgattg

SEQ ID NO: 71541 - DNA, 25 bp, Artificial
  probe
  misc_feature (1)..(25): SEQ ID NO: 1664; WAN024B3H_at; Start 114; Stop 138
tattgtactttatatcctccactat

SEQ ID NO: 71542 - DNA, 25 bp, Artificial
  probe
  misc_feature (1)..(25): SEQ ID NO: 1664; WAN024B3H_at; Start 676; Stop 700
aatgctttcgattgtatcttggcac

SEQ ID NO: 71543 - DNA, 25 bp, Artificial
  probe
  misc_feature (1)..(25): SEQ ID NO: 1664; WAN024B3H_at; Start 579; Stop 603
cgatgaagtctttatcaatcttcca

SEQ ID NO: 71544 - DNA, 25 bp, Artificial
  probe
  misc_feature (1)..(25): SEQ ID NO: 1664; WAN024B3H_at; Start 674; Stop 698
taaatgctttcgattgtatcttggc

SEQ ID NO: 71545 - DNA, 25 bp, Artificial
  probe
  misc_feature (1)..(25): SEQ ID NO: 1664; WAN024B3H_at; Start 230; Stop 254
ttgcgctagcgattagtatttctaa

SEQ ID NO: 71546 - DNA, 25 bp, Artificial
  probe
  misc_feature (1)..(25): SEQ ID NO: 1664; WAN024B3H_at; Start 616; Stop 640
aatattggagagcttgtctctcagt

SEQ ID NO: 71547 - DNA, 25 bp, Artificial
  probe
  misc_feature (1)..(25): SEQ ID NO: 1664; WAN024B3H_at; Start 481; Stop 505
gtagccgtcagtgttttagataaac

SEQ ID NO: 71548 - DNA, 25 bp, Artificial
  probe
  misc_feature (1)..(25): SEQ ID NO: 1664; WAN024B3H_at; Start 476; Stop 500
agttggtagccgtcagtgttttaga

SEQ ID NO: 71549 - DNA, 25 bp, Artificial
  probe
  misc_feature (1)..(25): SEQ ID NO: 1664; WAN024B3H_at; Start 103; Stop 127
tcaacaacagctattgtactttata

SEQ ID NO: 71550 - DNA, 25 bp, Artificial
  probe
  misc_feature (1)..(25): SEQ ID NO: 1664; WAN024B3H_at; Start 118; Stop 142
gtactttatatcctccactattttg

SEQ ID NO: 71551 - DNA, 25 bp, Artificial
  probe
  misc_feature (1)..(25): SEQ ID NO: 1664; WAN024B3H_at; Start 110; Stop 134
cagctattgtactttatatcctcca

SEQ ID NO: 71552 - DNA, 25 bp, Artificial
  probe
  misc_feature (1)..(25): SEQ ID NO: 1664; WAN024B3H_at; Start 623; Stop 647
gagagcttgtctctcagtttgaaac

SEQ ID NO: 71553 - DNA, 25 bp, Artificial
  probe
  misc_feature (1)..(25): SEQ ID NO: 1664; WAN024B3H_at; Start 486; Stop 510
cgtcagtgttttagataaaccagat

SEQ ID NO: 71554 - DNA, 25 bp, Artificial
  probe
  misc_feature (1)..(25): SEQ ID NO: 1664; WAN024B3H_at; Start 594; Stop 618
caatcttccaagtgaaaaatacaat

SEQ ID NO: 71555 - DNA, 25 bp, Artificial
  probe
  misc_feature (1)..(25): SEQ ID NO: 1664; WAN024B3H_at; Start 479; Stop 503
tggtagccgtcagtgttttagataa

SEQ ID NO: 71556 - DNA, 25 bp, Artificial
  probe
  misc_feature (1)..(25): SEQ ID NO: 1664; WAN024B3H_at; Start 485; Stop 509
ccgtcagtgttttagataaaccaga

SEQ ID NO: 71557 - DNA, 25 bp, Artificial
  probe
  misc_feature (1)..(25): SEQ ID NO: 1664; WAN024B3H_at; Start 112; Stop 136
gctattgtactttatatcctccact

SEQ ID NO: 71558 - DNA, 25 bp, Artificial
  probe
  misc_feature (1)..(25): SEQ ID NO: 1664; WAN024B3H_at; Start 482; Stop 506
tagccgtcagtgttttagataaacc

SEQ ID NO: 71559 - DNA, 25 bp, Artificial
  probe
  misc_feature (1)..(25): SEQ ID NO: 2360; WAN024B3I_s_at; Start 793; Stop 817
ctcgatatttgtggtgccactattg

SEQ ID NO: 71560 - DNA, 25 bp, Artificial
  probe
  misc_feature (1)..(25): SEQ ID NO: 2360; WAN024B3I_s_at; Start 788; Stop 812
gaattctcgatatttgtggtgccac

SEQ ID NO: 71561 - DNA, 25 bp, Artificial
  probe
  misc_feature (1)..(25): SEQ ID NO: 2360; WAN024B3I_s_at; Start 791; Stop 815
ttctcgatatttgtggtgccactat

SEQ ID NO: 71562 - DNA, 25 bp, Artificial
  probe
  misc_feature (1)..(25): SEQ ID NO: 2360; WAN024B3I_s_at; Start 797; Stop 821
atatttgtggtgccactattggcct

SEQ ID NO: 71563 - DNA, 25 bp, Artificial
  probe
  misc_feature (1)..(25): SEQ ID NO: 2360; WAN024B3I_s_at; Start 789; Stop 813
aattctcgatatttgtggtgccact

SEQ ID NO: 71564 - DNA, 25 bp, Artificial
  probe
  misc_feature (1)..(25): SEQ ID NO: 2360; WAN024B3I_s_at; Start 851; Stop 875
tagttccattgattcgtaaagatgg

SEQ ID NO: 71565 - DNA, 25 bp, Artificial
  probe
  misc_feature (1)..(25): SEQ ID NO: 2360; WAN024B3I_s_at; Start 841; Stop 865
agtctagttttagttccattgattc

SEQ ID NO: 71566 - DNA, 25 bp, Artificial
  probe
  misc_feature (1)..(25): SEQ ID NO: 2360; WAN024B3I_s_at; Start 796; Stop 820
gatatttgtggtgccactattggcc

SEQ ID NO: 71567 - DNA, 25 bp, Artificial
  probe
  misc_feature (1)..(25): SEQ ID NO: 2360; WAN024B3I_s_at; Start 798; Stop 822
tatttgtggtgccactattggcctt

SEQ ID NO: 71568 - DNA, 25 bp, Artificial
  probe
  misc_feature (1)..(25): SEQ ID NO: 2360; WAN024B3I_s_at; Start 840; Stop 864
tagtctagttttagttccattgatt

SEQ ID NO: 71569 - DNA, 25 bp, Artificial
  probe
  misc_feature (1)..(25): SEQ ID NO: 2360; WAN024B3I_s_at; Start 852; Stop 876
agttccattgattcgtaaagatggc

SEQ ID NO: 71570 - DNA, 25 bp, Artificial
  probe
  misc_feature (1)..(25): SEQ ID NO: 2360; WAN024B3I_s_at; Start 845; Stop 869
tagttttagttccattgattcgtaa

SEQ ID NO: 71571 - DNA, 25 bp, Artificial
  probe
  misc_feature (1)..(25): SEQ ID NO: 2360; WAN024B3I_s_at; Start 848; Stop 872
ttttagttccattgattcgtaaaga

SEQ ID NO: 71572 - DNA, 25 bp, Artificial
  probe
  misc_feature (1)..(25): SEQ ID NO: 2360; WAN024B3I_s_at; Start 786; Stop 810
gagaattctcgatatttgtggtgcc

SEQ ID NO: 71573 - DNA, 25 bp, Artificial
  probe
  misc_feature (1)..(25): SEQ ID NO: 2360; WAN024B3I_s_at; Start 787; Stop 811
agaattctcgatatttgtggtgcca

SEQ ID NO: 71574 - DNA, 25 bp, Artificial
  probe
  misc_feature (1)..(25): SEQ ID NO: 2360; WAN024B3I_s_at; Start 794; Stop 818
tcgatatttgtggtgccactattgg

SEQ ID NO: 71575 - DNA, 25 bp, Artificial
  probe
  misc_feature (1)..(25): SEQ ID NO: 2360; WAN024B3I_s_at; Start 790; Stop 814
attctcgatatttgtggtgccacta

SEQ ID NO: 71576 - DNA, 25 bp, Artificial
  probe
  misc_feature (1)..(25): SEQ ID NO: 2360; WAN024B3I_s_at; Start 850; Stop 874
ttagttccattgattcgtaaagatg

SEQ ID NO: 71577 - DNA, 25 bp, Artificial
  probe
  misc_feature (1)..(25): SEQ ID NO: 2360; WAN024B3I_s_at; Start 785; Stop 809
agagaattctcgatatttgtggtgc

SEQ ID NO: 71578 - DNA, 25 bp, Artificial
  probe
  misc_feature (1)..(25): SEQ ID NO: 2360; WAN024B3I_s_at; Start 842; Stop 866
gtctagttttagttccattgattcg

SEQ ID NO: 71579 - DNA, 25 bp, Artificial
  probe
  misc_feature (1)..(25): SEQ ID NO: 2360; WAN024B3I_s_at; Start 853; Stop 877
gttccattgattcgtaaagatggcg

SEQ ID NO: 71580 - DNA, 25 bp, Artificial
  probe
  misc_feature (1)..(25): SEQ ID NO: 2360; WAN024B3I_s_at; Start 795; Stop 819
cgatatttgtggtgccactattggc

SEQ ID NO: 71581 - DNA, 25 bp, Artificial
  probe
  misc_feature (1)..(25): SEQ ID NO: 2360; WAN024B3I_s_at; Start 784; Stop 808
aagagaattctcgatatttgtggtg

SEQ ID NO: 71582 - DNA, 25 bp, Artificial
  probe
  misc_feature (1)..(25): SEQ ID NO: 2360; WAN024B3I_s_at; Start 843; Stop 867
tctagttttagttccattgattcgt

SEQ ID NO: 71583 - DNA, 25 bp, Artificial
  probe
  misc_feature (1)..(25): SEQ ID NO: 2360; WAN024B3I_s_at; Start 783; Stop 807
aaagagaattctcgatatttgtggt

SEQ ID NO: 71584 - DNA, 25 bp, Artificial
  probe
  misc_feature (1)..(25): SEQ ID NO: 2360; WAN024B3I_s_at; Start 849; Stop 873
tttagttccattgattcgtaaagat

SEQ ID NO: 71585 - DNA, 25 bp, Artificial
  probe
  misc_feature (1)..(25): SEQ ID NO: 2360; WAN024B3I_s_at; Start 844; Stop 868
ctagttttagttccattgattcgta

SEQ ID NO: 71586 - DNA, 25 bp, Artificial
  probe
  misc_feature (1)..(25): SEQ ID NO: 2360; WAN024B3I_s_at; Start 792; Stop 816
tctcgatatttgtggtgccactatt

SEQ ID NO: 71587 - DNA, 25 bp, Artificial
  probe
  misc_feature (1)..(25): SEQ ID NO: 1292; WAN024B3J_at; Start 437; Stop 461
tactggatagattaatagaatcaaa

SEQ ID NO: 71588 - DNA, 25 bp, Artificial
  probe
  misc_feature (1)..(25): SEQ ID NO: 1292; WAN024B3J_at; Start 441; Stop 465
ggatagattaatagaatcaaatgag

SEQ ID NO: 71589 - DNA, 25 bp, Artificial
  probe
  misc_feature (1)..(25): SEQ ID NO: 1292; WAN024B3J_at; Start 439; Stop 463
ctggatagattaatagaatcaaatg

SEQ ID NO: 71590 - DNA, 25 bp, Artificial
  probe
  misc_feature (1)..(25): SEQ ID NO: 1292; WAN024B3J_at; Start 54; Stop 78
tattttattgacttatctacttagt

SEQ ID NO: 71591 - DNA, 25 bp, Artificial
  probe
  misc_feature (1)..(25): SEQ ID NO: 1292; WAN024B3J_at; Start 53; Stop 77
ttattttattgacttatctacttag

SEQ ID NO: 71592 - DNA, 25 bp, Artificial
  probe
  misc_feature (1)..(25): SEQ ID NO: 1292; WAN024B3J_at; Start 438; Stop 462
actggatagattaatagaatcaaat

SEQ ID NO: 71593 - DNA, 25 bp, Artificial
  probe
  misc_feature (1)..(25): SEQ ID NO: 1292; WAN024B3J_at; Start 436; Stop 460
gtactggatagattaatagaatcaa

SEQ ID NO: 71594 - DNA, 25 bp, Artificial
  probe
  misc_feature (1)..(25): SEQ ID NO: 7; WAN024B3K_x_at; Start 59; Stop 83
cagctaaatatcataaacgccttca

SEQ ID NO: 71595 - DNA, 25 bp, Artificial
  probe
  misc_feature (1)..(25): SEQ ID NO: 7; WAN024B3K_x_at; Start 5; Stop 29
aatcaactaaagaagaaatccaagc

SEQ ID NO: 71596 - DNA, 25 bp, Artificial
  probe
  misc_feature (1)..(25): SEQ ID NO: 7; WAN024B3K_x_at; Start 57; Stop 81
tacagctaaatatcataaacgcctt

SEQ ID NO: 71597 - DNA, 25 bp, Artificial
  probe
  misc_feature (1)..(25): SEQ ID NO: 7; WAN024B3K_x_at; Start 53; Stop 77
ctcgtacagctaaatatcataaacg

SEQ ID NO: 71598 - DNA, 25 bp, Artificial
  probe
  misc_feature (1)..(25): SEQ ID NO: 7; WAN024B3K_x_at; Start 56; Stop 80
gtacagctaaatatcataaacgcct

SEQ ID NO: 71599 - DNA, 25 bp, Artificial
  probe
  misc_feature (1)..(25): SEQ ID NO: 7; WAN024B3K_x_at; Start 23; Stop 47
tccaagccatcaaaacacttttaaa

SEQ ID NO: 71600 - DNA, 25 bp, Artificial
  probe
  misc_feature (1)..(25): SEQ ID NO: 7; WAN024B3K_x_at; Start 15; Stop 39
agaagaaatccaagccatcaaaaca

SEQ ID NO: 71601 - DNA, 25 bp, Artificial
  probe
  misc_feature (1)..(25): SEQ ID NO: 7; WAN024B3K_x_at; Start 14; Stop 38
aagaagaaatccaagccatcaaaac

SEQ ID NO: 71602 - DNA, 25 bp, Artificial
  probe
  misc_feature (1)..(25): SEQ ID NO: 7; WAN024B3K_x_at; Start 9; Stop 33
aactaaagaagaaatccaagccatc

SEQ ID NO: 71603 - DNA, 25 bp, Artificial
  probe
  misc_feature (1)..(25): SEQ ID NO: 7; WAN024B3K_x_at; Start 40; Stop 64
cttttaaaagactctcgtacagcta

SEQ ID NO: 71604 - DNA, 25 bp, Artificial
  probe
  misc_feature (1)..(25): SEQ ID NO: 7; WAN024B3K_x_at; Start 61; Stop 85
gctaaatatcataaacgccttcaaa

SEQ ID NO: 71605 - DNA, 25 bp, Artificial
  probe
  misc_feature (1)..(25): SEQ ID NO: 7; WAN024B3K_x_at; Start 46; Stop 70
aaagactctcgtacagctaaatatc

SEQ ID NO: 71606 - DNA, 25 bp, Artificial
  probe
  misc_feature (1)..(25): SEQ ID NO: 7; WAN024B3K_x_at; Start 8; Stop 32
caactaaagaagaaatccaagccat

SEQ ID NO: 71607 - DNA, 25 bp, Artificial
  probe
  misc_feature (1)..(25): SEQ ID NO: 7; WAN024B3K_x_at; Start 63; Stop 87
taaatatcataaacgccttcaaatc

SEQ ID NO: 71608 - DNA, 25 bp, Artificial
  probe
  misc_feature (1)..(25): SEQ ID NO: 7; WAN024B3K_x_at; Start 7; Stop 31
tcaactaaagaagaaatccaagcca

SEQ ID NO: 71609 - DNA, 25 bp, Artificial
  probe
  misc_feature (1)..(25): SEQ ID NO: 7; WAN024B3K_x_at; Start 55; Stop 79
cgtacagctaaatatcataaacgcc

SEQ ID NO: 71610 - DNA, 25 bp, Artificial
  probe
  misc_feature (1)..(25): SEQ ID NO: 7; WAN024B3K_x_at; Start 49; Stop 73
gactctcgtacagctaaatatcata

SEQ ID NO: 71611 - DNA, 25 bp, Artificial
  probe
  misc_feature (1)..(25): SEQ ID NO: 7; WAN024B3K_x_at; Start 4; Stop 28
aaatcaactaaagaagaaatccaag

SEQ ID NO: 71612 - DNA, 25 bp, Artificial
  probe
  misc_feature (1)..(25): SEQ ID NO: 7; WAN024B3K_x_at; Start 13; Stop 37
aaagaagaaatccaagccatcaaaa

SEQ ID NO: 71613 - DNA, 25 bp, Artificial
  probe
  misc_feature (1)..(25): SEQ ID NO: 7; WAN024B3K_x_at; Start 25; Stop 49
caagccatcaaaacacttttaaaag

SEQ ID NO: 71614 - DNA, 25 bp, Artificial
  probe
  misc_feature (1)..(25): SEQ ID NO: 7; WAN024B3K_x_at; Start 38; Stop 62
cacttttaaaagactctcgtacagc

SEQ ID NO: 71615 - DNA, 25 bp, Artificial
  probe
  misc_feature (1)..(25): SEQ ID NO: 7; WAN024B3K_x_at; Start 6; Stop 30
atcaactaaagaagaaatccaagcc

SEQ ID NO: 71616 - DNA, 25 bp, Artificial
  probe
  misc_feature (1)..(25): SEQ ID NO: 7; WAN024B3K_x_at; Start 64; Stop 88
aaatatcataaacgccttcaaatcg

SEQ ID NO: 71617 - DNA, 25 bp, Artificial
  probe
  misc_feature (1)..(25): SEQ ID NO: 7; WAN024B3K_x_at; Start 19; Stop 43
gaaatccaagccatcaaaacacttt

SEQ ID NO: 71618 - DNA, 25 bp, Artificial
  probe
  misc_feature (1)..(25): SEQ ID NO: 7; WAN024B3K_x_at; Start 20; Stop 44
aaatccaagccatcaaaacactttt

SEQ ID NO: 71619 - DNA, 25 bp, Artificial
  probe
  misc_feature (1)..(25): SEQ ID NO: 7; WAN024B3K_x_at; Start 16; Stop 40
gaagaaatccaagccatcaaaacac

SEQ ID NO: 71620 - DNA, 25 bp, Artificial
  probe
  misc_feature (1)..(25): SEQ ID NO: 7; WAN024B3K_x_at; Start 54; Stop 78
tcgtacagctaaatatcataaacgc

SEQ ID NO: 71621 - DNA, 25 bp, Artificial
  probe
  misc_feature (1)..(25): SEQ ID NO: 7; WAN024B3K_x_at; Start 21; Stop 45
aatccaagccatcaaaacactttta

SEQ ID NO: 71622 - DNA, 25 bp, Artificial
  probe
  misc_feature (1)..(25): SEQ ID NO: 7; WAN024B3K_x_at; Start 12; Stop 36
taaagaagaaatccaagccatcaaa

SEQ ID NO: 71623 - DNA, 25 bp, Artificial
  probe
  misc_feature (1)..(25): SEQ ID NO: 7; WAN024B3K_x_at; Start 47; Stop 71
aagactctcgtacagctaaatatca

SEQ ID NO: 71624 - DNA, 25 bp, Artificial
  probe
  misc_feature (1)..(25): SEQ ID NO: 7; WAN024B3K_x_at; Start 18; Stop 42
agaaatccaagccatcaaaacactt

SEQ ID NO: 71625 - DNA, 25 bp, Artificial
  probe
  misc_feature (1)..(25): SEQ ID NO: 7; WAN024B3K_x_at; Start 69; Stop 93
tcataaacgccttcaaatcgttcta

SEQ ID NO: 71626 - DNA, 25 bp, Artificial
  probe
  misc_feature (1)..(25): SEQ ID NO: 7; WAN024B3K_x_at; Start 10; Stop 34
actaaagaagaaatccaagccatca

SEQ ID NO: 71627 - DNA, 25 bp, Artificial
  probe
  misc_feature (1)..(25): SEQ ID NO: 7; WAN024B3K_x_at; Start 11; Stop 35
ctaaagaagaaatccaagccatcaa

SEQ ID NO: 71628 - DNA, 25 bp, Artificial
  probe
  misc_feature (1)..(25): SEQ ID NO: 6406; WAN024B3X_x_at; Start 30; Stop 54
catcaaaacacttttaaaagactct

SEQ ID NO: 71629 - DNA, 25 bp, Artificial
  probe
  misc_feature (1)..(25): SEQ ID NO: 6406; WAN024B3X_x_at; Start 57; Stop 81
tacagctaaatatcataaacacctt

SEQ ID NO: 71630 - DNA, 25 bp, Artificial
  probe
  misc_feature (1)..(25): SEQ ID NO: 6406; WAN024B3X_x_at; Start 56; Stop 80
gtacagctaaatatcataaacacct

SEQ ID NO: 71631 - DNA, 25 bp, Artificial
  probe
  misc_feature (1)..(25): SEQ ID NO: 6406; WAN024B3X_x_at; Start 53; Stop 77
ctcgtacagctaaatatcataaaca

SEQ ID NO: 71632 - DNA, 25 bp, Artificial
  probe
  misc_feature (1)..(25): SEQ ID NO: 6406; WAN024B3X_x_at; Start 58; Stop 82
acagctaaatatcataaacaccttc

SEQ ID NO: 71633 - DNA, 25 bp, Artificial
  probe
  misc_feature (1)..(25): SEQ ID NO: 6406; WAN024B3X_x_at; Start 17; Stop 41
aagaaatccaaaccatcaaaacact

SEQ ID NO: 71634 - DNA, 25 bp, Artificial
  probe
  misc_feature (1)..(25): SEQ ID NO: 6406; WAN024B3X_x_at; Start 15; Stop 39
agaagaaatccaaaccatcaaaaca

SEQ ID NO: 71635 - DNA, 25 bp, Artificial
  probe
  misc_feature (1)..(25): SEQ ID NO: 6406; WAN024B3X_x_at; Start 68; Stop 92
atcataaacaccttcaaatcgttct

SEQ ID NO: 71636 - DNA, 25 bp, Artificial
  probe
  misc_feature (1)..(25): SEQ ID NO: 6406; WAN024B3X_x_at; Start 40; Stop 64
cttttaaaagactctcgtacagcta

SEQ ID NO: 71637 - DNA, 25 bp, Artificial
  probe
  misc_feature (1)..(25): SEQ ID NO: 6406; WAN024B3X_x_at; Start 61; Stop 85
gctaaatatcataaacaccttcaaa

SEQ ID NO: 71638 - DNA, 25 bp, Artificial
  probe
  misc_feature (1)..(25): SEQ ID NO: 6406; WAN024B3X_x_at; Start 66; Stop 90
atatcataaacaccttcaaatcgtt

SEQ ID NO: 71639 - DNA, 25 bp, Artificial
  probe
  misc_feature (1)..(25): SEQ ID NO: 6406; WAN024B3X_x_at; Start 8; Stop 32
caactaaagaagaaatccaaaccat

SEQ ID NO: 71640 - DNA, 25 bp, Artificial
  probe
  misc_feature (1)..(25): SEQ ID NO: 6406; WAN024B3X_x_at; Start 63; Stop 87
taaatatcataaacaccttcaaatc

SEQ ID NO: 71641 - DNA, 25 bp, Artificial
  probe
  misc_feature (1)..(25): SEQ ID NO: 6406; WAN024B3X_x_at; Start 7; Stop 31
tcaactaaagaagaaatccaaacca

SEQ ID NO: 71642 - DNA, 25 bp, Artificial
  probe
  misc_feature (1)..(25): SEQ ID NO: 6406; WAN024B3X_x_at; Start 37; Stop 61
acacttttaaaagactctcgtacag

SEQ ID NO: 71643 - DNA, 25 bp, Artificial
  probe
  misc_feature (1)..(25): SEQ ID NO: 6406; WAN024B3X_x_at; Start 55; Stop 79
cgtacagctaaatatcataaacacc

SEQ ID NO: 71644 - DNA, 25 bp, Artificial
  probe
  misc_feature (1)..(25): SEQ ID NO: 6406; WAN024B3X_x_at; Start 59; Stop 83
cagctaaatatcataaacaccttca

SEQ ID NO: 71645 - DNA, 25 bp, Artificial
  probe
  misc_feature (1)..(25): SEQ ID NO: 6406; WAN024B3X_x_at; Start 38; Stop 62
cacttttaaaagactctcgtacagc

SEQ ID NO: 71646 - DNA, 25 bp, Artificial
  probe
  misc_feature (1)..(25): SEQ ID NO: 6406; WAN024B3X_x_at; Start 64; Stop 88
aaatatcataaacaccttcaaatcg

SEQ ID NO: 71647 - DNA, 25 bp, Artificial
  probe
  misc_feature (1)..(25): SEQ ID NO: 6406; WAN024B3X_x_at; Start 3; Stop 27
gaaatcaactaaagaagaaatccaa

SEQ ID NO: 71648 - DNA, 25 bp, Artificial
  probe
  misc_feature (1)..(25): SEQ ID NO: 6406; WAN024B3X_x_at; Start 39; Stop 63
acttttaaaagactctcgtacagct

SEQ ID NO: 71649 - DNA, 25 bp, Artificial
  probe
  misc_feature (1)..(25): SEQ ID NO: 6406; WAN024B3X_x_at; Start 2; Stop 26
tgaaatcaactaaagaagaaatcca

SEQ ID NO: 71650 - DNA, 25 bp, Artificial
  probe
  misc_feature (1)..(25): SEQ ID NO: 6406; WAN024B3X_x_at; Start 67; Stop 91
tatcataaacaccttcaaatcgttc

SEQ ID NO: 71651 - DNA, 25 bp, Artificial
  probe
  misc_feature (1)..(25): SEQ ID NO: 6406; WAN024B3X_x_at; Start 62; Stop 86
ctaaatatcataaacaccttcaaat

SEQ ID NO: 71652 - DNA, 25 bp, Artificial
  probe
  misc_feature (1)..(25): SEQ ID NO: 6406; WAN024B3X_x_at; Start 16; Stop 40
gaagaaatccaaaccatcaaaacac

SEQ ID NO: 71653 - DNA, 25 bp, Artificial
  probe
  misc_feature (1)..(25): SEQ ID NO: 6406; WAN024B3X_x_at; Start 54; Stop 78
tcgtacagctaaatatcataaacac

SEQ ID NO: 71654 - DNA, 25 bp, Artificial
  probe
  misc_feature (1)..(25): SEQ ID NO: 6406; WAN024B3X_x_at; Start 65; Stop 89
aatatcataaacaccttcaaatcgt

SEQ ID NO: 71655 - DNA, 25 bp, Artificial
  probe
  misc_feature (1)..(25): SEQ ID NO: 6406; WAN024B3X_x_at; Start 12; Stop 36
taaagaagaaatccaaaccatcaaa

SEQ ID NO: 71656 - DNA, 25 bp, Artificial
  probe
  misc_feature (1)..(25): SEQ ID NO: 6406; WAN024B3X_x_at; Start 18; Stop 42
agaaatccaaaccatcaaaacactt

SEQ ID NO: 71657 - DNA, 25 bp, Artificial
  probe
  misc_feature (1)..(25): SEQ ID NO: 6406; WAN024B3X_x_at; Start 69; Stop 93
tcataaacaccttcaaatcgttcta

SEQ ID NO: 71658 - DNA, 25 bp, Artificial
  probe
  misc_feature (1)..(25): SEQ ID NO: 6406; WAN024B3X_x_at; Start 10; Stop 34
actaaagaagaaatccaaaccatca

SEQ ID NO: 71659 - DNA, 25 bp, Artificial
  probe
  misc_feature (1)..(25): SEQ ID NO: 6406; WAN024B3X_x_at; Start 1; Stop 25
atgaaatcaactaaagaagaaatcc

SEQ ID NO: 71660 - DNA, 25 bp, Artificial
  probe
  misc_feature (1)..(25): SEQ ID NO: 6406; WAN024B3X_x_at; Start 60; Stop 84
agctaaatatcataaacaccttcaa

SEQ ID NO: 71661 - DNA, 25 bp, Artificial
  probe
  misc_feature (1)..(25): SEQ ID NO: 6406; WAN024B3X_x_at; Start 11; Stop 35
ctaaagaagaaatccaaaccatcaa

SEQ ID NO: 71662 - DNA, 25 bp, Artificial
  probe
  misc_feature (1)..(25): SEQ ID NO: 6; WAN024B3Z_x_at; Start 42; Stop 66
ttttaaagactctcgtacagctaaa

SEQ ID NO: 71663 - DNA, 25 bp, Artificial
  probe
  misc_feature (1)..(25): SEQ ID NO: 6; WAN024B3Z_x_at; Start 51; Stop 75
ctctcgtacagctaaatatcataaa

SEQ ID NO: 71664 - DNA, 25 bp, Artificial
  probe
  misc_feature (1)..(25): SEQ ID NO: 6; WAN024B3Z_x_at; Start 57; Stop 81
tacagctaaatatcataaacgcctt

SEQ ID NO: 71665 - DNA, 25 bp, Artificial
  probe
  misc_feature (1)..(25): SEQ ID NO: 6; WAN024B3Z_x_at; Start 30; Stop 54
catcaaaacactttttaaagactct

SEQ ID NO: 71666 - DNA, 25 bp, Artificial
  probe
  misc_feature (1)..(25): SEQ ID NO: 6; WAN024B3Z_x_at; Start 56; Stop 80
gtacagctaaatatcataaacgcct

SEQ ID NO: 71667 - DNA, 25 bp, Artificial
  probe
  misc_feature (1)..(25): SEQ ID NO: 6; WAN024B3Z_x_at; Start 53; Stop 77
ctcgtacagctaaatatcataaacg

SEQ ID NO: 71668 - DNA, 25 bp, Artificial
  probe
  misc_feature (1)..(25): SEQ ID NO: 6; WAN024B3Z_x_at; Start 58; Stop 82
acagctaaatatcataaacgccttc

SEQ ID NO: 71669 - DNA, 25 bp, Artificial
  probe
  misc_feature (1)..(25): SEQ ID NO: 6; WAN024B3Z_x_at; Start 15; Stop 39
agaagaaatccaaaccatcaaaaca

SEQ ID NO: 71670 - DNA, 25 bp, Artificial
  probe
  misc_feature (1)..(25): SEQ ID NO: 6; WAN024B3Z_x_at; Start 43; Stop 67
tttaaagactctcgtacagctaaat

SEQ ID NO: 71671 - DNA, 25 bp, Artificial
  probe
  misc_feature (1)..(25): SEQ ID NO: 6; WAN024B3Z_x_at; Start 44; Stop 68
ttaaagactctcgtacagctaaata

SEQ ID NO: 71672 - DNA, 25 bp, Artificial
  probe
  misc_feature (1)..(25): SEQ ID NO: 6; WAN024B3Z_x_at; Start 40; Stop 64
ctttttaaagactctcgtacagcta

SEQ ID NO: 71673 - DNA, 25 bp, Artificial
  probe
  misc_feature (1)..(25): SEQ ID NO: 6; WAN024B3Z_x_at; Start 61; Stop 85
gctaaatatcataaacgccttcaaa

SEQ ID NO: 71674 - DNA, 25 bp, Artificial
  probe
  misc_feature (1)..(25): SEQ ID NO: 6; WAN024B3Z_x_at; Start 46; Stop 70
aaagactctcgtacagctaaatatc

SEQ ID NO: 71675 - DNA, 25 bp, Artificial
  probe
  misc_feature (1)..(25): SEQ ID NO: 6; WAN024B3Z_x_at; Start 8; Stop 32
caactaaagaagaaatccaaaccat

SEQ ID NO: 71676 - DNA, 25 bp, Artificial
  probe
  misc_feature (1)..(25): SEQ ID NO: 6; WAN024B3Z_x_at; Start 63; Stop 87
taaatatcataaacgccttcaaatc

SEQ ID NO: 71677 - DNA, 25 bp, Artificial
  probe
  misc_feature (1)..(25): SEQ ID NO: 6; WAN024B3Z_x_at; Start 7; Stop 31
tcaactaaagaagaaatccaaacca

SEQ ID NO: 71678 - DNA, 25 bp, Artificial
  probe
  misc_feature (1)..(25): SEQ ID NO: 6; WAN024B3Z_x_at; Start 37; Stop 61
acactttttaaagactctcgtacag

SEQ ID NO: 71679 - DNA, 25 bp, Artificial
  probe
  misc_feature (1)..(25): SEQ ID NO: 6; WAN024B3Z_x_at; Start 55; Stop 79
cgtacagctaaatatcataaacgcc

SEQ ID NO: 71680 - DNA, 25 bp, Artificial
  probe
  misc_feature (1)..(25): SEQ ID NO: 6; WAN024B3Z_x_at; Start 49; Stop 73
gactctcgtacagctaaatatcata

SEQ ID NO: 71681 - DNA, 25 bp, Artificial
  probe
  misc_feature (1)..(25): SEQ ID NO: 6; WAN024B3Z_x_at; Start 38; Stop 62
cactttttaaagactctcgtacagc

SEQ ID NO: 71682 - DNA, 25 bp, Artificial
  probe
  misc_feature (1)..(25): SEQ ID NO: 6; WAN024B3Z_x_at; Start 64; Stop 88
aaatatcataaacgccttcaaatcg

SEQ ID NO: 71683 - DNA, 25 bp, Artificial
  probe
  misc_feature (1)..(25): SEQ ID NO: 6; WAN024B3Z_x_at; Start 50; Stop 74
actctcgtacagctaaatatcataa

SEQ ID NO: 71684 - DNA, 25 bp, Artificial
  probe
  misc_feature (1)..(25): SEQ ID NO: 6; WAN024B3Z_x_at; Start 39; Stop 63
actttttaaagactctcgtacagct

SEQ ID NO: 71685 - DNA, 25 bp, Artificial
  probe
  misc_feature (1)..(25): SEQ ID NO: 6; WAN024B3Z_x_at; Start 59; Stop 83
cagctaaatatcataaacgccttca

SEQ ID NO: 71686 - DNA, 25 bp, Artificial
  probe
  misc_feature (1)..(25): SEQ ID NO: 6; WAN024B3Z_x_at; Start 45; Stop 69
taaagactctcgtacagctaaatat

SEQ ID NO: 71687 - DNA, 25 bp, Artificial
  probe
  misc_feature (1)..(25): SEQ ID NO: 6; WAN024B3Z_x_at; Start 67; Stop 91
tatcataaacgccttcaaatcgttc

SEQ ID NO: 71688 - DNA, 25 bp, Artificial
  probe
  misc_feature (1)..(25): SEQ ID NO: 6; WAN024B3Z_x_at; Start 62; Stop 86
ctaaatatcataaacgccttcaaat

SEQ ID NO: 71689 - DNA, 25 bp, Artificial
  probe
  misc_feature (1)..(25): SEQ ID NO: 6; WAN024B3Z_x_at; Start 54; Stop 78
tcgtacagctaaatatcataaacgc

SEQ ID NO: 71690 - DNA, 25 bp, Artificial
  probe
  misc_feature (1)..(25): SEQ ID NO: 6; WAN024B3Z_x_at; Start 41; Stop 65
tttttaaagactctcgtacagctaa

SEQ ID NO: 71691 - DNA, 25 bp, Artificial
  probe
  misc_feature (1)..(25): SEQ ID NO: 6; WAN024B3Z_x_at; Start 47; Stop 71
aagactctcgtacagctaaatatca

SEQ ID NO: 71692 - DNA, 25 bp, Artificial
  probe
  misc_feature (1)..(25): SEQ ID NO: 6; WAN024B3Z_x_at; Start 69; Stop 93
tcataaacgccttcaaatcgttcta

SEQ ID NO: 71693 - DNA, 25 bp, Artificial
  probe
  misc_feature (1)..(25): SEQ ID NO: 6; WAN024B3Z_x_at; Start 10; Stop 34
actaaagaagaaatccaaaccatca

SEQ ID NO: 71694 - DNA, 25 bp, Artificial
  probe
  misc_feature (1)..(25): SEQ ID NO: 6; WAN024B3Z_x_at; Start 11; Stop 35
ctaaagaagaaatccaaaccatcaa

SEQ ID NO: 71695 - DNA, 25 bp, Artificial
  probe
  misc_feature (1)..(25): SEQ ID NO: 6; WAN024B3Z_x_at; Start 60; Stop 84
agctaaatatcataaacgccttcaa

SEQ ID NO: 71696 - DNA, 25 bp, Artificial
  probe
  misc_feature (1)..(25): SEQ ID NO: 5; WAN024B49_x_at; Start 51; Stop 75
ctctcgtacagctaaatattataaa

SEQ ID NO: 71697 - DNA, 25 bp, Artificial
  probe
  misc_feature (1)..(25): SEQ ID NO: 5; WAN024B49_x_at; Start 61; Stop 85
gctaaatattataaacgccttcaaa

SEQ ID NO: 71698 - DNA, 25 bp, Artificial
  probe
  misc_feature (1)..(25): SEQ ID NO: 5; WAN024B49_x_at; Start 30; Stop 54
catcaaaacacttttaaaagactct

SEQ ID NO: 71699 - DNA, 25 bp, Artificial
  probe
  misc_feature (1)..(25): SEQ ID NO: 5; WAN024B49_x_at; Start 57; Stop 81
tacagctaaatattataaacgcctt

SEQ ID NO: 71700 - DNA, 25 bp, Artificial
  probe
  misc_feature (1)..(25): SEQ ID NO: 5; WAN024B49_x_at; Start 56; Stop 80
gtacagctaaatattataaacgcct

SEQ ID NO: 71701 - DNA, 25 bp, Artificial
  probe
  misc_feature (1)..(25): SEQ ID NO: 5; WAN024B49_x_at; Start 53; Stop 77
ctcgtacagctaaatattataaacg

SEQ ID NO: 71702 - DNA, 25 bp, Artificial
  probe
  misc_feature (1)..(25): SEQ ID NO: 5; WAN024B49_x_at; Start 58; Stop 82
acagctaaatattataaacgccttc

SEQ ID NO: 71703 - DNA, 25 bp, Artificial
  probe
  misc_feature (1)..(25): SEQ ID NO: 5; WAN024B49_x_at; Start 17; Stop 41
aagaaatccaaaccatcaaaacact

SEQ ID NO: 71704 - DNA, 25 bp, Artificial
  probe
  misc_feature (1)..(25): SEQ ID NO: 5; WAN024B49_x_at; Start 15; Stop 39
agaagaaatccaaaccatcaaaaca

SEQ ID NO: 71705 - DNA, 25 bp, Artificial
  probe
  misc_feature (1)..(25): SEQ ID NO: 5; WAN024B49_x_at; Start 46; Stop 70
aaagactctcgtacagctaaatatt

SEQ ID NO: 71706 - DNA, 25 bp, Artificial
  probe
  misc_feature (1)..(25): SEQ ID NO: 5; WAN024B49_x_at; Start 8; Stop 32
caactaaagaagaaatccaaaccat

SEQ ID NO: 71707 - DNA, 25 bp, Artificial
  probe
  misc_feature (1)..(25): SEQ ID NO: 5; WAN024B49_x_at; Start 7; Stop 31
tcaactaaagaagaaatccaaacca

SEQ ID NO: 71708 - DNA, 25 bp, Artificial
  probe
  misc_feature (1)..(25): SEQ ID NO: 5; WAN024B49_x_at; Start 55; Stop 79
cgtacagctaaatattataaacgcc

SEQ ID NO: 71709 - DNA, 25 bp, Artificial
  probe
  misc_feature (1)..(25): SEQ ID NO: 5; WAN024B49_x_at; Start 49; Stop 73
gactctcgtacagctaaatattata

SEQ ID NO: 71710 - DNA, 25 bp, Artificial
  probe
  misc_feature (1)..(25): SEQ ID NO: 5; WAN024B49_x_at; Start 67; Stop 91
tattataaacgccttcaaatcgttc

SEQ ID NO: 71711 - DNA, 25 bp, Artificial
  probe
  misc_feature (1)..(25): SEQ ID NO: 5; WAN024B49_x_at; Start 64; Stop 88
aaatattataaacgccttcaaatcg

SEQ ID NO: 71712 - DNA, 25 bp, Artificial
  probe
  misc_feature (1)..(25): SEQ ID NO: 5; WAN024B49_x_at; Start 63; Stop 87
taaatattataaacgccttcaaatc

SEQ ID NO: 71713 - DNA, 25 bp, Artificial
  probe
  misc_feature (1)..(25): SEQ ID NO: 5; WAN024B49_x_at; Start 48; Stop 72
agactctcgtacagctaaatattat

SEQ ID NO: 71714 - DNA, 25 bp, Artificial
  probe
  misc_feature (1)..(25): SEQ ID NO: 5; WAN024B49_x_at; Start 52; Stop 76
tctcgtacagctaaatattataaac

SEQ ID NO: 71715 - DNA, 25 bp, Artificial
  probe
  misc_feature (1)..(25): SEQ ID NO: 5; WAN024B49_x_at; Start 65; Stop 89
aatattataaacgccttcaaatcgt

SEQ ID NO: 71716 - DNA, 25 bp, Artificial
  probe
  misc_feature (1)..(25): SEQ ID NO: 5; WAN024B49_x_at; Start 50; Stop 74
actctcgtacagctaaatattataa

SEQ ID NO: 71717 - DNA, 25 bp, Artificial
  probe
  misc_feature (1)..(25): SEQ ID NO: 5; WAN024B49_x_at; Start 68; Stop 92
attataaacgccttcaaatcgttct

SEQ ID NO: 71718 - DNA, 25 bp, Artificial
  probe
  misc_feature (1)..(25): SEQ ID NO: 5; WAN024B49_x_at; Start 2; Stop 26
tgaaatcaactaaagaagaaatcca

SEQ ID NO: 71719 - DNA, 25 bp, Artificial
  probe
  misc_feature (1)..(25): SEQ ID NO: 5; WAN024B49_x_at; Start 16; Stop 40
gaagaaatccaaaccatcaaaacac

SEQ ID NO: 71720 - DNA, 25 bp, Artificial
  probe
  misc_feature (1)..(25): SEQ ID NO: 5; WAN024B49_x_at; Start 54; Stop 78
tcgtacagctaaatattataaacgc

SEQ ID NO: 71721 - DNA, 25 bp, Artificial
  probe
  misc_feature (1)..(25): SEQ ID NO: 5; WAN024B49_x_at; Start 62; Stop 86
ctaaatattataaacgccttcaaat

SEQ ID NO: 71722 - DNA, 25 bp, Artificial
  probe
  misc_feature (1)..(25): SEQ ID NO: 5; WAN024B49_x_at; Start 69; Stop 93
ttataaacgccttcaaatcgttcta

SEQ ID NO: 71723 - DNA, 25 bp, Artificial
  probe
  misc_feature (1)..(25): SEQ ID NO: 5; WAN024B49_x_at; Start 59; Stop 83
cagctaaatattataaacgccttca

SEQ ID NO: 71724 - DNA, 25 bp, Artificial
  probe
  misc_feature (1)..(25): SEQ ID NO: 5; WAN024B49_x_at; Start 12; Stop 36
taaagaagaaatccaaaccatcaaa

SEQ ID NO: 71725 - DNA, 25 bp, Artificial
  probe
  misc_feature (1)..(25): SEQ ID NO: 5; WAN024B49_x_at; Start 18; Stop 42
agaaatccaaaccatcaaaacactt

SEQ ID NO: 71726 - DNA, 25 bp, Artificial
  probe
  misc_feature (1)..(25): SEQ ID NO: 5; WAN024B49_x_at; Start 47; Stop 71
aagactctcgtacagctaaatatta

SEQ ID NO: 71727 - DNA, 25 bp, Artificial
  probe
  misc_feature (1)..(25): SEQ ID NO: 5; WAN024B49_x_at; Start 10; Stop 34
actaaagaagaaatccaaaccatca

SEQ ID NO: 71728 - DNA, 25 bp, Artificial
  probe
  misc_feature (1)..(25): SEQ ID NO: 5; WAN024B49_x_at; Start 60; Stop 84
agctaaatattataaacgccttcaa

SEQ ID NO: 71729 - DNA, 25 bp, Artificial
  probe
  misc_feature (1)..(25): SEQ ID NO: 5; WAN024B49_x_at; Start 11; Stop 35
ctaaagaagaaatccaaaccatcaa

SEQ ID NO: 71730 - DNA, 25 bp, Artificial
  probe
  misc_feature (1)..(25): SEQ ID NO: 4; WAN024B4B_x_at; Start 51; Stop 75
ctctcgtacagctaaatatcataaa

SEQ ID NO: 71731 - DNA, 25 bp, Artificial
  probe
  misc_feature (1)..(25): SEQ ID NO: 4; WAN024B4B_x_at; Start 30; Stop 54
catcaaaacacttttaaaagactct

SEQ ID NO: 71732 - DNA, 25 bp, Artificial
  probe
  misc_feature (1)..(25): SEQ ID NO: 4; WAN024B4B_x_at; Start 43; Stop 67
ttaaaagactctcgtacagctaaat

SEQ ID NO: 71733 - DNA, 25 bp, Artificial
  probe
  misc_feature (1)..(25): SEQ ID NO: 4; WAN024B4B_x_at; Start 57; Stop 81
tacagctaaatatcataaacgcctt

SEQ ID NO: 71734 - DNA, 25 bp, Artificial
  probe
  misc_feature (1)..(25): SEQ ID NO: 4; WAN024B4B_x_at; Start 59; Stop 83
cagctaaatatcataaacgccttca

SEQ ID NO: 71735 - DNA, 25 bp, Artificial
  probe
  misc_feature (1)..(25): SEQ ID NO: 4; WAN024B4B_x_at; Start 56; Stop 80
gtacagctaaatatcataaacgcct

SEQ ID NO: 71736 - DNA, 25 bp, Artificial
  probe
  misc_feature (1)..(25): SEQ ID NO: 4; WAN024B4B_x_at; Start 53; Stop 77
ctcgtacagctaaatatcataaacg

SEQ ID NO: 71737 - DNA, 25 bp, Artificial
  probe
  misc_feature (1)..(25): SEQ ID NO: 4; WAN024B4B_x_at; Start 44; Stop 68
taaaagactctcgtacagctaaata

SEQ ID NO: 71738 - DNA, 25 bp, Artificial
  probe
  misc_feature (1)..(25): SEQ ID NO: 4; WAN024B4B_x_at; Start 58; Stop 82
acagctaaatatcataaacgccttc

SEQ ID NO: 71739 - DNA, 25 bp, Artificial
  probe
  misc_feature (1)..(25): SEQ ID NO: 4; WAN024B4B_x_at; Start 40; Stop 64
cttttaaaagactctcgtacagcta

SEQ ID NO: 71740 - DNA, 25 bp, Artificial
  probe
  misc_feature (1)..(25): SEQ ID NO: 4; WAN024B4B_x_at; Start 61; Stop 85
gctaaatatcataaacgccttcaaa

SEQ ID NO: 71741 - DNA, 25 bp, Artificial
  probe
  misc_feature (1)..(25): SEQ ID NO: 4; WAN024B4B_x_at; Start 46; Stop 70
aaagactctcgtacagctaaatatc

SEQ ID NO: 71742 - DNA, 25 bp, Artificial
  probe
  misc_feature (1)..(25): SEQ ID NO: 4; WAN024B4B_x_at; Start 8; Stop 32
caactaaagaagaaatccaaaccat

SEQ ID NO: 71743 - DNA, 25 bp, Artificial
  probe
  misc_feature (1)..(25): SEQ ID NO: 4; WAN024B4B_x_at; Start 63; Stop 87
taaatatcataaacgccttcaaatc

SEQ ID NO: 71744 - DNA, 25 bp, Artificial
  probe
  misc_feature (1)..(25): SEQ ID NO: 4; WAN024B4B_x_at; Start 7; Stop 31
tcaactaaagaagaaatccaaacca

SEQ ID NO: 71745 - DNA, 25 bp, Artificial
  probe
  misc_feature (1)..(25): SEQ ID NO: 4; WAN024B4B_x_at; Start 55; Stop 79
cgtacagctaaatatcataaacgcc

SEQ ID NO: 71746 - DNA, 25 bp, Artificial
  probe
  misc_feature (1)..(25): SEQ ID NO: 4; WAN024B4B_x_at; Start 49; Stop 73
gactctcgtacagctaaatatcata

SEQ ID NO: 71747 - DNA, 25 bp, Artificial
  probe
  misc_feature (1)..(25): SEQ ID NO: 4; WAN024B4B_x_at; Start 38; Stop 62
cacttttaaaagactctcgtacagc

SEQ ID NO: 71748 - DNA, 25 bp, Artificial
  probe
  misc_feature (1)..(25): SEQ ID NO: 4; WAN024B4B_x_at; Start 64; Stop 88
aaatatcataaacgccttcaaatcg

SEQ ID NO: 71749 - DNA, 25 bp, Artificial
  probe
  misc_feature (1)..(25): SEQ ID NO: 4; WAN024B4B_x_at; Start 48; Stop 72
agactctcgtacagctaaatatcat

SEQ ID NO: 71750 - DNA, 25 bp, Artificial
  probe
  misc_feature (1)..(25): SEQ ID NO: 4; WAN024B4B_x_at; Start 52; Stop 76
tctcgtacagctaaatatcataaac

SEQ ID NO: 71751 - DNA, 25 bp, Artificial
  probe
  misc_feature (1)..(25): SEQ ID NO: 4; WAN024B4B_x_at; Start 50; Stop 74
actctcgtacagctaaatatcataa

SEQ ID NO: 71752 - DNA, 25 bp, Artificial
  probe
  misc_feature (1)..(25): SEQ ID NO: 4; WAN024B4B_x_at; Start 67; Stop 91
tatcataaacgccttcaaatcgttc

SEQ ID NO: 71753 - DNA, 25 bp, Artificial
  probe
  misc_feature (1)..(25): SEQ ID NO: 4; WAN024B4B_x_at; Start 62; Stop 86
ctaaatatcataaacgccttcaaat

SEQ ID NO: 71754 - DNA, 25 bp, Artificial
  probe
  misc_feature (1)..(25): SEQ ID NO: 4; WAN024B4B_x_at; Start 16; Stop 40
gaagaaatccaaaccatcaaaacac

SEQ ID NO: 71755 - DNA, 25 bp, Artificial
  probe
  misc_feature (1)..(25): SEQ ID NO: 4; WAN024B4B_x_at; Start 54; Stop 78
tcgtacagctaaatatcataaacgc

SEQ ID NO: 71756 - DNA, 25 bp, Artificial
  probe
  misc_feature (1)..(25): SEQ ID NO: 4; WAN024B4B_x_at; Start 41; Stop 65
ttttaaaagactctcgtacagctaa

SEQ ID NO: 71757 - DNA, 25 bp, Artificial
  probe
  misc_feature (1)..(25): SEQ ID NO: 4; WAN024B4B_x_at; Start 12; Stop 36
taaagaagaaatccaaaccatcaaa

SEQ ID NO: 71758 - DNA, 25 bp, Artificial
  probe
  misc_feature (1)..(25): SEQ ID NO: 4; WAN024B4B_x_at; Start 18; Stop 42
agaaatccaaaccatcaaaacactt

SEQ ID NO: 71759 - DNA, 25 bp, Artificial
  probe
  misc_feature (1)..(25): SEQ ID NO: 4; WAN024B4B_x_at; Start 47; Stop 71
aagactctcgtacagctaaatatca

SEQ ID NO: 71760 - DNA, 25 bp, Artificial
  probe
  misc_feature (1)..(25): SEQ ID NO: 4; WAN024B4B_x_at; Start 69; Stop 93
tcataaacgccttcaaatcgttcta

SEQ ID NO: 71761 - DNA, 25 bp, Artificial
  probe
  misc_feature (1)..(25): SEQ ID NO: 4; WAN024B4B_x_at; Start 10; Stop 34
actaaagaagaaatccaaaccatca

SEQ ID NO: 71762 - DNA, 25 bp, Artificial
  probe
  misc_feature (1)..(25): SEQ ID NO: 4; WAN024B4B_x_at; Start 60; Stop 84
agctaaatatcataaacgccttcaa

SEQ ID NO: 71763 - DNA, 25 bp, Artificial
  probe
  misc_feature (1)..(25): SEQ ID NO: 4; WAN024B4B_x_at; Start 11; Stop 35
ctaaagaagaaatccaaaccatcaa

SEQ ID NO: 71764 - DNA, 25 bp, Artificial
  probe
  misc_feature (1)..(25): SEQ ID NO: 953; WAN024B4C_x_at; Start 42; Stop 66
tttaaaagactctcgtacagctaaa

SEQ ID NO: 71765 - DNA, 25 bp, Artificial
  probe
  misc_feature (1)..(25): SEQ ID NO: 953; WAN024B4C_x_at; Start 30; Stop 54
catcaaaacacttttaaaagactct

SEQ ID NO: 71766 - DNA, 25 bp, Artificial
  probe
  misc_feature (1)..(25): SEQ ID NO: 953; WAN024B4C_x_at; Start 83; Stop 107
aaatcgttctatttcgtctgatggg

SEQ ID NO: 71767 - DNA, 25 bp, Artificial
  probe
  misc_feature (1)..(25): SEQ ID NO: 953; WAN024B4C_x_at; Start 57; Stop 81
tacagctaaatatcataaacgcctt

SEQ ID NO: 71768 - DNA, 25 bp, Artificial
  probe
  misc_feature (1)..(25): SEQ ID NO: 953; WAN024B4C_x_at; Start 44; Stop 68
taaaagactctcgtacagctaaata

SEQ ID NO: 71769 - DNA, 25 bp, Artificial
  probe
  misc_feature (1)..(25): SEQ ID NO: 953; WAN024B4C_x_at; Start 53; Stop 77
ctcgtacagctaaatatcataaacg

SEQ ID NO: 71770 - DNA, 25 bp, Artificial
  probe
  misc_feature (1)..(25): SEQ ID NO: 953; WAN024B4C_x_at; Start 56; Stop 80
gtacagctaaatatcataaacgcct

SEQ ID NO: 71771 - DNA, 25 bp, Artificial
  probe
  misc_feature (1)..(25): SEQ ID NO: 953; WAN024B4C_x_at; Start 82; Stop 106
caaatcgttctatttcgtctgatgg

SEQ ID NO: 71772 - DNA, 25 bp, Artificial
  probe
  misc_feature (1)..(25): SEQ ID NO: 953; WAN024B4C_x_at; Start 58; Stop 82
acagctaaatatcataaacgccttc

SEQ ID NO: 71773 - DNA, 25 bp, Artificial
  probe
  misc_feature (1)..(25): SEQ ID NO: 953; WAN024B4C_x_at; Start 59; Stop 83
cagctaaatatcataaacgccttca

SEQ ID NO: 71774 - DNA, 25 bp, Artificial
  probe
  misc_feature (1)..(25): SEQ ID NO: 953; WAN024B4C_x_at; Start 40; Stop 64
cttttaaaagactctcgtacagcta

SEQ ID NO: 71775 - DNA, 25 bp, Artificial
  probe
  misc_feature (1)..(25): SEQ ID NO: 953; WAN024B4C_x_at; Start 7; Stop 31
tcaattaaagaagaaatccaaacca

SEQ ID NO: 71776 - DNA, 25 bp, Artificial
  probe
  misc_feature (1)..(25): SEQ ID NO: 953; WAN024B4C_x_at; Start 61; Stop 85
gctaaatatcataaacgccttcaaa

SEQ ID NO: 71777 - DNA, 25 bp, Artificial
  probe
  misc_feature (1)..(25): SEQ ID NO: 953; WAN024B4C_x_at; Start 46; Stop 70
aaagactctcgtacagctaaatatc

SEQ ID NO: 71778 - DNA, 25 bp, Artificial
  probe
  misc_feature (1)..(25): SEQ ID NO: 953; WAN024B4C_x_at; Start 63; Stop 87
taaatatcataaacgccttcaaatc

SEQ ID NO: 71779 - DNA, 25 bp, Artificial
  probe
  misc_feature (1)..(25): SEQ ID NO: 953; WAN024B4C_x_at; Start 55; Stop 79
cgtacagctaaatatcataaacgcc

SEQ ID NO: 71780 - DNA, 25 bp, Artificial
  probe
  misc_feature (1)..(25): SEQ ID NO: 953; WAN024B4C_x_at; Start 49; Stop 73
gactctcgtacagctaaatatcata

SEQ ID NO: 71781 - DNA, 25 bp, Artificial
  probe
  misc_feature (1)..(25): SEQ ID NO: 953; WAN024B4C_x_at; Start 38; Stop 62
cacttttaaaagactctcgtacagc

SEQ ID NO: 71782 - DNA, 25 bp, Artificial
  probe
  misc_feature (1)..(25): SEQ ID NO: 953; WAN024B4C_x_at; Start 3; Stop 27
gaaatcaattaaagaagaaatccaa

SEQ ID NO: 71783 - DNA, 25 bp, Artificial
  probe
  misc_feature (1)..(25): SEQ ID NO: 953; WAN024B4C_x_at; Start 64; Stop 88
aaatatcataaacgccttcaaatcg

SEQ ID NO: 71784 - DNA, 25 bp, Artificial
  probe
  misc_feature (1)..(25): SEQ ID NO: 953; WAN024B4C_x_at; Start 50; Stop 74
actctcgtacagctaaatatcataa

SEQ ID NO: 71785 - DNA, 25 bp, Artificial
  probe
  misc_feature (1)..(25): SEQ ID NO: 953; WAN024B4C_x_at; Start 2; Stop 26
tgaaatcaattaaagaagaaatcca

SEQ ID NO: 71786 - DNA, 25 bp, Artificial
  probe
  misc_feature (1)..(25): SEQ ID NO: 953; WAN024B4C_x_at; Start 67; Stop 91
tatcataaacgccttcaaatcgttc

SEQ ID NO: 71787 - DNA, 25 bp, Artificial
  probe
  misc_feature (1)..(25): SEQ ID NO: 953; WAN024B4C_x_at; Start 62; Stop 86
ctaaatatcataaacgccttcaaat

SEQ ID NO: 71788 - DNA, 25 bp, Artificial
  probe
  misc_feature (1)..(25): SEQ ID NO: 953; WAN024B4C_x_at; Start 10; Stop 34
attaaagaagaaatccaaaccatca

SEQ ID NO: 71789 - DNA, 25 bp, Artificial
  probe
  misc_feature (1)..(25): SEQ ID NO: 953; WAN024B4C_x_at; Start 16; Stop 40
gaagaaatccaaaccatcaaaacac

SEQ ID NO: 71790 - DNA, 25 bp, Artificial
  probe
  misc_feature (1)..(25): SEQ ID NO: 953; WAN024B4C_x_at; Start 54; Stop 78
tcgtacagctaaatatcataaacgc

SEQ ID NO: 71791 - DNA, 25 bp, Artificial
  probe
  misc_feature (1)..(25): SEQ ID NO: 953; WAN024B4C_x_at; Start 11; Stop 35
ttaaagaagaaatccaaaccatcaa

SEQ ID NO: 71792 - DNA, 25 bp, Artificial
  probe
  misc_feature (1)..(25): SEQ ID NO: 953; WAN024B4C_x_at; Start 84; Stop 108
aatcgttctatttcgtctgatgggc

SEQ ID NO: 71793 - DNA, 25 bp, Artificial
  probe
  misc_feature (1)..(25): SEQ ID NO: 953; WAN024B4C_x_at; Start 8; Stop 32
caattaaagaagaaatccaaaccat

SEQ ID NO: 71794 - DNA, 25 bp, Artificial
  probe
  misc_feature (1)..(25): SEQ ID NO: 953; WAN024B4C_x_at; Start 18; Stop 42
agaaatccaaaccatcaaaacactt

SEQ ID NO: 71795 - DNA, 25 bp, Artificial
  probe
  misc_feature (1)..(25): SEQ ID NO: 953; WAN024B4C_x_at; Start 47; Stop 71
aagactctcgtacagctaaatatca

SEQ ID NO: 71796 - DNA, 25 bp, Artificial
  probe
  misc_feature (1)..(25): SEQ ID NO: 953; WAN024B4C_x_at; Start 1; Stop 25
atgaaatcaattaaagaagaaatcc

SEQ ID NO: 71797 - DNA, 25 bp, Artificial
  probe
  misc_feature (1)..(25): SEQ ID NO: 953; WAN024B4C_x_at; Start 60; Stop 84
agctaaatatcataaacgccttcaa

SEQ ID NO: 71798 - DNA, 25 bp, Artificial
  probe
  misc_feature (1)..(25): SEQ ID NO: 947; WAN024B4D_x_at; Start 42; Stop 66
tttaaaagactctcgtacagctaaa

SEQ ID NO: 71799 - DNA, 25 bp, Artificial
  probe
  misc_feature (1)..(25): SEQ ID NO: 947; WAN024B4D_x_at; Start 78; Stop 102
ccttcaaatcgttctactaactaat

SEQ ID NO: 71800 - DNA, 25 bp, Artificial
  probe
  misc_feature (1)..(25): SEQ ID NO: 947; WAN024B4D_x_at; Start 30; Stop 54
catcaaaacacttttaaaagactct

SEQ ID NO: 71801 - DNA, 25 bp, Artificial
  probe
  misc_feature (1)..(25): SEQ ID NO: 947; WAN024B4D_x_at; Start 43; Stop 67
ttaaaagactctcgtacagctaaat

SEQ ID NO: 71802 - DNA, 25 bp, Artificial
  probe
  misc_feature (1)..(25): SEQ ID NO: 947; WAN024B4D_x_at; Start 44; Stop 68
taaaagactctcgtacagctaaata

SEQ ID NO: 71803 - DNA, 25 bp, Artificial
  probe
  misc_feature (1)..(25): SEQ ID NO: 947; WAN024B4D_x_at; Start 45; Stop 69
aaaagactctcgtacagctaaatat

SEQ ID NO: 71804 - DNA, 25 bp, Artificial
  probe
  misc_feature (1)..(25): SEQ ID NO: 947; WAN024B4D_x_at; Start 17; Stop 41
aagaaatccaaaccatcaaaacact

SEQ ID NO: 71805 - DNA, 25 bp, Artificial
  probe
  misc_feature (1)..(25): SEQ ID NO: 947; WAN024B4D_x_at; Start 15; Stop 39
agaagaaatccaaaccatcaaaaca

SEQ ID NO: 71806 - DNA, 25 bp, Artificial
  probe
  misc_feature (1)..(25): SEQ ID NO: 947; WAN024B4D_x_at; Start 40; Stop 64
cttttaaaagactctcgtacagcta

SEQ ID NO: 71807 - DNA, 25 bp, Artificial
  probe
  misc_feature (1)..(25): SEQ ID NO: 947; WAN024B4D_x_at; Start 8; Stop 32
caactaaagaagaaatccaaaccat

SEQ ID NO: 71808 - DNA, 25 bp, Artificial
  probe
  misc_feature (1)..(25): SEQ ID NO: 947; WAN024B4D_x_at; Start 7; Stop 31
tcaactaaagaagaaatccaaacca

SEQ ID NO: 71809 - DNA, 25 bp, Artificial
  probe
  misc_feature (1)..(25): SEQ ID NO: 947; WAN024B4D_x_at; Start 37; Stop 61
acacttttaaaagactctcgtacag

SEQ ID NO: 71810 - DNA, 25 bp, Artificial
  probe
  misc_feature (1)..(25): SEQ ID NO: 947; WAN024B4D_x_at; Start 75; Stop 99
acgccttcaaatcgttctactaact

SEQ ID NO: 71811 - DNA, 25 bp, Artificial
  probe
  misc_feature (1)..(25): SEQ ID NO: 947; WAN024B4D_x_at; Start 76; Stop 100
cgccttcaaatcgttctactaacta

SEQ ID NO: 71812 - DNA, 25 bp, Artificial
  probe
  misc_feature (1)..(25): SEQ ID NO: 947; WAN024B4D_x_at; Start 38; Stop 62
cacttttaaaagactctcgtacagc

SEQ ID NO: 71813 - DNA, 25 bp, Artificial
  probe
  misc_feature (1)..(25): SEQ ID NO: 947; WAN024B4D_x_at; Start 3; Stop 27
gaaatcaactaaagaagaaatccaa

SEQ ID NO: 71814 - DNA, 25 bp, Artificial
  probe
  misc_feature (1)..(25): SEQ ID NO: 947; WAN024B4D_x_at; Start 71; Stop 95
ataaacgccttcaaatcgttctact

SEQ ID NO: 71815 - DNA, 25 bp, Artificial
  probe
  misc_feature (1)..(25): SEQ ID NO: 947; WAN024B4D_x_at; Start 77; Stop 101
gccttcaaatcgttctactaactaa

SEQ ID NO: 71816 - DNA, 25 bp, Artificial
  probe
  misc_feature (1)..(25): SEQ ID NO: 947; WAN024B4D_x_at; Start 39; Stop 63
acttttaaaagactctcgtacagct

SEQ ID NO: 71817 - DNA, 25 bp, Artificial
  probe
  misc_feature (1)..(25): SEQ ID NO: 947; WAN024B4D_x_at; Start 2; Stop 26
tgaaatcaactaaagaagaaatcca

SEQ ID NO: 71818 - DNA, 25 bp, Artificial
  probe
  misc_feature (1)..(25): SEQ ID NO: 947; WAN024B4D_x_at; Start 72; Stop 96
taaacgccttcaaatcgttctacta

SEQ ID NO: 71819 - DNA, 25 bp, Artificial
  probe
  misc_feature (1)..(25): SEQ ID NO: 947; WAN024B4D_x_at; Start 16; Stop 40
gaagaaatccaaaccatcaaaacac

SEQ ID NO: 71820 - DNA, 25 bp, Artificial
  probe
  misc_feature (1)..(25): SEQ ID NO: 947; WAN024B4D_x_at; Start 41; Stop 65
ttttaaaagactctcgtacagctaa

SEQ ID NO: 71821 - DNA, 25 bp, Artificial
  probe
  misc_feature (1)..(25): SEQ ID NO: 947; WAN024B4D_x_at; Start 12; Stop 36
taaagaagaaatccaaaccatcaaa

SEQ ID NO: 71822 - DNA, 25 bp, Artificial
  probe
  misc_feature (1)..(25): SEQ ID NO: 947; WAN024B4D_x_at; Start 18; Stop 42
agaaatccaaaccatcaaaacactt

SEQ ID NO: 71823 - DNA, 25 bp, Artificial
  probe
  misc_feature (1)..(25): SEQ ID NO: 947; WAN024B4D_x_at; Start 10; Stop 34
actaaagaagaaatccaaaccatca

SEQ ID NO: 71824 - DNA, 25 bp, Artificial
  probe
  misc_feature (1)..(25): SEQ ID NO: 947; WAN024B4D_x_at; Start 1; Stop 25
atgaaatcaactaaagaagaaatcc

SEQ ID NO: 71825 - DNA, 25 bp, Artificial
  probe
  misc_feature (1)..(25): SEQ ID NO: 947; WAN024B4D_x_at; Start 11; Stop 35
ctaaagaagaaatccaaaccatcaa

SEQ ID NO: 71826 - DNA, 25 bp, Artificial
  probe
  misc_feature (1)..(25): SEQ ID NO: 2201; WAN024B4E_at; Start 197; Stop 221
tgatacacgtggtaggtaacagacc

SEQ ID NO: 71827 - DNA, 25 bp, Artificial
  probe
  misc_feature (1)..(25): SEQ ID NO: 2201; WAN024B4E_at; Start 129; Stop 153
taacacctccacttcagcgttagga

SEQ ID NO: 71828 - DNA, 25 bp, Artificial
  probe
  misc_feature (1)..(25): SEQ ID NO: 2201; WAN024B4E_at; Start 138; Stop 162
cacttcagcgttaggaagaaataac

SEQ ID NO: 71829 - DNA, 25 bp, Artificial
  probe
  misc_feature (1)..(25): SEQ ID NO: 2201; WAN024B4E_at; Start 2; Stop 26
tggaagaaacccaaatcgtatttga

SEQ ID NO: 71830 - DNA, 25 bp, Artificial
  probe
  misc_feature (1)..(25): SEQ ID NO: 2201; WAN024B4E_at; Start 202; Stop 226
cacgtggtaggtaacagaccaattg

SEQ ID NO: 71831 - DNA, 25 bp, Artificial
  probe
  misc_feature (1)..(25): SEQ ID NO: 2201; WAN024B4E_at; Start 228; Stop 252
tgcaaacaagagtccacctaatccc

SEQ ID NO: 71832 - DNA, 25 bp, Artificial
  probe
  misc_feature (1)..(25): SEQ ID NO: 2201; WAN024B4E_at; Start 221; Stop 245
caattgttgcaaacaagagtccacc

SEQ ID NO: 71833 - DNA, 25 bp, Artificial
  probe
  misc_feature (1)..(25): SEQ ID NO: 2201; WAN024B4E_at; Start 116; Stop 140
tagtttctgactctaacacctccac

SEQ ID NO: 71834 - DNA, 25 bp, Artificial
  probe
  misc_feature (1)..(25): SEQ ID NO: 2201; WAN024B4E_at; Start 46; Stop 70
gctgatacaaaaagtcttaatctag

SEQ ID NO: 71835 - DNA, 25 bp, Artificial
  probe
  misc_feature (1)..(25): SEQ ID NO: 2201; WAN024B4E_at; Start 35; Stop 59
ccaataaatttgctgatacaaaaag

SEQ ID NO: 71836 - DNA, 25 bp, Artificial
  probe
  misc_feature (1)..(25): SEQ ID NO: 2201; WAN024B4E_at; Start 189; Stop 213
gactaaattgatacacgtggtaggt

SEQ ID NO: 71837 - DNA, 25 bp, Artificial
  probe
  misc_feature (1)..(25): SEQ ID NO: 2201; WAN024B4E_at; Start 213; Stop 237
taacagaccaattgttgcaaacaag

SEQ ID NO: 71838 - DNA, 25 bp, Artificial
  probe
  misc_feature (1)..(25): SEQ ID NO: 2201; WAN024B4E_at; Start 200; Stop 224
tacacgtggtaggtaacagaccaat

SEQ ID NO: 71839 - DNA, 25 bp, Artificial
  probe
  misc_feature (1)..(25): SEQ ID NO: 2201; WAN024B4E_at; Start 207; Stop 231
ggtaggtaacagaccaattgttgca

SEQ ID NO: 71840 - DNA, 25 bp, Artificial
  probe
  misc_feature (1)..(25): SEQ ID NO: 2201; WAN024B4E_at; Start 225; Stop 249
tgttgcaaacaagagtccacctaat

SEQ ID NO: 71841 - DNA, 25 bp, Artificial
  probe
  misc_feature (1)..(25): SEQ ID NO: 2201; WAN024B4E_at; Start 77; Stop 101
tagcaactaacttccaacctttgag

SEQ ID NO: 71842 - DNA, 25 bp, Artificial
  probe
  misc_feature (1)..(25): SEQ ID NO: 2201; WAN024B4E_at; Start 94; Stop 118
cctttgagcaaaatttcaagattag

SEQ ID NO: 71843 - DNA, 25 bp, Artificial
  probe
  misc_feature (1)..(25): SEQ ID NO: 2201; WAN024B4E_at; Start 63; Stop 87
taatctaggatttctagcaactaac

SEQ ID NO: 71844 - DNA, 25 bp, Artificial
  probe
  misc_feature (1)..(25): SEQ ID NO: 2201; WAN024B4E_at; Start 143; Stop 167
cagcgttaggaagaaataacatcag

SEQ ID NO: 71845 - DNA, 25 bp, Artificial
  probe
  misc_feature (1)..(25): SEQ ID NO: 2201; WAN024B4E_at; Start 132; Stop 156
cacctccacttcagcgttaggaaga

SEQ ID NO: 71846 - DNA, 25 bp, Artificial
  probe
  misc_feature (1)..(25): SEQ ID NO: 2201; WAN024B4E_at; Start 80; Stop 104
caactaacttccaacctttgagcaa

SEQ ID NO: 71847 - DNA, 25 bp, Artificial
  probe
  misc_feature (1)..(25): SEQ ID NO: 2201; WAN024B4E_at; Start 110; Stop 134
caagattagtttctgactctaacac

SEQ ID NO: 71848 - DNA, 25 bp, Artificial
  probe
  misc_feature (1)..(25): SEQ ID NO: 2201; WAN024B4E_at; Start 135; Stop 159
ctccacttcagcgttaggaagaaat

SEQ ID NO: 71849 - DNA, 25 bp, Artificial
  probe
  misc_feature (1)..(25): SEQ ID NO: 2201; WAN024B4E_at; Start 184; Stop 208
tacaagactaaattgatacacgtgg

SEQ ID NO: 71850 - DNA, 25 bp, Artificial
  probe
  misc_feature (1)..(25): SEQ ID NO: 2201; WAN024B4E_at; Start 192; Stop 216
taaattgatacacgtggtaggtaac

SEQ ID NO: 71851 - DNA, 25 bp, Artificial
  probe
  misc_feature (1)..(25): SEQ ID NO: 2201; WAN024B4E_at; Start 70; Stop 94
ggatttctagcaactaacttccaac

SEQ ID NO: 71852 - DNA, 25 bp, Artificial
  probe
  misc_feature (1)..(25): SEQ ID NO: 2201; WAN024B4E_at; Start 151; Stop 175
ggaagaaataacatcagaaagctag

SEQ ID NO: 71853 - DNA, 25 bp, Artificial
  probe
  misc_feature (1)..(25): SEQ ID NO: 2201; WAN024B4E_at; Start 243; Stop 267
acctaatccccaacctatcaattga

SEQ ID NO: 71854 - DNA, 25 bp, Artificial
  probe
  misc_feature (1)..(25): SEQ ID NO: 2201; WAN024B4E_at; Start 89; Stop 113
tccaacctttgagcaaaatttcaag

SEQ ID NO: 71855 - DNA, 25 bp, Artificial
  probe
  misc_feature (1)..(25): SEQ ID NO: 2201; WAN024B4E_at; Start 56; Stop 80
aaagtcttaatctaggatttctagc

SEQ ID NO: 71856 - DNA, 25 bp, Artificial
  probe
  misc_feature (1)..(25): SEQ ID NO: 2201; WAN024B4E_at; Start 167; Stop 191
gaaagctagaaatgatatacaagac

SEQ ID NO: 71857 - DNA, 25 bp, Artificial
  probe
  misc_feature (1)..(25): SEQ ID NO: 2201; WAN024B4E_at; Start 171; Stop 195
gctagaaatgatatacaagactaaa

SEQ ID NO: 71858 - DNA, 25 bp, Artificial
  probe
  misc_feature (1)..(25): SEQ ID NO: 2201; WAN024B4E_at; Start 102; Stop 126
caaaatttcaagattagtttctgac

SEQ ID NO: 71859 - DNA, 25 bp, Artificial
  probe
  misc_feature (1)..(25): SEQ ID NO: 2201; WAN024B4E_at; Start 162; Stop 186
catcagaaagctagaaatgatatac

SEQ ID NO: 71860 - DNA, 25 bp, Artificial
  probe
  misc_feature (1)..(25): SEQ ID NO: 2912; WAN024B4F_at; Start 1121; Stop 1145
ccatttgtctgatgatagaagctat

SEQ ID NO: 71861 - DNA, 25 bp, Artificial
  probe
  misc_feature (1)..(25): SEQ ID NO: 2912; WAN024B4F_at; Start 902; Stop 926
cacagatgtttttattattttcagc

SEQ ID NO: 71862 - DNA, 25 bp, Artificial
  probe
  misc_feature (1)..(25): SEQ ID NO: 2912; WAN024B4F_at; Start 946; Stop 970
caactaaaagaagttcctgaaagtg

SEQ ID NO: 71863 - DNA, 25 bp, Artificial
  probe
  misc_feature (1)..(25): SEQ ID NO: 2912; WAN024B4F_at; Start 1052; Stop 1076
cagtatttgttttgctaatgagcta

SEQ ID NO: 71864 - DNA, 25 bp, Artificial
  probe
  misc_feature (1)..(25): SEQ ID NO: 2912; WAN024B4F_at; Start 1070; Stop 1094
tgagctatattactgagagttttgg

SEQ ID NO: 71865 - DNA, 25 bp, Artificial
  probe
  misc_feature (1)..(25): SEQ ID NO: 2912; WAN024B4F_at; Start 949; Stop 973
ctaaaagaagttcctgaaagtgtat

SEQ ID NO: 71866 - DNA, 25 bp, Artificial
  probe
  misc_feature (1)..(25): SEQ ID NO: 2912; WAN024B4F_at; Start 887; Stop 911
tatattttccaaacgcacagatgtt

SEQ ID NO: 71867 - DNA, 25 bp, Artificial
  probe
  misc_feature (1)..(25): SEQ ID NO: 2912; WAN024B4F_at; Start 873; Stop 897
gacactgactattctatattttcca

SEQ ID NO: 71868 - DNA, 25 bp, Artificial
  probe
  misc_feature (1)..(25): SEQ ID NO: 2912; WAN024B4F_at; Start 956; Stop 980
aagttcctgaaagtgtatttcttca

SEQ ID NO: 71869 - DNA, 25 bp, Artificial
  probe
  misc_feature (1)..(25): SEQ ID NO: 2912; WAN024B4F_at; Start 986; Stop 1010
cagtagaggaaaatcatttagttaa

SEQ ID NO: 71870 - DNA, 25 bp, Artificial
  probe
  misc_feature (1)..(25): SEQ ID NO: 2912; WAN024B4F_at; Start 1017; Stop 1041
ttccgttcttgaagtgatttctaca

SEQ ID NO: 71871 - DNA, 25 bp, Artificial
  probe
  misc_feature (1)..(25): SEQ ID NO: 2912; WAN024B4F_at; Start 917; Stop 941
tattttcagctttagttggtatgtt

SEQ ID NO: 71872 - DNA, 25 bp, Artificial
  probe
  misc_feature (1)..(25): SEQ ID NO: 2912; WAN024B4F_at; Start 1098; Stop 1122
tagcatcagtttttggctatcagcc

SEQ ID NO: 71873 - DNA, 25 bp, Artificial
  probe
  misc_feature (1)..(25): SEQ ID NO: 2912; WAN024B4F_at; Start 1064; Stop 1088
tgctaatgagctatattactgagag

SEQ ID NO: 71874 - DNA, 25 bp, Artificial
  probe
  misc_feature (1)..(25): SEQ ID NO: 2912; WAN024B4F_at; Start 979; Stop 1003
caggaaacagtagaggaaaatcatt

SEQ ID NO: 71875 - DNA, 25 bp, Artificial
  probe
  misc_feature (1)..(25): SEQ ID NO: 2912; WAN024B4F_at; Start 1118; Stop 1142
cagccatttgtctgatgatagaagc

SEQ ID NO: 71876 - DNA, 25 bp, Artificial
  probe
  misc_feature (1)..(25): SEQ ID NO: 2912; WAN024B4F_at; Start 882; Stop 906
tattctatattttccaaacgcacag

SEQ ID NO: 71877 - DNA, 25 bp, Artificial
  probe
  misc_feature (1)..(25): SEQ ID NO: 2912; WAN024B4F_at; Start 1152; Stop 1176
ttatatcagacgagattattttaaa

SEQ ID NO: 71878 - DNA, 25 bp, Artificial
  probe
  misc_feature (1)..(25): SEQ ID NO: 2912; WAN024B4F_at; Start 1141; Stop 1165
gctattttaatttatatcagacgag

SEQ ID NO: 71879 - DNA, 25 bp, Artificial
  probe
  misc_feature (1)..(25): SEQ ID NO: 2912; WAN024B4F_at; Start 1032; Stop 1056
gatttctacattagcattttcagta

SEQ ID NO: 71880 - DNA, 25 bp, Artificial
  probe
  misc_feature (1)..(25): SEQ ID NO: 2912; WAN024B4F_at; Start 976; Stop 1000
cttcaggaaacagtagaggaaaatc

SEQ ID NO: 71881 - DNA, 25 bp, Artificial
  probe
  misc_feature (1)..(25): SEQ ID NO: 2912; WAN024B4F_at; Start 840; Stop 864
tattctttttcctcttgtagctatg

SEQ ID NO: 71882 - DNA, 25 bp, Artificial
  probe
  misc_feature (1)..(25): SEQ ID NO: 2912; WAN024B4F_at; Start 1108; Stop 1132
ttttggctatcagccatttgtctga

SEQ ID NO: 71883 - DNA, 25 bp, Artificial
  probe
  misc_feature (1)..(25): SEQ ID NO: 2912; WAN024B4F_at; Start 1023; Stop 1047
tcttgaagtgatttctacattagca

SEQ ID NO: 71884 - DNA, 25 bp, Artificial
  probe
  misc_feature (1)..(25): SEQ ID NO: 2912; WAN024B4F_at; Start 1036; Stop 1060
tctacattagcattttcagtatttg

SEQ ID NO: 71885 - DNA, 25 bp, Artificial
  probe
  misc_feature (1)..(25): SEQ ID NO: 2912; WAN024B4F_at; Start 1084; Stop 1108
gagagttttggtattagcatcagtt

SEQ ID NO: 71886 - DNA, 25 bp, Artificial
  probe
  misc_feature (1)..(25): SEQ ID NO: 2912; WAN024B4F_at; Start 1126; Stop 1150
tgtctgatgatagaagctattttaa

SEQ ID NO: 71887 - DNA, 25 bp, Artificial
  probe
  misc_feature (1)..(25): SEQ ID NO: 2912; WAN024B4F_at; Start 982; Stop 1006
gaaacagtagaggaaaatcatttag

SEQ ID NO: 71888 - DNA, 25 bp, Artificial
  probe
  misc_feature (1)..(25): SEQ ID NO: 2912; WAN024B4F_at; Start 1009; Stop 1033
aatgtctattccgttcttgaagtga

SEQ ID NO: 71889 - DNA, 25 bp, Artificial
  probe
  misc_feature (1)..(25): SEQ ID NO: 2912; WAN024B4F_at; Start 1100; Stop 1124
gcatcagtttttggctatcagccat

SEQ ID NO: 71890 - DNA, 25 bp, Artificial
  probe
  misc_feature (1)..(25): SEQ ID NO: 2912; WAN024B4F_at; Start 894; Stop 918
tccaaacgcacagatgtttttatta

SEQ ID NO: 71891 - DNA, 25 bp, Artificial
  probe
  misc_feature (1)..(25): SEQ ID NO: 2912; WAN024B4F_at; Start 971; Stop 995
tatttcttcaggaaacagtagagga

SEQ ID NO: 71892 - DNA, 25 bp, Artificial
  probe
  misc_feature (1)..(25): SEQ ID NO: 2912; WAN024B4F_at; Start 1000; Stop 1024
catttagttaatgtctattccgttc

SEQ ID NO: 71893 - DNA, 25 bp, Artificial
  probe
  misc_feature (1)..(25): SEQ ID NO: 2912; WAN024B4F_at; Start 1080; Stop 1104
tactgagagttttggtattagcatc

SEQ ID NO: 71894 - DNA, 25 bp, Artificial
  probe
  misc_feature (1)..(25): SEQ ID NO: 7449; WAN024B4G_s_at; Start 46; Stop 70
gaagcactagaaaatatgatattac

SEQ ID NO: 71895 - DNA, 25 bp, Artificial
  probe
  misc_feature (1)..(25): SEQ ID NO: 7449; WAN024B4G_s_at; Start 19; Stop 43
gatgacccacgtatagaggaagaga

SEQ ID NO: 71896 - DNA, 25 bp, Artificial
  probe
  misc_feature (1)..(25): SEQ ID NO: 7449; WAN024B4G_s_at; Start 60; Stop 84
tatgatattacagtatctgggagaa

SEQ ID NO: 71897 - DNA, 25 bp, Artificial
  probe
  misc_feature (1)..(25): SEQ ID NO: 7449; WAN024B4G_s_at; Start 14; Stop 38
atgatgatgacccacgtatagagga

SEQ ID NO: 71898 - DNA, 25 bp, Artificial
  probe
  misc_feature (1)..(25): SEQ ID NO: 7449; WAN024B4G_s_at; Start 26; Stop 50
cacgtatagaggaagagagtgaagc

SEQ ID NO: 71899 - DNA, 25 bp, Artificial
  probe
  misc_feature (1)..(25): SEQ ID NO: 7449; WAN024B4G_s_at; Start 3; Stop 27
gaccttaaaagatgatgatgaccca

SEQ ID NO: 71900 - DNA, 25 bp, Artificial
  probe
  misc_feature (1)..(25): SEQ ID NO: 7449; WAN024B4G_s_at; Start 30; Stop 54
tatagaggaagagagtgaagcacta

SEQ ID NO: 71901 - DNA, 25 bp, Artificial
  probe
  misc_feature (1)..(25): SEQ ID NO: 7449; WAN024B4G_s_at; Start 15; Stop 39
tgatgatgacccacgtatagaggaa

SEQ ID NO: 71902 - DNA, 25 bp, Artificial
  probe
  misc_feature (1)..(25): SEQ ID NO: 7449; WAN024B4G_s_at; Start 17; Stop 41
atgatgacccacgtatagaggaaga

SEQ ID NO: 71903 - DNA, 25 bp, Artificial
  probe
  misc_feature (1)..(25): SEQ ID NO: 7449; WAN024B4G_s_at; Start 6; Stop 30
cttaaaagatgatgatgacccacgt

SEQ ID NO: 71904 - DNA, 25 bp, Artificial
  probe
  misc_feature (1)..(25): SEQ ID NO: 7449; WAN024B4G_s_at; Start 75; Stop 99
tctgggagaagatgatgccagctaa

SEQ ID NO: 71905 - DNA, 25 bp, Artificial
  probe
  misc_feature (1)..(25): SEQ ID NO: 7449; WAN024B4G_s_at; Start 73; Stop 97
tatctgggagaagatgatgccagct

SEQ ID NO: 71906 - DNA, 25 bp, Artificial
  probe
  misc_feature (1)..(25): SEQ ID NO: 7449; WAN024B4G_s_at; Start 68; Stop 92
tacagtatctgggagaagatgatgc

SEQ ID NO: 71907 - DNA, 25 bp, Artificial
  probe
  misc_feature (1)..(25): SEQ ID NO: 7449; WAN024B4G_s_at; Start 21; Stop 45
tgacccacgtatagaggaagagagt

SEQ ID NO: 71908 - DNA, 25 bp, Artificial
  probe
  misc_feature (1)..(25): SEQ ID NO: 7449; WAN024B4G_s_at; Start 70; Stop 94
cagtatctgggagaagatgatgcca

SEQ ID NO: 71909 - DNA, 25 bp, Artificial
  probe
  misc_feature (1)..(25): SEQ ID NO: 7449; WAN024B4G_s_at; Start 42; Stop 66
gagtgaagcactagaaaatatgata

SEQ ID NO: 71910 - DNA, 25 bp, Artificial
  probe
  misc_feature (1)..(25): SEQ ID NO: 7449; WAN024B4G_s_at; Start 5; Stop 29
ccttaaaagatgatgatgacccacg

SEQ ID NO: 71911 - DNA, 25 bp, Artificial
  probe
  misc_feature (1)..(25): SEQ ID NO: 7449; WAN024B4G_s_at; Start 62; Stop 86
tgatattacagtatctgggagaaga

SEQ ID NO: 71912 - DNA, 25 bp, Artificial
  probe
  misc_feature (1)..(25): SEQ ID NO: 7449; WAN024B4G_s_at; Start 34; Stop 58
gaggaagagagtgaagcactagaaa

SEQ ID NO: 71913 - DNA, 25 bp, Artificial
  probe
  misc_feature (1)..(25): SEQ ID NO: 7449; WAN024B4G_s_at; Start 65; Stop 89
tattacagtatctgggagaagatga

SEQ ID NO: 71914 - DNA, 25 bp, Artificial
  probe
  misc_feature (1)..(25): SEQ ID NO: 7449; WAN024B4G_s_at; Start 24; Stop 48
cccacgtatagaggaagagagtgaa

SEQ ID NO: 71915 - DNA, 25 bp, Artificial
  probe
  misc_feature (1)..(25): SEQ ID NO: 7449; WAN024B4G_s_at; Start 72; Stop 96
gtatctgggagaagatgatgccagc

SEQ ID NO: 71916 - DNA, 25 bp, Artificial
  probe
  misc_feature (1)..(25): SEQ ID NO: 7449; WAN024B4G_s_at; Start 18; Stop 42
tgatgacccacgtatagaggaagag

SEQ ID NO: 71917 - DNA, 25 bp, Artificial
  probe
  misc_feature (1)..(25): SEQ ID NO: 7449; WAN024B4G_s_at; Start 28; Stop 52
cgtatagaggaagagagtgaagcac

SEQ ID NO: 71918 - DNA, 25 bp, Artificial
  probe
  misc_feature (1)..(25): SEQ ID NO: 7449; WAN024B4G_s_at; Start 22; Stop 46
gacccacgtatagaggaagagagtg

SEQ ID NO: 71919 - DNA, 25 bp, Artificial
  probe
  misc_feature (1)..(25): SEQ ID NO: 7449; WAN024B4G_s_at; Start 10; Stop 34
aaagatgatgatgacccacgtatag

SEQ ID NO: 71920 - DNA, 25 bp, Artificial
  probe
  misc_feature (1)..(25): SEQ ID NO: 7449; WAN024B4G_s_at; Start 37; Stop 61
gaagagagtgaagcactagaaaata

SEQ ID NO: 71921 - DNA, 25 bp, Artificial
  probe
  misc_feature (1)..(25): SEQ ID NO: 7449; WAN024B4G_s_at; Start 32; Stop 56
tagaggaagagagtgaagcactaga

SEQ ID NO: 71922 - DNA, 25 bp, Artificial
  probe
  misc_feature (1)..(25): SEQ ID NO: 7449; WAN024B4G_s_at; Start 2; Stop 26
tgaccttaaaagatgatgatgaccc

SEQ ID NO: 71923 - DNA, 25 bp, Artificial
  probe
  misc_feature (1)..(25): SEQ ID NO: 7449; WAN024B4G_s_at; Start 12; Stop 36
agatgatgatgacccacgtatagag

SEQ ID NO: 71924 - DNA, 25 bp, Artificial
  probe
  misc_feature (1)..(25): SEQ ID NO: 7449; WAN024B4G_s_at; Start 8; Stop 32
taaaagatgatgatgacccacgtat

SEQ ID NO: 71925 - DNA, 25 bp, Artificial
  probe
  misc_feature (1)..(25): SEQ ID NO: 7449; WAN024B4G_s_at; Start 29; Stop 53
gtatagaggaagagagtgaagcact

SEQ ID NO: 71926 - DNA, 25 bp, Artificial
  probe
  misc_feature (1)..(25): SEQ ID NO: 7449; WAN024B4G_s_at; Start 40; Stop 64
gagagtgaagcactagaaaatatga

SEQ ID NO: 71927 - DNA, 25 bp, Artificial
  probe
  misc_feature (1)..(25): SEQ ID NO: 7449; WAN024B4G_s_at; Start 55; Stop 79
gaaaatatgatattacagtatctgg

SEQ ID NO: 71928 - DNA, 25 bp, Artificial
  probe
  misc_feature (1)..(25): SEQ ID NO: 1815; WAN024B4H_at; Start 272; Stop 296
taaggtcaaataaagagaaatcgga

SEQ ID NO: 71929 - DNA, 25 bp, Artificial
  probe
  misc_feature (1)..(25): SEQ ID NO: 1815; WAN024B4H_at; Start 242; Stop 266
ttcctctatacgtgggtcatcatca

SEQ ID NO: 71930 - DNA, 25 bp, Artificial
  probe
  misc_feature (1)..(25): SEQ ID NO: 1815; WAN024B4H_at; Start 229; Stop 253
gtgcttcactctcttcctctatacg

SEQ ID NO: 71931 - DNA, 25 bp, Artificial
  probe
  misc_feature (1)..(25): SEQ ID NO: 1815; WAN024B4H_at; Start 188; Stop 212
ggcatcatcttctcccagatactgt

SEQ ID NO: 71932 - DNA, 25 bp, Artificial
  probe
  misc_feature (1)..(25): SEQ ID NO: 1815; WAN024B4H_at; Start 144; Stop 168
gaaaatccgcaaacatttcttgaaa

SEQ ID NO: 71933 - DNA, 25 bp, Artificial
  probe
  misc_feature (1)..(25): SEQ ID NO: 1815; WAN024B4H_at; Start 85; Stop 109
tccttgcgaatccaatacgatagag

SEQ ID NO: 71934 - DNA, 25 bp, Artificial
  probe
  misc_feature (1)..(25): SEQ ID NO: 1815; WAN024B4H_at; Start 141; Stop 165
tctgaaaatccgcaaacatttcttg

SEQ ID NO: 71935 - DNA, 25 bp, Artificial
  probe
  misc_feature (1)..(25): SEQ ID NO: 1815; WAN024B4H_at; Start 95; Stop 119
tccaatacgatagaggtagcagttc

SEQ ID NO: 71936 - DNA, 25 bp, Artificial
  probe
  misc_feature (1)..(25): SEQ ID NO: 1815; WAN024B4H_at; Start 236; Stop 260
actctcttcctctatacgtgggtca

SEQ ID NO: 71937 - DNA, 25 bp, Artificial
  probe
  misc_feature (1)..(25): SEQ ID NO: 1815; WAN024B4H_at; Start 167; Stop 191
aaaataactttcgtattagctggca

SEQ ID NO: 71938 - DNA, 25 bp, Artificial
  probe
  misc_feature (1)..(25): SEQ ID NO: 1815; WAN024B4H_at; Start 120; Stop 144
ccccaatcagaacataatagttctg

SEQ ID NO: 71939 - DNA, 25 bp, Artificial
  probe
  misc_feature (1)..(25): SEQ ID NO: 1815; WAN024B4H_at; Start 178; Stop 202
cgtattagctggcatcatcttctcc

SEQ ID NO: 71940 - DNA, 25 bp, Artificial
  probe
  misc_feature (1)..(25): SEQ ID NO: 1815; WAN024B4H_at; Start 277; Stop 301
tcaaataaagagaaatcggatctac

SEQ ID NO: 71941 - DNA, 25 bp, Artificial
  probe
  misc_feature (1)..(25): SEQ ID NO: 1815; WAN024B4H_at; Start 198; Stop 222
tctcccagatactgtaatatcatat

SEQ ID NO: 71942 - DNA, 25 bp, Artificial
  probe
  misc_feature (1)..(25): SEQ ID NO: 1815; WAN024B4H_at; Start 68; Stop 92
gttgtgcgacttttaaatccttgcg

SEQ ID NO: 71943 - DNA, 25 bp, Artificial
  probe
  misc_feature (1)..(25): SEQ ID NO: 1815; WAN024B4H_at; Start 286; Stop 310
gagaaatcggatctacaaattgttt

SEQ ID NO: 71944 - DNA, 25 bp, Artificial
  probe
  misc_feature (1)..(25): SEQ ID NO: 1815; WAN024B4H_at; Start 89; Stop 113
tgcgaatccaatacgatagaggtag

SEQ ID NO: 71945 - DNA, 25 bp, Artificial
  probe
  misc_feature (1)..(25): SEQ ID NO: 1815; WAN024B4H_at; Start 171; Stop 195
taactttcgtattagctggcatcat

SEQ ID NO: 71946 - DNA, 25 bp, Artificial
  probe
  misc_feature (1)..(25): SEQ ID NO: 1815; WAN024B4H_at; Start 98; Stop 122
aatacgatagaggtagcagttcccc

SEQ ID NO: 71947 - DNA, 25 bp, Artificial
  probe
  misc_feature (1)..(25): SEQ ID NO: 1815; WAN024B4H_at; Start 75; Stop 99
gacttttaaatccttgcgaatccaa

SEQ ID NO: 71948 - DNA, 25 bp, Artificial
  probe
  misc_feature (1)..(25): SEQ ID NO: 1815; WAN024B4H_at; Start 39; Stop 63
catcaatgatgaccatatcataatc

SEQ ID NO: 71949 - DNA, 25 bp, Artificial
  probe
  misc_feature (1)..(25): SEQ ID NO: 1815; WAN024B4H_at; Start 2; Stop 26
tgattcaaggtagtataaaattcct

SEQ ID NO: 71950 - DNA, 25 bp, Artificial
  probe
  misc_feature (1)..(25): SEQ ID NO: 1815; WAN024B4H_at; Start 213; Stop 237
aatatcatattttctagtgcttcac

SEQ ID NO: 71951 - DNA, 25 bp, Artificial
  probe
  misc_feature (1)..(25): SEQ ID NO: 1815; WAN024B4H_at; Start 27; Stop 51
tattttttacttcatcaatgatgac

SEQ ID NO: 71952 - DNA, 25 bp, Artificial
  probe
  misc_feature (1)..(25): SEQ ID NO: 1815; WAN024B4H_at; Start 252; Stop 276
cgtgggtcatcatcatcttttaagg

SEQ ID NO: 71953 - DNA, 25 bp, Artificial
  probe
  misc_feature (1)..(25): SEQ ID NO: 1815; WAN024B4H_at; Start 245; Stop 269
ctctatacgtgggtcatcatcatct

SEQ ID NO: 71954 - DNA, 25 bp, Artificial
  probe
  misc_feature (1)..(25): SEQ ID NO: 1815; WAN024B4H_at; Start 293; Stop 317
cggatctacaaattgtttatcatga

SEQ ID NO: 71955 - DNA, 25 bp, Artificial
  probe
  misc_feature (1)..(25): SEQ ID NO: 1815; WAN024B4H_at; Start 183; Stop 207
tagctggcatcatcttctcccagat

SEQ ID NO: 71956 - DNA, 25 bp, Artificial
  probe
  misc_feature (1)..(25): SEQ ID NO: 1815; WAN024B4H_at; Start 255; Stop 279
gggtcatcatcatcttttaaggtca

SEQ ID NO: 71957 - DNA, 25 bp, Artificial
  probe
  misc_feature (1)..(25): SEQ ID NO: 1815; WAN024B4H_at; Start 134; Stop 158
taatagttctgaaaatccgcaaaca

SEQ ID NO: 71958 - DNA, 25 bp, Artificial
  probe
  misc_feature (1)..(25): SEQ ID NO: 1815; WAN024B4H_at; Start 259; Stop 283
catcatcatcttttaaggtcaaata

SEQ ID NO: 71959 - DNA, 25 bp, Artificial
  probe
  misc_feature (1)..(25): SEQ ID NO: 1815; WAN024B4H_at; Start 92; Stop 116
gaatccaatacgatagaggtagcag

SEQ ID NO: 71960 - DNA, 25 bp, Artificial
  probe
  misc_feature (1)..(25): SEQ ID NO: 1815; WAN024B4H_at; Start 52; Stop 76
catatcataatcttttgttgtgcga

SEQ ID NO: 71961 - DNA, 25 bp, Artificial
  probe
  misc_feature (1)..(25): SEQ ID NO: 1815; WAN024B4H_at; Start 107; Stop 131
gaggtagcagttcccccaatcagaa

SEQ ID NO: 71962 - DNA, 25 bp, Artificial
  probe
  misc_feature (1)..(25): SEQ ID NO: 2069; WAN024B4I_at; Start 11; Stop 35
tatggaaatatcgtccttttgtatc

SEQ ID NO: 71963 - DNA, 25 bp, Artificial
  probe
  misc_feature (1)..(25): SEQ ID NO: 2069; WAN024B4I_at; Start 12; Stop 36
atggaaatatcgtccttttgtatct

SEQ ID NO: 71964 - DNA, 25 bp, Artificial
  probe
  misc_feature (1)..(25): SEQ ID NO: 2069; WAN024B4I_at; Start 59; Stop 83
ataatcatgataaacaatttgtaga

SEQ ID NO: 71965 - DNA, 25 bp, Artificial
  probe
  misc_feature (1)..(25): SEQ ID NO: 2069; WAN024B4I_at; Start 20; Stop 44
atcgtccttttgtatctgagttttg

SEQ ID NO: 71966 - DNA, 25 bp, Artificial
  probe
  misc_feature (1)..(25): SEQ ID NO: 2069; WAN024B4I_at; Start 5; Stop 29
tagagatatggaaatatcgtccttt

SEQ ID NO: 71967 - DNA, 25 bp, Artificial
  probe
  misc_feature (1)..(25): SEQ ID NO: 2069; WAN024B4I_at; Start 17; Stop 41
aatatcgtccttttgtatctgagtt

SEQ ID NO: 71968 - DNA, 25 bp, Artificial
  probe
  misc_feature (1)..(25): SEQ ID NO: 2069; WAN024B4I_at; Start 28; Stop 52
tttgtatctgagttttggaatgatt

SEQ ID NO: 71969 - DNA, 25 bp, Artificial
  probe
  misc_feature (1)..(25): SEQ ID NO: 2069; WAN024B4I_at; Start 19; Stop 43
tatcgtccttttgtatctgagtttt

SEQ ID NO: 71970 - DNA, 25 bp, Artificial
  probe
  misc_feature (1)..(25): SEQ ID NO: 2069; WAN024B4I_at; Start 23; Stop 47
gtccttttgtatctgagttttggaa

SEQ ID NO: 71971 - DNA, 25 bp, Artificial
  probe
  misc_feature (1)..(25): SEQ ID NO: 2069; WAN024B4I_at; Start 30; Stop 54
tgtatctgagttttggaatgatttt

SEQ ID NO: 71972 - DNA, 25 bp, Artificial
  probe
  misc_feature (1)..(25): SEQ ID NO: 2069; WAN024B4I_at; Start 18; Stop 42
atatcgtccttttgtatctgagttt

SEQ ID NO: 71973 - DNA, 25 bp, Artificial
  probe
  misc_feature (1)..(25): SEQ ID NO: 2069; WAN024B4I_at; Start 8; Stop 32
agatatggaaatatcgtccttttgt

SEQ ID NO: 71974 - DNA, 25 bp, Artificial
  probe
  misc_feature (1)..(25): SEQ ID NO: 2069; WAN024B4I_at; Start 3; Stop 27
gctagagatatggaaatatcgtcct

SEQ ID NO: 71975 - DNA, 25 bp, Artificial
  probe
  misc_feature (1)..(25): SEQ ID NO: 2069; WAN024B4I_at; Start 60; Stop 84
taatcatgataaacaatttgtagat

SEQ ID NO: 71976 - DNA, 25 bp, Artificial
  probe
  misc_feature (1)..(25): SEQ ID NO: 2069; WAN024B4I_at; Start 14; Stop 38
ggaaatatcgtccttttgtatctga

SEQ ID NO: 71977 - DNA, 25 bp, Artificial
  probe
  misc_feature (1)..(25): SEQ ID NO: 2069; WAN024B4I_at; Start 13; Stop 37
tggaaatatcgtccttttgtatctg

SEQ ID NO: 71978 - DNA, 25 bp, Artificial
  probe
  misc_feature (1)..(25): SEQ ID NO: 2069; WAN024B4I_at; Start 2; Stop 26
tgctagagatatggaaatatcgtcc

SEQ ID NO: 71979 - DNA, 25 bp, Artificial
  probe
  misc_feature (1)..(25): SEQ ID NO: 2069; WAN024B4I_at; Start 27; Stop 51
ttttgtatctgagttttggaatgat

SEQ ID NO: 71980 - DNA, 25 bp, Artificial
  probe
  misc_feature (1)..(25): SEQ ID NO: 2069; WAN024B4I_at; Start 16; Stop 40
aaatatcgtccttttgtatctgagt

SEQ ID NO: 71981 - DNA, 25 bp, Artificial
  probe
  misc_feature (1)..(25): SEQ ID NO: 2069; WAN024B4I_at; Start 32; Stop 56
tatctgagttttggaatgattttaa

SEQ ID NO: 71982 - DNA, 25 bp, Artificial
  probe
  misc_feature (1)..(25): SEQ ID NO: 2069; WAN024B4I_at; Start 7; Stop 31
gagatatggaaatatcgtccttttg

SEQ ID NO: 71983 - DNA, 25 bp, Artificial
  probe
  misc_feature (1)..(25): SEQ ID NO: 2069; WAN024B4I_at; Start 9; Stop 33
gatatggaaatatcgtccttttgta

SEQ ID NO: 71984 - DNA, 25 bp, Artificial
  probe
  misc_feature (1)..(25): SEQ ID NO: 2069; WAN024B4I_at; Start 4; Stop 28
ctagagatatggaaatatcgtcctt

SEQ ID NO: 71985 - DNA, 25 bp, Artificial
  probe
  misc_feature (1)..(25): SEQ ID NO: 2069; WAN024B4I_at; Start 58; Stop 82
aataatcatgataaacaatttgtag

SEQ ID NO: 71986 - DNA, 25 bp, Artificial
  probe
  misc_feature (1)..(25): SEQ ID NO: 2069; WAN024B4I_at; Start 34; Stop 58
tctgagttttggaatgattttaaaa

SEQ ID NO: 71987 - DNA, 25 bp, Artificial
  probe
  misc_feature (1)..(25): SEQ ID NO: 2069; WAN024B4I_at; Start 33; Stop 57
atctgagttttggaatgattttaaa

SEQ ID NO: 71988 - DNA, 25 bp, Artificial
  probe
  misc_feature (1)..(25): SEQ ID NO: 2069; WAN024B4I_at; Start 26; Stop 50
cttttgtatctgagttttggaatga

SEQ ID NO: 71989 - DNA, 25 bp, Artificial
  probe
  misc_feature (1)..(25): SEQ ID NO: 2069; WAN024B4I_at; Start 6; Stop 30
agagatatggaaatatcgtcctttt

SEQ ID NO: 71990 - DNA, 25 bp, Artificial
  probe
  misc_feature (1)..(25): SEQ ID NO: 2069; WAN024B4I_at; Start 24; Stop 48
tccttttgtatctgagttttggaat

SEQ ID NO: 71991 - DNA, 25 bp, Artificial
  probe
  misc_feature (1)..(25): SEQ ID NO: 2069; WAN024B4I_at; Start 15; Stop 39
gaaatatcgtccttttgtatctgag

SEQ ID NO: 71992 - DNA, 25 bp, Artificial
  probe
  misc_feature (1)..(25): SEQ ID NO: 2069; WAN024B4I_at; Start 21; Stop 45
tcgtccttttgtatctgagttttgg

SEQ ID NO: 71993 - DNA, 25 bp, Artificial
  probe
  misc_feature (1)..(25): SEQ ID NO: 2069; WAN024B4I_at; Start 44; Stop 68
ggaatgattttaaaaataatcatga

SEQ ID NO: 71994 - DNA, 25 bp, Artificial
  probe
  misc_feature (1)..(25): SEQ ID NO: 2069; WAN024B4I_at; Start 22; Stop 46
cgtccttttgtatctgagttttgga

SEQ ID NO: 71995 - DNA, 25 bp, Artificial
  probe
  misc_feature (1)..(25): SEQ ID NO: 2069; WAN024B4I_at; Start 25; Stop 49
ccttttgtatctgagttttggaatg

SEQ ID NO: 71996 - DNA, 25 bp, Artificial
  probe
  misc_feature (1)..(25): SEQ ID NO: 1606; WAN024B4J_at; Start 52; Stop 76
tcaccgcctgatatcacagaagcag

SEQ ID NO: 71997 - DNA, 25 bp, Artificial
  probe
  misc_feature (1)..(25): SEQ ID NO: 1606; WAN024B4J_at; Start 1044; Stop 1068
tgcaagtaatgttcactacaaaccg

SEQ ID NO: 71998 - DNA, 25 bp, Artificial
  probe
  misc_feature (1)..(25): SEQ ID NO: 1606; WAN024B4J_at; Start 198; Stop 222
tgcgacagccgctctggagttgatt

SEQ ID NO: 71999 - DNA, 25 bp, Artificial
  probe
  misc_feature (1)..(25): SEQ ID NO: 1606; WAN024B4J_at; Start 1077; Stop 1101
cttgacagcctataagaatcttgga

SEQ ID NO: 72000 - DNA, 25 bp, Artificial
  probe
  misc_feature (1)..(25): SEQ ID NO: 1606; WAN024B4J_at; Start 806; Stop 830
tgaccgatatcatggcttcacttgg

SEQ ID NO: 72001 - DNA, 25 bp, Artificial
  probe
  misc_feature (1)..(25): SEQ ID NO: 1606; WAN024B4J_at; Start 372; Stop 396
tgagcaagctatcactgagaaaact

SEQ ID NO: 72002 - DNA, 25 bp, Artificial
  probe
  misc_feature (1)..(25): SEQ ID NO: 1606; WAN024B4J_at; Start 442; Stop 466
gaccgtttgttccaagtcgtggaga

SEQ ID NO: 72003 - DNA, 25 bp, Artificial
  probe
  misc_feature (1)..(25): SEQ ID NO: 1606; WAN024B4J_at; Start 336; Stop 360
ccaagcagatacgtttgagatggac

SEQ ID NO: 72004 - DNA, 25 bp, Artificial
  probe
  misc_feature (1)..(25): SEQ ID NO: 1606; WAN024B4J_at; Start 669; Stop 693
tccagtgattgatgacgaagagatg

SEQ ID NO: 72005 - DNA, 25 bp, Artificial
  probe
  misc_feature (1)..(25): SEQ ID NO: 1606; WAN024B4J_at; Start 1016; Stop 1040
tcatccaagaattggctaaagcagg

SEQ ID NO: 72006 - DNA, 25 bp, Artificial
  probe
  misc_feature (1)..(25): SEQ ID NO: 1606; WAN024B4J_at; Start 129; Stop 153
taaaacaaaagaactggagcgccgc

SEQ ID NO: 72007 - DNA, 25 bp, Artificial
  probe
  misc_feature (1)..(25): SEQ ID NO: 1606; WAN024B4J_at; Start 628; Stop 652
tttacaacggcagaaggtggaagtg

SEQ ID NO: 72008 - DNA, 25 bp, Artificial
  probe
  misc_feature (1)..(25): SEQ ID NO: 1606; WAN024B4J_at; Start 869; Stop 893
gccgtaaggacattgtggaccgcta

SEQ ID NO: 72009 - DNA, 25 bp, Artificial
  probe
  misc_feature (1)..(25): SEQ ID NO: 1606; WAN024B4J_at; Start 310; Stop 334
ggagcaacccctgtcatggtggata

SEQ ID NO: 72010 - DNA, 25 bp, Artificial
  probe
  misc_feature (1)..(25): SEQ ID NO: 1606; WAN024B4J_at; Start 144; Stop 168
ggagcgccgcttgtctctttacaca

SEQ ID NO: 72011 - DNA, 25 bp, Artificial
  probe
  misc_feature (1)..(25): SEQ ID NO: 1606; WAN024B4J_at; Start 1107; Stop 1131
tatgacgaactatcctaaggcctat

SEQ ID NO: 72012 - DNA, 25 bp, Artificial
  probe
  misc_feature (1)..(25): SEQ ID NO: 1606; WAN024B4J_at; Start 854; Stop 878
caagtttgttgcaacgccgtaagga

SEQ ID NO: 72013 - DNA, 25 bp, Artificial
  probe
  misc_feature (1)..(25): SEQ ID NO: 1606; WAN024B4J_at; Start 895; Stop 919
gatagtggttttgcaggttctcgca

SEQ ID NO: 72014 - DNA, 25 bp, Artificial
  probe
  misc_feature (1)..(25): SEQ ID NO: 1606; WAN024B4J_at; Start 422; Stop 446
cagggattgtttgcgattatgaccg

SEQ ID NO: 72015 - DNA, 25 bp, Artificial
  probe
  misc_feature (1)..(25): SEQ ID NO: 1606; WAN024B4J_at; Start 647; Stop 671
gaagtgcgacttggaaagccaatcc

SEQ ID NO: 72016 - DNA, 25 bp, Artificial
  probe
  misc_feature (1)..(25): SEQ ID NO: 1606; WAN024B4J_at; Start 279; Stop 303
tacggcttcatgtagtgtcattacg

SEQ ID NO: 72017 - DNA, 25 bp, Artificial
  probe
  misc_feature (1)..(25): SEQ ID NO: 1606; WAN024B4J_at; Start 727; Stop 751
caaactaaggatgctcttgccaaga

SEQ ID NO: 72018 - DNA, 25 bp, Artificial
  probe
  misc_feature (1)..(25): SEQ ID NO: 1606; WAN024B4J_at; Start 294; Stop 318
tgtcattacgcacgtgggagcaacc

SEQ ID NO: 72019 - DNA, 25 bp, Artificial
  probe
  misc_feature (1)..(25): SEQ ID NO: 1606; WAN024B4J_at; Start 250; Stop 274
gatgaagtcatcgttccagccatga

SEQ ID NO: 72020 - DNA, 25 bp, Artificial
  probe
  misc_feature (1)..(25): SEQ ID NO: 1606; WAN024B4J_at; Start 470; Stop 494
aacgtgacttctttaccgcttcaag

SEQ ID NO: 72021 - DNA, 25 bp, Artificial
  probe
  misc_feature (1)..(25): SEQ ID NO: 1606; WAN024B4J_at; Start 96; Stop 120
taccctgcgttctggttggatcaca

SEQ ID NO: 72022 - DNA, 25 bp, Artificial
  probe
  misc_feature (1)..(25): SEQ ID NO: 1606; WAN024B4J_at; Start 928; Stop 952
ttggcacacaagactgaaactgtcg

SEQ ID NO: 72023 - DNA, 25 bp, Artificial
  probe
  misc_feature (1)..(25): SEQ ID NO: 1606; WAN024B4J_at; Start 180; Stop 204
gactgtttgtctcaactctgcgaca

SEQ ID NO: 72024 - DNA, 25 bp, Artificial
  probe
  misc_feature (1)..(25): SEQ ID NO: 1606; WAN024B4J_at; Start 824; Stop 848
cacttggtttggtacaattggaccg

SEQ ID NO: 72025 - DNA, 25 bp, Artificial
  probe
  misc_feature (1)..(25): SEQ ID NO: 1606; WAN024B4J_at; Start 788; Stop 812
cagcctataagtgcaacatgaccga

SEQ ID NO: 72026 - DNA, 25 bp, Artificial
  probe
  misc_feature (1)..(25): SEQ ID NO: 1606; WAN024B4J_at; Start 943; Stop 967
gaaactgtcgaatcttcacgccacc

SEQ ID NO: 72027 - DNA, 25 bp, Artificial
  probe
  misc_feature (1)..(25): SEQ ID NO: 1606; WAN024B4J_at; Start 354; Stop 378
gatggactatgacctgcttgagcaa

SEQ ID NO: 72028 - DNA, 25 bp, Artificial
  probe
  misc_feature (1)..(25): SEQ ID NO: 1606; WAN024B4J_at; Start 569; Stop 593
gacaaccttctggttctatcgctga

SEQ ID NO: 72029 - DNA, 25 bp, Artificial
  probe
  misc_feature (1)..(25): SEQ ID NO: 1606; WAN024B4J_at; Start 769; Stop 793
gaatacgatatcgttacaccagcct

SEQ ID NO: 72030 - DNA, 25 bp, Artificial
  probe
  misc_feature (1)..(25): SEQ ID NO: 6817; WAN024B4K_at; Start 211; Stop 235
gacttgcaggcaggatcgtacttga

SEQ ID NO: 72031 - DNA, 25 bp, Artificial
  probe
  misc_feature (1)..(25): SEQ ID NO: 6817; WAN024B4K_at; Start 365; Stop 389
tcgtgtctatttcggttaatgatca

SEQ ID NO: 72032 - DNA, 25 bp, Artificial
  probe
  misc_feature (1)..(25): SEQ ID NO: 6817; WAN024B4K_at; Start 213; Stop 237
cttgcaggcaggatcgtacttgact

SEQ ID NO: 72033 - DNA, 25 bp, Artificial
  probe
  misc_feature (1)..(25): SEQ ID NO: 6817; WAN024B4K_at; Start 492; Stop 516
ggcaagaccagcgatatcaccgtct

SEQ ID NO: 72034 - DNA, 25 bp, Artificial
  probe
  misc_feature (1)..(25): SEQ ID NO: 6817; WAN024B4K_at; Start 598; Stop 622
cttttggacacacgagtgaaacgtc

SEQ ID NO: 72035 - DNA, 25 bp, Artificial
  probe
  misc_feature (1)..(25): SEQ ID NO: 6817; WAN024B4K_at; Start 351; Stop 375
agttgatacccgtatcgtgtctatt

SEQ ID NO: 72036 - DNA, 25 bp, Artificial
  probe
  misc_feature (1)..(25): SEQ ID NO: 6817; WAN024B4K_at; Start 355; Stop 379
gatacccgtatcgtgtctatttcgg

SEQ ID NO: 72037 - DNA, 25 bp, Artificial
  probe
  misc_feature (1)..(25): SEQ ID NO: 6817; WAN024B4K_at; Start 227; Stop 251
cgtacttgactaaagactatcgtga

SEQ ID NO: 72038 - DNA, 25 bp, Artificial
  probe
  misc_feature (1)..(25): SEQ ID NO: 6817; WAN024B4K_at; Start 372; Stop 396
tatttcggttaatgatcaagttcct

SEQ ID NO: 72039 - DNA, 25 bp, Artificial
  probe
  misc_feature (1)..(25): SEQ ID NO: 6817; WAN024B4K_at; Start 599; Stop 623
ttttggacacacgagtgaaacgtcc

SEQ ID NO: 72040 - DNA, 25 bp, Artificial
  probe
  misc_feature (1)..(25): SEQ ID NO: 6817; WAN024B4K_at; Start 496; Stop 520
agaccagcgatatcaccgtcttcgc

SEQ ID NO: 72041 - DNA, 25 bp, Artificial
  probe
  misc_feature (1)..(25): SEQ ID NO: 6817; WAN024B4K_at; Start 226; Stop 250
tcgtacttgactaaagactatcgtg

SEQ ID NO: 72042 - DNA, 25 bp, Artificial
  probe
  misc_feature (1)..(25): SEQ ID NO: 6817; WAN024B4K_at; Start 219; Stop 243
ggcaggatcgtacttgactaaagac

SEQ ID NO: 72043 - DNA, 25 bp, Artificial
  probe
  misc_feature (1)..(25): SEQ ID NO: 6817; WAN024B4K_at; Start 487; Stop 511
gaggaggcaagaccagcgatatcac

SEQ ID NO: 72044 - DNA, 25 bp, Artificial
  probe
  misc_feature (1)..(25): SEQ ID NO: 6817; WAN024B4K_at; Start 490; Stop 514
gaggcaagaccagcgatatcaccgt

SEQ ID NO: 72045 - DNA, 25 bp, Artificial
  probe
  misc_feature (1)..(25): SEQ ID NO: 6817; WAN024B4K_at; Start 361; Stop 385
cgtatcgtgtctatttcggttaatg

SEQ ID NO: 72046 - DNA, 25 bp, Artificial
  probe
  misc_feature (1)..(25): SEQ ID NO: 6817; WAN024B4K_at; Start 221; Stop 245
caggatcgtacttgactaaagacta

SEQ ID NO: 72047 - DNA, 25 bp, Artificial
  probe
  misc_feature (1)..(25): SEQ ID NO: 6817; WAN024B4K_at; Start 572; Stop 596
taaatgttacagttcttcttcttga

SEQ ID NO: 72048 - DNA, 25 bp, Artificial
  probe
  misc_feature (1)..(25): SEQ ID NO: 6817; WAN024B4K_at; Start 215; Stop 239
tgcaggcaggatcgtacttgactaa

SEQ ID NO: 72049 - DNA, 25 bp, Artificial
  probe
  misc_feature (1)..(25): SEQ ID NO: 6817; WAN024B4K_at; Start 493; Stop 517
gcaagaccagcgatatcaccgtctt

SEQ ID NO: 72050 - DNA, 25 bp, Artificial
  probe
  misc_feature (1)..(25): SEQ ID NO: 6817; WAN024B4K_at; Start 602; Stop 626
tggacacacgagtgaaacgtccgga

SEQ ID NO: 72051 - DNA, 25 bp, Artificial
  probe
  misc_feature (1)..(25): SEQ ID NO: 6817; WAN024B4K_at; Start 217; Stop 241
caggcaggatcgtacttgactaaag

SEQ ID NO: 72052 - DNA, 25 bp, Artificial
  probe
  misc_feature (1)..(25): SEQ ID NO: 6817; WAN024B4K_at; Start 603; Stop 627
ggacacacgagtgaaacgtccggaa

SEQ ID NO: 72053 - DNA, 25 bp, Artificial
  probe
  misc_feature (1)..(25): SEQ ID NO: 6817; WAN024B4K_at; Start 547; Stop 571
ggttttttggtaggattgattgtca

SEQ ID NO: 72054 - DNA, 25 bp, Artificial
  probe
  misc_feature (1)..(25): SEQ ID NO: 6817; WAN024B4K_at; Start 216; Stop 240
gcaggcaggatcgtacttgactaaa

SEQ ID NO: 72055 - DNA, 25 bp, Artificial
  probe
  misc_feature (1)..(25): SEQ ID NO: 6817; WAN024B4K_at; Start 595; Stop 619
gaacttttggacacacgagtgaaac

SEQ ID NO: 72056 - DNA, 25 bp, Artificial
  probe
  misc_feature (1)..(25): SEQ ID NO: 6817; WAN024B4K_at; Start 564; Stop 588
gattgtcataaatgttacagttctt

SEQ ID NO: 72057 - DNA, 25 bp, Artificial
  probe
  misc_feature (1)..(25): SEQ ID NO: 6817; WAN024B4K_at; Start 212; Stop 236
acttgcaggcaggatcgtacttgac

SEQ ID NO: 72058 - DNA, 25 bp, Artificial
  probe
  misc_feature (1)..(25): SEQ ID NO: 6817; WAN024B4K_at; Start 594; Stop 618
tgaacttttggacacacgagtgaaa

SEQ ID NO: 72059 - DNA, 25 bp, Artificial
  probe
  misc_feature (1)..(25): SEQ ID NO: 6817; WAN024B4K_at; Start 224; Stop 248
gatcgtacttgactaaagactatcg

SEQ ID NO: 72060 - DNA, 25 bp, Artificial
  probe
  misc_feature (1)..(25): SEQ ID NO: 6817; WAN024B4K_at; Start 354; Stop 378
tgatacccgtatcgtgtctatttcg

SEQ ID NO: 72061 - DNA, 25 bp, Artificial
  probe
  misc_feature (1)..(25): SEQ ID NO: 6817; WAN024B4K_at; Start 371; Stop 395
ctatttcggttaatgatcaagttcc

SEQ ID NO: 72062 - DNA, 25 bp, Artificial
  probe
  misc_feature (1)..(25): SEQ ID NO: 6817; WAN024B4K_at; Start 488; Stop 512
aggaggcaagaccagcgatatcacc

SEQ ID NO: 72063 - DNA, 25 bp, Artificial
  probe
  misc_feature (1)..(25): SEQ ID NO: 6817; WAN024B4K_at; Start 559; Stop 583
ggattgattgtcataaatgttacag

SEQ ID NO: 72064 - DNA, 25 bp, Artificial
  probe
  misc_feature (1)..(25): SEQ ID NO: 1736; WAN024B4L_at; Start 656; Stop 680
cacttctaggagtcgttccagattt

SEQ ID NO: 72065 - DNA, 25 bp, Artificial
  probe
  misc_feature (1)..(25): SEQ ID NO: 1736; WAN024B4L_at; Start 653; Stop 677
tgccacttctaggagtcgttccaga

SEQ ID NO: 72066 - DNA, 25 bp, Artificial
  probe
  misc_feature (1)..(25): SEQ ID NO: 1736; WAN024B4L_at; Start 197; Stop 221
cgggactgacgaatcaggacttgca

SEQ ID NO: 72067 - DNA, 25 bp, Artificial
  probe
  misc_feature (1)..(25): SEQ ID NO: 1736; WAN024B4L_at; Start 654; Stop 678
gccacttctaggagtcgttccagat

SEQ ID NO: 72068 - DNA, 25 bp, Artificial
  probe
  misc_feature (1)..(25): SEQ ID NO: 1736; WAN024B4L_at; Start 198; Stop 222
gggactgacgaatcaggacttgcag

SEQ ID NO: 72069 - DNA, 25 bp, Artificial
  probe
  misc_feature (1)..(25): SEQ ID NO: 1736; WAN024B4L_at; Start 655; Stop 679
ccacttctaggagtcgttccagatt

SEQ ID NO: 72070 - DNA, 25 bp, Artificial
  probe
  misc_feature (1)..(25): SEQ ID NO: 2739; WAN024B4M_s_at; Start 114; Stop 138
ctacagtacttttgttatcaaacct

SEQ ID NO: 72071 - DNA, 25 bp, Artificial
  probe
  misc_feature (1)..(25): SEQ ID NO: 2739; WAN024B4M_s_at; Start 124; Stop 148
tttgttatcaaacctgagtttacta

SEQ ID NO: 72072 - DNA, 25 bp, Artificial
  probe
  misc_feature (1)..(25): SEQ ID NO: 2739; WAN024B4M_s_at; Start 118; Stop 142
agtacttttgttatcaaacctgagt

SEQ ID NO: 72073 - DNA, 25 bp, Artificial
  probe
  misc_feature (1)..(25): SEQ ID NO: 2739; WAN024B4M_s_at; Start 125; Stop 149
ttgttatcaaacctgagtttactag

SEQ ID NO: 72074 - DNA, 25 bp, Artificial
  probe
  misc_feature (1)..(25): SEQ ID NO: 2739; WAN024B4M_s_at; Start 74; Stop 98
ttttattagtggcaattataacttc

SEQ ID NO: 72075 - DNA, 25 bp, Artificial
  probe
  misc_feature (1)..(25): SEQ ID NO: 2739; WAN024B4M_s_at; Start 127; Stop 151
gttatcaaacctgagtttactagta

SEQ ID NO: 72076 - DNA, 25 bp, Artificial
  probe
  misc_feature (1)..(25): SEQ ID NO: 2739; WAN024B4M_s_at; Start 116; Stop 140
acagtacttttgttatcaaacctga

SEQ ID NO: 72077 - DNA, 25 bp, Artificial
  probe
  misc_feature (1)..(25): SEQ ID NO: 2739; WAN024B4M_s_at; Start 126; Stop 150
tgttatcaaacctgagtttactagt

SEQ ID NO: 72078 - DNA, 25 bp, Artificial
  probe
  misc_feature (1)..(25): SEQ ID NO: 2739; WAN024B4M_s_at; Start 76; Stop 100
ttattagtggcaattataacttctt

SEQ ID NO: 72079 - DNA, 25 bp, Artificial
  probe
  misc_feature (1)..(25): SEQ ID NO: 2739; WAN024B4M_s_at; Start 115; Stop 139
tacagtacttttgttatcaaacctg

SEQ ID NO: 72080 - DNA, 25 bp, Artificial
  probe
  misc_feature (1)..(25): SEQ ID NO: 2739; WAN024B4M_s_at; Start 117; Stop 141
cagtacttttgttatcaaacctgag

SEQ ID NO: 72081 - DNA, 25 bp, Artificial
  probe
  misc_feature (1)..(25): SEQ ID NO: 2739; WAN024B4M_s_at; Start 75; Stop 99
tttattagtggcaattataacttct

SEQ ID NO: 72082 - DNA, 25 bp, Artificial
  probe
  misc_feature (1)..(25): SEQ ID NO: 1733; WAN024B4N_s_at; Start 360; Stop 384
cactcgtatcgtctcaatctctgtc

SEQ ID NO: 72083 - DNA, 25 bp, Artificial
  probe
  misc_feature (1)..(25): SEQ ID NO: 1733; WAN024B4N_s_at; Start 359; Stop 383
acactcgtatcgtctcaatctctgt

SEQ ID NO: 72084 - DNA, 25 bp, Artificial
  probe
  misc_feature (1)..(25): SEQ ID NO: 1733; WAN024B4N_s_at; Start 358; Stop 382
gacactcgtatcgtctcaatctctg

SEQ ID NO: 72085 - DNA, 25 bp, Artificial
  probe
  misc_feature (1)..(25): SEQ ID NO: 4875; WAN024B4O_at; Start 73; Stop 97
aggatttgcctagggagttggacca

SEQ ID NO: 72086 - DNA, 25 bp, Artificial
  probe
  misc_feature (1)..(25): SEQ ID NO: 4875; WAN024B4O_at; Start 40; Stop 64
aaggaatccttggtcccatccattg

SEQ ID NO: 72087 - DNA, 25 bp, Artificial
  probe
  misc_feature (1)..(25): SEQ ID NO: 4875; WAN024B4O_at; Start 91; Stop 115
tggaccactggcatacaaattgagc

SEQ ID NO: 72088 - DNA, 25 bp, Artificial
  probe
  misc_feature (1)..(25): SEQ ID NO: 4875; WAN024B4O_at; Start 178; Stop 202
gtttctccattatactatttctccc

SEQ ID NO: 72089 - DNA, 25 bp, Artificial
  probe
  misc_feature (1)..(25): SEQ ID NO: 4875; WAN024B4O_at; Start 31; Stop 55
tcagtagaaaaggaatccttggtcc

SEQ ID NO: 72090 - DNA, 25 bp, Artificial
  probe
  misc_feature (1)..(25): SEQ ID NO: 4875; WAN024B4O_at; Start 163; Stop 187
caccaccttatctatgtttctccat

SEQ ID NO: 72091 - DNA, 25 bp, Artificial
  probe
  misc_feature (1)..(25): SEQ ID NO: 4875; WAN024B4O_at; Start 42; Stop 66
ggaatccttggtcccatccattgtt

SEQ ID NO: 72092 - DNA, 25 bp, Artificial
  probe
  misc_feature (1)..(25): SEQ ID NO: 4875; WAN024B4O_at; Start 75; Stop 99
gatttgcctagggagttggaccact

SEQ ID NO: 72093 - DNA, 25 bp, Artificial
  probe
  misc_feature (1)..(25): SEQ ID NO: 4875; WAN024B4O_at; Start 149; Stop 173
tgtcatcttttcctcaccaccttat

SEQ ID NO: 72094 - DNA, 25 bp, Artificial
  probe
  misc_feature (1)..(25): SEQ ID NO: 4875; WAN024B4O_at; Start 4; Stop 28
aaaagactccttccaaggcttgaag

SEQ ID NO: 72095 - DNA, 25 bp, Artificial
  probe
  misc_feature (1)..(25): SEQ ID NO: 4875; WAN024B4O_at; Start 50; Stop 74
tggtcccatccattgttcttgaaag

SEQ ID NO: 72096 - DNA, 25 bp, Artificial
  probe
  misc_feature (1)..(25): SEQ ID NO: 4875; WAN024B4O_at; Start 93; Stop 117
gaccactggcatacaaattgagcgt

SEQ ID NO: 72097 - DNA, 25 bp, Artificial
  probe
  misc_feature (1)..(25): SEQ ID NO: 4875; WAN024B4O_at; Start 131; Stop 155
cttttcttcaaaacgaattgtcatc

SEQ ID NO: 72098 - DNA, 25 bp, Artificial
  probe
  misc_feature (1)..(25): SEQ ID NO: 4875; WAN024B4O_at; Start 95; Stop 119
ccactggcatacaaattgagcgttt

SEQ ID NO: 72099 - DNA, 25 bp, Artificial
  probe
  misc_feature (1)..(25): SEQ ID NO: 4875; WAN024B4O_at; Start 99; Stop 123
tggcatacaaattgagcgttttctg

SEQ ID NO: 72100 - DNA, 25 bp, Artificial
  probe
  misc_feature (1)..(25): SEQ ID NO: 4875; WAN024B4O_at; Start 87; Stop 111
gagttggaccactggcatacaaatt

SEQ ID NO: 72101 - DNA, 25 bp, Artificial
  probe
  misc_feature (1)..(25): SEQ ID NO: 4875; WAN024B4O_at; Start 122; Stop 146
tgtgctcaccttttcttcaaaacga

SEQ ID NO: 72102 - DNA, 25 bp, Artificial
  probe
  misc_feature (1)..(25): SEQ ID NO: 4875; WAN024B4O_at; Start 112; Stop 136
gagcgttttctgtgctcaccttttc

SEQ ID NO: 72103 - DNA, 25 bp, Artificial
  probe
  misc_feature (1)..(25): SEQ ID NO: 4875; WAN024B4O_at; Start 197; Stop 221
tctcccattttttacgaatagataa

SEQ ID NO: 72104 - DNA, 25 bp, Artificial
  probe
  misc_feature (1)..(25): SEQ ID NO: 4875; WAN024B4O_at; Start 58; Stop 82
tccattgttcttgaaaggatttgcc

SEQ ID NO: 72105 - DNA, 25 bp, Artificial
  probe
  misc_feature (1)..(25): SEQ ID NO: 4875; WAN024B4O_at; Start 207; Stop 231
tttacgaatagataagtatgattga

SEQ ID NO: 72106 - DNA, 25 bp, Artificial
  probe
  misc_feature (1)..(25): SEQ ID NO: 4875; WAN024B4O_at; Start 81; Stop 105
cctagggagttggaccactggcata

SEQ ID NO: 72107 - DNA, 25 bp, Artificial
  probe
  misc_feature (1)..(25): SEQ ID NO: 4875; WAN024B4O_at; Start 1; Stop 25
ttgaaaagactccttccaaggcttg

SEQ ID NO: 72108 - DNA, 25 bp, Artificial
  probe
  misc_feature (1)..(25): SEQ ID NO: 4875; WAN024B4O_at; Start 52; Stop 76
gtcccatccattgttcttgaaagga

SEQ ID NO: 72109 - DNA, 25 bp, Artificial
  probe
  misc_feature (1)..(25): SEQ ID NO: 4875; WAN024B4O_at; Start 145; Stop 169
gaattgtcatcttttcctcaccacc

SEQ ID NO: 72110 - DNA, 25 bp, Artificial
  probe
  misc_feature (1)..(25): SEQ ID NO: 4875; WAN024B4O_at; Start 107; Stop 131
aaattgagcgttttctgtgctcacc

SEQ ID NO: 72111 - DNA, 25 bp, Artificial
  probe
  misc_feature (1)..(25): SEQ ID NO: 4875; WAN024B4O_at; Start 83; Stop 107
tagggagttggaccactggcataca

SEQ ID NO: 72112 - DNA, 25 bp, Artificial
  probe
  misc_feature (1)..(25): SEQ ID NO: 4875; WAN024B4O_at; Start 154; Stop 178
tcttttcctcaccaccttatctatg

SEQ ID NO: 72113 - DNA, 25 bp, Artificial
  probe
  misc_feature (1)..(25): SEQ ID NO: 4875; WAN024B4O_at; Start 66; Stop 90
tcttgaaaggatttgcctagggagt

SEQ ID NO: 72114 - DNA, 25 bp, Artificial
  probe
  misc_feature (1)..(25): SEQ ID NO: 4875; WAN024B4O_at; Start 77; Stop 101
tttgcctagggagttggaccactgg

SEQ ID NO: 72115 - DNA, 25 bp, Artificial
  probe
  misc_feature (1)..(25): SEQ ID NO: 4875; WAN024B4O_at; Start 63; Stop 87
tgttcttgaaaggatttgcctaggg

SEQ ID NO: 72116 - DNA, 25 bp, Artificial
  probe
  misc_feature (1)..(25): SEQ ID NO: 4875; WAN024B4O_at; Start 102; Stop 126
catacaaattgagcgttttctgtgc

SEQ ID NO: 72117 - DNA, 25 bp, Artificial
  probe
  misc_feature (1)..(25): SEQ ID NO: 4875; WAN024B4O_at; Start 37; Stop 61
gaaaaggaatccttggtcccatcca

SEQ ID NO: 72118 - DNA, 25 bp, Artificial
  probe
  misc_feature (1)..(25): SEQ ID NO: 4875; WAN024B4O_at; Start 85; Stop 109
gggagttggaccactggcatacaaa

SEQ ID NO: 72119 - DNA, 25 bp, Artificial
  probe
  misc_feature (1)..(25): SEQ ID NO: 6796; WAN024B4P_at; Start 71; Stop 95
aactgccagagatcgctcttgcagg

SEQ ID NO: 72120 - DNA, 25 bp, Artificial
  probe
  misc_feature (1)..(25): SEQ ID NO: 6796; WAN024B4P_at; Start 498; Stop 522
ctttgacccaagtgacgactttatc

SEQ ID NO: 72121 - DNA, 25 bp, Artificial
  probe
  misc_feature (1)..(25): SEQ ID NO: 6796; WAN024B4P_at; Start 506; Stop 530
caagtgacgactttatcctcttttc

SEQ ID NO: 72122 - DNA, 25 bp, Artificial
  probe
  misc_feature (1)..(25): SEQ ID NO: 6796; WAN024B4P_at; Start 150; Stop 174
tctggctcgtacgtcagggaaaccc

SEQ ID NO: 72123 - DNA, 25 bp, Artificial
  probe
  misc_feature (1)..(25): SEQ ID NO: 6796; WAN024B4P_at; Start 408; Stop 432
gattccggttattatcgttgcgacc

SEQ ID NO: 72124 - DNA, 25 bp, Artificial
  probe
  misc_feature (1)..(25): SEQ ID NO: 6796; WAN024B4P_at; Start 75; Stop 99
gccagagatcgctcttgcagggcgt

SEQ ID NO: 72125 - DNA, 25 bp, Artificial
  probe
  misc_feature (1)..(25): SEQ ID NO: 6796; WAN024B4P_at; Start 238; Stop 262
ggttatggttatgcccgtgtttcca

SEQ ID NO: 72126 - DNA, 25 bp, Artificial
  probe
  misc_feature (1)..(25): SEQ ID NO: 6796; WAN024B4P_at; Start 125; Stop 149
tcaataccatgctgaaccgtaagaa

SEQ ID NO: 72127 - DNA, 25 bp, Artificial
  probe
  misc_feature (1)..(25): SEQ ID NO: 6796; WAN024B4P_at; Start 417; Stop 441
tattatcgttgcgaccaaggcggac

SEQ ID NO: 72128 - DNA, 25 bp, Artificial
  probe
  misc_feature (1)..(25): SEQ ID NO: 6796; WAN024B4P_at; Start 138; Stop 162
gaaccgtaagaatctggctcgtacg

SEQ ID NO: 72129 - DNA, 25 bp, Artificial
  probe
  misc_feature (1)..(25): SEQ ID NO: 6796; WAN024B4P_at; Start 79; Stop 103
gagatcgctcttgcagggcgttcaa

SEQ ID NO: 72130 - DNA, 25 bp, Artificial
  probe
  misc_feature (1)..(25): SEQ ID NO: 6796; WAN024B4P_at; Start 141; Stop 165
ccgtaagaatctggctcgtacgtca

SEQ ID NO: 72131 - DNA, 25 bp, Artificial
  probe
  misc_feature (1)..(25): SEQ ID NO: 6796; WAN024B4P_at; Start 127; Stop 151
aataccatgctgaaccgtaagaatc

SEQ ID NO: 72132 - DNA, 25 bp, Artificial
  probe
  misc_feature (1)..(25): SEQ ID NO: 6796; WAN024B4P_at; Start 400; Stop 424
tattatgagattccggttattatcg

SEQ ID NO: 72133 - DNA, 25 bp, Artificial
  probe
  misc_feature (1)..(25): SEQ ID NO: 6796; WAN024B4P_at; Start 406; Stop 430
gagattccggttattatcgttgcga

SEQ ID NO: 72134 - DNA, 25 bp, Artificial
  probe
  misc_feature (1)..(25): SEQ ID NO: 6796; WAN024B4P_at; Start 77; Stop 101
cagagatcgctcttgcagggcgttc

SEQ ID NO: 72135 - DNA, 25 bp, Artificial
  probe
  misc_feature (1)..(25): SEQ ID NO: 6796; WAN024B4P_at; Start 181; Stop 205
acccagcttctcaacttctttaaca

SEQ ID NO: 72136 - DNA, 25 bp, Artificial
  probe
  misc_feature (1)..(25): SEQ ID NO: 6796; WAN024B4P_at; Start 241; Stop 265
tatggttatgcccgtgtttccaaaa

SEQ ID NO: 72137 - DNA, 25 bp, Artificial
  probe
  misc_feature (1)..(25): SEQ ID NO: 6796; WAN024B4P_at; Start 103; Stop 127
aatgttggcaagtctagctttatca

SEQ ID NO: 72138 - DNA, 25 bp, Artificial
  probe
  misc_feature (1)..(25): SEQ ID NO: 6796; WAN024B4P_at; Start 414; Stop 438
ggttattatcgttgcgaccaaggcg

SEQ ID NO: 72139 - DNA, 25 bp, Artificial
  probe
  misc_feature (1)..(25): SEQ ID NO: 6796; WAN024B4P_at; Start 96; Stop 120
gcgttcaaatgttggcaagtctagc

SEQ ID NO: 72140 - DNA, 25 bp, Artificial
  probe
  misc_feature (1)..(25): SEQ ID NO: 6796; WAN024B4P_at; Start 109; Stop 133
ggcaagtctagctttatcaatacca

SEQ ID NO: 72141 - DNA, 25 bp, Artificial
  probe
  misc_feature (1)..(25): SEQ ID NO: 6796; WAN024B4P_at; Start 69; Stop 93
tgaactgccagagatcgctcttgca

SEQ ID NO: 72142 - DNA, 25 bp, Artificial
  probe
  misc_feature (1)..(25): SEQ ID NO: 6796; WAN024B4P_at; Start 112; Stop 136
aagtctagctttatcaataccatgc

SEQ ID NO: 72143 - DNA, 25 bp, Artificial
  probe
  misc_feature (1)..(25): SEQ ID NO: 6796; WAN024B4P_at; Start 97; Stop 121
cgttcaaatgttggcaagtctagct

SEQ ID NO: 72144 - DNA, 25 bp, Artificial
  probe
  misc_feature (1)..(25): SEQ ID NO: 6796; WAN024B4P_at; Start 411; Stop 435
tccggttattatcgttgcgaccaag

SEQ ID NO: 72145 - DNA, 25 bp, Artificial
  probe
  misc_feature (1)..(25): SEQ ID NO: 6796; WAN024B4P_at; Start 81; Stop 105
gatcgctcttgcagggcgttcaaat

SEQ ID NO: 72146 - DNA, 25 bp, Artificial
  probe
  misc_feature (1)..(25): SEQ ID NO: 6796; WAN024B4P_at; Start 119; Stop 143
gctttatcaataccatgctgaaccg

SEQ ID NO: 72147 - DNA, 25 bp, Artificial
  probe
  misc_feature (1)..(25): SEQ ID NO: 6796; WAN024B4P_at; Start 502; Stop 526
gacccaagtgacgactttatcctct

SEQ ID NO: 72148 - DNA, 25 bp, Artificial
  probe
  misc_feature (1)..(25): SEQ ID NO: 6796; WAN024B4P_at; Start 144; Stop 168
taagaatctggctcgtacgtcaggg

SEQ ID NO: 72149 - DNA, 25 bp, Artificial
  probe
  misc_feature (1)..(25): SEQ ID NO: 6796; WAN024B4P_at; Start 151; Stop 175
ctggctcgtacgtcagggaaacccg

SEQ ID NO: 72150 - DNA, 25 bp, Artificial
  probe
  misc_feature (1)..(25): SEQ ID NO: 6796; WAN024B4P_at; Start 192; Stop 216
caacttctttaacattgacgacaag

SEQ ID NO: 72151 - DNA, 25 bp, Artificial
  probe
  misc_feature (1)..(25): SEQ ID NO: 6796; WAN024B4P_at; Start 123; Stop 147
tatcaataccatgctgaaccgtaag

SEQ ID NO: 72152 - DNA, 25 bp, Artificial
  probe
  misc_feature (1)..(25): SEQ ID NO: 6796; WAN024B4P_at; Start 147; Stop 171
gaatctggctcgtacgtcagggaaa

SEQ ID NO: 72153 - DNA, 25 bp, Artificial
  probe
  misc_feature (1)..(25): SEQ ID NO: 3945; WAN024B4Q_at; Start 87; Stop 111
gattgccctagcagggcgttcaaat

SEQ ID NO: 72154 - DNA, 25 bp, Artificial
  probe
  misc_feature (1)..(25): SEQ ID NO: 3945; WAN024B4Q_at; Start 77; Stop 101
aactgccagagattgccctagcagg

SEQ ID NO: 72155 - DNA, 25 bp, Artificial
  probe
  misc_feature (1)..(25): SEQ ID NO: 3945; WAN024B4Q_at; Start 83; Stop 107
cagagattgccctagcagggcgttc

SEQ ID NO: 72156 - DNA, 25 bp, Artificial
  probe
  misc_feature (1)..(25): SEQ ID NO: 3945; WAN024B4Q_at; Start 188; Stop 212
cccagctcctgaacttttttaacat

SEQ ID NO: 72157 - DNA, 25 bp, Artificial
  probe
  misc_feature (1)..(25): SEQ ID NO: 3945; WAN024B4Q_at; Start 190; Stop 214
cagctcctgaacttttttaacattg

SEQ ID NO: 72158 - DNA, 25 bp, Artificial
  probe
  misc_feature (1)..(25): SEQ ID NO: 3945; WAN024B4Q_at; Start 107; Stop 131
caaatgttggtaaatccagctttat

SEQ ID NO: 72159 - DNA, 25 bp, Artificial
  probe
  misc_feature (1)..(25): SEQ ID NO: 3945; WAN024B4Q_at; Start 104; Stop 128
gttcaaatgttggtaaatccagctt

SEQ ID NO: 72160 - DNA, 25 bp, Artificial
  probe
  misc_feature (1)..(25): SEQ ID NO: 3945; WAN024B4Q_at; Start 120; Stop 144
atccagctttatcaacactatgttg

SEQ ID NO: 72161 - DNA, 25 bp, Artificial
  probe
  misc_feature (1)..(25): SEQ ID NO: 3945; WAN024B4Q_at; Start 195; Stop 219
cctgaacttttttaacattgatgac

SEQ ID NO: 72162 - DNA, 25 bp, Artificial
  probe
  misc_feature (1)..(25): SEQ ID NO: 3945; WAN024B4Q_at; Start 178; Stop 202
cctggtaaaacccagctcctgaact

SEQ ID NO: 72163 - DNA, 25 bp, Artificial
  probe
  misc_feature (1)..(25): SEQ ID NO: 3945; WAN024B4Q_at; Start 102; Stop 126
gcgttcaaatgttggtaaatccagc

SEQ ID NO: 72164 - DNA, 25 bp, Artificial
  probe
  misc_feature (1)..(25): SEQ ID NO: 3945; WAN024B4Q_at; Start 125; Stop 149
gctttatcaacactatgttgaaccg

SEQ ID NO: 72165 - DNA, 25 bp, Artificial
  probe
  misc_feature (1)..(25): SEQ ID NO: 3945; WAN024B4Q_at; Start 412; Stop 436
gagattccagtcatcattgtggcga

SEQ ID NO: 72166 - DNA, 25 bp, Artificial
  probe
  misc_feature (1)..(25): SEQ ID NO: 3945; WAN024B4Q_at; Start 115; Stop 139
ggtaaatccagctttatcaacacta

SEQ ID NO: 72167 - DNA, 25 bp, Artificial
  probe
  misc_feature (1)..(25): SEQ ID NO: 3945; WAN024B4Q_at; Start 423; Stop 447
catcattgtggcgaccaaggcggac

SEQ ID NO: 72168 - DNA, 25 bp, Artificial
  probe
  misc_feature (1)..(25): SEQ ID NO: 3945; WAN024B4Q_at; Start 82; Stop 106
ccagagattgccctagcagggcgtt

SEQ ID NO: 72169 - DNA, 25 bp, Artificial
  probe
  misc_feature (1)..(25): SEQ ID NO: 3945; WAN024B4Q_at; Start 179; Stop 203
ctggtaaaacccagctcctgaactt

SEQ ID NO: 72170 - DNA, 25 bp, Artificial
  probe
  misc_feature (1)..(25): SEQ ID NO: 3945; WAN024B4Q_at; Start 419; Stop 443
cagtcatcattgtggcgaccaaggc

SEQ ID NO: 72171 - DNA, 25 bp, Artificial
  probe
  misc_feature (1)..(25): SEQ ID NO: 3945; WAN024B4Q_at; Start 133; Stop 157
aacactatgttgaaccgtaagaatc

SEQ ID NO: 72172 - DNA, 25 bp, Artificial
  probe
  misc_feature (1)..(25): SEQ ID NO: 3945; WAN024B4Q_at; Start 417; Stop 441
tccagtcatcattgtggcgaccaag

SEQ ID NO: 72173 - DNA, 25 bp, Artificial
  probe
  misc_feature (1)..(25): SEQ ID NO: 3945; WAN024B4Q_at; Start 129; Stop 153
tatcaacactatgttgaaccgtaag

SEQ ID NO: 72174 - DNA, 25 bp, Artificial
  probe
  misc_feature (1)..(25): SEQ ID NO: 3945; WAN024B4Q_at; Start 132; Stop 156
caacactatgttgaaccgtaagaat

SEQ ID NO: 72175 - DNA, 25 bp, Artificial
  probe
  misc_feature (1)..(25): SEQ ID NO: 3945; WAN024B4Q_at; Start 414; Stop 438
gattccagtcatcattgtggcgacc

SEQ ID NO: 72176 - DNA, 25 bp, Artificial
  probe
  misc_feature (1)..(25): SEQ ID NO: 3945; WAN024B4Q_at; Start 117; Stop 141
taaatccagctttatcaacactatg

SEQ ID NO: 72177 - DNA, 25 bp, Artificial
  probe
  misc_feature (1)..(25): SEQ ID NO: 3945; WAN024B4Q_at; Start 75; Stop 99
tgaactgccagagattgccctagca

SEQ ID NO: 72178 - DNA, 25 bp, Artificial
  probe
  misc_feature (1)..(25): SEQ ID NO: 3945; WAN024B4Q_at; Start 420; Stop 444
agtcatcattgtggcgaccaaggcg

SEQ ID NO: 72179 - DNA, 25 bp, Artificial
  probe
  misc_feature (1)..(25): SEQ ID NO: 3945; WAN024B4Q_at; Start 109; Stop 133
aatgttggtaaatccagctttatca

SEQ ID NO: 72180 - DNA, 25 bp, Artificial
  probe
  misc_feature (1)..(25): SEQ ID NO: 3945; WAN024B4Q_at; Start 198; Stop 222
gaacttttttaacattgatgacaag

SEQ ID NO: 72181 - DNA, 25 bp, Artificial
  probe
  misc_feature (1)..(25): SEQ ID NO: 3945; WAN024B4Q_at; Start 406; Stop 430
tattatgagattccagtcatcattg

SEQ ID NO: 72182 - DNA, 25 bp, Artificial
  probe
  misc_feature (1)..(25): SEQ ID NO: 3945; WAN024B4Q_at; Start 79; Stop 103
ctgccagagattgccctagcagggc

SEQ ID NO: 72183 - DNA, 25 bp, Artificial
  probe
  misc_feature (1)..(25): SEQ ID NO: 3945; WAN024B4Q_at; Start 85; Stop 109
gagattgccctagcagggcgttcaa

SEQ ID NO: 72184 - DNA, 25 bp, Artificial
  probe
  misc_feature (1)..(25): SEQ ID NO: 3945; WAN024B4Q_at; Start 76; Stop 100
gaactgccagagattgccctagcag

SEQ ID NO: 72185 - DNA, 25 bp, Artificial
  probe
  misc_feature (1)..(25): SEQ ID NO: 3945; WAN024B4Q_at; Start 409; Stop 433
tatgagattccagtcatcattgtgg

SEQ ID NO: 72186 - DNA, 25 bp, Artificial
  probe
  misc_feature (1)..(25): SEQ ID NO: 3945; WAN024B4Q_at; Start 411; Stop 435
tgagattccagtcatcattgtggcg

SEQ ID NO: 72187 - DNA, 25 bp, Artificial
  probe
  misc_feature (1)..(25): SEQ ID NO: 3951; WAN024B4R_at; Start 274; Stop 298
gagttgtcttacctccaccagaagg

SEQ ID NO: 72188 - DNA, 25 bp, Artificial
  probe
  misc_feature (1)..(25): SEQ ID NO: 3951; WAN024B4R_at; Start 244; Stop 268
tggtttcaagacctgcaagcatacg

SEQ ID NO: 72189 - DNA, 25 bp, Artificial
  probe
  misc_feature (1)..(25): SEQ ID NO: 3951; WAN024B4R_at; Start 92; Stop 116
catggtcttcacaggcgataaagtc

SEQ ID NO: 72190 - DNA, 25 bp, Artificial
  probe
  misc_feature (1)..(25): SEQ ID NO: 3951; WAN024B4R_at; Start 42; Stop 66
tgttccaagagtccactcgccttct

SEQ ID NO: 72191 - DNA, 25 bp, Artificial
  probe
  misc_feature (1)..(25): SEQ ID NO: 3951; WAN024B4R_at; Start 178; Stop 202
gattgcgcttctgcaattcatccag

SEQ ID NO: 72192 - DNA, 25 bp, Artificial
  probe
  misc_feature (1)..(25): SEQ ID NO: 3951; WAN024B4R_at; Start 108; Stop 132
gataaagtcaaattttccagaactg

SEQ ID NO: 72193 - DNA, 25 bp, Artificial
  probe
  misc_feature (1)..(25): SEQ ID NO: 3951; WAN024B4R_at; Start 227; Stop 251
gatttgccctgaatcaatggtttca

SEQ ID NO: 72194 - DNA, 25 bp, Artificial
  probe
  misc_feature (1)..(25): SEQ ID NO: 3951; WAN024B4R_at; Start 194; Stop 218
ttcatccagctctaaaggttgtcca

SEQ ID NO: 72195 - DNA, 25 bp, Artificial
  probe
  misc_feature (1)..(25): SEQ ID NO: 3951; WAN024B4R_at; Start 32; Stop 56
tagtcctaactgttccaagagtcca

SEQ ID NO: 72196 - DNA, 25 bp, Artificial
  probe
  misc_feature (1)..(25): SEQ ID NO: 3951; WAN024B4R_at; Start 199; Stop 223
ccagctctaaaggttgtccattata

SEQ ID NO: 72197 - DNA, 25 bp, Artificial
  probe
  misc_feature (1)..(25): SEQ ID NO: 3951; WAN024B4R_at; Start 258; Stop 282
gcaagcatacgtaaaagagttgtct

SEQ ID NO: 72198 - DNA, 25 bp, Artificial
  probe
  misc_feature (1)..(25): SEQ ID NO: 3951; WAN024B4R_at; Start 12; Stop 36
taggcctctgcgtgtcctcctagtc

SEQ ID NO: 72199 - DNA, 25 bp, Artificial
  probe
  misc_feature (1)..(25): SEQ ID NO: 3951; WAN024B4R_at; Start 161; Stop 185
gaagacaaatcccagtagattgcgc

SEQ ID NO: 72200 - DNA, 25 bp, Artificial
  probe
  misc_feature (1)..(25): SEQ ID NO: 3951; WAN024B4R_at; Start 253; Stop 277
gacctgcaagcatacgtaaaagagt

SEQ ID NO: 72201 - DNA, 25 bp, Artificial
  probe
  misc_feature (1)..(25): SEQ ID NO: 3951; WAN024B4R_at; Start 139; Stop 163
gaggaaatagttgaaaatcttggaa

SEQ ID NO: 72202 - DNA, 25 bp, Artificial
  probe
  misc_feature (1)..(25): SEQ ID NO: 3951; WAN024B4R_at; Start 37; Stop 61
ctaactgttccaagagtccactcgc

SEQ ID NO: 72203 - DNA, 25 bp, Artificial
  probe
  misc_feature (1)..(25): SEQ ID NO: 3951; WAN024B4R_at; Start 75; Stop 99
tcttcctgcttcattcccatggtct

SEQ ID NO: 72204 - DNA, 25 bp, Artificial
  probe
  misc_feature (1)..(25): SEQ ID NO: 3951; WAN024B4R_at; Start 82; Stop 106
gcttcattcccatggtcttcacagg

SEQ ID NO: 72205 - DNA, 25 bp, Artificial
  probe
  misc_feature (1)..(25): SEQ ID NO: 3951; WAN024B4R_at; Start 101; Stop 125
cacaggcgataaagtcaaattttcc

SEQ ID NO: 72206 - DNA, 25 bp, Artificial
  probe
  misc_feature (1)..(25): SEQ ID NO: 3951; WAN024B4R_at; Start 187; Stop 211
tctgcaattcatccagctctaaagg

SEQ ID NO: 72207 - DNA, 25 bp, Artificial
  probe
  misc_feature (1)..(25): SEQ ID NO: 3951; WAN024B4R_at; Start 20; Stop 44
tgcgtgtcctcctagtcctaactgt

SEQ ID NO: 72208 - DNA, 25 bp, Artificial
  probe
  misc_feature (1)..(25): SEQ ID NO: 3951; WAN024B4R_at; Start 151; Stop 175
gaaaatcttggaagacaaatcccag

SEQ ID NO: 72209 - DNA, 25 bp, Artificial
  probe
  misc_feature (1)..(25): SEQ ID NO: 3951; WAN024B4R_at; Start 85; Stop 109
tcattcccatggtcttcacaggcga

SEQ ID NO: 72210 - DNA, 25 bp, Artificial
  probe
  misc_feature (1)..(25): SEQ ID NO: 3951; WAN024B4R_at; Start 237; Stop 261
gaatcaatggtttcaagacctgcaa

SEQ ID NO: 72211 - DNA, 25 bp, Artificial
  probe
  misc_feature (1)..(25): SEQ ID NO: 3951; WAN024B4R_at; Start 213; Stop 237
tgtccattataaaagatttgccctg

SEQ ID NO: 72212 - DNA, 25 bp, Artificial
  probe
  misc_feature (1)..(25): SEQ ID NO: 3951; WAN024B4R_at; Start 124; Stop 148
ccagaactgatagatgaggaaatag

SEQ ID NO: 72213 - DNA, 25 bp, Artificial
  probe
  misc_feature (1)..(25): SEQ ID NO: 3951; WAN024B4R_at; Start 168; Stop 192
aatcccagtagattgcgcttctgca

SEQ ID NO: 72214 - DNA, 25 bp, Artificial
  probe
  misc_feature (1)..(25): SEQ ID NO: 3951; WAN024B4R_at; Start 2; Stop 26
tgagaaaggataggcctctgcgtgt

SEQ ID NO: 72215 - DNA, 25 bp, Artificial
  probe
  misc_feature (1)..(25): SEQ ID NO: 3951; WAN024B4R_at; Start 283; Stop 307
tacctccaccagaaggtccaacgat

SEQ ID NO: 72216 - DNA, 25 bp, Artificial
  probe
  misc_feature (1)..(25): SEQ ID NO: 3951; WAN024B4R_at; Start 89; Stop 113
tcccatggtcttcacaggcgataaa

SEQ ID NO: 72217 - DNA, 25 bp, Artificial
  probe
  misc_feature (1)..(25): SEQ ID NO: 3951; WAN024B4R_at; Start 6; Stop 30
aaaggataggcctctgcgtgtcctc

SEQ ID NO: 72218 - DNA, 25 bp, Artificial
  probe
  misc_feature (1)..(25): SEQ ID NO: 3951; WAN024B4R_at; Start 278; Stop 302
tgtcttacctccaccagaaggtcca

SEQ ID NO: 72219 - DNA, 25 bp, Artificial
  probe
  misc_feature (1)..(25): SEQ ID NO: 3951; WAN024B4R_at; Start 118; Stop 142
aattttccagaactgatagatgagg

SEQ ID NO: 72220 - DNA, 25 bp, Artificial
  probe
  misc_feature (1)..(25): SEQ ID NO: 3951; WAN024B4R_at; Start 270; Stop 294
aaaagagttgtcttacctccaccag

SEQ ID NO: 72221 - DNA, 25 bp, Artificial
  probe
  misc_feature (1)..(25): SEQ ID NO: 5795; WAN024B4S_at; Start 22; Stop 46
caattatctccactagtttcgctag

SEQ ID NO: 72222 - DNA, 25 bp, Artificial
  probe
  misc_feature (1)..(25): SEQ ID NO: 5795; WAN024B4S_at; Start 226; Stop 250
tgcaagattagcttctccacttcca

SEQ ID NO: 72223 - DNA, 25 bp, Artificial
  probe
  misc_feature (1)..(25): SEQ ID NO: 5795; WAN024B4S_at; Start 174; Stop 198
aaactgcaaatcatgggtaaccaca

SEQ ID NO: 72224 - DNA, 25 bp, Artificial
  probe
  misc_feature (1)..(25): SEQ ID NO: 5795; WAN024B4S_at; Start 86; Stop 110
gactgactaatacaagcatccattt

SEQ ID NO: 72225 - DNA, 25 bp, Artificial
  probe
  misc_feature (1)..(25): SEQ ID NO: 5795; WAN024B4S_at; Start 11; Stop 35
ggtactttgaccaattatctccact

SEQ ID NO: 72226 - DNA, 25 bp, Artificial
  probe
  misc_feature (1)..(25): SEQ ID NO: 5795; WAN024B4S_at; Start 248; Stop 272
ccaaacgtaattctggatccagggc

SEQ ID NO: 72227 - DNA, 25 bp, Artificial
  probe
  misc_feature (1)..(25): SEQ ID NO: 5795; WAN024B4S_at; Start 184; Stop 208
tcatgggtaaccacaatctgggtca

SEQ ID NO: 72228 - DNA, 25 bp, Artificial
  probe
  misc_feature (1)..(25): SEQ ID NO: 5795; WAN024B4S_at; Start 166; Stop 190
ttttcagcaaactgcaaatcatggg

SEQ ID NO: 72229 - DNA, 25 bp, Artificial
  probe
  misc_feature (1)..(25): SEQ ID NO: 5795; WAN024B4S_at; Start 58; Stop 82
caagctactaagaacaaagcagtca

SEQ ID NO: 72230 - DNA, 25 bp, Artificial
  probe
  misc_feature (1)..(25): SEQ ID NO: 5795; WAN024B4S_at; Start 212; Stop 236
caagttccctattttgcaagattag

SEQ ID NO: 72231 - DNA, 25 bp, Artificial
  probe
  misc_feature (1)..(25): SEQ ID NO: 5795; WAN024B4S_at; Start 251; Stop 275
aacgtaattctggatccagggcaga

SEQ ID NO: 72232 - DNA, 25 bp, Artificial
  probe
  misc_feature (1)..(25): SEQ ID NO: 5795; WAN024B4S_at; Start 221; Stop 245
tattttgcaagattagcttctccac

SEQ ID NO: 72233 - DNA, 25 bp, Artificial
  probe
  misc_feature (1)..(25): SEQ ID NO: 5795; WAN024B4S_at; Start 124; Stop 148
tcctcctatttaggttctactttca

SEQ ID NO: 72234 - DNA, 25 bp, Artificial
  probe
  misc_feature (1)..(25): SEQ ID NO: 5795; WAN024B4S_at; Start 80; Stop 104
tcatcagactgactaatacaagcat

SEQ ID NO: 72235 - DNA, 25 bp, Artificial
  probe
  misc_feature (1)..(25): SEQ ID NO: 5795; WAN024B4S_at; Start 257; Stop 281
attctggatccagggcagaagttgg

SEQ ID NO: 72236 - DNA, 25 bp, Artificial
  probe
  misc_feature (1)..(25): SEQ ID NO: 5795; WAN024B4S_at; Start 69; Stop 93
gaacaaagcagtcatcagactgact

SEQ ID NO: 72237 - DNA, 25 bp, Artificial
  probe
  misc_feature (1)..(25): SEQ ID NO: 5795; WAN024B4S_at; Start 157; Stop 181
tctgcgatattttcagcaaactgca

SEQ ID NO: 72238 - DNA, 25 bp, Artificial
  probe
  misc_feature (1)..(25): SEQ ID NO: 5795; WAN024B4S_at; Start 65; Stop 89
ctaagaacaaagcagtcatcagact

SEQ ID NO: 72239 - DNA, 25 bp, Artificial
  probe
  misc_feature (1)..(25): SEQ ID NO: 5795; WAN024B4S_at; Start 170; Stop 194
cagcaaactgcaaatcatgggtaac

SEQ ID NO: 72240 - DNA, 25 bp, Artificial
  probe
  misc_feature (1)..(25): SEQ ID NO: 5795; WAN024B4S_at; Start 2; Stop 26
tgttagactggtactttgaccaatt

SEQ ID NO: 72241 - DNA, 25 bp, Artificial
  probe
  misc_feature (1)..(25): SEQ ID NO: 5795; WAN024B4S_at; Start 191; Stop 215
taaccacaatctgggtcatcccaag

SEQ ID NO: 72242 - DNA, 25 bp, Artificial
  probe
  misc_feature (1)..(25): SEQ ID NO: 5795; WAN024B4S_at; Start 181; Stop 205
aaatcatgggtaaccacaatctggg

SEQ ID NO: 72243 - DNA, 25 bp, Artificial
  probe
  misc_feature (1)..(25): SEQ ID NO: 5795; WAN024B4S_at; Start 113; Stop 137
tcatccatttttcctcctatttagg

SEQ ID NO: 72244 - DNA, 25 bp, Artificial
  probe
  misc_feature (1)..(25): SEQ ID NO: 5795; WAN024B4S_at; Start 35; Stop 59
tagtttcgctagaatttttcccaca

SEQ ID NO: 72245 - DNA, 25 bp, Artificial
  probe
  misc_feature (1)..(25): SEQ ID NO: 5795; WAN024B4S_at; Start 204; Stop 228
ggtcatcccaagttccctattttgc

SEQ ID NO: 72246 - DNA, 25 bp, Artificial
  probe
  misc_feature (1)..(25): SEQ ID NO: 5795; WAN024B4S_at; Start 150; Stop 174
taatacatctgcgatattttcagca

SEQ ID NO: 72247 - DNA, 25 bp, Artificial
  probe
  misc_feature (1)..(25): SEQ ID NO: 5795; WAN024B4S_at; Start 52; Stop 76
ttcccacaagctactaagaacaaag

SEQ ID NO: 72248 - DNA, 25 bp, Artificial
  probe
  misc_feature (1)..(25): SEQ ID NO: 5795; WAN024B4S_at; Start 139; Stop 163
tctactttcaataatacatctgcga

SEQ ID NO: 72249 - DNA, 25 bp, Artificial
  probe
  misc_feature (1)..(25): SEQ ID NO: 5795; WAN024B4S_at; Start 18; Stop 42
tgaccaattatctccactagtttcg

SEQ ID NO: 72250 - DNA, 25 bp, Artificial
  probe
  misc_feature (1)..(25): SEQ ID NO: 5795; WAN024B4S_at; Start 46; Stop 70
gaatttttcccacaagctactaaga

SEQ ID NO: 72251 - DNA, 25 bp, Artificial
  probe
  misc_feature (1)..(25): SEQ ID NO: 5795; WAN024B4S_at; Start 239; Stop 263
tctccacttccaaacgtaattctgg

SEQ ID NO: 72252 - DNA, 25 bp, Artificial
  probe
  misc_feature (1)..(25): SEQ ID NO: 5795; WAN024B4S_at; Start 197; Stop 221
caatctgggtcatcccaagttccct

SEQ ID NO: 72253 - DNA, 25 bp, Artificial
  probe
  misc_feature (1)..(25): SEQ ID NO: 5795; WAN024B4S_at; Start 96; Stop 120
tacaagcatccattttttcatccat

SEQ ID NO: 72254 - DNA, 25 bp, Artificial
  probe
  misc_feature (1)..(25): SEQ ID NO: 5795; WAN024B4S_at; Start 187; Stop 211
tgggtaaccacaatctgggtcatcc

SEQ ID NO: 72255 - DNA, 25 bp, Artificial
  probe
  misc_feature (1)..(25): SEQ ID NO: 4144; WAN024B4T_at; Start 218; Stop 242
tcaatcatggtacctggcaagatgt

SEQ ID NO: 72256 - DNA, 25 bp, Artificial
  probe
  misc_feature (1)..(25): SEQ ID NO: 4144; WAN024B4T_at; Start 212; Stop 236
tagtcctcaatcatggtacctggca

SEQ ID NO: 72257 - DNA, 25 bp, Artificial
  probe
  misc_feature (1)..(25): SEQ ID NO: 4144; WAN024B4T_at; Start 207; Stop 231
ccaagtagtcctcaatcatggtacc

SEQ ID NO: 72258 - DNA, 25 bp, Artificial
  probe
  misc_feature (1)..(25): SEQ ID NO: 4144; WAN024B4T_at; Start 122; Stop 146
tcctctggacgaataacgacctcaa

SEQ ID NO: 72259 - DNA, 25 bp, Artificial
  probe
  misc_feature (1)..(25): SEQ ID NO: 4144; WAN024B4T_at; Start 144; Stop 168
caacaggttcatttggcttcatccc

SEQ ID NO: 72260 - DNA, 25 bp, Artificial
  probe
  misc_feature (1)..(25): SEQ ID NO: 4144; WAN024B4T_at; Start 139; Stop 163
gacctcaacaggttcatttggcttc

SEQ ID NO: 72261 - DNA, 25 bp, Artificial
  probe
  misc_feature (1)..(25): SEQ ID NO: 4144; WAN024B4T_at; Start 65; Stop 89
agctgggtatcgaccttaacttgga

SEQ ID NO: 72262 - DNA, 25 bp, Artificial
  probe
  misc_feature (1)..(25): SEQ ID NO: 4144; WAN024B4T_at; Start 76; Stop 100
gaccttaacttggagcttgccttct

SEQ ID NO: 72263 - DNA, 25 bp, Artificial
  probe
  misc_feature (1)..(25): SEQ ID NO: 4144; WAN024B4T_at; Start 81; Stop 105
taacttggagcttgccttcttcagg

SEQ ID NO: 72264 - DNA, 25 bp, Artificial
  probe
  misc_feature (1)..(25): SEQ ID NO: 4144; WAN024B4T_at; Start 135; Stop 159
taacgacctcaacaggttcatttgg

SEQ ID NO: 72265 - DNA, 25 bp, Artificial
  probe
  misc_feature (1)..(25): SEQ ID NO: 4144; WAN024B4T_at; Start 196; Stop 220
gttaaattcgaccaagtagtcctca

SEQ ID NO: 72266 - DNA, 25 bp, Artificial
  probe
  misc_feature (1)..(25): SEQ ID NO: 4144; WAN024B4T_at; Start 127; Stop 151
tggacgaataacgacctcaacaggt

SEQ ID NO: 72267 - DNA, 25 bp, Artificial
  probe
  misc_feature (1)..(25): SEQ ID NO: 4144; WAN024B4T_at; Start 192; Stop 216
tgccgttaaattcgaccaagtagtc

SEQ ID NO: 72268 - DNA, 25 bp, Artificial
  probe
  misc_feature (1)..(25): SEQ ID NO: 4144; WAN024B4T_at; Start 4; Stop 28
gatcatccattcatttccaagttcg

SEQ ID NO: 72269 - DNA, 25 bp, Artificial
  probe
  misc_feature (1)..(25): SEQ ID NO: 4144; WAN024B4T_at; Start 27; Stop 51
cgtcataggcgataatttcataatg

SEQ ID NO: 72270 - DNA, 25 bp, Artificial
  probe
  misc_feature (1)..(25): SEQ ID NO: 4144; WAN024B4T_at; Start 13; Stop 37
ttcatttccaagttcgtcataggcg

SEQ ID NO: 72271 - DNA, 25 bp, Artificial
  probe
  misc_feature (1)..(25): SEQ ID NO: 4144; WAN024B4T_at; Start 68; Stop 92
tgggtatcgaccttaacttggagct

SEQ ID NO: 72272 - DNA, 25 bp, Artificial
  probe
  misc_feature (1)..(25): SEQ ID NO: 4144; WAN024B4T_at; Start 215; Stop 239
tcctcaatcatggtacctggcaaga

SEQ ID NO: 72273 - DNA, 25 bp, Artificial
  probe
  misc_feature (1)..(25): SEQ ID NO: 4144; WAN024B4T_at; Start 72; Stop 96
tatcgaccttaacttggagcttgcc

SEQ ID NO: 72274 - DNA, 25 bp, Artificial
  probe
  misc_feature (1)..(25): SEQ ID NO: 4144; WAN024B4T_at; Start 109; Stop 133
ggtaatgcgcaagtcctctggacga

SEQ ID NO: 72275 - DNA, 25 bp, Artificial
  probe
  misc_feature (1)..(25): SEQ ID NO: 4144; WAN024B4T_at; Start 152; Stop 176
tcatttggcttcatcccaccatcaa

SEQ ID NO: 72276 - DNA, 25 bp, Artificial
  probe
  misc_feature (1)..(25): SEQ ID NO: 4144; WAN024B4T_at; Start 178; Stop 202
cgcttcaaagcgtttgccgttaaat

SEQ ID NO: 72277 - DNA, 25 bp, Artificial
  probe
  misc_feature (1)..(25): SEQ ID NO: 4144; WAN024B4T_at; Start 96; Stop 120
cttcttcaggaagggtaatgcgcaa

SEQ ID NO: 72278 - DNA, 25 bp, Artificial
  probe
  misc_feature (1)..(25): SEQ ID NO: 4144; WAN024B4T_at; Start 106; Stop 130
aagggtaatgcgcaagtcctctgga

SEQ ID NO: 72279 - DNA, 25 bp, Artificial
  probe
  misc_feature (1)..(25): SEQ ID NO: 4144; WAN024B4T_at; Start 221; Stop 245
atcatggtacctggcaagatgtttg

SEQ ID NO: 72280 - DNA, 25 bp, Artificial
  probe
  misc_feature (1)..(25): SEQ ID NO: 4144; WAN024B4T_at; Start 15; Stop 39
catttccaagttcgtcataggcgat

SEQ ID NO: 72281 - DNA, 25 bp, Artificial
  probe
  misc_feature (1)..(25): SEQ ID NO: 4144; WAN024B4T_at; Start 86; Stop 110
tggagcttgccttcttcaggaaggg

SEQ ID NO: 72282 - DNA, 25 bp, Artificial
  probe
  misc_feature (1)..(25): SEQ ID NO: 4144; WAN024B4T_at; Start 149; Stop 173
ggttcatttggcttcatcccaccat

SEQ ID NO: 72283 - DNA, 25 bp, Artificial
  probe
  misc_feature (1)..(25): SEQ ID NO: 4144; WAN024B4T_at; Start 114; Stop 138
tgcgcaagtcctctggacgaataac

SEQ ID NO: 72284 - DNA, 25 bp, Artificial
  probe
  misc_feature (1)..(25): SEQ ID NO: 4144; WAN024B4T_at; Start 100; Stop 124
ttcaggaagggtaatgcgcaagtcc

SEQ ID NO: 72285 - DNA, 25 bp, Artificial
  probe
  misc_feature (1)..(25): SEQ ID NO: 4144; WAN024B4T_at; Start 168; Stop 192
caccatcaaccgcttcaaagcgttt

SEQ ID NO: 72286 - DNA, 25 bp, Artificial
  probe
  misc_feature (1)..(25): SEQ ID NO: 4144; WAN024B4T_at; Start 203; Stop 227
tcgaccaagtagtcctcaatcatgg

SEQ ID NO: 72287 - DNA, 25 bp, Artificial
  probe
  misc_feature (1)..(25): SEQ ID NO: 4144; WAN024B4T_at; Start 21; Stop 45
caagttcgtcataggcgataatttc

SEQ ID NO: 72288 - DNA, 25 bp, Artificial
  probe
  misc_feature (1)..(25): SEQ ID NO: 4144; WAN024B4T_at; Start 118; Stop 142
caagtcctctggacgaataacgacc

SEQ ID NO: 72289 - DNA, 25 bp, Artificial
  probe
  misc_feature (1)..(25): SEQ ID NO: 5651; WAN024B4U_at; Start 30; Stop 54
cacgctgacgttgtcctccagaaag

SEQ ID NO: 72290 - DNA, 25 bp, Artificial
  probe
  misc_feature (1)..(25): SEQ ID NO: 5651; WAN024B4U_at; Start 196; Stop 220
caaggcataggattggaagacggta

SEQ ID NO: 72291 - DNA, 25 bp, Artificial
  probe
  misc_feature (1)..(25): SEQ ID NO: 5651; WAN024B4U_at; Start 99; Stop 123
tgagaacttccgctacacgctgctc

SEQ ID NO: 72292 - DNA, 25 bp, Artificial
  probe
  misc_feature (1)..(25): SEQ ID NO: 5651; WAN024B4U_at; Start 132; Stop 156
tcttatcaattttacgcaagcgaag

SEQ ID NO: 72293 - DNA, 25 bp, Artificial
  probe
  misc_feature (1)..(25): SEQ ID NO: 5651; WAN024B4U_at; Start 86; Stop 110
aactgaaccatcttgagaacttccg

SEQ ID NO: 72294 - DNA, 25 bp, Artificial
  probe
  misc_feature (1)..(25): SEQ ID NO: 5651; WAN024B4U_at; Start 151; Stop 175
gcgaagtggaaaggcaacattttca

SEQ ID NO: 72295 - DNA, 25 bp, Artificial
  probe
  misc_feature (1)..(25): SEQ ID NO: 5651; WAN024B4U_at; Start 230; Stop 254
cgcttgttggttggaatatcattga

SEQ ID NO: 72296 - DNA, 25 bp, Artificial
  probe
  misc_feature (1)..(25): SEQ ID NO: 5651; WAN024B4U_at; Start 193; Stop 217
gaacaaggcataggattggaagacg

SEQ ID NO: 72297 - DNA, 25 bp, Artificial
  probe
  misc_feature (1)..(25): SEQ ID NO: 5651; WAN024B4U_at; Start 138; Stop 162
caattttacgcaagcgaagtggaaa

SEQ ID NO: 72298 - DNA, 25 bp, Artificial
  probe
  misc_feature (1)..(25): SEQ ID NO: 5651; WAN024B4U_at; Start 41; Stop 65
tgtcctccagaaagtttgcggatgg

SEQ ID NO: 72299 - DNA, 25 bp, Artificial
  probe
  misc_feature (1)..(25): SEQ ID NO: 5651; WAN024B4U_at; Start 19; Stop 43
ggcgatggccacacgctgacgttgt

SEQ ID NO: 72300 - DNA, 25 bp, Artificial
  probe
  misc_feature (1)..(25): SEQ ID NO: 5651; WAN024B4U_at; Start 77; Stop 101
taaccttccaactgaaccatcttga

SEQ ID NO: 72301 - DNA, 25 bp, Artificial
  probe
  misc_feature (1)..(25): SEQ ID NO: 5651; WAN024B4U_at; Start 1; Stop 25
ttggttgatgatagcacgggcgatg

SEQ ID NO: 72302 - DNA, 25 bp, Artificial
  probe
  misc_feature (1)..(25): SEQ ID NO: 5651; WAN024B4U_at; Start 46; Stop 70
tccagaaagtttgcggatggaacgt

SEQ ID NO: 72303 - DNA, 25 bp, Artificial
  probe
  misc_feature (1)..(25): SEQ ID NO: 5651; WAN024B4U_at; Start 90; Stop 114
gaaccatcttgagaacttccgctac

SEQ ID NO: 72304 - DNA, 25 bp, Artificial
  probe
  misc_feature (1)..(25): SEQ ID NO: 5651; WAN024B4U_at; Start 96; Stop 120
tcttgagaacttccgctacacgctg

SEQ ID NO: 72305 - DNA, 25 bp, Artificial
  probe
  misc_feature (1)..(25): SEQ ID NO: 5651; WAN024B4U_at; Start 215; Stop 239
acggtatgtacgtcgcgcttgttgg

SEQ ID NO: 72306 - DNA, 25 bp, Artificial
  probe
  misc_feature (1)..(25): SEQ ID NO: 5651; WAN024B4U_at; Start 178; Stop 202
cacattcatatgtgggaacaaggca

SEQ ID NO: 72307 - DNA, 25 bp, Artificial
  probe
  misc_feature (1)..(25): SEQ ID NO: 5651; WAN024B4U_at; Start 246; Stop 270
tatcattgatacgaacaccgtctag

SEQ ID NO: 72308 - DNA, 25 bp, Artificial
  probe
  misc_feature (1)..(25): SEQ ID NO: 5651; WAN024B4U_at; Start 184; Stop 208
catatgtgggaacaaggcataggat

SEQ ID NO: 72309 - DNA, 25 bp, Artificial
  probe
  misc_feature (1)..(25): SEQ ID NO: 5651; WAN024B4U_at; Start 225; Stop 249
cgtcgcgcttgttggttggaatatc

SEQ ID NO: 72310 - DNA, 25 bp, Artificial
  probe
  misc_feature (1)..(25): SEQ ID NO: 5651; WAN024B4U_at; Start 28; Stop 52
cacacgctgacgttgtcctccagaa

SEQ ID NO: 72311 - DNA, 25 bp, Artificial
  probe
  misc_feature (1)..(25): SEQ ID NO: 5651; WAN024B4U_at; Start 11; Stop 35
atagcacgggcgatggccacacgct

SEQ ID NO: 72312 - DNA, 25 bp, Artificial
  probe
  misc_feature (1)..(25): SEQ ID NO: 5651; WAN024B4U_at; Start 163; Stop 187
ggcaacattttcaaacacattcata

SEQ ID NO: 72313 - DNA, 25 bp, Artificial
  probe
  misc_feature (1)..(25): SEQ ID NO: 5651; WAN024B4U_at; Start 243; Stop 267
gaatatcattgatacgaacaccgtc

SEQ ID NO: 72314 - DNA, 25 bp, Artificial
  probe
  misc_feature (1)..(25): SEQ ID NO: 5651; WAN024B4U_at; Start 36; Stop 60
gacgttgtcctccagaaagtttgcg

SEQ ID NO: 72315 - DNA, 25 bp, Artificial
  probe
  misc_feature (1)..(25): SEQ ID NO: 5651; WAN024B4U_at; Start 221; Stop 245
tgtacgtcgcgcttgttggttggaa

SEQ ID NO: 72316 - DNA, 25 bp, Artificial
  probe
  misc_feature (1)..(25): SEQ ID NO: 5651; WAN024B4U_at; Start 57; Stop 81
tgcggatggaacgtttttcataacc

SEQ ID NO: 72317 - DNA, 25 bp, Artificial
  probe
  misc_feature (1)..(25): SEQ ID NO: 5651; WAN024B4U_at; Start 158; Stop 182
ggaaaggcaacattttcaaacacat

SEQ ID NO: 72318 - DNA, 25 bp, Artificial
  probe
  misc_feature (1)..(25): SEQ ID NO: 5651; WAN024B4U_at; Start 206; Stop 230
gattggaagacggtatgtacgtcgc

SEQ ID NO: 72319 - DNA, 25 bp, Artificial
  probe
  misc_feature (1)..(25): SEQ ID NO: 5651; WAN024B4U_at; Start 147; Stop 171
gcaagcgaagtggaaaggcaacatt

SEQ ID NO: 72320 - DNA, 25 bp, Artificial
  probe
  misc_feature (1)..(25): SEQ ID NO: 5651; WAN024B4U_at; Start 211; Stop 235
gaagacggtatgtacgtcgcgcttg

SEQ ID NO: 72321 - DNA, 25 bp, Artificial
  probe
  misc_feature (1)..(25): SEQ ID NO: 5651; WAN024B4U_at; Start 22; Stop 46
gatggccacacgctgacgttgtcct

SEQ ID NO: 72322 - DNA, 25 bp, Artificial
  probe
  misc_feature (1)..(25): SEQ ID NO: 5651; WAN024B4U_at; Start 144; Stop 168
tacgcaagcgaagtggaaaggcaac

SEQ ID NO: 72323 - DNA, 25 bp, Artificial
  probe
  misc_feature (1)..(25): SEQ ID NO: 713; WAN024B4V_at; Start 1058; Stop 1082
tgcgtctcaatgaaaccgaagaaga

SEQ ID NO: 72324 - DNA, 25 bp, Artificial
  probe
  misc_feature (1)..(25): SEQ ID NO: 713; WAN024B4V_at; Start 683; Stop 707
gaacccctgtggacatctacgatga

SEQ ID NO: 72325 - DNA, 25 bp, Artificial
  probe
  misc_feature (1)..(25): SEQ ID NO: 713; WAN024B4V_at; Start 409; Stop 433
ggttatgaaaaacgttccatccgca

SEQ ID NO: 72326 - DNA, 25 bp, Artificial
  probe
  misc_feature (1)..(25): SEQ ID NO: 713; WAN024B4V_at; Start 251; Stop 275
ccaacaagcgcgacgtacataccgt

SEQ ID NO: 72327 - DNA, 25 bp, Artificial
  probe
  misc_feature (1)..(25): SEQ ID NO: 713; WAN024B4V_at; Start 1073; Stop 1097
ccgaagaagagttcgatgctcgtat

SEQ ID NO: 72328 - DNA, 25 bp, Artificial
  probe
  misc_feature (1)..(25): SEQ ID NO: 713; WAN024B4V_at; Start 825; Stop 849
gatgaagccaaatgaacctgttgag

SEQ ID NO: 72329 - DNA, 25 bp, Artificial
  probe
  misc_feature (1)..(25): SEQ ID NO: 713; WAN024B4V_at; Start 954; Stop 978
cgcctatgacgaacttggaaatgaa

SEQ ID NO: 72330 - DNA, 25 bp, Artificial
  probe
  misc_feature (1)..(25): SEQ ID NO: 713; WAN024B4V_at; Start 671; Stop 695
ttgtccagtctggaacccctgtgga

SEQ ID NO: 72331 - DNA, 25 bp, Artificial
  probe
  misc_feature (1)..(25): SEQ ID NO: 713; WAN024B4V_at; Start 789; Stop 813
atttaacggcaaacgctttgaagcg

SEQ ID NO: 72332 - DNA, 25 bp, Artificial
  probe
  misc_feature (1)..(25): SEQ ID NO: 713; WAN024B4V_at; Start 320; Stop 344
atgttgcctttccacttcgcttgcg

SEQ ID NO: 72333 - DNA, 25 bp, Artificial
  probe
  misc_feature (1)..(25): SEQ ID NO: 713; WAN024B4V_at; Start 521; Stop 545
cagcgctggacttgaaattgagaac

SEQ ID NO: 72334 - DNA, 25 bp, Artificial
  probe
  misc_feature (1)..(25): SEQ ID NO: 713; WAN024B4V_at; Start 370; Stop 394
cagcgtgtagcggaagttctcaaga

SEQ ID NO: 72335 - DNA, 25 bp, Artificial
  probe
  misc_feature (1)..(25): SEQ ID NO: 713; WAN024B4V_at; Start 545; Stop 569
cagacatgcagtacgaattgcgtga

SEQ ID NO: 72336 - DNA, 25 bp, Artificial
  probe
  misc_feature (1)..(25): SEQ ID NO: 713; WAN024B4V_at; Start 490; Stop 514
ccccgtgtggtcttgttggacgagc

SEQ ID NO: 72337 - DNA, 25 bp, Artificial
  probe
  misc_feature (1)..(25): SEQ ID NO: 713; WAN024B4V_at; Start 183; Stop 207
tgcaggtttactggatgcgacgaca

SEQ ID NO: 72338 - DNA, 25 bp, Artificial
  probe
  misc_feature (1)..(25): SEQ ID NO: 713; WAN024B4V_at; Start 846; Stop 870
tgaggtcgttattcgtccagaggac

SEQ ID NO: 72339 - DNA, 25 bp, Artificial
  probe
  misc_feature (1)..(25): SEQ ID NO: 713; WAN024B4V_at; Start 775; Stop 799
gactacttggtcgaatttaacggca

SEQ ID NO: 72340 - DNA, 25 bp, Artificial
  probe
  misc_feature (1)..(25): SEQ ID NO: 713; WAN024B4V_at; Start 198; Stop 222
tgcgacgacaggagatatcatgcta

SEQ ID NO: 72341 - DNA, 25 bp, Artificial
  probe
  misc_feature (1)..(25): SEQ ID NO: 713; WAN024B4V_at; Start 67; Stop 91
tttgaagacagcaacaccaaggttc

SEQ ID NO: 72342 - DNA, 25 bp, Artificial
  probe
  misc_feature (1)..(25): SEQ ID NO: 713; WAN024B4V_at; Start 700; Stop 724
tacgatgagccaatcaaccactttg

SEQ ID NO: 72343 - DNA, 25 bp, Artificial
  probe
  misc_feature (1)..(25): SEQ ID NO: 713; WAN024B4V_at; Start 431; Stop 455
gcaaactttctggaggacaacgtca

SEQ ID NO: 72344 - DNA, 25 bp, Artificial
  probe
  misc_feature (1)..(25): SEQ ID NO: 713; WAN024B4V_at; Start 605; Stop 629
tcactcacgatcaggaagaagctct

SEQ ID NO: 72345 - DNA, 25 bp, Artificial
  probe
  misc_feature (1)..(25): SEQ ID NO: 713; WAN024B4V_at; Start 506; Stop 530
tggacgagcctttatcagcgctgga

SEQ ID NO: 72346 - DNA, 25 bp, Artificial
  probe
  misc_feature (1)..(25): SEQ ID NO: 713; WAN024B4V_at; Start 622; Stop 646
gaagctcttgccatgagtgactgga

SEQ ID NO: 72347 - DNA, 25 bp, Artificial
  probe
  misc_feature (1)..(25): SEQ ID NO: 713; WAN024B4V_at; Start 473; Stop 497
gtgctatcatcaaccaaccccgtgt

SEQ ID NO: 72348 - DNA, 25 bp, Artificial
  probe
  misc_feature (1)..(25): SEQ ID NO: 713; WAN024B4V_at; Start 868; Stop 892
gacttgcgcattacccttcctgaag

SEQ ID NO: 72349 - DNA, 25 bp, Artificial
  probe
  misc_feature (1)..(25): SEQ ID NO: 713; WAN024B4V_at; Start 740; Stop 764
gggagtcaaacatcttgccaggtac

SEQ ID NO: 72350 - DNA, 25 bp, Artificial
  probe
  misc_feature (1)..(25): SEQ ID NO: 713; WAN024B4V_at; Start 211; Stop 235
gatatcatgctagacggtgttcgta

SEQ ID NO: 72351 - DNA, 25 bp, Artificial
  probe
  misc_feature (1)..(25): SEQ ID NO: 713; WAN024B4V_at; Start 980; Stop 1004
ggatgatccactcaacccgtaaggc

SEQ ID NO: 72352 - DNA, 25 bp, Artificial
  probe
  misc_feature (1)..(25): SEQ ID NO: 713; WAN024B4V_at; Start 755; Stop 779
tgccaggtaccatgattgaggacta

SEQ ID NO: 72353 - DNA, 25 bp, Artificial
  probe
  misc_feature (1)..(25): SEQ ID NO: 713; WAN024B4V_at; Start 446; Stop 470
gacaacgtcagcgtgtggccatcgc

SEQ ID NO: 72354 - DNA, 25 bp, Artificial
  probe
  misc_feature (1)..(25): SEQ ID NO: 713; WAN024B4V_at; Start 565; Stop 589
cgtgaattacaacaacgattgggca

SEQ ID NO: 72355 - DNA, 25 bp, Artificial
  probe
  misc_feature (1)..(25): SEQ ID NO: 713; WAN024B4V_at; Start 122; Stop 146
ggaaattctacacccttctaggtgc

SEQ ID NO: 72356 - DNA, 25 bp, Artificial
  probe
  misc_feature (1)..(25): SEQ ID NO: 713; WAN024B4V_at; Start 656; Stop 680
tgaatgatggcgagattgtccagtc

SEQ ID NO: 72357 - DNA, 25 bp, Artificial
  probe
  misc_feature (1)..(25): SEQ ID NO: 5507; WAN024B4W_at; Start 76; Stop 100
ggaacaatagactgcgacactaaaa

SEQ ID NO: 72358 - DNA, 25 bp, Artificial
  probe
  misc_feature (1)..(25): SEQ ID NO: 5507; WAN024B4W_at; Start 133; Stop 157
tataggaggagagccctgaatccta

SEQ ID NO: 72359 - DNA, 25 bp, Artificial
  probe
  misc_feature (1)..(25): SEQ ID NO: 5507; WAN024B4W_at; Start 131; Stop 155
tatataggaggagagccctgaatcc

SEQ ID NO: 72360 - DNA, 25 bp, Artificial
  probe
  misc_feature (1)..(25): SEQ ID NO: 5507; WAN024B4W_at; Start 47; Stop 71
caaaacgacaatattgtggaatctc

SEQ ID NO: 72361 - DNA, 25 bp, Artificial
  probe
  misc_feature (1)..(25): SEQ ID NO: 5507; WAN024B4W_at; Start 124; Stop 148
ctaatagtatataggaggagagccc

SEQ ID NO: 72362 - DNA, 25 bp, Artificial
  probe
  misc_feature (1)..(25): SEQ ID NO: 5507; WAN024B4W_at; Start 58; Stop 82
tattgtggaatctctacaggaacaa

SEQ ID NO: 72363 - DNA, 25 bp, Artificial
  probe
  misc_feature (1)..(25): SEQ ID NO: 5507; WAN024B4W_at; Start 171; Stop 195
gatgcgcttacaaacagagttggaa

SEQ ID NO: 72364 - DNA, 25 bp, Artificial
  probe
  misc_feature (1)..(25): SEQ ID NO: 5507; WAN024B4W_at; Start 216; Stop 240
acgcatgatatcagcccctaacact

SEQ ID NO: 72365 - DNA, 25 bp, Artificial
  probe
  misc_feature (1)..(25): SEQ ID NO: 5507; WAN024B4W_at; Start 211; Stop 235
gaaaaacgcatgatatcagccccta

SEQ ID NO: 72366 - DNA, 25 bp, Artificial
  probe
  misc_feature (1)..(25): SEQ ID NO: 5507; WAN024B4W_at; Start 21; Stop 45
cagaattccatttctctttttagaa

SEQ ID NO: 72367 - DNA, 25 bp, Artificial
  probe
  misc_feature (1)..(25): SEQ ID NO: 5507; WAN024B4W_at; Start 41; Stop 65
tagaatcaaaacgacaatattgtgg

SEQ ID NO: 72368 - DNA, 25 bp, Artificial
  probe
  misc_feature (1)..(25): SEQ ID NO: 5507; WAN024B4W_at; Start 138; Stop 162
gaggagagccctgaatcctagaccc

SEQ ID NO: 72369 - DNA, 25 bp, Artificial
  probe
  misc_feature (1)..(25): SEQ ID NO: 5507; WAN024B4W_at; Start 33; Stop 57
tctctttttagaatcaaaacgacaa

SEQ ID NO: 72370 - DNA, 25 bp, Artificial
  probe
  misc_feature (1)..(25): SEQ ID NO: 5507; WAN024B4W_at; Start 53; Stop 77
gacaatattgtggaatctctacagg

SEQ ID NO: 72371 - DNA, 25 bp, Artificial
  probe
  misc_feature (1)..(25): SEQ ID NO: 5507; WAN024B4W_at; Start 153; Stop 177
tcctagaccctttgttatgatgcgc

SEQ ID NO: 72372 - DNA, 25 bp, Artificial
  probe
  misc_feature (1)..(25): SEQ ID NO: 5507; WAN024B4W_at; Start 141; Stop 165
gagagccctgaatcctagacccttt

SEQ ID NO: 72373 - DNA, 25 bp, Artificial
  probe
  misc_feature (1)..(25): SEQ ID NO: 5507; WAN024B4W_at; Start 147; Stop 171
cctgaatcctagaccctttgttatg

SEQ ID NO: 72374 - DNA, 25 bp, Artificial
  probe
  misc_feature (1)..(25): SEQ ID NO: 5507; WAN024B4W_at; Start 128; Stop 152
tagtatataggaggagagccctgaa

SEQ ID NO: 72375 - DNA, 25 bp, Artificial
  probe
  misc_feature (1)..(25): SEQ ID NO: 5507; WAN024B4W_at; Start 174; Stop 198
gcgcttacaaacagagttggaaaaa

SEQ ID NO: 72376 - DNA, 25 bp, Artificial
  probe
  misc_feature (1)..(25): SEQ ID NO: 5507; WAN024B4W_at; Start 72; Stop 96
tacaggaacaatagactgcgacact

SEQ ID NO: 72377 - DNA, 25 bp, Artificial
  probe
  misc_feature (1)..(25): SEQ ID NO: 5507; WAN024B4W_at; Start 143; Stop 167
gagccctgaatcctagaccctttgt

SEQ ID NO: 72378 - DNA, 25 bp, Artificial
  probe
  misc_feature (1)..(25): SEQ ID NO: 5507; WAN024B4W_at; Start 156; Stop 180
tagaccctttgttatgatgcgctta

SEQ ID NO: 72379 - DNA, 25 bp, Artificial
  probe
  misc_feature (1)..(25): SEQ ID NO: 5507; WAN024B4W_at; Start 61; Stop 85
tgtggaatctctacaggaacaatag

SEQ ID NO: 72380 - DNA, 25 bp, Artificial
  probe
  misc_feature (1)..(25): SEQ ID NO: 5507; WAN024B4W_at; Start 68; Stop 92
tctctacaggaacaatagactgcga

SEQ ID NO: 72381 - DNA, 25 bp, Artificial
  probe
  misc_feature (1)..(25): SEQ ID NO: 5507; WAN024B4W_at; Start 158; Stop 182
gaccctttgttatgatgcgcttaca

SEQ ID NO: 72382 - DNA, 25 bp, Artificial
  probe
  misc_feature (1)..(25): SEQ ID NO: 5507; WAN024B4W_at; Start 145; Stop 169
gccctgaatcctagaccctttgtta

SEQ ID NO: 72383 - DNA, 25 bp, Artificial
  probe
  misc_feature (1)..(25): SEQ ID NO: 5507; WAN024B4W_at; Start 83; Stop 107
tagactgcgacactaaaatatcctc

SEQ ID NO: 72384 - DNA, 25 bp, Artificial
  probe
  misc_feature (1)..(25): SEQ ID NO: 5507; WAN024B4W_at; Start 214; Stop 238
aaacgcatgatatcagcccctaaca

SEQ ID NO: 72385 - DNA, 25 bp, Artificial
  probe
  misc_feature (1)..(25): SEQ ID NO: 5507; WAN024B4W_at; Start 168; Stop 192
tatgatgcgcttacaaacagagttg

SEQ ID NO: 72386 - DNA, 25 bp, Artificial
  probe
  misc_feature (1)..(25): SEQ ID NO: 5507; WAN024B4W_at; Start 126; Stop 150
aatagtatataggaggagagccctg

SEQ ID NO: 72387 - DNA, 25 bp, Artificial
  probe
  misc_feature (1)..(25): SEQ ID NO: 5507; WAN024B4W_at; Start 203; Stop 227
taaaagcagaaaaacgcatgatatc

SEQ ID NO: 72388 - DNA, 25 bp, Artificial
  probe
  misc_feature (1)..(25): SEQ ID NO: 5507; WAN024B4W_at; Start 198; Stop 222
aatcttaaaagcagaaaaacgcatg

SEQ ID NO: 72389 - DNA, 25 bp, Artificial
  probe
  misc_feature (1)..(25): SEQ ID NO: 5507; WAN024B4W_at; Start 208; Stop 232
gcagaaaaacgcatgatatcagccc

SEQ ID NO: 72390 - DNA, 25 bp, Artificial
  probe
  misc_feature (1)..(25): SEQ ID NO: 5507; WAN024B4W_at; Start 65; Stop 89
gaatctctacaggaacaatagactg

SEQ ID NO: 72391 - DNA, 25 bp, Artificial
  probe
  misc_feature (1)..(25): SEQ ID NO: 5482; WAN024B4X_at; Start 32; Stop 56
ttttattgacagtatcaggatatct

SEQ ID NO: 72392 - DNA, 25 bp, Artificial
  probe
  misc_feature (1)..(25): SEQ ID NO: 5482; WAN024B4X_at; Start 42; Stop 66
agtatcaggatatctttttcaaaat

SEQ ID NO: 72393 - DNA, 25 bp, Artificial
  probe
  misc_feature (1)..(25): SEQ ID NO: 5482; WAN024B4X_at; Start 4; Stop 28
gataaggctttaagcctttctaagc

SEQ ID NO: 72394 - DNA, 25 bp, Artificial
  probe
  misc_feature (1)..(25): SEQ ID NO: 5482; WAN024B4X_at; Start 41; Stop 65
cagtatcaggatatctttttcaaaa

SEQ ID NO: 72395 - DNA, 25 bp, Artificial
  probe
  misc_feature (1)..(25): SEQ ID NO: 5482; WAN024B4X_at; Start 135; Stop 159
ttatatagaaagtaagcgcgtcata

SEQ ID NO: 72396 - DNA, 25 bp, Artificial
  probe
  misc_feature (1)..(25): SEQ ID NO: 5482; WAN024B4X_at; Start 132; Stop 156
taattatatagaaagtaagcgcgtc

SEQ ID NO: 72397 - DNA, 25 bp, Artificial
  probe
  misc_feature (1)..(25): SEQ ID NO: 5482; WAN024B4X_at; Start 33; Stop 57
tttattgacagtatcaggatatctt

SEQ ID NO: 72398 - DNA, 25 bp, Artificial
  probe
  misc_feature (1)..(25): SEQ ID NO: 5482; WAN024B4X_at; Start 47; Stop 71
caggatatctttttcaaaattttgg

SEQ ID NO: 72399 - DNA, 25 bp, Artificial
  probe
  misc_feature (1)..(25): SEQ ID NO: 5482; WAN024B4X_at; Start 37; Stop 61
ttgacagtatcaggatatctttttc

SEQ ID NO: 72400 - DNA, 25 bp, Artificial
  probe
  misc_feature (1)..(25): SEQ ID NO: 5482; WAN024B4X_at; Start 110; Stop 134
taggattagtaaatcgtaaatgtaa

SEQ ID NO: 72401 - DNA, 25 bp, Artificial
  probe
  misc_feature (1)..(25): SEQ ID NO: 5482; WAN024B4X_at; Start 113; Stop 137
gattagtaaatcgtaaatgtaatta

SEQ ID NO: 72402 - DNA, 25 bp, Artificial
  probe
  misc_feature (1)..(25): SEQ ID NO: 5482; WAN024B4X_at; Start 102; Stop 126
tctagatttaggattagtaaatcgt

SEQ ID NO: 72403 - DNA, 25 bp, Artificial
  probe
  misc_feature (1)..(25): SEQ ID NO: 5482; WAN024B4X_at; Start 35; Stop 59
tattgacagtatcaggatatctttt

SEQ ID NO: 72404 - DNA, 25 bp, Artificial
  probe
  misc_feature (1)..(25): SEQ ID NO: 5482; WAN024B4X_at; Start 130; Stop 154
tgtaattatatagaaagtaagcgcg

SEQ ID NO: 72405 - DNA, 25 bp, Artificial
  probe
  misc_feature (1)..(25): SEQ ID NO: 5482; WAN024B4X_at; Start 90; Stop 114
tgtttctactaatctagatttagga

SEQ ID NO: 72406 - DNA, 25 bp, Artificial
  probe
  misc_feature (1)..(25): SEQ ID NO: 5482; WAN024B4X_at; Start 71; Stop 95
gtttgttagataatgaaaatgtttc

SEQ ID NO: 72407 - DNA, 25 bp, Artificial
  probe
  misc_feature (1)..(25): SEQ ID NO: 5482; WAN024B4X_at; Start 91; Stop 115
gtttctactaatctagatttaggat

SEQ ID NO: 72408 - DNA, 25 bp, Artificial
  probe
  misc_feature (1)..(25): SEQ ID NO: 5482; WAN024B4X_at; Start 74; Stop 98
tgttagataatgaaaatgtttctac

SEQ ID NO: 72409 - DNA, 25 bp, Artificial
  probe
  misc_feature (1)..(25): SEQ ID NO: 5482; WAN024B4X_at; Start 134; Stop 158
attatatagaaagtaagcgcgtcat

SEQ ID NO: 72410 - DNA, 25 bp, Artificial
  probe
  misc_feature (1)..(25): SEQ ID NO: 5482; WAN024B4X_at; Start 43; Stop 67
gtatcaggatatctttttcaaaatt

SEQ ID NO: 72411 - DNA, 25 bp, Artificial
  probe
  misc_feature (1)..(25): SEQ ID NO: 5482; WAN024B4X_at; Start 88; Stop 112
aatgtttctactaatctagatttag

SEQ ID NO: 72412 - DNA, 25 bp, Artificial
  probe
  misc_feature (1)..(25): SEQ ID NO: 5482; WAN024B4X_at; Start 79; Stop 103
gataatgaaaatgtttctactaatc

SEQ ID NO: 72413 - DNA, 25 bp, Artificial
  probe
  misc_feature (1)..(25): SEQ ID NO: 5482; WAN024B4X_at; Start 5; Stop 29
ataaggctttaagcctttctaagct

SEQ ID NO: 72414 - DNA, 25 bp, Artificial
  probe
  misc_feature (1)..(25): SEQ ID NO: 5482; WAN024B4X_at; Start 19; Stop 43
ctttctaagctttttttattgacag

SEQ ID NO: 72415 - DNA, 25 bp, Artificial
  probe
  misc_feature (1)..(25): SEQ ID NO: 5482; WAN024B4X_at; Start 131; Stop 155
gtaattatatagaaagtaagcgcgt

SEQ ID NO: 72416 - DNA, 25 bp, Artificial
  probe
  misc_feature (1)..(25): SEQ ID NO: 5482; WAN024B4X_at; Start 94; Stop 118
tctactaatctagatttaggattag

SEQ ID NO: 72417 - DNA, 25 bp, Artificial
  probe
  misc_feature (1)..(25): SEQ ID NO: 5482; WAN024B4X_at; Start 83; Stop 107
atgaaaatgtttctactaatctaga

SEQ ID NO: 72418 - DNA, 25 bp, Artificial
  probe
  misc_feature (1)..(25): SEQ ID NO: 5482; WAN024B4X_at; Start 39; Stop 63
gacagtatcaggatatctttttcaa

SEQ ID NO: 72419 - DNA, 25 bp, Artificial
  probe
  misc_feature (1)..(25): SEQ ID NO: 5482; WAN024B4X_at; Start 61; Stop 85
caaaattttggtttgttagataatg

SEQ ID NO: 72420 - DNA, 25 bp, Artificial
  probe
  misc_feature (1)..(25): SEQ ID NO: 5482; WAN024B4X_at; Start 133; Stop 157
aattatatagaaagtaagcgcgtca

SEQ ID NO: 72421 - DNA, 25 bp, Artificial
  probe
  misc_feature (1)..(25): SEQ ID NO: 5482; WAN024B4X_at; Start 31; Stop 55
tttttattgacagtatcaggatatc

SEQ ID NO: 72422 - DNA, 25 bp, Artificial
  probe
  misc_feature (1)..(25): SEQ ID NO: 5482; WAN024B4X_at; Start 2; Stop 26
tggataaggctttaagcctttctaa

SEQ ID NO: 72423 - DNA, 25 bp, Artificial
  probe
  misc_feature (1)..(25): SEQ ID NO: 5482; WAN024B4X_at; Start 38; Stop 62
tgacagtatcaggatatctttttca

SEQ ID NO: 72424 - DNA, 25 bp, Artificial
  probe
  misc_feature (1)..(25): SEQ ID NO: 5482; WAN024B4X_at; Start 136; Stop 160
tatatagaaagtaagcgcgtcataa

SEQ ID NO: 72425 - DNA, 25 bp, Artificial
  probe
  misc_feature (1)..(25): SEQ ID NO: 7400; WAN024B4Z_s_at; Start 87; Stop 111
catatttaagaaagtgatctcggat

SEQ ID NO: 72426 - DNA, 25 bp, Artificial
  probe
  misc_feature (1)..(25): SEQ ID NO: 7400; WAN024B4Z_s_at; Start 80; Stop 104
gctctatcatatttaagaaagtgat

SEQ ID NO: 72427 - DNA, 25 bp, Artificial
  probe
  misc_feature (1)..(25): SEQ ID NO: 7400; WAN024B4Z_s_at; Start 82; Stop 106
tctatcatatttaagaaagtgatct

SEQ ID NO: 72428 - DNA, 25 bp, Artificial
  probe
  misc_feature (1)..(25): SEQ ID NO: 7400; WAN024B4Z_s_at; Start 88; Stop 112
atatttaagaaagtgatctcggatg

SEQ ID NO: 72429 - DNA, 25 bp, Artificial
  probe
  misc_feature (1)..(25): SEQ ID NO: 7400; WAN024B4Z_s_at; Start 76; Stop 100
gacggctctatcatatttaagaaag

SEQ ID NO: 72430 - DNA, 25 bp, Artificial
  probe
  misc_feature (1)..(25): SEQ ID NO: 7400; WAN024B4Z_s_at; Start 86; Stop 110
tcatatttaagaaagtgatctcgga

SEQ ID NO: 72431 - DNA, 25 bp, Artificial
  probe
  misc_feature (1)..(25): SEQ ID NO: 7400; WAN024B4Z_s_at; Start 73; Stop 97
tcggacggctctatcatatttaaga

SEQ ID NO: 72432 - DNA, 25 bp, Artificial
  probe
  misc_feature (1)..(25): SEQ ID NO: 7400; WAN024B4Z_s_at; Start 74; Stop 98
cggacggctctatcatatttaagaa

SEQ ID NO: 72433 - DNA, 25 bp, Artificial
  probe
  misc_feature (1)..(25): SEQ ID NO: 7400; WAN024B4Z_s_at; Start 85; Stop 109
atcatatttaagaaagtgatctcgg

SEQ ID NO: 72434 - DNA, 25 bp, Artificial
  probe
  misc_feature (1)..(25): SEQ ID NO: 7400; WAN024B4Z_s_at; Start 89; Stop 113
tatttaagaaagtgatctcggatga

SEQ ID NO: 72435 - DNA, 25 bp, Artificial
  probe
  misc_feature (1)..(25): SEQ ID NO: 7400; WAN024B4Z_s_at; Start 78; Stop 102
cggctctatcatatttaagaaagtg

SEQ ID NO: 72436 - DNA, 25 bp, Artificial
  probe
  misc_feature (1)..(25): SEQ ID NO: 7400; WAN024B4Z_s_at; Start 79; Stop 103
ggctctatcatatttaagaaagtga

SEQ ID NO: 72437 - DNA, 25 bp, Artificial
  probe
  misc_feature (1)..(25): SEQ ID NO: 7400; WAN024B4Z_s_at; Start 83; Stop 107
ctatcatatttaagaaagtgatctc

SEQ ID NO: 72438 - DNA, 25 bp, Artificial
  probe
  misc_feature (1)..(25): SEQ ID NO: 7400; WAN024B4Z_s_at; Start 84; Stop 108
tatcatatttaagaaagtgatctcg

SEQ ID NO: 72439 - DNA, 25 bp, Artificial
  probe
  misc_feature (1)..(25): SEQ ID NO: 7400; WAN024B4Z_s_at; Start 81; Stop 105
ctctatcatatttaagaaagtgatc

SEQ ID NO: 72440 - DNA, 25 bp, Artificial
  probe
  misc_feature (1)..(25): SEQ ID NO: 7400; WAN024B4Z_s_at; Start 75; Stop 99
ggacggctctatcatatttaagaaa

SEQ ID NO: 72441 - DNA, 25 bp, Artificial
  probe
  misc_feature (1)..(25): SEQ ID NO: 7400; WAN024B4Z_s_at; Start 77; Stop 101
acggctctatcatatttaagaaagt

SEQ ID NO: 72442 - DNA, 25 bp, Artificial
  probe
  misc_feature (1)..(25): SEQ ID NO: 7401; WAN024B52_at; Start 299; Stop 323
cagttgaagttgagatggaaagctg

SEQ ID NO: 72443 - DNA, 25 bp, Artificial
  probe
  misc_feature (1)..(25): SEQ ID NO: 7401; WAN024B52_at; Start 298; Stop 322
acagttgaagttgagatggaaagct

SEQ ID NO: 72444 - DNA, 25 bp, Artificial
  probe
  misc_feature (1)..(25): SEQ ID NO: 7401; WAN024B52_at; Start 297; Stop 321
gacagttgaagttgagatggaaagc

SEQ ID NO: 72445 - DNA, 25 bp, Artificial
  probe
  misc_feature (1)..(25): SEQ ID NO: 7401; WAN024B52_at; Start 300; Stop 324
agttgaagttgagatggaaagctga

SEQ ID NO: 72446 - DNA, 25 bp, Artificial
  probe
  misc_feature (1)..(25): SEQ ID NO: 6823; WAN024B53_s_at; Start 165; Stop 189
cttagctagacaacttcgctttcaa

SEQ ID NO: 72447 - DNA, 25 bp, Artificial
  probe
  misc_feature (1)..(25): SEQ ID NO: 6823; WAN024B53_s_at; Start 158; Stop 182
actatgacttagctagacaacttcg

SEQ ID NO: 72448 - DNA, 25 bp, Artificial
  probe
  misc_feature (1)..(25): SEQ ID NO: 6823; WAN024B53_s_at; Start 162; Stop 186
tgacttagctagacaacttcgcttt

SEQ ID NO: 72449 - DNA, 25 bp, Artificial
  probe
  misc_feature (1)..(25): SEQ ID NO: 6823; WAN024B53_s_at; Start 161; Stop 185
atgacttagctagacaacttcgctt

SEQ ID NO: 72450 - DNA, 25 bp, Artificial
  probe
  misc_feature (1)..(25): SEQ ID NO: 6823; WAN024B53_s_at; Start 168; Stop 192
agctagacaacttcgctttcaaatt

SEQ ID NO: 72451 - DNA, 25 bp, Artificial
  probe
  misc_feature (1)..(25): SEQ ID NO: 6823; WAN024B53_s_at; Start 163; Stop 187
gacttagctagacaacttcgctttc

SEQ ID NO: 72452 - DNA, 25 bp, Artificial
  probe
  misc_feature (1)..(25): SEQ ID NO: 6823; WAN024B53_s_at; Start 160; Stop 184
tatgacttagctagacaacttcgct

SEQ ID NO: 72453 - DNA, 25 bp, Artificial
  probe
  misc_feature (1)..(25): SEQ ID NO: 6823; WAN024B53_s_at; Start 166; Stop 190
ttagctagacaacttcgctttcaaa

SEQ ID NO: 72454 - DNA, 25 bp, Artificial
  probe
  misc_feature (1)..(25): SEQ ID NO: 6823; WAN024B53_s_at; Start 159; Stop 183
ctatgacttagctagacaacttcgc

SEQ ID NO: 72455 - DNA, 25 bp, Artificial
  probe
  misc_feature (1)..(25): SEQ ID NO: 6823; WAN024B53_s_at; Start 167; Stop 191
tagctagacaacttcgctttcaaat

SEQ ID NO: 72456 - DNA, 25 bp, Artificial
  probe
  misc_feature (1)..(25): SEQ ID NO: 6823; WAN024B53_s_at; Start 164; Stop 188
acttagctagacaacttcgctttca

SEQ ID NO: 72457 - DNA, 25 bp, Artificial
  probe
  misc_feature (1)..(25): SEQ ID NO: 7394; WAN024B54_x_at; Start 40; Stop 64
aagcgtcgattcaagtggctatcac

SEQ ID NO: 72458 - DNA, 25 bp, Artificial
  probe
  misc_feature (1)..(25): SEQ ID NO: 7394; WAN024B54_x_at; Start 49; Stop 73
ttcaagtggctatcactgttcaaaa

SEQ ID NO: 72459 - DNA, 25 bp, Artificial
  probe
  misc_feature (1)..(25): SEQ ID NO: 7394; WAN024B54_x_at; Start 41; Stop 65
agcgtcgattcaagtggctatcact

SEQ ID NO: 72460 - DNA, 25 bp, Artificial
  probe
  misc_feature (1)..(25): SEQ ID NO: 7394; WAN024B54_x_at; Start 5; Stop 29
aacgactggtaatgcctactagaat

SEQ ID NO: 72461 - DNA, 25 bp, Artificial
  probe
  misc_feature (1)..(25): SEQ ID NO: 7394; WAN024B54_x_at; Start 3; Stop 27
gaaacgactggtaatgcctactaga

SEQ ID NO: 72462 - DNA, 25 bp, Artificial
  probe
  misc_feature (1)..(25): SEQ ID NO: 7394; WAN024B54_x_at; Start 48; Stop 72
attcaagtggctatcactgttcaaa

SEQ ID NO: 72463 - DNA, 25 bp, Artificial
  probe
  misc_feature (1)..(25): SEQ ID NO: 7394; WAN024B54_x_at; Start 39; Stop 63
aaagcgtcgattcaagtggctatca

SEQ ID NO: 72464 - DNA, 25 bp, Artificial
  probe
  misc_feature (1)..(25): SEQ ID NO: 7394; WAN024B54_x_at; Start 54; Stop 78
gtggctatcactgttcaaaaatgat

SEQ ID NO: 72465 - DNA, 25 bp, Artificial
  probe
  misc_feature (1)..(25): SEQ ID NO: 7394; WAN024B54_x_at; Start 50; Stop 74
tcaagtggctatcactgttcaaaaa

SEQ ID NO: 72466 - DNA, 25 bp, Artificial
  probe
  misc_feature (1)..(25): SEQ ID NO: 7394; WAN024B54_x_at; Start 12; Stop 36
ggtaatgcctactagaattctcctt

SEQ ID NO: 72467 - DNA, 25 bp, Artificial
  probe
  misc_feature (1)..(25): SEQ ID NO: 7394; WAN024B54_x_at; Start 45; Stop 69
tcgattcaagtggctatcactgttc

SEQ ID NO: 72468 - DNA, 25 bp, Artificial
  probe
  misc_feature (1)..(25): SEQ ID NO: 7394; WAN024B54_x_at; Start 42; Stop 66
gcgtcgattcaagtggctatcactg

SEQ ID NO: 72469 - DNA, 25 bp, Artificial
  probe
  misc_feature (1)..(25): SEQ ID NO: 7394; WAN024B54_x_at; Start 43; Stop 67
cgtcgattcaagtggctatcactgt

SEQ ID NO: 72470 - DNA, 25 bp, Artificial
  probe
  misc_feature (1)..(25): SEQ ID NO: 7394; WAN024B54_x_at; Start 7; Stop 31
cgactggtaatgcctactagaattc

SEQ ID NO: 72471 - DNA, 25 bp, Artificial
  probe
  misc_feature (1)..(25): SEQ ID NO: 7394; WAN024B54_x_at; Start 4; Stop 28
aaacgactggtaatgcctactagaa

SEQ ID NO: 72472 - DNA, 25 bp, Artificial
  probe
  misc_feature (1)..(25): SEQ ID NO: 7394; WAN024B54_x_at; Start 2; Stop 26
tgaaacgactggtaatgcctactag

SEQ ID NO: 72473 - DNA, 25 bp, Artificial
  probe
  misc_feature (1)..(25): SEQ ID NO: 7394; WAN024B54_x_at; Start 38; Stop 62
gaaagcgtcgattcaagtggctatc

SEQ ID NO: 72474 - DNA, 25 bp, Artificial
  probe
  misc_feature (1)..(25): SEQ ID NO: 7394; WAN024B54_x_at; Start 1; Stop 25
ttgaaacgactggtaatgcctacta

SEQ ID NO: 72475 - DNA, 25 bp, Artificial
  probe
  misc_feature (1)..(25): SEQ ID NO: 7394; WAN024B54_x_at; Start 10; Stop 34
ctggtaatgcctactagaattctcc

SEQ ID NO: 72476 - DNA, 25 bp, Artificial
  probe
  misc_feature (1)..(25): SEQ ID NO: 7394; WAN024B54_x_at; Start 46; Stop 70
cgattcaagtggctatcactgttca

SEQ ID NO: 72477 - DNA, 25 bp, Artificial
  probe
  misc_feature (1)..(25): SEQ ID NO: 7394; WAN024B54_x_at; Start 52; Stop 76
aagtggctatcactgttcaaaaatg

SEQ ID NO: 72478 - DNA, 25 bp, Artificial
  probe
  misc_feature (1)..(25): SEQ ID NO: 7394; WAN024B54_x_at; Start 60; Stop 84
atcactgttcaaaaatgatgggcgc

SEQ ID NO: 72479 - DNA, 25 bp, Artificial
  probe
  misc_feature (1)..(25): SEQ ID NO: 7394; WAN024B54_x_at; Start 37; Stop 61
agaaagcgtcgattcaagtggctat

SEQ ID NO: 72480 - DNA, 25 bp, Artificial
  probe
  misc_feature (1)..(25): SEQ ID NO: 7394; WAN024B54_x_at; Start 44; Stop 68
gtcgattcaagtggctatcactgtt

SEQ ID NO: 72481 - DNA, 25 bp, Artificial
  probe
  misc_feature (1)..(25): SEQ ID NO: 7394; WAN024B54_x_at; Start 9; Stop 33
actggtaatgcctactagaattctc

SEQ ID NO: 72482 - DNA, 25 bp, Artificial
  probe
  misc_feature (1)..(25): SEQ ID NO: 7394; WAN024B54_x_at; Start 6; Stop 30
acgactggtaatgcctactagaatt

SEQ ID NO: 72483 - DNA, 25 bp, Artificial
  probe
  misc_feature (1)..(25): SEQ ID NO: 7394; WAN024B54_x_at; Start 51; Stop 75
caagtggctatcactgttcaaaaat

SEQ ID NO: 72484 - DNA, 25 bp, Artificial
  probe
  misc_feature (1)..(25): SEQ ID NO: 7394; WAN024B54_x_at; Start 13; Stop 37
gtaatgcctactagaattctcctta

SEQ ID NO: 72485 - DNA, 25 bp, Artificial
  probe
  misc_feature (1)..(25): SEQ ID NO: 7394; WAN024B54_x_at; Start 55; Stop 79
tggctatcactgttcaaaaatgatg

SEQ ID NO: 72486 - DNA, 25 bp, Artificial
  probe
  misc_feature (1)..(25): SEQ ID NO: 7394; WAN024B54_x_at; Start 11; Stop 35
tggtaatgcctactagaattctcct

SEQ ID NO: 72487 - DNA, 25 bp, Artificial
  probe
  misc_feature (1)..(25): SEQ ID NO: 7394; WAN024B54_x_at; Start 8; Stop 32
gactggtaatgcctactagaattct

SEQ ID NO: 72488 - DNA, 25 bp, Artificial
  probe
  misc_feature (1)..(25): SEQ ID NO: 7394; WAN024B54_x_at; Start 47; Stop 71
gattcaagtggctatcactgttcaa

SEQ ID NO: 72489 - DNA, 25 bp, Artificial
  probe
  misc_feature (1)..(25): SEQ ID NO: 7394; WAN024B54_x_at; Start 53; Stop 77
agtggctatcactgttcaaaaatga

SEQ ID NO: 72490 - DNA, 25 bp, Artificial
  probe
  misc_feature (1)..(25): SEQ ID NO: 7394; WAN024B54_x_at; Start 59; Stop 83
tatcactgttcaaaaatgatgggcg

SEQ ID NO: 72491 - DNA, 25 bp, Artificial
  probe
  misc_feature (1)..(25): SEQ ID NO: 6582; WAN024B55_s_at; Start 9; Stop 33
tatcggtcatagaaatcttctcaat

SEQ ID NO: 72492 - DNA, 25 bp, Artificial
  probe
  misc_feature (1)..(25): SEQ ID NO: 6582; WAN024B55_s_at; Start 44; Stop 68
gcaattttttggttgataatacgag

SEQ ID NO: 72493 - DNA, 25 bp, Artificial
  probe
  misc_feature (1)..(25): SEQ ID NO: 6582; WAN024B55_s_at; Start 14; Stop 38
gtcatagaaatcttctcaatcaact

SEQ ID NO: 72494 - DNA, 25 bp, Artificial
  probe
  misc_feature (1)..(25): SEQ ID NO: 6582; WAN024B55_s_at; Start 25; Stop 49
cttctcaatcaacttttgcgcaatt

SEQ ID NO: 72495 - DNA, 25 bp, Artificial
  probe
  misc_feature (1)..(25): SEQ ID NO: 6582; WAN024B55_s_at; Start 36; Stop 60
acttttgcgcaattttttggttgat

SEQ ID NO: 72496 - DNA, 25 bp, Artificial
  probe
  misc_feature (1)..(25): SEQ ID NO: 6582; WAN024B55_s_at; Start 23; Stop 47
atcttctcaatcaacttttgcgcaa

SEQ ID NO: 72497 - DNA, 25 bp, Artificial
  probe
  misc_feature (1)..(25): SEQ ID NO: 6582; WAN024B55_s_at; Start 30; Stop 54
caatcaacttttgcgcaattttttg

SEQ ID NO: 72498 - DNA, 25 bp, Artificial
  probe
  misc_feature (1)..(25): SEQ ID NO: 6582; WAN024B55_s_at; Start 8; Stop 32
atatcggtcatagaaatcttctcaa

SEQ ID NO: 72499 - DNA, 25 bp, Artificial
  probe
  misc_feature (1)..(25): SEQ ID NO: 6582; WAN024B55_s_at; Start 18; Stop 42
tagaaatcttctcaatcaacttttg

SEQ ID NO: 72500 - DNA, 25 bp, Artificial
  probe
  misc_feature (1)..(25): SEQ ID NO: 6582; WAN024B55_s_at; Start 7; Stop 31
aatatcggtcatagaaatcttctca

SEQ ID NO: 72501 - DNA, 25 bp, Artificial
  probe
  misc_feature (1)..(25): SEQ ID NO: 6582; WAN024B55_s_at; Start 24; Stop 48
tcttctcaatcaacttttgcgcaat

SEQ ID NO: 72502 - DNA, 25 bp, Artificial
  probe
  misc_feature (1)..(25): SEQ ID NO: 6582; WAN024B55_s_at; Start 16; Stop 40
catagaaatcttctcaatcaacttt

SEQ ID NO: 72503 - DNA, 25 bp, Artificial
  probe
  misc_feature (1)..(25): SEQ ID NO: 6582; WAN024B55_s_at; Start 37; Stop 61
cttttgcgcaattttttggttgata

SEQ ID NO: 72504 - DNA, 25 bp, Artificial
  probe
  misc_feature (1)..(25): SEQ ID NO: 6582; WAN024B55_s_at; Start 6; Stop 30
caatatcggtcatagaaatcttctc

SEQ ID NO: 72505 - DNA, 25 bp, Artificial
  probe
  misc_feature (1)..(25): SEQ ID NO: 6582; WAN024B55_s_at; Start 41; Stop 65
tgcgcaattttttggttgataatac

SEQ ID NO: 72506 - DNA, 25 bp, Artificial
  probe
  misc_feature (1)..(25): SEQ ID NO: 6582; WAN024B55_s_at; Start 5; Stop 29
gcaatatcggtcatagaaatcttct

SEQ ID NO: 72507 - DNA, 25 bp, Artificial
  probe
  misc_feature (1)..(25): SEQ ID NO: 6582; WAN024B55_s_at; Start 42; Stop 66
gcgcaattttttggttgataatacg

SEQ ID NO: 72508 - DNA, 25 bp, Artificial
  probe
  misc_feature (1)..(25): SEQ ID NO: 6582; WAN024B55_s_at; Start 20; Stop 44
gaaatcttctcaatcaacttttgcg

SEQ ID NO: 72509 - DNA, 25 bp, Artificial
  probe
  misc_feature (1)..(25): SEQ ID NO: 6582; WAN024B55_s_at; Start 43; Stop 67
cgcaattttttggttgataatacga

SEQ ID NO: 72510 - DNA, 25 bp, Artificial
  probe
  misc_feature (1)..(25): SEQ ID NO: 6582; WAN024B55_s_at; Start 28; Stop 52
ctcaatcaacttttgcgcaattttt

SEQ ID NO: 72511 - DNA, 25 bp, Artificial
  probe
  misc_feature (1)..(25): SEQ ID NO: 6582; WAN024B55_s_at; Start 21; Stop 45
aaatcttctcaatcaacttttgcgc

SEQ ID NO: 72512 - DNA, 25 bp, Artificial
  probe
  misc_feature (1)..(25): SEQ ID NO: 6582; WAN024B55_s_at; Start 3; Stop 27
gagcaatatcggtcatagaaatctt

SEQ ID NO: 72513 - DNA, 25 bp, Artificial
  probe
  misc_feature (1)..(25): SEQ ID NO: 6582; WAN024B55_s_at; Start 22; Stop 46
aatcttctcaatcaacttttgcgca

SEQ ID NO: 72514 - DNA, 25 bp, Artificial
  probe
  misc_feature (1)..(25): SEQ ID NO: 6582; WAN024B55_s_at; Start 13; Stop 37
ggtcatagaaatcttctcaatcaac

SEQ ID NO: 72515 - DNA, 25 bp, Artificial
  probe
  misc_feature (1)..(25): SEQ ID NO: 6582; WAN024B55_s_at; Start 10; Stop 34
atcggtcatagaaatcttctcaatc

SEQ ID NO: 72516 - DNA, 25 bp, Artificial
  probe
  misc_feature (1)..(25): SEQ ID NO: 6582; WAN024B55_s_at; Start 51; Stop 75
tttggttgataatacgaggaatttg

SEQ ID NO: 72517 - DNA, 25 bp, Artificial
  probe
  misc_feature (1)..(25): SEQ ID NO: 6582; WAN024B55_s_at; Start 12; Stop 36
cggtcatagaaatcttctcaatcaa

SEQ ID NO: 72518 - DNA, 25 bp, Artificial
  probe
  misc_feature (1)..(25): SEQ ID NO: 6582; WAN024B55_s_at; Start 4; Stop 28
agcaatatcggtcatagaaatcttc

SEQ ID NO: 72519 - DNA, 25 bp, Artificial
  probe
  misc_feature (1)..(25): SEQ ID NO: 6582; WAN024B55_s_at; Start 27; Stop 51
tctcaatcaacttttgcgcaatttt

SEQ ID NO: 72520 - DNA, 25 bp, Artificial
  probe
  misc_feature (1)..(25): SEQ ID NO: 6582; WAN024B55_s_at; Start 34; Stop 58
caacttttgcgcaattttttggttg

SEQ ID NO: 72521 - DNA, 25 bp, Artificial
  probe
  misc_feature (1)..(25): SEQ ID NO: 6582; WAN024B55_s_at; Start 11; Stop 35
tcggtcatagaaatcttctcaatca

SEQ ID NO: 72522 - DNA, 25 bp, Artificial
  probe
  misc_feature (1)..(25): SEQ ID NO: 6582; WAN024B55_s_at; Start 15; Stop 39
tcatagaaatcttctcaatcaactt

SEQ ID NO: 72523 - DNA, 25 bp, Artificial
  probe
  misc_feature (1)..(25): SEQ ID NO: 6582; WAN024B55_s_at; Start 45; Stop 69
caattttttggttgataatacgagg

SEQ ID NO: 72524 - DNA, 25 bp, Artificial
  probe
  misc_feature (1)..(25): SEQ ID NO: 6582; WAN024B55_s_at; Start 2; Stop 26
tgagcaatatcggtcatagaaatct

SEQ ID NO: 72525 - DNA, 25 bp, Artificial
  probe
  misc_feature (1)..(25): SEQ ID NO: 6674; WAN024B56_at; Start 170; Stop 194
ggacaagatggagcttcatagtcca

SEQ ID NO: 72526 - DNA, 25 bp, Artificial
  probe
  misc_feature (1)..(25): SEQ ID NO: 6674; WAN024B56_at; Start 169; Stop 193
aggacaagatggagcttcatagtcc

SEQ ID NO: 72527 - DNA, 25 bp, Artificial
  probe
  misc_feature (1)..(25): SEQ ID NO: 6674; WAN024B56_at; Start 173; Stop 197
caagatggagcttcatagtccagtt

SEQ ID NO: 72528 - DNA, 25 bp, Artificial
  probe
  misc_feature (1)..(25): SEQ ID NO: 6674; WAN024B56_at; Start 164; Stop 188
cactcaggacaagatggagcttcat

SEQ ID NO: 72529 - DNA, 25 bp, Artificial
  probe
  misc_feature (1)..(25): SEQ ID NO: 6674; WAN024B56_at; Start 163; Stop 187
gcactcaggacaagatggagcttca

SEQ ID NO: 72530 - DNA, 25 bp, Artificial
  probe
  misc_feature (1)..(25): SEQ ID NO: 6674; WAN024B56_at; Start 177; Stop 201
atggagcttcatagtccagtttggc

SEQ ID NO: 72531 - DNA, 25 bp, Artificial
  probe
  misc_feature (1)..(25): SEQ ID NO: 6674; WAN024B56_at; Start 103; Stop 127
tgtttcaagataaggaattttagaa

SEQ ID NO: 72532 - DNA, 25 bp, Artificial
  probe
  misc_feature (1)..(25): SEQ ID NO: 6674; WAN024B56_at; Start 155; Stop 179
tgacttccgcactcaggacaagatg

SEQ ID NO: 72533 - DNA, 25 bp, Artificial
  probe
  misc_feature (1)..(25): SEQ ID NO: 6674; WAN024B56_at; Start 175; Stop 199
agatggagcttcatagtccagtttg

SEQ ID NO: 72534 - DNA, 25 bp, Artificial
  probe
  misc_feature (1)..(25): SEQ ID NO: 6674; WAN024B56_at; Start 153; Stop 177
tttgacttccgcactcaggacaaga

SEQ ID NO: 72535 - DNA, 25 bp, Artificial
  probe
  misc_feature (1)..(25): SEQ ID NO: 6674; WAN024B56_at; Start 146; Stop 170
ttcttcatttgacttccgcactcag

SEQ ID NO: 72536 - DNA, 25 bp, Artificial
  probe
  misc_feature (1)..(25): SEQ ID NO: 6674; WAN024B56_at; Start 99; Stop 123
cagttgtttcaagataaggaatttt

SEQ ID NO: 72537 - DNA, 25 bp, Artificial
  probe
  misc_feature (1)..(25): SEQ ID NO: 6674; WAN024B56_at; Start 168; Stop 192
caggacaagatggagcttcatagtc

SEQ ID NO: 72538 - DNA, 25 bp, Artificial
  probe
  misc_feature (1)..(25): SEQ ID NO: 6674; WAN024B56_at; Start 148; Stop 172
cttcatttgacttccgcactcagga

SEQ ID NO: 72539 - DNA, 25 bp, Artificial
  probe
  misc_feature (1)..(25): SEQ ID NO: 6674; WAN024B56_at; Start 98; Stop 122
ccagttgtttcaagataaggaattt

SEQ ID NO: 72540 - DNA, 25 bp, Artificial
  probe
  misc_feature (1)..(25): SEQ ID NO: 6674; WAN024B56_at; Start 162; Stop 186
cgcactcaggacaagatggagcttc

SEQ ID NO: 72541 - DNA, 25 bp, Artificial
  probe
  misc_feature (1)..(25): SEQ ID NO: 6674; WAN024B56_at; Start 166; Stop 190
ctcaggacaagatggagcttcatag

SEQ ID NO: 72542 - DNA, 25 bp, Artificial
  probe
  misc_feature (1)..(25): SEQ ID NO: 6674; WAN024B56_at; Start 178; Stop 202
tggagcttcatagtccagtttggcg

SEQ ID NO: 72543 - DNA, 25 bp, Artificial
  probe
  misc_feature (1)..(25): SEQ ID NO: 6674; WAN024B56_at; Start 144; Stop 168
atttcttcatttgacttccgcactc

SEQ ID NO: 72544 - DNA, 25 bp, Artificial
  probe
  misc_feature (1)..(25): SEQ ID NO: 6674; WAN024B56_at; Start 174; Stop 198
aagatggagcttcatagtccagttt

SEQ ID NO: 72545 - DNA, 25 bp, Artificial
  probe
  misc_feature (1)..(25): SEQ ID NO: 6674; WAN024B56_at; Start 142; Stop 166
atatttcttcatttgacttccgcac

SEQ ID NO: 72546 - DNA, 25 bp, Artificial
  probe
  misc_feature (1)..(25): SEQ ID NO: 6674; WAN024B56_at; Start 97; Stop 121
accagttgtttcaagataaggaatt

SEQ ID NO: 72547 - DNA, 25 bp, Artificial
  probe
  misc_feature (1)..(25): SEQ ID NO: 6674; WAN024B56_at; Start 171; Stop 195
gacaagatggagcttcatagtccag

SEQ ID NO: 72548 - DNA, 25 bp, Artificial
  probe
  misc_feature (1)..(25): SEQ ID NO: 6674; WAN024B56_at; Start 176; Stop 200
gatggagcttcatagtccagtttgg

SEQ ID NO: 72549 - DNA, 25 bp, Artificial
  probe
  misc_feature (1)..(25): SEQ ID NO: 6674; WAN024B56_at; Start 143; Stop 167
tatttcttcatttgacttccgcact

SEQ ID NO: 72550 - DNA, 25 bp, Artificial
  probe
  misc_feature (1)..(25): SEQ ID NO: 6674; WAN024B56_at; Start 167; Stop 191
tcaggacaagatggagcttcatagt

SEQ ID NO: 72551 - DNA, 25 bp, Artificial
  probe
  misc_feature (1)..(25): SEQ ID NO: 6674; WAN024B56_at; Start 145; Stop 169
tttcttcatttgacttccgcactca

SEQ ID NO: 72552 - DNA, 25 bp, Artificial
  probe
  misc_feature (1)..(25): SEQ ID NO: 6674; WAN024B56_at; Start 152; Stop 176
atttgacttccgcactcaggacaag

SEQ ID NO: 72553 - DNA, 25 bp, Artificial
  probe
  misc_feature (1)..(25): SEQ ID NO: 6674; WAN024B56_at; Start 161; Stop 185
ccgcactcaggacaagatggagctt

SEQ ID NO: 72554 - DNA, 25 bp, Artificial
  probe
  misc_feature (1)..(25): SEQ ID NO: 6674; WAN024B56_at; Start 147; Stop 171
tcttcatttgacttccgcactcagg

SEQ ID NO: 72555 - DNA, 25 bp, Artificial
  probe
  misc_feature (1)..(25): SEQ ID NO: 6674; WAN024B56_at; Start 154; Stop 178
ttgacttccgcactcaggacaagat

SEQ ID NO: 72556 - DNA, 25 bp, Artificial
  probe
  misc_feature (1)..(25): SEQ ID NO: 6674; WAN024B56_at; Start 165; Stop 189
actcaggacaagatggagcttcata

SEQ ID NO: 72557 - DNA, 25 bp, Artificial
  probe
  misc_feature (1)..(25): SEQ ID NO: 6674; WAN024B56_at; Start 172; Stop 196
acaagatggagcttcatagtccagt

SEQ ID NO: 72558 - DNA, 25 bp, Artificial
  probe
  misc_feature (1)..(25): SEQ ID NO: 6674; WAN024B56_at; Start 149; Stop 173
ttcatttgacttccgcactcaggac

SEQ ID NO: 72559 - DNA, 25 bp, Artificial
  probe
  misc_feature (1)..(25): SEQ ID NO: 6654; WAN024B57_at; Start 67; Stop 91
attgcttcaaagttaattctaacta

SEQ ID NO: 72560 - DNA, 25 bp, Artificial
  probe
  misc_feature (1)..(25): SEQ ID NO: 6654; WAN024B57_at; Start 68; Stop 92
ttgcttcaaagttaattctaactaa

SEQ ID NO: 72561 - DNA, 25 bp, Artificial
  probe
  misc_feature (1)..(25): SEQ ID NO: 6654; WAN024B57_at; Start 66; Stop 90
aattgcttcaaagttaattctaact

SEQ ID NO: 72562 - DNA, 25 bp, Artificial
  probe
  misc_feature (1)..(25): SEQ ID NO: 6654; WAN024B57_at; Start 69; Stop 93
tgcttcaaagttaattctaactaat

SEQ ID NO: 72563 - DNA, 25 bp, Artificial
  probe
  misc_feature (1)..(25): SEQ ID NO: 3850; WAN024B59_s_at; Start 21; Stop 45
gtttcagcctgagcctagaaatttg

SEQ ID NO: 72564 - DNA, 25 bp, Artificial
  probe
  misc_feature (1)..(25): SEQ ID NO: 3850; WAN024B59_s_at; Start 24; Stop 48
tcagcctgagcctagaaatttgaaa

SEQ ID NO: 72565 - DNA, 25 bp, Artificial
  probe
  misc_feature (1)..(25): SEQ ID NO: 3850; WAN024B59_s_at; Start 25; Stop 49
cagcctgagcctagaaatttgaaag

SEQ ID NO: 72566 - DNA, 25 bp, Artificial
  probe
  misc_feature (1)..(25): SEQ ID NO: 3850; WAN024B59_s_at; Start 18; Stop 42
actgtttcagcctgagcctagaaat

SEQ ID NO: 72567 - DNA, 25 bp, Artificial
  probe
  misc_feature (1)..(25): SEQ ID NO: 3850; WAN024B59_s_at; Start 13; Stop 37
gggagactgtttcagcctgagccta

SEQ ID NO: 72568 - DNA, 25 bp, Artificial
  probe
  misc_feature (1)..(25): SEQ ID NO: 3850; WAN024B59_s_at; Start 20; Stop 44
tgtttcagcctgagcctagaaattt

SEQ ID NO: 72569 - DNA, 25 bp, Artificial
  probe
  misc_feature (1)..(25): SEQ ID NO: 3850; WAN024B59_s_at; Start 23; Stop 47
ttcagcctgagcctagaaatttgaa

SEQ ID NO: 72570 - DNA, 25 bp, Artificial
  probe
  misc_feature (1)..(25): SEQ ID NO: 3850; WAN024B59_s_at; Start 22; Stop 46
tttcagcctgagcctagaaatttga

SEQ ID NO: 72571 - DNA, 25 bp, Artificial
  probe
  misc_feature (1)..(25): SEQ ID NO: 3850; WAN024B59_s_at; Start 26; Stop 50
agcctgagcctagaaatttgaaagc

SEQ ID NO: 72572 - DNA, 25 bp, Artificial
  probe
  misc_feature (1)..(25): SEQ ID NO: 3850; WAN024B59_s_at; Start 28; Stop 52
cctgagcctagaaatttgaaagcga

SEQ ID NO: 72573 - DNA, 25 bp, Artificial
  probe
  misc_feature (1)..(25): SEQ ID NO: 3850; WAN024B59_s_at; Start 29; Stop 53
ctgagcctagaaatttgaaagcgaa

SEQ ID NO: 72574 - DNA, 25 bp, Artificial
  probe
  misc_feature (1)..(25): SEQ ID NO: 3850; WAN024B59_s_at; Start 30; Stop 54
tgagcctagaaatttgaaagcgaag

SEQ ID NO: 72575 - DNA, 25 bp, Artificial
  probe
  misc_feature (1)..(25): SEQ ID NO: 3850; WAN024B59_s_at; Start 15; Stop 39
gagactgtttcagcctgagcctaga

SEQ ID NO: 72576 - DNA, 25 bp, Artificial
  probe
  misc_feature (1)..(25): SEQ ID NO: 3850; WAN024B59_s_at; Start 17; Stop 41
gactgtttcagcctgagcctagaaa

SEQ ID NO: 72577 - DNA, 25 bp, Artificial
  probe
  misc_feature (1)..(25): SEQ ID NO: 3850; WAN024B59_s_at; Start 11; Stop 35
ctgggagactgtttcagcctgagcc

SEQ ID NO: 72578 - DNA, 25 bp, Artificial
  probe
  misc_feature (1)..(25): SEQ ID NO: 3850; WAN024B59_s_at; Start 16; Stop 40
agactgtttcagcctgagcctagaa

SEQ ID NO: 72579 - DNA, 25 bp, Artificial
  probe
  misc_feature (1)..(25): SEQ ID NO: 3850; WAN024B59_s_at; Start 27; Stop 51
gcctgagcctagaaatttgaaagcg

SEQ ID NO: 72580 - DNA, 25 bp, Artificial
  probe
  misc_feature (1)..(25): SEQ ID NO: 3850; WAN024B59_s_at; Start 14; Stop 38
ggagactgtttcagcctgagcctag

SEQ ID NO: 72581 - DNA, 25 bp, Artificial
  probe
  misc_feature (1)..(25): SEQ ID NO: 3850; WAN024B59_s_at; Start 19; Stop 43
ctgtttcagcctgagcctagaaatt

SEQ ID NO: 72582 - DNA, 25 bp, Artificial
  probe
  misc_feature (1)..(25): SEQ ID NO: 3850; WAN024B59_s_at; Start 12; Stop 36
tgggagactgtttcagcctgagcct

SEQ ID NO: 72583 - DNA, 25 bp, Artificial
  probe
  misc_feature (1)..(25): SEQ ID NO: 2743; WAN024B5A_s_at; Start 48; Stop 72
aaatatccaaattatagatgtcgtc

SEQ ID NO: 72584 - DNA, 25 bp, Artificial
  probe
  misc_feature (1)..(25): SEQ ID NO: 2743; WAN024B5A_s_at; Start 51; Stop 75
tatccaaattatagatgtcgtcaat

SEQ ID NO: 72585 - DNA, 25 bp, Artificial
  probe
  misc_feature (1)..(25): SEQ ID NO: 2743; WAN024B5A_s_at; Start 45; Stop 69
cacaaatatccaaattatagatgtc

SEQ ID NO: 72586 - DNA, 25 bp, Artificial
  probe
  misc_feature (1)..(25): SEQ ID NO: 2743; WAN024B5A_s_at; Start 57; Stop 81
aattatagatgtcgtcaatagggat

SEQ ID NO: 72587 - DNA, 25 bp, Artificial
  probe
  misc_feature (1)..(25): SEQ ID NO: 2743; WAN024B5A_s_at; Start 43; Stop 67
gacacaaatatccaaattatagatg

SEQ ID NO: 72588 - DNA, 25 bp, Artificial
  probe
  misc_feature (1)..(25): SEQ ID NO: 2743; WAN024B5A_s_at; Start 47; Stop 71
caaatatccaaattatagatgtcgt

SEQ ID NO: 72589 - DNA, 25 bp, Artificial
  probe
  misc_feature (1)..(25): SEQ ID NO: 2743; WAN024B5A_s_at; Start 53; Stop 77
tccaaattatagatgtcgtcaatag

SEQ ID NO: 72590 - DNA, 25 bp, Artificial
  probe
  misc_feature (1)..(25): SEQ ID NO: 2743; WAN024B5A_s_at; Start 49; Stop 73
aatatccaaattatagatgtcgtca

SEQ ID NO: 72591 - DNA, 25 bp, Artificial
  probe
  misc_feature (1)..(25): SEQ ID NO: 2743; WAN024B5A_s_at; Start 54; Stop 78
ccaaattatagatgtcgtcaatagg

SEQ ID NO: 72592 - DNA, 25 bp, Artificial
  probe
  misc_feature (1)..(25): SEQ ID NO: 2743; WAN024B5A_s_at; Start 42; Stop 66
agacacaaatatccaaattatagat

SEQ ID NO: 72593 - DNA, 25 bp, Artificial
  probe
  misc_feature (1)..(25): SEQ ID NO: 2743; WAN024B5A_s_at; Start 40; Stop 64
aaagacacaaatatccaaattatag

SEQ ID NO: 72594 - DNA, 25 bp, Artificial
  probe
  misc_feature (1)..(25): SEQ ID NO: 2743; WAN024B5A_s_at; Start 50; Stop 74
atatccaaattatagatgtcgtcaa

SEQ ID NO: 72595 - DNA, 25 bp, Artificial
  probe
  misc_feature (1)..(25): SEQ ID NO: 2743; WAN024B5A_s_at; Start 44; Stop 68
acacaaatatccaaattatagatgt

SEQ ID NO: 72596 - DNA, 25 bp, Artificial
  probe
  misc_feature (1)..(25): SEQ ID NO: 2743; WAN024B5A_s_at; Start 52; Stop 76
atccaaattatagatgtcgtcaata

SEQ ID NO: 72597 - DNA, 25 bp, Artificial
  probe
  misc_feature (1)..(25): SEQ ID NO: 2743; WAN024B5A_s_at; Start 55; Stop 79
caaattatagatgtcgtcaataggg

SEQ ID NO: 72598 - DNA, 25 bp, Artificial
  probe
  misc_feature (1)..(25): SEQ ID NO: 2743; WAN024B5A_s_at; Start 56; Stop 80
aaattatagatgtcgtcaataggga

SEQ ID NO: 72599 - DNA, 25 bp, Artificial
  probe
  misc_feature (1)..(25): SEQ ID NO: 2743; WAN024B5A_s_at; Start 41; Stop 65
aagacacaaatatccaaattataga

SEQ ID NO: 72600 - DNA, 25 bp, Artificial
  probe
  misc_feature (1)..(25): SEQ ID NO: 2743; WAN024B5A_s_at; Start 46; Stop 70
acaaatatccaaattatagatgtcg

SEQ ID NO: 72601 - DNA, 25 bp, Artificial
  probe
  misc_feature (1)..(25): SEQ ID NO: 4369; WAN024B5B_at; Start 257; Stop 281
aaatcattgagcttacgaataacag

SEQ ID NO: 72602 - DNA, 25 bp, Artificial
  probe
  misc_feature (1)..(25): SEQ ID NO: 4369; WAN024B5B_at; Start 242; Stop 266
tcatgtttaaagtgaaaatcattga

SEQ ID NO: 72603 - DNA, 25 bp, Artificial
  probe
  misc_feature (1)..(25): SEQ ID NO: 4369; WAN024B5B_at; Start 240; Stop 264
aatcatgtttaaagtgaaaatcatt

SEQ ID NO: 72604 - DNA, 25 bp, Artificial
  probe
  misc_feature (1)..(25): SEQ ID NO: 4369; WAN024B5B_at; Start 243; Stop 267
catgtttaaagtgaaaatcattgag

SEQ ID NO: 72605 - DNA, 25 bp, Artificial
  probe
  misc_feature (1)..(25): SEQ ID NO: 4369; WAN024B5B_at; Start 190; Stop 214
ctttgtaaaagcatactcatcccaa

SEQ ID NO: 72606 - DNA, 25 bp, Artificial
  probe
  misc_feature (1)..(25): SEQ ID NO: 4369; WAN024B5B_at; Start 174; Stop 198
tgaagctcatctttccctttgtaaa

SEQ ID NO: 72607 - DNA, 25 bp, Artificial
  probe
  misc_feature (1)..(25): SEQ ID NO: 4369; WAN024B5B_at; Start 173; Stop 197
atgaagctcatctttccctttgtaa

SEQ ID NO: 72608 - DNA, 25 bp, Artificial
  probe
  misc_feature (1)..(25): SEQ ID NO: 4369; WAN024B5B_at; Start 183; Stop 207
tctttccctttgtaaaagcatactc

SEQ ID NO: 72609 - DNA, 25 bp, Artificial
  probe
  misc_feature (1)..(25): SEQ ID NO: 4369; WAN024B5B_at; Start 180; Stop 204
tcatctttccctttgtaaaagcata

SEQ ID NO: 72610 - DNA, 25 bp, Artificial
  probe
  misc_feature (1)..(25): SEQ ID NO: 4369; WAN024B5B_at; Start 247; Stop 271
tttaaagtgaaaatcattgagctta

SEQ ID NO: 72611 - DNA, 25 bp, Artificial
  probe
  misc_feature (1)..(25): SEQ ID NO: 4369; WAN024B5B_at; Start 179; Stop 203
ctcatctttccctttgtaaaagcat

SEQ ID NO: 72612 - DNA, 25 bp, Artificial
  probe
  misc_feature (1)..(25): SEQ ID NO: 4369; WAN024B5B_at; Start 246; Stop 270
gtttaaagtgaaaatcattgagctt

SEQ ID NO: 72613 - DNA, 25 bp, Artificial
  probe
  misc_feature (1)..(25): SEQ ID NO: 4369; WAN024B5B_at; Start 248; Stop 272
ttaaagtgaaaatcattgagcttac

SEQ ID NO: 72614 - DNA, 25 bp, Artificial
  probe
  misc_feature (1)..(25): SEQ ID NO: 4369; WAN024B5B_at; Start 186; Stop 210
ttccctttgtaaaagcatactcatc

SEQ ID NO: 72615 - DNA, 25 bp, Artificial
  probe
  misc_feature (1)..(25): SEQ ID NO: 4369; WAN024B5B_at; Start 249; Stop 273
taaagtgaaaatcattgagcttacg

SEQ ID NO: 72616 - DNA, 25 bp, Artificial
  probe
  misc_feature (1)..(25): SEQ ID NO: 4369; WAN024B5B_at; Start 253; Stop 277
gtgaaaatcattgagcttacgaata

SEQ ID NO: 72617 - DNA, 25 bp, Artificial
  probe
  misc_feature (1)..(25): SEQ ID NO: 4369; WAN024B5B_at; Start 238; Stop 262
aaaatcatgtttaaagtgaaaatca

SEQ ID NO: 72618 - DNA, 25 bp, Artificial
  probe
  misc_feature (1)..(25): SEQ ID NO: 4369; WAN024B5B_at; Start 176; Stop 200
aagctcatctttccctttgtaaaag

SEQ ID NO: 72619 - DNA, 25 bp, Artificial
  probe
  misc_feature (1)..(25): SEQ ID NO: 4369; WAN024B5B_at; Start 181; Stop 205
catctttccctttgtaaaagcatac

SEQ ID NO: 72620 - DNA, 25 bp, Artificial
  probe
  misc_feature (1)..(25): SEQ ID NO: 4369; WAN024B5B_at; Start 184; Stop 208
ctttccctttgtaaaagcatactca

SEQ ID NO: 72621 - DNA, 25 bp, Artificial
  probe
  misc_feature (1)..(25): SEQ ID NO: 4369; WAN024B5B_at; Start 182; Stop 206
atctttccctttgtaaaagcatact

SEQ ID NO: 72622 - DNA, 25 bp, Artificial
  probe
  misc_feature (1)..(25): SEQ ID NO: 4369; WAN024B5B_at; Start 244; Stop 268
atgtttaaagtgaaaatcattgagc

SEQ ID NO: 72623 - DNA, 25 bp, Artificial
  probe
  misc_feature (1)..(25): SEQ ID NO: 4369; WAN024B5B_at; Start 175; Stop 199
gaagctcatctttccctttgtaaaa

SEQ ID NO: 72624 - DNA, 25 bp, Artificial
  probe
  misc_feature (1)..(25): SEQ ID NO: 4369; WAN024B5B_at; Start 254; Stop 278
tgaaaatcattgagcttacgaataa

SEQ ID NO: 72625 - DNA, 25 bp, Artificial
  probe
  misc_feature (1)..(25): SEQ ID NO: 4369; WAN024B5B_at; Start 178; Stop 202
gctcatctttccctttgtaaaagca

SEQ ID NO: 72626 - DNA, 25 bp, Artificial
  probe
  misc_feature (1)..(25): SEQ ID NO: 4369; WAN024B5B_at; Start 189; Stop 213
cctttgtaaaagcatactcatccca

SEQ ID NO: 72627 - DNA, 25 bp, Artificial
  probe
  misc_feature (1)..(25): SEQ ID NO: 4369; WAN024B5B_at; Start 255; Stop 279
gaaaatcattgagcttacgaataac

SEQ ID NO: 72628 - DNA, 25 bp, Artificial
  probe
  misc_feature (1)..(25): SEQ ID NO: 4369; WAN024B5B_at; Start 245; Stop 269
tgtttaaagtgaaaatcattgagct

SEQ ID NO: 72629 - DNA, 25 bp, Artificial
  probe
  misc_feature (1)..(25): SEQ ID NO: 4369; WAN024B5B_at; Start 187; Stop 211
tccctttgtaaaagcatactcatcc

SEQ ID NO: 72630 - DNA, 25 bp, Artificial
  probe
  misc_feature (1)..(25): SEQ ID NO: 4369; WAN024B5B_at; Start 239; Stop 263
aaatcatgtttaaagtgaaaatcat

SEQ ID NO: 72631 - DNA, 25 bp, Artificial
  probe
  misc_feature (1)..(25): SEQ ID NO: 4369; WAN024B5B_at; Start 185; Stop 209
tttccctttgtaaaagcatactcat

SEQ ID NO: 72632 - DNA, 25 bp, Artificial
  probe
  misc_feature (1)..(25): SEQ ID NO: 4369; WAN024B5B_at; Start 172; Stop 196
aatgaagctcatctttccctttgta

SEQ ID NO: 72633 - DNA, 25 bp, Artificial
  probe
  misc_feature (1)..(25): SEQ ID NO: 4369; WAN024B5B_at; Start 241; Stop 265
atcatgtttaaagtgaaaatcattg

SEQ ID NO: 72634 - DNA, 25 bp, Artificial
  probe
  misc_feature (1)..(25): SEQ ID NO: 4369; WAN024B5B_at; Start 256; Stop 280
aaaatcattgagcttacgaataaca

SEQ ID NO: 72635 - DNA, 25 bp, Artificial
  probe
  misc_feature (1)..(25): SEQ ID NO: 2176; WAN024B5C_at; Start 26; Stop 50
aactactcgatatcaaagacacaaa

SEQ ID NO: 72636 - DNA, 25 bp, Artificial
  probe
  misc_feature (1)..(25): SEQ ID NO: 2176; WAN024B5C_at; Start 25; Stop 49
aaactactcgatatcaaagacacaa

SEQ ID NO: 72637 - DNA, 25 bp, Artificial
  probe
  misc_feature (1)..(25): SEQ ID NO: 2176; WAN024B5C_at; Start 27; Stop 51
actactcgatatcaaagacacaaat

SEQ ID NO: 72638 - DNA, 25 bp, Artificial
  probe
  misc_feature (1)..(25): SEQ ID NO: 2176; WAN024B5C_at; Start 29; Stop 53
tactcgatatcaaagacacaaatat

SEQ ID NO: 72639 - DNA, 25 bp, Artificial
  probe
  misc_feature (1)..(25): SEQ ID NO: 2176; WAN024B5C_at; Start 28; Stop 52
ctactcgatatcaaagacacaaata

SEQ ID NO: 72640 - DNA, 25 bp, Artificial
  probe
  misc_feature (1)..(25): SEQ ID NO: 2176; WAN024B5C_at; Start 23; Stop 47
caaaactactcgatatcaaagacac

SEQ ID NO: 72641 - DNA, 25 bp, Artificial
  probe
  misc_feature (1)..(25): SEQ ID NO: 2176; WAN024B5C_at; Start 22; Stop 46
acaaaactactcgatatcaaagaca

SEQ ID NO: 72642 - DNA, 25 bp, Artificial
  probe
  misc_feature (1)..(25): SEQ ID NO: 2176; WAN024B5C_at; Start 30; Stop 54
actcgatatcaaagacacaaatatc

SEQ ID NO: 72643 - DNA, 25 bp, Artificial
  probe
  misc_feature (1)..(25): SEQ ID NO: 2176; WAN024B5C_at; Start 24; Stop 48
aaaactactcgatatcaaagacaca

SEQ ID NO: 72644 - DNA, 25 bp, Artificial
  probe
  misc_feature (1)..(25): SEQ ID NO: 2180; WAN024B5D_at; Start 273; Stop 297
tgaaacttctgatgacgtacagtca

SEQ ID NO: 72645 - DNA, 25 bp, Artificial
  probe
  misc_feature (1)..(25): SEQ ID NO: 2180; WAN024B5D_at; Start 380; Stop 404
gacgaaaaaacctgagaatcatctc

SEQ ID NO: 72646 - DNA, 25 bp, Artificial
  probe
  misc_feature (1)..(25): SEQ ID NO: 2180; WAN024B5D_at; Start 377; Stop 401
aaagacgaaaaaacctgagaatcat

SEQ ID NO: 72647 - DNA, 25 bp, Artificial
  probe
  misc_feature (1)..(25): SEQ ID NO: 2180; WAN024B5D_at; Start 315; Stop 339
ttatatcacagttttaaatctagct

SEQ ID NO: 72648 - DNA, 25 bp, Artificial
  probe
  misc_feature (1)..(25): SEQ ID NO: 2180; WAN024B5D_at; Start 399; Stop 423
catctcaggcttggtcattaaattt

SEQ ID NO: 72649 - DNA, 25 bp, Artificial
  probe
  misc_feature (1)..(25): SEQ ID NO: 2180; WAN024B5D_at; Start 280; Stop 304
tctgatgacgtacagtcatatttct

SEQ ID NO: 72650 - DNA, 25 bp, Artificial
  probe
  misc_feature (1)..(25): SEQ ID NO: 2180; WAN024B5D_at; Start 271; Stop 295
gctgaaacttctgatgacgtacagt

SEQ ID NO: 72651 - DNA, 25 bp, Artificial
  probe
  misc_feature (1)..(25): SEQ ID NO: 2180; WAN024B5D_at; Start 430; Stop 454
caatatcgaaaagtggagaaagtgg

SEQ ID NO: 72652 - DNA, 25 bp, Artificial
  probe
  misc_feature (1)..(25): SEQ ID NO: 2180; WAN024B5D_at; Start 339; Stop 363
tttactagattcaccgctactatct

SEQ ID NO: 72653 - DNA, 25 bp, Artificial
  probe
  misc_feature (1)..(25): SEQ ID NO: 2180; WAN024B5D_at; Start 283; Stop 307
gatgacgtacagtcatatttcttct

SEQ ID NO: 72654 - DNA, 25 bp, Artificial
  probe
  misc_feature (1)..(25): SEQ ID NO: 2180; WAN024B5D_at; Start 344; Stop 368
tagattcaccgctactatctattta

SEQ ID NO: 72655 - DNA, 25 bp, Artificial
  probe
  misc_feature (1)..(25): SEQ ID NO: 2180; WAN024B5D_at; Start 383; Stop 407
gaaaaaacctgagaatcatctcagg

SEQ ID NO: 72656 - DNA, 25 bp, Artificial
  probe
  misc_feature (1)..(25): SEQ ID NO: 2180; WAN024B5D_at; Start 337; Stop 361
gctttactagattcaccgctactat

SEQ ID NO: 72657 - DNA, 25 bp, Artificial
  probe
  misc_feature (1)..(25): SEQ ID NO: 2180; WAN024B5D_at; Start 335; Stop 359
tagctttactagattcaccgctact

SEQ ID NO: 72658 - DNA, 25 bp, Artificial
  probe
  misc_feature (1)..(25): SEQ ID NO: 2180; WAN024B5D_at; Start 394; Stop 418
agaatcatctcaggcttggtcatta

SEQ ID NO: 72659 - DNA, 25 bp, Artificial
  probe
  misc_feature (1)..(25): SEQ ID NO: 2180; WAN024B5D_at; Start 402; Stop 426
ctcaggcttggtcattaaatttttt

SEQ ID NO: 72660 - DNA, 25 bp, Artificial
  probe
  misc_feature (1)..(25): SEQ ID NO: 2180; WAN024B5D_at; Start 456; Stop 480
cgtttttcatgaatacgtacgatag

SEQ ID NO: 72661 - DNA, 25 bp, Artificial
  probe
  misc_feature (1)..(25): SEQ ID NO: 2180; WAN024B5D_at; Start 348; Stop 372
ttcaccgctactatctatttattcg

SEQ ID NO: 72662 - DNA, 25 bp, Artificial
  probe
  misc_feature (1)..(25): SEQ ID NO: 2180; WAN024B5D_at; Start 269; Stop 293
tcgctgaaacttctgatgacgtaca

SEQ ID NO: 72663 - DNA, 25 bp, Artificial
  probe
  misc_feature (1)..(25): SEQ ID NO: 2180; WAN024B5D_at; Start 276; Stop 300
aacttctgatgacgtacagtcatat

SEQ ID NO: 72664 - DNA, 25 bp, Artificial
  probe
  misc_feature (1)..(25): SEQ ID NO: 2180; WAN024B5D_at; Start 393; Stop 417
gagaatcatctcaggcttggtcatt

SEQ ID NO: 72665 - DNA, 25 bp, Artificial
  probe
  misc_feature (1)..(25): SEQ ID NO: 2180; WAN024B5D_at; Start 286; Stop 310
gacgtacagtcatatttcttctctt

SEQ ID NO: 72666 - DNA, 25 bp, Artificial
  probe
  misc_feature (1)..(25): SEQ ID NO: 2180; WAN024B5D_at; Start 427; Stop 451
tctcaatatcgaaaagtggagaaag

SEQ ID NO: 72667 - DNA, 25 bp, Artificial
  probe
  misc_feature (1)..(25): SEQ ID NO: 2180; WAN024B5D_at; Start 288; Stop 312
cgtacagtcatatttcttctctttt

SEQ ID NO: 72668 - DNA, 25 bp, Artificial
  probe
  misc_feature (1)..(25): SEQ ID NO: 2180; WAN024B5D_at; Start 424; Stop 448
ttttctcaatatcgaaaagtggaga

SEQ ID NO: 72669 - DNA, 25 bp, Artificial
  probe
  misc_feature (1)..(25): SEQ ID NO: 2180; WAN024B5D_at; Start 434; Stop 458
atcgaaaagtggagaaagtggtcgt

SEQ ID NO: 72670 - DNA, 25 bp, Artificial
  probe
  misc_feature (1)..(25): SEQ ID NO: 2180; WAN024B5D_at; Start 333; Stop 357
tctagctttactagattcaccgcta

SEQ ID NO: 72671 - DNA, 25 bp, Artificial
  probe
  misc_feature (1)..(25): SEQ ID NO: 2180; WAN024B5D_at; Start 444; Stop 468
ggagaaagtggtcgtttttcatgaa

SEQ ID NO: 72672 - DNA, 25 bp, Artificial
  probe
  misc_feature (1)..(25): SEQ ID NO: 2180; WAN024B5D_at; Start 452; Stop 476
tggtcgtttttcatgaatacgtacg

SEQ ID NO: 72673 - DNA, 25 bp, Artificial
  probe
  misc_feature (1)..(25): SEQ ID NO: 2180; WAN024B5D_at; Start 322; Stop 346
acagttttaaatctagctttactag

SEQ ID NO: 72674 - DNA, 25 bp, Artificial
  probe
  misc_feature (1)..(25): SEQ ID NO: 2180; WAN024B5D_at; Start 448; Stop 472
aaagtggtcgtttttcatgaatacg

SEQ ID NO: 72675 - DNA, 25 bp, Artificial
  probe
  misc_feature (1)..(25): SEQ ID NO: 2180; WAN024B5D_at; Start 396; Stop 420
aatcatctcaggcttggtcattaaa

SEQ ID NO: 72676 - DNA, 25 bp, Artificial
  probe
  misc_feature (1)..(25): SEQ ID NO: 2180; WAN024B5D_at; Start 433; Stop 457
tatcgaaaagtggagaaagtggtcg

SEQ ID NO: 72677 - DNA, 25 bp, Artificial
  probe
  misc_feature (1)..(25): SEQ ID NO: 2180; WAN024B5D_at; Start 274; Stop 298
gaaacttctgatgacgtacagtcat

SEQ ID NO: 72678 - DNA, 25 bp, Artificial
  probe
  misc_feature (1)..(25): SEQ ID NO: 2177; WAN024B5E_s_at; Start 426; Stop 450
ctttgagtgtaattttagaaatctg

SEQ ID NO: 72679 - DNA, 25 bp, Artificial
  probe
  misc_feature (1)..(25): SEQ ID NO: 2177; WAN024B5E_s_at; Start 412; Stop 436
ctcaatgacttccactttgagtgta

SEQ ID NO: 72680 - DNA, 25 bp, Artificial
  probe
  misc_feature (1)..(25): SEQ ID NO: 2177; WAN024B5E_s_at; Start 427; Stop 451
tttgagtgtaattttagaaatctgc

SEQ ID NO: 72681 - DNA, 25 bp, Artificial
  probe
  misc_feature (1)..(25): SEQ ID NO: 2177; WAN024B5E_s_at; Start 422; Stop 446
tccactttgagtgtaattttagaaa

SEQ ID NO: 72682 - DNA, 25 bp, Artificial
  probe
  misc_feature (1)..(25): SEQ ID NO: 2177; WAN024B5E_s_at; Start 423; Stop 447
ccactttgagtgtaattttagaaat

SEQ ID NO: 72683 - DNA, 25 bp, Artificial
  probe
  misc_feature (1)..(25): SEQ ID NO: 2177; WAN024B5E_s_at; Start 421; Stop 445
ttccactttgagtgtaattttagaa

SEQ ID NO: 72684 - DNA, 25 bp, Artificial
  probe
  misc_feature (1)..(25): SEQ ID NO: 2177; WAN024B5E_s_at; Start 419; Stop 443
acttccactttgagtgtaattttag

SEQ ID NO: 72685 - DNA, 25 bp, Artificial
  probe
  misc_feature (1)..(25): SEQ ID NO: 2177; WAN024B5E_s_at; Start 418; Stop 442
gacttccactttgagtgtaatttta

SEQ ID NO: 72686 - DNA, 25 bp, Artificial
  probe
  misc_feature (1)..(25): SEQ ID NO: 2177; WAN024B5E_s_at; Start 420; Stop 444
cttccactttgagtgtaattttaga

SEQ ID NO: 72687 - DNA, 25 bp, Artificial
  probe
  misc_feature (1)..(25): SEQ ID NO: 2177; WAN024B5E_s_at; Start 428; Stop 452
ttgagtgtaattttagaaatctgcc

SEQ ID NO: 72688 - DNA, 25 bp, Artificial
  probe
  misc_feature (1)..(25): SEQ ID NO: 2177; WAN024B5E_s_at; Start 425; Stop 449
actttgagtgtaattttagaaatct

SEQ ID NO: 72689 - DNA, 25 bp, Artificial
  probe
  misc_feature (1)..(25): SEQ ID NO: 2177; WAN024B5E_s_at; Start 414; Stop 438
caatgacttccactttgagtgtaat

SEQ ID NO: 72690 - DNA, 25 bp, Artificial
  probe
  misc_feature (1)..(25): SEQ ID NO: 2177; WAN024B5E_s_at; Start 424; Stop 448
cactttgagtgtaattttagaaatc

SEQ ID NO: 72691 - DNA, 25 bp, Artificial
  probe
  misc_feature (1)..(25): SEQ ID NO: 2177; WAN024B5E_s_at; Start 415; Stop 439
aatgacttccactttgagtgtaatt

SEQ ID NO: 72692 - DNA, 25 bp, Artificial
  probe
  misc_feature (1)..(25): SEQ ID NO: 2177; WAN024B5E_s_at; Start 417; Stop 441
tgacttccactttgagtgtaatttt

SEQ ID NO: 72693 - DNA, 25 bp, Artificial
  probe
  misc_feature (1)..(25): SEQ ID NO: 2177; WAN024B5E_s_at; Start 413; Stop 437
tcaatgacttccactttgagtgtaa

SEQ ID NO: 72694 - DNA, 25 bp, Artificial
  probe
  misc_feature (1)..(25): SEQ ID NO: 2177; WAN024B5E_s_at; Start 416; Stop 440
atgacttccactttgagtgtaattt

SEQ ID NO: 72695 - DNA, 25 bp, Artificial
  probe
  misc_feature (1)..(25): SEQ ID NO: 2177; WAN024B5E_s_at; Start 429; Stop 453
tgagtgtaattttagaaatctgcct

SEQ ID NO: 72696 - DNA, 25 bp, Artificial
  probe
  misc_feature (1)..(25): SEQ ID NO: 2182; WAN024B5F_s_at; Start 568; Stop 592
atccgaaatcactttcttcgctacg

SEQ ID NO: 72697 - DNA, 25 bp, Artificial
  probe
  misc_feature (1)..(25): SEQ ID NO: 2182; WAN024B5F_s_at; Start 563; Stop 587
ctgtcatccgaaatcactttcttcg

SEQ ID NO: 72698 - DNA, 25 bp, Artificial
  probe
  misc_feature (1)..(25): SEQ ID NO: 2182; WAN024B5F_s_at; Start 436; Stop 460
gatttttctcggcttccaaagatta

SEQ ID NO: 72699 - DNA, 25 bp, Artificial
  probe
  misc_feature (1)..(25): SEQ ID NO: 2182; WAN024B5F_s_at; Start 445; Stop 469
cggcttccaaagattatgtcttggg

SEQ ID NO: 72700 - DNA, 25 bp, Artificial
  probe
  misc_feature (1)..(25): SEQ ID NO: 2182; WAN024B5F_s_at; Start 444; Stop 468
tcggcttccaaagattatgtcttgg

SEQ ID NO: 72701 - DNA, 25 bp, Artificial
  probe
  misc_feature (1)..(25): SEQ ID NO: 2182; WAN024B5F_s_at; Start 570; Stop 594
ccgaaatcactttcttcgctacgat

SEQ ID NO: 72702 - DNA, 25 bp, Artificial
  probe
  misc_feature (1)..(25): SEQ ID NO: 2182; WAN024B5F_s_at; Start 566; Stop 590
tcatccgaaatcactttcttcgcta

SEQ ID NO: 72703 - DNA, 25 bp, Artificial
  probe
  misc_feature (1)..(25): SEQ ID NO: 2182; WAN024B5F_s_at; Start 582; Stop 606
tcttcgctacgatagagccgttcgt

SEQ ID NO: 72704 - DNA, 25 bp, Artificial
  probe
  misc_feature (1)..(25): SEQ ID NO: 2182; WAN024B5F_s_at; Start 573; Stop 597
aaatcactttcttcgctacgataga

SEQ ID NO: 72705 - DNA, 25 bp, Artificial
  probe
  misc_feature (1)..(25): SEQ ID NO: 2182; WAN024B5F_s_at; Start 567; Stop 591
catccgaaatcactttcttcgctac

SEQ ID NO: 72706 - DNA, 25 bp, Artificial
  probe
  misc_feature (1)..(25): SEQ ID NO: 2182; WAN024B5F_s_at; Start 578; Stop 602
actttcttcgctacgatagagccgt

SEQ ID NO: 72707 - DNA, 25 bp, Artificial
  probe
  misc_feature (1)..(25): SEQ ID NO: 2182; WAN024B5F_s_at; Start 576; Stop 600
tcactttcttcgctacgatagagcc

SEQ ID NO: 72708 - DNA, 25 bp, Artificial
  probe
  misc_feature (1)..(25): SEQ ID NO: 2182; WAN024B5F_s_at; Start 440; Stop 464
tttctcggcttccaaagattatgtc

SEQ ID NO: 72709 - DNA, 25 bp, Artificial
  probe
  misc_feature (1)..(25): SEQ ID NO: 2182; WAN024B5F_s_at; Start 443; Stop 467
ctcggcttccaaagattatgtcttg

SEQ ID NO: 72710 - DNA, 25 bp, Artificial
  probe
  misc_feature (1)..(25): SEQ ID NO: 2182; WAN024B5F_s_at; Start 431; Stop 455
agcatgatttttctcggcttccaaa

SEQ ID NO: 72711 - DNA, 25 bp, Artificial
  probe
  misc_feature (1)..(25): SEQ ID NO: 2182; WAN024B5F_s_at; Start 565; Stop 589
gtcatccgaaatcactttcttcgct

SEQ ID NO: 72712 - DNA, 25 bp, Artificial
  probe
  misc_feature (1)..(25): SEQ ID NO: 2182; WAN024B5F_s_at; Start 571; Stop 595
cgaaatcactttcttcgctacgata

SEQ ID NO: 72713 - DNA, 25 bp, Artificial
  probe
  misc_feature (1)..(25): SEQ ID NO: 2182; WAN024B5F_s_at; Start 433; Stop 457
catgatttttctcggcttccaaaga

SEQ ID NO: 72714 - DNA, 25 bp, Artificial
  probe
  misc_feature (1)..(25): SEQ ID NO: 2182; WAN024B5F_s_at; Start 432; Stop 456
gcatgatttttctcggcttccaaag

SEQ ID NO: 72715 - DNA, 25 bp, Artificial
  probe
  misc_feature (1)..(25): SEQ ID NO: 2182; WAN024B5F_s_at; Start 577; Stop 601
cactttcttcgctacgatagagccg

SEQ ID NO: 72716 - DNA, 25 bp, Artificial
  probe
  misc_feature (1)..(25): SEQ ID NO: 2182; WAN024B5F_s_at; Start 564; Stop 588
tgtcatccgaaatcactttcttcgc

SEQ ID NO: 72717 - DNA, 25 bp, Artificial
  probe
  misc_feature (1)..(25): SEQ ID NO: 2182; WAN024B5F_s_at; Start 442; Stop 466
tctcggcttccaaagattatgtctt

SEQ ID NO: 72718 - DNA, 25 bp, Artificial
  probe
  misc_feature (1)..(25): SEQ ID NO: 2182; WAN024B5F_s_at; Start 439; Stop 463
ttttctcggcttccaaagattatgt

SEQ ID NO: 72719 - DNA, 25 bp, Artificial
  probe
  misc_feature (1)..(25): SEQ ID NO: 2182; WAN024B5F_s_at; Start 438; Stop 462
tttttctcggcttccaaagattatg

SEQ ID NO: 72720 - DNA, 25 bp, Artificial
  probe
  misc_feature (1)..(25): SEQ ID NO: 2182; WAN024B5F_s_at; Start 441; Stop 465
ttctcggcttccaaagattatgtct

SEQ ID NO: 72721 - DNA, 25 bp, Artificial
  probe
  misc_feature (1)..(25): SEQ ID NO: 2182; WAN024B5F_s_at; Start 430; Stop 454
gagcatgatttttctcggcttccaa

SEQ ID NO: 72722 - DNA, 25 bp, Artificial
  probe
  misc_feature (1)..(25): SEQ ID NO: 2182; WAN024B5F_s_at; Start 579; Stop 603
ctttcttcgctacgatagagccgtt

SEQ ID NO: 72723 - DNA, 25 bp, Artificial
  probe
  misc_feature (1)..(25): SEQ ID NO: 2182; WAN024B5F_s_at; Start 525; Stop 549
tcttaatattatcactgttcttgaa

SEQ ID NO: 72724 - DNA, 25 bp, Artificial
  probe
  misc_feature (1)..(25): SEQ ID NO: 2182; WAN024B5F_s_at; Start 572; Stop 596
gaaatcactttcttcgctacgatag

SEQ ID NO: 72725 - DNA, 25 bp, Artificial
  probe
  misc_feature (1)..(25): SEQ ID NO: 2182; WAN024B5F_s_at; Start 580; Stop 604
tttcttcgctacgatagagccgttc

SEQ ID NO: 72726 - DNA, 25 bp, Artificial
  probe
  misc_feature (1)..(25): SEQ ID NO: 2182; WAN024B5F_s_at; Start 581; Stop 605
ttcttcgctacgatagagccgttcg

SEQ ID NO: 72727 - DNA, 25 bp, Artificial
  probe
  misc_feature (1)..(25): SEQ ID NO: 2182; WAN024B5F_s_at; Start 574; Stop 598
aatcactttcttcgctacgatagag

SEQ ID NO: 72728 - DNA, 25 bp, Artificial
  probe
  misc_feature (1)..(25): SEQ ID NO: 2182; WAN024B5F_s_at; Start 569; Stop 593
tccgaaatcactttcttcgctacga

SEQ ID NO: 72729 - DNA, 25 bp, Artificial
  probe
  misc_feature (1)..(25): SEQ ID NO: 2182; WAN024B5F_s_at; Start 437; Stop 461
atttttctcggcttccaaagattat

SEQ ID NO: 72730 - DNA, 25 bp, Artificial
  probe
  misc_feature (1)..(25): SEQ ID NO: 2949; WAN024B5H_at; Start 44; Stop 68
aagaattggcagaacgtgtggcgca

SEQ ID NO: 72731 - DNA, 25 bp, Artificial
  probe
  misc_feature (1)..(25): SEQ ID NO: 2949; WAN024B5H_at; Start 913; Stop 937
cgtattcatgaaaaacgaccacttt

SEQ ID NO: 72732 - DNA, 25 bp, Artificial
  probe
  misc_feature (1)..(25): SEQ ID NO: 2949; WAN024B5H_at; Start 702; Stop 726
tcatgcggcagatgctcttgcggaa

SEQ ID NO: 72733 - DNA, 25 bp, Artificial
  probe
  misc_feature (1)..(25): SEQ ID NO: 2949; WAN024B5H_at; Start 589; Stop 613
cgtcgtagcgttgataagatgaata

SEQ ID NO: 72734 - DNA, 25 bp, Artificial
  probe
  misc_feature (1)..(25): SEQ ID NO: 2949; WAN024B5H_at; Start 732; Stop 756
tgctgttgaagtctatgcaagctgt

SEQ ID NO: 72735 - DNA, 25 bp, Artificial
  probe
  misc_feature (1)..(25): SEQ ID NO: 2949; WAN024B5H_at; Start 261; Stop 285
caatgttgtcatgccttactatggg

SEQ ID NO: 72736 - DNA, 25 bp, Artificial
  probe
  misc_feature (1)..(25): SEQ ID NO: 2949; WAN024B5H_at; Start 876; Stop 900
gatttcaatcgctcatctcctaggg

SEQ ID NO: 72737 - DNA, 25 bp, Artificial
  probe
  misc_feature (1)..(25): SEQ ID NO: 2949; WAN024B5H_at; Start 672; Stop 696
tgatatgattgataccgctggaacg

SEQ ID NO: 72738 - DNA, 25 bp, Artificial
  probe
  misc_feature (1)..(25): SEQ ID NO: 2949; WAN024B5H_at; Start 632; Stop 656
tcatcggtaaggttgaaggcaagac

SEQ ID NO: 72739 - DNA, 25 bp, Artificial
  probe
  misc_feature (1)..(25): SEQ ID NO: 2949; WAN024B5H_at; Start 329; Stop 353
cttcaaaacttgtcgcaaatatgct

SEQ ID NO: 72740 - DNA, 25 bp, Artificial
  probe
  misc_feature (1)..(25): SEQ ID NO: 2949; WAN024B5H_at; Start 785; Stop 809
cggacaatatccaaaaatcagctat

SEQ ID NO: 72741 - DNA, 25 bp, Artificial
  probe
  misc_feature (1)..(25): SEQ ID NO: 2949; WAN024B5H_at; Start 142; Stop 166
gaatcaatccgtgggaaacacgtct

SEQ ID NO: 72742 - DNA, 25 bp, Artificial
  probe
  misc_feature (1)..(25): SEQ ID NO: 2949; WAN024B5H_at; Start 575; Stop 599
ctattattgataaacgtcgtagcgt

SEQ ID NO: 72743 - DNA, 25 bp, Artificial
  probe
  misc_feature (1)..(25): SEQ ID NO: 2949; WAN024B5H_at; Start 377; Stop 401
tattgaccatcgacttgcatgctgc

SEQ ID NO: 72744 - DNA, 25 bp, Artificial
  probe
  misc_feature (1)..(25): SEQ ID NO: 2949; WAN024B5H_at; Start 827; Stop 851
tggataccatctatctgccagaaga

SEQ ID NO: 72745 - DNA, 25 bp, Artificial
  probe
  misc_feature (1)..(25): SEQ ID NO: 2949; WAN024B5H_at; Start 275; Stop 299
cttactatgggtatgcacgtcagga

SEQ ID NO: 72746 - DNA, 25 bp, Artificial
  probe
  misc_feature (1)..(25): SEQ ID NO: 2949; WAN024B5H_at; Start 309; Stop 333
gagagcgcgtgagccaatcacttca

SEQ ID NO: 72747 - DNA, 25 bp, Artificial
  probe
  misc_feature (1)..(25): SEQ ID NO: 2949; WAN024B5H_at; Start 112; Stop 136
tcagatggagagattcaggtcaaca

SEQ ID NO: 72748 - DNA, 25 bp, Artificial
  probe
  misc_feature (1)..(25): SEQ ID NO: 2949; WAN024B5H_at; Start 175; Stop 199
caatcaactagttcgcctgtaaatg

SEQ ID NO: 72749 - DNA, 25 bp, Artificial
  probe
  misc_feature (1)..(25): SEQ ID NO: 2949; WAN024B5H_at; Start 530; Stop 554
tgactcgtgctcgtaagttggcaga

SEQ ID NO: 72750 - DNA, 25 bp, Artificial
  probe
  misc_feature (1)..(25): SEQ ID NO: 2949; WAN024B5H_at; Start 394; Stop 418
catgctgcgcaaattcaaggattct

SEQ ID NO: 72751 - DNA, 25 bp, Artificial
  probe
  misc_feature (1)..(25): SEQ ID NO: 2949; WAN024B5H_at; Start 361; Stop 385
gctggagtggatcgtttattgacca

SEQ ID NO: 72752 - DNA, 25 bp, Artificial
  probe
  misc_feature (1)..(25): SEQ ID NO: 2949; WAN024B5H_at; Start 290; Stop 314
cacgtcaggatagaaaggcgagagc

SEQ ID NO: 72753 - DNA, 25 bp, Artificial
  probe
  misc_feature (1)..(25): SEQ ID NO: 2949; WAN024B5H_at; Start 431; Stop 455
tggatcatttgatgggtgctcctct

SEQ ID NO: 72754 - DNA, 25 bp, Artificial
  probe
  misc_feature (1)..(25): SEQ ID NO: 2949; WAN024B5H_at; Start 745; Stop 769
tatgcaagctgtacgcacccagttc

SEQ ID NO: 72755 - DNA, 25 bp, Artificial
  probe
  misc_feature (1)..(25): SEQ ID NO: 2949; WAN024B5H_at; Start 764; Stop 788
cagttctttctggtcctgctacgga

SEQ ID NO: 72756 - DNA, 25 bp, Artificial
  probe
  misc_feature (1)..(25): SEQ ID NO: 2949; WAN024B5H_at; Start 189; Stop 213
gcctgtaaatgacaatctgcttgaa

SEQ ID NO: 72757 - DNA, 25 bp, Artificial
  probe
  misc_feature (1)..(25): SEQ ID NO: 2949; WAN024B5H_at; Start 95; Stop 119
caagtgttcgccaattttcagatgg

SEQ ID NO: 72758 - DNA, 25 bp, Artificial
  probe
  misc_feature (1)..(25): SEQ ID NO: 2949; WAN024B5H_at; Start 344; Stop 368
caaatatgcttgaagtagctggagt

SEQ ID NO: 72759 - DNA, 25 bp, Artificial
  probe
  misc_feature (1)..(25): SEQ ID NO: 2949; WAN024B5H_at; Start 844; Stop 868
ccagaagagcgtttgattgataaga

SEQ ID NO: 72760 - DNA, 25 bp, Artificial
  probe
  misc_feature (1)..(25): SEQ ID NO: 2949; WAN024B5H_at; Start 717; Stop 741
tcttgcggaagctggtgctgttgaa

SEQ ID NO: 72761 - DNA, 25 bp, Artificial
  probe
  misc_feature (1)..(25): SEQ ID NO: 2949; WAN024B5H_at; Start 227; Stop 251
tagatgctttgaagcgtgcgagtgc

SEQ ID NO: 72762 - DNA, 25 bp, Artificial
  probe
  misc_feature (1)..(25): SEQ ID NO: 2949; WAN024B5H_at; Start 899; Stop 923
gggatgctatcgtacgtattcatga

SEQ ID NO: 72763 - DNA, 25 bp, Artificial
  probe
  misc_feature (1)..(25): SEQ ID NO: 2949; WAN024B5H_at; Start 687; Stop 711
cgctggaacgatttgtcatgcggca

SEQ ID NO: 72764 - DNA, 25 bp, Artificial
  probe
  misc_feature (1)..(25): SEQ ID NO: 2178; WAN024B5J_s_at; Start 21; Stop 45
cacaaaattactagacattaaagac

SEQ ID NO: 72765 - DNA, 25 bp, Artificial
  probe
  misc_feature (1)..(25): SEQ ID NO: 2178; WAN024B5J_s_at; Start 16; Stop 40
tttatcacaaaattactagacatta

SEQ ID NO: 72766 - DNA, 25 bp, Artificial
  probe
  misc_feature (1)..(25): SEQ ID NO: 2178; WAN024B5J_s_at; Start 20; Stop 44
tcacaaaattactagacattaaaga

SEQ ID NO: 72767 - DNA, 25 bp, Artificial
  probe
  misc_feature (1)..(25): SEQ ID NO: 2178; WAN024B5J_s_at; Start 14; Stop 38
attttatcacaaaattactagacat

SEQ ID NO: 72768 - DNA, 25 bp, Artificial
  probe
  misc_feature (1)..(25): SEQ ID NO: 2178; WAN024B5J_s_at; Start 15; Stop 39
ttttatcacaaaattactagacatt

SEQ ID NO: 72769 - DNA, 25 bp, Artificial
  probe
  misc_feature (1)..(25): SEQ ID NO: 2178; WAN024B5J_s_at; Start 17; Stop 41
ttatcacaaaattactagacattaa

SEQ ID NO: 72770 - DNA, 25 bp, Artificial
  probe
  misc_feature (1)..(25): SEQ ID NO: 2178; WAN024B5J_s_at; Start 18; Stop 42
tatcacaaaattactagacattaaa

SEQ ID NO: 72771 - DNA, 25 bp, Artificial
  probe
  misc_feature (1)..(25): SEQ ID NO: 2178; WAN024B5J_s_at; Start 19; Stop 43
atcacaaaattactagacattaaag

SEQ ID NO: 72772 - DNA, 25 bp, Artificial
  probe
  misc_feature (1)..(25): SEQ ID NO: 2178; WAN024B5J_s_at; Start 13; Stop 37
cattttatcacaaaattactagaca

SEQ ID NO: 72773 - DNA, 25 bp, Artificial
  probe
  misc_feature (1)..(25): SEQ ID NO: 2179; WAN024B5K_s_at; Start 426; Stop 450
ctttgagtgtaattttagaaatctg

SEQ ID NO: 72774 - DNA, 25 bp, Artificial
  probe
  misc_feature (1)..(25): SEQ ID NO: 2179; WAN024B5K_s_at; Start 412; Stop 436
ctcaatgacttccactttgagtgta

SEQ ID NO: 72775 - DNA, 25 bp, Artificial
  probe
  misc_feature (1)..(25): SEQ ID NO: 2179; WAN024B5K_s_at; Start 427; Stop 451
tttgagtgtaattttagaaatctgc

SEQ ID NO: 72776 - DNA, 25 bp, Artificial
  probe
  misc_feature (1)..(25): SEQ ID NO: 2179; WAN024B5K_s_at; Start 423; Stop 447
ccactttgagtgtaattttagaaat

SEQ ID NO: 72777 - DNA, 25 bp, Artificial
  probe
  misc_feature (1)..(25): SEQ ID NO: 2179; WAN024B5K_s_at; Start 422; Stop 446
tccactttgagtgtaattttagaaa

SEQ ID NO: 72778 - DNA, 25 bp, Artificial
  probe
  misc_feature (1)..(25): SEQ ID NO: 2179; WAN024B5K_s_at; Start 421; Stop 445
ttccactttgagtgtaattttagaa

SEQ ID NO: 72779 - DNA, 25 bp, Artificial
  probe
  misc_feature (1)..(25): SEQ ID NO: 2179; WAN024B5K_s_at; Start 419; Stop 443
acttccactttgagtgtaattttag

SEQ ID NO: 72780 - DNA, 25 bp, Artificial
  probe
  misc_feature (1)..(25): SEQ ID NO: 2179; WAN024B5K_s_at; Start 418; Stop 442
gacttccactttgagtgtaatttta

SEQ ID NO: 72781 - DNA, 25 bp, Artificial
  probe
  misc_feature (1)..(25): SEQ ID NO: 2179; WAN024B5K_s_at; Start 420; Stop 444
cttccactttgagtgtaattttaga

SEQ ID NO: 72782 - DNA, 25 bp, Artificial
  probe
  misc_feature (1)..(25): SEQ ID NO: 2179; WAN024B5K_s_at; Start 428; Stop 452
ttgagtgtaattttagaaatctgcc

SEQ ID NO: 72783 - DNA, 25 bp, Artificial
  probe
  misc_feature (1)..(25): SEQ ID NO: 2179; WAN024B5K_s_at; Start 425; Stop 449
actttgagtgtaattttagaaatct

SEQ ID NO: 72784 - DNA, 25 bp, Artificial
  probe
  misc_feature (1)..(25): SEQ ID NO: 2179; WAN024B5K_s_at; Start 414; Stop 438
caatgacttccactttgagtgtaat

SEQ ID NO: 72785 - DNA, 25 bp, Artificial
  probe
  misc_feature (1)..(25): SEQ ID NO: 2179; WAN024B5K_s_at; Start 424; Stop 448
cactttgagtgtaattttagaaatc

SEQ ID NO: 72786 - DNA, 25 bp, Artificial
  probe
  misc_feature (1)..(25): SEQ ID NO: 2179; WAN024B5K_s_at; Start 415; Stop 439
aatgacttccactttgagtgtaatt

SEQ ID NO: 72787 - DNA, 25 bp, Artificial
  probe
  misc_feature (1)..(25): SEQ ID NO: 2179; WAN024B5K_s_at; Start 417; Stop 441
tgacttccactttgagtgtaatttt

SEQ ID NO: 72788 - DNA, 25 bp, Artificial
  probe
  misc_feature (1)..(25): SEQ ID NO: 2179; WAN024B5K_s_at; Start 413; Stop 437
tcaatgacttccactttgagtgtaa

SEQ ID NO: 72789 - DNA, 25 bp, Artificial
  probe
  misc_feature (1)..(25): SEQ ID NO: 2179; WAN024B5K_s_at; Start 416; Stop 440
atgacttccactttgagtgtaattt

SEQ ID NO: 72790 - DNA, 25 bp, Artificial
  probe
  misc_feature (1)..(25): SEQ ID NO: 2179; WAN024B5K_s_at; Start 429; Stop 453
tgagtgtaattttagaaatctgcct

SEQ ID NO: 72791 - DNA, 25 bp, Artificial
  probe
  misc_feature (1)..(25): SEQ ID NO: 2013; WAN024B5M_s_at; Start 479; Stop 503
aggctcaggctgaaacagtctccca

SEQ ID NO: 72792 - DNA, 25 bp, Artificial
  probe
  misc_feature (1)..(25): SEQ ID NO: 2013; WAN024B5M_s_at; Start 480; Stop 504
ggctcaggctgaaacagtctcccag

SEQ ID NO: 72793 - DNA, 25 bp, Artificial
  probe
  misc_feature (1)..(25): SEQ ID NO: 2013; WAN024B5M_s_at; Start 478; Stop 502
taggctcaggctgaaacagtctccc

SEQ ID NO: 72794 - DNA, 25 bp, Artificial
  probe
  misc_feature (1)..(25): SEQ ID NO: 2013; WAN024B5M_s_at; Start 477; Stop 501
ctaggctcaggctgaaacagtctcc

SEQ ID NO: 72795 - DNA, 25 bp, Artificial
  probe
  misc_feature (1)..(25): SEQ ID NO: 1993; WAN024B5N_at; Start 132; Stop 156
ccctgaaggaccgatgataacgaca

SEQ ID NO: 72796 - DNA, 25 bp, Artificial
  probe
  misc_feature (1)..(25): SEQ ID NO: 1993; WAN024B5N_at; Start 91; Stop 115
tccaacaaattcatagagcgaagca

SEQ ID NO: 72797 - DNA, 25 bp, Artificial
  probe
  misc_feature (1)..(25): SEQ ID NO: 1993; WAN024B5N_at; Start 35; Stop 59
tcttcttgtccgtaatatcgactcc

SEQ ID NO: 72798 - DNA, 25 bp, Artificial
  probe
  misc_feature (1)..(25): SEQ ID NO: 1993; WAN024B5N_at; Start 135; Stop 159
tgaaggaccgatgataacgacaact

SEQ ID NO: 72799 - DNA, 25 bp, Artificial
  probe
  misc_feature (1)..(25): SEQ ID NO: 1993; WAN024B5N_at; Start 45; Stop 69
cgtaatatcgactccctcaaagata

SEQ ID NO: 72800 - DNA, 25 bp, Artificial
  probe
  misc_feature (1)..(25): SEQ ID NO: 1993; WAN024B5N_at; Start 177; Stop 201
gaggttgatgcccttcaatacttca

SEQ ID NO: 72801 - DNA, 25 bp, Artificial
  probe
  misc_feature (1)..(25): SEQ ID NO: 1993; WAN024B5N_at; Start 6; Stop 30
catcttctcacgcatggcaaacagg

SEQ ID NO: 72802 - DNA, 25 bp, Artificial
  probe
  misc_feature (1)..(25): SEQ ID NO: 1993; WAN024B5N_at; Start 14; Stop 38
cacgcatggcaaacaggtcattctt

SEQ ID NO: 72803 - DNA, 25 bp, Artificial
  probe
  misc_feature (1)..(25): SEQ ID NO: 1993; WAN024B5N_at; Start 17; Stop 41
gcatggcaaacaggtcattcttctt

SEQ ID NO: 72804 - DNA, 25 bp, Artificial
  probe
  misc_feature (1)..(25): SEQ ID NO: 1993; WAN024B5N_at; Start 139; Stop 163
ggaccgatgataacgacaacttctc

SEQ ID NO: 72805 - DNA, 25 bp, Artificial
  probe
  misc_feature (1)..(25): SEQ ID NO: 1993; WAN024B5N_at; Start 291; Stop 315
gctttcaaggctactgtcagaatag

SEQ ID NO: 72806 - DNA, 25 bp, Artificial
  probe
  misc_feature (1)..(25): SEQ ID NO: 1993; WAN024B5N_at; Start 286; Stop 310
caaaagctttcaaggctactgtcag

SEQ ID NO: 72807 - DNA, 25 bp, Artificial
  probe
  misc_feature (1)..(25): SEQ ID NO: 1993; WAN024B5N_at; Start 104; Stop 128
tagagcgaagcaaggtagatttccc

SEQ ID NO: 72808 - DNA, 25 bp, Artificial
  probe
  misc_feature (1)..(25): SEQ ID NO: 1993; WAN024B5N_at; Start 252; Stop 276
cattatttcttatctccttgtccca

SEQ ID NO: 72809 - DNA, 25 bp, Artificial
  probe
  misc_feature (1)..(25): SEQ ID NO: 1993; WAN024B5N_at; Start 27; Stop 51
caggtcattcttcttgtccgtaata

SEQ ID NO: 72810 - DNA, 25 bp, Artificial
  probe
  misc_feature (1)..(25): SEQ ID NO: 1993; WAN024B5N_at; Start 267; Stop 291
ccttgtcccatatgtttttcaaaag

SEQ ID NO: 72811 - DNA, 25 bp, Artificial
  probe
  misc_feature (1)..(25): SEQ ID NO: 1993; WAN024B5N_at; Start 144; Stop 168
gatgataacgacaacttctcctctt

SEQ ID NO: 72812 - DNA, 25 bp, Artificial
  probe
  misc_feature (1)..(25): SEQ ID NO: 1993; WAN024B5N_at; Start 2; Stop 26
tgcccatcttctcacgcatggcaaa

SEQ ID NO: 72813 - DNA, 25 bp, Artificial
  probe
  misc_feature (1)..(25): SEQ ID NO: 1993; WAN024B5N_at; Start 130; Stop 154
ctccctgaaggaccgatgataacga

SEQ ID NO: 72814 - DNA, 25 bp, Artificial
  probe
  misc_feature (1)..(25): SEQ ID NO: 1993; WAN024B5N_at; Start 237; Stop 261
tatcaaggtttctgtcattatttct

SEQ ID NO: 72815 - DNA, 25 bp, Artificial
  probe
  misc_feature (1)..(25): SEQ ID NO: 1993; WAN024B5N_at; Start 102; Stop 126
catagagcgaagcaaggtagatttc

SEQ ID NO: 72816 - DNA, 25 bp, Artificial
  probe
  misc_feature (1)..(25): SEQ ID NO: 1993; WAN024B5N_at; Start 173; Stop 197
tctcgaggttgatgcccttcaatac

SEQ ID NO: 72817 - DNA, 25 bp, Artificial
  probe
  misc_feature (1)..(25): SEQ ID NO: 1993; WAN024B5N_at; Start 170; Stop 194
taatctcgaggttgatgcccttcaa

SEQ ID NO: 72818 - DNA, 25 bp, Artificial
  probe
  misc_feature (1)..(25): SEQ ID NO: 1993; WAN024B5N_at; Start 277; Stop 301
tatgtttttcaaaagctttcaaggc

SEQ ID NO: 72819 - DNA, 25 bp, Artificial
  probe
  misc_feature (1)..(25): SEQ ID NO: 1993; WAN024B5N_at; Start 22; Stop 46
gcaaacaggtcattcttcttgtccg

SEQ ID NO: 72820 - DNA, 25 bp, Artificial
  probe
  misc_feature (1)..(25): SEQ ID NO: 1993; WAN024B5N_at; Start 165; Stop 189
tcttttaatctcgaggttgatgccc

SEQ ID NO: 72821 - DNA, 25 bp, Artificial
  probe
  misc_feature (1)..(25): SEQ ID NO: 1993; WAN024B5N_at; Start 186; Stop 210
gcccttcaatacttcattctttcca

SEQ ID NO: 72822 - DNA, 25 bp, Artificial
  probe
  misc_feature (1)..(25): SEQ ID NO: 1993; WAN024B5N_at; Start 229; Stop 253
tcaatttttatcaaggtttctgtca

SEQ ID NO: 72823 - DNA, 25 bp, Artificial
  probe
  misc_feature (1)..(25): SEQ ID NO: 1993; WAN024B5N_at; Start 50; Stop 74
tatcgactccctcaaagataacctt

SEQ ID NO: 72824 - DNA, 25 bp, Artificial
  probe
  misc_feature (1)..(25): SEQ ID NO: 1993; WAN024B5N_at; Start 8; Stop 32
tcttctcacgcatggcaaacaggtc

SEQ ID NO: 72825 - DNA, 25 bp, Artificial
  probe
  misc_feature (1)..(25): SEQ ID NO: 1993; WAN024B5N_at; Start 153; Stop 177
gacaacttctcctcttttaatctcg

SEQ ID NO: 72826 - DNA, 25 bp, Artificial
  probe
  misc_feature (1)..(25): SEQ ID NO: 1993; WAN024B5N_at; Start 11; Stop 35
tctcacgcatggcaaacaggtcatt

SEQ ID NO: 72827 - DNA, 25 bp, Artificial
  probe
  misc_feature (1)..(25): SEQ ID NO: 1993; WAN024B5N_at; Start 96; Stop 120
caaattcatagagcgaagcaaggta

SEQ ID NO: 72828 - DNA, 25 bp, Artificial
  probe
  misc_feature (1)..(25): SEQ ID NO: 1993; WAN024B5N_at; Start 41; Stop 65
tgtccgtaatatcgactccctcaaa

SEQ ID NO: 72829 - DNA, 25 bp, Artificial
  probe
  misc_feature (1)..(25): SEQ ID NO: 3944; WAN024B5O_at; Start 421; Stop 445
gcgatgcgttatgtgattttgccac

SEQ ID NO: 72830 - DNA, 25 bp, Artificial
  probe
  misc_feature (1)..(25): SEQ ID NO: 3944; WAN024B5O_at; Start 388; Stop 412
gcggcttattcgctagggattcgtc

SEQ ID NO: 72831 - DNA, 25 bp, Artificial
  probe
  misc_feature (1)..(25): SEQ ID NO: 3944; WAN024B5O_at; Start 601; Stop 625
gcagcattttactacttgattatga

SEQ ID NO: 72832 - DNA, 25 bp, Artificial
  probe
  misc_feature (1)..(25): SEQ ID NO: 3944; WAN024B5O_at; Start 198; Stop 222
gatgatggttcaaattatgattgcc

SEQ ID NO: 72833 - DNA, 25 bp, Artificial
  probe
  misc_feature (1)..(25): SEQ ID NO: 3944; WAN024B5O_at; Start 77; Stop 101
ctatctgtgttatctttttgggaac

SEQ ID NO: 72834 - DNA, 25 bp, Artificial
  probe
  misc_feature (1)..(25): SEQ ID NO: 3944; WAN024B5O_at; Start 147; Stop 171
accgcttgtttggttggccaacttg

SEQ ID NO: 72835 - DNA, 25 bp, Artificial
  probe
  misc_feature (1)..(25): SEQ ID NO: 3944; WAN024B5O_at; Start 98; Stop 122
gaactattttgggtgttgtcttggc

SEQ ID NO: 72836 - DNA, 25 bp, Artificial
  probe
  misc_feature (1)..(25): SEQ ID NO: 3944; WAN024B5O_at; Start 564; Stop 588
tacaacaacctatctacctttaaca

SEQ ID NO: 72837 - DNA, 25 bp, Artificial
  probe
  misc_feature (1)..(25): SEQ ID NO: 3944; WAN024B5O_at; Start 306; Stop 330
gattatctctatgaatagtggtgct

SEQ ID NO: 72838 - DNA, 25 bp, Artificial
  probe
  misc_feature (1)..(25): SEQ ID NO: 3944; WAN024B5O_at; Start 178; Stop 202
tggattttccgtgggacaccgatga

SEQ ID NO: 72839 - DNA, 25 bp, Artificial
  probe
  misc_feature (1)..(25): SEQ ID NO: 3944; WAN024B5O_at; Start 184; Stop 208
ttccgtgggacaccgatgatggttc

SEQ ID NO: 72840 - DNA, 25 bp, Artificial
  probe
  misc_feature (1)..(25): SEQ ID NO: 3944; WAN024B5O_at; Start 486; Stop 510
tatcaccattatcaaggacagctcc

SEQ ID NO: 72841 - DNA, 25 bp, Artificial
  probe
  misc_feature (1)..(25): SEQ ID NO: 3944; WAN024B5O_at; Start 621; Stop 645
tatgacctctattctgacagtagcc

SEQ ID NO: 72842 - DNA, 25 bp, Artificial
  probe
  misc_feature (1)..(25): SEQ ID NO: 3944; WAN024B5O_at; Start 157; Stop 181
tggttggccaacttgtacgtttgga

SEQ ID NO: 72843 - DNA, 25 bp, Artificial
  probe
  misc_feature (1)..(25): SEQ ID NO: 3944; WAN024B5O_at; Start 497; Stop 521
tcaaggacagctccctcttatcagc

SEQ ID NO: 72844 - DNA, 25 bp, Artificial
  probe
  misc_feature (1)..(25): SEQ ID NO: 3944; WAN024B5O_at; Start 345; Stop 369
tgttcgtgccggaatcaatgcggtt

SEQ ID NO: 72845 - DNA, 25 bp, Artificial
  probe
  misc_feature (1)..(25): SEQ ID NO: 3944; WAN024B5O_at; Start 319; Stop 343
aatagtggtgcttatgtttcggaga

SEQ ID NO: 72846 - DNA, 25 bp, Artificial
  probe
  misc_feature (1)..(25): SEQ ID NO: 3944; WAN024B5O_at; Start 548; Stop 572
gggctacaacagtttctacaacaac

SEQ ID NO: 72847 - DNA, 25 bp, Artificial
  probe
  misc_feature (1)..(25): SEQ ID NO: 3944; WAN024B5O_at; Start 225; Stop 249
tgctcttatgcatatcaatgctccg

SEQ ID NO: 72848 - DNA, 25 bp, Artificial
  probe
  misc_feature (1)..(25): SEQ ID NO: 3944; WAN024B5O_at; Start 213; Stop 237
tatgattgcctttgctcttatgcat

SEQ ID NO: 72849 - DNA, 25 bp, Artificial
  probe
  misc_feature (1)..(25): SEQ ID NO: 3944; WAN024B5O_at; Start 53; Stop 77
gggctgttgtgacgattcttatttc

SEQ ID NO: 72850 - DNA, 25 bp, Artificial
  probe
  misc_feature (1)..(25): SEQ ID NO: 3944; WAN024B5O_at; Start 584; Stop 608
taacaccacttttatttgcagcatt

SEQ ID NO: 72851 - DNA, 25 bp, Artificial
  probe
  misc_feature (1)..(25): SEQ ID NO: 3944; WAN024B5O_at; Start 668; Stop 692
tgggacaaggagataagaaataact

SEQ ID NO: 72852 - DNA, 25 bp, Artificial
  probe
  misc_feature (1)..(25): SEQ ID NO: 3944; WAN024B5O_at; Start 291; Stop 315
gattccagggattttgattatctct

SEQ ID NO: 72853 - DNA, 25 bp, Artificial
  probe
  misc_feature (1)..(25): SEQ ID NO: 3944; WAN024B5O_at; Start 636; Stop 660
gacagtagccttgaaagcttttgaa

SEQ ID NO: 72854 - DNA, 25 bp, Artificial
  probe
  misc_feature (1)..(25): SEQ ID NO: 3944; WAN024B5O_at; Start 652; Stop 676
gcttttgaaaaacatatgggacaag

SEQ ID NO: 72855 - DNA, 25 bp, Artificial
  probe
  misc_feature (1)..(25): SEQ ID NO: 3944; WAN024B5O_at; Start 452; Stop 476
tcaaaaatatcttgccagcattggg

SEQ ID NO: 72856 - DNA, 25 bp, Artificial
  probe
  misc_feature (1)..(25): SEQ ID NO: 3944; WAN024B5O_at; Start 114; Stop 138
tgtcttggcttttgggcaacgttca

SEQ ID NO: 72857 - DNA, 25 bp, Artificial
  probe
  misc_feature (1)..(25): SEQ ID NO: 3944; WAN024B5O_at; Start 276; Stop 300
tgatttttcgcgtctgattccaggg

SEQ ID NO: 72858 - DNA, 25 bp, Artificial
  probe
  misc_feature (1)..(25): SEQ ID NO: 3944; WAN024B5O_at; Start 360; Stop 384
caatgcggttccaaaaggtcagcta

SEQ ID NO: 72859 - DNA, 25 bp, Artificial
  probe
  misc_feature (1)..(25): SEQ ID NO: 3944; WAN024B5O_at; Start 504; Stop 528
cagctccctcttatcagctattggg

SEQ ID NO: 72860 - DNA, 25 bp, Artificial
  probe
  misc_feature (1)..(25): SEQ ID NO: 3944; WAN024B5O_at; Start 475; Stop 499
gggaacgaatttatcaccattatca

SEQ ID NO: 72861 - DNA, 25 bp, Artificial
  probe
  misc_feature (1)..(25): SEQ ID NO: 3944; WAN024B5O_at; Start 240; Stop 264
caatgctccgactattcagattgga

SEQ ID NO: 72862 - DNA, 25 bp, Artificial
  probe
  misc_feature (1)..(25): SEQ ID NO: 3944; WAN024B5O_at; Start 256; Stop 280
cagattggaattttaggtgttgatt

SEQ ID NO: 72863 - DNA, 25 bp, Artificial
  probe
  misc_feature (1)..(25): SEQ ID NO: 1581; WAN024B5P_x_at; Start 179; Stop 203
cacacttgttcaatggggttcatct

SEQ ID NO: 72864 - DNA, 25 bp, Artificial
  probe
  misc_feature (1)..(25): SEQ ID NO: 1581; WAN024B5P_x_at; Start 201; Stop 225
tctctggtgtgtatggaggaataaa

SEQ ID NO: 72865 - DNA, 25 bp, Artificial
  probe
  misc_feature (1)..(25): SEQ ID NO: 1581; WAN024B5P_x_at; Start 198; Stop 222
tcatctctggtgtgtatggaggaat

SEQ ID NO: 72866 - DNA, 25 bp, Artificial
  probe
  misc_feature (1)..(25): SEQ ID NO: 1581; WAN024B5P_x_at; Start 185; Stop 209
tgttcaatggggttcatctctggtg

SEQ ID NO: 72867 - DNA, 25 bp, Artificial
  probe
  misc_feature (1)..(25): SEQ ID NO: 1581; WAN024B5P_x_at; Start 165; Stop 189
tacgaatctctttccacacttgttc

SEQ ID NO: 72868 - DNA, 25 bp, Artificial
  probe
  misc_feature (1)..(25): SEQ ID NO: 1581; WAN024B5P_x_at; Start 196; Stop 220
gttcatctctggtgtgtatggagga

SEQ ID NO: 72869 - DNA, 25 bp, Artificial
  probe
  misc_feature (1)..(25): SEQ ID NO: 1581; WAN024B5P_x_at; Start 181; Stop 205
cacttgttcaatggggttcatctct

SEQ ID NO: 72870 - DNA, 25 bp, Artificial
  probe
  misc_feature (1)..(25): SEQ ID NO: 1581; WAN024B5P_x_at; Start 184; Stop 208
ttgttcaatggggttcatctctggt

SEQ ID NO: 72871 - DNA, 25 bp, Artificial
  probe
  misc_feature (1)..(25): SEQ ID NO: 1581; WAN024B5P_x_at; Start 64; Stop 88
gatggactttatcacctccttctcc

SEQ ID NO: 72872 - DNA, 25 bp, Artificial
  probe
  misc_feature (1)..(25): SEQ ID NO: 1581; WAN024B5P_x_at; Start 63; Stop 87
cgatggactttatcacctccttctc

SEQ ID NO: 72873 - DNA, 25 bp, Artificial
  probe
  misc_feature (1)..(25): SEQ ID NO: 1581; WAN024B5P_x_at; Start 112; Stop 136
ttgattcatgacatcttccaaagtt

SEQ ID NO: 72874 - DNA, 25 bp, Artificial
  probe
  misc_feature (1)..(25): SEQ ID NO: 1581; WAN024B5P_x_at; Start 175; Stop 199
tttccacacttgttcaatggggttc

SEQ ID NO: 72875 - DNA, 25 bp, Artificial
  probe
  misc_feature (1)..(25): SEQ ID NO: 1581; WAN024B5P_x_at; Start 177; Stop 201
tccacacttgttcaatggggttcat

SEQ ID NO: 72876 - DNA, 25 bp, Artificial
  probe
  misc_feature (1)..(25): SEQ ID NO: 1581; WAN024B5P_x_at; Start 170; Stop 194
atctctttccacacttgttcaatgg

SEQ ID NO: 72877 - DNA, 25 bp, Artificial
  probe
  misc_feature (1)..(25): SEQ ID NO: 1581; WAN024B5P_x_at; Start 199; Stop 223
catctctggtgtgtatggaggaata

SEQ ID NO: 72878 - DNA, 25 bp, Artificial
  probe
  misc_feature (1)..(25): SEQ ID NO: 1581; WAN024B5P_x_at; Start 197; Stop 221
ttcatctctggtgtgtatggaggaa

SEQ ID NO: 72879 - DNA, 25 bp, Artificial
  probe
  misc_feature (1)..(25): SEQ ID NO: 1581; WAN024B5P_x_at; Start 169; Stop 193
aatctctttccacacttgttcaatg

SEQ ID NO: 72880 - DNA, 25 bp, Artificial
  probe
  misc_feature (1)..(25): SEQ ID NO: 1581; WAN024B5P_x_at; Start 111; Stop 135
gttgattcatgacatcttccaaagt

SEQ ID NO: 72881 - DNA, 25 bp, Artificial
  probe
  misc_feature (1)..(25): SEQ ID NO: 1581; WAN024B5P_x_at; Start 180; Stop 204
acacttgttcaatggggttcatctc

SEQ ID NO: 72882 - DNA, 25 bp, Artificial
  probe
  misc_feature (1)..(25): SEQ ID NO: 1581; WAN024B5P_x_at; Start 166; Stop 190
acgaatctctttccacacttgttca

SEQ ID NO: 72883 - DNA, 25 bp, Artificial
  probe
  misc_feature (1)..(25): SEQ ID NO: 1581; WAN024B5P_x_at; Start 168; Stop 192
gaatctctttccacacttgttcaat

SEQ ID NO: 72884 - DNA, 25 bp, Artificial
  probe
  misc_feature (1)..(25): SEQ ID NO: 1581; WAN024B5P_x_at; Start 110; Stop 134
agttgattcatgacatcttccaaag

SEQ ID NO: 72885 - DNA, 25 bp, Artificial
  probe
  misc_feature (1)..(25): SEQ ID NO: 1581; WAN024B5P_x_at; Start 171; Stop 195
tctctttccacacttgttcaatggg

SEQ ID NO: 72886 - DNA, 25 bp, Artificial
  probe
  misc_feature (1)..(25): SEQ ID NO: 1581; WAN024B5P_x_at; Start 189; Stop 213
caatggggttcatctctggtgtgta

SEQ ID NO: 72887 - DNA, 25 bp, Artificial
  probe
  misc_feature (1)..(25): SEQ ID NO: 1581; WAN024B5P_x_at; Start 173; Stop 197
tctttccacacttgttcaatggggt

SEQ ID NO: 72888 - DNA, 25 bp, Artificial
  probe
  misc_feature (1)..(25): SEQ ID NO: 1581; WAN024B5P_x_at; Start 164; Stop 188
ttacgaatctctttccacacttgtt

SEQ ID NO: 72889 - DNA, 25 bp, Artificial
  probe
  misc_feature (1)..(25): SEQ ID NO: 1581; WAN024B5P_x_at; Start 188; Stop 212
tcaatggggttcatctctggtgtgt

SEQ ID NO: 72890 - DNA, 25 bp, Artificial
  probe
  misc_feature (1)..(25): SEQ ID NO: 1581; WAN024B5P_x_at; Start 187; Stop 211
ttcaatggggttcatctctggtgtg

SEQ ID NO: 72891 - DNA, 25 bp, Artificial
  probe
  misc_feature (1)..(25): SEQ ID NO: 1581; WAN024B5P_x_at; Start 163; Stop 187
tttacgaatctctttccacacttgt

SEQ ID NO: 72892 - DNA, 25 bp, Artificial
  probe
  misc_feature (1)..(25): SEQ ID NO: 1581; WAN024B5P_x_at; Start 4; Stop 28
aggactttctttttatactcatctg

SEQ ID NO: 72893 - DNA, 25 bp, Artificial
  probe
  misc_feature (1)..(25): SEQ ID NO: 1581; WAN024B5P_x_at; Start 65; Stop 89
atggactttatcacctccttctcca

SEQ ID NO: 72894 - DNA, 25 bp, Artificial
  probe
  misc_feature (1)..(25): SEQ ID NO: 1581; WAN024B5P_x_at; Start 167; Stop 191
cgaatctctttccacacttgttcaa

SEQ ID NO: 72895 - DNA, 25 bp, Artificial
  probe
  misc_feature (1)..(25): SEQ ID NO: 1581; WAN024B5P_x_at; Start 190; Stop 214
aatggggttcatctctggtgtgtat

SEQ ID NO: 72896 - DNA, 25 bp, Artificial
  probe
  misc_feature (1)..(25): SEQ ID NO: 1581; WAN024B5P_x_at; Start 200; Stop 224
atctctggtgtgtatggaggaataa

SEQ ID NO: 72897 - DNA, 25 bp, Artificial
  probe
  misc_feature (1)..(25): SEQ ID NO: 3077; WAN024B5Q_at; Start 58; Stop 82
tcactcatggctggtgaggcgccca

SEQ ID NO: 72898 - DNA, 25 bp, Artificial
  probe
  misc_feature (1)..(25): SEQ ID NO: 3077; WAN024B5Q_at; Start 85; Stop 109
gctactaatccatttgctgtgaaat

SEQ ID NO: 72899 - DNA, 25 bp, Artificial
  probe
  misc_feature (1)..(25): SEQ ID NO: 3077; WAN024B5Q_at; Start 42; Stop 66
taaatctgctggaaactcactcatg

SEQ ID NO: 72900 - DNA, 25 bp, Artificial
  probe
  misc_feature (1)..(25): SEQ ID NO: 3077; WAN024B5Q_at; Start 51; Stop 75
tggaaactcactcatggctggtgag

SEQ ID NO: 72901 - DNA, 25 bp, Artificial
  probe
  misc_feature (1)..(25): SEQ ID NO: 3077; WAN024B5Q_at; Start 29; Stop 53
ttaacaaatcctctaaatctgctgg

SEQ ID NO: 72902 - DNA, 25 bp, Artificial
  probe
  misc_feature (1)..(25): SEQ ID NO: 3077; WAN024B5Q_at; Start 3; Stop 27
gtttattaataaaccaccagcatac

SEQ ID NO: 72903 - DNA, 25 bp, Artificial
  probe
  misc_feature (1)..(25): SEQ ID NO: 3077; WAN024B5Q_at; Start 38; Stop 62
cctctaaatctgctggaaactcact

SEQ ID NO: 72904 - DNA, 25 bp, Artificial
  probe
  misc_feature (1)..(25): SEQ ID NO: 3077; WAN024B5Q_at; Start 114; Stop 138
tactacatcattggttatacaaatg

SEQ ID NO: 72905 - DNA, 25 bp, Artificial
  probe
  misc_feature (1)..(25): SEQ ID NO: 3077; WAN024B5Q_at; Start 40; Stop 64
tctaaatctgctggaaactcactca

SEQ ID NO: 72906 - DNA, 25 bp, Artificial
  probe
  misc_feature (1)..(25): SEQ ID NO: 3077; WAN024B5Q_at; Start 49; Stop 73
gctggaaactcactcatggctggtg

SEQ ID NO: 72907 - DNA, 25 bp, Artificial
  probe
  misc_feature (1)..(25): SEQ ID NO: 3077; WAN024B5Q_at; Start 104; Stop 128
tgaaattttttactacatcattggt

SEQ ID NO: 72908 - DNA, 25 bp, Artificial
  probe
  misc_feature (1)..(25): SEQ ID NO: 3077; WAN024B5Q_at; Start 122; Stop 146
cattggttatacaaatgaccaatgg

SEQ ID NO: 72909 - DNA, 25 bp, Artificial
  probe
  misc_feature (1)..(25): SEQ ID NO: 3077; WAN024B5Q_at; Start 44; Stop 68
aatctgctggaaactcactcatggc

SEQ ID NO: 72910 - DNA, 25 bp, Artificial
  probe
  misc_feature (1)..(25): SEQ ID NO: 3077; WAN024B5Q_at; Start 69; Stop 93
tggtgaggcgcccagtgctactaat

SEQ ID NO: 72911 - DNA, 25 bp, Artificial
  probe
  misc_feature (1)..(25): SEQ ID NO: 3077; WAN024B5Q_at; Start 6; Stop 30
tattaataaaccaccagcatacttt

SEQ ID NO: 72912 - DNA, 25 bp, Artificial
  probe
  misc_feature (1)..(25): SEQ ID NO: 3077; WAN024B5Q_at; Start 48; Stop 72
tgctggaaactcactcatggctggt

SEQ ID NO: 72913 - DNA, 25 bp, Artificial
  probe
  misc_feature (1)..(25): SEQ ID NO: 3077; WAN024B5Q_at; Start 137; Stop 161
tgaccaatggtgctttttcttttaa

SEQ ID NO: 72914 - DNA, 25 bp, Artificial
  probe
  misc_feature (1)..(25): SEQ ID NO: 3077; WAN024B5Q_at; Start 60; Stop 84
actcatggctggtgaggcgcccagt

SEQ ID NO: 72915 - DNA, 25 bp, Artificial
  probe
  misc_feature (1)..(25): SEQ ID NO: 3077; WAN024B5Q_at; Start 70; Stop 94
ggtgaggcgcccagtgctactaatc

SEQ ID NO: 72916 - DNA, 25 bp, Artificial
  probe
  misc_feature (1)..(25): SEQ ID NO: 3077; WAN024B5Q_at; Start 72; Stop 96
tgaggcgcccagtgctactaatcca

SEQ ID NO: 72917 - DNA, 25 bp, Artificial
  probe
  misc_feature (1)..(25): SEQ ID NO: 3077; WAN024B5Q_at; Start 78; Stop 102
gcccagtgctactaatccatttgct

SEQ ID NO: 72918 - DNA, 25 bp, Artificial
  probe
  misc_feature (1)..(25): SEQ ID NO: 3077; WAN024B5Q_at; Start 82; Stop 106
agtgctactaatccatttgctgtga

SEQ ID NO: 72919 - DNA, 25 bp, Artificial
  probe
  misc_feature (1)..(25): SEQ ID NO: 3077; WAN024B5Q_at; Start 54; Stop 78
aaactcactcatggctggtgaggcg

SEQ ID NO: 72920 - DNA, 25 bp, Artificial
  probe
  misc_feature (1)..(25): SEQ ID NO: 3077; WAN024B5Q_at; Start 94; Stop 118
ccatttgctgtgaaattttttacta

SEQ ID NO: 72921 - DNA, 25 bp, Artificial
  probe
  misc_feature (1)..(25): SEQ ID NO: 3077; WAN024B5Q_at; Start 141; Stop 165
caatggtgctttttcttttaataat

SEQ ID NO: 72922 - DNA, 25 bp, Artificial
  probe
  misc_feature (1)..(25): SEQ ID NO: 3077; WAN024B5Q_at; Start 170; Stop 194
aacttgtcatattgaaatccttcct

SEQ ID NO: 72923 - DNA, 25 bp, Artificial
  probe
  misc_feature (1)..(25): SEQ ID NO: 3077; WAN024B5Q_at; Start 168; Stop 192
taaacttgtcatattgaaatccttc

SEQ ID NO: 72924 - DNA, 25 bp, Artificial
  probe
  misc_feature (1)..(25): SEQ ID NO: 3077; WAN024B5Q_at; Start 119; Stop 143
catcattggttatacaaatgaccaa

SEQ ID NO: 72925 - DNA, 25 bp, Artificial
  probe
  misc_feature (1)..(25): SEQ ID NO: 3077; WAN024B5Q_at; Start 46; Stop 70
tctgctggaaactcactcatggctg

SEQ ID NO: 72926 - DNA, 25 bp, Artificial
  probe
  misc_feature (1)..(25): SEQ ID NO: 3077; WAN024B5Q_at; Start 12; Stop 36
taaaccaccagcatactttaacaaa

SEQ ID NO: 72927 - DNA, 25 bp, Artificial
  probe
  misc_feature (1)..(25): SEQ ID NO: 3077; WAN024B5Q_at; Start 76; Stop 100
gcgcccagtgctactaatccatttg

SEQ ID NO: 72928 - DNA, 25 bp, Artificial
  probe
  misc_feature (1)..(25): SEQ ID NO: 3077; WAN024B5Q_at; Start 33; Stop 57
caaatcctctaaatctgctggaaac

SEQ ID NO: 72929 - DNA, 25 bp, Artificial
  probe
  misc_feature (1)..(25): SEQ ID NO: 3077; WAN024B5Q_at; Start 73; Stop 97
gaggcgcccagtgctactaatccat

SEQ ID NO: 72930 - DNA, 25 bp, Artificial
  probe
  misc_feature (1)..(25): SEQ ID NO: 3077; WAN024B5Q_at; Start 19; Stop 43
ccagcatactttaacaaatcctcta

SEQ ID NO: 72931 - DNA, 25 bp, Artificial
  probe
  misc_feature (1)..(25): SEQ ID NO: 3875; WAN024B5R_at; Start 375; Stop 399
catgacagcgtccacaagtgactgg

SEQ ID NO: 72932 - DNA, 25 bp, Artificial
  probe
  misc_feature (1)..(25): SEQ ID NO: 3875; WAN024B5R_at; Start 70; Stop 94
gatagtcgttccttcacgttcaaac

SEQ ID NO: 72933 - DNA, 25 bp, Artificial
  probe
  misc_feature (1)..(25): SEQ ID NO: 3875; WAN024B5R_at; Start 306; Stop 330
catcacaggttacttggcgacgcat

SEQ ID NO: 72934 - DNA, 25 bp, Artificial
  probe
  misc_feature (1)..(25): SEQ ID NO: 3875; WAN024B5R_at; Start 280; Stop 304
gatttcttttcctcgaccgtgacag

SEQ ID NO: 72935 - DNA, 25 bp, Artificial
  probe
  misc_feature (1)..(25): SEQ ID NO: 3875; WAN024B5R_at; Start 246; Stop 270
gacctgttccatgacaggttgtaca

SEQ ID NO: 72936 - DNA, 25 bp, Artificial
  probe
  misc_feature (1)..(25): SEQ ID NO: 3875; WAN024B5R_at; Start 201; Stop 225
caccagcagggattttcacatgtac

SEQ ID NO: 72937 - DNA, 25 bp, Artificial
  probe
  misc_feature (1)..(25): SEQ ID NO: 3875; WAN024B5R_at; Start 232; Stop 256
agcttgtttctcatgacctgttcca

SEQ ID NO: 72938 - DNA, 25 bp, Artificial
  probe
  misc_feature (1)..(25): SEQ ID NO: 3875; WAN024B5R_at; Start 136; Stop 160
ataaggtccaccgttaaagcctgct

SEQ ID NO: 72939 - DNA, 25 bp, Artificial
  probe
  misc_feature (1)..(25): SEQ ID NO: 3875; WAN024B5R_at; Start 527; Stop 551
tctccttggcgaggagcgtttggat

SEQ ID NO: 72940 - DNA, 25 bp, Artificial
  probe
  misc_feature (1)..(25): SEQ ID NO: 3875; WAN024B5R_at; Start 398; Stop 422
ggacttgtccctggcttagcaccag

SEQ ID NO: 72941 - DNA, 25 bp, Artificial
  probe
  misc_feature (1)..(25): SEQ ID NO: 3875; WAN024B5R_at; Start 30; Stop 54
caagagccgcttggacaaagttgag

SEQ ID NO: 72942 - DNA, 25 bp, Artificial
  probe
  misc_feature (1)..(25): SEQ ID NO: 3875; WAN024B5R_at; Start 438; Stop 462
gacagccagcttcacgatgatactt

SEQ ID NO: 72943 - DNA, 25 bp, Artificial
  probe
  misc_feature (1)..(25): SEQ ID NO: 3875; WAN024B5R_at; Start 515; Stop 539
tactggagatcatctccttggcgag

SEQ ID NO: 72944 - DNA, 25 bp, Artificial
  probe
  misc_feature (1)..(25): SEQ ID NO: 3875; WAN024B5R_at; Start 217; Stop 241
cacatgtacgctatgagcttgtttc

SEQ ID NO: 72945 - DNA, 25 bp, Artificial
  probe
  misc_feature (1)..(25): SEQ ID NO: 3875; WAN024B5R_at; Start 545; Stop 569
tttggattgcgcgaagaaccgcctc

SEQ ID NO: 72946 - DNA, 25 bp, Artificial
  probe
  misc_feature (1)..(25): SEQ ID NO: 3875; WAN024B5R_at; Start 467; Stop 491
tccttctcagttccgaagatagctt

SEQ ID NO: 72947 - DNA, 25 bp, Artificial
  probe
  misc_feature (1)..(25): SEQ ID NO: 3875; WAN024B5R_at; Start 168; Stop 192
gaccagcgaggcgaatttgttgacc

SEQ ID NO: 72948 - DNA, 25 bp, Artificial
  probe
  misc_feature (1)..(25): SEQ ID NO: 3875; WAN024B5R_at; Start 389; Stop 413
caagtgactggacttgtccctggct

SEQ ID NO: 72949 - DNA, 25 bp, Artificial
  probe
  misc_feature (1)..(25): SEQ ID NO: 3875; WAN024B5R_at; Start 499; Stop 523
ggtcaaattgacacgatactggaga

SEQ ID NO: 72950 - DNA, 25 bp, Artificial
  probe
  misc_feature (1)..(25): SEQ ID NO: 3875; WAN024B5R_at; Start 185; Stop 209
tgttgacctgtttccacaccagcag

SEQ ID NO: 72951 - DNA, 25 bp, Artificial
  probe
  misc_feature (1)..(25): SEQ ID NO: 3875; WAN024B5R_at; Start 359; Stop 383
ttaatgacaccagcgccatgacagc

SEQ ID NO: 72952 - DNA, 25 bp, Artificial
  probe
  misc_feature (1)..(25): SEQ ID NO: 3875; WAN024B5R_at; Start 121; Stop 145
tacatacaagtcaccataaggtcca

SEQ ID NO: 72953 - DNA, 25 bp, Artificial
  probe
  misc_feature (1)..(25): SEQ ID NO: 3875; WAN024B5R_at; Start 151; Stop 175
aaagcctgcttcaccttgaccagcg

SEQ ID NO: 72954 - DNA, 25 bp, Artificial
  probe
  misc_feature (1)..(25): SEQ ID NO: 3875; WAN024B5R_at; Start 292; Stop 316
tcgaccgtgacagacatcacaggtt

SEQ ID NO: 72955 - DNA, 25 bp, Artificial
  probe
  misc_feature (1)..(25): SEQ ID NO: 3875; WAN024B5R_at; Start 15; Stop 39
tatctactgtatcaccaagagccgc

SEQ ID NO: 72956 - DNA, 25 bp, Artificial
  probe
  misc_feature (1)..(25): SEQ ID NO: 3875; WAN024B5R_at; Start 57; Stop 81
tgagattgtagaagatagtcgttcc

SEQ ID NO: 72957 - DNA, 25 bp, Artificial
  probe
  misc_feature (1)..(25): SEQ ID NO: 3875; WAN024B5R_at; Start 481; Stop 505
gaagatagcttcttcaaaggtcaaa

SEQ ID NO: 72958 - DNA, 25 bp, Artificial
  probe
  misc_feature (1)..(25): SEQ ID NO: 3875; WAN024B5R_at; Start 86; Stop 110
cgttcaaacttgtcgctagcttcca

SEQ ID NO: 72959 - DNA, 25 bp, Artificial
  probe
  misc_feature (1)..(25): SEQ ID NO: 3875; WAN024B5R_at; Start 321; Stop 345
ggcgacgcatcataccaagaggagt

SEQ ID NO: 72960 - DNA, 25 bp, Artificial
  probe
  misc_feature (1)..(25): SEQ ID NO: 3875; WAN024B5R_at; Start 100; Stop 124
gctagcttccacagaaactactaca

SEQ ID NO: 72961 - DNA, 25 bp, Artificial
  probe
  misc_feature (1)..(25): SEQ ID NO: 3875; WAN024B5R_at; Start 453; Stop 477
gatgatacttaacttccttctcagt

SEQ ID NO: 72962 - DNA, 25 bp, Artificial
  probe
  misc_feature (1)..(25): SEQ ID NO: 3875; WAN024B5R_at; Start 426; Stop 450
cattacatgtacgacagccagcttc

SEQ ID NO: 72963 - DNA, 25 bp, Artificial
  probe
  misc_feature (1)..(25): SEQ ID NO: 3875; WAN024B5R_at; Start 336; Stop 360
caagaggagtctgcgtatcgacgtt

SEQ ID NO: 72964 - DNA, 25 bp, Artificial
  probe
  misc_feature (1)..(25): SEQ ID NO: 3875; WAN024B5R_at; Start 351; Stop 375
tatcgacgttaatgacaccagcgcc

SEQ ID NO: 72965 - DNA, 25 bp, Artificial
  probe
  misc_feature (1)..(25): SEQ ID NO: 5607; WAN024B5S_at; Start 432; Stop 456
taagtatcatcgtgaagctggctgt

SEQ ID NO: 72966 - DNA, 25 bp, Artificial
  probe
  misc_feature (1)..(25): SEQ ID NO: 5607; WAN024B5S_at; Start 531; Stop 555
cattaacgtcgatacgcagactcct

SEQ ID NO: 72967 - DNA, 25 bp, Artificial
  probe
  misc_feature (1)..(25): SEQ ID NO: 5607; WAN024B5S_at; Start 44; Stop 68
gggtatccaaaaacgcttcggcaga

SEQ ID NO: 72968 - DNA, 25 bp, Artificial
  probe
  misc_feature (1)..(25): SEQ ID NO: 5607; WAN024B5S_at; Start 307; Stop 331
ttctcaagtttcttcggcggaggcg

SEQ ID NO: 72969 - DNA, 25 bp, Artificial
  probe
  misc_feature (1)..(25): SEQ ID NO: 5607; WAN024B5S_at; Start 365; Stop 389
gagatgatctccagtatcgtgtcaa

SEQ ID NO: 72970 - DNA, 25 bp, Artificial
  probe
  misc_feature (1)..(25): SEQ ID NO: 5607; WAN024B5S_at; Start 1028; Stop 1052
caggcttgaacgaccgccaaaaagt

SEQ ID NO: 72971 - DNA, 25 bp, Artificial
  probe
  misc_feature (1)..(25): SEQ ID NO: 5607; WAN024B5S_at; Start 167; Stop 191
cctatgagactttgagtgacgacca

SEQ ID NO: 72972 - DNA, 25 bp, Artificial
  probe
  misc_feature (1)..(25): SEQ ID NO: 5607; WAN024B5S_at; Start 136; Stop 160
gctgaggacaagtacaaggaagttc

SEQ ID NO: 72973 - DNA, 25 bp, Artificial
  probe
  misc_feature (1)..(25): SEQ ID NO: 5607; WAN024B5S_at; Start 563; Stop 587
tgatgcgtcgccaagtaacctgtga

SEQ ID NO: 72974 - DNA, 25 bp, Artificial
  probe
  misc_feature (1)..(25): SEQ ID NO: 5607; WAN024B5S_at; Start 707; Stop 731
aacaaattcgcctcgctggtcaagg

SEQ ID NO: 72975 - DNA, 25 bp, Artificial
  probe
  misc_feature (1)..(25): SEQ ID NO: 5607; WAN024B5S_at; Start 474; Stop 498
tggtgctaagccagggacaagtcca

SEQ ID NO: 72976 - DNA, 25 bp, Artificial
  probe
  misc_feature (1)..(25): SEQ ID NO: 5607; WAN024B5S_at; Start 639; Stop 663
tggaacaggtcatgagaaacaagct

SEQ ID NO: 72977 - DNA, 25 bp, Artificial
  probe
  misc_feature (1)..(25): SEQ ID NO: 5607; WAN024B5S_at; Start 912; Stop 936
tattccagagggaactcagactggt

SEQ ID NO: 72978 - DNA, 25 bp, Artificial
  probe
  misc_feature (1)..(25): SEQ ID NO: 5607; WAN024B5S_at; Start 501; Stop 525
cacttgtggacgctgtcatggcgct

SEQ ID NO: 72979 - DNA, 25 bp, Artificial
  probe
  misc_feature (1)..(25): SEQ ID NO: 5607; WAN024B5S_at; Start 1008; Stop 1032
tgttaatgtcgtaacaccgacaggc

SEQ ID NO: 72980 - DNA, 25 bp, Artificial
  probe
  misc_feature (1)..(25): SEQ ID NO: 5607; WAN024B5S_at; Start 207; Stop 231
tgaccagtatggtgctgcaggcgcc

SEQ ID NO: 72981 - DNA, 25 bp, Artificial
  probe
  misc_feature (1)..(25): SEQ ID NO: 5607; WAN024B5S_at; Start 343; Stop 367
aatccaaacgctcctcgccaaggag

SEQ ID NO: 72982 - DNA, 25 bp, Artificial
  probe
  misc_feature (1)..(25): SEQ ID NO: 5607; WAN024B5S_at; Start 1068; Stop 1092
cgcggctgctggtgacttgaaagta

SEQ ID NO: 72983 - DNA, 25 bp, Artificial
  probe
  misc_feature (1)..(25): SEQ ID NO: 5607; WAN024B5S_at; Start 547; Stop 571
cagactcctcttggtatgatgcgtc

SEQ ID NO: 72984 - DNA, 25 bp, Artificial
  probe
  misc_feature (1)..(25): SEQ ID NO: 5607; WAN024B5S_at; Start 61; Stop 85
tcggcagacgaaatcaaaaaggctt

SEQ ID NO: 72985 - DNA, 25 bp, Artificial
  probe
  misc_feature (1)..(25): SEQ ID NO: 5607; WAN024B5S_at; Start 592; Stop 616
tgtcacggtcgaggaaaagaaatca

SEQ ID NO: 72986 - DNA, 25 bp, Artificial
  probe
  misc_feature (1)..(25): SEQ ID NO: 5607; WAN024B5S_at; Start 578; Stop 602
taacctgtgatgtctgtcacggtcg

SEQ ID NO: 72987 - DNA, 25 bp, Artificial
  probe
  misc_feature (1)..(25): SEQ ID NO: 5607; WAN024B5S_at; Start 1055; Stop 1079
ccttgaaagaattcgcggctgctgg

SEQ ID NO: 72988 - DNA, 25 bp, Artificial
  probe
  misc_feature (1)..(25): SEQ ID NO: 5607; WAN024B5S_at; Start 326; Stop 350
gaggcggttcttcgcgcaatccaaa

SEQ ID NO: 72989 - DNA, 25 bp, Artificial
  probe
  misc_feature (1)..(25): SEQ ID NO: 5607; WAN024B5S_at; Start 837; Stop 861
caacctcaactttgtccaagcggct

SEQ ID NO: 72990 - DNA, 25 bp, Artificial
  probe
  misc_feature (1)..(25): SEQ ID NO: 5607; WAN024B5S_at; Start 678; Stop 702
gaaaatccctgctggtgtggaaaca

SEQ ID NO: 72991 - DNA, 25 bp, Artificial
  probe
  misc_feature (1)..(25): SEQ ID NO: 5607; WAN024B5S_at; Start 875; Stop 899
tagatattccaactgttcacggtga

SEQ ID NO: 72992 - DNA, 25 bp, Artificial
  probe
  misc_feature (1)..(25): SEQ ID NO: 5607; WAN024B5S_at; Start 693; Stop 717
tgtggaaacaggtcaacaaattcgc

SEQ ID NO: 72993 - DNA, 25 bp, Artificial
  probe
  misc_feature (1)..(25): SEQ ID NO: 5607; WAN024B5S_at; Start 663; Stop 687
tcatagcgtacatgtgaaaatccct

SEQ ID NO: 72994 - DNA, 25 bp, Artificial
  probe
  misc_feature (1)..(25): SEQ ID NO: 5607; WAN024B5S_at; Start 516; Stop 540
tcatggcgctggtgtcattaacgtc

SEQ ID NO: 72995 - DNA, 25 bp, Artificial
  probe
  misc_feature (1)..(25): SEQ ID NO: 5607; WAN024B5S_at; Start 106; Stop 130
tatcacccagatatcaacaaggagc

SEQ ID NO: 72996 - DNA, 25 bp, Artificial
  probe
  misc_feature (1)..(25): SEQ ID NO: 5607; WAN024B5S_at; Start 121; Stop 145
aacaaggagcctggtgctgaggaca

SEQ ID NO: 72997 - DNA, 25 bp, Artificial
  probe
  misc_feature (1)..(25): SEQ ID NO: 5607; WAN024B5S_at; Start 184; Stop 208
gacgaccaaaaacgtgctgcctatg

SEQ ID NO: 72998 - DNA, 25 bp, Artificial
  probe
  misc_feature (1)..(25): SEQ ID NO: 5607; WAN024B5S_at; Start 853; Stop 877
caagcggctcttggtgatacagtag

SEQ ID NO: 72999 - DNA, 25 bp, Artificial
  probe
  misc_feature (1)..(25): SEQ ID NO: 3031; WAN024B5T_at; Start 132; Stop 156
cgatgatacgagaatattttcggaa

SEQ ID NO: 73000 - DNA, 25 bp, Artificial
  probe
  misc_feature (1)..(25): SEQ ID NO: 3031; WAN024B5T_at; Start 196; Stop 220
gagaagcatgctttcaatataccgg

SEQ ID NO: 73001 - DNA, 25 bp, Artificial
  probe
  misc_feature (1)..(25): SEQ ID NO: 3031; WAN024B5T_at; Start 109; Stop 133
gaccattttcttctttttctcatcg

SEQ ID NO: 73002 - DNA, 25 bp, Artificial
  probe
  misc_feature (1)..(25): SEQ ID NO: 3031; WAN024B5T_at; Start 187; Stop 211
tactcccaagagaagcatgctttca

SEQ ID NO: 73003 - DNA, 25 bp, Artificial
  probe
  misc_feature (1)..(25): SEQ ID NO: 3031; WAN024B5T_at; Start 218; Stop 242
cggtcctcactctcttggctgtaat

SEQ ID NO: 73004 - DNA, 25 bp, Artificial
  probe
  misc_feature (1)..(25): SEQ ID NO: 3031; WAN024B5T_at; Start 234; Stop 258
ggctgtaattactatttcctatcat

SEQ ID NO: 73005 - DNA, 25 bp, Artificial
  probe
  misc_feature (1)..(25): SEQ ID NO: 3031; WAN024B5T_at; Start 275; Stop 299
tggctggcgatatcctcaattccct

SEQ ID NO: 73006 - DNA, 25 bp, Artificial
  probe
  misc_feature (1)..(25): SEQ ID NO: 3031; WAN024B5T_at; Start 120; Stop 144
tctttttctcatcgatgatacgaga

SEQ ID NO: 73007 - DNA, 25 bp, Artificial
  probe
  misc_feature (1)..(25): SEQ ID NO: 3031; WAN024B5T_at; Start 66; Stop 90
taacccagctagtccggtgttcata

SEQ ID NO: 73008 - DNA, 25 bp, Artificial
  probe
  misc_feature (1)..(25): SEQ ID NO: 3031; WAN024B5T_at; Start 174; Stop 198
taataaagccgtctactcccaagag

SEQ ID NO: 73009 - DNA, 25 bp, Artificial
  probe
  misc_feature (1)..(25): SEQ ID NO: 3031; WAN024B5T_at; Start 148; Stop 172
ttttcggaaattagaggtcggctga

SEQ ID NO: 73010 - DNA, 25 bp, Artificial
  probe
  misc_feature (1)..(25): SEQ ID NO: 3031; WAN024B5T_at; Start 177; Stop 201
taaagccgtctactcccaagagaag

SEQ ID NO: 73011 - DNA, 25 bp, Artificial
  probe
  misc_feature (1)..(25): SEQ ID NO: 3031; WAN024B5T_at; Start 93; Stop 117
gctgactatcaaaaaagaccatttt

SEQ ID NO: 73012 - DNA, 25 bp, Artificial
  probe
  misc_feature (1)..(25): SEQ ID NO: 3031; WAN024B5T_at; Start 202; Stop 226
catgctttcaatataccggtcctca

SEQ ID NO: 73013 - DNA, 25 bp, Artificial
  probe
  misc_feature (1)..(25): SEQ ID NO: 3031; WAN024B5T_at; Start 79; Stop 103
ccggtgttcatagagctgactatca

SEQ ID NO: 73014 - DNA, 25 bp, Artificial
  probe
  misc_feature (1)..(25): SEQ ID NO: 3031; WAN024B5T_at; Start 268; Stop 292
gccattctggctggcgatatcctca

SEQ ID NO: 73015 - DNA, 25 bp, Artificial
  probe
  misc_feature (1)..(25): SEQ ID NO: 3031; WAN024B5T_at; Start 11; Stop 35
cctttttcgatacaggactgggtca

SEQ ID NO: 73016 - DNA, 25 bp, Artificial
  probe
  misc_feature (1)..(25): SEQ ID NO: 3031; WAN024B5T_at; Start 31; Stop 55
ggtcatgtcataaacggcatcatag

SEQ ID NO: 73017 - DNA, 25 bp, Artificial
  probe
  misc_feature (1)..(25): SEQ ID NO: 3031; WAN024B5T_at; Start 51; Stop 75
catagttattggttttaacccagct

SEQ ID NO: 73018 - DNA, 25 bp, Artificial
  probe
  misc_feature (1)..(25): SEQ ID NO: 3031; WAN024B5T_at; Start 211; Stop 235
aatataccggtcctcactctcttgg

SEQ ID NO: 73019 - DNA, 25 bp, Artificial
  probe
  misc_feature (1)..(25): SEQ ID NO: 3031; WAN024B5T_at; Start 255; Stop 279
tcattacctggtagccattctggct

SEQ ID NO: 73020 - DNA, 25 bp, Artificial
  probe
  misc_feature (1)..(25): SEQ ID NO: 3031; WAN024B5T_at; Start 17; Stop 41
tcgatacaggactgggtcatgtcat

SEQ ID NO: 73021 - DNA, 25 bp, Artificial
  probe
  misc_feature (1)..(25): SEQ ID NO: 3031; WAN024B5T_at; Start 259; Stop 283
tacctggtagccattctggctggcg

SEQ ID NO: 73022 - DNA, 25 bp, Artificial
  probe
  misc_feature (1)..(25): SEQ ID NO: 3031; WAN024B5T_at; Start 225; Stop 249
cactctcttggctgtaattactatt

SEQ ID NO: 73023 - DNA, 25 bp, Artificial
  probe
  misc_feature (1)..(25): SEQ ID NO: 3031; WAN024B5T_at; Start 159; Stop 183
tagaggtcggctgaataataaagcc

SEQ ID NO: 73024 - DNA, 25 bp, Artificial
  probe
  misc_feature (1)..(25): SEQ ID NO: 3031; WAN024B5T_at; Start 246; Stop 270
tatttcctatcattacctggtagcc

SEQ ID NO: 73025 - DNA, 25 bp, Artificial
  probe
  misc_feature (1)..(25): SEQ ID NO: 3031; WAN024B5T_at; Start 181; Stop 205
gccgtctactcccaagagaagcatg

SEQ ID NO: 73026 - DNA, 25 bp, Artificial
  probe
  misc_feature (1)..(25): SEQ ID NO: 3031; WAN024B5T_at; Start 39; Stop 63
cataaacggcatcatagttattggt

SEQ ID NO: 73027 - DNA, 25 bp, Artificial
  probe
  misc_feature (1)..(25): SEQ ID NO: 3031; WAN024B5T_at; Start 280; Stop 304
ggcgatatcctcaattcccttaaca

SEQ ID NO: 73028 - DNA, 25 bp, Artificial
  probe
  misc_feature (1)..(25): SEQ ID NO: 3031; WAN024B5T_at; Start 286; Stop 310
atcctcaattcccttaacaatttgg

SEQ ID NO: 73029 - DNA, 25 bp, Artificial
  probe
  misc_feature (1)..(25): SEQ ID NO: 3031; WAN024B5T_at; Start 3; Stop 27
gttcataacctttttcgatacagga

SEQ ID NO: 73030 - DNA, 25 bp, Artificial
  probe
  misc_feature (1)..(25): SEQ ID NO: 3031; WAN024B5T_at; Start 73; Stop 97
gctagtccggtgttcatagagctga

SEQ ID NO: 73031 - DNA, 25 bp, Artificial
  probe
  misc_feature (1)..(25): SEQ ID NO: 3031; WAN024B5T_at; Start 89; Stop 113
tagagctgactatcaaaaaagacca

SEQ ID NO: 73032 - DNA, 25 bp, Artificial
  probe
  misc_feature (1)..(25): SEQ ID NO: 3031; WAN024B5T_at; Start 25; Stop 49
ggactgggtcatgtcataaacggca

SEQ ID NO: 73033 - DNA, 25 bp, Artificial
  probe
  misc_feature (1)..(25): SEQ ID NO: 2948; WAN024B5U_at; Start 152; Stop 176
ttttgttccgtcaacgaggcacaat

SEQ ID NO: 73034 - DNA, 25 bp, Artificial
  probe
  misc_feature (1)..(25): SEQ ID NO: 2948; WAN024B5U_at; Start 74; Stop 98
tcaaaatgcctatttctagcactgc

SEQ ID NO: 73035 - DNA, 25 bp, Artificial
  probe
  misc_feature (1)..(25): SEQ ID NO: 2948; WAN024B5U_at; Start 251; Stop 275
cagagcattttccacttcacgatca

SEQ ID NO: 73036 - DNA, 25 bp, Artificial
  probe
  misc_feature (1)..(25): SEQ ID NO: 2948; WAN024B5U_at; Start 3; Stop 27
gtcttttatggtcagtttcttctcc

SEQ ID NO: 73037 - DNA, 25 bp, Artificial
  probe
  misc_feature (1)..(25): SEQ ID NO: 2948; WAN024B5U_at; Start 203; Stop 227
taataacagaatcagcttgtctgtt

SEQ ID NO: 73038 - DNA, 25 bp, Artificial
  probe
  misc_feature (1)..(25): SEQ ID NO: 2948; WAN024B5U_at; Start 77; Stop 101
aaatgcctatttctagcactgcaag

SEQ ID NO: 73039 - DNA, 25 bp, Artificial
  probe
  misc_feature (1)..(25): SEQ ID NO: 2948; WAN024B5U_at; Start 235; Stop 259
ttttcacttcaaaagccagagcatt

SEQ ID NO: 73040 - DNA, 25 bp, Artificial
  probe
  misc_feature (1)..(25): SEQ ID NO: 2948; WAN024B5U_at; Start 193; Stop 217
tatcctcgcttaataacagaatcag

SEQ ID NO: 73041 - DNA, 25 bp, Artificial
  probe
  misc_feature (1)..(25): SEQ ID NO: 2948; WAN024B5U_at; Start 165; Stop 189
acgaggcacaatttttcacctacac

SEQ ID NO: 73042 - DNA, 25 bp, Artificial
  probe
  misc_feature (1)..(25): SEQ ID NO: 2948; WAN024B5U_at; Start 239; Stop 263
cacttcaaaagccagagcattttcc

SEQ ID NO: 73043 - DNA, 25 bp, Artificial
  probe
  misc_feature (1)..(25): SEQ ID NO: 2948; WAN024B5U_at; Start 25; Stop 49
tccaatctaaaacacctcctactaa

SEQ ID NO: 73044 - DNA, 25 bp, Artificial
  probe
  misc_feature (1)..(25): SEQ ID NO: 2948; WAN024B5U_at; Start 12; Stop 36
ggtcagtttcttctccaatctaaaa

SEQ ID NO: 73045 - DNA, 25 bp, Artificial
  probe
  misc_feature (1)..(25): SEQ ID NO: 2948; WAN024B5U_at; Start 255; Stop 279
gcattttccacttcacgatcatctg

SEQ ID NO: 73046 - DNA, 25 bp, Artificial
  probe
  misc_feature (1)..(25): SEQ ID NO: 2948; WAN024B5U_at; Start 160; Stop 184
cgtcaacgaggcacaatttttcacc

SEQ ID NO: 73047 - DNA, 25 bp, Artificial
  probe
  misc_feature (1)..(25): SEQ ID NO: 2948; WAN024B5U_at; Start 279; Stop 303
gtctggtagacagaatgacggatga

SEQ ID NO: 73048 - DNA, 25 bp, Artificial
  probe
  misc_feature (1)..(25): SEQ ID NO: 2948; WAN024B5U_at; Start 149; Stop 173
catttttgttccgtcaacgaggcac

SEQ ID NO: 73049 - DNA, 25 bp, Artificial
  probe
  misc_feature (1)..(25): SEQ ID NO: 2948; WAN024B5U_at; Start 248; Stop 272
agccagagcattttccacttcacga

SEQ ID NO: 73050 - DNA, 25 bp, Artificial
  probe
  misc_feature (1)..(25): SEQ ID NO: 2948; WAN024B5U_at; Start 199; Stop 223
cgcttaataacagaatcagcttgtc

SEQ ID NO: 73051 - DNA, 25 bp, Artificial
  probe
  misc_feature (1)..(25): SEQ ID NO: 2948; WAN024B5U_at; Start 59; Stop 83
taacatattcactattcaaaatgcc

SEQ ID NO: 73052 - DNA, 25 bp, Artificial
  probe
  misc_feature (1)..(25): SEQ ID NO: 2948; WAN024B5U_at; Start 157; Stop 181
ttccgtcaacgaggcacaatttttc

SEQ ID NO: 73053 - DNA, 25 bp, Artificial
  probe
  misc_feature (1)..(25): SEQ ID NO: 2948; WAN024B5U_at; Start 244; Stop 268
caaaagccagagcattttccacttc

SEQ ID NO: 73054 - DNA, 25 bp, Artificial
  probe
  misc_feature (1)..(25): SEQ ID NO: 2948; WAN024B5U_at; Start 263; Stop 287
cacttcacgatcatctgtctggtag

SEQ ID NO: 73055 - DNA, 25 bp, Artificial
  probe
  misc_feature (1)..(25): SEQ ID NO: 2948; WAN024B5U_at; Start 81; Stop 105
gcctatttctagcactgcaagcgaa

SEQ ID NO: 73056 - DNA, 25 bp, Artificial
  probe
  misc_feature (1)..(25): SEQ ID NO: 2948; WAN024B5U_at; Start 97; Stop 121
gcaagcgaatcattctctcatttat

SEQ ID NO: 73057 - DNA, 25 bp, Artificial
  probe
  misc_feature (1)..(25): SEQ ID NO: 2948; WAN024B5U_at; Start 274; Stop 298
catctgtctggtagacagaatgacg

SEQ ID NO: 73058 - DNA, 25 bp, Artificial
  probe
  misc_feature (1)..(25): SEQ ID NO: 2948; WAN024B5U_at; Start 101; Stop 125
gcgaatcattctctcatttatttta

SEQ ID NO: 73059 - DNA, 25 bp, Artificial
  probe
  misc_feature (1)..(25): SEQ ID NO: 2948; WAN024B5U_at; Start 35; Stop 59
aacacctcctactaatacttattat

SEQ ID NO: 73060 - DNA, 25 bp, Artificial
  probe
  misc_feature (1)..(25): SEQ ID NO: 2948; WAN024B5U_at; Start 88; Stop 112
tctagcactgcaagcgaatcattct

SEQ ID NO: 73061 - DNA, 25 bp, Artificial
  probe
  misc_feature (1)..(25): SEQ ID NO: 2948; WAN024B5U_at; Start 268; Stop 292
cacgatcatctgtctggtagacaga

SEQ ID NO: 73062 - DNA, 25 bp, Artificial
  probe
  misc_feature (1)..(25): SEQ ID NO: 2948; WAN024B5U_at; Start 84; Stop 108
tatttctagcactgcaagcgaatca

SEQ ID NO: 73063 - DNA, 25 bp, Artificial
  probe
  misc_feature (1)..(25): SEQ ID NO: 2948; WAN024B5U_at; Start 137; Stop 161
acattttccacgcatttttgttccg

SEQ ID NO: 73064 - DNA, 25 bp, Artificial
  probe
  misc_feature (1)..(25): SEQ ID NO: 2948; WAN024B5U_at; Start 145; Stop 169
cacgcatttttgttccgtcaacgag

SEQ ID NO: 73065 - DNA, 25 bp, Artificial
  probe
  misc_feature (1)..(25): SEQ ID NO: 2948; WAN024B5U_at; Start 92; Stop 116
gcactgcaagcgaatcattctctca

SEQ ID NO: 73066 - DNA, 25 bp, Artificial
  probe
  misc_feature (1)..(25): SEQ ID NO: 2948; WAN024B5U_at; Start 232; Stop 256
catttttcacttcaaaagccagagc

SEQ ID NO: 73067 - DNA, 25 bp, Artificial
  probe
  misc_feature (1)..(25): SEQ ID NO: 4238; WAN024B5V_at; Start 36; Stop 60
cgactctttcaaaaaattgtcttct

SEQ ID NO: 73068 - DNA, 25 bp, Artificial
  probe
  misc_feature (1)..(25): SEQ ID NO: 4238; WAN024B5V_at; Start 105; Stop 129
gcagttcttttgtctttcccattac

SEQ ID NO: 73069 - DNA, 25 bp, Artificial
  probe
  misc_feature (1)..(25): SEQ ID NO: 4238; WAN024B5V_at; Start 70; Stop 94
cattatctattaccagaaaaagaac

SEQ ID NO: 73070 - DNA, 25 bp, Artificial
  probe
  misc_feature (1)..(25): SEQ ID NO: 4238; WAN024B5V_at; Start 158; Stop 182
ccttttgcaatctgcaaggagacca

SEQ ID NO: 73071 - DNA, 25 bp, Artificial
  probe
  misc_feature (1)..(25): SEQ ID NO: 4238; WAN024B5V_at; Start 30; Stop 54
ttccatcgactctttcaaaaaattg

SEQ ID NO: 73072 - DNA, 25 bp, Artificial
  probe
  misc_feature (1)..(25): SEQ ID NO: 4238; WAN024B5V_at; Start 73; Stop 97
tatctattaccagaaaaagaactac

SEQ ID NO: 73073 - DNA, 25 bp, Artificial
  probe
  misc_feature (1)..(25): SEQ ID NO: 4238; WAN024B5V_at; Start 170; Stop 194
tgcaaggagaccaagtcatcttgga

SEQ ID NO: 73074 - DNA, 25 bp, Artificial
  probe
  misc_feature (1)..(25): SEQ ID NO: 4238; WAN024B5V_at; Start 106; Stop 130
cagttcttttgtctttcccattaca

SEQ ID NO: 73075 - DNA, 25 bp, Artificial
  probe
  misc_feature (1)..(25): SEQ ID NO: 4238; WAN024B5V_at; Start 48; Stop 72
aaaattgtcttctttcttctttcat

SEQ ID NO: 73076 - DNA, 25 bp, Artificial
  probe
  misc_feature (1)..(25): SEQ ID NO: 4238; WAN024B5V_at; Start 154; Stop 178
cacaccttttgcaatctgcaaggag

SEQ ID NO: 73077 - DNA, 25 bp, Artificial
  probe
  misc_feature (1)..(25): SEQ ID NO: 4238; WAN024B5V_at; Start 160; Stop 184
ttttgcaatctgcaaggagaccaag

SEQ ID NO: 73078 - DNA, 25 bp, Artificial
  probe
  misc_feature (1)..(25): SEQ ID NO: 4238; WAN024B5V_at; Start 102; Stop 126
aaagcagttcttttgtctttcccat

SEQ ID NO: 73079 - DNA, 25 bp, Artificial
  probe
  misc_feature (1)..(25): SEQ ID NO: 4238; WAN024B5V_at; Start 150; Stop 174
tgaccacaccttttgcaatctgcaa

SEQ ID NO: 73080 - DNA, 25 bp, Artificial
  probe
  misc_feature (1)..(25): SEQ ID NO: 4238; WAN024B5V_at; Start 168; Stop 192
tctgcaaggagaccaagtcatcttg

SEQ ID NO: 73081 - DNA, 25 bp, Artificial
  probe
  misc_feature (1)..(25): SEQ ID NO: 4238; WAN024B5V_at; Start 201; Stop 225
tgatttttccatgaattccagacaa

SEQ ID NO: 73082 - DNA, 25 bp, Artificial
  probe
  misc_feature (1)..(25): SEQ ID NO: 4238; WAN024B5V_at; Start 186; Stop 210
catcttggatagaaatgatttttcc

SEQ ID NO: 73083 - DNA, 25 bp, Artificial
  probe
  misc_feature (1)..(25): SEQ ID NO: 4238; WAN024B5V_at; Start 166; Stop 190
aatctgcaaggagaccaagtcatct

SEQ ID NO: 73084 - DNA, 25 bp, Artificial
  probe
  misc_feature (1)..(25): SEQ ID NO: 4238; WAN024B5V_at; Start 163; Stop 187
tgcaatctgcaaggagaccaagtca

SEQ ID NO: 73085 - DNA, 25 bp, Artificial
  probe
  misc_feature (1)..(25): SEQ ID NO: 4238; WAN024B5V_at; Start 156; Stop 180
caccttttgcaatctgcaaggagac

SEQ ID NO: 73086 - DNA, 25 bp, Artificial
  probe
  misc_feature (1)..(25): SEQ ID NO: 4238; WAN024B5V_at; Start 180; Stop 204
ccaagtcatcttggatagaaatgat

SEQ ID NO: 73087 - DNA, 25 bp, Artificial
  probe
  misc_feature (1)..(25): SEQ ID NO: 4238; WAN024B5V_at; Start 165; Stop 189
caatctgcaaggagaccaagtcatc

SEQ ID NO: 73088 - DNA, 25 bp, Artificial
  probe
  misc_feature (1)..(25): SEQ ID NO: 4238; WAN024B5V_at; Start 121; Stop 145
tcccattacactttccttttctaca

SEQ ID NO: 73089 - DNA, 25 bp, Artificial
  probe
  misc_feature (1)..(25): SEQ ID NO: 4238; WAN024B5V_at; Start 204; Stop 228
tttttccatgaattccagacaataa

SEQ ID NO: 73090 - DNA, 25 bp, Artificial
  probe
  misc_feature (1)..(25): SEQ ID NO: 4238; WAN024B5V_at; Start 172; Stop 196
caaggagaccaagtcatcttggata

SEQ ID NO: 73091 - DNA, 25 bp, Artificial
  probe
  misc_feature (1)..(25): SEQ ID NO: 4238; WAN024B5V_at; Start 148; Stop 172
gatgaccacaccttttgcaatctgc

SEQ ID NO: 73092 - DNA, 25 bp, Artificial
  probe
  misc_feature (1)..(25): SEQ ID NO: 4238; WAN024B5V_at; Start 62; Stop 86
tcttctttcattatctattaccaga

SEQ ID NO: 73093 - DNA, 25 bp, Artificial
  probe
  misc_feature (1)..(25): SEQ ID NO: 4238; WAN024B5V_at; Start 197; Stop 221
gaaatgatttttccatgaattccag

SEQ ID NO: 73094 - DNA, 25 bp, Artificial
  probe
  misc_feature (1)..(25): SEQ ID NO: 4238; WAN024B5V_at; Start 151; Stop 175
gaccacaccttttgcaatctgcaag

SEQ ID NO: 73095 - DNA, 25 bp, Artificial
  probe
  misc_feature (1)..(25): SEQ ID NO: 4238; WAN024B5V_at; Start 199; Stop 223
aatgatttttccatgaattccagac

SEQ ID NO: 73096 - DNA, 25 bp, Artificial
  probe
  misc_feature (1)..(25): SEQ ID NO: 4238; WAN024B5V_at; Start 162; Stop 186
ttgcaatctgcaaggagaccaagtc

SEQ ID NO: 73097 - DNA, 25 bp, Artificial
  probe
  misc_feature (1)..(25): SEQ ID NO: 4238; WAN024B5V_at; Start 164; Stop 188
gcaatctgcaaggagaccaagtcat

SEQ ID NO: 73098 - DNA, 25 bp, Artificial
  probe
  misc_feature (1)..(25): SEQ ID NO: 4238; WAN024B5V_at; Start 178; Stop 202
gaccaagtcatcttggatagaaatg

SEQ ID NO: 73099 - DNA, 25 bp, Artificial
  probe
  misc_feature (1)..(25): SEQ ID NO: 4238; WAN024B5V_at; Start 175; Stop 199
ggagaccaagtcatcttggatagaa

SEQ ID NO: 73100 - DNA, 25 bp, Artificial
  probe
  misc_feature (1)..(25): SEQ ID NO: 4238; WAN024B5V_at; Start 32; Stop 56
ccatcgactctttcaaaaaattgtc

SEQ ID NO: 73101 - DNA, 25 bp, Artificial
  probe
  misc_feature (1)..(25): SEQ ID NO: 2727; WAN024B5W_s_at; Start 332; Stop 356
tgtctagtctctatgcctattccga

SEQ ID NO: 73102 - DNA, 25 bp, Artificial
  probe
  misc_feature (1)..(25): SEQ ID NO: 2727; WAN024B5W_s_at; Start 82; Stop 106
cacaaaaagaaaggaaactcacatg

SEQ ID NO: 73103 - DNA, 25 bp, Artificial
  probe
  misc_feature (1)..(25): SEQ ID NO: 2727; WAN024B5W_s_at; Start 184; Stop 208
tggtggtcttatcttttttcaggaa

SEQ ID NO: 73104 - DNA, 25 bp, Artificial
  probe
  misc_feature (1)..(25): SEQ ID NO: 2727; WAN024B5W_s_at; Start 359; Stop 383
tgttttcagcactttattctaggat

SEQ ID NO: 73105 - DNA, 25 bp, Artificial
  probe
  misc_feature (1)..(25): SEQ ID NO: 2727; WAN024B5W_s_at; Start 292; Stop 316
ggaaaatgtgttcgaacaggacgca

SEQ ID NO: 73106 - DNA, 25 bp, Artificial
  probe
  misc_feature (1)..(25): SEQ ID NO: 2727; WAN024B5W_s_at; Start 310; Stop 334
ggacgcaagcagctcctcaaattgt

SEQ ID NO: 73107 - DNA, 25 bp, Artificial
  probe
  misc_feature (1)..(25): SEQ ID NO: 2727; WAN024B5W_s_at; Start 266; Stop 290
tccgccatctttttcttcacgtggt

SEQ ID NO: 73108 - DNA, 25 bp, Artificial
  probe
  misc_feature (1)..(25): SEQ ID NO: 2727; WAN024B5W_s_at; Start 148; Stop 172
ccaactatctttcgatggaggtcat

SEQ ID NO: 73109 - DNA, 25 bp, Artificial
  probe
  misc_feature (1)..(25): SEQ ID NO: 2727; WAN024B5W_s_at; Start 165; Stop 189
gaggtcatttaacccagtatggtgg

SEQ ID NO: 73110 - DNA, 25 bp, Artificial
  probe
  misc_feature (1)..(25): SEQ ID NO: 2727; WAN024B5W_s_at; Start 174; Stop 198
taacccagtatggtggtcttatctt

SEQ ID NO: 73111 - DNA, 25 bp, Artificial
  probe
  misc_feature (1)..(25): SEQ ID NO: 2727; WAN024B5W_s_at; Start 298; Stop 322
tgtgttcgaacaggacgcaagcagc

SEQ ID NO: 73112 - DNA, 25 bp, Artificial
  probe
  misc_feature (1)..(25): SEQ ID NO: 2727; WAN024B5W_s_at; Start 160; Stop 184
cgatggaggtcatttaacccagtat

SEQ ID NO: 73113 - DNA, 25 bp, Artificial
  probe
  misc_feature (1)..(25): SEQ ID NO: 2727; WAN024B5W_s_at; Start 52; Stop 76
tcccctttatggtataagtgtagaa

SEQ ID NO: 73114 - DNA, 25 bp, Artificial
  probe
  misc_feature (1)..(25): SEQ ID NO: 2727; WAN024B5W_s_at; Start 346; Stop 370
gcctattccgaattgttttcagcac

SEQ ID NO: 73115 - DNA, 25 bp, Artificial
  probe
  misc_feature (1)..(25): SEQ ID NO: 2727; WAN024B5W_s_at; Start 373; Stop 397
tattctaggattagaaaagtcaacc

SEQ ID NO: 73116 - DNA, 25 bp, Artificial
  probe
  misc_feature (1)..(25): SEQ ID NO: 2727; WAN024B5W_s_at; Start 314; Stop 338
gcaagcagctcctcaaattgtctag

SEQ ID NO: 73117 - DNA, 25 bp, Artificial
  probe
  misc_feature (1)..(25): SEQ ID NO: 2727; WAN024B5W_s_at; Start 364; Stop 388
tcagcactttattctaggattagaa

SEQ ID NO: 73118 - DNA, 25 bp, Artificial
  probe
  misc_feature (1)..(25): SEQ ID NO: 2727; WAN024B5W_s_at; Start 248; Stop 272
ctttaacaatcaaacgcttccgcca

SEQ ID NO: 73119 - DNA, 25 bp, Artificial
  probe
  misc_feature (1)..(25): SEQ ID NO: 2727; WAN024B5W_s_at; Start 121; Stop 145
tcatcacttccaaaacaagtctttt

SEQ ID NO: 73120 - DNA, 25 bp, Artificial
  probe
  misc_feature (1)..(25): SEQ ID NO: 2727; WAN024B5W_s_at; Start 336; Stop 360
tagtctctatgcctattccgaattg

SEQ ID NO: 73121 - DNA, 25 bp, Artificial
  probe
  misc_feature (1)..(25): SEQ ID NO: 2727; WAN024B5W_s_at; Start 386; Stop 410
gaaaagtcaacctgaatcttcctgt

SEQ ID NO: 73122 - DNA, 25 bp, Artificial
  probe
  misc_feature (1)..(25): SEQ ID NO: 2727; WAN024B5W_s_at; Start 105; Stop 129
tgaacagtttaccaaatcatcactt

SEQ ID NO: 73123 - DNA, 25 bp, Artificial
  probe
  misc_feature (1)..(25): SEQ ID NO: 2727; WAN024B5W_s_at; Start 399; Stop 423
gaatcttcctgttccttatgaacca

SEQ ID NO: 73124 - DNA, 25 bp, Artificial
  probe
  misc_feature (1)..(25): SEQ ID NO: 2727; WAN024B5W_s_at; Start 144; Stop 168
tttaccaactatctttcgatggagg

SEQ ID NO: 73125 - DNA, 25 bp, Artificial
  probe
  misc_feature (1)..(25): SEQ ID NO: 2727; WAN024B5W_s_at; Start 254; Stop 278
caatcaaacgcttccgccatctttt

SEQ ID NO: 73126 - DNA, 25 bp, Artificial
  probe
  misc_feature (1)..(25): SEQ ID NO: 2727; WAN024B5W_s_at; Start 389; Stop 413
aagtcaacctgaatcttcctgttcc

SEQ ID NO: 73127 - DNA, 25 bp, Artificial
  probe
  misc_feature (1)..(25): SEQ ID NO: 2727; WAN024B5W_s_at; Start 323; Stop 347
tcctcaaattgtctagtctctatgc

SEQ ID NO: 73128 - DNA, 25 bp, Artificial
  probe
  misc_feature (1)..(25): SEQ ID NO: 2727; WAN024B5W_s_at; Start 170; Stop 194
catttaacccagtatggtggtctta

SEQ ID NO: 73129 - DNA, 25 bp, Artificial
  probe
  misc_feature (1)..(25): SEQ ID NO: 2727; WAN024B5W_s_at; Start 94; Stop 118
ggaaactcacatgaacagtttacca

SEQ ID NO: 73130 - DNA, 25 bp, Artificial
  probe
  misc_feature (1)..(25): SEQ ID NO: 2727; WAN024B5W_s_at; Start 295; Stop 319
aaatgtgttcgaacaggacgcaagc

SEQ ID NO: 73131 - DNA, 25 bp, Artificial
  probe
  misc_feature (1)..(25): SEQ ID NO: 2727; WAN024B5W_s_at; Start 155; Stop 179
tctttcgatggaggtcatttaaccc

SEQ ID NO: 73132 - DNA, 25 bp, Artificial
  probe
  misc_feature (1)..(25): SEQ ID NO: 2727; WAN024B5W_s_at; Start 301; Stop 325
gttcgaacaggacgcaagcagctcc

SEQ ID NO: 73133 - DNA, 25 bp, Artificial
  probe
  misc_feature (1)..(25): SEQ ID NO: 2727; WAN024B5W_s_at; Start 114; Stop 138
taccaaatcatcacttccaaaacaa

SEQ ID NO: 73134 - DNA, 25 bp, Artificial
  probe
  misc_feature (1)..(25): SEQ ID NO: 2727; WAN024B5W_s_at; Start 87; Stop 111
aaagaaaggaaactcacatgaacag

SEQ ID NO: 73135 - DNA, 25 bp, Artificial
  probe
  misc_feature (1)..(25): SEQ ID NO: 3366; WAN024B5X_at; Start 24; Stop 48
tgcttgctacttccttctgtcgaat

SEQ ID NO: 73136 - DNA, 25 bp, Artificial
  probe
  misc_feature (1)..(25): SEQ ID NO: 3366; WAN024B5X_at; Start 25; Stop 49
gcttgctacttccttctgtcgaatt

SEQ ID NO: 73137 - DNA, 25 bp, Artificial
  probe
  misc_feature (1)..(25): SEQ ID NO: 3366; WAN024B5X_at; Start 15; Stop 39
tagcgacaatgcttgctacttcctt

SEQ ID NO: 73138 - DNA, 25 bp, Artificial
  probe
  misc_feature (1)..(25): SEQ ID NO: 3366; WAN024B5X_at; Start 35; Stop 59
tccttctgtcgaatttagacaattt

SEQ ID NO: 73139 - DNA, 25 bp, Artificial
  probe
  misc_feature (1)..(25): SEQ ID NO: 3366; WAN024B5X_at; Start 448; Stop 472
ctgttaacaggttatggaacggact

SEQ ID NO: 73140 - DNA, 25 bp, Artificial
  probe
  misc_feature (1)..(25): SEQ ID NO: 3366; WAN024B5X_at; Start 34; Stop 58
ttccttctgtcgaatttagacaatt

SEQ ID NO: 73141 - DNA, 25 bp, Artificial
  probe
  misc_feature (1)..(25): SEQ ID NO: 3366; WAN024B5X_at; Start 23; Stop 47
atgcttgctacttccttctgtcgaa

SEQ ID NO: 73142 - DNA, 25 bp, Artificial
  probe
  misc_feature (1)..(25): SEQ ID NO: 3366; WAN024B5X_at; Start 18; Stop 42
cgacaatgcttgctacttccttctg

SEQ ID NO: 73143 - DNA, 25 bp, Artificial
  probe
  misc_feature (1)..(25): SEQ ID NO: 3366; WAN024B5X_at; Start 449; Stop 473
tgttaacaggttatggaacggacta

SEQ ID NO: 73144 - DNA, 25 bp, Artificial
  probe
  misc_feature (1)..(25): SEQ ID NO: 3366; WAN024B5X_at; Start 10; Stop 34
ttttttagcgacaatgcttgctact

SEQ ID NO: 73145 - DNA, 25 bp, Artificial
  probe
  misc_feature (1)..(25): SEQ ID NO: 3366; WAN024B5X_at; Start 14; Stop 38
ttagcgacaatgcttgctacttcct

SEQ ID NO: 73146 - DNA, 25 bp, Artificial
  probe
  misc_feature (1)..(25): SEQ ID NO: 3366; WAN024B5X_at; Start 39; Stop 63
tctgtcgaatttagacaattttaaa

SEQ ID NO: 73147 - DNA, 25 bp, Artificial
  probe
  misc_feature (1)..(25): SEQ ID NO: 3366; WAN024B5X_at; Start 16; Stop 40
agcgacaatgcttgctacttccttc

SEQ ID NO: 73148 - DNA, 25 bp, Artificial
  probe
  misc_feature (1)..(25): SEQ ID NO: 3366; WAN024B5X_at; Start 31; Stop 55
tacttccttctgtcgaatttagaca

SEQ ID NO: 73149 - DNA, 25 bp, Artificial
  probe
  misc_feature (1)..(25): SEQ ID NO: 3366; WAN024B5X_at; Start 27; Stop 51
ttgctacttccttctgtcgaattta

SEQ ID NO: 73150 - DNA, 25 bp, Artificial
  probe
  misc_feature (1)..(25): SEQ ID NO: 3366; WAN024B5X_at; Start 28; Stop 52
tgctacttccttctgtcgaatttag

SEQ ID NO: 73151 - DNA, 25 bp, Artificial
  probe
  misc_feature (1)..(25): SEQ ID NO: 3366; WAN024B5X_at; Start 21; Stop 45
caatgcttgctacttccttctgtcg

SEQ ID NO: 73152 - DNA, 25 bp, Artificial
  probe
  misc_feature (1)..(25): SEQ ID NO: 3366; WAN024B5X_at; Start 17; Stop 41
gcgacaatgcttgctacttccttct

SEQ ID NO: 73153 - DNA, 25 bp, Artificial
  probe
  misc_feature (1)..(25): SEQ ID NO: 3366; WAN024B5X_at; Start 459; Stop 483
ttatggaacggactatgcttgtaaa

SEQ ID NO: 73154 - DNA, 25 bp, Artificial
  probe
  misc_feature (1)..(25): SEQ ID NO: 3366; WAN024B5X_at; Start 13; Stop 37
tttagcgacaatgcttgctacttcc

SEQ ID NO: 73155 - DNA, 25 bp, Artificial
  probe
  misc_feature (1)..(25): SEQ ID NO: 3366; WAN024B5X_at; Start 30; Stop 54
ctacttccttctgtcgaatttagac

SEQ ID NO: 73156 - DNA, 25 bp, Artificial
  probe
  misc_feature (1)..(25): SEQ ID NO: 3366; WAN024B5X_at; Start 26; Stop 50
cttgctacttccttctgtcgaattt

SEQ ID NO: 73157 - DNA, 25 bp, Artificial
  probe
  misc_feature (1)..(25): SEQ ID NO: 3366; WAN024B5X_at; Start 458; Stop 482
gttatggaacggactatgcttgtaa

SEQ ID NO: 73158 - DNA, 25 bp, Artificial
  probe
  misc_feature (1)..(25): SEQ ID NO: 3366; WAN024B5X_at; Start 19; Stop 43
gacaatgcttgctacttccttctgt

SEQ ID NO: 73159 - DNA, 25 bp, Artificial
  probe
  misc_feature (1)..(25): SEQ ID NO: 3366; WAN024B5X_at; Start 33; Stop 57
cttccttctgtcgaatttagacaat

SEQ ID NO: 73160 - DNA, 25 bp, Artificial
  probe
  misc_feature (1)..(25): SEQ ID NO: 3366; WAN024B5X_at; Start 22; Stop 46
aatgcttgctacttccttctgtcga

SEQ ID NO: 73161 - DNA, 25 bp, Artificial
  probe
  misc_feature (1)..(25): SEQ ID NO: 3366; WAN024B5X_at; Start 32; Stop 56
acttccttctgtcgaatttagacaa

SEQ ID NO: 73162 - DNA, 25 bp, Artificial
  probe
  misc_feature (1)..(25): SEQ ID NO: 3366; WAN024B5X_at; Start 457; Stop 481
ggttatggaacggactatgcttgta

SEQ ID NO: 73163 - DNA, 25 bp, Artificial
  probe
  misc_feature (1)..(25): SEQ ID NO: 3366; WAN024B5X_at; Start 29; Stop 53
gctacttccttctgtcgaatttaga

SEQ ID NO: 73164 - DNA, 25 bp, Artificial
  probe
  misc_feature (1)..(25): SEQ ID NO: 3366; WAN024B5X_at; Start 451; Stop 475
ttaacaggttatggaacggactatg

SEQ ID NO: 73165 - DNA, 25 bp, Artificial
  probe
  misc_feature (1)..(25): SEQ ID NO: 3366; WAN024B5X_at; Start 36; Stop 60
ccttctgtcgaatttagacaatttt

SEQ ID NO: 73166 - DNA, 25 bp, Artificial
  probe
  misc_feature (1)..(25): SEQ ID NO: 3366; WAN024B5X_at; Start 1; Stop 25
ctgatgcatttttttagcgacaatg

SEQ ID NO: 73167 - DNA, 25 bp, Artificial
  probe
  misc_feature (1)..(25): SEQ ID NO: 3366; WAN024B5X_at; Start 11; Stop 35
tttttagcgacaatgcttgctactt

SEQ ID NO: 73168 - DNA, 25 bp, Artificial
  probe
  misc_feature (1)..(25): SEQ ID NO: 3366; WAN024B5X_at; Start 12; Stop 36
ttttagcgacaatgcttgctacttc

SEQ ID NO: 73169 - DNA, 25 bp, Artificial
  probe
  misc_feature (1)..(25): SEQ ID NO: 5457; WAN024B5Y_at; Start 9; Stop 33
gaaactgaccataaaagacattgcg

SEQ ID NO: 73170 - DNA, 25 bp, Artificial
  probe
  misc_feature (1)..(25): SEQ ID NO: 5457; WAN024B5Y_at; Start 872; Stop 896
tggttcagccctcctttgaggaagg

SEQ ID NO: 73171 - DNA, 25 bp, Artificial
  probe
  misc_feature (1)..(25): SEQ ID NO: 5457; WAN024B5Y_at; Start 444; Stop 468
tgatagtcagctctatgaacaccgg

SEQ ID NO: 73172 - DNA, 25 bp, Artificial
  probe
  misc_feature (1)..(25): SEQ ID NO: 5457; WAN024B5Y_at; Start 885; Stop 909
ctttgaggaaggacaacaggctaca

SEQ ID NO: 73173 - DNA, 25 bp, Artificial
  probe
  misc_feature (1)..(25): SEQ ID NO: 5457; WAN024B5Y_at; Start 375; Stop 399
tcagccgacctctaatttccgaaaa

SEQ ID NO: 73174 - DNA, 25 bp, Artificial
  probe
  misc_feature (1)..(25): SEQ ID NO: 5457; WAN024B5Y_at; Start 939; Stop 963
caatcaagaagaaaggcaacaagtc

SEQ ID NO: 73175 - DNA, 25 bp, Artificial
  probe
  misc_feature (1)..(25): SEQ ID NO: 5457; WAN024B5Y_at; Start 132; Stop 156
tcatgaaacaaattacaaaccgagc

SEQ ID NO: 73176 - DNA, 25 bp, Artificial
  probe
  misc_feature (1)..(25): SEQ ID NO: 5457; WAN024B5Y_at; Start 307; Stop 331
tacagccaagagagtgaggaccggt

SEQ ID NO: 73177 - DNA, 25 bp, Artificial
  probe
  misc_feature (1)..(25): SEQ ID NO: 5457; WAN024B5Y_at; Start 88; Stop 112
gaaaaaatgtcccaagagacacgtg

SEQ ID NO: 73178 - DNA, 25 bp, Artificial
  probe
  misc_feature (1)..(25): SEQ ID NO: 5457; WAN024B5Y_at; Start 322; Stop 346
gaggaccggtatattgaaagcatgc

SEQ ID NO: 73179 - DNA, 25 bp, Artificial
  probe
  misc_feature (1)..(25): SEQ ID NO: 5457; WAN024B5Y_at; Start 555; Stop 579
gattacagcggatacgagtcgtttg

SEQ ID NO: 73180 - DNA, 25 bp, Artificial
  probe
  misc_feature (1)..(25): SEQ ID NO: 5457; WAN024B5Y_at; Start 658; Stop 682
gaagataagcatacgaatttggaac

SEQ ID NO: 73181 - DNA, 25 bp, Artificial
  probe
  misc_feature (1)..(25): SEQ ID NO: 5457; WAN024B5Y_at; Start 268; Stop 292
agccagaatggctaccaggtaatga

SEQ ID NO: 73182 - DNA, 25 bp, Artificial
  probe
  misc_feature (1)..(25): SEQ ID NO: 5457; WAN024B5Y_at; Start 342; Stop 366
catgcttctcttgggagtagacggc

SEQ ID NO: 73183 - DNA, 25 bp, Artificial
  probe
  misc_feature (1)..(25): SEQ ID NO: 5457; WAN024B5Y_at; Start 638; Stop 662
gtcacgccagtctaaccattgaaga

SEQ ID NO: 73184 - DNA, 25 bp, Artificial
  probe
  misc_feature (1)..(25): SEQ ID NO: 5457; WAN024B5Y_at; Start 493; Stop 517
tatgatgccgtttatgacatgaccc

SEQ ID NO: 73185 - DNA, 25 bp, Artificial
  probe
  misc_feature (1)..(25): SEQ ID NO: 5457; WAN024B5Y_at; Start 459; Stop 483
tgaacaccggactagctgggttaaa

SEQ ID NO: 73186 - DNA, 25 bp, Artificial
  probe
  misc_feature (1)..(25): SEQ ID NO: 5457; WAN024B5Y_at; Start 576; Stop 600
tttgagtactcggattgagcgggca

SEQ ID NO: 73187 - DNA, 25 bp, Artificial
  probe
  misc_feature (1)..(25): SEQ ID NO: 5457; WAN024B5Y_at; Start 623; Stop 647
cagatgctaatatgcgtcacgccag

SEQ ID NO: 73188 - DNA, 25 bp, Artificial
  probe
  misc_feature (1)..(25): SEQ ID NO: 5457; WAN024B5Y_at; Start 147; Stop 171
caaaccgagcattgttgcgcgtagc

SEQ ID NO: 73189 - DNA, 25 bp, Artificial
  probe
  misc_feature (1)..(25): SEQ ID NO: 5457; WAN024B5Y_at; Start 697; Stop 721
ttacaaaaagaaatcgatcccgatg

SEQ ID NO: 73190 - DNA, 25 bp, Artificial
  probe
  misc_feature (1)..(25): SEQ ID NO: 5457; WAN024B5Y_at; Start 512; Stop 536
tgacccagtcctgtatcgaaaaagg

SEQ ID NO: 73191 - DNA, 25 bp, Artificial
  probe
  misc_feature (1)..(25): SEQ ID NO: 5457; WAN024B5Y_at; Start 599; Stop 623
caagtggttttgtggatgctttaac

SEQ ID NO: 73192 - DNA, 25 bp, Artificial
  probe
  misc_feature (1)..(25): SEQ ID NO: 5457; WAN024B5Y_at; Start 819; Stop 843
tggttttgacaatacggagtggact

SEQ ID NO: 73193 - DNA, 25 bp, Artificial
  probe
  misc_feature (1)..(25): SEQ ID NO: 5457; WAN024B5Y_at; Start 835; Stop 859
gagtggacttgcttttcttctccaa

SEQ ID NO: 73194 - DNA, 25 bp, Artificial
  probe
  misc_feature (1)..(25): SEQ ID NO: 5457; WAN024B5Y_at; Start 395; Stop 419
gaaaatattctcgtatcatcgatga

SEQ ID NO: 73195 - DNA, 25 bp, Artificial
  probe
  misc_feature (1)..(25): SEQ ID NO: 5457; WAN024B5Y_at; Start 251; Stop 275
gaattgaggatatcgccagccagaa

SEQ ID NO: 73196 - DNA, 25 bp, Artificial
  probe
  misc_feature (1)..(25): SEQ ID NO: 5457; WAN024B5Y_at; Start 25; Stop 49
gacattgcggaaatggctcagacct

SEQ ID NO: 73197 - DNA, 25 bp, Artificial
  probe
  misc_feature (1)..(25): SEQ ID NO: 5457; WAN024B5Y_at; Start 711; Stop 735
cgatcccgatgaaaaaactctggta

SEQ ID NO: 73198 - DNA, 25 bp, Artificial
  probe
  misc_feature (1)..(25): SEQ ID NO: 5457; WAN024B5Y_at; Start 40; Stop 64
gctcagacctcgaaaacaaccgtgt

SEQ ID NO: 73199 - DNA, 25 bp, Artificial
  probe
  misc_feature (1)..(25): SEQ ID NO: 5457; WAN024B5Y_at; Start 748; Stop 772
tgttgggccctacctctagtcttta

SEQ ID NO: 73200 - DNA, 25 bp, Artificial
  probe
  misc_feature (1)..(25): SEQ ID NO: 5457; WAN024B5Y_at; Start 857; Stop 881
caagtgtttcgacgctggttcagcc

SEQ ID NO: 73201 - DNA, 25 bp, Artificial
  probe
  misc_feature (1)..(25): SEQ ID NO: 5457; WAN024B5Y_at; Start 731; Stop 755
tggtatttatccctaactgttgggc

SEQ ID NO: 73202 - DNA, 25 bp, Artificial
  probe
  misc_feature (1)..(25): SEQ ID NO: 5457; WAN024B5Y_at; Start 162; Stop 186
tgcgcgtagcttaaactccaaacga

SEQ ID NO: 73203 - DNA, 25 bp, Artificial
  probe
  misc_feature (1)..(25): SEQ ID NO: 877; WAN024B5Z_at; Start 1317; Stop 1341
ttgtcaccataaagaaagggaggga

SEQ ID NO: 73204 - DNA, 25 bp, Artificial
  probe
  misc_feature (1)..(25): SEQ ID NO: 877; WAN024B5Z_at; Start 622; Stop 646
taccattttgcttcagaggagttga

SEQ ID NO: 73205 - DNA, 25 bp, Artificial
  probe
  misc_feature (1)..(25): SEQ ID NO: 877; WAN024B5Z_at; Start 778; Stop 802
gagttgctggaaaagatggcgacct

SEQ ID NO: 73206 - DNA, 25 bp, Artificial
  probe
  misc_feature (1)..(25): SEQ ID NO: 877; WAN024B5Z_at; Start 1013; Stop 1037
ggcagcctaagtccatgatctttga

SEQ ID NO: 73207 - DNA, 25 bp, Artificial
  probe
  misc_feature (1)..(25): SEQ ID NO: 877; WAN024B5Z_at; Start 1876; Stop 1900
gagagaatgattcgcttgcagtgct

SEQ ID NO: 73208 - DNA, 25 bp, Artificial
  probe
  misc_feature (1)..(25): SEQ ID NO: 877; WAN024B5Z_at; Start 520; Stop 544
tatcgcgccaagtacacccttagta

SEQ ID NO: 73209 - DNA, 25 bp, Artificial
  probe
  misc_feature (1)..(25): SEQ ID NO: 877; WAN024B5Z_at; Start 1045; Stop 1069
ggacatgtctgcattaaggatgaac

SEQ ID NO: 73210 - DNA, 25 bp, Artificial
  probe
  misc_feature (1)..(25): SEQ ID NO: 877; WAN024B5Z_at; Start 1157; Stop 1181
aacctattttcatagatgctgggcg

SEQ ID NO: 73211 - DNA, 25 bp, Artificial
  probe
  misc_feature (1)..(25): SEQ ID NO: 877; WAN024B5Z_at; Start 371; Stop 395
tgatgactagaaccttggatacggg

SEQ ID NO: 73212 - DNA, 25 bp, Artificial
  probe
  misc_feature (1)..(25): SEQ ID NO: 877; WAN024B5Z_at; Start 691; Stop 715
gaacagtcgattctctatcatgtag

SEQ ID NO: 73213 - DNA, 25 bp, Artificial
  probe
  misc_feature (1)..(25): SEQ ID NO: 877; WAN024B5Z_at; Start 1810; Stop 1834
gaaaaattgtgcctcgttgacggaa

SEQ ID NO: 73214 - DNA, 25 bp, Artificial
  probe
  misc_feature (1)..(25): SEQ ID NO: 877; WAN024B5Z_at; Start 1217; Stop 1241
taaagagtgcttggagtcattcgac

SEQ ID NO: 73215 - DNA, 25 bp, Artificial
  probe
  misc_feature (1)..(25): SEQ ID NO: 877; WAN024B5Z_at; Start 808; Stop 832
caaatgatgacaggcttagatggac

SEQ ID NO: 73216 - DNA, 25 bp, Artificial
  probe
  misc_feature (1)..(25): SEQ ID NO: 877; WAN024B5Z_at; Start 1241; Stop 1265
cctgcattgtagatgggaaagctcc

SEQ ID NO: 73217 - DNA, 25 bp, Artificial
  probe
  misc_feature (1)..(25): SEQ ID NO: 877; WAN024B5Z_at; Start 1363; Stop 1387
tattggtcagcagaacctgatttgc

SEQ ID NO: 73218 - DNA, 25 bp, Artificial
  probe
  misc_feature (1)..(25): SEQ ID NO: 877; WAN024B5Z_at; Start 846; Stop 870
tggtgatagcgattctacagaaacg

SEQ ID NO: 73219 - DNA, 25 bp, Artificial
  probe
  misc_feature (1)..(25): SEQ ID NO: 877; WAN024B5Z_at; Start 417; Stop 441
gaaactactcttgctcctcttgaaa

SEQ ID NO: 73220 - DNA, 25 bp, Artificial
  probe
  misc_feature (1)..(25): SEQ ID NO: 877; WAN024B5Z_at; Start 1257; Stop 1281
gaaagctccggaaagaatcacggga

SEQ ID NO: 73221 - DNA, 25 bp, Artificial
  probe
  misc_feature (1)..(25): SEQ ID NO: 877; WAN024B5Z_at; Start 971; Stop 995
gagaaaaggtcaagcgactgcagga

SEQ ID NO: 73222 - DNA, 25 bp, Artificial
  probe
  misc_feature (1)..(25): SEQ ID NO: 877; WAN024B5Z_at; Start 1413; Stop 1437
catgttggtagaggatgtctggctc

SEQ ID NO: 73223 - DNA, 25 bp, Artificial
  probe
  misc_feature (1)..(25): SEQ ID NO: 877; WAN024B5Z_at; Start 82; Stop 106
gactatgagaaagtcaagagttccc

SEQ ID NO: 73224 - DNA, 25 bp, Artificial
  probe
  misc_feature (1)..(25): SEQ ID NO: 877; WAN024B5Z_at; Start 1429; Stop 1453
gtctggctcttggtagatgacatca

SEQ ID NO: 73225 - DNA, 25 bp, Artificial
  probe
  misc_feature (1)..(25): SEQ ID NO: 877; WAN024B5Z_at; Start 1653; Stop 1677
ggattataccatcattgcgcatgag

SEQ ID NO: 73226 - DNA, 25 bp, Artificial
  probe
  misc_feature (1)..(25): SEQ ID NO: 877; WAN024B5Z_at; Start 1271; Stop 1295
gaatcacgggatcctgggaatatga

SEQ ID NO: 73227 - DNA, 25 bp, Artificial
  probe
  misc_feature (1)..(25): SEQ ID NO: 877; WAN024B5Z_at; Start 144; Stop 168
tccttgggatatggagccttgttca

SEQ ID NO: 73228 - DNA, 25 bp, Artificial
  probe
  misc_feature (1)..(25): SEQ ID NO: 877; WAN024B5Z_at; Start 1824; Stop 1848
cgttgacggaacaaaaatgcgtgga

SEQ ID NO: 73229 - DNA, 25 bp, Artificial
  probe
  misc_feature (1)..(25): SEQ ID NO: 877; WAN024B5Z_at; Start 1139; Stop 1163
gcttacagtatcaaggccaacctat

SEQ ID NO: 73230 - DNA, 25 bp, Artificial
  probe
  misc_feature (1)..(25): SEQ ID NO: 877; WAN024B5Z_at; Start 165; Stop 189
ttcaaaaatccatcaaatccagccg

SEQ ID NO: 73231 - DNA, 25 bp, Artificial
  probe
  misc_feature (1)..(25): SEQ ID NO: 877; WAN024B5Z_at; Start 182; Stop 206
tccagccgatggtatgggatcaagt

SEQ ID NO: 73232 - DNA, 25 bp, Artificial
  probe
  misc_feature (1)..(25): SEQ ID NO: 877; WAN024B5Z_at; Start 1703; Stop 1727
tctaccagacagatgatcgtgaagt

SEQ ID NO: 73233 - DNA, 25 bp, Artificial
  probe
  misc_feature (1)..(25): SEQ ID NO: 877; WAN024B5Z_at; Start 1174; Stop 1198
gctgggcgttattcttatcgggaga

SEQ ID NO: 73234 - DNA, 25 bp, Artificial
  probe
  misc_feature (1)..(25): SEQ ID NO: 877; WAN024B5Z_at; Start 1497; Stop 1521
caaggatgtgacctatcaagatggg

SEQ ID NO: 73235 - DNA, 25 bp, Artificial
  probe
  misc_feature (1)..(25): SEQ ID NO: 877; WAN024B5Z_at; Start 1088; Stop 1112
aaaatggtccgctaggaagtgccca

SEQ ID NO: 73236 - DNA, 25 bp, Artificial
  probe
  misc_feature (1)..(25): SEQ ID NO: 877; WAN024B5Z_at; Start 792; Stop 816
gatggcgacctatattcaaatgatg

SEQ ID NO: 73237 - DNA, 25 bp, Artificial
  probe
  misc_feature (1)..(25): SEQ ID NO: 2707; WAN024B62_at; Start 601; Stop 625
tatttgatggacatagttgaccgtg

SEQ ID NO: 73238 - DNA, 25 bp, Artificial
  probe
  misc_feature (1)..(25): SEQ ID NO: 2707; WAN024B62_at; Start 146; Stop 170
gactagctgtaaggtatgataacgc

SEQ ID NO: 73239 - DNA, 25 bp, Artificial
  probe
  misc_feature (1)..(25): SEQ ID NO: 2707; WAN024B62_at; Start 755; Stop 779
taaaagaaggtggagagtatcagat

SEQ ID NO: 73240 - DNA, 25 bp, Artificial
  probe
  misc_feature (1)..(25): SEQ ID NO: 2707; WAN024B62_at; Start 424; Stop 448
ggcggtgaaaaacaaattctttgca

SEQ ID NO: 73241 - DNA, 25 bp, Artificial
  probe
  misc_feature (1)..(25): SEQ ID NO: 2707; WAN024B62_at; Start 1145; Stop 1169
tatcaggagggcaaaagcaaaggct

SEQ ID NO: 73242 - DNA, 25 bp, Artificial
  probe
  misc_feature (1)..(25): SEQ ID NO: 2707; WAN024B62_at; Start 569; Stop 593
taagcataattgttgcagagcatag

SEQ ID NO: 73243 - DNA, 25 bp, Artificial
  probe
  misc_feature (1)..(25): SEQ ID NO: 2707; WAN024B62_at; Start 80; Stop 104
gagagtgcgtgctatttacaggaaa

SEQ ID NO: 73244 - DNA, 25 bp, Artificial
  probe
  misc_feature (1)..(25): SEQ ID NO: 2707; WAN024B62_at; Start 490; Stop 514
gatgagccttcatcgaatttagata

SEQ ID NO: 73245 - DNA, 25 bp, Artificial
  probe
  misc_feature (1)..(25): SEQ ID NO: 2707; WAN024B62_at; Start 1178; Stop 1202
catctgttatgtgcaagaattctcc

SEQ ID NO: 73246 - DNA, 25 bp, Artificial
  probe
  misc_feature (1)..(25): SEQ ID NO: 2707; WAN024B62_at; Start 477; Stop 501
gattatagttatggatgagccttca

SEQ ID NO: 73247 - DNA, 25 bp, Artificial
  probe
  misc_feature (1)..(25): SEQ ID NO: 2707; WAN024B62_at; Start 1161; Stop 1185
gcaaaggcttgcaatagcatctgtt

SEQ ID NO: 73248 - DNA, 25 bp, Artificial
  probe
  misc_feature (1)..(25): SEQ ID NO: 2707; WAN024B62_at; Start 101; Stop 125
gaaaaagtggaaatggtaagtcatc

SEQ ID NO: 73249 - DNA, 25 bp, Artificial
  probe
  misc_feature (1)..(25): SEQ ID NO: 2707; WAN024B62_at; Start 55; Stop 79
gatatatcactatccatagccgagg

SEQ ID NO: 73250 - DNA, 25 bp, Artificial
  probe
  misc_feature (1)..(25): SEQ ID NO: 2707; WAN024B62_at; Start 1025; Stop 1049
tcacagatgaagtattcaacgagct

SEQ ID NO: 73251 - DNA, 25 bp, Artificial
  probe
  misc_feature (1)..(25): SEQ ID NO: 2707; WAN024B62_at; Start 317; Stop 341
tggaaaatatcggtcttgcaagaga

SEQ ID NO: 73252 - DNA, 25 bp, Artificial
  probe
  misc_feature (1)..(25): SEQ ID NO: 2707; WAN024B62_at; Start 840; Stop 864
caagcttgggaaaatttatggcata

SEQ ID NO: 73253 - DNA, 25 bp, Artificial
  probe
  misc_feature (1)..(25): SEQ ID NO: 2707; WAN024B62_at; Start 856; Stop 880
tatggcataataggatccaacggac

SEQ ID NO: 73254 - DNA, 25 bp, Artificial
  probe
  misc_feature (1)..(25): SEQ ID NO: 2707; WAN024B62_at; Start 549; Stop 573
gatattaaaagagaaaggcataagc

SEQ ID NO: 73255 - DNA, 25 bp, Artificial
  probe
  misc_feature (1)..(25): SEQ ID NO: 2707; WAN024B62_at; Start 1213; Stop 1237
tttgacgaaccttcaagtggtatgg

SEQ ID NO: 73256 - DNA, 25 bp, Artificial
  probe
  misc_feature (1)..(25): SEQ ID NO: 2707; WAN024B62_at; Start 229; Stop 253
caaatctcaatgcttgtttcaactg

SEQ ID NO: 73257 - DNA, 25 bp, Artificial
  probe
  misc_feature (1)..(25): SEQ ID NO: 2707; WAN024B62_at; Start 1040; Stop 1064
tcaacgagcttagattaggagtaaa

SEQ ID NO: 73258 - DNA, 25 bp, Artificial
  probe
  misc_feature (1)..(25): SEQ ID NO: 2707; WAN024B62_at; Start 160; Stop 184
tatgataacgcaaagacaaagggcg

SEQ ID NO: 73259 - DNA, 25 bp, Artificial
  probe
  misc_feature (1)..(25): SEQ ID NO: 2707; WAN024B62_at; Start 1132; Stop 1156
catccgatgagtttatcaggagggc

SEQ ID NO: 73260 - DNA, 25 bp, Artificial
  probe
  misc_feature (1)..(25): SEQ ID NO: 2707; WAN024B62_at; Start 335; Stop 359
caagagaagagatggacaggcgttt

SEQ ID NO: 73261 - DNA, 25 bp, Artificial
  probe
  misc_feature (1)..(25): SEQ ID NO: 2707; WAN024B62_at; Start 20; Stop 44
taagtcttgattatggtgaagagca

SEQ ID NO: 73262 - DNA, 25 bp, Artificial
  probe
  misc_feature (1)..(25): SEQ ID NO: 2707; WAN024B62_at; Start 131; Stop 155
taaattcaatcaatggactagctgt

SEQ ID NO: 73263 - DNA, 25 bp, Artificial
  probe
  misc_feature (1)..(25): SEQ ID NO: 2707; WAN024B62_at; Start 446; Stop 470
gcattgcagcttcttatatagcagg

SEQ ID NO: 73264 - DNA, 25 bp, Artificial
  probe
  misc_feature (1)..(25): SEQ ID NO: 2707; WAN024B62_at; Start 871; Stop 895
tccaacggacgaggaaaatcaacgc

SEQ ID NO: 73265 - DNA, 25 bp, Artificial
  probe
  misc_feature (1)..(25): SEQ ID NO: 2707; WAN024B62_at; Start 522; Stop 546
cataagtgttttggcaaagatgcta

SEQ ID NO: 73266 - DNA, 25 bp, Artificial
  probe
  misc_feature (1)..(25): SEQ ID NO: 2707; WAN024B62_at; Start 943; Stop 967
tattttaagggagagaagctatcta

SEQ ID NO: 73267 - DNA, 25 bp, Artificial
  probe
  misc_feature (1)..(25): SEQ ID NO: 2707; WAN024B62_at; Start 1324; Stop 1348
gaatttttaaatgaagtggcagatg

SEQ ID NO: 73268 - DNA, 25 bp, Artificial
  probe
  misc_feature (1)..(25): SEQ ID NO: 2707; WAN024B62_at; Start 408; Stop 432
tatatttaatctatccggcggtgaa

SEQ ID NO: 73269 - DNA, 25 bp, Artificial
  probe
  misc_feature (1)..(25): SEQ ID NO: 2707; WAN024B62_at; Start 982; Stop 1006
aaaaactcttcacttgttatgcaag

SEQ ID NO: 73270 - DNA, 25 bp, Artificial
  probe
  misc_feature (1)..(25): SEQ ID NO: 2707; WAN024B62_at; Start 65; Stop 89
tatccatagccgagggagagtgcgt

SEQ ID NO: 73271 - DNA, 25 bp, Artificial
  probe
  misc_feature (1)..(25): SEQ ID NO: 275; WAN024B63_at; Start 70; Stop 94
gagggtcacttaatgccagaccatg

SEQ ID NO: 73272 - DNA, 25 bp, Artificial
  probe
  misc_feature (1)..(25): SEQ ID NO: 275; WAN024B63_at; Start 91; Stop 115
catgtacacatgttagtcagtattc

SEQ ID NO: 73273 - DNA, 25 bp, Artificial
  probe
  misc_feature (1)..(25): SEQ ID NO: 275; WAN024B63_at; Start 202; Stop 226
tacaagtttgggaatcggcatttct

SEQ ID NO: 73274 - DNA, 25 bp, Artificial
  probe
  misc_feature (1)..(25): SEQ ID NO: 275; WAN024B63_at; Start 198; Stop 222
caagtacaagtttgggaatcggcat

SEQ ID NO: 73275 - DNA, 25 bp, Artificial
  probe
  misc_feature (1)..(25): SEQ ID NO: 275; WAN024B63_at; Start 170; Stop 194
tcatgatgtttgacaaacacgccaa

SEQ ID NO: 73276 - DNA, 25 bp, Artificial
  probe
  misc_feature (1)..(25): SEQ ID NO: 275; WAN024B63_at; Start 65; Stop 89
tgatcgagggtcacttaatgccaga

SEQ ID NO: 73277 - DNA, 25 bp, Artificial
  probe
  misc_feature (1)..(25): SEQ ID NO: 275; WAN024B63_at; Start 174; Stop 198
gatgtttgacaaacacgccaatctc

SEQ ID NO: 73278 - DNA, 25 bp, Artificial
  probe
  misc_feature (1)..(25): SEQ ID NO: 275; WAN024B63_at; Start 161; Stop 185
aaagtgcactcatgatgtttgacaa

SEQ ID NO: 73279 - DNA, 25 bp, Artificial
  probe
  misc_feature (1)..(25): SEQ ID NO: 275; WAN024B63_at; Start 154; Stop 178
aaaggcaaaagtgcactcatgatgt

SEQ ID NO: 73280 - DNA, 25 bp, Artificial
  probe
  misc_feature (1)..(25): SEQ ID NO: 275; WAN024B63_at; Start 76; Stop 100
cacttaatgccagaccatgtacaca

SEQ ID NO: 73281 - DNA, 25 bp, Artificial
  probe
  misc_feature (1)..(25): SEQ ID NO: 275; WAN024B63_at; Start 177; Stop 201
gtttgacaaacacgccaatctcaag

SEQ ID NO: 73282 - DNA, 25 bp, Artificial
  probe
  misc_feature (1)..(25): SEQ ID NO: 275; WAN024B63_at; Start 272; Stop 296
caattaagaaatatagtcaagatta

SEQ ID NO: 73283 - DNA, 25 bp, Artificial
  probe
  misc_feature (1)..(25): SEQ ID NO: 275; WAN024B63_at; Start 183; Stop 207
caaacacgccaatctcaagtacaag

SEQ ID NO: 73284 - DNA, 25 bp, Artificial
  probe
  misc_feature (1)..(25): SEQ ID NO: 275; WAN024B63_at; Start 4; Stop 28
caatatagaagtagtttaggcgaaa

SEQ ID NO: 73285 - DNA, 25 bp, Artificial
  probe
  misc_feature (1)..(25): SEQ ID NO: 275; WAN024B63_at; Start 190; Stop 214
gccaatctcaagtacaagtttggga

SEQ ID NO: 73286 - DNA, 25 bp, Artificial
  probe
  misc_feature (1)..(25): SEQ ID NO: 275; WAN024B63_at; Start 52; Stop 76
aaaggtgttgaaatgatcgagggtc

SEQ ID NO: 73287 - DNA, 25 bp, Artificial
  probe
  misc_feature (1)..(25): SEQ ID NO: 275; WAN024B63_at; Start 86; Stop 110
cagaccatgtacacatgttagtcag

SEQ ID NO: 73288 - DNA, 25 bp, Artificial
  probe
  misc_feature (1)..(25): SEQ ID NO: 275; WAN024B63_at; Start 1; Stop 25
aatcaatatagaagtagtttaggcg

SEQ ID NO: 73289 - DNA, 25 bp, Artificial
  probe
  misc_feature (1)..(25): SEQ ID NO: 275; WAN024B63_at; Start 24; Stop 48
cgaaatatttcatcgcttgtgtagt

SEQ ID NO: 73290 - DNA, 25 bp, Artificial
  probe
  misc_feature (1)..(25): SEQ ID NO: 275; WAN024B63_at; Start 72; Stop 96
gggtcacttaatgccagaccatgta

SEQ ID NO: 73291 - DNA, 25 bp, Artificial
  probe
  misc_feature (1)..(25): SEQ ID NO: 275; WAN024B63_at; Start 83; Stop 107
tgccagaccatgtacacatgttagt

SEQ ID NO: 73292 - DNA, 25 bp, Artificial
  probe
  misc_feature (1)..(25): SEQ ID NO: 275; WAN024B63_at; Start 68; Stop 92
tcgagggtcacttaatgccagacca

SEQ ID NO: 73293 - DNA, 25 bp, Artificial
  probe
  misc_feature (1)..(25): SEQ ID NO: 275; WAN024B63_at; Start 32; Stop 56
ttcatcgcttgtgtagttataaagg

SEQ ID NO: 73294 - DNA, 25 bp, Artificial
  probe
  misc_feature (1)..(25): SEQ ID NO: 275; WAN024B63_at; Start 204; Stop 228
caagtttgggaatcggcatttctgg

SEQ ID NO: 73295 - DNA, 25 bp, Artificial
  probe
  misc_feature (1)..(25): SEQ ID NO: 275; WAN024B63_at; Start 79; Stop 103
ttaatgccagaccatgtacacatgt

SEQ ID NO: 73296 - DNA, 25 bp, Artificial
  probe
  misc_feature (1)..(25): SEQ ID NO: 275; WAN024B63_at; Start 62; Stop 86
aaatgatcgagggtcacttaatgcc

SEQ ID NO: 73297 - DNA, 25 bp, Artificial
  probe
  misc_feature (1)..(25): SEQ ID NO: 275; WAN024B63_at; Start 15; Stop 39
tagtttaggcgaaatatttcatcgc

SEQ ID NO: 73298 - DNA, 25 bp, Artificial
  probe
  misc_feature (1)..(25): SEQ ID NO: 275; WAN024B63_at; Start 57; Stop 81
tgttgaaatgatcgagggtcactta

SEQ ID NO: 73299 - DNA, 25 bp, Artificial
  probe
  misc_feature (1)..(25): SEQ ID NO: 275; WAN024B63_at; Start 20; Stop 44
taggcgaaatatttcatcgcttgtg

SEQ ID NO: 73300 - DNA, 25 bp, Artificial
  probe
  misc_feature (1)..(25): SEQ ID NO: 275; WAN024B63_at; Start 37; Stop 61
cgcttgtgtagttataaaggtgttg

SEQ ID NO: 73301 - DNA, 25 bp, Artificial
  probe
  misc_feature (1)..(25): SEQ ID NO: 275; WAN024B63_at; Start 166; Stop 190
gcactcatgatgtttgacaaacacg

SEQ ID NO: 73302 - DNA, 25 bp, Artificial
  probe
  misc_feature (1)..(25): SEQ ID NO: 275; WAN024B63_at; Start 187; Stop 211
cacgccaatctcaagtacaagtttg

SEQ ID NO: 73303 - DNA, 25 bp, Artificial
  probe
  misc_feature (1)..(25): SEQ ID NO: 275; WAN024B63_at; Start 181; Stop 205
gacaaacacgccaatctcaagtaca

SEQ ID NO: 73304 - DNA, 25 bp, Artificial
  probe
  misc_feature (1)..(25): SEQ ID NO: 275; WAN024B63_at; Start 195; Stop 219
tctcaagtacaagtttgggaatcgg

SEQ ID NO: 73305 - DNA, 25 bp, Artificial
  probe
  misc_feature (1)..(25): SEQ ID NO: 34; WAN024B67_s_at; Start 45; Stop 69
tccagcaacgaccagacgctttctg

SEQ ID NO: 73306 - DNA, 25 bp, Artificial
  probe
  misc_feature (1)..(25): SEQ ID NO: 34; WAN024B67_s_at; Start 56; Stop 80
ccagacgctttctggttagtgacct

SEQ ID NO: 73307 - DNA, 25 bp, Artificial
  probe
  misc_feature (1)..(25): SEQ ID NO: 34; WAN024B67_s_at; Start 22; Stop 46
gaaggtgttgagagccgcaaacatc

SEQ ID NO: 73308 - DNA, 25 bp, Artificial
  probe
  misc_feature (1)..(25): SEQ ID NO: 34; WAN024B67_s_at; Start 48; Stop 72
agcaacgaccagacgctttctggtt

SEQ ID NO: 73309 - DNA, 25 bp, Artificial
  probe
  misc_feature (1)..(25): SEQ ID NO: 34; WAN024B67_s_at; Start 60; Stop 84
acgctttctggttagtgaccttgtc

SEQ ID NO: 73310 - DNA, 25 bp, Artificial
  probe
  misc_feature (1)..(25): SEQ ID NO: 34; WAN024B67_s_at; Start 31; Stop 55
gagagccgcaaacatccagcaacga

SEQ ID NO: 73311 - DNA, 25 bp, Artificial
  probe
  misc_feature (1)..(25): SEQ ID NO: 34; WAN024B67_s_at; Start 27; Stop 51
tgttgagagccgcaaacatccagca

SEQ ID NO: 73312 - DNA, 25 bp, Artificial
  probe
  misc_feature (1)..(25): SEQ ID NO: 34; WAN024B67_s_at; Start 55; Stop 79
accagacgctttctggttagtgacc

SEQ ID NO: 73313 - DNA, 25 bp, Artificial
  probe
  misc_feature (1)..(25): SEQ ID NO: 34; WAN024B67_s_at; Start 54; Stop 78
gaccagacgctttctggttagtgac

SEQ ID NO: 73314 - DNA, 25 bp, Artificial
  probe
  misc_feature (1)..(25): SEQ ID NO: 34; WAN024B67_s_at; Start 65; Stop 89
ttctggttagtgaccttgtccttgg

SEQ ID NO: 73315 - DNA, 25 bp, Artificial
  probe
  misc_feature (1)..(25): SEQ ID NO: 34; WAN024B67_s_at; Start 47; Stop 71
cagcaacgaccagacgctttctggt

SEQ ID NO: 73316 - DNA, 25 bp, Artificial
  probe
  misc_feature (1)..(25): SEQ ID NO: 34; WAN024B67_s_at; Start 66; Stop 90
tctggttagtgaccttgtccttggt

SEQ ID NO: 73317 - DNA, 25 bp, Artificial
  probe
  misc_feature (1)..(25): SEQ ID NO: 34; WAN024B67_s_at; Start 63; Stop 87
ctttctggttagtgaccttgtcctt

SEQ ID NO: 73318 - DNA, 25 bp, Artificial
  probe
  misc_feature (1)..(25): SEQ ID NO: 34; WAN024B67_s_at; Start 38; Stop 62
gcaaacatccagcaacgaccagacg

SEQ ID NO: 73319 - DNA, 25 bp, Artificial
  probe
  misc_feature (1)..(25): SEQ ID NO: 34; WAN024B67_s_at; Start 59; Stop 83
gacgctttctggttagtgaccttgt

SEQ ID NO: 73320 - DNA, 25 bp, Artificial
  probe
  misc_feature (1)..(25): SEQ ID NO: 34; WAN024B67_s_at; Start 44; Stop 68
atccagcaacgaccagacgctttct

SEQ ID NO: 73321 - DNA, 25 bp, Artificial
  probe
  misc_feature (1)..(25): SEQ ID NO: 34; WAN024B67_s_at; Start 23; Stop 47
aaggtgttgagagccgcaaacatcc

SEQ ID NO: 73322 - DNA, 25 bp, Artificial
  probe
  misc_feature (1)..(25): SEQ ID NO: 34; WAN024B67_s_at; Start 30; Stop 54
tgagagccgcaaacatccagcaacg

SEQ ID NO: 73323 - DNA, 25 bp, Artificial
  probe
  misc_feature (1)..(25): SEQ ID NO: 34; WAN024B67_s_at; Start 28; Stop 52
gttgagagccgcaaacatccagcaa

SEQ ID NO: 73324 - DNA, 25 bp, Artificial
  probe
  misc_feature (1)..(25): SEQ ID NO: 34; WAN024B67_s_at; Start 40; Stop 64
aaacatccagcaacgaccagacgct

SEQ ID NO: 73325 - DNA, 25 bp, Artificial
  probe
  misc_feature (1)..(25): SEQ ID NO: 34; WAN024B67_s_at; Start 61; Stop 85
cgctttctggttagtgaccttgtcc

SEQ ID NO: 73326 - DNA, 25 bp, Artificial
  probe
  misc_feature (1)..(25): SEQ ID NO: 34; WAN024B67_s_at; Start 51; Stop 75
aacgaccagacgctttctggttagt

SEQ ID NO: 73327 - DNA, 25 bp, Artificial
  probe
  misc_feature (1)..(25): SEQ ID NO: 34; WAN024B67_s_at; Start 32; Stop 56
agagccgcaaacatccagcaacgac

SEQ ID NO: 73328 - DNA, 25 bp, Artificial
  probe
  misc_feature (1)..(25): SEQ ID NO: 34; WAN024B67_s_at; Start 41; Stop 65
aacatccagcaacgaccagacgctt

SEQ ID NO: 73329 - DNA, 25 bp, Artificial
  probe
  misc_feature (1)..(25): SEQ ID NO: 34; WAN024B67_s_at; Start 1; Stop 25
ttgcgagatgagtttgtggcggaag

SEQ ID NO: 73330 - DNA, 25 bp, Artificial
  probe
  misc_feature (1)..(25): SEQ ID NO: 34; WAN024B67_s_at; Start 29; Stop 53
ttgagagccgcaaacatccagcaac

SEQ ID NO: 73331 - DNA, 25 bp, Artificial
  probe
  misc_feature (1)..(25): SEQ ID NO: 34; WAN024B67_s_at; Start 21; Stop 45
ggaaggtgttgagagccgcaaacat

SEQ ID NO: 73332 - DNA, 25 bp, Artificial
  probe
  misc_feature (1)..(25): SEQ ID NO: 34; WAN024B67_s_at; Start 57; Stop 81
cagacgctttctggttagtgacctt

SEQ ID NO: 73333 - DNA, 25 bp, Artificial
  probe
  misc_feature (1)..(25): SEQ ID NO: 34; WAN024B67_s_at; Start 53; Stop 77
cgaccagacgctttctggttagtga

SEQ ID NO: 73334 - DNA, 25 bp, Artificial
  probe
  misc_feature (1)..(25): SEQ ID NO: 34; WAN024B67_s_at; Start 49; Stop 73
gcaacgaccagacgctttctggtta

SEQ ID NO: 73335 - DNA, 25 bp, Artificial
  probe
  misc_feature (1)..(25): SEQ ID NO: 34; WAN024B67_s_at; Start 58; Stop 82
agacgctttctggttagtgaccttg

SEQ ID NO: 73336 - DNA, 25 bp, Artificial
  probe
  misc_feature (1)..(25): SEQ ID NO: 34; WAN024B67_s_at; Start 5; Stop 29
gagatgagtttgtggcggaaggtgt

SEQ ID NO: 73337 - DNA, 25 bp, Artificial
  probe
  misc_feature (1)..(25): SEQ ID NO: 34; WAN024B67_s_at; Start 20; Stop 44
cggaaggtgttgagagccgcaaaca

SEQ ID NO: 73338 - DNA, 25 bp, Artificial
  probe
  misc_feature (1)..(25): SEQ ID NO: 34; WAN024B67_s_at; Start 62; Stop 86
gctttctggttagtgaccttgtcct

SEQ ID NO: 73339 - DNA, 25 bp, Artificial
  probe
  misc_feature (1)..(25): SEQ ID NO: 1483; WAN024B68_at; Start 224; Stop 248
gacgttccagagctgcaaaaattcc

SEQ ID NO: 73340 - DNA, 25 bp, Artificial
  probe
  misc_feature (1)..(25): SEQ ID NO: 1483; WAN024B68_at; Start 80; Stop 104
ccaatttgtattgcgagatgagttt

SEQ ID NO: 73341 - DNA, 25 bp, Artificial
  probe
  misc_feature (1)..(25): SEQ ID NO: 1483; WAN024B68_at; Start 208; Stop 232
tctacatggctttggcgacgttcca

SEQ ID NO: 73342 - DNA, 25 bp, Artificial
  probe
  misc_feature (1)..(25): SEQ ID NO: 1483; WAN024B68_at; Start 212; Stop 236
catggctttggcgacgttccagagc

SEQ ID NO: 73343 - DNA, 25 bp, Artificial
  probe
  misc_feature (1)..(25): SEQ ID NO: 1483; WAN024B68_at; Start 8; Stop 32
gctccaagaaccagtttgatttctc

SEQ ID NO: 73344 - DNA, 25 bp, Artificial
  probe
  misc_feature (1)..(25): SEQ ID NO: 1483; WAN024B68_at; Start 34; Stop 58
tacttatcccagaagaaagtgtggg

SEQ ID NO: 73345 - DNA, 25 bp, Artificial
  probe
  misc_feature (1)..(25): SEQ ID NO: 1483; WAN024B68_at; Start 258; Stop 282
ggcagcattttcaatcgcttggtat

SEQ ID NO: 73346 - DNA, 25 bp, Artificial
  probe
  misc_feature (1)..(25): SEQ ID NO: 1483; WAN024B68_at; Start 12; Stop 36
caagaaccagtttgatttctcatac

SEQ ID NO: 73347 - DNA, 25 bp, Artificial
  probe
  misc_feature (1)..(25): SEQ ID NO: 1483; WAN024B68_at; Start 48; Stop 72
gaaagtgtgggcttgtgacaactca

SEQ ID NO: 73348 - DNA, 25 bp, Artificial
  probe
  misc_feature (1)..(25): SEQ ID NO: 1483; WAN024B68_at; Start 38; Stop 62
tatcccagaagaaagtgtgggcttg

SEQ ID NO: 73349 - DNA, 25 bp, Artificial
  probe
  misc_feature (1)..(25): SEQ ID NO: 1483; WAN024B68_at; Start 254; Stop 278
ggctggcagcattttcaatcgcttg

SEQ ID NO: 73350 - DNA, 25 bp, Artificial
  probe
  misc_feature (1)..(25): SEQ ID NO: 1483; WAN024B68_at; Start 231; Stop 255
cagagctgcaaaaattccgttgtgg

SEQ ID NO: 73351 - DNA, 25 bp, Artificial
  probe
  misc_feature (1)..(25): SEQ ID NO: 1483; WAN024B68_at; Start 239; Stop 263
caaaaattccgttgtggctggcagc

SEQ ID NO: 73352 - DNA, 25 bp, Artificial
  probe
  misc_feature (1)..(25): SEQ ID NO: 1483; WAN024B68_at; Start 185; Stop 209
ccaatgagaaaacaggtgtgttgtc

SEQ ID NO: 73353 - DNA, 25 bp, Artificial
  probe
  misc_feature (1)..(25): SEQ ID NO: 1483; WAN024B68_at; Start 166; Stop 190
accttgtccttggttaaatccaatg

SEQ ID NO: 73354 - DNA, 25 bp, Artificial
  probe
  misc_feature (1)..(25): SEQ ID NO: 1483; WAN024B68_at; Start 180; Stop 204
taaatccaatgagaaaacaggtgtg

SEQ ID NO: 73355 - DNA, 25 bp, Artificial
  probe
  misc_feature (1)..(25): SEQ ID NO: 1483; WAN024B68_at; Start 227; Stop 251
gttccagagctgcaaaaattccgtt

SEQ ID NO: 73356 - DNA, 25 bp, Artificial
  probe
  misc_feature (1)..(25): SEQ ID NO: 1483; WAN024B68_at; Start 58; Stop 82
gcttgtgacaactcaaagttctcca

SEQ ID NO: 73357 - DNA, 25 bp, Artificial
  probe
  misc_feature (1)..(25): SEQ ID NO: 1483; WAN024B68_at; Start 220; Stop 244
tggcgacgttccagagctgcaaaaa

SEQ ID NO: 73358 - DNA, 25 bp, Artificial
  probe
  misc_feature (1)..(25): SEQ ID NO: 1483; WAN024B68_at; Start 63; Stop 87
tgacaactcaaagttctccaatttg

SEQ ID NO: 73359 - DNA, 25 bp, Artificial
  probe
  misc_feature (1)..(25): SEQ ID NO: 1483; WAN024B68_at; Start 241; Stop 265
aaaattccgttgtggctggcagcat

SEQ ID NO: 73360 - DNA, 25 bp, Artificial
  probe
  misc_feature (1)..(25): SEQ ID NO: 1483; WAN024B68_at; Start 55; Stop 79
tgggcttgtgacaactcaaagttct

SEQ ID NO: 73361 - DNA, 25 bp, Artificial
  probe
  misc_feature (1)..(25): SEQ ID NO: 1483; WAN024B68_at; Start 251; Stop 275
tgtggctggcagcattttcaatcgc

SEQ ID NO: 73362 - DNA, 25 bp, Artificial
  probe
  misc_feature (1)..(25): SEQ ID NO: 1483; WAN024B68_at; Start 201; Stop 225
tgtgttgtctacatggctttggcga

SEQ ID NO: 73363 - DNA, 25 bp, Artificial
  probe
  misc_feature (1)..(25): SEQ ID NO: 1483; WAN024B68_at; Start 269; Stop 293
caatcgcttggtattttacatttgc

SEQ ID NO: 73364 - DNA, 25 bp, Artificial
  probe
  misc_feature (1)..(25): SEQ ID NO: 1483; WAN024B68_at; Start 24; Stop 48
tgatttctcatacttatcccagaag

SEQ ID NO: 73365 - DNA, 25 bp, Artificial
  probe
  misc_feature (1)..(25): SEQ ID NO: 1483; WAN024B68_at; Start 42; Stop 66
ccagaagaaagtgtgggcttgtgac

SEQ ID NO: 73366 - DNA, 25 bp, Artificial
  probe
  misc_feature (1)..(25): SEQ ID NO: 1483; WAN024B68_at; Start 246; Stop 270
tccgttgtggctggcagcattttca

SEQ ID NO: 73367 - DNA, 25 bp, Artificial
  probe
  misc_feature (1)..(25): SEQ ID NO: 1483; WAN024B68_at; Start 193; Stop 217
aaaacaggtgtgttgtctacatggc

SEQ ID NO: 73368 - DNA, 25 bp, Artificial
  probe
  misc_feature (1)..(25): SEQ ID NO: 1483; WAN024B68_at; Start 71; Stop 95
caaagttctccaatttgtattgcga

SEQ ID NO: 73369 - DNA, 25 bp, Artificial
  probe
  misc_feature (1)..(25): SEQ ID NO: 1483; WAN024B68_at; Start 273; Stop 297
cgcttggtattttacatttgcttca

SEQ ID NO: 73370 - DNA, 25 bp, Artificial
  probe
  misc_feature (1)..(25): SEQ ID NO: 1483; WAN024B68_at; Start 216; Stop 240
gctttggcgacgttccagagctgca

SEQ ID NO: 73371 - DNA, 25 bp, Artificial
  probe
  misc_feature (1)..(25): SEQ ID NO: 1483; WAN024B68_at; Start 3; Stop 27
gacttgctccaagaaccagtttgat

SEQ ID NO: 73372 - DNA, 25 bp, Artificial
  probe
  misc_feature (1)..(25): SEQ ID NO: 1483; WAN024B68_at; Start 235; Stop 259
gctgcaaaaattccgttgtggctgg

SEQ ID NO: 73373 - DNA, 25 bp, Artificial
  probe
  misc_feature (1)..(25): SEQ ID NO: 2675; WAN024B69_at; Start 90; Stop 114
tcgtccatccaagcgtctgaggcaa

SEQ ID NO: 73374 - DNA, 25 bp, Artificial
  probe
  misc_feature (1)..(25): SEQ ID NO: 2675; WAN024B69_at; Start 1; Stop 25
atggtgcaagtacgattggttctgc

SEQ ID NO: 73375 - DNA, 25 bp, Artificial
  probe
  misc_feature (1)..(25): SEQ ID NO: 2675; WAN024B69_at; Start 174; Stop 198
gatttaccattttcgtccaagtcaa

SEQ ID NO: 73376 - DNA, 25 bp, Artificial
  probe
  misc_feature (1)..(25): SEQ ID NO: 2675; WAN024B69_at; Start 95; Stop 119
catccaagcgtctgaggcaacaaag

SEQ ID NO: 73377 - DNA, 25 bp, Artificial
  probe
  misc_feature (1)..(25): SEQ ID NO: 2675; WAN024B69_at; Start 197; Stop 221
aacacctgtcaagaccatggcgtgg

SEQ ID NO: 73378 - DNA, 25 bp, Artificial
  probe
  misc_feature (1)..(25): SEQ ID NO: 2675; WAN024B69_at; Start 201; Stop 225
cctgtcaagaccatggcgtgggtca

SEQ ID NO: 73379 - DNA, 25 bp, Artificial
  probe
  misc_feature (1)..(25): SEQ ID NO: 2675; WAN024B69_at; Start 45; Stop 69
tctgctgtcagcaattccttacgaa

SEQ ID NO: 73380 - DNA, 25 bp, Artificial
  probe
  misc_feature (1)..(25): SEQ ID NO: 2675; WAN024B69_at; Start 17; Stop 41
tggttctgctccataggcagcttgt

SEQ ID NO: 73381 - DNA, 25 bp, Artificial
  probe
  misc_feature (1)..(25): SEQ ID NO: 2675; WAN024B69_at; Start 120; Stop 144
taaccatctgtaccgaccttgtctc

SEQ ID NO: 73382 - DNA, 25 bp, Artificial
  probe
  misc_feature (1)..(25): SEQ ID NO: 2675; WAN024B69_at; Start 215; Stop 239
ggcgtgggtcatcaagctttcacta

SEQ ID NO: 73383 - DNA, 25 bp, Artificial
  probe
  misc_feature (1)..(25): SEQ ID NO: 2675; WAN024B69_at; Start 220; Stop 244
gggtcatcaagctttcactatagtc

SEQ ID NO: 73384 - DNA, 25 bp, Artificial
  probe
  misc_feature (1)..(25): SEQ ID NO: 2675; WAN024B69_at; Start 70; Stop 94
caacgatttggtatgtgtattcgtc

SEQ ID NO: 73385 - DNA, 25 bp, Artificial
  probe
  misc_feature (1)..(25): SEQ ID NO: 2675; WAN024B69_at; Start 60; Stop 84
tccttacgaacaacgatttggtatg

SEQ ID NO: 73386 - DNA, 25 bp, Artificial
  probe
  misc_feature (1)..(25): SEQ ID NO: 2675; WAN024B69_at; Start 246; Stop 270
aaacgtccagccttgtcttgagtaa

SEQ ID NO: 73387 - DNA, 25 bp, Artificial
  probe
  misc_feature (1)..(25): SEQ ID NO: 2675; WAN024B69_at; Start 238; Stop 262
tatagtccaaacgtccagccttgtc

SEQ ID NO: 73388 - DNA, 25 bp, Artificial
  probe
  misc_feature (1)..(25): SEQ ID NO: 2675; WAN024B69_at; Start 11; Stop 35
tacgattggttctgctccataggca

SEQ ID NO: 73389 - DNA, 25 bp, Artificial
  probe
  misc_feature (1)..(25): SEQ ID NO: 2675; WAN024B69_at; Start 159; Stop 183
accttccacttggttgatttaccat

SEQ ID NO: 73390 - DNA, 25 bp, Artificial
  probe
  misc_feature (1)..(25): SEQ ID NO: 2675; WAN024B69_at; Start 87; Stop 111
tattcgtccatccaagcgtctgagg

SEQ ID NO: 73391 - DNA, 25 bp, Artificial
  probe
  misc_feature (1)..(25): SEQ ID NO: 2675; WAN024B69_at; Start 139; Stop 163
tgtctccccatgagttttcaacctt

SEQ ID NO: 73392 - DNA, 25 bp, Artificial
  probe
  misc_feature (1)..(25): SEQ ID NO: 2675; WAN024B69_at; Start 56; Stop 80
caattccttacgaacaacgatttgg

SEQ ID NO: 73393 - DNA, 25 bp, Artificial
  probe
  misc_feature (1)..(25): SEQ ID NO: 2675; WAN024B69_at; Start 81; Stop 105
tatgtgtattcgtccatccaagcgt

SEQ ID NO: 73394 - DNA, 25 bp, Artificial
  probe
  misc_feature (1)..(25): SEQ ID NO: 2675; WAN024B69_at; Start 98; Stop 122
ccaagcgtctgaggcaacaaagtaa

SEQ ID NO: 73395 - DNA, 25 bp, Artificial
  probe
  misc_feature (1)..(25): SEQ ID NO: 2675; WAN024B69_at; Start 183; Stop 207
ttttcgtccaagtcaacacctgtca

SEQ ID NO: 73396 - DNA, 25 bp, Artificial
  probe
  misc_feature (1)..(25): SEQ ID NO: 2675; WAN024B69_at; Start 7; Stop 31
caagtacgattggttctgctccata

SEQ ID NO: 73397 - DNA, 25 bp, Artificial
  probe
  misc_feature (1)..(25): SEQ ID NO: 2675; WAN024B69_at; Start 232; Stop 256
tttcactatagtccaaacgtccagc

SEQ ID NO: 73398 - DNA, 25 bp, Artificial
  probe
  misc_feature (1)..(25): SEQ ID NO: 2675; WAN024B69_at; Start 33; Stop 57
gcagcttgttcttctgctgtcagca

SEQ ID NO: 73399 - DNA, 25 bp, Artificial
  probe
  misc_feature (1)..(25): SEQ ID NO: 2675; WAN024B69_at; Start 50; Stop 74
tgtcagcaattccttacgaacaacg

SEQ ID NO: 73400 - DNA, 25 bp, Artificial
  probe
  misc_feature (1)..(25): SEQ ID NO: 2675; WAN024B69_at; Start 129; Stop 153
gtaccgaccttgtctccccatgagt

SEQ ID NO: 73401 - DNA, 25 bp, Artificial
  probe
  misc_feature (1)..(25): SEQ ID NO: 2675; WAN024B69_at; Start 24; Stop 48
gctccataggcagcttgttcttctg

SEQ ID NO: 73402 - DNA, 25 bp, Artificial
  probe
  misc_feature (1)..(25): SEQ ID NO: 2675; WAN024B69_at; Start 192; Stop 216
aagtcaacacctgtcaagaccatgg

SEQ ID NO: 73403 - DNA, 25 bp, Artificial
  probe
  misc_feature (1)..(25): SEQ ID NO: 2675; WAN024B69_at; Start 103; Stop 127
cgtctgaggcaacaaagtaaccatc

SEQ ID NO: 73404 - DNA, 25 bp, Artificial
  probe
  misc_feature (1)..(25): SEQ ID NO: 2675; WAN024B69_at; Start 116; Stop 140
aaagtaaccatctgtaccgaccttg

SEQ ID NO: 73405 - DNA, 25 bp, Artificial
  probe
  misc_feature (1)..(25): SEQ ID NO: 2675; WAN024B69_at; Start 147; Stop 171
catgagttttcaaccttccacttgg

SEQ ID NO: 73406 - DNA, 25 bp, Artificial
  probe
  misc_feature (1)..(25): SEQ ID NO: 2675; WAN024B69_at; Start 211; Stop 235
ccatggcgtgggtcatcaagctttc

SEQ ID NO: 73407 - DNA, 25 bp, Artificial
  probe
  misc_feature (1)..(25): SEQ ID NO: 1041; WAN024B6A_at; Start 187; Stop 211
cagaaagcgtctggtcgttgctgga

SEQ ID NO: 73408 - DNA, 25 bp, Artificial
  probe
  misc_feature (1)..(25): SEQ ID NO: 1041; WAN024B6A_at; Start 337; Stop 361
caagtcattgcgacttcagaccaag

SEQ ID NO: 73409 - DNA, 25 bp, Artificial
  probe
  misc_feature (1)..(25): SEQ ID NO: 1041; WAN024B6A_at; Start 1250; Stop 1274
tgctgacagcagaagaacaagctgc

SEQ ID NO: 73410 - DNA, 25 bp, Artificial
  probe
  misc_feature (1)..(25): SEQ ID NO: 1041; WAN024B6A_at; Start 669; Stop 693
caagtttgactttgcttatcgcgat

SEQ ID NO: 73411 - DNA, 25 bp, Artificial
  probe
  misc_feature (1)..(25): SEQ ID NO: 1041; WAN024B6A_at; Start 202; Stop 226
cgttgctggatgtttgcggctctca

SEQ ID NO: 73412 - DNA, 25 bp, Artificial
  probe
  misc_feature (1)..(25): SEQ ID NO: 1041; WAN024B6A_at; Start 915; Stop 939
tgcccaaatgcaagcaggtgagact

SEQ ID NO: 73413 - DNA, 25 bp, Artificial
  probe
  misc_feature (1)..(25): SEQ ID NO: 1041; WAN024B6A_at; Start 1073; Stop 1097
aaagcttgatgacccacgccatggt

SEQ ID NO: 73414 - DNA, 25 bp, Artificial
  probe
  misc_feature (1)..(25): SEQ ID NO: 1041; WAN024B6A_at; Start 67; Stop 91
caagcgattgaaaatgctgccagcc

SEQ ID NO: 73415 - DNA, 25 bp, Artificial
  probe
  misc_feature (1)..(25): SEQ ID NO: 1041; WAN024B6A_at; Start 120; Stop 144
tcgccaaagccatgtagacaacaca

SEQ ID NO: 73416 - DNA, 25 bp, Artificial
  probe
  misc_feature (1)..(25): SEQ ID NO: 1041; WAN024B6A_at; Start 81; Stop 105
tgctgccagccacaacggaattttt

SEQ ID NO: 73417 - DNA, 25 bp, Artificial
  probe
  misc_feature (1)..(25): SEQ ID NO: 1041; WAN024B6A_at; Start 946; Stop 970
tttggttctgatgtcggccagctca

SEQ ID NO: 73418 - DNA, 25 bp, Artificial
  probe
  misc_feature (1)..(25): SEQ ID NO: 1041; WAN024B6A_at; Start 847; Stop 871
aatgtggttggtagccgtgcagttc

SEQ ID NO: 73419 - DNA, 25 bp, Artificial
  probe
  misc_feature (1)..(25): SEQ ID NO: 1041; WAN024B6A_at; Start 501; Stop 525
cagtcgtgagctaaatgcgatcctt

SEQ ID NO: 73420 - DNA, 25 bp, Artificial
  probe
  misc_feature (1)..(25): SEQ ID NO: 1041; WAN024B6A_at; Start 1199; Stop 1223
cagacgcttggatggacgaatacac

SEQ ID NO: 73421 - DNA, 25 bp, Artificial
  probe
  misc_feature (1)..(25): SEQ ID NO: 1041; WAN024B6A_at; Start 874; Stop 898
tacatcaacgttccaatggagcgct

SEQ ID NO: 73422 - DNA, 25 bp, Artificial
  probe
  misc_feature (1)..(25): SEQ ID NO: 1041; WAN024B6A_at; Start 1233; Stop 1257
cgttgttcgtaaggaattgctgaca

SEQ ID NO: 73423 - DNA, 25 bp, Artificial
  probe
  misc_feature (1)..(25): SEQ ID NO: 1041; WAN024B6A_at; Start 1045; Stop 1069
gacaaggctggacgtttggactata

SEQ ID NO: 73424 - DNA, 25 bp, Artificial
  probe
  misc_feature (1)..(25): SEQ ID NO: 1041; WAN024B6A_at; Start 793; Stop 817
gctccaactgctgataaaccttacg

SEQ ID NO: 73425 - DNA, 25 bp, Artificial
  probe
  misc_feature (1)..(25): SEQ ID NO: 1041; WAN024B6A_at; Start 1295; Stop 1319
tacttgcaccatgggatccaatggg

SEQ ID NO: 73426 - DNA, 25 bp, Artificial
  probe
  misc_feature (1)..(25): SEQ ID NO: 1041; WAN024B6A_at; Start 715; Stop 739
gaaaaaggaatcacaccacaagagt

SEQ ID NO: 73427 - DNA, 25 bp, Artificial
  probe
  misc_feature (1)..(25): SEQ ID NO: 1041; WAN024B6A_at; Start 319; Stop 343
tcaaactggttcttggagcaagtca

SEQ ID NO: 73428 - DNA, 25 bp, Artificial
  probe
  misc_feature (1)..(25): SEQ ID NO: 1041; WAN024B6A_at; Start 1165; Stop 1189
gacaaggtcggtacagatggttact

SEQ ID NO: 73429 - DNA, 25 bp, Artificial
  probe
  misc_feature (1)..(25): SEQ ID NO: 1041; WAN024B6A_at; Start 896; Stop 920
gcttgaaagaattggcgattgccca

SEQ ID NO: 73430 - DNA, 25 bp, Artificial
  probe
  misc_feature (1)..(25): SEQ ID NO: 1041; WAN024B6A_at; Start 1031; Stop 1055
ttaaacttactcaagacaaggctgg

SEQ ID NO: 73431 - DNA, 25 bp, Artificial
  probe
  misc_feature (1)..(25): SEQ ID NO: 1041; WAN024B6A_at; Start 655; Stop 679
ggacttccaccacgcaagtttgact

SEQ ID NO: 73432 - DNA, 25 bp, Artificial
  probe
  misc_feature (1)..(25): SEQ ID NO: 1041; WAN024B6A_at; Start 172; Stop 196
gacaaggtcactaaccagaaagcgt

SEQ ID NO: 73433 - DNA, 25 bp, Artificial
  probe
  misc_feature (1)..(25): SEQ ID NO: 1041; WAN024B6A_at; Start 267; Stop 291
gaactttgagttgtcacaagcccac

SEQ ID NO: 73434 - DNA, 25 bp, Artificial
  probe
  misc_feature (1)..(25): SEQ ID NO: 1041; WAN024B6A_at; Start 374; Stop 398
gcaaggttagcttcttactccaaac

SEQ ID NO: 73435 - DNA, 25 bp, Artificial
  probe
  misc_feature (1)..(25): SEQ ID NO: 1041; WAN024B6A_at; Start 1267; Stop 1291
caagctgcctatggagcagaaccaa

SEQ ID NO: 73436 - DNA, 25 bp, Artificial
  probe
  misc_feature (1)..(25): SEQ ID NO: 1041; WAN024B6A_at; Start 355; Stop 379
gaccaagaattgactagccgcaagg

SEQ ID NO: 73437 - DNA, 25 bp, Artificial
  probe
  misc_feature (1)..(25): SEQ ID NO: 1041; WAN024B6A_at; Start 440; Stop 464
tctttgaaaaatacggtgtcgtgcc

SEQ ID NO: 73438 - DNA, 25 bp, Artificial
  probe
  misc_feature (1)..(25): SEQ ID NO: 1041; WAN024B6A_at; Start 1100; Stop 1124
tgacaggtgttgacttggacgaaaa

SEQ ID NO: 73439 - DNA, 25 bp, Artificial
  probe
  misc_feature (1)..(25): SEQ ID NO: 1041; WAN024B6A_at; Start 486; Stop 510
tgtttcatctagcagcagtcgtgag

SEQ ID NO: 73440 - DNA, 25 bp, Artificial
  probe
  misc_feature (1)..(25): SEQ ID NO: 1041; WAN024B6A_at; Start 423; Stop 447
ggatatggtcgtttccctctttgaa

SEQ ID NO: 73441 - DNA, 25 bp, Artificial
  probe
  misc_feature (1)..(25): SEQ ID NO: 7702; WAN024B6B_at; Start 189; Stop 213
cgaagaattgtttataatatgtgag

SEQ ID NO: 73442 - DNA, 25 bp, Artificial
  probe
  misc_feature (1)..(25): SEQ ID NO: 7702; WAN024B6B_at; Start 217; Stop 241
ttattagataagaaaaaagtatcat

SEQ ID NO: 73443 - DNA, 25 bp, Artificial
  probe
  misc_feature (1)..(25): SEQ ID NO: 7702; WAN024B6B_at; Start 187; Stop 211
gtcgaagaattgtttataatatgtg

SEQ ID NO: 73444 - DNA, 25 bp, Artificial
  probe
  misc_feature (1)..(25): SEQ ID NO: 7702; WAN024B6B_at; Start 180; Stop 204
ttcctctgtcgaagaattgtttata

SEQ ID NO: 73445 - DNA, 25 bp, Artificial
  probe
  misc_feature (1)..(25): SEQ ID NO: 7702; WAN024B6B_at; Start 159; Stop 183
tattgagttagaagttaagtattcc

SEQ ID NO: 73446 - DNA, 25 bp, Artificial
  probe
  misc_feature (1)..(25): SEQ ID NO: 7702; WAN024B6B_at; Start 167; Stop 191
tagaagttaagtattcctctgtcga

SEQ ID NO: 73447 - DNA, 25 bp, Artificial
  probe
  misc_feature (1)..(25): SEQ ID NO: 7702; WAN024B6B_at; Start 171; Stop 195
agttaagtattcctctgtcgaagaa

SEQ ID NO: 73448 - DNA, 25 bp, Artificial
  probe
  misc_feature (1)..(25): SEQ ID NO: 7702; WAN024B6B_at; Start 178; Stop 202
tattcctctgtcgaagaattgttta

SEQ ID NO: 73449 - DNA, 25 bp, Artificial
  probe
  misc_feature (1)..(25): SEQ ID NO: 7702; WAN024B6B_at; Start 183; Stop 207
ctctgtcgaagaattgtttataata

SEQ ID NO: 73450 - DNA, 25 bp, Artificial
  probe
  misc_feature (1)..(25): SEQ ID NO: 7702; WAN024B6B_at; Start 173; Stop 197
ttaagtattcctctgtcgaagaatt

SEQ ID NO: 73451 - DNA, 25 bp, Artificial
  probe
  misc_feature (1)..(25): SEQ ID NO: 7702; WAN024B6B_at; Start 191; Stop 215
aagaattgtttataatatgtgagaa

SEQ ID NO: 73452 - DNA, 25 bp, Artificial
  probe
  misc_feature (1)..(25): SEQ ID NO: 7702; WAN024B6B_at; Start 181; Stop 205
tcctctgtcgaagaattgtttataa

SEQ ID NO: 73453 - DNA, 25 bp, Artificial
  probe
  misc_feature (1)..(25): SEQ ID NO: 7702; WAN024B6B_at; Start 172; Stop 196
gttaagtattcctctgtcgaagaat

SEQ ID NO: 73454 - DNA, 25 bp, Artificial
  probe
  misc_feature (1)..(25): SEQ ID NO: 7702; WAN024B6B_at; Start 169; Stop 193
gaagttaagtattcctctgtcgaag

SEQ ID NO: 73455 - DNA, 25 bp, Artificial
  probe
  misc_feature (1)..(25): SEQ ID NO: 7702; WAN024B6B_at; Start 164; Stop 188
agttagaagttaagtattcctctgt

SEQ ID NO: 73456 - DNA, 25 bp, Artificial
  probe
  misc_feature (1)..(25): SEQ ID NO: 7702; WAN024B6B_at; Start 160; Stop 184
attgagttagaagttaagtattcct

SEQ ID NO: 73457 - DNA, 25 bp, Artificial
  probe
  misc_feature (1)..(25): SEQ ID NO: 7702; WAN024B6B_at; Start 179; Stop 203
attcctctgtcgaagaattgtttat

SEQ ID NO: 73458 - DNA, 25 bp, Artificial
  probe
  misc_feature (1)..(25): SEQ ID NO: 7702; WAN024B6B_at; Start 165; Stop 189
gttagaagttaagtattcctctgtc

SEQ ID NO: 73459 - DNA, 25 bp, Artificial
  probe
  misc_feature (1)..(25): SEQ ID NO: 7702; WAN024B6B_at; Start 161; Stop 185
ttgagttagaagttaagtattcctc

SEQ ID NO: 73460 - DNA, 25 bp, Artificial
  probe
  misc_feature (1)..(25): SEQ ID NO: 7702; WAN024B6B_at; Start 146; Stop 170
tatactttaatgatattgagttaga

SEQ ID NO: 73461 - DNA, 25 bp, Artificial
  probe
  misc_feature (1)..(25): SEQ ID NO: 7702; WAN024B6B_at; Start 168; Stop 192
agaagttaagtattcctctgtcgaa

SEQ ID NO: 73462 - DNA, 25 bp, Artificial
  probe
  misc_feature (1)..(25): SEQ ID NO: 7702; WAN024B6B_at; Start 206; Stop 230
tatgtgagaaattattagataagaa

SEQ ID NO: 73463 - DNA, 25 bp, Artificial
  probe
  misc_feature (1)..(25): SEQ ID NO: 7702; WAN024B6B_at; Start 182; Stop 206
cctctgtcgaagaattgtttataat

SEQ ID NO: 73464 - DNA, 25 bp, Artificial
  probe
  misc_feature (1)..(25): SEQ ID NO: 7702; WAN024B6B_at; Start 174; Stop 198
taagtattcctctgtcgaagaattg

SEQ ID NO: 73465 - DNA, 25 bp, Artificial
  probe
  misc_feature (1)..(25): SEQ ID NO: 7702; WAN024B6B_at; Start 176; Stop 200
agtattcctctgtcgaagaattgtt

SEQ ID NO: 73466 - DNA, 25 bp, Artificial
  probe
  misc_feature (1)..(25): SEQ ID NO: 7702; WAN024B6B_at; Start 170; Stop 194
aagttaagtattcctctgtcgaaga

SEQ ID NO: 73467 - DNA, 25 bp, Artificial
  probe
  misc_feature (1)..(25): SEQ ID NO: 7702; WAN024B6B_at; Start 185; Stop 209
ctgtcgaagaattgtttataatatg

SEQ ID NO: 73468 - DNA, 25 bp, Artificial
  probe
  misc_feature (1)..(25): SEQ ID NO: 7702; WAN024B6B_at; Start 141; Stop 165
aaaagtatactttaatgatattgag

SEQ ID NO: 73469 - DNA, 25 bp, Artificial
  probe
  misc_feature (1)..(25): SEQ ID NO: 7702; WAN024B6B_at; Start 175; Stop 199
aagtattcctctgtcgaagaattgt

SEQ ID NO: 73470 - DNA, 25 bp, Artificial
  probe
  misc_feature (1)..(25): SEQ ID NO: 7702; WAN024B6B_at; Start 163; Stop 187
gagttagaagttaagtattcctctg

SEQ ID NO: 73471 - DNA, 25 bp, Artificial
  probe
  misc_feature (1)..(25): SEQ ID NO: 7702; WAN024B6B_at; Start 177; Stop 201
gtattcctctgtcgaagaattgttt

SEQ ID NO: 73472 - DNA, 25 bp, Artificial
  probe
  misc_feature (1)..(25): SEQ ID NO: 7702; WAN024B6B_at; Start 162; Stop 186
tgagttagaagttaagtattcctct

SEQ ID NO: 73473 - DNA, 25 bp, Artificial
  probe
  misc_feature (1)..(25): SEQ ID NO: 7702; WAN024B6B_at; Start 166; Stop 190
ttagaagttaagtattcctctgtcg

SEQ ID NO: 73474 - DNA, 25 bp, Artificial
  probe
  misc_feature (1)..(25): SEQ ID NO: 7702; WAN024B6B_at; Start 190; Stop 214
gaagaattgtttataatatgtgaga

SEQ ID NO: 73475 - DNA, 25 bp, Artificial
  probe
  misc_feature (1)..(25): SEQ ID NO: 5084; WAN024B6C_at; Start 196; Stop 220
agactaacttctcgcattttcgatg

SEQ ID NO: 73476 - DNA, 25 bp, Artificial
  probe
  misc_feature (1)..(25): SEQ ID NO: 5084; WAN024B6C_at; Start 255; Stop 279
tgaaaacaaggtggctacagtcaat

SEQ ID NO: 73477 - DNA, 25 bp, Artificial
  probe
  misc_feature (1)..(25): SEQ ID NO: 5084; WAN024B6C_at; Start 187; Stop 211
gttaaatttagactaacttctcgca

SEQ ID NO: 73478 - DNA, 25 bp, Artificial
  probe
  misc_feature (1)..(25): SEQ ID NO: 5084; WAN024B6C_at; Start 37; Stop 61
acagttgtctttctttgtataacca

SEQ ID NO: 73479 - DNA, 25 bp, Artificial
  probe
  misc_feature (1)..(25): SEQ ID NO: 5084; WAN024B6C_at; Start 1; Stop 25
ttgagaaagaagctaatagcgcctg

SEQ ID NO: 73480 - DNA, 25 bp, Artificial
  probe
  misc_feature (1)..(25): SEQ ID NO: 5084; WAN024B6C_at; Start 258; Stop 282
aaacaaggtggctacagtcaatgac

SEQ ID NO: 73481 - DNA, 25 bp, Artificial
  probe
  misc_feature (1)..(25): SEQ ID NO: 5084; WAN024B6C_at; Start 121; Stop 145
gacgctaacacatcaaatccattca

SEQ ID NO: 73482 - DNA, 25 bp, Artificial
  probe
  misc_feature (1)..(25): SEQ ID NO: 5084; WAN024B6C_at; Start 7; Stop 31
aagaagctaatagcgcctgctaacg

SEQ ID NO: 73483 - DNA, 25 bp, Artificial
  probe
  misc_feature (1)..(25): SEQ ID NO: 5084; WAN024B6C_at; Start 209; Stop 233
gcattttcgatgcaaagatttttgg

SEQ ID NO: 73484 - DNA, 25 bp, Artificial
  probe
  misc_feature (1)..(25): SEQ ID NO: 5084; WAN024B6C_at; Start 79; Stop 103
gcttctttaattttcttaggcaata

SEQ ID NO: 73485 - DNA, 25 bp, Artificial
  probe
  misc_feature (1)..(25): SEQ ID NO: 5084; WAN024B6C_at; Start 102; Stop 126
tacatataaaagattcaaggacgct

SEQ ID NO: 73486 - DNA, 25 bp, Artificial
  probe
  misc_feature (1)..(25): SEQ ID NO: 5084; WAN024B6C_at; Start 261; Stop 285
caaggtggctacagtcaatgaccaa

SEQ ID NO: 73487 - DNA, 25 bp, Artificial
  probe
  misc_feature (1)..(25): SEQ ID NO: 5084; WAN024B6C_at; Start 106; Stop 130
tataaaagattcaaggacgctaaca

SEQ ID NO: 73488 - DNA, 25 bp, Artificial
  probe
  misc_feature (1)..(25): SEQ ID NO: 5084; WAN024B6C_at; Start 136; Stop 160
aatccattcaatatagtctcactag

SEQ ID NO: 73489 - DNA, 25 bp, Artificial
  probe
  misc_feature (1)..(25): SEQ ID NO: 5084; WAN024B6C_at; Start 56; Stop 80
taaccatctttaataaaattcctgc

SEQ ID NO: 73490 - DNA, 25 bp, Artificial
  probe
  misc_feature (1)..(25): SEQ ID NO: 5084; WAN024B6C_at; Start 245; Stop 269
taatcattaatgaaaacaaggtggc

SEQ ID NO: 73491 - DNA, 25 bp, Artificial
  probe
  misc_feature (1)..(25): SEQ ID NO: 5084; WAN024B6C_at; Start 113; Stop 137
gattcaaggacgctaacacatcaaa

SEQ ID NO: 73492 - DNA, 25 bp, Artificial
  probe
  misc_feature (1)..(25): SEQ ID NO: 5084; WAN024B6C_at; Start 60; Stop 84
catctttaataaaattcctgcttct

SEQ ID NO: 73493 - DNA, 25 bp, Artificial
  probe
  misc_feature (1)..(25): SEQ ID NO: 5084; WAN024B6C_at; Start 230; Stop 254
ttggtacaagtagcataatcattaa

SEQ ID NO: 73494 - DNA, 25 bp, Artificial
  probe
  misc_feature (1)..(25): SEQ ID NO: 5084; WAN024B6C_at; Start 264; Stop 288
ggtggctacagtcaatgaccaatga

SEQ ID NO: 73495 - DNA, 25 bp, Artificial
  probe
  misc_feature (1)..(25): SEQ ID NO: 5084; WAN024B6C_at; Start 25; Stop 49
gctaacgtttctacagttgtctttc

SEQ ID NO: 73496 - DNA, 25 bp, Artificial
  probe
  misc_feature (1)..(25): SEQ ID NO: 5084; WAN024B6C_at; Start 17; Stop 41
tagcgcctgctaacgtttctacagt

SEQ ID NO: 73497 - DNA, 25 bp, Artificial
  probe
  misc_feature (1)..(25): SEQ ID NO: 5084; WAN024B6C_at; Start 116; Stop 140
tcaaggacgctaacacatcaaatcc

SEQ ID NO: 73498 - DNA, 25 bp, Artificial
  probe
  misc_feature (1)..(25): SEQ ID NO: 5084; WAN024B6C_at; Start 248; Stop 272
tcattaatgaaaacaaggtggctac

SEQ ID NO: 73499 - DNA, 25 bp, Artificial
  probe
  misc_feature (1)..(25): SEQ ID NO: 5084; WAN024B6C_at; Start 252; Stop 276
taatgaaaacaaggtggctacagtc

SEQ ID NO: 73500 - DNA, 25 bp, Artificial
  probe
  misc_feature (1)..(25): SEQ ID NO: 5084; WAN024B6C_at; Start 14; Stop 38
taatagcgcctgctaacgtttctac

SEQ ID NO: 73501 - DNA, 25 bp, Artificial
  probe
  misc_feature (1)..(25): SEQ ID NO: 5084; WAN024B6C_at; Start 43; Stop 67
gtctttctttgtataaccatcttta

SEQ ID NO: 73502 - DNA, 25 bp, Artificial
  probe
  misc_feature (1)..(25): SEQ ID NO: 5084; WAN024B6C_at; Start 93; Stop 117
cttaggcaatacatataaaagattc

SEQ ID NO: 73503 - DNA, 25 bp, Artificial
  probe
  misc_feature (1)..(25): SEQ ID NO: 5084; WAN024B6C_at; Start 220; Stop 244
gcaaagatttttggtacaagtagca

SEQ ID NO: 73504 - DNA, 25 bp, Artificial
  probe
  misc_feature (1)..(25): SEQ ID NO: 5084; WAN024B6C_at; Start 21; Stop 45
gcctgctaacgtttctacagttgtc

SEQ ID NO: 73505 - DNA, 25 bp, Artificial
  probe
  misc_feature (1)..(25): SEQ ID NO: 5084; WAN024B6C_at; Start 149; Stop 173
tagtctcactagattttaaaaaagc

SEQ ID NO: 73506 - DNA, 25 bp, Artificial
  probe
  misc_feature (1)..(25): SEQ ID NO: 5084; WAN024B6C_at; Start 108; Stop 132
taaaagattcaaggacgctaacaca

SEQ ID NO: 73507 - DNA, 25 bp, Artificial
  probe
  misc_feature (1)..(25): SEQ ID NO: 5084; WAN024B6C_at; Start 5; Stop 29
gaaagaagctaatagcgcctgctaa

SEQ ID NO: 73508 - DNA, 25 bp, Artificial
  probe
  misc_feature (1)..(25): SEQ ID NO: 5084; WAN024B6C_at; Start 202; Stop 226
acttctcgcattttcgatgcaaaga

SEQ ID NO: 73509 - DNA, 25 bp, Artificial
  probe
  misc_feature (1)..(25): SEQ ID NO: 4250; WAN024B6D_at; Start 686; Stop 710
caactgtagaaacgttagcaggcgc

SEQ ID NO: 73510 - DNA, 25 bp, Artificial
  probe
  misc_feature (1)..(25): SEQ ID NO: 4250; WAN024B6D_at; Start 1079; Stop 1103
gtgaaagtggaagcgggaaatctac

SEQ ID NO: 73511 - DNA, 25 bp, Artificial
  probe
  misc_feature (1)..(25): SEQ ID NO: 4250; WAN024B6D_at; Start 1514; Stop 1538
tagatagagaggatttgactgtcat

SEQ ID NO: 73512 - DNA, 25 bp, Artificial
  probe
  misc_feature (1)..(25): SEQ ID NO: 4250; WAN024B6D_at; Start 457; Stop 481
gtagccaccttgttttcattaatga

SEQ ID NO: 73513 - DNA, 25 bp, Artificial
  probe
  misc_feature (1)..(25): SEQ ID NO: 4250; WAN024B6D_at; Start 1530; Stop 1554
gactgtcattattgttacccatgct

SEQ ID NO: 73514 - DNA, 25 bp, Artificial
  probe
  misc_feature (1)..(25): SEQ ID NO: 4250; WAN024B6D_at; Start 82; Stop 106
tatgcagcaactattaatgctctgg

SEQ ID NO: 73515 - DNA, 25 bp, Artificial
  probe
  misc_feature (1)..(25): SEQ ID NO: 4250; WAN024B6D_at; Start 217; Stop 241
caggttgaagtgatccaagagttta

SEQ ID NO: 73516 - DNA, 25 bp, Artificial
  probe
  misc_feature (1)..(25): SEQ ID NO: 4250; WAN024B6D_at; Start 119; Stop 143
taattgcgatgaatttagagcggtt

SEQ ID NO: 73517 - DNA, 25 bp, Artificial
  probe
  misc_feature (1)..(25): SEQ ID NO: 4250; WAN024B6D_at; Start 441; Stop 465
tcattggtcattgactgtagccacc

SEQ ID NO: 73518 - DNA, 25 bp, Artificial
  probe
  misc_feature (1)..(25): SEQ ID NO: 4250; WAN024B6D_at; Start 271; Stop 295
gacatctctaactctacctatcaag

SEQ ID NO: 73519 - DNA, 25 bp, Artificial
  probe
  misc_feature (1)..(25): SEQ ID NO: 4250; WAN024B6D_at; Start 1368; Stop 1392
tgatgatgggagattactgtcagga

SEQ ID NO: 73520 - DNA, 25 bp, Artificial
  probe
  misc_feature (1)..(25): SEQ ID NO: 4250; WAN024B6D_at; Start 824; Stop 848
caggtgttatttttacagcgctagg

SEQ ID NO: 73521 - DNA, 25 bp, Artificial
  probe
  misc_feature (1)..(25): SEQ ID NO: 4250; WAN024B6D_at; Start 698; Stop 722
cgttagcaggcgctattagcttctt

SEQ ID NO: 73522 - DNA, 25 bp, Artificial
  probe
  misc_feature (1)..(25): SEQ ID NO: 4250; WAN024B6D_at; Start 406; Stop 430
ggtactatatttgcagttgtgactc

SEQ ID NO: 73523 - DNA, 25 bp, Artificial
  probe
  misc_feature (1)..(25): SEQ ID NO: 4250; WAN024B6D_at; Start 1493; Stop 1517
tagcgattgaacgtaagatattaga

SEQ ID NO: 73524 - DNA, 25 bp, Artificial
  probe
  misc_feature (1)..(25): SEQ ID NO: 4250; WAN024B6D_at; Start 249; Stop 273
gattcgaaatagagttgccacagac

SEQ ID NO: 73525 - DNA, 25 bp, Artificial
  probe
  misc_feature (1)..(25): SEQ ID NO: 4250; WAN024B6D_at; Start 1473; Stop 1497
tatcgataggagaacttcgttagcg

SEQ ID NO: 73526 - DNA, 25 bp, Artificial
  probe
  misc_feature (1)..(25): SEQ ID NO: 4250; WAN024B6D_at; Start 1295; Stop 1319
tactacagtctttagagcaagttgg

SEQ ID NO: 73527 - DNA, 25 bp, Artificial
  probe
  misc_feature (1)..(25): SEQ ID NO: 4250; WAN024B6D_at; Start 758; Stop 782
taacaggctatcttgcaataaaagg

SEQ ID NO: 73528 - DNA, 25 bp, Artificial
  probe
  misc_feature (1)..(25): SEQ ID NO: 4250; WAN024B6D_at; Start 1138; Stop 1162
tatagtggagaattgcgattctgcg

SEQ ID NO: 73529 - DNA, 25 bp, Artificial
  probe
  misc_feature (1)..(25): SEQ ID NO: 4250; WAN024B6D_at; Start 1459; Stop 1483
gagggaacttctgctatcgatagga

SEQ ID NO: 73530 - DNA, 25 bp, Artificial
  probe
  misc_feature (1)..(25): SEQ ID NO: 4250; WAN024B6D_at; Start 805; Stop 829
gaagcaataggagcactaacaggtg

SEQ ID NO: 73531 - DNA, 25 bp, Artificial
  probe
  misc_feature (1)..(25): SEQ ID NO: 4250; WAN024B6D_at; Start 968; Stop 992
gagattttccgttatatgaagcaaa

SEQ ID NO: 73532 - DNA, 25 bp, Artificial
  probe
  misc_feature (1)..(25): SEQ ID NO: 4250; WAN024B6D_at; Start 163; Stop 187
caaatgattgtctggtgtgggataa

SEQ ID NO: 73533 - DNA, 25 bp, Artificial
  probe
  misc_feature (1)..(25): SEQ ID NO: 4250; WAN024B6D_at; Start 1381; Stop 1405
ttactgtcaggagggcagaaacaaa

SEQ ID NO: 73534 - DNA, 25 bp, Artificial
  probe
  misc_feature (1)..(25): SEQ ID NO: 4250; WAN024B6D_at; Start 509; Stop 533
catcgaaaatgcgagaagttagtct

SEQ ID NO: 73535 - DNA, 25 bp, Artificial
  probe
  misc_feature (1)..(25): SEQ ID NO: 4250; WAN024B6D_at; Start 839; Stop 863
cagcgctaggtgaattaggaggtca

SEQ ID NO: 73536 - DNA, 25 bp, Artificial
  probe
  misc_feature (1)..(25): SEQ ID NO: 4250; WAN024B6D_at; Start 1448; Stop 1472
tattaattgacgagggaacttctgc

SEQ ID NO: 73537 - DNA, 25 bp, Artificial
  probe
  misc_feature (1)..(25): SEQ ID NO: 4250; WAN024B6D_at; Start 866; Stop 890
tatcctctattattggtacgaagcc

SEQ ID NO: 73538 - DNA, 25 bp, Artificial
  probe
  misc_feature (1)..(25): SEQ ID NO: 4250; WAN024B6D_at; Start 668; Stop 692
tggttatacaaagaaagacaactgt

SEQ ID NO: 73539 - DNA, 25 bp, Artificial
  probe
  misc_feature (1)..(25): SEQ ID NO: 4250; WAN024B6D_at; Start 183; Stop 207
gataatattccttgactgggtagtg

SEQ ID NO: 73540 - DNA, 25 bp, Artificial
  probe
  misc_feature (1)..(25): SEQ ID NO: 4250; WAN024B6D_at; Start 485; Stop 509
tgctacttgtaccaaaaatctttgc

SEQ ID NO: 73541 - DNA, 25 bp, Artificial
  probe
  misc_feature (1)..(25): SEQ ID NO: 4250; WAN024B6D_at; Start 231; Stop 255
ccaagagtttaatctagagattcga

SEQ ID NO: 73542 - DNA, 25 bp, Artificial
  probe
  misc_feature (1)..(25): SEQ ID NO: 4250; WAN024B6D_at; Start 310; Stop 334
tcatcaggaacatatctttcgtggc

SEQ ID NO: 73543 - DNA, 25 bp, Artificial
  probe
  misc_feature (1)..(25): SEQ ID NO: 1649; WAN024B6E_at; Start 121; Stop 145
agtgcctcaaattcagatactgaca

SEQ ID NO: 73544 - DNA, 25 bp, Artificial
  probe
  misc_feature (1)..(25): SEQ ID NO: 1649; WAN024B6E_at; Start 182; Stop 206
gaccttggcgtactatgtctaggaa

SEQ ID NO: 73545 - DNA, 25 bp, Artificial
  probe
  misc_feature (1)..(25): SEQ ID NO: 1649; WAN024B6E_at; Start 141; Stop 165
tgacatacctaattgctggctggca

SEQ ID NO: 73546 - DNA, 25 bp, Artificial
  probe
  misc_feature (1)..(25): SEQ ID NO: 1649; WAN024B6E_at; Start 157; Stop 181
tggctggcaacctcagaagtcagaa

SEQ ID NO: 73547 - DNA, 25 bp, Artificial
  probe
  misc_feature (1)..(25): SEQ ID NO: 1649; WAN024B6E_at; Start 243; Stop 267
cccacgctctagtccttgttcaagg

SEQ ID NO: 73548 - DNA, 25 bp, Artificial
  probe
  misc_feature (1)..(25): SEQ ID NO: 1649; WAN024B6E_at; Start 136; Stop 160
gatactgacatacctaattgctggc

SEQ ID NO: 73549 - DNA, 25 bp, Artificial
  probe
  misc_feature (1)..(25): SEQ ID NO: 1649; WAN024B6E_at; Start 133; Stop 157
tcagatactgacatacctaattgct

SEQ ID NO: 73550 - DNA, 25 bp, Artificial
  probe
  misc_feature (1)..(25): SEQ ID NO: 1649; WAN024B6E_at; Start 269; Stop 293
cttcagccctagcagtttccaaggc

SEQ ID NO: 73551 - DNA, 25 bp, Artificial
  probe
  misc_feature (1)..(25): SEQ ID NO: 1649; WAN024B6E_at; Start 237; Stop 261
aactttcccacgctctagtccttgt

SEQ ID NO: 73552 - DNA, 25 bp, Artificial
  probe
  misc_feature (1)..(25): SEQ ID NO: 1649; WAN024B6E_at; Start 105; Stop 129
ggagccattttacaacagtgcctca

SEQ ID NO: 73553 - DNA, 25 bp, Artificial
  probe
  misc_feature (1)..(25): SEQ ID NO: 1649; WAN024B6E_at; Start 170; Stop 194
cagaagtcagaagaccttggcgtac

SEQ ID NO: 73554 - DNA, 25 bp, Artificial
  probe
  misc_feature (1)..(25): SEQ ID NO: 1649; WAN024B6E_at; Start 107; Stop 131
agccattttacaacagtgcctcaaa

SEQ ID NO: 73555 - DNA, 25 bp, Artificial
  probe
  misc_feature (1)..(25): SEQ ID NO: 1649; WAN024B6E_at; Start 102; Stop 126
tatggagccattttacaacagtgcc

SEQ ID NO: 73556 - DNA, 25 bp, Artificial
  probe
  misc_feature (1)..(25): SEQ ID NO: 1649; WAN024B6E_at; Start 176; Stop 200
tcagaagaccttggcgtactatgtc

SEQ ID NO: 73557 - DNA, 25 bp, Artificial
  probe
  misc_feature (1)..(25): SEQ ID NO: 1649; WAN024B6E_at; Start 159; Stop 183
gctggcaacctcagaagtcagaaga

SEQ ID NO: 73558 - DNA, 25 bp, Artificial
  probe
  misc_feature (1)..(25): SEQ ID NO: 1649; WAN024B6E_at; Start 165; Stop 189
aacctcagaagtcagaagaccttgg

SEQ ID NO: 73559 - DNA, 25 bp, Artificial
  probe
  misc_feature (1)..(25): SEQ ID NO: 1649; WAN024B6E_at; Start 273; Stop 297
agccctagcagtttccaaggcatag

SEQ ID NO: 73560 - DNA, 25 bp, Artificial
  probe
  misc_feature (1)..(25): SEQ ID NO: 1649; WAN024B6E_at; Start 117; Stop 141
caacagtgcctcaaattcagatact

SEQ ID NO: 73561 - DNA, 25 bp, Artificial
  probe
  misc_feature (1)..(25): SEQ ID NO: 1649; WAN024B6E_at; Start 138; Stop 162
tactgacatacctaattgctggctg

SEQ ID NO: 73562 - DNA, 25 bp, Artificial
  probe
  misc_feature (1)..(25): SEQ ID NO: 1649; WAN024B6E_at; Start 161; Stop 185
tggcaacctcagaagtcagaagacc

SEQ ID NO: 73563 - DNA, 25 bp, Artificial
  probe
  misc_feature (1)..(25): SEQ ID NO: 1649; WAN024B6E_at; Start 162; Stop 186
ggcaacctcagaagtcagaagacct

SEQ ID NO: 73564 - DNA, 25 bp, Artificial
  probe
  misc_feature (1)..(25): SEQ ID NO: 1649; WAN024B6E_at; Start 144; Stop 168
catacctaattgctggctggcaacc

SEQ ID NO: 73565 - DNA, 25 bp, Artificial
  probe
  misc_feature (1)..(25): SEQ ID NO: 1649; WAN024B6E_at; Start 146; Stop 170
tacctaattgctggctggcaacctc

SEQ ID NO: 73566 - DNA, 25 bp, Artificial
  probe
  misc_feature (1)..(25): SEQ ID NO: 1649; WAN024B6E_at; Start 155; Stop 179
gctggctggcaacctcagaagtcag

SEQ ID NO: 73567 - DNA, 25 bp, Artificial
  probe
  misc_feature (1)..(25): SEQ ID NO: 1649; WAN024B6E_at; Start 172; Stop 196
gaagtcagaagaccttggcgtacta

SEQ ID NO: 73568 - DNA, 25 bp, Artificial
  probe
  misc_feature (1)..(25): SEQ ID NO: 1649; WAN024B6E_at; Start 96; Stop 120
ggatattatggagccattttacaac

SEQ ID NO: 73569 - DNA, 25 bp, Artificial
  probe
  misc_feature (1)..(25): SEQ ID NO: 1649; WAN024B6E_at; Start 114; Stop 138
ttacaacagtgcctcaaattcagat

SEQ ID NO: 73570 - DNA, 25 bp, Artificial
  probe
  misc_feature (1)..(25): SEQ ID NO: 1649; WAN024B6E_at; Start 223; Stop 247
tctgcccttccttcaactttcccac

SEQ ID NO: 73571 - DNA, 25 bp, Artificial
  probe
  misc_feature (1)..(25): SEQ ID NO: 1649; WAN024B6E_at; Start 150; Stop 174
taattgctggctggcaacctcagaa

SEQ ID NO: 73572 - DNA, 25 bp, Artificial
  probe
  misc_feature (1)..(25): SEQ ID NO: 1649; WAN024B6E_at; Start 167; Stop 191
cctcagaagtcagaagaccttggcg

SEQ ID NO: 73573 - DNA, 25 bp, Artificial
  probe
  misc_feature (1)..(25): SEQ ID NO: 1649; WAN024B6E_at; Start 179; Stop 203
gaagaccttggcgtactatgtctag

SEQ ID NO: 73574 - DNA, 25 bp, Artificial
  probe
  misc_feature (1)..(25): SEQ ID NO: 1649; WAN024B6E_at; Start 154; Stop 178
tgctggctggcaacctcagaagtca

SEQ ID NO: 73575 - DNA, 25 bp, Artificial
  probe
  misc_feature (1)..(25): SEQ ID NO: 1649; WAN024B6E_at; Start 271; Stop 295
tcagccctagcagtttccaaggcat

SEQ ID NO: 73576 - DNA, 25 bp, Artificial
  probe
  misc_feature (1)..(25): SEQ ID NO: 1649; WAN024B6E_at; Start 184; Stop 208
ccttggcgtactatgtctaggaagg

SEQ ID NO: 73577 - DNA, 25 bp, Artificial
  probe
  misc_feature (1)..(25): SEQ ID NO: 5448; WAN024B6F_at; Start 737; Stop 761
ttcgggagctggtcgaggtcatcac

SEQ ID NO: 73578 - DNA, 25 bp, Artificial
  probe
  misc_feature (1)..(25): SEQ ID NO: 5448; WAN024B6F_at; Start 462; Stop 486
aatcgctcagctcctccttgaaaag

SEQ ID NO: 73579 - DNA, 25 bp, Artificial
  probe
  misc_feature (1)..(25): SEQ ID NO: 5448; WAN024B6F_at; Start 147; Stop 171
taagaataccacagatttgctcgga

SEQ ID NO: 73580 - DNA, 25 bp, Artificial
  probe
  misc_feature (1)..(25): SEQ ID NO: 5448; WAN024B6F_at; Start 1009; Stop 1033
atagcttcaagctctgtcagaaacg

SEQ ID NO: 73581 - DNA, 25 bp, Artificial
  probe
  misc_feature (1)..(25): SEQ ID NO: 5448; WAN024B6F_at; Start 854; Stop 878
tgagccgagctatgaaccgagtacg

SEQ ID NO: 73582 - DNA, 25 bp, Artificial
  probe
  misc_feature (1)..(25): SEQ ID NO: 5448; WAN024B6F_at; Start 265; Stop 289
cctcattgtcaagggaagatgatca

SEQ ID NO: 73583 - DNA, 25 bp, Artificial
  probe
  misc_feature (1)..(25): SEQ ID NO: 5448; WAN024B6F_at; Start 664; Stop 688
tccatcctcgcaattttagacgggc

SEQ ID NO: 73584 - DNA, 25 bp, Artificial
  probe
  misc_feature (1)..(25): SEQ ID NO: 5448; WAN024B6F_at; Start 817; Stop 841
aagattgttcttgaccgcttccaca

SEQ ID NO: 73585 - DNA, 25 bp, Artificial
  probe
  misc_feature (1)..(25): SEQ ID NO: 5448; WAN024B6F_at; Start 1026; Stop 1050
cagaaacgattctatcagcccacgt

SEQ ID NO: 73586 - DNA, 25 bp, Artificial
  probe
  misc_feature (1)..(25): SEQ ID NO: 5448; WAN024B6F_at; Start 501; Stop 525
gattgcccacagattggcggtctca

SEQ ID NO: 73587 - DNA, 25 bp, Artificial
  probe
  misc_feature (1)..(25): SEQ ID NO: 5448; WAN024B6F_at; Start 487; Stop 511
cagtctatgactgagattgcccaca

SEQ ID NO: 73588 - DNA, 25 bp, Artificial
  probe
  misc_feature (1)..(25): SEQ ID NO: 5448; WAN024B6F_at; Start 626; Stop 650
gcaaaatgagcttcattgcccaaga

SEQ ID NO: 73589 - DNA, 25 bp, Artificial
  probe
  misc_feature (1)..(25): SEQ ID NO: 5448; WAN024B6F_at; Start 1041; Stop 1065
cagcccacgtttcgaatgcacttaa

SEQ ID NO: 73590 - DNA, 25 bp, Artificial
  probe
  misc_feature (1)..(25): SEQ ID NO: 5448; WAN024B6F_at; Start 206; Stop 230
tgaaataccaaacccatctagtcgt

SEQ ID NO: 73591 - DNA, 25 bp, Artificial
  probe
  misc_feature (1)..(25): SEQ ID NO: 5448; WAN024B6F_at; Start 926; Stop 950
cgctcaagcgcttttggaaccctcg

SEQ ID NO: 73592 - DNA, 25 bp, Artificial
  probe
  misc_feature (1)..(25): SEQ ID NO: 5448; WAN024B6F_at; Start 907; Stop 931
aaatccttggagtatcgggcgctca

SEQ ID NO: 73593 - DNA, 25 bp, Artificial
  probe
  misc_feature (1)..(25): SEQ ID NO: 5448; WAN024B6F_at; Start 314; Stop 338
aaattccgcttctcgactgtcaggg

SEQ ID NO: 73594 - DNA, 25 bp, Artificial
  probe
  misc_feature (1)..(25): SEQ ID NO: 5448; WAN024B6F_at; Start 679; Stop 703
ttagacgggcgaactcatgcggtga

SEQ ID NO: 73595 - DNA, 25 bp, Artificial
  probe
  misc_feature (1)..(25): SEQ ID NO: 5448; WAN024B6F_at; Start 388; Stop 412
tgccttaaggtggtcgtttctcaaa

SEQ ID NO: 73596 - DNA, 25 bp, Artificial
  probe
  misc_feature (1)..(25): SEQ ID NO: 5448; WAN024B6F_at; Start 227; Stop 251
tcgttcaggcaaagttggattcccc

SEQ ID NO: 73597 - DNA, 25 bp, Artificial
  probe
  misc_feature (1)..(25): SEQ ID NO: 5448; WAN024B6F_at; Start 840; Stop 864
cattgtccaacatctgagccgagct

SEQ ID NO: 73598 - DNA, 25 bp, Artificial
  probe
  misc_feature (1)..(25): SEQ ID NO: 5448; WAN024B6F_at; Start 764; Stop 788
tggacatgtacagcccttattatcg

SEQ ID NO: 73599 - DNA, 25 bp, Artificial
  probe
  misc_feature (1)..(25): SEQ ID NO: 5448; WAN024B6F_at; Start 867; Stop 891
gaaccgagtacgaatccaaatcatg

SEQ ID NO: 73600 - DNA, 25 bp, Artificial
  probe
  misc_feature (1)..(25): SEQ ID NO: 5448; WAN024B6F_at; Start 362; Stop 386
aaaagcgccgctttcagtgcaagaa

SEQ ID NO: 73601 - DNA, 25 bp, Artificial
  probe
  misc_feature (1)..(25): SEQ ID NO: 5448; WAN024B6F_at; Start 534; Stop 558
cgtcatccgaaaactgagggaattt

SEQ ID NO: 73602 - DNA, 25 bp, Artificial
  probe
  misc_feature (1)..(25): SEQ ID NO: 5448; WAN024B6F_at; Start 795; Stop 819
taagcaactctttccaaaggcgaag

SEQ ID NO: 73603 - DNA, 25 bp, Artificial
  probe
  misc_feature (1)..(25): SEQ ID NO: 5448; WAN024B6F_at; Start 429; Stop 453
aaattgccagatttccaacatggtg

SEQ ID NO: 73604 - DNA, 25 bp, Artificial
  probe
  misc_feature (1)..(25): SEQ ID NO: 5448; WAN024B6F_at; Start 288; Stop 312
caaatacgacttccagaaagcctct

SEQ ID NO: 73605 - DNA, 25 bp, Artificial
  probe
  misc_feature (1)..(25): SEQ ID NO: 5448; WAN024B6F_at; Start 694; Stop 718
catgcggtgattcgaaaccatttcc

SEQ ID NO: 73606 - DNA, 25 bp, Artificial
  probe
  misc_feature (1)..(25): SEQ ID NO: 5448; WAN024B6F_at; Start 750; Stop 774
cgaggtcatcaccatggacatgtac

SEQ ID NO: 73607 - DNA, 25 bp, Artificial
  probe
  misc_feature (1)..(25): SEQ ID NO: 5448; WAN024B6F_at; Start 780; Stop 804
ttattatcggctcgctaagcaactc

SEQ ID NO: 73608 - DNA, 25 bp, Artificial
  probe
  misc_feature (1)..(25): SEQ ID NO: 5448; WAN024B6F_at; Start 966; Stop 990
gctcgggctaaatcagtccactgga

SEQ ID NO: 73609 - DNA, 25 bp, Artificial
  probe
  misc_feature (1)..(25): SEQ ID NO: 5448; WAN024B6F_at; Start 565; Stop 589
gaaaccgattggaccaagttgccaa

SEQ ID NO: 73610 - DNA, 25 bp, Artificial
  probe
  misc_feature (1)..(25): SEQ ID NO: 5448; WAN024B6F_at; Start 444; Stop 468
caacatggtgagacaaaaaatcgct

SEQ ID NO: 73611 - DNA, 25 bp, Artificial
  probe
  misc_feature (1)..(25): SEQ ID NO: 7660; WAN024B6H_x_at; Start 37; Stop 61
ccaatgacttacgaagagacgatga

SEQ ID NO: 73612 - DNA, 25 bp, Artificial
  probe
  misc_feature (1)..(25): SEQ ID NO: 7660; WAN024B6H_x_at; Start 53; Stop 77
agacgatgacgagcgacttttttga

SEQ ID NO: 73613 - DNA, 25 bp, Artificial
  probe
  misc_feature (1)..(25): SEQ ID NO: 7660; WAN024B6H_x_at; Start 57; Stop 81
gatgacgagcgacttttttgaagct

SEQ ID NO: 73614 - DNA, 25 bp, Artificial
  probe
  misc_feature (1)..(25): SEQ ID NO: 7660; WAN024B6H_x_at; Start 13; Stop 37
ctaacaaatggtgaattaatcgctc

SEQ ID NO: 73615 - DNA, 25 bp, Artificial
  probe
  misc_feature (1)..(25): SEQ ID NO: 7660; WAN024B6H_x_at; Start 27; Stop 51
attaatcgctccaatgacttacgaa

SEQ ID NO: 73616 - DNA, 25 bp, Artificial
  probe
  misc_feature (1)..(25): SEQ ID NO: 7660; WAN024B6H_x_at; Start 39; Stop 63
aatgacttacgaagagacgatgacg

SEQ ID NO: 73617 - DNA, 25 bp, Artificial
  probe
  misc_feature (1)..(25): SEQ ID NO: 7660; WAN024B6H_x_at; Start 9; Stop 33
aggtctaacaaatggtgaattaatc

SEQ ID NO: 73618 - DNA, 25 bp, Artificial
  probe
  misc_feature (1)..(25): SEQ ID NO: 7660; WAN024B6H_x_at; Start 33; Stop 57
cgctccaatgacttacgaagagacg

SEQ ID NO: 73619 - DNA, 25 bp, Artificial
  probe
  misc_feature (1)..(25): SEQ ID NO: 7660; WAN024B6H_x_at; Start 25; Stop 49
gaattaatcgctccaatgacttacg

SEQ ID NO: 73620 - DNA, 25 bp, Artificial
  probe
  misc_feature (1)..(25): SEQ ID NO: 7660; WAN024B6H_x_at; Start 34; Stop 58
gctccaatgacttacgaagagacga

SEQ ID NO: 73621 - DNA, 25 bp, Artificial
  probe
  misc_feature (1)..(25): SEQ ID NO: 7660; WAN024B6H_x_at; Start 21; Stop 45
tggtgaattaatcgctccaatgact

SEQ ID NO: 73622 - DNA, 25 bp, Artificial
  probe
  misc_feature (1)..(25): SEQ ID NO: 7660; WAN024B6H_x_at; Start 40; Stop 64
atgacttacgaagagacgatgacga

SEQ ID NO: 73623 - DNA, 25 bp, Artificial
  probe
  misc_feature (1)..(25): SEQ ID NO: 7660; WAN024B6H_x_at; Start 26; Stop 50
aattaatcgctccaatgacttacga

SEQ ID NO: 73624 - DNA, 25 bp, Artificial
  probe
  misc_feature (1)..(25): SEQ ID NO: 7660; WAN024B6H_x_at; Start 32; Stop 56
tcgctccaatgacttacgaagagac

SEQ ID NO: 73625 - DNA, 25 bp, Artificial
  probe
  misc_feature (1)..(25): SEQ ID NO: 7660; WAN024B6H_x_at; Start 11; Stop 35
gtctaacaaatggtgaattaatcgc

SEQ ID NO: 73626 - DNA, 25 bp, Artificial
  probe
  misc_feature (1)..(25): SEQ ID NO: 7660; WAN024B6H_x_at; Start 44; Stop 68
cttacgaagagacgatgacgagcga

SEQ ID NO: 73627 - DNA, 25 bp, Artificial
  probe
  misc_feature (1)..(25): SEQ ID NO: 7660; WAN024B6H_x_at; Start 22; Stop 46
ggtgaattaatcgctccaatgactt

SEQ ID NO: 73628 - DNA, 25 bp, Artificial
  probe
  misc_feature (1)..(25): SEQ ID NO: 7660; WAN024B6H_x_at; Start 23; Stop 47
gtgaattaatcgctccaatgactta

SEQ ID NO: 73629 - DNA, 25 bp, Artificial
  probe
  misc_feature (1)..(25): SEQ ID NO: 7660; WAN024B6H_x_at; Start 10; Stop 34
ggtctaacaaatggtgaattaatcg

SEQ ID NO: 73630 - DNA, 25 bp, Artificial
  probe
  misc_feature (1)..(25): SEQ ID NO: 7660; WAN024B6H_x_at; Start 17; Stop 41
caaatggtgaattaatcgctccaat

SEQ ID NO: 73631 - DNA, 25 bp, Artificial
  probe
  misc_feature (1)..(25): SEQ ID NO: 7660; WAN024B6H_x_at; Start 12; Stop 36
tctaacaaatggtgaattaatcgct

SEQ ID NO: 73632 - DNA, 25 bp, Artificial
  probe
  misc_feature (1)..(25): SEQ ID NO: 7660; WAN024B6H_x_at; Start 46; Stop 70
tacgaagagacgatgacgagcgact

SEQ ID NO: 73633 - DNA, 25 bp, Artificial
  probe
  misc_feature (1)..(25): SEQ ID NO: 7660; WAN024B6H_x_at; Start 19; Stop 43
aatggtgaattaatcgctccaatga

SEQ ID NO: 73634 - DNA, 25 bp, Artificial
  probe
  misc_feature (1)..(25): SEQ ID NO: 7660; WAN024B6H_x_at; Start 18; Stop 42
aaatggtgaattaatcgctccaatg

SEQ ID NO: 73635 - DNA, 25 bp, Artificial
  probe
  misc_feature (1)..(25): SEQ ID NO: 7660; WAN024B6H_x_at; Start 52; Stop 76
gagacgatgacgagcgacttttttg

SEQ ID NO: 73636 - DNA, 25 bp, Artificial
  probe
  misc_feature (1)..(25): SEQ ID NO: 7660; WAN024B6H_x_at; Start 35; Stop 59
ctccaatgacttacgaagagacgat

SEQ ID NO: 73637 - DNA, 25 bp, Artificial
  probe
  misc_feature (1)..(25): SEQ ID NO: 7660; WAN024B6H_x_at; Start 36; Stop 60
tccaatgacttacgaagagacgatg

SEQ ID NO: 73638 - DNA, 25 bp, Artificial
  probe
  misc_feature (1)..(25): SEQ ID NO: 7660; WAN024B6H_x_at; Start 20; Stop 44
atggtgaattaatcgctccaatgac

SEQ ID NO: 73639 - DNA, 25 bp, Artificial
  probe
  misc_feature (1)..(25): SEQ ID NO: 7660; WAN024B6H_x_at; Start 38; Stop 62
caatgacttacgaagagacgatgac

SEQ ID NO: 73640 - DNA, 25 bp, Artificial
  probe
  misc_feature (1)..(25): SEQ ID NO: 7660; WAN024B6H_x_at; Start 49; Stop 73
gaagagacgatgacgagcgactttt

SEQ ID NO: 73641 - DNA, 25 bp, Artificial
  probe
  misc_feature (1)..(25): SEQ ID NO: 7660; WAN024B6H_x_at; Start 42; Stop 66
gacttacgaagagacgatgacgagc

SEQ ID NO: 73642 - DNA, 25 bp, Artificial
  probe
  misc_feature (1)..(25): SEQ ID NO: 7660; WAN024B6H_x_at; Start 41; Stop 65
tgacttacgaagagacgatgacgag

SEQ ID NO: 73643 - DNA, 25 bp, Artificial
  probe
  misc_feature (1)..(25): SEQ ID NO: 7660; WAN024B6H_x_at; Start 24; Stop 48
tgaattaatcgctccaatgacttac

SEQ ID NO: 73644 - DNA, 25 bp, Artificial
  probe
  misc_feature (1)..(25): SEQ ID NO: 7660; WAN024B6H_x_at; Start 14; Stop 38
taacaaatggtgaattaatcgctcc

SEQ ID NO: 73645 - DNA, 25 bp, Artificial
  probe
  misc_feature (1)..(25): SEQ ID NO: 6924; WAN024B6I_at; Start 17; Stop 41
tgtttttcagagaaattgaaaagac

SEQ ID NO: 73646 - DNA, 25 bp, Artificial
  probe
  misc_feature (1)..(25): SEQ ID NO: 6924; WAN024B6I_at; Start 19; Stop 43
tttttcagagaaattgaaaagacca

SEQ ID NO: 73647 - DNA, 25 bp, Artificial
  probe
  misc_feature (1)..(25): SEQ ID NO: 6924; WAN024B6I_at; Start 82; Stop 106
acagactcagcgaggaatcagttga

SEQ ID NO: 73648 - DNA, 25 bp, Artificial
  probe
  misc_feature (1)..(25): SEQ ID NO: 6924; WAN024B6I_at; Start 79; Stop 103
gctacagactcagcgaggaatcagt

SEQ ID NO: 73649 - DNA, 25 bp, Artificial
  probe
  misc_feature (1)..(25): SEQ ID NO: 6924; WAN024B6I_at; Start 20; Stop 44
ttttcagagaaattgaaaagaccaa

SEQ ID NO: 73650 - DNA, 25 bp, Artificial
  probe
  misc_feature (1)..(25): SEQ ID NO: 6924; WAN024B6I_at; Start 251; Stop 275
tccgagaaagagaacgagtttactg

SEQ ID NO: 73651 - DNA, 25 bp, Artificial
  probe
  misc_feature (1)..(25): SEQ ID NO: 6924; WAN024B6I_at; Start 80; Stop 104
ctacagactcagcgaggaatcagtt

SEQ ID NO: 73652 - DNA, 25 bp, Artificial
  probe
  misc_feature (1)..(25): SEQ ID NO: 6924; WAN024B6I_at; Start 83; Stop 107
cagactcagcgaggaatcagttgat

SEQ ID NO: 73653 - DNA, 25 bp, Artificial
  probe
  misc_feature (1)..(25): SEQ ID NO: 6924; WAN024B6I_at; Start 16; Stop 40
ttgtttttcagagaaattgaaaaga

SEQ ID NO: 73654 - DNA, 25 bp, Artificial
  probe
  misc_feature (1)..(25): SEQ ID NO: 6924; WAN024B6I_at; Start 81; Stop 105
tacagactcagcgaggaatcagttg

SEQ ID NO: 73655 - DNA, 25 bp, Artificial
  probe
  misc_feature (1)..(25): SEQ ID NO: 6924; WAN024B6I_at; Start 84; Stop 108
agactcagcgaggaatcagttgatt

SEQ ID NO: 73656 - DNA, 25 bp, Artificial
  probe
  misc_feature (1)..(25): SEQ ID NO: 6924; WAN024B6I_at; Start 21; Stop 45
tttcagagaaattgaaaagaccaaa

SEQ ID NO: 73657 - DNA, 25 bp, Artificial
  probe
  misc_feature (1)..(25): SEQ ID NO: 7705; WAN024B6K_s_at; Start 62; Stop 86
ataaaccagagactgtttacatttt

SEQ ID NO: 73658 - DNA, 25 bp, Artificial
  probe
  misc_feature (1)..(25): SEQ ID NO: 7705; WAN024B6K_s_at; Start 53; Stop 77
ttttactatataaaccagagactgt

SEQ ID NO: 73659 - DNA, 25 bp, Artificial
  probe
  misc_feature (1)..(25): SEQ ID NO: 7705; WAN024B6K_s_at; Start 60; Stop 84
atataaaccagagactgtttacatt

SEQ ID NO: 73660 - DNA, 25 bp, Artificial
  probe
  misc_feature (1)..(25): SEQ ID NO: 7705; WAN024B6K_s_at; Start 50; Stop 74
tcattttactatataaaccagagac

SEQ ID NO: 73661 - DNA, 25 bp, Artificial
  probe
  misc_feature (1)..(25): SEQ ID NO: 7705; WAN024B6K_s_at; Start 52; Stop 76
attttactatataaaccagagactg

SEQ ID NO: 73662 - DNA, 25 bp, Artificial
  probe
  misc_feature (1)..(25): SEQ ID NO: 7705; WAN024B6K_s_at; Start 69; Stop 93
agagactgtttacattttcagcaag

SEQ ID NO: 73663 - DNA, 25 bp, Artificial
  probe
  misc_feature (1)..(25): SEQ ID NO: 7705; WAN024B6K_s_at; Start 58; Stop 82
ctatataaaccagagactgtttaca

SEQ ID NO: 73664 - DNA, 25 bp, Artificial
  probe
  misc_feature (1)..(25): SEQ ID NO: 7705; WAN024B6K_s_at; Start 68; Stop 92
cagagactgtttacattttcagcaa

SEQ ID NO: 73665 - DNA, 25 bp, Artificial
  probe
  misc_feature (1)..(25): SEQ ID NO: 7705; WAN024B6K_s_at; Start 54; Stop 78
tttactatataaaccagagactgtt

SEQ ID NO: 73666 - DNA, 25 bp, Artificial
  probe
  misc_feature (1)..(25): SEQ ID NO: 7705; WAN024B6K_s_at; Start 66; Stop 90
accagagactgtttacattttcagc

SEQ ID NO: 73667 - DNA, 25 bp, Artificial
  probe
  misc_feature (1)..(25): SEQ ID NO: 7705; WAN024B6K_s_at; Start 64; Stop 88
aaaccagagactgtttacattttca

SEQ ID NO: 73668 - DNA, 25 bp, Artificial
  probe
  misc_feature (1)..(25): SEQ ID NO: 7705; WAN024B6K_s_at; Start 61; Stop 85
tataaaccagagactgtttacattt

SEQ ID NO: 73669 - DNA, 25 bp, Artificial
  probe
  misc_feature (1)..(25): SEQ ID NO: 7705; WAN024B6K_s_at; Start 51; Stop 75
cattttactatataaaccagagact

SEQ ID NO: 73670 - DNA, 25 bp, Artificial
  probe
  misc_feature (1)..(25): SEQ ID NO: 7705; WAN024B6K_s_at; Start 57; Stop 81
actatataaaccagagactgtttac

SEQ ID NO: 73671 - DNA, 25 bp, Artificial
  probe
  misc_feature (1)..(25): SEQ ID NO: 7705; WAN024B6K_s_at; Start 65; Stop 89
aaccagagactgtttacattttcag

SEQ ID NO: 73672 - DNA, 25 bp, Artificial
  probe
  misc_feature (1)..(25): SEQ ID NO: 7705; WAN024B6K_s_at; Start 56; Stop 80
tactatataaaccagagactgttta

SEQ ID NO: 73673 - DNA, 25 bp, Artificial
  probe
  misc_feature (1)..(25): SEQ ID NO: 7705; WAN024B6K_s_at; Start 55; Stop 79
ttactatataaaccagagactgttt

SEQ ID NO: 73674 - DNA, 25 bp, Artificial
  probe
  misc_feature (1)..(25): SEQ ID NO: 7705; WAN024B6K_s_at; Start 67; Stop 91
ccagagactgtttacattttcagca

SEQ ID NO: 73675 - DNA, 25 bp, Artificial
  probe
  misc_feature (1)..(25): SEQ ID NO: 7705; WAN024B6K_s_at; Start 63; Stop 87
taaaccagagactgtttacattttc

SEQ ID NO: 73676 - DNA, 25 bp, Artificial
  probe
  misc_feature (1)..(25): SEQ ID NO: 7705; WAN024B6K_s_at; Start 59; Stop 83
tatataaaccagagactgtttacat

SEQ ID NO: 73677 - DNA, 25 bp, Artificial
  probe
  misc_feature (1)..(25): SEQ ID NO: 39; WAN024B6M_at; Start 56; Stop 80
tcaaattcttttggggtcaaactca

SEQ ID NO: 73678 - DNA, 25 bp, Artificial
  probe
  misc_feature (1)..(25): SEQ ID NO: 39; WAN024B6M_at; Start 50; Stop 74
tcgctttcaaattcttttggggtca

SEQ ID NO: 73679 - DNA, 25 bp, Artificial
  probe
  misc_feature (1)..(25): SEQ ID NO: 39; WAN024B6M_at; Start 57; Stop 81
caaattcttttggggtcaaactcag

SEQ ID NO: 73680 - DNA, 25 bp, Artificial
  probe
  misc_feature (1)..(25): SEQ ID NO: 6280; WAN024B6O_s_at; Start 22; Stop 46
aaaataatgcccatcaattctttag

SEQ ID NO: 73681 - DNA, 25 bp, Artificial
  probe
  misc_feature (1)..(25): SEQ ID NO: 6280; WAN024B6O_s_at; Start 16; Stop 40
ttgaaaaaaataatgcccatcaatt

SEQ ID NO: 73682 - DNA, 25 bp, Artificial
  probe
  misc_feature (1)..(25): SEQ ID NO: 6280; WAN024B6O_s_at; Start 52; Stop 76
caagagaagaacgaaccaagcaatt

SEQ ID NO: 73683 - DNA, 25 bp, Artificial
  probe
  misc_feature (1)..(25): SEQ ID NO: 6280; WAN024B6O_s_at; Start 19; Stop 43
aaaaaaataatgcccatcaattctt

SEQ ID NO: 73684 - DNA, 25 bp, Artificial
  probe
  misc_feature (1)..(25): SEQ ID NO: 6280; WAN024B6O_s_at; Start 67; Stop 91
ccaagcaattttggaacgaattctt

SEQ ID NO: 73685 - DNA, 25 bp, Artificial
  probe
  misc_feature (1)..(25): SEQ ID NO: 6280; WAN024B6O_s_at; Start 54; Stop 78
agagaagaacgaaccaagcaatttt

SEQ ID NO: 73686 - DNA, 25 bp, Artificial
  probe
  misc_feature (1)..(25): SEQ ID NO: 6280; WAN024B6O_s_at; Start 63; Stop 87
cgaaccaagcaattttggaacgaat

SEQ ID NO: 73687 - DNA, 25 bp, Artificial
  probe
  misc_feature (1)..(25): SEQ ID NO: 6280; WAN024B6O_s_at; Start 53; Stop 77
aagagaagaacgaaccaagcaattt

SEQ ID NO: 73688 - DNA, 25 bp, Artificial
  probe
  misc_feature (1)..(25): SEQ ID NO: 6280; WAN024B6O_s_at; Start 20; Stop 44
aaaaaataatgcccatcaattcttt

SEQ ID NO: 73689 - DNA, 25 bp, Artificial
  probe
  misc_feature (1)..(25): SEQ ID NO: 6280; WAN024B6O_s_at; Start 21; Stop 45
aaaaataatgcccatcaattcttta

SEQ ID NO: 73690 - DNA, 25 bp, Artificial
  probe
  misc_feature (1)..(25): SEQ ID NO: 6280; WAN024B6O_s_at; Start 66; Stop 90
accaagcaattttggaacgaattct

SEQ ID NO: 73691 - DNA, 25 bp, Artificial
  probe
  misc_feature (1)..(25): SEQ ID NO: 6280; WAN024B6O_s_at; Start 13; Stop 37
ttgttgaaaaaaataatgcccatca

SEQ ID NO: 73692 - DNA, 25 bp, Artificial
  probe
  misc_feature (1)..(25): SEQ ID NO: 6280; WAN024B6O_s_at; Start 56; Stop 80
agaagaacgaaccaagcaattttgg

SEQ ID NO: 73693 - DNA, 25 bp, Artificial
  probe
  misc_feature (1)..(25): SEQ ID NO: 6280; WAN024B6O_s_at; Start 68; Stop 92
caagcaattttggaacgaattcttt

SEQ ID NO: 73694 - DNA, 25 bp, Artificial
  probe
  misc_feature (1)..(25): SEQ ID NO: 6280; WAN024B6O_s_at; Start 49; Stop 73
gtccaagagaagaacgaaccaagca

SEQ ID NO: 73695 - DNA, 25 bp, Artificial
  probe
  misc_feature (1)..(25): SEQ ID NO: 6280; WAN024B6O_s_at; Start 57; Stop 81
gaagaacgaaccaagcaattttgga

SEQ ID NO: 73696 - DNA, 25 bp, Artificial
  probe
  misc_feature (1)..(25): SEQ ID NO: 6280; WAN024B6O_s_at; Start 14; Stop 38
tgttgaaaaaaataatgcccatcaa

SEQ ID NO: 73697 - DNA, 25 bp, Artificial
  probe
  misc_feature (1)..(25): SEQ ID NO: 6280; WAN024B6O_s_at; Start 11; Stop 35
aattgttgaaaaaaataatgcccat

SEQ ID NO: 73698 - DNA, 25 bp, Artificial
  probe
  misc_feature (1)..(25): SEQ ID NO: 6280; WAN024B6O_s_at; Start 50; Stop 74
tccaagagaagaacgaaccaagcaa

SEQ ID NO: 73699 - DNA, 25 bp, Artificial
  probe
  misc_feature (1)..(25): SEQ ID NO: 6280; WAN024B6O_s_at; Start 15; Stop 39
gttgaaaaaaataatgcccatcaat

SEQ ID NO: 73700 - DNA, 25 bp, Artificial
  probe
  misc_feature (1)..(25): SEQ ID NO: 6280; WAN024B6O_s_at; Start 55; Stop 79
gagaagaacgaaccaagcaattttg

SEQ ID NO: 73701 - DNA, 25 bp, Artificial
  probe
  misc_feature (1)..(25): SEQ ID NO: 6280; WAN024B6O_s_at; Start 18; Stop 42
gaaaaaaataatgcccatcaattct

SEQ ID NO: 73702 - DNA, 25 bp, Artificial
  probe
  misc_feature (1)..(25): SEQ ID NO: 6280; WAN024B6O_s_at; Start 12; Stop 36
attgttgaaaaaaataatgcccatc

SEQ ID NO: 73703 - DNA, 25 bp, Artificial
  probe
  misc_feature (1)..(25): SEQ ID NO: 6280; WAN024B6O_s_at; Start 51; Stop 75
ccaagagaagaacgaaccaagcaat

SEQ ID NO: 73704 - DNA, 25 bp, Artificial
  probe
  misc_feature (1)..(25): SEQ ID NO: 6280; WAN024B6O_s_at; Start 17; Stop 41
tgaaaaaaataatgcccatcaattc

SEQ ID NO: 73705 - DNA, 25 bp, Artificial
  probe
  misc_feature (1)..(25): SEQ ID NO: 6280; WAN024B6O_s_at; Start 23; Stop 47
aaataatgcccatcaattctttagt

SEQ ID NO: 73706 - DNA, 25 bp, Artificial
  probe
  misc_feature (1)..(25): SEQ ID NO: 6371; WAN024B6Q_x_at; Start 31; Stop 55
acagtcaaatcgatttctaacaata

SEQ ID NO: 73707 - DNA, 25 bp, Artificial
  probe
  misc_feature (1)..(25): SEQ ID NO: 6371; WAN024B6Q_x_at; Start 61; Stop 85
gaagtagaggcgtactattctagtt

SEQ ID NO: 73708 - DNA, 25 bp, Artificial
  probe
  misc_feature (1)..(25): SEQ ID NO: 6371; WAN024B6Q_x_at; Start 51; Stop 75
caatattttagaagtagaggcgtac

SEQ ID NO: 73709 - DNA, 25 bp, Artificial
  probe
  misc_feature (1)..(25): SEQ ID NO: 6371; WAN024B6Q_x_at; Start 33; Stop 57
agtcaaatcgatttctaacaatatt

SEQ ID NO: 73710 - DNA, 25 bp, Artificial
  probe
  misc_feature (1)..(25): SEQ ID NO: 6371; WAN024B6Q_x_at; Start 15; Stop 39
ggacaaatcgatcaggacagtcaaa

SEQ ID NO: 73711 - DNA, 25 bp, Artificial
  probe
  misc_feature (1)..(25): SEQ ID NO: 6371; WAN024B6Q_x_at; Start 14; Stop 38
aggacaaatcgatcaggacagtcaa

SEQ ID NO: 73712 - DNA, 25 bp, Artificial
  probe
  misc_feature (1)..(25): SEQ ID NO: 6371; WAN024B6Q_x_at; Start 1; Stop 25
atgaaacaagaacaggacaaatcga

SEQ ID NO: 73713 - DNA, 25 bp, Artificial
  probe
  misc_feature (1)..(25): SEQ ID NO: 6371; WAN024B6Q_x_at; Start 17; Stop 41
acaaatcgatcaggacagtcaaatc

SEQ ID NO: 73714 - DNA, 25 bp, Artificial
  probe
  misc_feature (1)..(25): SEQ ID NO: 6371; WAN024B6Q_x_at; Start 20; Stop 44
aatcgatcaggacagtcaaatcgat

SEQ ID NO: 73715 - DNA, 25 bp, Artificial
  probe
  misc_feature (1)..(25): SEQ ID NO: 6371; WAN024B6Q_x_at; Start 55; Stop 79
attttagaagtagaggcgtactatt

SEQ ID NO: 73716 - DNA, 25 bp, Artificial
  probe
  misc_feature (1)..(25): SEQ ID NO: 6371; WAN024B6Q_x_at; Start 22; Stop 46
tcgatcaggacagtcaaatcgattt

SEQ ID NO: 73717 - DNA, 25 bp, Artificial
  probe
  misc_feature (1)..(25): SEQ ID NO: 6371; WAN024B6Q_x_at; Start 49; Stop 73
aacaatattttagaagtagaggcgt

SEQ ID NO: 73718 - DNA, 25 bp, Artificial
  probe
  misc_feature (1)..(25): SEQ ID NO: 6371; WAN024B6Q_x_at; Start 8; Stop 32
aagaacaggacaaatcgatcaggac

SEQ ID NO: 73719 - DNA, 25 bp, Artificial
  probe
  misc_feature (1)..(25): SEQ ID NO: 6371; WAN024B6Q_x_at; Start 56; Stop 80
ttttagaagtagaggcgtactattc

SEQ ID NO: 73720 - DNA, 25 bp, Artificial
  probe
  misc_feature (1)..(25): SEQ ID NO: 6371; WAN024B6Q_x_at; Start 60; Stop 84
agaagtagaggcgtactattctagt

SEQ ID NO: 73721 - DNA, 25 bp, Artificial
  probe
  misc_feature (1)..(25): SEQ ID NO: 6371; WAN024B6Q_x_at; Start 54; Stop 78
tattttagaagtagaggcgtactat

SEQ ID NO: 73722 - DNA, 25 bp, Artificial
  probe
  misc_feature (1)..(25): SEQ ID NO: 6371; WAN024B6Q_x_at; Start 62; Stop 86
aagtagaggcgtactattctagttt

SEQ ID NO: 73723 - DNA, 25 bp, Artificial
  probe
  misc_feature (1)..(25): SEQ ID NO: 6371; WAN024B6Q_x_at; Start 23; Stop 47
cgatcaggacagtcaaatcgatttc

SEQ ID NO: 73724 - DNA, 25 bp, Artificial
  probe
  misc_feature (1)..(25): SEQ ID NO: 6371; WAN024B6Q_x_at; Start 4; Stop 28
aaacaagaacaggacaaatcgatca

SEQ ID NO: 73725 - DNA, 25 bp, Artificial
  probe
  misc_feature (1)..(25): SEQ ID NO: 6371; WAN024B6Q_x_at; Start 32; Stop 56
cagtcaaatcgatttctaacaatat

SEQ ID NO: 73726 - DNA, 25 bp, Artificial
  probe
  misc_feature (1)..(25): SEQ ID NO: 6371; WAN024B6Q_x_at; Start 52; Stop 76
aatattttagaagtagaggcgtact

SEQ ID NO: 73727 - DNA, 25 bp, Artificial
  probe
  misc_feature (1)..(25): SEQ ID NO: 6371; WAN024B6Q_x_at; Start 9; Stop 33
agaacaggacaaatcgatcaggaca

SEQ ID NO: 73728 - DNA, 25 bp, Artificial
  probe
  misc_feature (1)..(25): SEQ ID NO: 6371; WAN024B6Q_x_at; Start 13; Stop 37
caggacaaatcgatcaggacagtca

SEQ ID NO: 73729 - DNA, 25 bp, Artificial
  probe
  misc_feature (1)..(25): SEQ ID NO: 6371; WAN024B6Q_x_at; Start 18; Stop 42
caaatcgatcaggacagtcaaatcg

SEQ ID NO: 73730 - DNA, 25 bp, Artificial
  probe
  misc_feature (1)..(25): SEQ ID NO: 6371; WAN024B6Q_x_at; Start 5; Stop 29
aacaagaacaggacaaatcgatcag

SEQ ID NO: 73731 - DNA, 25 bp, Artificial
  probe
  misc_feature (1)..(25): SEQ ID NO: 6371; WAN024B6Q_x_at; Start 48; Stop 72
taacaatattttagaagtagaggcg

SEQ ID NO: 73732 - DNA, 25 bp, Artificial
  probe
  misc_feature (1)..(25): SEQ ID NO: 6371; WAN024B6Q_x_at; Start 19; Stop 43
aaatcgatcaggacagtcaaatcga

SEQ ID NO: 73733 - DNA, 25 bp, Artificial
  probe
  misc_feature (1)..(25): SEQ ID NO: 6371; WAN024B6Q_x_at; Start 12; Stop 36
acaggacaaatcgatcaggacagtc

SEQ ID NO: 73734 - DNA, 25 bp, Artificial
  probe
  misc_feature (1)..(25): SEQ ID NO: 6371; WAN024B6Q_x_at; Start 53; Stop 77
atattttagaagtagaggcgtacta

SEQ ID NO: 73735 - DNA, 25 bp, Artificial
  probe
  misc_feature (1)..(25): SEQ ID NO: 6371; WAN024B6Q_x_at; Start 6; Stop 30
acaagaacaggacaaatcgatcagg

SEQ ID NO: 73736 - DNA, 25 bp, Artificial
  probe
  misc_feature (1)..(25): SEQ ID NO: 6371; WAN024B6Q_x_at; Start 10; Stop 34
gaacaggacaaatcgatcaggacag

SEQ ID NO: 73737 - DNA, 25 bp, Artificial
  probe
  misc_feature (1)..(25): SEQ ID NO: 6371; WAN024B6Q_x_at; Start 50; Stop 74
acaatattttagaagtagaggcgta

SEQ ID NO: 73738 - DNA, 25 bp, Artificial
  probe
  misc_feature (1)..(25): SEQ ID NO: 6371; WAN024B6Q_x_at; Start 16; Stop 40
gacaaatcgatcaggacagtcaaat

SEQ ID NO: 73739 - DNA, 25 bp, Artificial
  probe
  misc_feature (1)..(25): SEQ ID NO: 6371; WAN024B6Q_x_at; Start 7; Stop 31
caagaacaggacaaatcgatcagga

SEQ ID NO: 73740 - DNA, 25 bp, Artificial
  probe
  misc_feature (1)..(25): SEQ ID NO: 6373; WAN024B6R_x_at; Start 62; Stop 86
aagttgaggtgtactattctagttt

SEQ ID NO: 73741 - DNA, 25 bp, Artificial
  probe
  misc_feature (1)..(25): SEQ ID NO: 6373; WAN024B6R_x_at; Start 54; Stop 78
tgttttagaagttgaggtgtactat

SEQ ID NO: 73742 - DNA, 25 bp, Artificial
  probe
  misc_feature (1)..(25): SEQ ID NO: 6373; WAN024B6R_x_at; Start 31; Stop 55
acagtcaaattgattgctaacaatg

SEQ ID NO: 73743 - DNA, 25 bp, Artificial
  probe
  misc_feature (1)..(25): SEQ ID NO: 6373; WAN024B6R_x_at; Start 64; Stop 88
gttgaggtgtactattctagtttca

SEQ ID NO: 73744 - DNA, 25 bp, Artificial
  probe
  misc_feature (1)..(25): SEQ ID NO: 6373; WAN024B6R_x_at; Start 8; Stop 32
aagaacaggagaaatcgatcaggac

SEQ ID NO: 73745 - DNA, 25 bp, Artificial
  probe
  misc_feature (1)..(25): SEQ ID NO: 6373; WAN024B6R_x_at; Start 78; Stop 102
ttctagtttcaatctactatacatg

SEQ ID NO: 73746 - DNA, 25 bp, Artificial
  probe
  misc_feature (1)..(25): SEQ ID NO: 6373; WAN024B6R_x_at; Start 56; Stop 80
ttttagaagttgaggtgtactattc

SEQ ID NO: 73747 - DNA, 25 bp, Artificial
  probe
  misc_feature (1)..(25): SEQ ID NO: 6373; WAN024B6R_x_at; Start 34; Stop 58
gtcaaattgattgctaacaatgttt

SEQ ID NO: 73748 - DNA, 25 bp, Artificial
  probe
  misc_feature (1)..(25): SEQ ID NO: 6373; WAN024B6R_x_at; Start 59; Stop 83
tagaagttgaggtgtactattctag

SEQ ID NO: 73749 - DNA, 25 bp, Artificial
  probe
  misc_feature (1)..(25): SEQ ID NO: 6373; WAN024B6R_x_at; Start 37; Stop 61
aaattgattgctaacaatgttttag

SEQ ID NO: 73750 - DNA, 25 bp, Artificial
  probe
  misc_feature (1)..(25): SEQ ID NO: 6373; WAN024B6R_x_at; Start 1; Stop 25
atgaaacaagaacaggagaaatcga

SEQ ID NO: 73751 - DNA, 25 bp, Artificial
  probe
  misc_feature (1)..(25): SEQ ID NO: 6373; WAN024B6R_x_at; Start 57; Stop 81
tttagaagttgaggtgtactattct

SEQ ID NO: 73752 - DNA, 25 bp, Artificial
  probe
  misc_feature (1)..(25): SEQ ID NO: 6373; WAN024B6R_x_at; Start 32; Stop 56
cagtcaaattgattgctaacaatgt

SEQ ID NO: 73753 - DNA, 25 bp, Artificial
  probe
  misc_feature (1)..(25): SEQ ID NO: 6373; WAN024B6R_x_at; Start 61; Stop 85
gaagttgaggtgtactattctagtt

SEQ ID NO: 73754 - DNA, 25 bp, Artificial
  probe
  misc_feature (1)..(25): SEQ ID NO: 6373; WAN024B6R_x_at; Start 4; Stop 28
aaacaagaacaggagaaatcgatca

SEQ ID NO: 73755 - DNA, 25 bp, Artificial
  probe
  misc_feature (1)..(25): SEQ ID NO: 6373; WAN024B6R_x_at; Start 5; Stop 29
aacaagaacaggagaaatcgatcag

SEQ ID NO: 73756 - DNA, 25 bp, Artificial
  probe
  misc_feature (1)..(25): SEQ ID NO: 6373; WAN024B6R_x_at; Start 60; Stop 84
agaagttgaggtgtactattctagt

SEQ ID NO: 73757 - DNA, 25 bp, Artificial
  probe
  misc_feature (1)..(25): SEQ ID NO: 6373; WAN024B6R_x_at; Start 9; Stop 33
agaacaggagaaatcgatcaggaca

SEQ ID NO: 73758 - DNA, 25 bp, Artificial
  probe
  misc_feature (1)..(25): SEQ ID NO: 6373; WAN024B6R_x_at; Start 51; Stop 75
caatgttttagaagttgaggtgtac

SEQ ID NO: 73759 - DNA, 25 bp, Artificial
  probe
  misc_feature (1)..(25): SEQ ID NO: 6373; WAN024B6R_x_at; Start 36; Stop 60
caaattgattgctaacaatgtttta

SEQ ID NO: 73760 - DNA, 25 bp, Artificial
  probe
  misc_feature (1)..(25): SEQ ID NO: 6373; WAN024B6R_x_at; Start 33; Stop 57
agtcaaattgattgctaacaatgtt

SEQ ID NO: 73761 - DNA, 25 bp, Artificial
  probe
  misc_feature (1)..(25): SEQ ID NO: 6373; WAN024B6R_x_at; Start 65; Stop 89
ttgaggtgtactattctagtttcaa

SEQ ID NO: 73762 - DNA, 25 bp, Artificial
  probe
  misc_feature (1)..(25): SEQ ID NO: 6373; WAN024B6R_x_at; Start 53; Stop 77
atgttttagaagttgaggtgtacta

SEQ ID NO: 73763 - DNA, 25 bp, Artificial
  probe
  misc_feature (1)..(25): SEQ ID NO: 6373; WAN024B6R_x_at; Start 27; Stop 51
caggacagtcaaattgattgctaac

SEQ ID NO: 73764 - DNA, 25 bp, Artificial
  probe
  misc_feature (1)..(25): SEQ ID NO: 6373; WAN024B6R_x_at; Start 58; Stop 82
ttagaagttgaggtgtactattcta

SEQ ID NO: 73765 - DNA, 25 bp, Artificial
  probe
  misc_feature (1)..(25): SEQ ID NO: 6373; WAN024B6R_x_at; Start 28; Stop 52
aggacagtcaaattgattgctaaca

SEQ ID NO: 73766 - DNA, 25 bp, Artificial
  probe
  misc_feature (1)..(25): SEQ ID NO: 6373; WAN024B6R_x_at; Start 52; Stop 76
aatgttttagaagttgaggtgtact

SEQ ID NO: 73767 - DNA, 25 bp, Artificial
  probe
  misc_feature (1)..(25): SEQ ID NO: 6373; WAN024B6R_x_at; Start 12; Stop 36
acaggagaaatcgatcaggacagtc

SEQ ID NO: 73768 - DNA, 25 bp, Artificial
  probe
  misc_feature (1)..(25): SEQ ID NO: 6373; WAN024B6R_x_at; Start 35; Stop 59
tcaaattgattgctaacaatgtttt

SEQ ID NO: 73769 - DNA, 25 bp, Artificial
  probe
  misc_feature (1)..(25): SEQ ID NO: 6373; WAN024B6R_x_at; Start 66; Stop 90
tgaggtgtactattctagtttcaat

SEQ ID NO: 73770 - DNA, 25 bp, Artificial
  probe
  misc_feature (1)..(25): SEQ ID NO: 6373; WAN024B6R_x_at; Start 11; Stop 35
aacaggagaaatcgatcaggacagt

SEQ ID NO: 73771 - DNA, 25 bp, Artificial
  probe
  misc_feature (1)..(25): SEQ ID NO: 6373; WAN024B6R_x_at; Start 63; Stop 87
agttgaggtgtactattctagtttc

SEQ ID NO: 73772 - DNA, 25 bp, Artificial
  probe
  misc_feature (1)..(25): SEQ ID NO: 6373; WAN024B6R_x_at; Start 10; Stop 34
gaacaggagaaatcgatcaggacag

SEQ ID NO: 73773 - DNA, 25 bp, Artificial
  probe
  misc_feature (1)..(25): SEQ ID NO: 6373; WAN024B6R_x_at; Start 7; Stop 31
caagaacaggagaaatcgatcagga

SEQ ID NO: 73774 - DNA, 25 bp, Artificial
  probe
  misc_feature (1)..(25): SEQ ID NO: 7366; WAN024B6T_at; Start 70; Stop 94
aaatttcctctgggagtttcatggt

SEQ ID NO: 73775 - DNA, 25 bp, Artificial
  probe
  misc_feature (1)..(25): SEQ ID NO: 7366; WAN024B6T_at; Start 49; Stop 73
tttaacctattgaatatctataaat

SEQ ID NO: 73776 - DNA, 25 bp, Artificial
  probe
  misc_feature (1)..(25): SEQ ID NO: 7366; WAN024B6T_at; Start 60; Stop 84
gaatatctataaatttcctctggga

SEQ ID NO: 73777 - DNA, 25 bp, Artificial
  probe
  misc_feature (1)..(25): SEQ ID NO: 7366; WAN024B6T_at; Start 55; Stop 79
ctattgaatatctataaatttcctc

SEQ ID NO: 73778 - DNA, 25 bp, Artificial
  probe
  misc_feature (1)..(25): SEQ ID NO: 7366; WAN024B6T_at; Start 45; Stop 69
gatatttaacctattgaatatctat

SEQ ID NO: 73779 - DNA, 25 bp, Artificial
  probe
  misc_feature (1)..(25): SEQ ID NO: 7366; WAN024B6T_at; Start 66; Stop 90
ctataaatttcctctgggagtttca

SEQ ID NO: 73780 - DNA, 25 bp, Artificial
  probe
  misc_feature (1)..(25): SEQ ID NO: 7366; WAN024B6T_at; Start 39; Stop 63
cactacgatatttaacctattgaat

SEQ ID NO: 73781 - DNA, 25 bp, Artificial
  probe
  misc_feature (1)..(25): SEQ ID NO: 7366; WAN024B6T_at; Start 67; Stop 91
tataaatttcctctgggagtttcat

SEQ ID NO: 73782 - DNA, 25 bp, Artificial
  probe
  misc_feature (1)..(25): SEQ ID NO: 7366; WAN024B6T_at; Start 57; Stop 81
attgaatatctataaatttcctctg

SEQ ID NO: 73783 - DNA, 25 bp, Artificial
  probe
  misc_feature (1)..(25): SEQ ID NO: 7366; WAN024B6T_at; Start 37; Stop 61
cccactacgatatttaacctattga

SEQ ID NO: 73784 - DNA, 25 bp, Artificial
  probe
  misc_feature (1)..(25): SEQ ID NO: 7366; WAN024B6T_at; Start 51; Stop 75
taacctattgaatatctataaattt

SEQ ID NO: 73785 - DNA, 25 bp, Artificial
  probe
  misc_feature (1)..(25): SEQ ID NO: 7366; WAN024B6T_at; Start 36; Stop 60
acccactacgatatttaacctattg

SEQ ID NO: 73786 - DNA, 25 bp, Artificial
  probe
  misc_feature (1)..(25): SEQ ID NO: 7366; WAN024B6T_at; Start 43; Stop 67
acgatatttaacctattgaatatct

SEQ ID NO: 73787 - DNA, 25 bp, Artificial
  probe
  misc_feature (1)..(25): SEQ ID NO: 7366; WAN024B6T_at; Start 52; Stop 76
aacctattgaatatctataaatttc

SEQ ID NO: 73788 - DNA, 25 bp, Artificial
  probe
  misc_feature (1)..(25): SEQ ID NO: 7366; WAN024B6T_at; Start 40; Stop 64
actacgatatttaacctattgaata

SEQ ID NO: 73789 - DNA, 25 bp, Artificial
  probe
  misc_feature (1)..(25): SEQ ID NO: 7366; WAN024B6T_at; Start 62; Stop 86
atatctataaatttcctctgggagt

SEQ ID NO: 73790 - DNA, 25 bp, Artificial
  probe
  misc_feature (1)..(25): SEQ ID NO: 7366; WAN024B6T_at; Start 56; Stop 80
tattgaatatctataaatttcctct

SEQ ID NO: 73791 - DNA, 25 bp, Artificial
  probe
  misc_feature (1)..(25): SEQ ID NO: 7366; WAN024B6T_at; Start 42; Stop 66
tacgatatttaacctattgaatatc

SEQ ID NO: 73792 - DNA, 25 bp, Artificial
  probe
  misc_feature (1)..(25): SEQ ID NO: 7366; WAN024B6T_at; Start 29; Stop 53
tccgagtacccactacgatatttaa

SEQ ID NO: 73793 - DNA, 25 bp, Artificial
  probe
  misc_feature (1)..(25): SEQ ID NO: 7366; WAN024B6T_at; Start 50; Stop 74
ttaacctattgaatatctataaatt

SEQ ID NO: 73794 - DNA, 25 bp, Artificial
  probe
  misc_feature (1)..(25): SEQ ID NO: 7366; WAN024B6T_at; Start 59; Stop 83
tgaatatctataaatttcctctggg

SEQ ID NO: 73795 - DNA, 25 bp, Artificial
  probe
  misc_feature (1)..(25): SEQ ID NO: 7366; WAN024B6T_at; Start 41; Stop 65
ctacgatatttaacctattgaatat

SEQ ID NO: 73796 - DNA, 25 bp, Artificial
  probe
  misc_feature (1)..(25): SEQ ID NO: 7366; WAN024B6T_at; Start 54; Stop 78
cctattgaatatctataaatttcct

SEQ ID NO: 73797 - DNA, 25 bp, Artificial
  probe
  misc_feature (1)..(25): SEQ ID NO: 7366; WAN024B6T_at; Start 65; Stop 89
tctataaatttcctctgggagtttc

SEQ ID NO: 73798 - DNA, 25 bp, Artificial
  probe
  misc_feature (1)..(25): SEQ ID NO: 7366; WAN024B6T_at; Start 68; Stop 92
ataaatttcctctgggagtttcatg

SEQ ID NO: 73799 - DNA, 25 bp, Artificial
  probe
  misc_feature (1)..(25): SEQ ID NO: 7366; WAN024B6T_at; Start 53; Stop 77
acctattgaatatctataaatttcc

SEQ ID NO: 73800 - DNA, 25 bp, Artificial
  probe
  misc_feature (1)..(25): SEQ ID NO: 7366; WAN024B6T_at; Start 64; Stop 88
atctataaatttcctctgggagttt

SEQ ID NO: 73801 - DNA, 25 bp, Artificial
  probe
  misc_feature (1)..(25): SEQ ID NO: 7366; WAN024B6T_at; Start 61; Stop 85
aatatctataaatttcctctgggag

SEQ ID NO: 73802 - DNA, 25 bp, Artificial
  probe
  misc_feature (1)..(25): SEQ ID NO: 7366; WAN024B6T_at; Start 38; Stop 62
ccactacgatatttaacctattgaa

SEQ ID NO: 73803 - DNA, 25 bp, Artificial
  probe
  misc_feature (1)..(25): SEQ ID NO: 7366; WAN024B6T_at; Start 47; Stop 71
tatttaacctattgaatatctataa

SEQ ID NO: 73804 - DNA, 25 bp, Artificial
  probe
  misc_feature (1)..(25): SEQ ID NO: 7366; WAN024B6T_at; Start 63; Stop 87
tatctataaatttcctctgggagtt

SEQ ID NO: 73805 - DNA, 25 bp, Artificial
  probe
  misc_feature (1)..(25): SEQ ID NO: 7366; WAN024B6T_at; Start 69; Stop 93
taaatttcctctgggagtttcatgg

SEQ ID NO: 73806 - DNA, 25 bp, Artificial
  probe
  misc_feature (1)..(25): SEQ ID NO: 7366; WAN024B6T_at; Start 58; Stop 82
ttgaatatctataaatttcctctgg

SEQ ID NO: 73807 - DNA, 25 bp, Artificial
  probe
  misc_feature (1)..(25): SEQ ID NO: 7366; WAN024B6T_at; Start 44; Stop 68
cgatatttaacctattgaatatcta

SEQ ID NO: 73808 - DNA, 25 bp, Artificial
  probe
  misc_feature (1)..(25): SEQ ID NO: 6996; WAN024B6U_s_at; Start 308; Stop 332
aaaatgctaaaacaagcgaaaacat

SEQ ID NO: 73809 - DNA, 25 bp, Artificial
  probe
  misc_feature (1)..(25): SEQ ID NO: 6996; WAN024B6U_s_at; Start 323; Stop 347
gcgaaaacatgaaaccaattgacaa

SEQ ID NO: 73810 - DNA, 25 bp, Artificial
  probe
  misc_feature (1)..(25): SEQ ID NO: 6996; WAN024B6U_s_at; Start 335; Stop 359
aaccaattgacaaaatcaaaacact

SEQ ID NO: 73811 - DNA, 25 bp, Artificial
  probe
  misc_feature (1)..(25): SEQ ID NO: 6996; WAN024B6U_s_at; Start 319; Stop 343
acaagcgaaaacatgaaaccaattg

SEQ ID NO: 73812 - DNA, 25 bp, Artificial
  probe
  misc_feature (1)..(25): SEQ ID NO: 6996; WAN024B6U_s_at; Start 337; Stop 361
ccaattgacaaaatcaaaacactca

SEQ ID NO: 73813 - DNA, 25 bp, Artificial
  probe
  misc_feature (1)..(25): SEQ ID NO: 6996; WAN024B6U_s_at; Start 332; Stop 356
tgaaaccaattgacaaaatcaaaac

SEQ ID NO: 73814 - DNA, 25 bp, Artificial
  probe
  misc_feature (1)..(25): SEQ ID NO: 6996; WAN024B6U_s_at; Start 318; Stop 342
aacaagcgaaaacatgaaaccaatt

SEQ ID NO: 73815 - DNA, 25 bp, Artificial
  probe
  misc_feature (1)..(25): SEQ ID NO: 6996; WAN024B6U_s_at; Start 331; Stop 355
atgaaaccaattgacaaaatcaaaa

SEQ ID NO: 73816 - DNA, 25 bp, Artificial
  probe
  misc_feature (1)..(25): SEQ ID NO: 6996; WAN024B6U_s_at; Start 320; Stop 344
caagcgaaaacatgaaaccaattga

SEQ ID NO: 73817 - DNA, 25 bp, Artificial
  probe
  misc_feature (1)..(25): SEQ ID NO: 6996; WAN024B6U_s_at; Start 302; Stop 326
ttcgtaaaaatgctaaaacaagcga

SEQ ID NO: 73818 - DNA, 25 bp, Artificial
  probe
  misc_feature (1)..(25): SEQ ID NO: 6996; WAN024B6U_s_at; Start 333; Stop 357
gaaaccaattgacaaaatcaaaaca

SEQ ID NO: 73819 - DNA, 25 bp, Artificial
  probe
  misc_feature (1)..(25): SEQ ID NO: 6996; WAN024B6U_s_at; Start 317; Stop 341
aaacaagcgaaaacatgaaaccaat

SEQ ID NO: 73820 - DNA, 25 bp, Artificial
  probe
  misc_feature (1)..(25): SEQ ID NO: 6996; WAN024B6U_s_at; Start 315; Stop 339
taaaacaagcgaaaacatgaaacca

SEQ ID NO: 73821 - DNA, 25 bp, Artificial
  probe
  misc_feature (1)..(25): SEQ ID NO: 6996; WAN024B6U_s_at; Start 327; Stop 351
aaacatgaaaccaattgacaaaatc

SEQ ID NO: 73822 - DNA, 25 bp, Artificial
  probe
  misc_feature (1)..(25): SEQ ID NO: 6996; WAN024B6U_s_at; Start 312; Stop 336
tgctaaaacaagcgaaaacatgaaa

SEQ ID NO: 73823 - DNA, 25 bp, Artificial
  probe
  misc_feature (1)..(25): SEQ ID NO: 6996; WAN024B6U_s_at; Start 300; Stop 324
tgttcgtaaaaatgctaaaacaagc

SEQ ID NO: 73824 - DNA, 25 bp, Artificial
  probe
  misc_feature (1)..(25): SEQ ID NO: 6996; WAN024B6U_s_at; Start 326; Stop 350
aaaacatgaaaccaattgacaaaat

SEQ ID NO: 73825 - DNA, 25 bp, Artificial
  probe
  misc_feature (1)..(25): SEQ ID NO: 6996; WAN024B6U_s_at; Start 310; Stop 334
aatgctaaaacaagcgaaaacatga

SEQ ID NO: 73826 - DNA, 25 bp, Artificial
  probe
  misc_feature (1)..(25): SEQ ID NO: 6996; WAN024B6U_s_at; Start 325; Stop 349
gaaaacatgaaaccaattgacaaaa

SEQ ID NO: 73827 - DNA, 25 bp, Artificial
  probe
  misc_feature (1)..(25): SEQ ID NO: 6996; WAN024B6U_s_at; Start 311; Stop 335
atgctaaaacaagcgaaaacatgaa

SEQ ID NO: 73828 - DNA, 25 bp, Artificial
  probe
  misc_feature (1)..(25): SEQ ID NO: 6996; WAN024B6U_s_at; Start 303; Stop 327
tcgtaaaaatgctaaaacaagcgaa

SEQ ID NO: 73829 - DNA, 25 bp, Artificial
  probe
  misc_feature (1)..(25): SEQ ID NO: 6996; WAN024B6U_s_at; Start 321; Stop 345
aagcgaaaacatgaaaccaattgac

SEQ ID NO: 73830 - DNA, 25 bp, Artificial
  probe
  misc_feature (1)..(25): SEQ ID NO: 6996; WAN024B6U_s_at; Start 329; Stop 353
acatgaaaccaattgacaaaatcaa

SEQ ID NO: 73831 - DNA, 25 bp, Artificial
  probe
  misc_feature (1)..(25): SEQ ID NO: 6996; WAN024B6U_s_at; Start 330; Stop 354
catgaaaccaattgacaaaatcaaa

SEQ ID NO: 73832 - DNA, 25 bp, Artificial
  probe
  misc_feature (1)..(25): SEQ ID NO: 6996; WAN024B6U_s_at; Start 299; Stop 323
ctgttcgtaaaaatgctaaaacaag

SEQ ID NO: 73833 - DNA, 25 bp, Artificial
  probe
  misc_feature (1)..(25): SEQ ID NO: 6996; WAN024B6U_s_at; Start 324; Stop 348
cgaaaacatgaaaccaattgacaaa

SEQ ID NO: 73834 - DNA, 25 bp, Artificial
  probe
  misc_feature (1)..(25): SEQ ID NO: 6996; WAN024B6U_s_at; Start 336; Stop 360
accaattgacaaaatcaaaacactc

SEQ ID NO: 73835 - DNA, 25 bp, Artificial
  probe
  misc_feature (1)..(25): SEQ ID NO: 6996; WAN024B6U_s_at; Start 322; Stop 346
agcgaaaacatgaaaccaattgaca

SEQ ID NO: 73836 - DNA, 25 bp, Artificial
  probe
  misc_feature (1)..(25): SEQ ID NO: 6996; WAN024B6U_s_at; Start 309; Stop 333
aaatgctaaaacaagcgaaaacatg

SEQ ID NO: 73837 - DNA, 25 bp, Artificial
  probe
  misc_feature (1)..(25): SEQ ID NO: 6996; WAN024B6U_s_at; Start 339; Stop 363
aattgacaaaatcaaaacactcact

SEQ ID NO: 73838 - DNA, 25 bp, Artificial
  probe
  misc_feature (1)..(25): SEQ ID NO: 6996; WAN024B6U_s_at; Start 338; Stop 362
caattgacaaaatcaaaacactcac

SEQ ID NO: 73839 - DNA, 25 bp, Artificial
  probe
  misc_feature (1)..(25): SEQ ID NO: 6996; WAN024B6U_s_at; Start 313; Stop 337
gctaaaacaagcgaaaacatgaaac

SEQ ID NO: 73840 - DNA, 25 bp, Artificial
  probe
  misc_feature (1)..(25): SEQ ID NO: 6996; WAN024B6U_s_at; Start 328; Stop 352
aacatgaaaccaattgacaaaatca

SEQ ID NO: 73841 - DNA, 25 bp, Artificial
  probe
  misc_feature (1)..(25): SEQ ID NO: 7498; WAN024B6V_at; Start 69; Stop 93
tctactatattttcgtacaggtgct

SEQ ID NO: 73842 - DNA, 25 bp, Artificial
  probe
  misc_feature (1)..(25): SEQ ID NO: 7498; WAN024B6V_at; Start 74; Stop 98
tatattttcgtacaggtgcttcaac

SEQ ID NO: 73843 - DNA, 25 bp, Artificial
  probe
  misc_feature (1)..(25): SEQ ID NO: 7498; WAN024B6V_at; Start 78; Stop 102
ttttcgtacaggtgcttcaaccatt

SEQ ID NO: 73844 - DNA, 25 bp, Artificial
  probe
  misc_feature (1)..(25): SEQ ID NO: 7498; WAN024B6V_at; Start 73; Stop 97
ctatattttcgtacaggtgcttcaa

SEQ ID NO: 73845 - DNA, 25 bp, Artificial
  probe
  misc_feature (1)..(25): SEQ ID NO: 7498; WAN024B6V_at; Start 76; Stop 100
tattttcgtacaggtgcttcaacca

SEQ ID NO: 73846 - DNA, 25 bp, Artificial
  probe
  misc_feature (1)..(25): SEQ ID NO: 7498; WAN024B6V_at; Start 71; Stop 95
tactatattttcgtacaggtgcttc

SEQ ID NO: 73847 - DNA, 25 bp, Artificial
  probe
  misc_feature (1)..(25): SEQ ID NO: 7498; WAN024B6V_at; Start 68; Stop 92
atctactatattttcgtacaggtgc

SEQ ID NO: 73848 - DNA, 25 bp, Artificial
  probe
  misc_feature (1)..(25): SEQ ID NO: 7498; WAN024B6V_at; Start 77; Stop 101
attttcgtacaggtgcttcaaccat

SEQ ID NO: 73849 - DNA, 25 bp, Artificial
  probe
  misc_feature (1)..(25): SEQ ID NO: 7498; WAN024B6V_at; Start 70; Stop 94
ctactatattttcgtacaggtgctt

SEQ ID NO: 73850 - DNA, 25 bp, Artificial
  probe
  misc_feature (1)..(25): SEQ ID NO: 7498; WAN024B6V_at; Start 67; Stop 91
aatctactatattttcgtacaggtg

SEQ ID NO: 73851 - DNA, 25 bp, Artificial
  probe
  misc_feature (1)..(25): SEQ ID NO: 7498; WAN024B6V_at; Start 72; Stop 96
actatattttcgtacaggtgcttca

SEQ ID NO: 73852 - DNA, 25 bp, Artificial
  probe
  misc_feature (1)..(25): SEQ ID NO: 7498; WAN024B6V_at; Start 75; Stop 99
atattttcgtacaggtgcttcaacc

SEQ ID NO: 73853 - DNA, 25 bp, Artificial
  probe
  misc_feature (1)..(25): SEQ ID NO: 7498; WAN024B6V_at; Start 66; Stop 90
caatctactatattttcgtacaggt

SEQ ID NO: 73854 - DNA, 25 bp, Artificial
  probe
  misc_feature (1)..(25): SEQ ID NO: 7129; WAN024B6W_at; Start 8; Stop 32
aagatatcagaggatttcttttggt

SEQ ID NO: 73855 - DNA, 25 bp, Artificial
  probe
  misc_feature (1)..(25): SEQ ID NO: 7129; WAN024B6W_at; Start 15; Stop 39
cagaggatttcttttggttgcaggt

SEQ ID NO: 73856 - DNA, 25 bp, Artificial
  probe
  misc_feature (1)..(25): SEQ ID NO: 7129; WAN024B6W_at; Start 9; Stop 33
agatatcagaggatttcttttggtt

SEQ ID NO: 73857 - DNA, 25 bp, Artificial
  probe
  misc_feature (1)..(25): SEQ ID NO: 7129; WAN024B6W_at; Start 16; Stop 40
agaggatttcttttggttgcaggtc

SEQ ID NO: 73858 - DNA, 25 bp, Artificial
  probe
  misc_feature (1)..(25): SEQ ID NO: 7129; WAN024B6W_at; Start 2; Stop 26
tggaagaagatatcagaggatttct

SEQ ID NO: 73859 - DNA, 25 bp, Artificial
  probe
  misc_feature (1)..(25): SEQ ID NO: 7129; WAN024B6W_at; Start 11; Stop 35
atatcagaggatttcttttggttgc

SEQ ID NO: 73860 - DNA, 25 bp, Artificial
  probe
  misc_feature (1)..(25): SEQ ID NO: 7129; WAN024B6W_at; Start 17; Stop 41
gaggatttcttttggttgcaggtct

SEQ ID NO: 73861 - DNA, 25 bp, Artificial
  probe
  misc_feature (1)..(25): SEQ ID NO: 7129; WAN024B6W_at; Start 6; Stop 30
agaagatatcagaggatttcttttg

SEQ ID NO: 73862 - DNA, 25 bp, Artificial
  probe
  misc_feature (1)..(25): SEQ ID NO: 7129; WAN024B6W_at; Start 14; Stop 38
tcagaggatttcttttggttgcagg

SEQ ID NO: 73863 - DNA, 25 bp, Artificial
  probe
  misc_feature (1)..(25): SEQ ID NO: 7129; WAN024B6W_at; Start 18; Stop 42
aggatttcttttggttgcaggtcta

SEQ ID NO: 73864 - DNA, 25 bp, Artificial
  probe
  misc_feature (1)..(25): SEQ ID NO: 7129; WAN024B6W_at; Start 7; Stop 31
gaagatatcagaggatttcttttgg

SEQ ID NO: 73865 - DNA, 25 bp, Artificial
  probe
  misc_feature (1)..(25): SEQ ID NO: 7129; WAN024B6W_at; Start 10; Stop 34
gatatcagaggatttcttttggttg

SEQ ID NO: 73866 - DNA, 25 bp, Artificial
  probe
  misc_feature (1)..(25): SEQ ID NO: 7129; WAN024B6W_at; Start 12; Stop 36
tatcagaggatttcttttggttgca

SEQ ID NO: 73867 - DNA, 25 bp, Artificial
  probe
  misc_feature (1)..(25): SEQ ID NO: 7129; WAN024B6W_at; Start 5; Stop 29
aagaagatatcagaggatttctttt

SEQ ID NO: 73868 - DNA, 25 bp, Artificial
  probe
  misc_feature (1)..(25): SEQ ID NO: 7129; WAN024B6W_at; Start 3; Stop 27
ggaagaagatatcagaggatttctt

SEQ ID NO: 73869 - DNA, 25 bp, Artificial
  probe
  misc_feature (1)..(25): SEQ ID NO: 7129; WAN024B6W_at; Start 13; Stop 37
atcagaggatttcttttggttgcag

SEQ ID NO: 73870 - DNA, 25 bp, Artificial
  probe
  misc_feature (1)..(25): SEQ ID NO: 7129; WAN024B6W_at; Start 4; Stop 28
gaagaagatatcagaggatttcttt

SEQ ID NO: 73871 - DNA, 25 bp, Artificial
  probe
  misc_feature (1)..(25): SEQ ID NO: 7129; WAN024B6W_at; Start 1; Stop 25
ctggaagaagatatcagaggatttc

SEQ ID NO: 73872 - DNA, 25 bp, Artificial
  probe
  misc_feature (1)..(25): SEQ ID NO: 6379; WAN024B6X_x_at; Start 31; Stop 55
acagtcaaatcgatttctaacaatg

SEQ ID NO: 73873 - DNA, 25 bp, Artificial
  probe
  misc_feature (1)..(25): SEQ ID NO: 6379; WAN024B6X_x_at; Start 54; Stop 78
tgttttagaagcagaagtgtactat

SEQ ID NO: 73874 - DNA, 25 bp, Artificial
  probe
  misc_feature (1)..(25): SEQ ID NO: 6379; WAN024B6X_x_at; Start 8; Stop 32
gagaacaggacaaattgatcaggac

SEQ ID NO: 73875 - DNA, 25 bp, Artificial
  probe
  misc_feature (1)..(25): SEQ ID NO: 6379; WAN024B6X_x_at; Start 24; Stop 48
gatcaggacagtcaaatcgatttct

SEQ ID NO: 73876 - DNA, 25 bp, Artificial
  probe
  misc_feature (1)..(25): SEQ ID NO: 6379; WAN024B6X_x_at; Start 23; Stop 47
tgatcaggacagtcaaatcgatttc

SEQ ID NO: 73877 - DNA, 25 bp, Artificial
  probe
  misc_feature (1)..(25): SEQ ID NO: 6379; WAN024B6X_x_at; Start 33; Stop 57
agtcaaatcgatttctaacaatgtt

SEQ ID NO: 73878 - DNA, 25 bp, Artificial
  probe
  misc_feature (1)..(25): SEQ ID NO: 6379; WAN024B6X_x_at; Start 15; Stop 39
ggacaaattgatcaggacagtcaaa

SEQ ID NO: 73879 - DNA, 25 bp, Artificial
  probe
  misc_feature (1)..(25): SEQ ID NO: 6379; WAN024B6X_x_at; Start 14; Stop 38
aggacaaattgatcaggacagtcaa

SEQ ID NO: 73880 - DNA, 25 bp, Artificial
  probe
  misc_feature (1)..(25): SEQ ID NO: 6379; WAN024B6X_x_at; Start 17; Stop 41
acaaattgatcaggacagtcaaatc

SEQ ID NO: 73881 - DNA, 25 bp, Artificial
  probe
  misc_feature (1)..(25): SEQ ID NO: 6379; WAN024B6X_x_at; Start 51; Stop 75
caatgttttagaagcagaagtgtac

SEQ ID NO: 73882 - DNA, 25 bp, Artificial
  probe
  misc_feature (1)..(25): SEQ ID NO: 6379; WAN024B6X_x_at; Start 29; Stop 53
ggacagtcaaatcgatttctaacaa

SEQ ID NO: 73883 - DNA, 25 bp, Artificial
  probe
  misc_feature (1)..(25): SEQ ID NO: 6379; WAN024B6X_x_at; Start 34; Stop 58
gtcaaatcgatttctaacaatgttt

SEQ ID NO: 73884 - DNA, 25 bp, Artificial
  probe
  misc_feature (1)..(25): SEQ ID NO: 6379; WAN024B6X_x_at; Start 60; Stop 84
agaagcagaagtgtactattctagt

SEQ ID NO: 73885 - DNA, 25 bp, Artificial
  probe
  misc_feature (1)..(25): SEQ ID NO: 6379; WAN024B6X_x_at; Start 59; Stop 83
tagaagcagaagtgtactattctag

SEQ ID NO: 73886 - DNA, 25 bp, Artificial
  probe
  misc_feature (1)..(25): SEQ ID NO: 6379; WAN024B6X_x_at; Start 26; Stop 50
tcaggacagtcaaatcgatttctaa

SEQ ID NO: 73887 - DNA, 25 bp, Artificial
  probe
  misc_feature (1)..(25): SEQ ID NO: 6379; WAN024B6X_x_at; Start 3; Stop 27
gaaacgagaacaggacaaattgatc

SEQ ID NO: 73888 - DNA, 25 bp, Artificial
  probe
  misc_feature (1)..(25): SEQ ID NO: 6379; WAN024B6X_x_at; Start 4; Stop 28
aaacgagaacaggacaaattgatca

SEQ ID NO: 73889 - DNA, 25 bp, Artificial
  probe
  misc_feature (1)..(25): SEQ ID NO: 6379; WAN024B6X_x_at; Start 32; Stop 56
cagtcaaatcgatttctaacaatgt

SEQ ID NO: 73890 - DNA, 25 bp, Artificial
  probe
  misc_feature (1)..(25): SEQ ID NO: 6379; WAN024B6X_x_at; Start 12; Stop 36
acaggacaaattgatcaggacagtc

SEQ ID NO: 73891 - DNA, 25 bp, Artificial
  probe
  misc_feature (1)..(25): SEQ ID NO: 6379; WAN024B6X_x_at; Start 6; Stop 30
acgagaacaggacaaattgatcagg

SEQ ID NO: 73892 - DNA, 25 bp, Artificial
  probe
  misc_feature (1)..(25): SEQ ID NO: 6379; WAN024B6X_x_at; Start 55; Stop 79
gttttagaagcagaagtgtactatt

SEQ ID NO: 73893 - DNA, 25 bp, Artificial
  probe
  misc_feature (1)..(25): SEQ ID NO: 6379; WAN024B6X_x_at; Start 13; Stop 37
caggacaaattgatcaggacagtca

SEQ ID NO: 73894 - DNA, 25 bp, Artificial
  probe
  misc_feature (1)..(25): SEQ ID NO: 6379; WAN024B6X_x_at; Start 25; Stop 49
atcaggacagtcaaatcgatttcta

SEQ ID NO: 73895 - DNA, 25 bp, Artificial
  probe
  misc_feature (1)..(25): SEQ ID NO: 6379; WAN024B6X_x_at; Start 7; Stop 31
cgagaacaggacaaattgatcagga

SEQ ID NO: 73896 - DNA, 25 bp, Artificial
  probe
  misc_feature (1)..(25): SEQ ID NO: 6379; WAN024B6X_x_at; Start 35; Stop 59
tcaaatcgatttctaacaatgtttt

SEQ ID NO: 73897 - DNA, 25 bp, Artificial
  probe
  misc_feature (1)..(25): SEQ ID NO: 6379; WAN024B6X_x_at; Start 18; Stop 42
caaattgatcaggacagtcaaatcg

SEQ ID NO: 73898 - DNA, 25 bp, Artificial
  probe
  misc_feature (1)..(25): SEQ ID NO: 6379; WAN024B6X_x_at; Start 27; Stop 51
caggacagtcaaatcgatttctaac

SEQ ID NO: 73899 - DNA, 25 bp, Artificial
  probe
  misc_feature (1)..(25): SEQ ID NO: 6379; WAN024B6X_x_at; Start 58; Stop 82
ttagaagcagaagtgtactattcta

SEQ ID NO: 73900 - DNA, 25 bp, Artificial
  probe
  misc_feature (1)..(25): SEQ ID NO: 6379; WAN024B6X_x_at; Start 19; Stop 43
aaattgatcaggacagtcaaatcga

SEQ ID NO: 73901 - DNA, 25 bp, Artificial
  probe
  misc_feature (1)..(25): SEQ ID NO: 6379; WAN024B6X_x_at; Start 52; Stop 76
aatgttttagaagcagaagtgtact

SEQ ID NO: 73902 - DNA, 25 bp, Artificial
  probe
  misc_feature (1)..(25): SEQ ID NO: 6379; WAN024B6X_x_at; Start 28; Stop 52
aggacagtcaaatcgatttctaaca

SEQ ID NO: 73903 - DNA, 25 bp, Artificial
  probe
  misc_feature (1)..(25): SEQ ID NO: 6379; WAN024B6X_x_at; Start 16; Stop 40
gacaaattgatcaggacagtcaaat

SEQ ID NO: 73904 - DNA, 25 bp, Artificial
  probe
  misc_feature (1)..(25): SEQ ID NO: 6379; WAN024B6X_x_at; Start 5; Stop 29
aacgagaacaggacaaattgatcag

SEQ ID NO: 73905 - DNA, 25 bp, Artificial
  probe
  misc_feature (1)..(25): SEQ ID NO: 6379; WAN024B6X_x_at; Start 30; Stop 54
gacagtcaaatcgatttctaacaat

SEQ ID NO: 73906 - DNA, 25 bp, Artificial
  probe
  misc_feature (1)..(25): SEQ ID NO: 6320; WAN024B6Y_s_at; Start 48; Stop 72
tgccgatgacagttcatctgataaa

SEQ ID NO: 73907 - DNA, 25 bp, Artificial
  probe
  misc_feature (1)..(25): SEQ ID NO: 6320; WAN024B6Y_s_at; Start 35; Stop 59
cttctaatgaatctgccgatgacag

SEQ ID NO: 73908 - DNA, 25 bp, Artificial
  probe
  misc_feature (1)..(25): SEQ ID NO: 6320; WAN024B6Y_s_at; Start 28; Stop 52
gcttgttcttctaatgaatctgccg

SEQ ID NO: 73909 - DNA, 25 bp, Artificial
  probe
  misc_feature (1)..(25): SEQ ID NO: 6320; WAN024B6Y_s_at; Start 6; Stop 30
aaagaaatggatgtattatgctgct

SEQ ID NO: 73910 - DNA, 25 bp, Artificial
  probe
  misc_feature (1)..(25): SEQ ID NO: 6320; WAN024B6Y_s_at; Start 33; Stop 57
ttcttctaatgaatctgccgatgac

SEQ ID NO: 73911 - DNA, 25 bp, Artificial
  probe
  misc_feature (1)..(25): SEQ ID NO: 6320; WAN024B6Y_s_at; Start 25; Stop 49
gctgcttgttcttctaatgaatctg

SEQ ID NO: 73912 - DNA, 25 bp, Artificial
  probe
  misc_feature (1)..(25): SEQ ID NO: 6320; WAN024B6Y_s_at; Start 17; Stop 41
tgtattatgctgcttgttcttctaa

SEQ ID NO: 73913 - DNA, 25 bp, Artificial
  probe
  misc_feature (1)..(25): SEQ ID NO: 6320; WAN024B6Y_s_at; Start 40; Stop 64
aatgaatctgccgatgacagttcat

SEQ ID NO: 73914 - DNA, 25 bp, Artificial
  probe
  misc_feature (1)..(25): SEQ ID NO: 6320; WAN024B6Y_s_at; Start 43; Stop 67
gaatctgccgatgacagttcatctg

SEQ ID NO: 73915 - DNA, 25 bp, Artificial
  probe
  misc_feature (1)..(25): SEQ ID NO: 6320; WAN024B6Y_s_at; Start 5; Stop 29
aaaagaaatggatgtattatgctgc

SEQ ID NO: 73916 - DNA, 25 bp, Artificial
  probe
  misc_feature (1)..(25): SEQ ID NO: 6320; WAN024B6Y_s_at; Start 14; Stop 38
ggatgtattatgctgcttgttcttc

SEQ ID NO: 73917 - DNA, 25 bp, Artificial
  probe
  misc_feature (1)..(25): SEQ ID NO: 6320; WAN024B6Y_s_at; Start 22; Stop 46
tatgctgcttgttcttctaatgaat

SEQ ID NO: 73918 - DNA, 25 bp, Artificial
  probe
  misc_feature (1)..(25): SEQ ID NO: 6320; WAN024B6Y_s_at; Start 44; Stop 68
aatctgccgatgacagttcatctga

SEQ ID NO: 73919 - DNA, 25 bp, Artificial
  probe
  misc_feature (1)..(25): SEQ ID NO: 6320; WAN024B6Y_s_at; Start 49; Stop 73
gccgatgacagttcatctgataaag

SEQ ID NO: 73920 - DNA, 25 bp, Artificial
  probe
  misc_feature (1)..(25): SEQ ID NO: 6320; WAN024B6Y_s_at; Start 2; Stop 26
tgaaaaagaaatggatgtattatgc

SEQ ID NO: 73921 - DNA, 25 bp, Artificial
  probe
  misc_feature (1)..(25): SEQ ID NO: 6320; WAN024B6Y_s_at; Start 19; Stop 43
tattatgctgcttgttcttctaatg

SEQ ID NO: 73922 - DNA, 25 bp, Artificial
  probe
  misc_feature (1)..(25): SEQ ID NO: 6320; WAN024B6Y_s_at; Start 52; Stop 76
gatgacagttcatctgataaaggag

SEQ ID NO: 73923 - DNA, 25 bp, Artificial
  probe
  misc_feature (1)..(25): SEQ ID NO: 6320; WAN024B6Y_s_at; Start 27; Stop 51
tgcttgttcttctaatgaatctgcc

SEQ ID NO: 73924 - DNA, 25 bp, Artificial
  probe
  misc_feature (1)..(25): SEQ ID NO: 6320; WAN024B6Y_s_at; Start 31; Stop 55
tgttcttctaatgaatctgccgatg

SEQ ID NO: 73925 - DNA, 25 bp, Artificial
  probe
  misc_feature (1)..(25): SEQ ID NO: 6320; WAN024B6Y_s_at; Start 46; Stop 70
tctgccgatgacagttcatctgata

SEQ ID NO: 73926 - DNA, 25 bp, Artificial
  probe
  misc_feature (1)..(25): SEQ ID NO: 6320; WAN024B6Y_s_at; Start 32; Stop 56
gttcttctaatgaatctgccgatga

SEQ ID NO: 73927 - DNA, 25 bp, Artificial
  probe
  misc_feature (1)..(25): SEQ ID NO: 6320; WAN024B6Y_s_at; Start 11; Stop 35
aatggatgtattatgctgcttgttc

SEQ ID NO: 73928 - DNA, 25 bp, Artificial
  probe
  misc_feature (1)..(25): SEQ ID NO: 6320; WAN024B6Y_s_at; Start 42; Stop 66
tgaatctgccgatgacagttcatct

SEQ ID NO: 73929 - DNA, 25 bp, Artificial
  probe
  misc_feature (1)..(25): SEQ ID NO: 6320; WAN024B6Y_s_at; Start 9; Stop 33
gaaatggatgtattatgctgcttgt

SEQ ID NO: 73930 - DNA, 25 bp, Artificial
  probe
  misc_feature (1)..(25): SEQ ID NO: 6320; WAN024B6Y_s_at; Start 50; Stop 74
ccgatgacagttcatctgataaagg

SEQ ID NO: 73931 - DNA, 25 bp, Artificial
  probe
  misc_feature (1)..(25): SEQ ID NO: 6320; WAN024B6Y_s_at; Start 8; Stop 32
agaaatggatgtattatgctgcttg

SEQ ID NO: 73932 - DNA, 25 bp, Artificial
  probe
  misc_feature (1)..(25): SEQ ID NO: 6320; WAN024B6Y_s_at; Start 51; Stop 75
cgatgacagttcatctgataaagga

SEQ ID NO: 73933 - DNA, 25 bp, Artificial
  probe
  misc_feature (1)..(25): SEQ ID NO: 6320; WAN024B6Y_s_at; Start 34; Stop 58
tcttctaatgaatctgccgatgaca

SEQ ID NO: 73934 - DNA, 25 bp, Artificial
  probe
  misc_feature (1)..(25): SEQ ID NO: 6320; WAN024B6Y_s_at; Start 56; Stop 80
acagttcatctgataaaggagacgg

SEQ ID NO: 73935 - DNA, 25 bp, Artificial
  probe
  misc_feature (1)..(25): SEQ ID NO: 6320; WAN024B6Y_s_at; Start 36; Stop 60
ttctaatgaatctgccgatgacagt

SEQ ID NO: 73936 - DNA, 25 bp, Artificial
  probe
  misc_feature (1)..(25): SEQ ID NO: 6320; WAN024B6Y_s_at; Start 29; Stop 53
cttgttcttctaatgaatctgccga

SEQ ID NO: 73937 - DNA, 25 bp, Artificial
  probe
  misc_feature (1)..(25): SEQ ID NO: 6320; WAN024B6Y_s_at; Start 54; Stop 78
tgacagttcatctgataaaggagac

SEQ ID NO: 73938 - DNA, 25 bp, Artificial
  probe
  misc_feature (1)..(25): SEQ ID NO: 6320; WAN024B6Y_s_at; Start 55; Stop 79
gacagttcatctgataaaggagacg

SEQ ID NO: 73939 - DNA, 25 bp, Artificial
  probe
  misc_feature (1)..(25): SEQ ID NO: 6320; WAN024B6Y_s_at; Start 37; Stop 61
tctaatgaatctgccgatgacagtt

SEQ ID NO: 73940 - DNA, 25 bp, Artificial
  probe
  misc_feature (1)..(25): SEQ ID NO: 7708; WAN024B74_at; Start 241; Stop 265
aagggagagcttactttggagcaag

SEQ ID NO: 73941 - DNA, 25 bp, Artificial
  probe
  misc_feature (1)..(25): SEQ ID NO: 7708; WAN024B74_at; Start 142; Stop 166
tggctgccaagaggcttgttatatc

SEQ ID NO: 73942 - DNA, 25 bp, Artificial
  probe
  misc_feature (1)..(25): SEQ ID NO: 7708; WAN024B74_at; Start 252; Stop 276
tactttggagcaagaattagccctg

SEQ ID NO: 73943 - DNA, 25 bp, Artificial
  probe
  misc_feature (1)..(25): SEQ ID NO: 7708; WAN024B74_at; Start 228; Stop 252
tagagtagcatttaagggagagctt

SEQ ID NO: 73944 - DNA, 25 bp, Artificial
  probe
  misc_feature (1)..(25): SEQ ID NO: 7708; WAN024B74_at; Start 178; Stop 202
aaatttaagcaggtagttgtggagg

SEQ ID NO: 73945 - DNA, 25 bp, Artificial
  probe
  misc_feature (1)..(25): SEQ ID NO: 7708; WAN024B74_at; Start 149; Stop 173
caagaggcttgttatatccattgca

SEQ ID NO: 73946 - DNA, 25 bp, Artificial
  probe
  misc_feature (1)..(25): SEQ ID NO: 7708; WAN024B74_at; Start 236; Stop 260
catttaagggagagcttactttgga

SEQ ID NO: 73947 - DNA, 25 bp, Artificial
  probe
  misc_feature (1)..(25): SEQ ID NO: 7708; WAN024B74_at; Start 51; Stop 75
cattttattatatttaaagcaggct

SEQ ID NO: 73948 - DNA, 25 bp, Artificial
  probe
  misc_feature (1)..(25): SEQ ID NO: 7708; WAN024B74_at; Start 223; Stop 247
tctattagagtagcatttaagggag

SEQ ID NO: 73949 - DNA, 25 bp, Artificial
  probe
  misc_feature (1)..(25): SEQ ID NO: 7708; WAN024B74_at; Start 144; Stop 168
gctgccaagaggcttgttatatcca

SEQ ID NO: 73950 - DNA, 25 bp, Artificial
  probe
  misc_feature (1)..(25): SEQ ID NO: 7708; WAN024B74_at; Start 140; Stop 164
tatggctgccaagaggcttgttata

SEQ ID NO: 73951 - DNA, 25 bp, Artificial
  probe
  misc_feature (1)..(25): SEQ ID NO: 7708; WAN024B74_at; Start 310; Stop 334
catgcgggacaggttttggaaagat

SEQ ID NO: 73952 - DNA, 25 bp, Artificial
  probe
  misc_feature (1)..(25): SEQ ID NO: 7708; WAN024B74_at; Start 309; Stop 333
tcatgcgggacaggttttggaaaga

SEQ ID NO: 73953 - DNA, 25 bp, Artificial
  probe
  misc_feature (1)..(25): SEQ ID NO: 7708; WAN024B74_at; Start 150; Stop 174
aagaggcttgttatatccattgcaa

SEQ ID NO: 73954 - DNA, 25 bp, Artificial
  probe
  misc_feature (1)..(25): SEQ ID NO: 7708; WAN024B74_at; Start 233; Stop 257
tagcatttaagggagagcttacttt

SEQ ID NO: 73955 - DNA, 25 bp, Artificial
  probe
  misc_feature (1)..(25): SEQ ID NO: 7708; WAN024B74_at; Start 306; Stop 330
acttcatgcgggacaggttttggaa

SEQ ID NO: 73956 - DNA, 25 bp, Artificial
  probe
  misc_feature (1)..(25): SEQ ID NO: 7708; WAN024B74_at; Start 230; Stop 254
gagtagcatttaagggagagcttac

SEQ ID NO: 73957 - DNA, 25 bp, Artificial
  probe
  misc_feature (1)..(25): SEQ ID NO: 7708; WAN024B74_at; Start 238; Stop 262
tttaagggagagcttactttggagc

SEQ ID NO: 73958 - DNA, 25 bp, Artificial
  probe
  misc_feature (1)..(25): SEQ ID NO: 7708; WAN024B74_at; Start 243; Stop 267
gggagagcttactttggagcaagaa

SEQ ID NO: 73959 - DNA, 25 bp, Artificial
  probe
  misc_feature (1)..(25): SEQ ID NO: 7708; WAN024B74_at; Start 147; Stop 171
gccaagaggcttgttatatccattg

SEQ ID NO: 73960 - DNA, 25 bp, Artificial
  probe
  misc_feature (1)..(25): SEQ ID NO: 7708; WAN024B74_at; Start 307; Stop 331
cttcatgcgggacaggttttggaaa

SEQ ID NO: 73961 - DNA, 25 bp, Artificial
  probe
  misc_feature (1)..(25): SEQ ID NO: 7708; WAN024B74_at; Start 240; Stop 264
taagggagagcttactttggagcaa

SEQ ID NO: 73962 - DNA, 25 bp, Artificial
  probe
  misc_feature (1)..(25): SEQ ID NO: 7708; WAN024B74_at; Start 133; Stop 157
tattatttatggctgccaagaggct

SEQ ID NO: 73963 - DNA, 25 bp, Artificial
  probe
  misc_feature (1)..(25): SEQ ID NO: 7708; WAN024B74_at; Start 221; Stop 245
ggtctattagagtagcatttaaggg

SEQ ID NO: 73964 - DNA, 25 bp, Artificial
  probe
  misc_feature (1)..(25): SEQ ID NO: 7708; WAN024B74_at; Start 152; Stop 176
gaggcttgttatatccattgcaaga

SEQ ID NO: 73965 - DNA, 25 bp, Artificial
  probe
  misc_feature (1)..(25): SEQ ID NO: 7708; WAN024B74_at; Start 247; Stop 271
gagcttactttggagcaagaattag

SEQ ID NO: 73966 - DNA, 25 bp, Artificial
  probe
  misc_feature (1)..(25): SEQ ID NO: 7708; WAN024B74_at; Start 250; Stop 274
cttactttggagcaagaattagccc

SEQ ID NO: 73967 - DNA, 25 bp, Artificial
  probe
  misc_feature (1)..(25): SEQ ID NO: 7708; WAN024B74_at; Start 194; Stop 218
ttgtggaggataggagaaaagtaca

SEQ ID NO: 73968 - DNA, 25 bp, Artificial
  probe
  misc_feature (1)..(25): SEQ ID NO: 7708; WAN024B74_at; Start 226; Stop 250
attagagtagcatttaagggagagc

SEQ ID NO: 73969 - DNA, 25 bp, Artificial
  probe
  misc_feature (1)..(25): SEQ ID NO: 7708; WAN024B74_at; Start 245; Stop 269
gagagcttactttggagcaagaatt

SEQ ID NO: 73970 - DNA, 25 bp, Artificial
  probe
  misc_feature (1)..(25): SEQ ID NO: 7708; WAN024B74_at; Start 217; Stop 241
caaaggtctattagagtagcattta

SEQ ID NO: 73971 - DNA, 25 bp, Artificial
  probe
  misc_feature (1)..(25): SEQ ID NO: 7708; WAN024B74_at; Start 181; Stop 205
tttaagcaggtagttgtggaggata

SEQ ID NO: 73972 - DNA, 25 bp, Artificial
  probe
  misc_feature (1)..(25): SEQ ID NO: 7708; WAN024B74_at; Start 138; Stop 162
tttatggctgccaagaggcttgtta

SEQ ID NO: 73973 - DNA, 25 bp, Artificial
  probe
  misc_feature (1)..(25): SEQ ID NO: 7708; WAN024B74_at; Start 311; Stop 335
atgcgggacaggttttggaaagatc

SEQ ID NO: 73974 - DNA, 25 bp, Artificial
  probe
  misc_feature (1)..(25): SEQ ID NO: 41; WAN024B76_x_at; Start 24; Stop 48
tgagttaatcgctccaatgacttac

SEQ ID NO: 73975 - DNA, 25 bp, Artificial
  probe
  misc_feature (1)..(25): SEQ ID NO: 41; WAN024B76_x_at; Start 37; Stop 61
ccaatgacttacgaagagacgatga

SEQ ID NO: 73976 - DNA, 25 bp, Artificial
  probe
  misc_feature (1)..(25): SEQ ID NO: 41; WAN024B76_x_at; Start 53; Stop 77
agacgatgacgagcgacttttttga

SEQ ID NO: 73977 - DNA, 25 bp, Artificial
  probe
  misc_feature (1)..(25): SEQ ID NO: 41; WAN024B76_x_at; Start 57; Stop 81
gatgacgagcgacttttttgaagct

SEQ ID NO: 73978 - DNA, 25 bp, Artificial
  probe
  misc_feature (1)..(25): SEQ ID NO: 41; WAN024B76_x_at; Start 13; Stop 37
ctaaccaatggtgagttaatcgctc

SEQ ID NO: 73979 - DNA, 25 bp, Artificial
  probe
  misc_feature (1)..(25): SEQ ID NO: 41; WAN024B76_x_at; Start 16; Stop 40
accaatggtgagttaatcgctccaa

SEQ ID NO: 73980 - DNA, 25 bp, Artificial
  probe
  misc_feature (1)..(25): SEQ ID NO: 41; WAN024B76_x_at; Start 26; Stop 50
agttaatcgctccaatgacttacga

SEQ ID NO: 73981 - DNA, 25 bp, Artificial
  probe
  misc_feature (1)..(25): SEQ ID NO: 41; WAN024B76_x_at; Start 39; Stop 63
aatgacttacgaagagacgatgacg

SEQ ID NO: 73982 - DNA, 25 bp, Artificial
  probe
  misc_feature (1)..(25): SEQ ID NO: 41; WAN024B76_x_at; Start 9; Stop 33
aggtctaaccaatggtgagttaatc

SEQ ID NO: 73983 - DNA, 25 bp, Artificial
  probe
  misc_feature (1)..(25): SEQ ID NO: 41; WAN024B76_x_at; Start 33; Stop 57
cgctccaatgacttacgaagagacg

SEQ ID NO: 73984 - DNA, 25 bp, Artificial
  probe
  misc_feature (1)..(25): SEQ ID NO: 41; WAN024B76_x_at; Start 14; Stop 38
taaccaatggtgagttaatcgctcc

SEQ ID NO: 73985 - DNA, 25 bp, Artificial
  probe
  misc_feature (1)..(25): SEQ ID NO: 41; WAN024B76_x_at; Start 34; Stop 58
gctccaatgacttacgaagagacga

SEQ ID NO: 73986 - DNA, 25 bp, Artificial
  probe
  misc_feature (1)..(25): SEQ ID NO: 41; WAN024B76_x_at; Start 27; Stop 51
gttaatcgctccaatgacttacgaa

SEQ ID NO: 73987 - DNA, 25 bp, Artificial
  probe
  misc_feature (1)..(25): SEQ ID NO: 41; WAN024B76_x_at; Start 17; Stop 41
ccaatggtgagttaatcgctccaat

SEQ ID NO: 73988 - DNA, 25 bp, Artificial
  probe
  misc_feature (1)..(25): SEQ ID NO: 41; WAN024B76_x_at; Start 21; Stop 45
tggtgagttaatcgctccaatgact

SEQ ID NO: 73989 - DNA, 25 bp, Artificial
  probe
  misc_feature (1)..(25): SEQ ID NO: 41; WAN024B76_x_at; Start 40; Stop 64
atgacttacgaagagacgatgacga

SEQ ID NO: 73990 - DNA, 25 bp, Artificial
  probe
  misc_feature (1)..(25): SEQ ID NO: 41; WAN024B76_x_at; Start 32; Stop 56
tcgctccaatgacttacgaagagac

SEQ ID NO: 73991 - DNA, 25 bp, Artificial
  probe
  misc_feature (1)..(25): SEQ ID NO: 41; WAN024B76_x_at; Start 11; Stop 35
gtctaaccaatggtgagttaatcgc

SEQ ID NO: 73992 - DNA, 25 bp, Artificial
  probe
  misc_feature (1)..(25): SEQ ID NO: 41; WAN024B76_x_at; Start 44; Stop 68
cttacgaagagacgatgacgagcga

SEQ ID NO: 73993 - DNA, 25 bp, Artificial
  probe
  misc_feature (1)..(25): SEQ ID NO: 41; WAN024B76_x_at; Start 23; Stop 47
gtgagttaatcgctccaatgactta

SEQ ID NO: 73994 - DNA, 25 bp, Artificial
  probe
  misc_feature (1)..(25): SEQ ID NO: 41; WAN024B76_x_at; Start 10; Stop 34
ggtctaaccaatggtgagttaatcg

SEQ ID NO: 73995 - DNA, 25 bp, Artificial
  probe
  misc_feature (1)..(25): SEQ ID NO: 41; WAN024B76_x_at; Start 12; Stop 36
tctaaccaatggtgagttaatcgct

SEQ ID NO: 73996 - DNA, 25 bp, Artificial
  probe
  misc_feature (1)..(25): SEQ ID NO: 41; WAN024B76_x_at; Start 46; Stop 70
tacgaagagacgatgacgagcgact

SEQ ID NO: 73997 - DNA, 25 bp, Artificial
  probe
  misc_feature (1)..(25): SEQ ID NO: 41; WAN024B76_x_at; Start 19; Stop 43
aatggtgagttaatcgctccaatga

SEQ ID NO: 73998 - DNA, 25 bp, Artificial
  probe
  misc_feature (1)..(25): SEQ ID NO: 41; WAN024B76_x_at; Start 15; Stop 39
aaccaatggtgagttaatcgctcca

SEQ ID NO: 73999 - DNA, 25 bp, Artificial
  probe
  misc_feature (1)..(25): SEQ ID NO: 41; WAN024B76_x_at; Start 18; Stop 42
caatggtgagttaatcgctccaatg

SEQ ID NO: 74000 - DNA, 25 bp, Artificial
  probe
  misc_feature (1)..(25): SEQ ID NO: 41; WAN024B76_x_at; Start 52; Stop 76
gagacgatgacgagcgacttttttg

SEQ ID NO: 74001 - DNA, 25 bp, Artificial
  probe
  misc_feature (1)..(25): SEQ ID NO: 41; WAN024B76_x_at; Start 35; Stop 59
ctccaatgacttacgaagagacgat

SEQ ID NO: 74002 - DNA, 25 bp, Artificial
  probe
  misc_feature (1)..(25): SEQ ID NO: 41; WAN024B76_x_at; Start 36; Stop 60
tccaatgacttacgaagagacgatg

SEQ ID NO: 74003 - DNA, 25 bp, Artificial
  probe
  misc_feature (1)..(25): SEQ ID NO: 41; WAN024B76_x_at; Start 20; Stop 44
atggtgagttaatcgctccaatgac

SEQ ID NO: 74004 - DNA, 25 bp, Artificial
  probe
  misc_feature (1)..(25): SEQ ID NO: 41; WAN024B76_x_at; Start 49; Stop 73
gaagagacgatgacgagcgactttt

SEQ ID NO: 74005 - DNA, 25 bp, Artificial
  probe
  misc_feature (1)..(25): SEQ ID NO: 41; WAN024B76_x_at; Start 38; Stop 62
caatgacttacgaagagacgatgac

SEQ ID NO: 74006 - DNA, 25 bp, Artificial
  probe
  misc_feature (1)..(25): SEQ ID NO: 41; WAN024B76_x_at; Start 41; Stop 65
tgacttacgaagagacgatgacgag

SEQ ID NO: 74007 - DNA, 25 bp, Artificial
  probe
  misc_feature (1)..(25): SEQ ID NO: 41; WAN024B76_x_at; Start 25; Stop 49
gagttaatcgctccaatgacttacg

SEQ ID NO: 74008 - DNA, 25 bp, Artificial
  probe
  misc_feature (1)..(25): SEQ ID NO: 7659; WAN024B77_x_at; Start 12; Stop 36
gctaacaaatggtgagttaattgct

SEQ ID NO: 74009 - DNA, 25 bp, Artificial
  probe
  misc_feature (1)..(25): SEQ ID NO: 7659; WAN024B77_x_at; Start 13; Stop 37
ctaacaaatggtgagttaattgctc

SEQ ID NO: 74010 - DNA, 25 bp, Artificial
  probe
  misc_feature (1)..(25): SEQ ID NO: 7659; WAN024B77_x_at; Start 26; Stop 50
agttaattgctccaatgacttacga

SEQ ID NO: 74011 - DNA, 25 bp, Artificial
  probe
  misc_feature (1)..(25): SEQ ID NO: 7659; WAN024B77_x_at; Start 60; Stop 84
gacgagcgacttttttgaagcttgg

SEQ ID NO: 74012 - DNA, 25 bp, Artificial
  probe
  misc_feature (1)..(25): SEQ ID NO: 7659; WAN024B77_x_at; Start 9; Stop 33
agggctaacaaatggtgagttaatt

SEQ ID NO: 74013 - DNA, 25 bp, Artificial
  probe
  misc_feature (1)..(25): SEQ ID NO: 7659; WAN024B77_x_at; Start 75; Stop 99
tgaagcttggtttcagaagtttttc

SEQ ID NO: 74014 - DNA, 25 bp, Artificial
  probe
  misc_feature (1)..(25): SEQ ID NO: 7659; WAN024B77_x_at; Start 27; Stop 51
gttaattgctccaatgacttacgaa

SEQ ID NO: 74015 - DNA, 25 bp, Artificial
  probe
  misc_feature (1)..(25): SEQ ID NO: 7659; WAN024B77_x_at; Start 15; Stop 39
aacaaatggtgagttaattgctcca

SEQ ID NO: 74016 - DNA, 25 bp, Artificial
  probe
  misc_feature (1)..(25): SEQ ID NO: 7659; WAN024B77_x_at; Start 113; Stop 137
ccataccatcggttattatagtaaa

SEQ ID NO: 74017 - DNA, 25 bp, Artificial
  probe
  misc_feature (1)..(25): SEQ ID NO: 7659; WAN024B77_x_at; Start 23; Stop 47
gtgagttaattgctccaatgactta

SEQ ID NO: 74018 - DNA, 25 bp, Artificial
  probe
  misc_feature (1)..(25): SEQ ID NO: 7659; WAN024B77_x_at; Start 11; Stop 35
ggctaacaaatggtgagttaattgc

SEQ ID NO: 74019 - DNA, 25 bp, Artificial
  probe
  misc_feature (1)..(25): SEQ ID NO: 7659; WAN024B77_x_at; Start 30; Stop 54
aattgctccaatgacttacgaagag

SEQ ID NO: 74020 - DNA, 25 bp, Artificial
  probe
  misc_feature (1)..(25): SEQ ID NO: 7659; WAN024B77_x_at; Start 22; Stop 46
ggtgagttaattgctccaatgactt

SEQ ID NO: 74021 - DNA, 25 bp, Artificial
  probe
  misc_feature (1)..(25): SEQ ID NO: 7659; WAN024B77_x_at; Start 112; Stop 136
accataccatcggttattatagtaa

SEQ ID NO: 74022 - DNA, 25 bp, Artificial
  probe
  misc_feature (1)..(25): SEQ ID NO: 7659; WAN024B77_x_at; Start 19; Stop 43
aatggtgagttaattgctccaatga

SEQ ID NO: 74023 - DNA, 25 bp, Artificial
  probe
  misc_feature (1)..(25): SEQ ID NO: 7659; WAN024B77_x_at; Start 33; Stop 57
tgctccaatgacttacgaagagacg

SEQ ID NO: 74024 - DNA, 25 bp, Artificial
  probe
  misc_feature (1)..(25): SEQ ID NO: 7659; WAN024B77_x_at; Start 18; Stop 42
aaatggtgagttaattgctccaatg

SEQ ID NO: 74025 - DNA, 25 bp, Artificial
  probe
  misc_feature (1)..(25): SEQ ID NO: 7659; WAN024B77_x_at; Start 99; Stop 123
cttaccaacattaaccataccatcg

SEQ ID NO: 74026 - DNA, 25 bp, Artificial
  probe
  misc_feature (1)..(25): SEQ ID NO: 7659; WAN024B77_x_at; Start 87; Stop 111
tcagaagtttttcttaccaacatta

SEQ ID NO: 74027 - DNA, 25 bp, Artificial
  probe
  misc_feature (1)..(25): SEQ ID NO: 7659; WAN024B77_x_at; Start 96; Stop 120
tttcttaccaacattaaccatacca

SEQ ID NO: 74028 - DNA, 25 bp, Artificial
  probe
  misc_feature (1)..(25): SEQ ID NO: 7659; WAN024B77_x_at; Start 110; Stop 134
taaccataccatcggttattatagt

SEQ ID NO: 74029 - DNA, 25 bp, Artificial
  probe
  misc_feature (1)..(25): SEQ ID NO: 7659; WAN024B77_x_at; Start 10; Stop 34
gggctaacaaatggtgagttaattg

SEQ ID NO: 74030 - DNA, 25 bp, Artificial
  probe
  misc_feature (1)..(25): SEQ ID NO: 7659; WAN024B77_x_at; Start 29; Stop 53
taattgctccaatgacttacgaaga

SEQ ID NO: 74031 - DNA, 25 bp, Artificial
  probe
  misc_feature (1)..(25): SEQ ID NO: 7659; WAN024B77_x_at; Start 100; Stop 124
ttaccaacattaaccataccatcgg

SEQ ID NO: 74032 - DNA, 25 bp, Artificial
  probe
  misc_feature (1)..(25): SEQ ID NO: 7659; WAN024B77_x_at; Start 97; Stop 121
ttcttaccaacattaaccataccat

SEQ ID NO: 74033 - DNA, 25 bp, Artificial
  probe
  misc_feature (1)..(25): SEQ ID NO: 7659; WAN024B77_x_at; Start 41; Stop 65
tgacttacgaagagacgatgacgag

SEQ ID NO: 74034 - DNA, 25 bp, Artificial
  probe
  misc_feature (1)..(25): SEQ ID NO: 7659; WAN024B77_x_at; Start 109; Stop 133
ttaaccataccatcggttattatag

SEQ ID NO: 74035 - DNA, 25 bp, Artificial
  probe
  misc_feature (1)..(25): SEQ ID NO: 7659; WAN024B77_x_at; Start 111; Stop 135
aaccataccatcggttattatagta

SEQ ID NO: 74036 - DNA, 25 bp, Artificial
  probe
  misc_feature (1)..(25): SEQ ID NO: 7659; WAN024B77_x_at; Start 104; Stop 128
caacattaaccataccatcggttat

SEQ ID NO: 74037 - DNA, 25 bp, Artificial
  probe
  misc_feature (1)..(25): SEQ ID NO: 7659; WAN024B77_x_at; Start 103; Stop 127
ccaacattaaccataccatcggtta

SEQ ID NO: 74038 - DNA, 25 bp, Artificial
  probe
  misc_feature (1)..(25): SEQ ID NO: 7659; WAN024B77_x_at; Start 101; Stop 125
taccaacattaaccataccatcggt

SEQ ID NO: 74039 - DNA, 25 bp, Artificial
  probe
  misc_feature (1)..(25): SEQ ID NO: 7659; WAN024B77_x_at; Start 14; Stop 38
taacaaatggtgagttaattgctcc

SEQ ID NO: 74040 - DNA, 25 bp, Artificial
  probe
  misc_feature (1)..(25): SEQ ID NO: 7659; WAN024B77_x_at; Start 98; Stop 122
tcttaccaacattaaccataccatc

SEQ ID NO: 74041 - DNA, 25 bp, Artificial
  probe
  misc_feature (1)..(25): SEQ ID NO: 7659; WAN024B77_x_at; Start 114; Stop 138
cataccatcggttattatagtaaaa

SEQ ID NO: 74042 - DNA, 25 bp, Artificial
  probe
  misc_feature (1)..(25): SEQ ID NO: 7234; WAN024B78_at; Start 55; Stop 79
aagtatggtttcagaagtttctctt

SEQ ID NO: 74043 - DNA, 25 bp, Artificial
  probe
  misc_feature (1)..(25): SEQ ID NO: 7234; WAN024B78_at; Start 57; Stop 81
gtatggtttcagaagtttctcttac

SEQ ID NO: 74044 - DNA, 25 bp, Artificial
  probe
  misc_feature (1)..(25): SEQ ID NO: 7234; WAN024B78_at; Start 56; Stop 80
agtatggtttcagaagtttctctta

SEQ ID NO: 74045 - DNA, 25 bp, Artificial
  probe
  misc_feature (1)..(25): SEQ ID NO: 7234; WAN024B78_at; Start 52; Stop 76
ttgaagtatggtttcagaagtttct

SEQ ID NO: 74046 - DNA, 25 bp, Artificial
  probe
  misc_feature (1)..(25): SEQ ID NO: 7234; WAN024B78_at; Start 54; Stop 78
gaagtatggtttcagaagtttctct

SEQ ID NO: 74047 - DNA, 25 bp, Artificial
  probe
  misc_feature (1)..(25): SEQ ID NO: 7234; WAN024B78_at; Start 58; Stop 82
tatggtttcagaagtttctcttacc

SEQ ID NO: 74048 - DNA, 25 bp, Artificial
  probe
  misc_feature (1)..(25): SEQ ID NO: 7234; WAN024B78_at; Start 53; Stop 77
tgaagtatggtttcagaagtttctc

SEQ ID NO: 74049 - DNA, 25 bp, Artificial
  probe
  misc_feature (1)..(25): SEQ ID NO: 7234; WAN024B78_at; Start 51; Stop 75
tttgaagtatggtttcagaagtttc

SEQ ID NO: 74050 - DNA, 25 bp, Artificial
  probe
  misc_feature (1)..(25): SEQ ID NO: 40; WAN024B7A_x_at; Start 8; Stop 32
caggtctaacaaatggtgagttaat

SEQ ID NO: 74051 - DNA, 25 bp, Artificial
  probe
  misc_feature (1)..(25): SEQ ID NO: 40; WAN024B7A_x_at; Start 37; Stop 61
ccaatgacttacgaagagacgatga

SEQ ID NO: 74052 - DNA, 25 bp, Artificial
  probe
  misc_feature (1)..(25): SEQ ID NO: 40; WAN024B7A_x_at; Start 53; Stop 77
agacgatgacgagcgacttttttga

SEQ ID NO: 74053 - DNA, 25 bp, Artificial
  probe
  misc_feature (1)..(25): SEQ ID NO: 40; WAN024B7A_x_at; Start 13; Stop 37
ctaacaaatggtgagttaatcgctc

SEQ ID NO: 74054 - DNA, 25 bp, Artificial
  probe
  misc_feature (1)..(25): SEQ ID NO: 40; WAN024B7A_x_at; Start 24; Stop 48
tgagttaatcgctccaatgacttac

SEQ ID NO: 74055 - DNA, 25 bp, Artificial
  probe
  misc_feature (1)..(25): SEQ ID NO: 40; WAN024B7A_x_at; Start 26; Stop 50
agttaatcgctccaatgacttacga

SEQ ID NO: 74056 - DNA, 25 bp, Artificial
  probe
  misc_feature (1)..(25): SEQ ID NO: 40; WAN024B7A_x_at; Start 39; Stop 63
aatgacttacgaagagacgatgacg

SEQ ID NO: 74057 - DNA, 25 bp, Artificial
  probe
  misc_feature (1)..(25): SEQ ID NO: 40; WAN024B7A_x_at; Start 9; Stop 33
aggtctaacaaatggtgagttaatc

SEQ ID NO: 74058 - DNA, 25 bp, Artificial
  probe
  misc_feature (1)..(25): SEQ ID NO: 40; WAN024B7A_x_at; Start 33; Stop 57
cgctccaatgacttacgaagagacg

SEQ ID NO: 74059 - DNA, 25 bp, Artificial
  probe
  misc_feature (1)..(25): SEQ ID NO: 40; WAN024B7A_x_at; Start 34; Stop 58
gctccaatgacttacgaagagacga

SEQ ID NO: 74060 - DNA, 25 bp, Artificial
  probe
  misc_feature (1)..(25): SEQ ID NO: 40; WAN024B7A_x_at; Start 27; Stop 51
gttaatcgctccaatgacttacgaa

SEQ ID NO: 74061 - DNA, 25 bp, Artificial
  probe
  misc_feature (1)..(25): SEQ ID NO: 40; WAN024B7A_x_at; Start 40; Stop 64
atgacttacgaagagacgatgacga

SEQ ID NO: 74062 - DNA, 25 bp, Artificial
  probe
  misc_feature (1)..(25): SEQ ID NO: 40; WAN024B7A_x_at; Start 21; Stop 45
tggtgagttaatcgctccaatgact

SEQ ID NO: 74063 - DNA, 25 bp, Artificial
  probe
  misc_feature (1)..(25): SEQ ID NO: 40; WAN024B7A_x_at; Start 15; Stop 39
aacaaatggtgagttaatcgctcca

SEQ ID NO: 74064 - DNA, 25 bp, Artificial
  probe
  misc_feature (1)..(25): SEQ ID NO: 40; WAN024B7A_x_at; Start 32; Stop 56
tcgctccaatgacttacgaagagac

SEQ ID NO: 74065 - DNA, 25 bp, Artificial
  probe
  misc_feature (1)..(25): SEQ ID NO: 40; WAN024B7A_x_at; Start 11; Stop 35
gtctaacaaatggtgagttaatcgc

SEQ ID NO: 74066 - DNA, 25 bp, Artificial
  probe
  misc_feature (1)..(25): SEQ ID NO: 40; WAN024B7A_x_at; Start 23; Stop 47
gtgagttaatcgctccaatgactta

SEQ ID NO: 74067 - DNA, 25 bp, Artificial
  probe
  misc_feature (1)..(25): SEQ ID NO: 40; WAN024B7A_x_at; Start 10; Stop 34
ggtctaacaaatggtgagttaatcg

SEQ ID NO: 74068 - DNA, 25 bp, Artificial
  probe
  misc_feature (1)..(25): SEQ ID NO: 40; WAN024B7A_x_at; Start 17; Stop 41
caaatggtgagttaatcgctccaat

SEQ ID NO: 74069 - DNA, 25 bp, Artificial
  probe
  misc_feature (1)..(25): SEQ ID NO: 40; WAN024B7A_x_at; Start 12; Stop 36
tctaacaaatggtgagttaatcgct

SEQ ID NO: 74070 - DNA, 25 bp, Artificial
  probe
  misc_feature (1)..(25): SEQ ID NO: 40; WAN024B7A_x_at; Start 46; Stop 70
tacgaagagacgatgacgagcgact

SEQ ID NO: 74071 - DNA, 25 bp, Artificial
  probe
  misc_feature (1)..(25): SEQ ID NO: 40; WAN024B7A_x_at; Start 19; Stop 43
aatggtgagttaatcgctccaatga

SEQ ID NO: 74072 - DNA, 25 bp, Artificial
  probe
  misc_feature (1)..(25): SEQ ID NO: 40; WAN024B7A_x_at; Start 16; Stop 40
acaaatggtgagttaatcgctccaa

SEQ ID NO: 74073 - DNA, 25 bp, Artificial
  probe
  misc_feature (1)..(25): SEQ ID NO: 40; WAN024B7A_x_at; Start 18; Stop 42
aaatggtgagttaatcgctccaatg

SEQ ID NO: 74074 - DNA, 25 bp, Artificial
  probe
  misc_feature (1)..(25): SEQ ID NO: 40; WAN024B7A_x_at; Start 6; Stop 30
tgcaggtctaacaaatggtgagtta

SEQ ID NO: 74075 - DNA, 25 bp, Artificial
  probe
  misc_feature (1)..(25): SEQ ID NO: 40; WAN024B7A_x_at; Start 35; Stop 59
ctccaatgacttacgaagagacgat

SEQ ID NO: 74076 - DNA, 25 bp, Artificial
  probe
  misc_feature (1)..(25): SEQ ID NO: 40; WAN024B7A_x_at; Start 36; Stop 60
tccaatgacttacgaagagacgatg

SEQ ID NO: 74077 - DNA, 25 bp, Artificial
  probe
  misc_feature (1)..(25): SEQ ID NO: 40; WAN024B7A_x_at; Start 20; Stop 44
atggtgagttaatcgctccaatgac

SEQ ID NO: 74078 - DNA, 25 bp, Artificial
  probe
  misc_feature (1)..(25): SEQ ID NO: 40; WAN024B7A_x_at; Start 49; Stop 73
gaagagacgatgacgagcgactttt

SEQ ID NO: 74079 - DNA, 25 bp, Artificial
  probe
  misc_feature (1)..(25): SEQ ID NO: 40; WAN024B7A_x_at; Start 38; Stop 62
caatgacttacgaagagacgatgac

SEQ ID NO: 74080 - DNA, 25 bp, Artificial
  probe
  misc_feature (1)..(25): SEQ ID NO: 40; WAN024B7A_x_at; Start 41; Stop 65
tgacttacgaagagacgatgacgag

SEQ ID NO: 74081 - DNA, 25 bp, Artificial
  probe
  misc_feature (1)..(25): SEQ ID NO: 40; WAN024B7A_x_at; Start 7; Stop 31
gcaggtctaacaaatggtgagttaa

SEQ ID NO: 74082 - DNA, 25 bp, Artificial
  probe
  misc_feature (1)..(25): SEQ ID NO: 40; WAN024B7A_x_at; Start 25; Stop 49
gagttaatcgctccaatgacttacg

SEQ ID NO: 74083 - DNA, 25 bp, Artificial
  probe
  misc_feature (1)..(25): SEQ ID NO: 40; WAN024B7A_x_at; Start 14; Stop 38
taacaaatggtgagttaatcgctcc

SEQ ID NO: 74084 - DNA, 25 bp, Artificial
  probe
  misc_feature (1)..(25): SEQ ID NO: 7531; WAN024B7C_x_at; Start 22; Stop 46
gaagtagaagtgtactattctagtt

SEQ ID NO: 74085 - DNA, 25 bp, Artificial
  probe
  misc_feature (1)..(25): SEQ ID NO: 7531; WAN024B7C_x_at; Start 15; Stop 39
tgttttagaagtagaagtgtactat

SEQ ID NO: 74086 - DNA, 25 bp, Artificial
  probe
  misc_feature (1)..(25): SEQ ID NO: 7531; WAN024B7C_x_at; Start 47; Stop 71
tcaatctactatacaataagagaac

SEQ ID NO: 74087 - DNA, 25 bp, Artificial
  probe
  misc_feature (1)..(25): SEQ ID NO: 7531; WAN024B7C_x_at; Start 26; Stop 50
tagaagtgtactattctagtttcaa

SEQ ID NO: 74088 - DNA, 25 bp, Artificial
  probe
  misc_feature (1)..(25): SEQ ID NO: 7531; WAN024B7C_x_at; Start 32; Stop 56
tgtactattctagtttcaatctact

SEQ ID NO: 74089 - DNA, 25 bp, Artificial
  probe
  misc_feature (1)..(25): SEQ ID NO: 7531; WAN024B7C_x_at; Start 54; Stop 78
actatacaataagagaacgactcaa

SEQ ID NO: 74090 - DNA, 25 bp, Artificial
  probe
  misc_feature (1)..(25): SEQ ID NO: 7531; WAN024B7C_x_at; Start 24; Stop 48
agtagaagtgtactattctagtttc

SEQ ID NO: 74091 - DNA, 25 bp, Artificial
  probe
  misc_feature (1)..(25): SEQ ID NO: 7531; WAN024B7C_x_at; Start 53; Stop 77
tactatacaataagagaacgactca

SEQ ID NO: 74092 - DNA, 25 bp, Artificial
  probe
  misc_feature (1)..(25): SEQ ID NO: 7531; WAN024B7C_x_at; Start 50; Stop 74
atctactatacaataagagaacgac

SEQ ID NO: 74093 - DNA, 25 bp, Artificial
  probe
  misc_feature (1)..(25): SEQ ID NO: 7531; WAN024B7C_x_at; Start 2; Stop 26
tgatttctaacaatgttttagaagt

SEQ ID NO: 74094 - DNA, 25 bp, Artificial
  probe
  misc_feature (1)..(25): SEQ ID NO: 7531; WAN024B7C_x_at; Start 23; Stop 47
aagtagaagtgtactattctagttt

SEQ ID NO: 74095 - DNA, 25 bp, Artificial
  probe
  misc_feature (1)..(25): SEQ ID NO: 7531; WAN024B7C_x_at; Start 51; Stop 75
tctactatacaataagagaacgact

SEQ ID NO: 74096 - DNA, 25 bp, Artificial
  probe
  misc_feature (1)..(25): SEQ ID NO: 7531; WAN024B7C_x_at; Start 20; Stop 44
tagaagtagaagtgtactattctag

SEQ ID NO: 74097 - DNA, 25 bp, Artificial
  probe
  misc_feature (1)..(25): SEQ ID NO: 7531; WAN024B7C_x_at; Start 17; Stop 41
ttttagaagtagaagtgtactattc

SEQ ID NO: 74098 - DNA, 25 bp, Artificial
  probe
  misc_feature (1)..(25): SEQ ID NO: 7531; WAN024B7C_x_at; Start 18; Stop 42
tttagaagtagaagtgtactattct

SEQ ID NO: 74099 - DNA, 25 bp, Artificial
  probe
  misc_feature (1)..(25): SEQ ID NO: 7531; WAN024B7C_x_at; Start 1; Stop 25
ttgatttctaacaatgttttagaag

SEQ ID NO: 74100 - DNA, 25 bp, Artificial
  probe
  misc_feature (1)..(25): SEQ ID NO: 7531; WAN024B7C_x_at; Start 21; Stop 45
agaagtagaagtgtactattctagt

SEQ ID NO: 74101 - DNA, 25 bp, Artificial
  probe
  misc_feature (1)..(25): SEQ ID NO: 7531; WAN024B7C_x_at; Start 48; Stop 72
caatctactatacaataagagaacg

SEQ ID NO: 74102 - DNA, 25 bp, Artificial
  probe
  misc_feature (1)..(25): SEQ ID NO: 7531; WAN024B7C_x_at; Start 12; Stop 36
caatgttttagaagtagaagtgtac

SEQ ID NO: 74103 - DNA, 25 bp, Artificial
  probe
  misc_feature (1)..(25): SEQ ID NO: 7531; WAN024B7C_x_at; Start 28; Stop 52
gaagtgtactattctagtttcaatc

SEQ ID NO: 74104 - DNA, 25 bp, Artificial
  probe
  misc_feature (1)..(25): SEQ ID NO: 7531; WAN024B7C_x_at; Start 52; Stop 76
ctactatacaataagagaacgactc

SEQ ID NO: 74105 - DNA, 25 bp, Artificial
  probe
  misc_feature (1)..(25): SEQ ID NO: 7531; WAN024B7C_x_at; Start 49; Stop 73
aatctactatacaataagagaacga

SEQ ID NO: 74106 - DNA, 25 bp, Artificial
  probe
  misc_feature (1)..(25): SEQ ID NO: 7531; WAN024B7C_x_at; Start 25; Stop 49
gtagaagtgtactattctagtttca

SEQ ID NO: 74107 - DNA, 25 bp, Artificial
  probe
  misc_feature (1)..(25): SEQ ID NO: 7531; WAN024B7C_x_at; Start 3; Stop 27
gatttctaacaatgttttagaagta

SEQ ID NO: 74108 - DNA, 25 bp, Artificial
  probe
  misc_feature (1)..(25): SEQ ID NO: 7531; WAN024B7C_x_at; Start 14; Stop 38
atgttttagaagtagaagtgtacta

SEQ ID NO: 74109 - DNA, 25 bp, Artificial
  probe
  misc_feature (1)..(25): SEQ ID NO: 7531; WAN024B7C_x_at; Start 27; Stop 51
agaagtgtactattctagtttcaat

SEQ ID NO: 74110 - DNA, 25 bp, Artificial
  probe
  misc_feature (1)..(25): SEQ ID NO: 7531; WAN024B7C_x_at; Start 57; Stop 81
atacaataagagaacgactcaaaat

SEQ ID NO: 74111 - DNA, 25 bp, Artificial
  probe
  misc_feature (1)..(25): SEQ ID NO: 7531; WAN024B7C_x_at; Start 55; Stop 79
ctatacaataagagaacgactcaaa

SEQ ID NO: 74112 - DNA, 25 bp, Artificial
  probe
  misc_feature (1)..(25): SEQ ID NO: 7531; WAN024B7C_x_at; Start 19; Stop 43
ttagaagtagaagtgtactattcta

SEQ ID NO: 74113 - DNA, 25 bp, Artificial
  probe
  misc_feature (1)..(25): SEQ ID NO: 7531; WAN024B7C_x_at; Start 29; Stop 53
aagtgtactattctagtttcaatct

SEQ ID NO: 74114 - DNA, 25 bp, Artificial
  probe
  misc_feature (1)..(25): SEQ ID NO: 7531; WAN024B7C_x_at; Start 31; Stop 55
gtgtactattctagtttcaatctac

SEQ ID NO: 74115 - DNA, 25 bp, Artificial
  probe
  misc_feature (1)..(25): SEQ ID NO: 7531; WAN024B7C_x_at; Start 56; Stop 80
tatacaataagagaacgactcaaaa

SEQ ID NO: 74116 - DNA, 25 bp, Artificial
  probe
  misc_feature (1)..(25): SEQ ID NO: 7531; WAN024B7C_x_at; Start 13; Stop 37
aatgttttagaagtagaagtgtact

SEQ ID NO: 74117 - DNA, 25 bp, Artificial
  probe
  misc_feature (1)..(25): SEQ ID NO: 7531; WAN024B7C_x_at; Start 30; Stop 54
agtgtactattctagtttcaatcta

SEQ ID NO: 74118 - DNA, 25 bp, Artificial
  probe
  misc_feature (1)..(25): SEQ ID NO: 6898; WAN024B7D_s_at; Start 8; Stop 32
catatcaaaaagcacctcaaaaagg

SEQ ID NO: 74119 - DNA, 25 bp, Artificial
  probe
  misc_feature (1)..(25): SEQ ID NO: 6898; WAN024B7D_s_at; Start 11; Stop 35
atcaaaaagcacctcaaaaaggtat

SEQ ID NO: 74120 - DNA, 25 bp, Artificial
  probe
  misc_feature (1)..(25): SEQ ID NO: 6898; WAN024B7D_s_at; Start 9; Stop 33
atatcaaaaagcacctcaaaaaggt

SEQ ID NO: 74121 - DNA, 25 bp, Artificial
  probe
  misc_feature (1)..(25): SEQ ID NO: 6898; WAN024B7D_s_at; Start 10; Stop 34
tatcaaaaagcacctcaaaaaggta

SEQ ID NO: 74122 - DNA, 25 bp, Artificial
  probe
  misc_feature (1)..(25): SEQ ID NO: 6898; WAN024B7D_s_at; Start 18; Stop 42
agcacctcaaaaaggtattaccaag

SEQ ID NO: 74123 - DNA, 25 bp, Artificial
  probe
  misc_feature (1)..(25): SEQ ID NO: 5634; WAN024B7E_at; Start 218; Stop 242
ggaagaaaagatggctctttgtcaa

SEQ ID NO: 74124 - DNA, 25 bp, Artificial
  probe
  misc_feature (1)..(25): SEQ ID NO: 5634; WAN024B7E_at; Start 215; Stop 239
cgaggaagaaaagatggctctttgt

SEQ ID NO: 74125 - DNA, 25 bp, Artificial
  probe
  misc_feature (1)..(25): SEQ ID NO: 5634; WAN024B7E_at; Start 216; Stop 240
gaggaagaaaagatggctctttgtc

SEQ ID NO: 74126 - DNA, 25 bp, Artificial
  probe
  misc_feature (1)..(25): SEQ ID NO: 5634; WAN024B7E_at; Start 217; Stop 241
aggaagaaaagatggctctttgtca

SEQ ID NO: 74127 - DNA, 25 bp, Artificial
  probe
  misc_feature (1)..(25): SEQ ID NO: 2576; WAN024B7F_at; Start 103; Stop 127
ggatacagttgggaaagaagctatc

SEQ ID NO: 74128 - DNA, 25 bp, Artificial
  probe
  misc_feature (1)..(25): SEQ ID NO: 2576; WAN024B7F_at; Start 104; Stop 128
gatacagttgggaaagaagctatct

SEQ ID NO: 74129 - DNA, 25 bp, Artificial
  probe
  misc_feature (1)..(25): SEQ ID NO: 2576; WAN024B7F_at; Start 87; Stop 111
attgactatatatcacggatacagt

SEQ ID NO: 74130 - DNA, 25 bp, Artificial
  probe
  misc_feature (1)..(25): SEQ ID NO: 2576; WAN024B7F_at; Start 102; Stop 126
cggatacagttgggaaagaagctat

SEQ ID NO: 74131 - DNA, 25 bp, Artificial
  probe
  misc_feature (1)..(25): SEQ ID NO: 2576; WAN024B7F_at; Start 97; Stop 121
tatcacggatacagttgggaaagaa

SEQ ID NO: 74132 - DNA, 25 bp, Artificial
  probe
  misc_feature (1)..(25): SEQ ID NO: 2576; WAN024B7F_at; Start 95; Stop 119
tatatcacggatacagttgggaaag

SEQ ID NO: 74133 - DNA, 25 bp, Artificial
  probe
  misc_feature (1)..(25): SEQ ID NO: 2576; WAN024B7F_at; Start 88; Stop 112
ttgactatatatcacggatacagtt

SEQ ID NO: 74134 - DNA, 25 bp, Artificial
  probe
  misc_feature (1)..(25): SEQ ID NO: 2576; WAN024B7F_at; Start 99; Stop 123
tcacggatacagttgggaaagaagc

SEQ ID NO: 74135 - DNA, 25 bp, Artificial
  probe
  misc_feature (1)..(25): SEQ ID NO: 2576; WAN024B7F_at; Start 98; Stop 122
atcacggatacagttgggaaagaag

SEQ ID NO: 74136 - DNA, 25 bp, Artificial
  probe
  misc_feature (1)..(25): SEQ ID NO: 2576; WAN024B7F_at; Start 107; Stop 131
acagttgggaaagaagctatctaac

SEQ ID NO: 74137 - DNA, 25 bp, Artificial
  probe
  misc_feature (1)..(25): SEQ ID NO: 2576; WAN024B7F_at; Start 109; Stop 133
agttgggaaagaagctatctaacta

SEQ ID NO: 74138 - DNA, 25 bp, Artificial
  probe
  misc_feature (1)..(25): SEQ ID NO: 2576; WAN024B7F_at; Start 96; Stop 120
atatcacggatacagttgggaaaga

SEQ ID NO: 74139 - DNA, 25 bp, Artificial
  probe
  misc_feature (1)..(25): SEQ ID NO: 2576; WAN024B7F_at; Start 85; Stop 109
caattgactatatatcacggataca

SEQ ID NO: 74140 - DNA, 25 bp, Artificial
  probe
  misc_feature (1)..(25): SEQ ID NO: 2576; WAN024B7F_at; Start 111; Stop 135
ttgggaaagaagctatctaactaat

SEQ ID NO: 74141 - DNA, 25 bp, Artificial
  probe
  misc_feature (1)..(25): SEQ ID NO: 2576; WAN024B7F_at; Start 94; Stop 118
atatatcacggatacagttgggaaa

SEQ ID NO: 74142 - DNA, 25 bp, Artificial
  probe
  misc_feature (1)..(25): SEQ ID NO: 2576; WAN024B7F_at; Start 91; Stop 115
actatatatcacggatacagttggg

SEQ ID NO: 74143 - DNA, 25 bp, Artificial
  probe
  misc_feature (1)..(25): SEQ ID NO: 2576; WAN024B7F_at; Start 83; Stop 107
ttcaattgactatatatcacggata

SEQ ID NO: 74144 - DNA, 25 bp, Artificial
  probe
  misc_feature (1)..(25): SEQ ID NO: 2576; WAN024B7F_at; Start 105; Stop 129
atacagttgggaaagaagctatcta

SEQ ID NO: 74145 - DNA, 25 bp, Artificial
  probe
  misc_feature (1)..(25): SEQ ID NO: 2576; WAN024B7F_at; Start 92; Stop 116
ctatatatcacggatacagttggga

SEQ ID NO: 74146 - DNA, 25 bp, Artificial
  probe
  misc_feature (1)..(25): SEQ ID NO: 2576; WAN024B7F_at; Start 110; Stop 134
gttgggaaagaagctatctaactaa

SEQ ID NO: 74147 - DNA, 25 bp, Artificial
  probe
  misc_feature (1)..(25): SEQ ID NO: 2576; WAN024B7F_at; Start 100; Stop 124
cacggatacagttgggaaagaagct

SEQ ID NO: 74148 - DNA, 25 bp, Artificial
  probe
  misc_feature (1)..(25): SEQ ID NO: 2576; WAN024B7F_at; Start 90; Stop 114
gactatatatcacggatacagttgg

SEQ ID NO: 74149 - DNA, 25 bp, Artificial
  probe
  misc_feature (1)..(25): SEQ ID NO: 2576; WAN024B7F_at; Start 86; Stop 110
aattgactatatatcacggatacag

SEQ ID NO: 74150 - DNA, 25 bp, Artificial
  probe
  misc_feature (1)..(25): SEQ ID NO: 2576; WAN024B7F_at; Start 101; Stop 125
acggatacagttgggaaagaagcta

SEQ ID NO: 74151 - DNA, 25 bp, Artificial
  probe
  misc_feature (1)..(25): SEQ ID NO: 2576; WAN024B7F_at; Start 84; Stop 108
tcaattgactatatatcacggatac

SEQ ID NO: 74152 - DNA, 25 bp, Artificial
  probe
  misc_feature (1)..(25): SEQ ID NO: 2576; WAN024B7F_at; Start 89; Stop 113
tgactatatatcacggatacagttg

SEQ ID NO: 74153 - DNA, 25 bp, Artificial
  probe
  misc_feature (1)..(25): SEQ ID NO: 2576; WAN024B7F_at; Start 108; Stop 132
cagttgggaaagaagctatctaact

SEQ ID NO: 74154 - DNA, 25 bp, Artificial
  probe
  misc_feature (1)..(25): SEQ ID NO: 2576; WAN024B7F_at; Start 106; Stop 130
tacagttgggaaagaagctatctaa

SEQ ID NO: 74155 - DNA, 25 bp, Artificial
  probe
  misc_feature (1)..(25): SEQ ID NO: 2576; WAN024B7F_at; Start 93; Stop 117
tatatatcacggatacagttgggaa

SEQ ID NO: 74156 - DNA, 25 bp, Artificial
  probe
  misc_feature (1)..(25): SEQ ID NO: 5077; WAN024B7G_at; Start 195; Stop 219
tctcataaagctgatcaaaaactca

SEQ ID NO: 74157 - DNA, 25 bp, Artificial
  probe
  misc_feature (1)..(25): SEQ ID NO: 5077; WAN024B7G_at; Start 66; Stop 90
attcgttccaaaattgcttggttcg

SEQ ID NO: 74158 - DNA, 25 bp, Artificial
  probe
  misc_feature (1)..(25): SEQ ID NO: 5077; WAN024B7G_at; Start 193; Stop 217
tatctcataaagctgatcaaaaact

SEQ ID NO: 74159 - DNA, 25 bp, Artificial
  probe
  misc_feature (1)..(25): SEQ ID NO: 5077; WAN024B7G_at; Start 38; Stop 62
ttttactatatagatcgcattcgaa

SEQ ID NO: 74160 - DNA, 25 bp, Artificial
  probe
  misc_feature (1)..(25): SEQ ID NO: 5077; WAN024B7G_at; Start 46; Stop 70
tatagatcgcattcgaaagaattcg

SEQ ID NO: 74161 - DNA, 25 bp, Artificial
  probe
  misc_feature (1)..(25): SEQ ID NO: 5077; WAN024B7G_at; Start 145; Stop 169
cccactgtccataaaaataacatga

SEQ ID NO: 74162 - DNA, 25 bp, Artificial
  probe
  misc_feature (1)..(25): SEQ ID NO: 5077; WAN024B7G_at; Start 54; Stop 78
gcattcgaaagaattcgttccaaaa

SEQ ID NO: 74163 - DNA, 25 bp, Artificial
  probe
  misc_feature (1)..(25): SEQ ID NO: 5077; WAN024B7G_at; Start 197; Stop 221
tcataaagctgatcaaaaactcaat

SEQ ID NO: 74164 - DNA, 25 bp, Artificial
  probe
  misc_feature (1)..(25): SEQ ID NO: 5077; WAN024B7G_at; Start 48; Stop 72
tagatcgcattcgaaagaattcgtt

SEQ ID NO: 74165 - DNA, 25 bp, Artificial
  probe
  misc_feature (1)..(25): SEQ ID NO: 5077; WAN024B7G_at; Start 50; Stop 74
gatcgcattcgaaagaattcgttcc

SEQ ID NO: 74166 - DNA, 25 bp, Artificial
  probe
  misc_feature (1)..(25): SEQ ID NO: 5077; WAN024B7G_at; Start 41; Stop 65
tactatatagatcgcattcgaaaga

SEQ ID NO: 74167 - DNA, 25 bp, Artificial
  probe
  misc_feature (1)..(25): SEQ ID NO: 5077; WAN024B7G_at; Start 151; Stop 175
gtccataaaaataacatgatgggct

SEQ ID NO: 74168 - DNA, 25 bp, Artificial
  probe
  misc_feature (1)..(25): SEQ ID NO: 5077; WAN024B7G_at; Start 149; Stop 173
ctgtccataaaaataacatgatggg

SEQ ID NO: 74169 - DNA, 25 bp, Artificial
  probe
  misc_feature (1)..(25): SEQ ID NO: 5077; WAN024B7G_at; Start 154; Stop 178
cataaaaataacatgatgggctaca

SEQ ID NO: 74170 - DNA, 25 bp, Artificial
  probe
  misc_feature (1)..(25): SEQ ID NO: 5077; WAN024B7G_at; Start 36; Stop 60
cattttactatatagatcgcattcg

SEQ ID NO: 74171 - DNA, 25 bp, Artificial
  probe
  misc_feature (1)..(25): SEQ ID NO: 5077; WAN024B7G_at; Start 131; Stop 155
ttttcaacaattttcccactgtcca

SEQ ID NO: 74172 - DNA, 25 bp, Artificial
  probe
  misc_feature (1)..(25): SEQ ID NO: 5077; WAN024B7G_at; Start 59; Stop 83
cgaaagaattcgttccaaaattgct

SEQ ID NO: 74173 - DNA, 25 bp, Artificial
  probe
  misc_feature (1)..(25): SEQ ID NO: 5077; WAN024B7G_at; Start 80; Stop 104
tgcttggttcgttcttctcttggac

SEQ ID NO: 74174 - DNA, 25 bp, Artificial
  probe
  misc_feature (1)..(25): SEQ ID NO: 5077; WAN024B7G_at; Start 164; Stop 188
acatgatgggctacatctctagcaa

SEQ ID NO: 74175 - DNA, 25 bp, Artificial
  probe
  misc_feature (1)..(25): SEQ ID NO: 5077; WAN024B7G_at; Start 62; Stop 86
aagaattcgttccaaaattgcttgg

SEQ ID NO: 74176 - DNA, 25 bp, Artificial
  probe
  misc_feature (1)..(25): SEQ ID NO: 5077; WAN024B7G_at; Start 201; Stop 225
aaagctgatcaaaaactcaatctga

SEQ ID NO: 74177 - DNA, 25 bp, Artificial
  probe
  misc_feature (1)..(25): SEQ ID NO: 5077; WAN024B7G_at; Start 106; Stop 130
actaaagaattgatgggcattattt

SEQ ID NO: 74178 - DNA, 25 bp, Artificial
  probe
  misc_feature (1)..(25): SEQ ID NO: 5077; WAN024B7G_at; Start 163; Stop 187
aacatgatgggctacatctctagca

SEQ ID NO: 74179 - DNA, 25 bp, Artificial
  probe
  misc_feature (1)..(25): SEQ ID NO: 5077; WAN024B7G_at; Start 156; Stop 180
taaaaataacatgatgggctacatc

SEQ ID NO: 74180 - DNA, 25 bp, Artificial
  probe
  misc_feature (1)..(25): SEQ ID NO: 5077; WAN024B7G_at; Start 115; Stop 139
ttgatgggcattatttttttcaaca

SEQ ID NO: 74181 - DNA, 25 bp, Artificial
  probe
  misc_feature (1)..(25): SEQ ID NO: 5077; WAN024B7G_at; Start 158; Stop 182
aaaataacatgatgggctacatctc

SEQ ID NO: 74182 - DNA, 25 bp, Artificial
  probe
  misc_feature (1)..(25): SEQ ID NO: 5077; WAN024B7G_at; Start 77; Stop 101
aattgcttggttcgttcttctcttg

SEQ ID NO: 74183 - DNA, 25 bp, Artificial
  probe
  misc_feature (1)..(25): SEQ ID NO: 5077; WAN024B7G_at; Start 200; Stop 224
taaagctgatcaaaaactcaatctg

SEQ ID NO: 74184 - DNA, 25 bp, Artificial
  probe
  misc_feature (1)..(25): SEQ ID NO: 5077; WAN024B7G_at; Start 74; Stop 98
caaaattgcttggttcgttcttctc

SEQ ID NO: 74185 - DNA, 25 bp, Artificial
  probe
  misc_feature (1)..(25): SEQ ID NO: 5077; WAN024B7G_at; Start 142; Stop 166
tttcccactgtccataaaaataaca

SEQ ID NO: 74186 - DNA, 25 bp, Artificial
  probe
  misc_feature (1)..(25): SEQ ID NO: 5077; WAN024B7G_at; Start 58; Stop 82
tcgaaagaattcgttccaaaattgc

SEQ ID NO: 74187 - DNA, 25 bp, Artificial
  probe
  misc_feature (1)..(25): SEQ ID NO: 5077; WAN024B7G_at; Start 135; Stop 159
caacaattttcccactgtccataaa

SEQ ID NO: 74188 - DNA, 25 bp, Artificial
  probe
  misc_feature (1)..(25): SEQ ID NO: 5077; WAN024B7G_at; Start 190; Stop 214
acctatctcataaagctgatcaaaa

SEQ ID NO: 74189 - DNA, 25 bp, Artificial
  probe
  misc_feature (1)..(25): SEQ ID NO: 5077; WAN024B7G_at; Start 52; Stop 76
tcgcattcgaaagaattcgttccaa

SEQ ID NO: 74190 - DNA, 25 bp, Artificial
  probe
  misc_feature (1)..(25): SEQ ID NO: 5081; WAN024B7H_at; Start 501; Stop 525
aagctcagatttatggaagtacacc

SEQ ID NO: 74191 - DNA, 25 bp, Artificial
  probe
  misc_feature (1)..(25): SEQ ID NO: 5081; WAN024B7H_at; Start 1293; Stop 1317
tattatagcagcaaaagctcatttg

SEQ ID NO: 74192 - DNA, 25 bp, Artificial
  probe
  misc_feature (1)..(25): SEQ ID NO: 5081; WAN024B7H_at; Start 776; Stop 800
cattaattgcagcattagaggctgt

SEQ ID NO: 74193 - DNA, 25 bp, Artificial
  probe
  misc_feature (1)..(25): SEQ ID NO: 5081; WAN024B7H_at; Start 931; Stop 955
gatattttctcgcttgtattttggg

SEQ ID NO: 74194 - DNA, 25 bp, Artificial
  probe
  misc_feature (1)..(25): SEQ ID NO: 5081; WAN024B7H_at; Start 485; Stop 509
tttcgtttgtacatgaaagctcaga

SEQ ID NO: 74195 - DNA, 25 bp, Artificial
  probe
  misc_feature (1)..(25): SEQ ID NO: 5081; WAN024B7H_at; Start 1334; Stop 1358
atcttgttctccttatagtgctggg

SEQ ID NO: 74196 - DNA, 25 bp, Artificial
  probe
  misc_feature (1)..(25): SEQ ID NO: 5081; WAN024B7H_at; Start 1148; Stop 1172
ccatgggtgctacgattagtacagt

SEQ ID NO: 74197 - DNA, 25 bp, Artificial
  probe
  misc_feature (1)..(25): SEQ ID NO: 5081; WAN024B7H_at; Start 226; Stop 250
cgagaagggaaagagattttatcaa

SEQ ID NO: 74198 - DNA, 25 bp, Artificial
  probe
  misc_feature (1)..(25): SEQ ID NO: 5081; WAN024B7H_at; Start 809; Stop 833
cacgaacatcttatttattagcaga

SEQ ID NO: 74199 - DNA, 25 bp, Artificial
  probe
  misc_feature (1)..(25): SEQ ID NO: 5081; WAN024B7H_at; Start 875; Stop 899
tcctttatgcgatgatgatttcgag

SEQ ID NO: 74200 - DNA, 25 bp, Artificial
  probe
  misc_feature (1)..(25): SEQ ID NO: 5081; WAN024B7H_at; Start 1349; Stop 1373
tagtgctgggaggaatagtatatac

SEQ ID NO: 74201 - DNA, 25 bp, Artificial
  probe
  misc_feature (1)..(25): SEQ ID NO: 5081; WAN024B7H_at; Start 63; Stop 87
tggtattgcctttcctttgataact

SEQ ID NO: 74202 - DNA, 25 bp, Artificial
  probe
  misc_feature (1)..(25): SEQ ID NO: 5081; WAN024B7H_at; Start 861; Stop 885
tatagaggttacaatcctttatgcg

SEQ ID NO: 74203 - DNA, 25 bp, Artificial
  probe
  misc_feature (1)..(25): SEQ ID NO: 5081; WAN024B7H_at; Start 206; Stop 230
ggacaatagcgaccgttaaacgaga

SEQ ID NO: 74204 - DNA, 25 bp, Artificial
  probe
  misc_feature (1)..(25): SEQ ID NO: 5081; WAN024B7H_at; Start 1078; Stop 1102
gtgttgtctctaataataggtgctc

SEQ ID NO: 74205 - DNA, 25 bp, Artificial
  probe
  misc_feature (1)..(25): SEQ ID NO: 5081; WAN024B7H_at; Start 196; Stop 220
tatggaaataggacaatagcgaccg

SEQ ID NO: 74206 - DNA, 25 bp, Artificial
  probe
  misc_feature (1)..(25): SEQ ID NO: 5081; WAN024B7H_at; Start 1178; Stop 1202
cagaatttgtcttgtatggagtgca

SEQ ID NO: 74207 - DNA, 25 bp, Artificial
  probe
  misc_feature (1)..(25): SEQ ID NO: 5081; WAN024B7H_at; Start 791; Stop 815
tagaggctgttatgttaccacgaac

SEQ ID NO: 74208 - DNA, 25 bp, Artificial
  probe
  misc_feature (1)..(25): SEQ ID NO: 5081; WAN024B7H_at; Start 333; Stop 357
ggtgtcgagttacaagttcattgcg

SEQ ID NO: 74209 - DNA, 25 bp, Artificial
  probe
  misc_feature (1)..(25): SEQ ID NO: 5081; WAN024B7H_at; Start 536; Stop 560
gaggagtgactttagttgggcaact

SEQ ID NO: 74210 - DNA, 25 bp, Artificial
  probe
  misc_feature (1)..(25): SEQ ID NO: 5081; WAN024B7H_at; Start 1133; Stop 1157
taaaaccttttggagccatgggtgc

SEQ ID NO: 74211 - DNA, 25 bp, Artificial
  probe
  misc_feature (1)..(25): SEQ ID NO: 5081; WAN024B7H_at; Start 1020; Stop 1044
tccaggaaatataattagaacacag

SEQ ID NO: 74212 - DNA, 25 bp, Artificial
  probe
  misc_feature (1)..(25): SEQ ID NO: 5081; WAN024B7H_at; Start 654; Stop 678
cattcctgtgttagcaatcagtatc

SEQ ID NO: 74213 - DNA, 25 bp, Artificial
  probe
  misc_feature (1)..(25): SEQ ID NO: 5081; WAN024B7H_at; Start 1369; Stop 1393
tatactggcttttgttgtttctaca

SEQ ID NO: 74214 - DNA, 25 bp, Artificial
  probe
  misc_feature (1)..(25): SEQ ID NO: 5081; WAN024B7H_at; Start 824; Stop 848
tattagcagaaggtcaggaggaaaa

SEQ ID NO: 74215 - DNA, 25 bp, Artificial
  probe
  misc_feature (1)..(25): SEQ ID NO: 5081; WAN024B7H_at; Start 761; Stop 785
tcgatattcctaaagcattaattgc

SEQ ID NO: 74216 - DNA, 25 bp, Artificial
  probe
  misc_feature (1)..(25): SEQ ID NO: 5081; WAN024B7H_at; Start 965; Stop 989
tccttgaatcaggaagattaattgc

SEQ ID NO: 74217 - DNA, 25 bp, Artificial
  probe
  misc_feature (1)..(25): SEQ ID NO: 5081; WAN024B7H_at; Start 268; Stop 292
tactatgtccagttgctaatgtcgg

SEQ ID NO: 74218 - DNA, 25 bp, Artificial
  probe
  misc_feature (1)..(25): SEQ ID NO: 5081; WAN024B7H_at; Start 252; Stop 276
aacgttttggaatatctactatgtc

SEQ ID NO: 74219 - DNA, 25 bp, Artificial
  probe
  misc_feature (1)..(25): SEQ ID NO: 5081; WAN024B7H_at; Start 284; Stop 308
taatgtcggttctagtaactatcgc

SEQ ID NO: 74220 - DNA, 25 bp, Artificial
  probe
  misc_feature (1)..(25): SEQ ID NO: 5081; WAN024B7H_at; Start 1205; Stop 1229
tttggacagtcagaagagatttaga

SEQ ID NO: 74221 - DNA, 25 bp, Artificial
  probe
  misc_feature (1)..(25): SEQ ID NO: 5081; WAN024B7H_at; Start 522; Stop 546
caccttaataaacggaggagtgact

SEQ ID NO: 74222 - DNA, 25 bp, Artificial
  probe
  misc_feature (1)..(25): SEQ ID NO: 5081; WAN024B7H_at; Start 980; Stop 1004
gattaattgctgctatggcaccagt

SEQ ID NO: 74223 - DNA, 25 bp, Artificial
  probe
  misc_feature (1)..(25): SEQ ID NO: 5081; WAN024B7H_at; Start 574; Stop 598
caattaaaaggcagattatcttggg

SEQ ID NO: 74224 - DNA, 25 bp, Artificial
  probe
  misc_feature (1)..(25): SEQ ID NO: 5661; WAN024B7I_at; Start 29; Stop 53
tagctctcctgttttctcttttagc

SEQ ID NO: 74225 - DNA, 25 bp, Artificial
  probe
  misc_feature (1)..(25): SEQ ID NO: 5661; WAN024B7I_at; Start 52; Stop 76
gctttaaccagccataaatggtatt

SEQ ID NO: 74226 - DNA, 25 bp, Artificial
  probe
  misc_feature (1)..(25): SEQ ID NO: 5661; WAN024B7I_at; Start 48; Stop 72
tttagctttaaccagccataaatgg

SEQ ID NO: 74227 - DNA, 25 bp, Artificial
  probe
  misc_feature (1)..(25): SEQ ID NO: 5661; WAN024B7I_at; Start 151; Stop 175
gaaaatctattgaatatgccactaa

SEQ ID NO: 74228 - DNA, 25 bp, Artificial
  probe
  misc_feature (1)..(25): SEQ ID NO: 5661; WAN024B7I_at; Start 83; Stop 107
gatttggaaaacgtgtgatgcttct

SEQ ID NO: 74229 - DNA, 25 bp, Artificial
  probe
  misc_feature (1)..(25): SEQ ID NO: 5661; WAN024B7I_at; Start 50; Stop 74
tagctttaaccagccataaatggta

SEQ ID NO: 74230 - DNA, 25 bp, Artificial
  probe
  misc_feature (1)..(25): SEQ ID NO: 5661; WAN024B7I_at; Start 43; Stop 67
tctcttttagctttaaccagccata

SEQ ID NO: 74231 - DNA, 25 bp, Artificial
  probe
  misc_feature (1)..(25): SEQ ID NO: 5661; WAN024B7I_at; Start 22; Stop 46
ggtggtttagctctcctgttttctc

SEQ ID NO: 74232 - DNA, 25 bp, Artificial
  probe
  misc_feature (1)..(25): SEQ ID NO: 5661; WAN024B7I_at; Start 127; Stop 151
cacaataagagagaacttttttacg

SEQ ID NO: 74233 - DNA, 25 bp, Artificial
  probe
  misc_feature (1)..(25): SEQ ID NO: 5661; WAN024B7I_at; Start 107; Stop 131
tgttatactacctattcgctcacaa

SEQ ID NO: 74234 - DNA, 25 bp, Artificial
  probe
  misc_feature (1)..(25): SEQ ID NO: 5661; WAN024B7I_at; Start 73; Stop 97
tattacgtgagatttggaaaacgtg

SEQ ID NO: 74235 - DNA, 25 bp, Artificial
  probe
  misc_feature (1)..(25): SEQ ID NO: 5661; WAN024B7I_at; Start 70; Stop 94
tggtattacgtgagatttggaaaac

SEQ ID NO: 74236 - DNA, 25 bp, Artificial
  probe
  misc_feature (1)..(25): SEQ ID NO: 5661; WAN024B7I_at; Start 146; Stop 170
tttacgaaaatctattgaatatgcc

SEQ ID NO: 74237 - DNA, 25 bp, Artificial
  probe
  misc_feature (1)..(25): SEQ ID NO: 5661; WAN024B7I_at; Start 156; Stop 180
tctattgaatatgccactaactaat

SEQ ID NO: 74238 - DNA, 25 bp, Artificial
  probe
  misc_feature (1)..(25): SEQ ID NO: 5661; WAN024B7I_at; Start 87; Stop 111
tggaaaacgtgtgatgcttctgtta

SEQ ID NO: 74239 - DNA, 25 bp, Artificial
  probe
  misc_feature (1)..(25): SEQ ID NO: 5661; WAN024B7I_at; Start 57; Stop 81
aaccagccataaatggtattacgtg

SEQ ID NO: 74240 - DNA, 25 bp, Artificial
  probe
  misc_feature (1)..(25): SEQ ID NO: 5661; WAN024B7I_at; Start 85; Stop 109
tttggaaaacgtgtgatgcttctgt

SEQ ID NO: 74241 - DNA, 25 bp, Artificial
  probe
  misc_feature (1)..(25): SEQ ID NO: 5661; WAN024B7I_at; Start 80; Stop 104
tgagatttggaaaacgtgtgatgct

SEQ ID NO: 74242 - DNA, 25 bp, Artificial
  probe
  misc_feature (1)..(25): SEQ ID NO: 5661; WAN024B7I_at; Start 119; Stop 143
tattcgctcacaataagagagaact

SEQ ID NO: 74243 - DNA, 25 bp, Artificial
  probe
  misc_feature (1)..(25): SEQ ID NO: 5661; WAN024B7I_at; Start 76; Stop 100
tacgtgagatttggaaaacgtgtga

SEQ ID NO: 74244 - DNA, 25 bp, Artificial
  probe
  misc_feature (1)..(25): SEQ ID NO: 5661; WAN024B7I_at; Start 148; Stop 172
tacgaaaatctattgaatatgccac

SEQ ID NO: 74245 - DNA, 25 bp, Artificial
  probe
  misc_feature (1)..(25): SEQ ID NO: 5661; WAN024B7I_at; Start 115; Stop 139
tacctattcgctcacaataagagag

SEQ ID NO: 74246 - DNA, 25 bp, Artificial
  probe
  misc_feature (1)..(25): SEQ ID NO: 5661; WAN024B7I_at; Start 99; Stop 123
gatgcttctgttatactacctattc

SEQ ID NO: 74247 - DNA, 25 bp, Artificial
  probe
  misc_feature (1)..(25): SEQ ID NO: 5661; WAN024B7I_at; Start 17; Stop 41
tacttggtggtttagctctcctgtt

SEQ ID NO: 74248 - DNA, 25 bp, Artificial
  probe
  misc_feature (1)..(25): SEQ ID NO: 5661; WAN024B7I_at; Start 96; Stop 120
tgtgatgcttctgttatactaccta

SEQ ID NO: 74249 - DNA, 25 bp, Artificial
  probe
  misc_feature (1)..(25): SEQ ID NO: 5661; WAN024B7I_at; Start 62; Stop 86
gccataaatggtattacgtgagatt

SEQ ID NO: 74250 - DNA, 25 bp, Artificial
  probe
  misc_feature (1)..(25): SEQ ID NO: 5661; WAN024B7I_at; Start 102; Stop 126
gcttctgttatactacctattcgct

SEQ ID NO: 74251 - DNA, 25 bp, Artificial
  probe
  misc_feature (1)..(25): SEQ ID NO: 5661; WAN024B7I_at; Start 122; Stop 146
tcgctcacaataagagagaactttt

SEQ ID NO: 74252 - DNA, 25 bp, Artificial
  probe
  misc_feature (1)..(25): SEQ ID NO: 5661; WAN024B7I_at; Start 60; Stop 84
cagccataaatggtattacgtgaga

SEQ ID NO: 74253 - DNA, 25 bp, Artificial
  probe
  misc_feature (1)..(25): SEQ ID NO: 5661; WAN024B7I_at; Start 117; Stop 141
cctattcgctcacaataagagagaa

SEQ ID NO: 74254 - DNA, 25 bp, Artificial
  probe
  misc_feature (1)..(25): SEQ ID NO: 5661; WAN024B7I_at; Start 94; Stop 118
cgtgtgatgcttctgttatactacc

SEQ ID NO: 74255 - DNA, 25 bp, Artificial
  probe
  misc_feature (1)..(25): SEQ ID NO: 5661; WAN024B7I_at; Start 41; Stop 65
tttctcttttagctttaaccagcca

SEQ ID NO: 74256 - DNA, 25 bp, Artificial
  probe
  misc_feature (1)..(25): SEQ ID NO: 5661; WAN024B7I_at; Start 15; Stop 39
tttacttggtggtttagctctcctg

SEQ ID NO: 74257 - DNA, 25 bp, Artificial
  probe
  misc_feature (1)..(25): SEQ ID NO: 5661; WAN024B7I_at; Start 90; Stop 114
aaaacgtgtgatgcttctgttatac

SEQ ID NO: 74258 - DNA, 25 bp, Artificial
  probe
  misc_feature (1)..(25): SEQ ID NO: 2577; WAN024B7J_at; Start 101; Stop 125
aggcgagacatttttcggttctttg

SEQ ID NO: 74259 - DNA, 25 bp, Artificial
  probe
  misc_feature (1)..(25): SEQ ID NO: 2577; WAN024B7J_at; Start 114; Stop 138
ttcggttctttgtcaactgctaact

SEQ ID NO: 74260 - DNA, 25 bp, Artificial
  probe
  misc_feature (1)..(25): SEQ ID NO: 2577; WAN024B7J_at; Start 94; Stop 118
atattagaggcgagacatttttcgg

SEQ ID NO: 74261 - DNA, 25 bp, Artificial
  probe
  misc_feature (1)..(25): SEQ ID NO: 2577; WAN024B7J_at; Start 111; Stop 135
tttttcggttctttgtcaactgcta

SEQ ID NO: 74262 - DNA, 25 bp, Artificial
  probe
  misc_feature (1)..(25): SEQ ID NO: 2577; WAN024B7J_at; Start 99; Stop 123
agaggcgagacatttttcggttctt

SEQ ID NO: 74263 - DNA, 25 bp, Artificial
  probe
  misc_feature (1)..(25): SEQ ID NO: 2577; WAN024B7J_at; Start 92; Stop 116
ctatattagaggcgagacatttttc

SEQ ID NO: 74264 - DNA, 25 bp, Artificial
  probe
  misc_feature (1)..(25): SEQ ID NO: 2577; WAN024B7J_at; Start 87; Stop 111
attgactatattagaggcgagacat

SEQ ID NO: 74265 - DNA, 25 bp, Artificial
  probe
  misc_feature (1)..(25): SEQ ID NO: 2577; WAN024B7J_at; Start 95; Stop 119
tattagaggcgagacatttttcggt

SEQ ID NO: 74266 - DNA, 25 bp, Artificial
  probe
  misc_feature (1)..(25): SEQ ID NO: 2577; WAN024B7J_at; Start 93; Stop 117
tatattagaggcgagacatttttcg

SEQ ID NO: 74267 - DNA, 25 bp, Artificial
  probe
  misc_feature (1)..(25): SEQ ID NO: 2577; WAN024B7J_at; Start 110; Stop 134
atttttcggttctttgtcaactgct

SEQ ID NO: 74268 - DNA, 25 bp, Artificial
  probe
  misc_feature (1)..(25): SEQ ID NO: 2577; WAN024B7J_at; Start 116; Stop 140
cggttctttgtcaactgctaactaa

SEQ ID NO: 74269 - DNA, 25 bp, Artificial
  probe
  misc_feature (1)..(25): SEQ ID NO: 2577; WAN024B7J_at; Start 115; Stop 139
tcggttctttgtcaactgctaacta

SEQ ID NO: 74270 - DNA, 25 bp, Artificial
  probe
  misc_feature (1)..(25): SEQ ID NO: 2577; WAN024B7J_at; Start 85; Stop 109
caattgactatattagaggcgagac

SEQ ID NO: 74271 - DNA, 25 bp, Artificial
  probe
  misc_feature (1)..(25): SEQ ID NO: 2577; WAN024B7J_at; Start 89; Stop 113
tgactatattagaggcgagacattt

SEQ ID NO: 74272 - DNA, 25 bp, Artificial
  probe
  misc_feature (1)..(25): SEQ ID NO: 2577; WAN024B7J_at; Start 83; Stop 107
ttcaattgactatattagaggcgag

SEQ ID NO: 74273 - DNA, 25 bp, Artificial
  probe
  misc_feature (1)..(25): SEQ ID NO: 2577; WAN024B7J_at; Start 91; Stop 115
actatattagaggcgagacattttt

SEQ ID NO: 74274 - DNA, 25 bp, Artificial
  probe
  misc_feature (1)..(25): SEQ ID NO: 2577; WAN024B7J_at; Start 86; Stop 110
aattgactatattagaggcgagaca

SEQ ID NO: 74275 - DNA, 25 bp, Artificial
  probe
  misc_feature (1)..(25): SEQ ID NO: 2577; WAN024B7J_at; Start 90; Stop 114
gactatattagaggcgagacatttt

SEQ ID NO: 74276 - DNA, 25 bp, Artificial
  probe
  misc_feature (1)..(25): SEQ ID NO: 2577; WAN024B7J_at; Start 84; Stop 108
tcaattgactatattagaggcgaga

SEQ ID NO: 74277 - DNA, 25 bp, Artificial
  probe
  misc_feature (1)..(25): SEQ ID NO: 2577; WAN024B7J_at; Start 113; Stop 137
tttcggttctttgtcaactgctaac

SEQ ID NO: 74278 - DNA, 25 bp, Artificial
  probe
  misc_feature (1)..(25): SEQ ID NO: 2577; WAN024B7J_at; Start 98; Stop 122
tagaggcgagacatttttcggttct

SEQ ID NO: 74279 - DNA, 25 bp, Artificial
  probe
  misc_feature (1)..(25): SEQ ID NO: 2577; WAN024B7J_at; Start 97; Stop 121
ttagaggcgagacatttttcggttc

SEQ ID NO: 74280 - DNA, 25 bp, Artificial
  probe
  misc_feature (1)..(25): SEQ ID NO: 2577; WAN024B7J_at; Start 117; Stop 141
ggttctttgtcaactgctaactaat

SEQ ID NO: 74281 - DNA, 25 bp, Artificial
  probe
  misc_feature (1)..(25): SEQ ID NO: 2577; WAN024B7J_at; Start 109; Stop 133
catttttcggttctttgtcaactgc

SEQ ID NO: 74282 - DNA, 25 bp, Artificial
  probe
  misc_feature (1)..(25): SEQ ID NO: 2577; WAN024B7J_at; Start 96; Stop 120
attagaggcgagacatttttcggtt

SEQ ID NO: 74283 - DNA, 25 bp, Artificial
  probe
  misc_feature (1)..(25): SEQ ID NO: 2577; WAN024B7J_at; Start 112; Stop 136
ttttcggttctttgtcaactgctaa

SEQ ID NO: 74284 - DNA, 25 bp, Artificial
  probe
  misc_feature (1)..(25): SEQ ID NO: 2577; WAN024B7J_at; Start 88; Stop 112
ttgactatattagaggcgagacatt

SEQ ID NO: 74285 - DNA, 25 bp, Artificial
  probe
  misc_feature (1)..(25): SEQ ID NO: 5718; WAN024B7K_at; Start 402; Stop 426
cataataacgtttctgaatggtttc

SEQ ID NO: 74286 - DNA, 25 bp, Artificial
  probe
  misc_feature (1)..(25): SEQ ID NO: 5718; WAN024B7K_at; Start 155; Stop 179
gctggttcatccttaatctggattt

SEQ ID NO: 74287 - DNA, 25 bp, Artificial
  probe
  misc_feature (1)..(25): SEQ ID NO: 5718; WAN024B7K_at; Start 336; Stop 360
caacgatgagcttattgacaatttc

SEQ ID NO: 74288 - DNA, 25 bp, Artificial
  probe
  misc_feature (1)..(25): SEQ ID NO: 5718; WAN024B7K_at; Start 290; Stop 314
tccatttcagctgtgaaggtcacgt

SEQ ID NO: 74289 - DNA, 25 bp, Artificial
  probe
  misc_feature (1)..(25): SEQ ID NO: 5718; WAN024B7K_at; Start 392; Stop 416
gccaggcgaacataataacgtttct

SEQ ID NO: 74290 - DNA, 25 bp, Artificial
  probe
  misc_feature (1)..(25): SEQ ID NO: 5718; WAN024B7K_at; Start 225; Stop 249
tgtaaaaggcatcaatgacccgtcg

SEQ ID NO: 74291 - DNA, 25 bp, Artificial
  probe
  misc_feature (1)..(25): SEQ ID NO: 5718; WAN024B7K_at; Start 251; Stop 275
cactgctcttttccaacttcgacat

SEQ ID NO: 74292 - DNA, 25 bp, Artificial
  probe
  misc_feature (1)..(25): SEQ ID NO: 5718; WAN024B7K_at; Start 213; Stop 237
tagagaatggtttgtaaaaggcatc

SEQ ID NO: 74293 - DNA, 25 bp, Artificial
  probe
  misc_feature (1)..(25): SEQ ID NO: 5718; WAN024B7K_at; Start 105; Stop 129
gaccaagtttaatgaccattggact

SEQ ID NO: 74294 - DNA, 25 bp, Artificial
  probe
  misc_feature (1)..(25): SEQ ID NO: 5718; WAN024B7K_at; Start 198; Stop 222
ccttggcaacttctttagagaatgg

SEQ ID NO: 74295 - DNA, 25 bp, Artificial
  probe
  misc_feature (1)..(25): SEQ ID NO: 5718; WAN024B7K_at; Start 231; Stop 255
aggcatcaatgacccgtcgccactg

SEQ ID NO: 74296 - DNA, 25 bp, Artificial
  probe
  misc_feature (1)..(25): SEQ ID NO: 5718; WAN024B7K_at; Start 79; Stop 103
gctacaagcgtagaatttaccaaaa

SEQ ID NO: 74297 - DNA, 25 bp, Artificial
  probe
  misc_feature (1)..(25): SEQ ID NO: 5718; WAN024B7K_at; Start 269; Stop 293
tcgacatcatccagtttaccttcca

SEQ ID NO: 74298 - DNA, 25 bp, Artificial
  probe
  misc_feature (1)..(25): SEQ ID NO: 5718; WAN024B7K_at; Start 370; Stop 394
tgtcggttcaaaacgtttggctgcc

SEQ ID NO: 74299 - DNA, 25 bp, Artificial
  probe
  misc_feature (1)..(25): SEQ ID NO: 5718; WAN024B7K_at; Start 37; Stop 61
ctctttcacgattgcttgggtatga

SEQ ID NO: 74300 - DNA, 25 bp, Artificial
  probe
  misc_feature (1)..(25): SEQ ID NO: 5718; WAN024B7K_at; Start 12; Stop 36
gacagcttggacactcaacaccaat

SEQ ID NO: 74301 - DNA, 25 bp, Artificial
  probe
  misc_feature (1)..(25): SEQ ID NO: 5718; WAN024B7K_at; Start 281; Stop 305
agtttaccttccatttcagctgtga

SEQ ID NO: 74302 - DNA, 25 bp, Artificial
  probe
  misc_feature (1)..(25): SEQ ID NO: 5718; WAN024B7K_at; Start 316; Stop 340
tacgatatctgggaaatattcaacg

SEQ ID NO: 74303 - DNA, 25 bp, Artificial
  probe
  misc_feature (1)..(25): SEQ ID NO: 5718; WAN024B7K_at; Start 182; Stop 206
tccatttcttcttcagccttggcaa

SEQ ID NO: 74304 - DNA, 25 bp, Artificial
  probe
  misc_feature (1)..(25): SEQ ID NO: 5718; WAN024B7K_at; Start 304; Stop 328
gaaggtcacgtttacgatatctggg

SEQ ID NO: 74305 - DNA, 25 bp, Artificial
  probe
  misc_feature (1)..(25): SEQ ID NO: 5718; WAN024B7K_at; Start 378; Stop 402
caaaacgtttggctgccaggcgaac

SEQ ID NO: 74306 - DNA, 25 bp, Artificial
  probe
  misc_feature (1)..(25): SEQ ID NO: 5718; WAN024B7K_at; Start 352; Stop 376
gacaatttctcccaactctgtcggt

SEQ ID NO: 74307 - DNA, 25 bp, Artificial
  probe
  misc_feature (1)..(25): SEQ ID NO: 5718; WAN024B7K_at; Start 26; Stop 50
tcaacaccaatctctttcacgattg

SEQ ID NO: 74308 - DNA, 25 bp, Artificial
  probe
  misc_feature (1)..(25): SEQ ID NO: 5718; WAN024B7K_at; Start 99; Stop 123
caaaacgaccaagtttaatgaccat

SEQ ID NO: 74309 - DNA, 25 bp, Artificial
  probe
  misc_feature (1)..(25): SEQ ID NO: 5718; WAN024B7K_at; Start 136; Stop 160
cacttcacagtcaaatccagctggt

SEQ ID NO: 74310 - DNA, 25 bp, Artificial
  probe
  misc_feature (1)..(25): SEQ ID NO: 5718; WAN024B7K_at; Start 364; Stop 388
caactctgtcggttcaaaacgtttg

SEQ ID NO: 74311 - DNA, 25 bp, Artificial
  probe
  misc_feature (1)..(25): SEQ ID NO: 5718; WAN024B7K_at; Start 417; Stop 441
gaatggtttcaatggttggcgcgta

SEQ ID NO: 74312 - DNA, 25 bp, Artificial
  probe
  misc_feature (1)..(25): SEQ ID NO: 5718; WAN024B7K_at; Start 387; Stop 411
tggctgccaggcgaacataataacg

SEQ ID NO: 74313 - DNA, 25 bp, Artificial
  probe
  misc_feature (1)..(25): SEQ ID NO: 5718; WAN024B7K_at; Start 65; Stop 89
caatctgggaaattgctacaagcgt

SEQ ID NO: 74314 - DNA, 25 bp, Artificial
  probe
  misc_feature (1)..(25): SEQ ID NO: 5718; WAN024B7K_at; Start 259; Stop 283
ttttccaacttcgacatcatccagt

SEQ ID NO: 74315 - DNA, 25 bp, Artificial
  probe
  misc_feature (1)..(25): SEQ ID NO: 5718; WAN024B7K_at; Start 148; Stop 172
aaatccagctggttcatccttaatc

SEQ ID NO: 74316 - DNA, 25 bp, Artificial
  probe
  misc_feature (1)..(25): SEQ ID NO: 5718; WAN024B7K_at; Start 195; Stop 219
cagccttggcaacttctttagagaa

SEQ ID NO: 74317 - DNA, 25 bp, Artificial
  probe
  misc_feature (1)..(25): SEQ ID NO: 5718; WAN024B7K_at; Start 4; Stop 28
tccctgatgacagcttggacactca

SEQ ID NO: 74318 - DNA, 25 bp, Artificial
  probe
  misc_feature (1)..(25): SEQ ID NO: 5718; WAN024B7K_at; Start 323; Stop 347
tctgggaaatattcaacgatgagct

SEQ ID NO: 74319 - DNA, 25 bp, Artificial
  probe
  misc_feature (1)..(25): SEQ ID NO: 5654; WAN024B7L_at; Start 178; Stop 202
tgtgaagagtttgggcataaacttt

SEQ ID NO: 74320 - DNA, 25 bp, Artificial
  probe
  misc_feature (1)..(25): SEQ ID NO: 5654; WAN024B7L_at; Start 128; Stop 152
ttattatggataatgcaagattcca

SEQ ID NO: 74321 - DNA, 25 bp, Artificial
  probe
  misc_feature (1)..(25): SEQ ID NO: 5654; WAN024B7L_at; Start 248; Stop 272
catgggctcttttgtcttgttcttg

SEQ ID NO: 74322 - DNA, 25 bp, Artificial
  probe
  misc_feature (1)..(25): SEQ ID NO: 5654; WAN024B7L_at; Start 219; Stop 243
ttcacctgagtacaatcctattgag

SEQ ID NO: 74323 - DNA, 25 bp, Artificial
  probe
  misc_feature (1)..(25): SEQ ID NO: 5654; WAN024B7L_at; Start 172; Stop 196
ctcttgtgtgaagagtttgggcata

SEQ ID NO: 74324 - DNA, 25 bp, Artificial
  probe
  misc_feature (1)..(25): SEQ ID NO: 5654; WAN024B7L_at; Start 176; Stop 200
tgtgtgaagagtttgggcataaact

SEQ ID NO: 74325 - DNA, 25 bp, Artificial
  probe
  misc_feature (1)..(25): SEQ ID NO: 5654; WAN024B7L_at; Start 163; Stop 187
aagctagaactcttgtgtgaagagt

SEQ ID NO: 74326 - DNA, 25 bp, Artificial
  probe
  misc_feature (1)..(25): SEQ ID NO: 5654; WAN024B7L_at; Start 175; Stop 199
ttgtgtgaagagtttgggcataaac

SEQ ID NO: 74327 - DNA, 25 bp, Artificial
  probe
  misc_feature (1)..(25): SEQ ID NO: 5654; WAN024B7L_at; Start 180; Stop 204
tgaagagtttgggcataaactttta

SEQ ID NO: 74328 - DNA, 25 bp, Artificial
  probe
  misc_feature (1)..(25): SEQ ID NO: 5654; WAN024B7L_at; Start 243; Stop 267
gaaaacatgggctcttttgtcttgt

SEQ ID NO: 74329 - DNA, 25 bp, Artificial
  probe
  misc_feature (1)..(25): SEQ ID NO: 5654; WAN024B7L_at; Start 134; Stop 158
tggataatgcaagattccatagaat

SEQ ID NO: 74330 - DNA, 25 bp, Artificial
  probe
  misc_feature (1)..(25): SEQ ID NO: 5654; WAN024B7L_at; Start 210; Stop 234
tcctccctattcacctgagtacaat

SEQ ID NO: 74331 - DNA, 25 bp, Artificial
  probe
  misc_feature (1)..(25): SEQ ID NO: 5654; WAN024B7L_at; Start 165; Stop 189
gctagaactcttgtgtgaagagttt

SEQ ID NO: 74332 - DNA, 25 bp, Artificial
  probe
  misc_feature (1)..(25): SEQ ID NO: 5654; WAN024B7L_at; Start 217; Stop 241
tattcacctgagtacaatcctattg

SEQ ID NO: 74333 - DNA, 25 bp, Artificial
  probe
  misc_feature (1)..(25): SEQ ID NO: 5654; WAN024B7L_at; Start 129; Stop 153
tattatggataatgcaagattccat

SEQ ID NO: 74334 - DNA, 25 bp, Artificial
  probe
  misc_feature (1)..(25): SEQ ID NO: 5654; WAN024B7L_at; Start 169; Stop 193
gaactcttgtgtgaagagtttgggc

SEQ ID NO: 74335 - DNA, 25 bp, Artificial
  probe
  misc_feature (1)..(25): SEQ ID NO: 5654; WAN024B7L_at; Start 174; Stop 198
cttgtgtgaagagtttgggcataaa

SEQ ID NO: 74336 - DNA, 25 bp, Artificial
  probe
  misc_feature (1)..(25): SEQ ID NO: 5654; WAN024B7L_at; Start 218; Stop 242
attcacctgagtacaatcctattga

SEQ ID NO: 74337 - DNA, 25 bp, Artificial
  probe
  misc_feature (1)..(25): SEQ ID NO: 5654; WAN024B7L_at; Start 215; Stop 239
cctattcacctgagtacaatcctat

SEQ ID NO: 74338 - DNA, 25 bp, Artificial
  probe
  misc_feature (1)..(25): SEQ ID NO: 5654; WAN024B7L_at; Start 162; Stop 186
gaagctagaactcttgtgtgaagag

SEQ ID NO: 74339 - DNA, 25 bp, Artificial
  probe
  misc_feature (1)..(25): SEQ ID NO: 5654; WAN024B7L_at; Start 170; Stop 194
aactcttgtgtgaagagtttgggca

SEQ ID NO: 74340 - DNA, 25 bp, Artificial
  probe
  misc_feature (1)..(25): SEQ ID NO: 5654; WAN024B7L_at; Start 150; Stop 174
ccatagaatggggaagctagaactc

SEQ ID NO: 74341 - DNA, 25 bp, Artificial
  probe
  misc_feature (1)..(25): SEQ ID NO: 5654; WAN024B7L_at; Start 202; Stop 226
ttacctcttcctccctattcacctg

SEQ ID NO: 74342 - DNA, 25 bp, Artificial
  probe
  misc_feature (1)..(25): SEQ ID NO: 5654; WAN024B7L_at; Start 177; Stop 201
gtgtgaagagtttgggcataaactt

SEQ ID NO: 74343 - DNA, 25 bp, Artificial
  probe
  misc_feature (1)..(25): SEQ ID NO: 5654; WAN024B7L_at; Start 132; Stop 156
tatggataatgcaagattccataga

SEQ ID NO: 74344 - DNA, 25 bp, Artificial
  probe
  misc_feature (1)..(25): SEQ ID NO: 5654; WAN024B7L_at; Start 171; Stop 195
actcttgtgtgaagagtttgggcat

SEQ ID NO: 74345 - DNA, 25 bp, Artificial
  probe
  misc_feature (1)..(25): SEQ ID NO: 5654; WAN024B7L_at; Start 209; Stop 233
ttcctccctattcacctgagtacaa

SEQ ID NO: 74346 - DNA, 25 bp, Artificial
  probe
  misc_feature (1)..(25): SEQ ID NO: 5654; WAN024B7L_at; Start 161; Stop 185
ggaagctagaactcttgtgtgaaga

SEQ ID NO: 74347 - DNA, 25 bp, Artificial
  probe
  misc_feature (1)..(25): SEQ ID NO: 5654; WAN024B7L_at; Start 246; Stop 270
aacatgggctcttttgtcttgttct

SEQ ID NO: 74348 - DNA, 25 bp, Artificial
  probe
  misc_feature (1)..(25): SEQ ID NO: 5654; WAN024B7L_at; Start 250; Stop 274
tgggctcttttgtcttgttcttgtt

SEQ ID NO: 74349 - DNA, 25 bp, Artificial
  probe
  misc_feature (1)..(25): SEQ ID NO: 5654; WAN024B7L_at; Start 173; Stop 197
tcttgtgtgaagagtttgggcataa

SEQ ID NO: 74350 - DNA, 25 bp, Artificial
  probe
  misc_feature (1)..(25): SEQ ID NO: 5654; WAN024B7L_at; Start 167; Stop 191
tagaactcttgtgtgaagagtttgg

SEQ ID NO: 74351 - DNA, 25 bp, Artificial
  probe
  misc_feature (1)..(25): SEQ ID NO: 5654; WAN024B7L_at; Start 213; Stop 237
tccctattcacctgagtacaatcct

SEQ ID NO: 74352 - DNA, 25 bp, Artificial
  probe
  misc_feature (1)..(25): SEQ ID NO: 5654; WAN024B7L_at; Start 245; Stop 269
aaacatgggctcttttgtcttgttc

SEQ ID NO: 74353 - DNA, 25 bp, Artificial
  probe
  misc_feature (1)..(25): SEQ ID NO: 5097; WAN024B7M_at; Start 725; Stop 749
caacgaaggcgtataatcttgatta

SEQ ID NO: 74354 - DNA, 25 bp, Artificial
  probe
  misc_feature (1)..(25): SEQ ID NO: 5097; WAN024B7M_at; Start 307; Stop 331
ttttttgaatggagcaccgcaaagg

SEQ ID NO: 74355 - DNA, 25 bp, Artificial
  probe
  misc_feature (1)..(25): SEQ ID NO: 5097; WAN024B7M_at; Start 335; Stop 359
ggattgacaacattagaaattcaga

SEQ ID NO: 74356 - DNA, 25 bp, Artificial
  probe
  misc_feature (1)..(25): SEQ ID NO: 5097; WAN024B7M_at; Start 350; Stop 374
gaaattcagatcgtccttggaaaag

SEQ ID NO: 74357 - DNA, 25 bp, Artificial
  probe
  misc_feature (1)..(25): SEQ ID NO: 5097; WAN024B7M_at; Start 1066; Stop 1090
gatccgtttgatgagattattggtc

SEQ ID NO: 74358 - DNA, 25 bp, Artificial
  probe
  misc_feature (1)..(25): SEQ ID NO: 5097; WAN024B7M_at; Start 1054; Stop 1078
ggcattgcgcttgatccgtttgatg

SEQ ID NO: 74359 - DNA, 25 bp, Artificial
  probe
  misc_feature (1)..(25): SEQ ID NO: 5097; WAN024B7M_at; Start 481; Stop 505
tacgatggtagcatctctgatgcaa

SEQ ID NO: 74360 - DNA, 25 bp, Artificial
  probe
  misc_feature (1)..(25): SEQ ID NO: 5097; WAN024B7M_at; Start 428; Stop 452
tcgaaaaagatgcagagtcaacact

SEQ ID NO: 74361 - DNA, 25 bp, Artificial
  probe
  misc_feature (1)..(25): SEQ ID NO: 5097; WAN024B7M_at; Start 664; Stop 688
tataatatctccctagatgaattgg

SEQ ID NO: 74362 - DNA, 25 bp, Artificial
  probe
  misc_feature (1)..(25): SEQ ID NO: 5097; WAN024B7M_at; Start 383; Stop 407
aagtttatttgcaaacatggcatgg

SEQ ID NO: 74363 - DNA, 25 bp, Artificial
  probe
  misc_feature (1)..(25): SEQ ID NO: 5097; WAN024B7M_at; Start 985; Stop 1009
ccagattttaaagaatatcagagcg

SEQ ID NO: 74364 - DNA, 25 bp, Artificial
  probe
  misc_feature (1)..(25): SEQ ID NO: 5097; WAN024B7M_at; Start 452; Stop 476
tttcaaaatcatatatcaggatggc

SEQ ID NO: 74365 - DNA, 25 bp, Artificial
  probe
  misc_feature (1)..(25): SEQ ID NO: 5097; WAN024B7M_at; Start 321; Stop 345
caccgcaaaggtatggattgacaac

SEQ ID NO: 74366 - DNA, 25 bp, Artificial
  probe
  misc_feature (1)..(25): SEQ ID NO: 5097; WAN024B7M_at; Start 193; Stop 217
gctgatgaactattaaaacaagatg

SEQ ID NO: 74367 - DNA, 25 bp, Artificial
  probe
  misc_feature (1)..(25): SEQ ID NO: 5097; WAN024B7M_at; Start 467; Stop 491
tcaggatggctaaatacgatggtag

SEQ ID NO: 74368 - DNA, 25 bp, Artificial
  probe
  misc_feature (1)..(25): SEQ ID NO: 5097; WAN024B7M_at; Start 639; Stop 663
tataaaccatacagtcagatctaag

SEQ ID NO: 74369 - DNA, 25 bp, Artificial
  probe
  misc_feature (1)..(25): SEQ ID NO: 5097; WAN024B7M_at; Start 398; Stop 422
catggcatggttctgatggagttaa

SEQ ID NO: 74370 - DNA, 25 bp, Artificial
  probe
  misc_feature (1)..(25): SEQ ID NO: 5097; WAN024B7M_at; Start 517; Stop 541
tgccaactgcaaacacaaacagaac

SEQ ID NO: 74371 - DNA, 25 bp, Artificial
  probe
  misc_feature (1)..(25): SEQ ID NO: 5097; WAN024B7M_at; Start 885; Stop 909
tccgcaggatttaatgtttgtggct

SEQ ID NO: 74372 - DNA, 25 bp, Artificial
  probe
  misc_feature (1)..(25): SEQ ID NO: 5097; WAN024B7M_at; Start 162; Stop 186
tagaggatatggagacaatccaaag

SEQ ID NO: 74373 - DNA, 25 bp, Artificial
  probe
  misc_feature (1)..(25): SEQ ID NO: 5097; WAN024B7M_at; Start 559; Stop 583
tggttggctgataatgttgaaatct

SEQ ID NO: 74374 - DNA, 25 bp, Artificial
  probe
  misc_feature (1)..(25): SEQ ID NO: 5097; WAN024B7M_at; Start 577; Stop 601
gaaatcttggagtatggtttaccaa

SEQ ID NO: 74375 - DNA, 25 bp, Artificial
  probe
  misc_feature (1)..(25): SEQ ID NO: 5097; WAN024B7M_at; Start 931; Stop 955
tcgtcagcacccatagattttttgt

SEQ ID NO: 74376 - DNA, 25 bp, Artificial
  probe
  misc_feature (1)..(25): SEQ ID NO: 5097; WAN024B7M_at; Start 965; Stop 989
gagtagtctttctgtatctaccaga

SEQ ID NO: 74377 - DNA, 25 bp, Artificial
  probe
  misc_feature (1)..(25): SEQ ID NO: 5097; WAN024B7M_at; Start 150; Stop 174
taactttggtggtagaggatatgga

SEQ ID NO: 74378 - DNA, 25 bp, Artificial
  probe
  misc_feature (1)..(25): SEQ ID NO: 5097; WAN024B7M_at; Start 917; Stop 941
tgatttcagactattcgtcagcacc

SEQ ID NO: 74379 - DNA, 25 bp, Artificial
  probe
  misc_feature (1)..(25): SEQ ID NO: 5097; WAN024B7M_at; Start 222; Stop 246
tcttgatttagtttgggtagtggaa

SEQ ID NO: 74380 - DNA, 25 bp, Artificial
  probe
  misc_feature (1)..(25): SEQ ID NO: 5097; WAN024B7M_at; Start 870; Stop 894
gacagattatcctaatccgcaggat

SEQ ID NO: 74381 - DNA, 25 bp, Artificial
  probe
  misc_feature (1)..(25): SEQ ID NO: 5097; WAN024B7M_at; Start 710; Stop 734
ttagggatgatgcttcaacgaaggc

SEQ ID NO: 74382 - DNA, 25 bp, Artificial
  probe
  misc_feature (1)..(25): SEQ ID NO: 5097; WAN024B7M_at; Start 178; Stop 202
aatccaaagtatattgctgatgaac

SEQ ID NO: 74383 - DNA, 25 bp, Artificial
  probe
  misc_feature (1)..(25): SEQ ID NO: 5097; WAN024B7M_at; Start 627; Stop 651
gaaagttgaccatataaaccataca

SEQ ID NO: 74384 - DNA, 25 bp, Artificial
  probe
  misc_feature (1)..(25): SEQ ID NO: 5097; WAN024B7M_at; Start 502; Stop 526
gcaatcatttctagttgccaactgc

SEQ ID NO: 74385 - DNA, 25 bp, Artificial
  probe
  misc_feature (1)..(25): SEQ ID NO: 5097; WAN024B7M_at; Start 796; Stop 820
aaagtattgattcgttttcatccaa

SEQ ID NO: 74386 - DNA, 25 bp, Artificial
  probe
  misc_feature (1)..(25): SEQ ID NO: 5097; WAN024B7M_at; Start 695; Stop 719
tgtatatgcctacttttagggatga

SEQ ID NO: 74387 - DNA, 25 bp, Artificial
  probe
  misc_feature (1)..(25): SEQ ID NO: 5790; WAN024B7N_at; Start 99; Stop 123
ggatttcactgatttgtattaataa

SEQ ID NO: 74388 - DNA, 25 bp, Artificial
  probe
  misc_feature (1)..(25): SEQ ID NO: 5790; WAN024B7N_at; Start 90; Stop 114
gaaatccatggatttcactgatttg

SEQ ID NO: 74389 - DNA, 25 bp, Artificial
  probe
  misc_feature (1)..(25): SEQ ID NO: 5790; WAN024B7N_at; Start 93; Stop 117
atccatggatttcactgatttgtat

SEQ ID NO: 74390 - DNA, 25 bp, Artificial
  probe
  misc_feature (1)..(25): SEQ ID NO: 5790; WAN024B7N_at; Start 84; Stop 108
atcagtgaaatccatggatttcact

SEQ ID NO: 74391 - DNA, 25 bp, Artificial
  probe
  misc_feature (1)..(25): SEQ ID NO: 5790; WAN024B7N_at; Start 121; Stop 145
taaaattgtttatatggttgattga

SEQ ID NO: 74392 - DNA, 25 bp, Artificial
  probe
  misc_feature (1)..(25): SEQ ID NO: 5790; WAN024B7N_at; Start 78; Stop 102
taaaaaatcagtgaaatccatggat

SEQ ID NO: 74393 - DNA, 25 bp, Artificial
  probe
  misc_feature (1)..(25): SEQ ID NO: 5790; WAN024B7N_at; Start 81; Stop 105
aaaatcagtgaaatccatggatttc

SEQ ID NO: 74394 - DNA, 25 bp, Artificial
  probe
  misc_feature (1)..(25): SEQ ID NO: 5790; WAN024B7N_at; Start 120; Stop 144
ataaaattgtttatatggttgattg

SEQ ID NO: 74395 - DNA, 25 bp, Artificial
  probe
  misc_feature (1)..(25): SEQ ID NO: 5790; WAN024B7N_at; Start 88; Stop 112
gtgaaatccatggatttcactgatt

SEQ ID NO: 74396 - DNA, 25 bp, Artificial
  probe
  misc_feature (1)..(25): SEQ ID NO: 5790; WAN024B7N_at; Start 96; Stop 120
catggatttcactgatttgtattaa

SEQ ID NO: 74397 - DNA, 25 bp, Artificial
  probe
  misc_feature (1)..(25): SEQ ID NO: 5790; WAN024B7N_at; Start 77; Stop 101
ttaaaaaatcagtgaaatccatgga

SEQ ID NO: 74398 - DNA, 25 bp, Artificial
  probe
  misc_feature (1)..(25): SEQ ID NO: 5790; WAN024B7N_at; Start 118; Stop 142
taataaaattgtttatatggttgat

SEQ ID NO: 74399 - DNA, 25 bp, Artificial
  probe
  misc_feature (1)..(25): SEQ ID NO: 5790; WAN024B7N_at; Start 79; Stop 103
aaaaaatcagtgaaatccatggatt

SEQ ID NO: 74400 - DNA, 25 bp, Artificial
  probe
  misc_feature (1)..(25): SEQ ID NO: 5790; WAN024B7N_at; Start 76; Stop 100
cttaaaaaatcagtgaaatccatgg

SEQ ID NO: 74401 - DNA, 25 bp, Artificial
  probe
  misc_feature (1)..(25): SEQ ID NO: 5790; WAN024B7N_at; Start 101; Stop 125
atttcactgatttgtattaataaaa

SEQ ID NO: 74402 - DNA, 25 bp, Artificial
  probe
  misc_feature (1)..(25): SEQ ID NO: 5790; WAN024B7N_at; Start 73; Stop 97
aatcttaaaaaatcagtgaaatcca

SEQ ID NO: 74403 - DNA, 25 bp, Artificial
  probe
  misc_feature (1)..(25): SEQ ID NO: 5790; WAN024B7N_at; Start 94; Stop 118
tccatggatttcactgatttgtatt

SEQ ID NO: 74404 - DNA, 25 bp, Artificial
  probe
  misc_feature (1)..(25): SEQ ID NO: 5790; WAN024B7N_at; Start 82; Stop 106
aaatcagtgaaatccatggatttca

SEQ ID NO: 74405 - DNA, 25 bp, Artificial
  probe
  misc_feature (1)..(25): SEQ ID NO: 5790; WAN024B7N_at; Start 75; Stop 99
tcttaaaaaatcagtgaaatccatg

SEQ ID NO: 74406 - DNA, 25 bp, Artificial
  probe
  misc_feature (1)..(25): SEQ ID NO: 5790; WAN024B7N_at; Start 100; Stop 124
gatttcactgatttgtattaataaa

SEQ ID NO: 74407 - DNA, 25 bp, Artificial
  probe
  misc_feature (1)..(25): SEQ ID NO: 5790; WAN024B7N_at; Start 89; Stop 113
tgaaatccatggatttcactgattt

SEQ ID NO: 74408 - DNA, 25 bp, Artificial
  probe
  misc_feature (1)..(25): SEQ ID NO: 5790; WAN024B7N_at; Start 87; Stop 111
agtgaaatccatggatttcactgat

SEQ ID NO: 74409 - DNA, 25 bp, Artificial
  probe
  misc_feature (1)..(25): SEQ ID NO: 5790; WAN024B7N_at; Start 103; Stop 127
ttcactgatttgtattaataaaatt

SEQ ID NO: 74410 - DNA, 25 bp, Artificial
  probe
  misc_feature (1)..(25): SEQ ID NO: 5790; WAN024B7N_at; Start 91; Stop 115
aaatccatggatttcactgatttgt

SEQ ID NO: 74411 - DNA, 25 bp, Artificial
  probe
  misc_feature (1)..(25): SEQ ID NO: 5790; WAN024B7N_at; Start 85; Stop 109
tcagtgaaatccatggatttcactg

SEQ ID NO: 74412 - DNA, 25 bp, Artificial
  probe
  misc_feature (1)..(25): SEQ ID NO: 5790; WAN024B7N_at; Start 83; Stop 107
aatcagtgaaatccatggatttcac

SEQ ID NO: 74413 - DNA, 25 bp, Artificial
  probe
  misc_feature (1)..(25): SEQ ID NO: 5790; WAN024B7N_at; Start 74; Stop 98
atcttaaaaaatcagtgaaatccat

SEQ ID NO: 74414 - DNA, 25 bp, Artificial
  probe
  misc_feature (1)..(25): SEQ ID NO: 5790; WAN024B7N_at; Start 98; Stop 122
tggatttcactgatttgtattaata

SEQ ID NO: 74415 - DNA, 25 bp, Artificial
  probe
  misc_feature (1)..(25): SEQ ID NO: 5790; WAN024B7N_at; Start 80; Stop 104
aaaaatcagtgaaatccatggattt

SEQ ID NO: 74416 - DNA, 25 bp, Artificial
  probe
  misc_feature (1)..(25): SEQ ID NO: 5790; WAN024B7N_at; Start 86; Stop 110
cagtgaaatccatggatttcactga

SEQ ID NO: 74417 - DNA, 25 bp, Artificial
  probe
  misc_feature (1)..(25): SEQ ID NO: 5790; WAN024B7N_at; Start 92; Stop 116
aatccatggatttcactgatttgta

SEQ ID NO: 74418 - DNA, 25 bp, Artificial
  probe
  misc_feature (1)..(25): SEQ ID NO: 5790; WAN024B7N_at; Start 97; Stop 121
atggatttcactgatttgtattaat

SEQ ID NO: 74419 - DNA, 25 bp, Artificial
  probe
  misc_feature (1)..(25): SEQ ID NO: 5790; WAN024B7N_at; Start 95; Stop 119
ccatggatttcactgatttgtatta

SEQ ID NO: 74420 - DNA, 25 bp, Artificial
  probe
  misc_feature (1)..(25): SEQ ID NO: 5790; WAN024B7N_at; Start 102; Stop 126
tttcactgatttgtattaataaaat

SEQ ID NO: 74421 - DNA, 25 bp, Artificial
  probe
  misc_feature (1)..(25): SEQ ID NO: 5653; WAN024B7O_x_at; Start 13; Stop 37
ctaacaaatggtgaattaatcgctc

SEQ ID NO: 74422 - DNA, 25 bp, Artificial
  probe
  misc_feature (1)..(25): SEQ ID NO: 5653; WAN024B7O_x_at; Start 27; Stop 51
attaatcgctccaatgacttacgaa

SEQ ID NO: 74423 - DNA, 25 bp, Artificial
  probe
  misc_feature (1)..(25): SEQ ID NO: 5653; WAN024B7O_x_at; Start 105; Stop 129
aacattaaccacaccatcggttatt

SEQ ID NO: 74424 - DNA, 25 bp, Artificial
  probe
  misc_feature (1)..(25): SEQ ID NO: 5653; WAN024B7O_x_at; Start 9; Stop 33
aggtctaacaaatggtgaattaatc

SEQ ID NO: 74425 - DNA, 25 bp, Artificial
  probe
  misc_feature (1)..(25): SEQ ID NO: 5653; WAN024B7O_x_at; Start 25; Stop 49
gaattaatcgctccaatgacttacg

SEQ ID NO: 74426 - DNA, 25 bp, Artificial
  probe
  misc_feature (1)..(25): SEQ ID NO: 5653; WAN024B7O_x_at; Start 21; Stop 45
tggtgaattaatcgctccaatgact

SEQ ID NO: 74427 - DNA, 25 bp, Artificial
  probe
  misc_feature (1)..(25): SEQ ID NO: 5653; WAN024B7O_x_at; Start 26; Stop 50
aattaatcgctccaatgacttacga

SEQ ID NO: 74428 - DNA, 25 bp, Artificial
  probe
  misc_feature (1)..(25): SEQ ID NO: 5653; WAN024B7O_x_at; Start 15; Stop 39
aacaaatggtgaattaatcgctcca

SEQ ID NO: 74429 - DNA, 25 bp, Artificial
  probe
  misc_feature (1)..(25): SEQ ID NO: 5653; WAN024B7O_x_at; Start 113; Stop 137
ccacaccatcggttattatagtaaa

SEQ ID NO: 74430 - DNA, 25 bp, Artificial
  probe
  misc_feature (1)..(25): SEQ ID NO: 5653; WAN024B7O_x_at; Start 11; Stop 35
gtctaacaaatggtgaattaatcgc

SEQ ID NO: 74431 - DNA, 25 bp, Artificial
  probe
  misc_feature (1)..(25): SEQ ID NO: 5653; WAN024B7O_x_at; Start 22; Stop 46
ggtgaattaatcgctccaatgactt

SEQ ID NO: 74432 - DNA, 25 bp, Artificial
  probe
  misc_feature (1)..(25): SEQ ID NO: 5653; WAN024B7O_x_at; Start 23; Stop 47
gtgaattaatcgctccaatgactta

SEQ ID NO: 74433 - DNA, 25 bp, Artificial
  probe
  misc_feature (1)..(25): SEQ ID NO: 5653; WAN024B7O_x_at; Start 10; Stop 34
ggtctaacaaatggtgaattaatcg

SEQ ID NO: 74434 - DNA, 25 bp, Artificial
  probe
  misc_feature (1)..(25): SEQ ID NO: 5653; WAN024B7O_x_at; Start 17; Stop 41
caaatggtgaattaatcgctccaat

SEQ ID NO: 74435 - DNA, 25 bp, Artificial
  probe
  misc_feature (1)..(25): SEQ ID NO: 5653; WAN024B7O_x_at; Start 102; Stop 126
accaacattaaccacaccatcggtt

SEQ ID NO: 74436 - DNA, 25 bp, Artificial
  probe
  misc_feature (1)..(25): SEQ ID NO: 5653; WAN024B7O_x_at; Start 12; Stop 36
tctaacaaatggtgaattaatcgct

SEQ ID NO: 74437 - DNA, 25 bp, Artificial
  probe
  misc_feature (1)..(25): SEQ ID NO: 5653; WAN024B7O_x_at; Start 112; Stop 136
accacaccatcggttattatagtaa

SEQ ID NO: 74438 - DNA, 25 bp, Artificial
  probe
  misc_feature (1)..(25): SEQ ID NO: 5653; WAN024B7O_x_at; Start 19; Stop 43
aatggtgaattaatcgctccaatga

SEQ ID NO: 74439 - DNA, 25 bp, Artificial
  probe
  misc_feature (1)..(25): SEQ ID NO: 5653; WAN024B7O_x_at; Start 114; Stop 138
cacaccatcggttattatagtaaaa

SEQ ID NO: 74440 - DNA, 25 bp, Artificial
  probe
  misc_feature (1)..(25): SEQ ID NO: 5653; WAN024B7O_x_at; Start 18; Stop 42
aaatggtgaattaatcgctccaatg

SEQ ID NO: 74441 - DNA, 25 bp, Artificial
  probe
  misc_feature (1)..(25): SEQ ID NO: 5653; WAN024B7O_x_at; Start 110; Stop 134
taaccacaccatcggttattatagt

SEQ ID NO: 74442 - DNA, 25 bp, Artificial
  probe
  misc_feature (1)..(25): SEQ ID NO: 5653; WAN024B7O_x_at; Start 31; Stop 55
atcgctccaatgacttacgaagaga

SEQ ID NO: 74443 - DNA, 25 bp, Artificial
  probe
  misc_feature (1)..(25): SEQ ID NO: 5653; WAN024B7O_x_at; Start 20; Stop 44
atggtgaattaatcgctccaatgac

SEQ ID NO: 74444 - DNA, 25 bp, Artificial
  probe
  misc_feature (1)..(25): SEQ ID NO: 5653; WAN024B7O_x_at; Start 100; Stop 124
ttaccaacattaaccacaccatcgg

SEQ ID NO: 74445 - DNA, 25 bp, Artificial
  probe
  misc_feature (1)..(25): SEQ ID NO: 5653; WAN024B7O_x_at; Start 29; Stop 53
taatcgctccaatgacttacgaaga

SEQ ID NO: 74446 - DNA, 25 bp, Artificial
  probe
  misc_feature (1)..(25): SEQ ID NO: 5653; WAN024B7O_x_at; Start 24; Stop 48
tgaattaatcgctccaatgacttac

SEQ ID NO: 74447 - DNA, 25 bp, Artificial
  probe
  misc_feature (1)..(25): SEQ ID NO: 5653; WAN024B7O_x_at; Start 106; Stop 130
acattaaccacaccatcggttatta

SEQ ID NO: 74448 - DNA, 25 bp, Artificial
  probe
  misc_feature (1)..(25): SEQ ID NO: 5653; WAN024B7O_x_at; Start 109; Stop 133
ttaaccacaccatcggttattatag

SEQ ID NO: 74449 - DNA, 25 bp, Artificial
  probe
  misc_feature (1)..(25): SEQ ID NO: 5653; WAN024B7O_x_at; Start 111; Stop 135
aaccacaccatcggttattatagta

SEQ ID NO: 74450 - DNA, 25 bp, Artificial
  probe
  misc_feature (1)..(25): SEQ ID NO: 5653; WAN024B7O_x_at; Start 104; Stop 128
caacattaaccacaccatcggttat

SEQ ID NO: 74451 - DNA, 25 bp, Artificial
  probe
  misc_feature (1)..(25): SEQ ID NO: 5653; WAN024B7O_x_at; Start 108; Stop 132
attaaccacaccatcggttattata

SEQ ID NO: 74452 - DNA, 25 bp, Artificial
  probe
  misc_feature (1)..(25): SEQ ID NO: 5653; WAN024B7O_x_at; Start 103; Stop 127
ccaacattaaccacaccatcggtta

SEQ ID NO: 74453 - DNA, 25 bp, Artificial
  probe
  misc_feature (1)..(25): SEQ ID NO: 5653; WAN024B7O_x_at; Start 14; Stop 38
taacaaatggtgaattaatcgctcc

SEQ ID NO: 74454 - DNA, 25 bp, Artificial
  probe
  misc_feature (1)..(25): SEQ ID NO: 5653; WAN024B7O_x_at; Start 101; Stop 125
taccaacattaaccacaccatcggt

SEQ ID NO: 74455 - DNA, 25 bp, Artificial
  probe
  misc_feature (1)..(25): SEQ ID NO: 4702; WAN024B7P_x_at; Start 1; Stop 25
tgcgatctatatagtaaaatgaaac

SEQ ID NO: 74456 - DNA, 25 bp, Artificial
  probe
  misc_feature (1)..(25): SEQ ID NO: 4702; WAN024B7P_x_at; Start 49; Stop 73
acagtcaaatcgatttctaaaaatg

SEQ ID NO: 74457 - DNA, 25 bp, Artificial
  probe
  misc_feature (1)..(25): SEQ ID NO: 4702; WAN024B7P_x_at; Start 51; Stop 75
agtcaaatcgatttctaaaaatgtt

SEQ ID NO: 74458 - DNA, 25 bp, Artificial
  probe
  misc_feature (1)..(25): SEQ ID NO: 4702; WAN024B7P_x_at; Start 33; Stop 57
ggacaaatcgatcaggacagtcaaa

SEQ ID NO: 74459 - DNA, 25 bp, Artificial
  probe
  misc_feature (1)..(25): SEQ ID NO: 4702; WAN024B7P_x_at; Start 32; Stop 56
aggacaaatcgatcaggacagtcaa

SEQ ID NO: 74460 - DNA, 25 bp, Artificial
  probe
  misc_feature (1)..(25): SEQ ID NO: 4702; WAN024B7P_x_at; Start 6; Stop 30
tctatatagtaaaatgaaacaagaa

SEQ ID NO: 74461 - DNA, 25 bp, Artificial
  probe
  misc_feature (1)..(25): SEQ ID NO: 4702; WAN024B7P_x_at; Start 26; Stop 50
aagaacaggacaaatcgatcaggac

SEQ ID NO: 74462 - DNA, 25 bp, Artificial
  probe
  misc_feature (1)..(25): SEQ ID NO: 4702; WAN024B7P_x_at; Start 18; Stop 42
aatgaaacaagaacaggacaaatcg

SEQ ID NO: 74463 - DNA, 25 bp, Artificial
  probe
  misc_feature (1)..(25): SEQ ID NO: 4702; WAN024B7P_x_at; Start 47; Stop 71
ggacagtcaaatcgatttctaaaaa

SEQ ID NO: 74464 - DNA, 25 bp, Artificial
  probe
  misc_feature (1)..(25): SEQ ID NO: 4702; WAN024B7P_x_at; Start 19; Stop 43
atgaaacaagaacaggacaaatcga

SEQ ID NO: 74465 - DNA, 25 bp, Artificial
  probe
  misc_feature (1)..(25): SEQ ID NO: 4702; WAN024B7P_x_at; Start 20; Stop 44
tgaaacaagaacaggacaaatcgat

SEQ ID NO: 74466 - DNA, 25 bp, Artificial
  probe
  misc_feature (1)..(25): SEQ ID NO: 4702; WAN024B7P_x_at; Start 9; Stop 33
atatagtaaaatgaaacaagaacag

SEQ ID NO: 74467 - DNA, 25 bp, Artificial
  probe
  misc_feature (1)..(25): SEQ ID NO: 4702; WAN024B7P_x_at; Start 5; Stop 29
atctatatagtaaaatgaaacaaga

SEQ ID NO: 74468 - DNA, 25 bp, Artificial
  probe
  misc_feature (1)..(25): SEQ ID NO: 4702; WAN024B7P_x_at; Start 10; Stop 34
tatagtaaaatgaaacaagaacagg

SEQ ID NO: 74469 - DNA, 25 bp, Artificial
  probe
  misc_feature (1)..(25): SEQ ID NO: 4702; WAN024B7P_x_at; Start 8; Stop 32
tatatagtaaaatgaaacaagaaca

SEQ ID NO: 74470 - DNA, 25 bp, Artificial
  probe
  misc_feature (1)..(25): SEQ ID NO: 4702; WAN024B7P_x_at; Start 22; Stop 46
aaacaagaacaggacaaatcgatca

SEQ ID NO: 74471 - DNA, 25 bp, Artificial
  probe
  misc_feature (1)..(25): SEQ ID NO: 4702; WAN024B7P_x_at; Start 50; Stop 74
cagtcaaatcgatttctaaaaatgt

SEQ ID NO: 74472 - DNA, 25 bp, Artificial
  probe
  misc_feature (1)..(25): SEQ ID NO: 4702; WAN024B7P_x_at; Start 21; Stop 45
gaaacaagaacaggacaaatcgatc

SEQ ID NO: 74473 - DNA, 25 bp, Artificial
  probe
  misc_feature (1)..(25): SEQ ID NO: 4702; WAN024B7P_x_at; Start 27; Stop 51
agaacaggacaaatcgatcaggaca

SEQ ID NO: 74474 - DNA, 25 bp, Artificial
  probe
  misc_feature (1)..(25): SEQ ID NO: 4702; WAN024B7P_x_at; Start 31; Stop 55
caggacaaatcgatcaggacagtca

SEQ ID NO: 74475 - DNA, 25 bp, Artificial
  probe
  misc_feature (1)..(25): SEQ ID NO: 4702; WAN024B7P_x_at; Start 45; Stop 69
caggacagtcaaatcgatttctaaa

SEQ ID NO: 74476 - DNA, 25 bp, Artificial
  probe
  misc_feature (1)..(25): SEQ ID NO: 4702; WAN024B7P_x_at; Start 23; Stop 47
aacaagaacaggacaaatcgatcag

SEQ ID NO: 74477 - DNA, 25 bp, Artificial
  probe
  misc_feature (1)..(25): SEQ ID NO: 4702; WAN024B7P_x_at; Start 30; Stop 54
acaggacaaatcgatcaggacagtc

SEQ ID NO: 74478 - DNA, 25 bp, Artificial
  probe
  misc_feature (1)..(25): SEQ ID NO: 4702; WAN024B7P_x_at; Start 29; Stop 53
aacaggacaaatcgatcaggacagt

SEQ ID NO: 74479 - DNA, 25 bp, Artificial
  probe
  misc_feature (1)..(25): SEQ ID NO: 4702; WAN024B7P_x_at; Start 46; Stop 70
aggacagtcaaatcgatttctaaaa

SEQ ID NO: 74480 - DNA, 25 bp, Artificial
  probe
  misc_feature (1)..(25): SEQ ID NO: 4702; WAN024B7P_x_at; Start 28; Stop 52
gaacaggacaaatcgatcaggacag

SEQ ID NO: 74481 - DNA, 25 bp, Artificial
  probe
  misc_feature (1)..(25): SEQ ID NO: 4702; WAN024B7P_x_at; Start 7; Stop 31
ctatatagtaaaatgaaacaagaac

SEQ ID NO: 74482 - DNA, 25 bp, Artificial
  probe
  misc_feature (1)..(25): SEQ ID NO: 4702; WAN024B7P_x_at; Start 4; Stop 28
gatctatatagtaaaatgaaacaag

SEQ ID NO: 74483 - DNA, 25 bp, Artificial
  probe
  misc_feature (1)..(25): SEQ ID NO: 4702; WAN024B7P_x_at; Start 34; Stop 58
gacaaatcgatcaggacagtcaaat

SEQ ID NO: 74484 - DNA, 25 bp, Artificial
  probe
  misc_feature (1)..(25): SEQ ID NO: 4702; WAN024B7P_x_at; Start 25; Stop 49
caagaacaggacaaatcgatcagga

SEQ ID NO: 74485 - DNA, 25 bp, Artificial
  probe
  misc_feature (1)..(25): SEQ ID NO: 4702; WAN024B7P_x_at; Start 48; Stop 72
gacagtcaaatcgatttctaaaaat

SEQ ID NO: 74486 - DNA, 25 bp, Artificial
  probe
  misc_feature (1)..(25): SEQ ID NO: 4702; WAN024B7P_x_at; Start 12; Stop 36
tagtaaaatgaaacaagaacaggac

SEQ ID NO: 74487 - DNA, 25 bp, Artificial
  probe
  misc_feature (1)..(25): SEQ ID NO: 4702; WAN024B7P_x_at; Start 2; Stop 26
gcgatctatatagtaaaatgaaaca

SEQ ID NO: 74488 - DNA, 25 bp, Artificial
  probe
  misc_feature (1)..(25): SEQ ID NO: 4702; WAN024B7P_x_at; Start 3; Stop 27
cgatctatatagtaaaatgaaacaa

SEQ ID NO: 74489 - DNA, 25 bp, Artificial
  probe
  misc_feature (1)..(25): SEQ ID NO: 1296; WAN024B7Q_at; Start 609; Stop 633
tcttgttttctttgtgatatttgac

SEQ ID NO: 74490 - DNA, 25 bp, Artificial
  probe
  misc_feature (1)..(25): SEQ ID NO: 1296; WAN024B7Q_at; Start 743; Stop 767
tagttgcgtttgtaatcttccctaa

SEQ ID NO: 74491 - DNA, 25 bp, Artificial
  probe
  misc_feature (1)..(25): SEQ ID NO: 1296; WAN024B7Q_at; Start 325; Stop 349
gtcccgacgactatatttgatttaa

SEQ ID NO: 74492 - DNA, 25 bp, Artificial
  probe
  misc_feature (1)..(25): SEQ ID NO: 1296; WAN024B7Q_at; Start 116; Stop 140
ataacatactatcgttgttgatagc

SEQ ID NO: 74493 - DNA, 25 bp, Artificial
  probe
  misc_feature (1)..(25): SEQ ID NO: 1296; WAN024B7Q_at; Start 393; Stop 417
catactctggtcgattttgataatg

SEQ ID NO: 74494 - DNA, 25 bp, Artificial
  probe
  misc_feature (1)..(25): SEQ ID NO: 1296; WAN024B7Q_at; Start 753; Stop 777
tgtaatcttccctaaaatatcggaa

SEQ ID NO: 74495 - DNA, 25 bp, Artificial
  probe
  misc_feature (1)..(25): SEQ ID NO: 1296; WAN024B7Q_at; Start 60; Stop 84
cttagcaggacatgtgttgcttgga

SEQ ID NO: 74496 - DNA, 25 bp, Artificial
  probe
  misc_feature (1)..(25): SEQ ID NO: 1296; WAN024B7Q_at; Start 383; Stop 407
ggtatttatacatactctggtcgat

SEQ ID NO: 74497 - DNA, 25 bp, Artificial
  probe
  misc_feature (1)..(25): SEQ ID NO: 1296; WAN024B7Q_at; Start 370; Stop 394
attggagtctcatggtatttataca

SEQ ID NO: 74498 - DNA, 25 bp, Artificial
  probe
  misc_feature (1)..(25): SEQ ID NO: 1296; WAN024B7Q_at; Start 389; Stop 413
tatacatactctggtcgattttgat

SEQ ID NO: 74499 - DNA, 25 bp, Artificial
  probe
  misc_feature (1)..(25): SEQ ID NO: 1296; WAN024B7Q_at; Start 924; Stop 948
gattgtcttgggttggtatttatcc

SEQ ID NO: 74500 - DNA, 25 bp, Artificial
  probe
  misc_feature (1)..(25): SEQ ID NO: 1296; WAN024B7Q_at; Start 363; Stop 387
aaatcctattggagtctcatggtat

SEQ ID NO: 74501 - DNA, 25 bp, Artificial
  probe
  misc_feature (1)..(25): SEQ ID NO: 1296; WAN024B7Q_at; Start 830; Stop 854
gtatctatatcctccatgcaccaat

SEQ ID NO: 74502 - DNA, 25 bp, Artificial
  probe
  misc_feature (1)..(25): SEQ ID NO: 1296; WAN024B7Q_at; Start 321; Stop 345
tagagtcccgacgactatatttgat

SEQ ID NO: 74503 - DNA, 25 bp, Artificial
  probe
  misc_feature (1)..(25): SEQ ID NO: 1296; WAN024B7Q_at; Start 811; Stop 835
tatggtaaagatagtttaggtatct

SEQ ID NO: 74504 - DNA, 25 bp, Artificial
  probe
  misc_feature (1)..(25): SEQ ID NO: 1296; WAN024B7Q_at; Start 630; Stop 654
tgactttatttatatgcttgtatgg

SEQ ID NO: 74505 - DNA, 25 bp, Artificial
  probe
  misc_feature (1)..(25): SEQ ID NO: 1296; WAN024B7Q_at; Start 108; Stop 132
cacagcaaataacatactatcgttg

SEQ ID NO: 74506 - DNA, 25 bp, Artificial
  probe
  misc_feature (1)..(25): SEQ ID NO: 1296; WAN024B7Q_at; Start 410; Stop 434
tgataatgtatggattagtatctat

SEQ ID NO: 74507 - DNA, 25 bp, Artificial
  probe
  misc_feature (1)..(25): SEQ ID NO: 1296; WAN024B7Q_at; Start 678; Stop 702
taaaagggatagtgtaagctatagt

SEQ ID NO: 74508 - DNA, 25 bp, Artificial
  probe
  misc_feature (1)..(25): SEQ ID NO: 1296; WAN024B7Q_at; Start 55; Stop 79
ttagtcttagcaggacatgtgttgc

SEQ ID NO: 74509 - DNA, 25 bp, Artificial
  probe
  misc_feature (1)..(25): SEQ ID NO: 1296; WAN024B7Q_at; Start 311; Stop 335
gggcgactgttagagtcccgacgac

SEQ ID NO: 74510 - DNA, 25 bp, Artificial
  probe
  misc_feature (1)..(25): SEQ ID NO: 1296; WAN024B7Q_at; Start 328; Stop 352
ccgacgactatatttgatttaataa

SEQ ID NO: 74511 - DNA, 25 bp, Artificial
  probe
  misc_feature (1)..(25): SEQ ID NO: 1296; WAN024B7Q_at; Start 556; Stop 580
cttggaagtgtattgaacgaaattc

SEQ ID NO: 74512 - DNA, 25 bp, Artificial
  probe
  misc_feature (1)..(25): SEQ ID NO: 1296; WAN024B7Q_at; Start 645; Stop 669
gcttgtatggttcttattttatgaa

SEQ ID NO: 74513 - DNA, 25 bp, Artificial
  probe
  misc_feature (1)..(25): SEQ ID NO: 1296; WAN024B7Q_at; Start 732; Stop 756
tgtctgtatattagttgcgtttgta

SEQ ID NO: 74514 - DNA, 25 bp, Artificial
  probe
  misc_feature (1)..(25): SEQ ID NO: 1296; WAN024B7Q_at; Start 425; Stop 449
tagtatctattttaatcaaaaatcg

SEQ ID NO: 74515 - DNA, 25 bp, Artificial
  probe
  misc_feature (1)..(25): SEQ ID NO: 1296; WAN024B7Q_at; Start 827; Stop 851
taggtatctatatcctccatgcacc

SEQ ID NO: 74516 - DNA, 25 bp, Artificial
  probe
  misc_feature (1)..(25): SEQ ID NO: 1296; WAN024B7Q_at; Start 820; Stop 844
gatagtttaggtatctatatcctcc

SEQ ID NO: 74517 - DNA, 25 bp, Artificial
  probe
  misc_feature (1)..(25): SEQ ID NO: 1296; WAN024B7Q_at; Start 559; Stop 583
ggaagtgtattgaacgaaattcact

SEQ ID NO: 74518 - DNA, 25 bp, Artificial
  probe
  misc_feature (1)..(25): SEQ ID NO: 1296; WAN024B7Q_at; Start 47; Stop 71
ccatatttttagtcttagcaggaca

SEQ ID NO: 74519 - DNA, 25 bp, Artificial
  probe
  misc_feature (1)..(25): SEQ ID NO: 1296; WAN024B7Q_at; Start 315; Stop 339
gactgttagagtcccgacgactata

SEQ ID NO: 74520 - DNA, 25 bp, Artificial
  probe
  misc_feature (1)..(25): SEQ ID NO: 1296; WAN024B7Q_at; Start 740; Stop 764
tattagttgcgtttgtaatcttccc

SEQ ID NO: 74521 - DNA, 25 bp, Artificial
  probe
  misc_feature (1)..(25): SEQ ID NO: 1296; WAN024B7Q_at; Start 352; Stop 376
aatatctataaaaatcctattggag

SEQ ID NO: 74522 - DNA, 25 bp, Artificial
  probe
  misc_feature (1)..(25): SEQ ID NO: 1296; WAN024B7Q_at; Start 551; Stop 575
tctttcttggaagtgtattgaacga

SEQ ID NO: 74523 - DNA, 25 bp, Artificial
  probe
  misc_feature (1)..(25): SEQ ID NO: 2184; WAN024B7R_at; Start 189; Stop 213
tatcgagattggtggtttccctagc

SEQ ID NO: 74524 - DNA, 25 bp, Artificial
  probe
  misc_feature (1)..(25): SEQ ID NO: 2184; WAN024B7R_at; Start 716; Stop 740
acattgtccaacacatgagcagggc

SEQ ID NO: 74525 - DNA, 25 bp, Artificial
  probe
  misc_feature (1)..(25): SEQ ID NO: 2184; WAN024B7R_at; Start 63; Stop 87
taaagccattcagcacgatacccat

SEQ ID NO: 74526 - DNA, 25 bp, Artificial
  probe
  misc_feature (1)..(25): SEQ ID NO: 2184; WAN024B7R_at; Start 1043; Stop 1067
gcacctttaaaaccactttgagcac

SEQ ID NO: 74527 - DNA, 25 bp, Artificial
  probe
  misc_feature (1)..(25): SEQ ID NO: 2184; WAN024B7R_at; Start 408; Stop 432
taccgtctatcgtaagctcaagcaa

SEQ ID NO: 74528 - DNA, 25 bp, Artificial
  probe
  misc_feature (1)..(25): SEQ ID NO: 2184; WAN024B7R_at; Start 1114; Stop 1138
tattctaacgctaaacttgaggcca

SEQ ID NO: 74529 - DNA, 25 bp, Artificial
  probe
  misc_feature (1)..(25): SEQ ID NO: 2184; WAN024B7R_at; Start 79; Stop 103
gatacccatatcgaagtcttcgcta

SEQ ID NO: 74530 - DNA, 25 bp, Artificial
  probe
  misc_feature (1)..(25): SEQ ID NO: 2184; WAN024B7R_at; Start 1010; Stop 1034
gcttaattcaagacacgttacctca

SEQ ID NO: 74531 - DNA, 25 bp, Artificial
  probe
  misc_feature (1)..(25): SEQ ID NO: 2184; WAN024B7R_at; Start 426; Stop 450
caagcaatttcatttccaagaggat

SEQ ID NO: 74532 - DNA, 25 bp, Artificial
  probe
  misc_feature (1)..(25): SEQ ID NO: 2184; WAN024B7R_at; Start 310; Stop 334
gaaatggtgagacagaaaattgccc

SEQ ID NO: 74533 - DNA, 25 bp, Artificial
  probe
  misc_feature (1)..(25): SEQ ID NO: 2184; WAN024B7R_at; Start 894; Stop 918
tcctagggagtgtctgaagaaaatc

SEQ ID NO: 74534 - DNA, 25 bp, Artificial
  probe
  misc_feature (1)..(25): SEQ ID NO: 2184; WAN024B7R_at; Start 545; Stop 569
tcatgaccattcttgataacagacg

SEQ ID NO: 74535 - DNA, 25 bp, Artificial
  probe
  misc_feature (1)..(25): SEQ ID NO: 2184; WAN024B7R_at; Start 835; Stop 859
gatagtcggaaactctctcttaagc

SEQ ID NO: 74536 - DNA, 25 bp, Artificial
  probe
  misc_feature (1)..(25): SEQ ID NO: 2184; WAN024B7R_at; Start 879; Stop 903
cagagagaccttaactcctagggag

SEQ ID NO: 74537 - DNA, 25 bp, Artificial
  probe
  misc_feature (1)..(25): SEQ ID NO: 2184; WAN024B7R_at; Start 330; Stop 354
tgcccaactcctactcaacagagag

SEQ ID NO: 74538 - DNA, 25 bp, Artificial
  probe
  misc_feature (1)..(25): SEQ ID NO: 2184; WAN024B7R_at; Start 694; Stop 718
aaaattgttctcgatcgtttccaca

SEQ ID NO: 74539 - DNA, 25 bp, Artificial
  probe
  misc_feature (1)..(25): SEQ ID NO: 2184; WAN024B7R_at; Start 731; Stop 755
tgagcagggctcttaatcagactag

SEQ ID NO: 74540 - DNA, 25 bp, Artificial
  probe
  misc_feature (1)..(25): SEQ ID NO: 2184; WAN024B7R_at; Start 978; Stop 1002
tctacaagagaagaatactgaccag

SEQ ID NO: 74541 - DNA, 25 bp, Artificial
  probe
  misc_feature (1)..(25): SEQ ID NO: 2184; WAN024B7R_at; Start 653; Stop 677
gaagttatatccctctcattaagaa

SEQ ID NO: 74542 - DNA, 25 bp, Artificial
  probe
  misc_feature (1)..(25): SEQ ID NO: 2184; WAN024B7R_at; Start 479; Stop 503
gggatgaattctcctaccagaaggg

SEQ ID NO: 74543 - DNA, 25 bp, Artificial
  probe
  misc_feature (1)..(25): SEQ ID NO: 2184; WAN024B7R_at; Start 264; Stop 288
cactgtagctgaaacaactctcgtt

SEQ ID NO: 74544 - DNA, 25 bp, Artificial
  probe
  misc_feature (1)..(25): SEQ ID NO: 2184; WAN024B7R_at; Start 632; Stop 656
tcgtcactgttgatatgtctggaag

SEQ ID NO: 74545 - DNA, 25 bp, Artificial
  probe
  misc_feature (1)..(25): SEQ ID NO: 2184; WAN024B7R_at; Start 462; Stop 486
gcctgaaatcctctcctgggatgaa

SEQ ID NO: 74546 - DNA, 25 bp, Artificial
  probe
  misc_feature (1)..(25): SEQ ID NO: 2184; WAN024B7R_at; Start 593; Stop 617
tcttcaagtactcgaaagaagctag

SEQ ID NO: 74547 - DNA, 25 bp, Artificial
  probe
  misc_feature (1)..(25): SEQ ID NO: 2184; WAN024B7R_at; Start 865; Stop 889
tatgctagaactttcagagagacct

SEQ ID NO: 74548 - DNA, 25 bp, Artificial
  probe
  misc_feature (1)..(25): SEQ ID NO: 2184; WAN024B7R_at; Start 1132; Stop 1156
gaggccactaacaaactcatcaaag

SEQ ID NO: 74549 - DNA, 25 bp, Artificial
  probe
  misc_feature (1)..(25): SEQ ID NO: 2184; WAN024B7R_at; Start 250; Stop 274
tcctgtcggaaagtcactgtagctg

SEQ ID NO: 74550 - DNA, 25 bp, Artificial
  probe
  misc_feature (1)..(25): SEQ ID NO: 2184; WAN024B7R_at; Start 348; Stop 372
cagagaggctcttacacatatcgct

SEQ ID NO: 74551 - DNA, 25 bp, Artificial
  probe
  misc_feature (1)..(25): SEQ ID NO: 2184; WAN024B7R_at; Start 1149; Stop 1173
catcaaagacatcaagcgcaatgcc

SEQ ID NO: 74552 - DNA, 25 bp, Artificial
  probe
  misc_feature (1)..(25): SEQ ID NO: 2184; WAN024B7R_at; Start 445; Stop 469
gaggattacaccactttgcctgaaa

SEQ ID NO: 74553 - DNA, 25 bp, Artificial
  probe
  misc_feature (1)..(25): SEQ ID NO: 2184; WAN024B7R_at; Start 286; Stop 310
gttcagaaaaattgccaaatctcgg

SEQ ID NO: 74554 - DNA, 25 bp, Artificial
  probe
  misc_feature (1)..(25): SEQ ID NO: 2184; WAN024B7R_at; Start 235; Stop 259
cgatttcaatgcaagtcctgtcgga

SEQ ID NO: 74555 - DNA, 25 bp, Artificial
  probe
  misc_feature (1)..(25): SEQ ID NO: 2184; WAN024B7R_at; Start 503; Stop 527
ggaaattggctttcattgctcagga

SEQ ID NO: 74556 - DNA, 25 bp, Artificial
  probe
  misc_feature (1)..(25): SEQ ID NO: 2184; WAN024B7R_at; Start 566; Stop 590
gacgtcaaacaaccatccgaaatca

SEQ ID NO: 74557 - DNA, 25 bp, Artificial
  probe
  misc_feature (1)..(25): SEQ ID NO: 3411; WAN024B7S_x_at; Start 77; Stop 101
tcgctctgaacatcaaaaaagaaag

SEQ ID NO: 74558 - DNA, 25 bp, Artificial
  probe
  misc_feature (1)..(25): SEQ ID NO: 3411; WAN024B7S_x_at; Start 101; Stop 125
ggacgaaatttgtcctttctcaagc

SEQ ID NO: 74559 - DNA, 25 bp, Artificial
  probe
  misc_feature (1)..(25): SEQ ID NO: 3411; WAN024B7S_x_at; Start 80; Stop 104
ctctgaacatcaaaaaagaaaggac

SEQ ID NO: 74560 - DNA, 25 bp, Artificial
  probe
  misc_feature (1)..(25): SEQ ID NO: 3411; WAN024B7S_x_at; Start 68; Stop 92
ggatttttatcgctctgaacatcaa

SEQ ID NO: 74561 - DNA, 25 bp, Artificial
  probe
  misc_feature (1)..(25): SEQ ID NO: 3411; WAN024B7S_x_at; Start 3; Stop 27
ggagatttttcaatatacttcgtta

SEQ ID NO: 74562 - DNA, 25 bp, Artificial
  probe
  misc_feature (1)..(25): SEQ ID NO: 3411; WAN024B7S_x_at; Start 7; Stop 31
atttttcaatatacttcgttattgg

SEQ ID NO: 74563 - DNA, 25 bp, Artificial
  probe
  misc_feature (1)..(25): SEQ ID NO: 3411; WAN024B7S_x_at; Start 74; Stop 98
ttatcgctctgaacatcaaaaaaga

SEQ ID NO: 74564 - DNA, 25 bp, Artificial
  probe
  misc_feature (1)..(25): SEQ ID NO: 3411; WAN024B7S_x_at; Start 60; Stop 84
caaaaaacggatttttatcgctctg

SEQ ID NO: 74565 - DNA, 25 bp, Artificial
  probe
  misc_feature (1)..(25): SEQ ID NO: 3411; WAN024B7S_x_at; Start 65; Stop 89
aacggatttttatcgctctgaacat

SEQ ID NO: 74566 - DNA, 25 bp, Artificial
  probe
  misc_feature (1)..(25): SEQ ID NO: 3411; WAN024B7S_x_at; Start 70; Stop 94
atttttatcgctctgaacatcaaaa

SEQ ID NO: 74567 - DNA, 25 bp, Artificial
  probe
  misc_feature (1)..(25): SEQ ID NO: 3411; WAN024B7S_x_at; Start 78; Stop 102
cgctctgaacatcaaaaaagaaagg

SEQ ID NO: 74568 - DNA, 25 bp, Artificial
  probe
  misc_feature (1)..(25): SEQ ID NO: 3411; WAN024B7S_x_at; Start 6; Stop 30
gatttttcaatatacttcgttattg

SEQ ID NO: 74569 - DNA, 25 bp, Artificial
  probe
  misc_feature (1)..(25): SEQ ID NO: 3411; WAN024B7S_x_at; Start 81; Stop 105
tctgaacatcaaaaaagaaaggacg

SEQ ID NO: 74570 - DNA, 25 bp, Artificial
  probe
  misc_feature (1)..(25): SEQ ID NO: 3411; WAN024B7S_x_at; Start 67; Stop 91
cggatttttatcgctctgaacatca

SEQ ID NO: 74571 - DNA, 25 bp, Artificial
  probe
  misc_feature (1)..(25): SEQ ID NO: 3411; WAN024B7S_x_at; Start 11; Stop 35
ttcaatatacttcgttattgggcgg

SEQ ID NO: 74572 - DNA, 25 bp, Artificial
  probe
  misc_feature (1)..(25): SEQ ID NO: 3411; WAN024B7S_x_at; Start 4; Stop 28
gagatttttcaatatacttcgttat

SEQ ID NO: 74573 - DNA, 25 bp, Artificial
  probe
  misc_feature (1)..(25): SEQ ID NO: 3411; WAN024B7S_x_at; Start 79; Stop 103
gctctgaacatcaaaaaagaaagga

SEQ ID NO: 74574 - DNA, 25 bp, Artificial
  probe
  misc_feature (1)..(25): SEQ ID NO: 3411; WAN024B7S_x_at; Start 12; Stop 36
tcaatatacttcgttattgggcggt

SEQ ID NO: 74575 - DNA, 25 bp, Artificial
  probe
  misc_feature (1)..(25): SEQ ID NO: 3411; WAN024B7S_x_at; Start 10; Stop 34
tttcaatatacttcgttattgggcg

SEQ ID NO: 74576 - DNA, 25 bp, Artificial
  probe
  misc_feature (1)..(25): SEQ ID NO: 3411; WAN024B7S_x_at; Start 13; Stop 37
caatatacttcgttattgggcggtt

SEQ ID NO: 74577 - DNA, 25 bp, Artificial
  probe
  misc_feature (1)..(25): SEQ ID NO: 3411; WAN024B7S_x_at; Start 5; Stop 29
agatttttcaatatacttcgttatt

SEQ ID NO: 74578 - DNA, 25 bp, Artificial
  probe
  misc_feature (1)..(25): SEQ ID NO: 3411; WAN024B7S_x_at; Start 83; Stop 107
tgaacatcaaaaaagaaaggacgaa

SEQ ID NO: 74579 - DNA, 25 bp, Artificial
  probe
  misc_feature (1)..(25): SEQ ID NO: 3411; WAN024B7S_x_at; Start 76; Stop 100
atcgctctgaacatcaaaaaagaaa

SEQ ID NO: 74580 - DNA, 25 bp, Artificial
  probe
  misc_feature (1)..(25): SEQ ID NO: 3411; WAN024B7S_x_at; Start 71; Stop 95
tttttatcgctctgaacatcaaaaa

SEQ ID NO: 74581 - DNA, 25 bp, Artificial
  probe
  misc_feature (1)..(25): SEQ ID NO: 3411; WAN024B7S_x_at; Start 73; Stop 97
tttatcgctctgaacatcaaaaaag

SEQ ID NO: 74582 - DNA, 25 bp, Artificial
  probe
  misc_feature (1)..(25): SEQ ID NO: 3411; WAN024B7S_x_at; Start 69; Stop 93
gatttttatcgctctgaacatcaaa

SEQ ID NO: 74583 - DNA, 25 bp, Artificial
  probe
  misc_feature (1)..(25): SEQ ID NO: 3411; WAN024B7S_x_at; Start 72; Stop 96
ttttatcgctctgaacatcaaaaaa

SEQ ID NO: 74584 - DNA, 25 bp, Artificial
  probe
  misc_feature (1)..(25): SEQ ID NO: 3411; WAN024B7S_x_at; Start 100; Stop 124
aggacgaaatttgtcctttctcaag

SEQ ID NO: 74585 - DNA, 25 bp, Artificial
  probe
  misc_feature (1)..(25): SEQ ID NO: 3411; WAN024B7S_x_at; Start 66; Stop 90
acggatttttatcgctctgaacatc

SEQ ID NO: 74586 - DNA, 25 bp, Artificial
  probe
  misc_feature (1)..(25): SEQ ID NO: 3411; WAN024B7S_x_at; Start 82; Stop 106
ctgaacatcaaaaaagaaaggacga

SEQ ID NO: 74587 - DNA, 25 bp, Artificial
  probe
  misc_feature (1)..(25): SEQ ID NO: 3411; WAN024B7S_x_at; Start 64; Stop 88
aaacggatttttatcgctctgaaca

SEQ ID NO: 74588 - DNA, 25 bp, Artificial
  probe
  misc_feature (1)..(25): SEQ ID NO: 3411; WAN024B7S_x_at; Start 102; Stop 126
gacgaaatttgtcctttctcaagct

SEQ ID NO: 74589 - DNA, 25 bp, Artificial
  probe
  misc_feature (1)..(25): SEQ ID NO: 3411; WAN024B7S_x_at; Start 75; Stop 99
tatcgctctgaacatcaaaaaagaa

SEQ ID NO: 74590 - DNA, 25 bp, Artificial
  probe
  misc_feature (1)..(25): SEQ ID NO: 3411; WAN024B7S_x_at; Start 9; Stop 33
ttttcaatatacttcgttattgggc

SEQ ID NO: 74591 - DNA, 25 bp, Artificial
  probe
  misc_feature (1)..(25): SEQ ID NO: 1300; WAN024B7T_at; Start 21; Stop 45
agtggatgatgaagaacacattctg

SEQ ID NO: 74592 - DNA, 25 bp, Artificial
  probe
  misc_feature (1)..(25): SEQ ID NO: 1300; WAN024B7T_at; Start 8; Stop 32
aacaagtcttattagtggatgatga

SEQ ID NO: 74593 - DNA, 25 bp, Artificial
  probe
  misc_feature (1)..(25): SEQ ID NO: 1300; WAN024B7T_at; Start 34; Stop 58
gaacacattctgaaattgcttgact

SEQ ID NO: 74594 - DNA, 25 bp, Artificial
  probe
  misc_feature (1)..(25): SEQ ID NO: 1300; WAN024B7T_at; Start 13; Stop 37
gtcttattagtggatgatgaagaac

SEQ ID NO: 74595 - DNA, 25 bp, Artificial
  probe
  misc_feature (1)..(25): SEQ ID NO: 1300; WAN024B7T_at; Start 20; Stop 44
tagtggatgatgaagaacacattct

SEQ ID NO: 74596 - DNA, 25 bp, Artificial
  probe
  misc_feature (1)..(25): SEQ ID NO: 1300; WAN024B7T_at; Start 23; Stop 47
tggatgatgaagaacacattctgaa

SEQ ID NO: 74597 - DNA, 25 bp, Artificial
  probe
  misc_feature (1)..(25): SEQ ID NO: 1300; WAN024B7T_at; Start 24; Stop 48
ggatgatgaagaacacattctgaaa

SEQ ID NO: 74598 - DNA, 25 bp, Artificial
  probe
  misc_feature (1)..(25): SEQ ID NO: 1300; WAN024B7T_at; Start 3; Stop 27
gacaaaacaagtcttattagtggat

SEQ ID NO: 74599 - DNA, 25 bp, Artificial
  probe
  misc_feature (1)..(25): SEQ ID NO: 1300; WAN024B7T_at; Start 27; Stop 51
tgatgaagaacacattctgaaattg

SEQ ID NO: 74600 - DNA, 25 bp, Artificial
  probe
  misc_feature (1)..(25): SEQ ID NO: 1300; WAN024B7T_at; Start 26; Stop 50
atgatgaagaacacattctgaaatt

SEQ ID NO: 74601 - DNA, 25 bp, Artificial
  probe
  misc_feature (1)..(25): SEQ ID NO: 1300; WAN024B7T_at; Start 15; Stop 39
cttattagtggatgatgaagaacac

SEQ ID NO: 74602 - DNA, 25 bp, Artificial
  probe
  misc_feature (1)..(25): SEQ ID NO: 1300; WAN024B7T_at; Start 32; Stop 56
aagaacacattctgaaattgcttga

SEQ ID NO: 74603 - DNA, 25 bp, Artificial
  probe
  misc_feature (1)..(25): SEQ ID NO: 1300; WAN024B7T_at; Start 7; Stop 31
aaacaagtcttattagtggatgatg

SEQ ID NO: 74604 - DNA, 25 bp, Artificial
  probe
  misc_feature (1)..(25): SEQ ID NO: 1300; WAN024B7T_at; Start 17; Stop 41
tattagtggatgatgaagaacacat

SEQ ID NO: 74605 - DNA, 25 bp, Artificial
  probe
  misc_feature (1)..(25): SEQ ID NO: 1300; WAN024B7T_at; Start 4; Stop 28
acaaaacaagtcttattagtggatg

SEQ ID NO: 74606 - DNA, 25 bp, Artificial
  probe
  misc_feature (1)..(25): SEQ ID NO: 1300; WAN024B7T_at; Start 19; Stop 43
ttagtggatgatgaagaacacattc

SEQ ID NO: 74607 - DNA, 25 bp, Artificial
  probe
  misc_feature (1)..(25): SEQ ID NO: 1300; WAN024B7T_at; Start 35; Stop 59
aacacattctgaaattgcttgacta

SEQ ID NO: 74608 - DNA, 25 bp, Artificial
  probe
  misc_feature (1)..(25): SEQ ID NO: 1300; WAN024B7T_at; Start 25; Stop 49
gatgatgaagaacacattctgaaat

SEQ ID NO: 74609 - DNA, 25 bp, Artificial
  probe
  misc_feature (1)..(25): SEQ ID NO: 1300; WAN024B7T_at; Start 9; Stop 33
acaagtcttattagtggatgatgaa

SEQ ID NO: 74610 - DNA, 25 bp, Artificial
  probe
  misc_feature (1)..(25): SEQ ID NO: 1300; WAN024B7T_at; Start 14; Stop 38
tcttattagtggatgatgaagaaca

SEQ ID NO: 74611 - DNA, 25 bp, Artificial
  probe
  misc_feature (1)..(25): SEQ ID NO: 1300; WAN024B7T_at; Start 12; Stop 36
agtcttattagtggatgatgaagaa

SEQ ID NO: 74612 - DNA, 25 bp, Artificial
  probe
  misc_feature (1)..(25): SEQ ID NO: 1300; WAN024B7T_at; Start 5; Stop 29
caaaacaagtcttattagtggatga

SEQ ID NO: 74613 - DNA, 25 bp, Artificial
  probe
  misc_feature (1)..(25): SEQ ID NO: 1300; WAN024B7T_at; Start 18; Stop 42
attagtggatgatgaagaacacatt

SEQ ID NO: 74614 - DNA, 25 bp, Artificial
  probe
  misc_feature (1)..(25): SEQ ID NO: 1300; WAN024B7T_at; Start 29; Stop 53
atgaagaacacattctgaaattgct

SEQ ID NO: 74615 - DNA, 25 bp, Artificial
  probe
  misc_feature (1)..(25): SEQ ID NO: 1300; WAN024B7T_at; Start 30; Stop 54
tgaagaacacattctgaaattgctt

SEQ ID NO: 74616 - DNA, 25 bp, Artificial
  probe
  misc_feature (1)..(25): SEQ ID NO: 1300; WAN024B7T_at; Start 28; Stop 52
gatgaagaacacattctgaaattgc

SEQ ID NO: 74617 - DNA, 25 bp, Artificial
  probe
  misc_feature (1)..(25): SEQ ID NO: 1300; WAN024B7T_at; Start 31; Stop 55
gaagaacacattctgaaattgcttg

SEQ ID NO: 74618 - DNA, 25 bp, Artificial
  probe
  misc_feature (1)..(25): SEQ ID NO: 1300; WAN024B7T_at; Start 11; Stop 35
aagtcttattagtggatgatgaaga

SEQ ID NO: 74619 - DNA, 25 bp, Artificial
  probe
  misc_feature (1)..(25): SEQ ID NO: 1300; WAN024B7T_at; Start 10; Stop 34
caagtcttattagtggatgatgaag

SEQ ID NO: 74620 - DNA, 25 bp, Artificial
  probe
  misc_feature (1)..(25): SEQ ID NO: 1300; WAN024B7T_at; Start 6; Stop 30
aaaacaagtcttattagtggatgat

SEQ ID NO: 74621 - DNA, 25 bp, Artificial
  probe
  misc_feature (1)..(25): SEQ ID NO: 1300; WAN024B7T_at; Start 22; Stop 46
gtggatgatgaagaacacattctga

SEQ ID NO: 74622 - DNA, 25 bp, Artificial
  probe
  misc_feature (1)..(25): SEQ ID NO: 1300; WAN024B7T_at; Start 16; Stop 40
ttattagtggatgatgaagaacaca

SEQ ID NO: 74623 - DNA, 25 bp, Artificial
  probe
  misc_feature (1)..(25): SEQ ID NO: 1300; WAN024B7T_at; Start 33; Stop 57
agaacacattctgaaattgcttgac

SEQ ID NO: 74624 - DNA, 25 bp, Artificial
  probe
  misc_feature (1)..(25): SEQ ID NO: 1300; WAN024B7T_at; Start 2; Stop 26
tgacaaaacaagtcttattagtgga

SEQ ID NO: 74625 - DNA, 25 bp, Artificial
  probe
  misc_feature (1)..(25): SEQ ID NO: 2923; WAN024B7U_at; Start 564; Stop 588
tcgtgttgatgaagttgatgataga

SEQ ID NO: 74626 - DNA, 25 bp, Artificial
  probe
  misc_feature (1)..(25): SEQ ID NO: 2923; WAN024B7U_at; Start 264; Stop 288
tgctcaaaaattaccagttattggg

SEQ ID NO: 74627 - DNA, 25 bp, Artificial
  probe
  misc_feature (1)..(25): SEQ ID NO: 2923; WAN024B7U_at; Start 622; Stop 646
gaagaccttgctgctacagaacgta

SEQ ID NO: 74628 - DNA, 25 bp, Artificial
  probe
  misc_feature (1)..(25): SEQ ID NO: 2923; WAN024B7U_at; Start 65; Stop 89
gatttctgatattactgtcactggc

SEQ ID NO: 74629 - DNA, 25 bp, Artificial
  probe
  misc_feature (1)..(25): SEQ ID NO: 2923; WAN024B7U_at; Start 226; Stop 250
gctatctcttcggaagctgttctaa

SEQ ID NO: 74630 - DNA, 25 bp, Artificial
  probe
  misc_feature (1)..(25): SEQ ID NO: 2923; WAN024B7U_at; Start 653; Stop 677
tcaaaggtgatttgaaagaaacaaa

SEQ ID NO: 74631 - DNA, 25 bp, Artificial
  probe
  misc_feature (1)..(25): SEQ ID NO: 2923; WAN024B7U_at; Start 320; Stop 344
tgccgatttttaaaggacttgataa

SEQ ID NO: 74632 - DNA, 25 bp, Artificial
  probe
  misc_feature (1)..(25): SEQ ID NO: 2923; WAN024B7U_at; Start 340; Stop 364
gataatgttaatctcttctacggag

SEQ ID NO: 74633 - DNA, 25 bp, Artificial
  probe
  misc_feature (1)..(25): SEQ ID NO: 2923; WAN024B7U_at; Start 401; Stop 425
gaaattatagtctagctagtcacca

SEQ ID NO: 74634 - DNA, 25 bp, Artificial
  probe
  misc_feature (1)..(25): SEQ ID NO: 2923; WAN024B7U_at; Start 433; Stop 457
ggtgttgataatgctaataaaatgt

SEQ ID NO: 74635 - DNA, 25 bp, Artificial
  probe
  misc_feature (1)..(25): SEQ ID NO: 2923; WAN024B7U_at; Start 523; Stop 547
tatacttatgaaatacgtgaagtca

SEQ ID NO: 74636 - DNA, 25 bp, Artificial
  probe
  misc_feature (1)..(25): SEQ ID NO: 2923; WAN024B7U_at; Start 48; Stop 72
gacaaatatcctagcaggatttctg

SEQ ID NO: 74637 - DNA, 25 bp, Artificial
  probe
  misc_feature (1)..(25): SEQ ID NO: 2923; WAN024B7U_at; Start 214; Stop 238
gattctgtcaaagctatctcttcgg

SEQ ID NO: 74638 - DNA, 25 bp, Artificial
  probe
  misc_feature (1)..(25): SEQ ID NO: 2923; WAN024B7U_at; Start 371; Stop 395
caatgaaacgcgagcaagtaatggg

SEQ ID NO: 74639 - DNA, 25 bp, Artificial
  probe
  misc_feature (1)..(25): SEQ ID NO: 2923; WAN024B7U_at; Start 356; Stop 380
tctacggagctggtacaatgaaacg

SEQ ID NO: 74640 - DNA, 25 bp, Artificial
  probe
  misc_feature (1)..(25): SEQ ID NO: 2923; WAN024B7U_at; Start 148; Stop 172
caagttagccaggtatcaaaagaaa

SEQ ID NO: 74641 - DNA, 25 bp, Artificial
  probe
  misc_feature (1)..(25): SEQ ID NO: 2923; WAN024B7U_at; Start 301; Stop 325
cctgaattggaaatgaatttgccga

SEQ ID NO: 74642 - DNA, 25 bp, Artificial
  probe
  misc_feature (1)..(25): SEQ ID NO: 2923; WAN024B7U_at; Start 24; Stop 48
gaaaaacaagcgaaaaaatctgctg

SEQ ID NO: 74643 - DNA, 25 bp, Artificial
  probe
  misc_feature (1)..(25): SEQ ID NO: 2923; WAN024B7U_at; Start 593; Stop 617
gggtcaatgaaatcacattagtaac

SEQ ID NO: 74644 - DNA, 25 bp, Artificial
  probe
  misc_feature (1)..(25): SEQ ID NO: 2923; WAN024B7U_at; Start 120; Stop 144
tttcatagtctggaataccaataag

SEQ ID NO: 74645 - DNA, 25 bp, Artificial
  probe
  misc_feature (1)..(25): SEQ ID NO: 2923; WAN024B7U_at; Start 83; Stop 107
cactggctttgatttttaatactca

SEQ ID NO: 74646 - DNA, 25 bp, Artificial
  probe
  misc_feature (1)..(25): SEQ ID NO: 2923; WAN024B7U_at; Start 381; Stop 405
cgagcaagtaatgggagaaggaaat

SEQ ID NO: 74647 - DNA, 25 bp, Artificial
  probe
  misc_feature (1)..(25): SEQ ID NO: 2923; WAN024B7U_at; Start 135; Stop 159
taccaataagtatcaagttagccag

SEQ ID NO: 74648 - DNA, 25 bp, Artificial
  probe
  misc_feature (1)..(25): SEQ ID NO: 2923; WAN024B7U_at; Start 704; Stop 728
tcctaacagctttcaatcaaccata

SEQ ID NO: 74649 - DNA, 25 bp, Artificial
  probe
  misc_feature (1)..(25): SEQ ID NO: 2923; WAN024B7U_at; Start 288; Stop 312
gggaattgcaattcctgaattggaa

SEQ ID NO: 74650 - DNA, 25 bp, Artificial
  probe
  misc_feature (1)..(25): SEQ ID NO: 2923; WAN024B7U_at; Start 37; Stop 61
aaaaatctgctgacaaatatcctag

SEQ ID NO: 74651 - DNA, 25 bp, Artificial
  probe
  misc_feature (1)..(25): SEQ ID NO: 2923; WAN024B7U_at; Start 608; Stop 632
cattagtaacctgtgaagaccttgc

SEQ ID NO: 74652 - DNA, 25 bp, Artificial
  probe
  misc_feature (1)..(25): SEQ ID NO: 2923; WAN024B7U_at; Start 254; Stop 278
ctcaatgggatgctcaaaaattacc

SEQ ID NO: 74653 - DNA, 25 bp, Artificial
  probe
  misc_feature (1)..(25): SEQ ID NO: 2923; WAN024B7U_at; Start 536; Stop 560
tacgtgaagtcaaacgtgtgacacc

SEQ ID NO: 74654 - DNA, 25 bp, Artificial
  probe
  misc_feature (1)..(25): SEQ ID NO: 2923; WAN024B7U_at; Start 472; Stop 496
gataatgctaaaaatggcatgaaga

SEQ ID NO: 74655 - DNA, 25 bp, Artificial
  probe
  misc_feature (1)..(25): SEQ ID NO: 2923; WAN024B7U_at; Start 181; Stop 205
gaaaatcaggatacagaaggcaatt

SEQ ID NO: 74656 - DNA, 25 bp, Artificial
  probe
  misc_feature (1)..(25): SEQ ID NO: 2923; WAN024B7U_at; Start 241; Stop 265
gctgttctaacttctcaatgggatg

SEQ ID NO: 74657 - DNA, 25 bp, Artificial
  probe
  misc_feature (1)..(25): SEQ ID NO: 2923; WAN024B7U_at; Start 196; Stop 220
gaaggcaattttgactttgattctg

SEQ ID NO: 74658 - DNA, 25 bp, Artificial
  probe
  misc_feature (1)..(25): SEQ ID NO: 2923; WAN024B7U_at; Start 638; Stop 662
cagaacgtattattgtcaaaggtga

SEQ ID NO: 74659 - DNA, 25 bp, Artificial
  probe
  misc_feature (1)..(25): SEQ ID NO: 5791; WAN024B7V_at; Start 1616; Stop 1640
tagtaacgcctattcttttggtgaa

SEQ ID NO: 74660 - DNA, 25 bp, Artificial
  probe
  misc_feature (1)..(25): SEQ ID NO: 5791; WAN024B7V_at; Start 821; Stop 845
gattcacttcttttggtcatttgga

SEQ ID NO: 74661 - DNA, 25 bp, Artificial
  probe
  misc_feature (1)..(25): SEQ ID NO: 5791; WAN024B7V_at; Start 1231; Stop 1255
ggtcggattcatagaaactacaagg

SEQ ID NO: 74662 - DNA, 25 bp, Artificial
  probe
  misc_feature (1)..(25): SEQ ID NO: 5791; WAN024B7V_at; Start 1247; Stop 1271
actacaaggataagtctttggtgcg

SEQ ID NO: 74663 - DNA, 25 bp, Artificial
  probe
  misc_feature (1)..(25): SEQ ID NO: 5791; WAN024B7V_at; Start 1126; Stop 1150
ttgtctactggaaaatacattggcg

SEQ ID NO: 74664 - DNA, 25 bp, Artificial
  probe
  misc_feature (1)..(25): SEQ ID NO: 5791; WAN024B7V_at; Start 1141; Stop 1165
tacattggcgaaggttttgacttac

SEQ ID NO: 74665 - DNA, 25 bp, Artificial
  probe
  misc_feature (1)..(25): SEQ ID NO: 5791; WAN024B7V_at; Start 252; Stop 276
cacttttgagcaagagttagccctg

SEQ ID NO: 74666 - DNA, 25 bp, Artificial
  probe
  misc_feature (1)..(25): SEQ ID NO: 5791; WAN024B7V_at; Start 661; Stop 685
gaaaaagttgttgctcagtttagag

SEQ ID NO: 74667 - DNA, 25 bp, Artificial
  probe
  misc_feature (1)..(25): SEQ ID NO: 5791; WAN024B7V_at; Start 762; Stop 786
tgagatactccatactgctgataag

SEQ ID NO: 74668 - DNA, 25 bp, Artificial
  probe
  misc_feature (1)..(25): SEQ ID NO: 5791; WAN024B7V_at; Start 228; Stop 252
tagcgtggaatttaagggagaactc

SEQ ID NO: 74669 - DNA, 25 bp, Artificial
  probe
  misc_feature (1)..(25): SEQ ID NO: 5791; WAN024B7V_at; Start 1647; Stop 1671
tattgtttggtatggtgcaatgcca

SEQ ID NO: 74670 - DNA, 25 bp, Artificial
  probe
  misc_feature (1)..(25): SEQ ID NO: 5791; WAN024B7V_at; Start 328; Stop 352
gggaagaccgttttaggtgctgctc

SEQ ID NO: 74671 - DNA, 25 bp, Artificial
  probe
  misc_feature (1)..(25): SEQ ID NO: 5791; WAN024B7V_at; Start 1314; Stop 1338
gatgtttcagaaacgacaagtagct

SEQ ID NO: 74672 - DNA, 25 bp, Artificial
  probe
  misc_feature (1)..(25): SEQ ID NO: 5791; WAN024B7V_at; Start 1527; Stop 1551
gatatgtataccagagacggttgca

SEQ ID NO: 74673 - DNA, 25 bp, Artificial
  probe
  misc_feature (1)..(25): SEQ ID NO: 5791; WAN024B7V_at; Start 691; Stop 715
tatctttacggtttgacggctacgc

SEQ ID NO: 74674 - DNA, 25 bp, Artificial
  probe
  misc_feature (1)..(25): SEQ ID NO: 5791; WAN024B7V_at; Start 452; Stop 476
aggaggaggctatccgttatacggc

SEQ ID NO: 74675 - DNA, 25 bp, Artificial
  probe
  misc_feature (1)..(25): SEQ ID NO: 5791; WAN024B7V_at; Start 1455; Stop 1479
gcttattttaccttatgtgcaccag

SEQ ID NO: 74676 - DNA, 25 bp, Artificial
  probe
  misc_feature (1)..(25): SEQ ID NO: 5791; WAN024B7V_at; Start 483; Stop 507
tcgtgaaaaggtaatcggctatgtt

SEQ ID NO: 74677 - DNA, 25 bp, Artificial
  probe
  misc_feature (1)..(25): SEQ ID NO: 5791; WAN024B7V_at; Start 713; Stop 737
cgcctgagcgtaagaatggtcatga

SEQ ID NO: 74678 - DNA, 25 bp, Artificial
  probe
  misc_feature (1)..(25): SEQ ID NO: 5791; WAN024B7V_at; Start 412; Stop 436
caatggctagatcgcttaaactgct

SEQ ID NO: 74679 - DNA, 25 bp, Artificial
  probe
  misc_feature (1)..(25): SEQ ID NO: 5791; WAN024B7V_at; Start 1697; Stop 1721
ccatattacgtttggaatcagctag

SEQ ID NO: 74680 - DNA, 25 bp, Artificial
  probe
  misc_feature (1)..(25): SEQ ID NO: 5791; WAN024B7V_at; Start 307; Stop 331
cttcatgcggagactggttttggga

SEQ ID NO: 74681 - DNA, 25 bp, Artificial
  probe
  misc_feature (1)..(25): SEQ ID NO: 5791; WAN024B7V_at; Start 1468; Stop 1492
tatgtgcaccagacaaaactgatga

SEQ ID NO: 74682 - DNA, 25 bp, Artificial
  probe
  misc_feature (1)..(25): SEQ ID NO: 5791; WAN024B7V_at; Start 1187; Stop 1211
tggcagcacccttttcttggaaaaa

SEQ ID NO: 74683 - DNA, 25 bp, Artificial
  probe
  misc_feature (1)..(25): SEQ ID NO: 5791; WAN024B7V_at; Start 1172; Stop 1196
tggacacgcttatcttggcagcacc

SEQ ID NO: 74684 - DNA, 25 bp, Artificial
  probe
  misc_feature (1)..(25): SEQ ID NO: 5791; WAN024B7V_at; Start 1328; Stop 1352
gacaagtagcttatcgaaagatgga

SEQ ID NO: 74685 - DNA, 25 bp, Artificial
  probe
  misc_feature (1)..(25): SEQ ID NO: 5791; WAN024B7V_at; Start 776; Stop 800
ctgctgataagagggaaacggattt

SEQ ID NO: 74686 - DNA, 25 bp, Artificial
  probe
  misc_feature (1)..(25): SEQ ID NO: 5791; WAN024B7V_at; Start 1664; Stop 1688
caatgccattattagggaaggtaga

SEQ ID NO: 74687 - DNA, 25 bp, Artificial
  probe
  misc_feature (1)..(25): SEQ ID NO: 5791; WAN024B7V_at; Start 1157; Stop 1181
ttgacttacctcagttggacacgct

SEQ ID NO: 74688 - DNA, 25 bp, Artificial
  probe
  misc_feature (1)..(25): SEQ ID NO: 5791; WAN024B7V_at; Start 441; Stop 465
gactttcgaagaggaggaggctatc

SEQ ID NO: 74689 - DNA, 25 bp, Artificial
  probe
  misc_feature (1)..(25): SEQ ID NO: 5791; WAN024B7V_at; Start 1727; Stop 1751
tttctgaactagtggcaggtttacg

SEQ ID NO: 74690 - DNA, 25 bp, Artificial
  probe
  misc_feature (1)..(25): SEQ ID NO: 5791; WAN024B7V_at; Start 193; Stop 217
tctgtggaagataggagaaaggtac

SEQ ID NO: 74691 - DNA, 25 bp, Artificial
  probe
  misc_feature (1)..(25): SEQ ID NO: 5791; WAN024B7V_at; Start 149; Stop 173
caagaggtttgctgtatccattgca

SEQ ID NO: 74692 - DNA, 25 bp, Artificial
  probe
  misc_feature (1)..(25): SEQ ID NO: 5791; WAN024B7V_at; Start 1574; Stop 1598
tgaagagccagaaaattaaagtgtc

SEQ ID NO: 74693 - DNA, 25 bp, Artificial
  probe
  misc_feature (1)..(25): SEQ ID NO: 3021; WAN024B7W_at; Start 96; Stop 120
aacgaattctttcgaatgcgatcta

SEQ ID NO: 74694 - DNA, 25 bp, Artificial
  probe
  misc_feature (1)..(25): SEQ ID NO: 3021; WAN024B7W_at; Start 94; Stop 118
ggaacgaattctttcgaatgcgatc

SEQ ID NO: 74695 - DNA, 25 bp, Artificial
  probe
  misc_feature (1)..(25): SEQ ID NO: 3021; WAN024B7W_at; Start 100; Stop 124
aattctttcgaatgcgatctatact

SEQ ID NO: 74696 - DNA, 25 bp, Artificial
  probe
  misc_feature (1)..(25): SEQ ID NO: 3021; WAN024B7W_at; Start 97; Stop 121
acgaattctttcgaatgcgatctat

SEQ ID NO: 74697 - DNA, 25 bp, Artificial
  probe
  misc_feature (1)..(25): SEQ ID NO: 3021; WAN024B7W_at; Start 95; Stop 119
gaacgaattctttcgaatgcgatct

SEQ ID NO: 74698 - DNA, 25 bp, Artificial
  probe
  misc_feature (1)..(25): SEQ ID NO: 3021; WAN024B7W_at; Start 99; Stop 123
gaattctttcgaatgcgatctatac

SEQ ID NO: 74699 - DNA, 25 bp, Artificial
  probe
  misc_feature (1)..(25): SEQ ID NO: 3021; WAN024B7W_at; Start 101; Stop 125
attctttcgaatgcgatctatacta

SEQ ID NO: 74700 - DNA, 25 bp, Artificial
  probe
  misc_feature (1)..(25): SEQ ID NO: 3021; WAN024B7W_at; Start 93; Stop 117
tggaacgaattctttcgaatgcgat

SEQ ID NO: 74701 - DNA, 25 bp, Artificial
  probe
  misc_feature (1)..(25): SEQ ID NO: 3021; WAN024B7W_at; Start 98; Stop 122
cgaattctttcgaatgcgatctata

SEQ ID NO: 74702 - DNA, 25 bp, Artificial
  probe
  misc_feature (1)..(25): SEQ ID NO: 673; WAN024B7X_at; Start 961; Stop 985
tcagatatcgttaagaaatacaacg

SEQ ID NO: 74703 - DNA, 25 bp, Artificial
  probe
  misc_feature (1)..(25): SEQ ID NO: 673; WAN024B7X_at; Start 972; Stop 996
taagaaatacaacgaagtctttaca

SEQ ID NO: 74704 - DNA, 25 bp, Artificial
  probe
  misc_feature (1)..(25): SEQ ID NO: 673; WAN024B7X_at; Start 422; Stop 446
tcgaaggatataacgatcttttcaa

SEQ ID NO: 74705 - DNA, 25 bp, Artificial
  probe
  misc_feature (1)..(25): SEQ ID NO: 673; WAN024B7X_at; Start 957; Stop 981
taaatcagatatcgttaagaaatac

SEQ ID NO: 74706 - DNA, 25 bp, Artificial
  probe
  misc_feature (1)..(25): SEQ ID NO: 673; WAN024B7X_at; Start 925; Stop 949
ctcactgaagattatgattatgtca

SEQ ID NO: 74707 - DNA, 25 bp, Artificial
  probe
  misc_feature (1)..(25): SEQ ID NO: 673; WAN024B7X_at; Start 985; Stop 1009
gaagtctttacagatatccaatcta

SEQ ID NO: 74708 - DNA, 25 bp, Artificial
  probe
  misc_feature (1)..(25): SEQ ID NO: 673; WAN024B7X_at; Start 918; Stop 942
caaaacactcactgaagattatgat

SEQ ID NO: 74709 - DNA, 25 bp, Artificial
  probe
  misc_feature (1)..(25): SEQ ID NO: 673; WAN024B7X_at; Start 951; Stop 975
caagaataaatcagatatcgttaag

SEQ ID NO: 74710 - DNA, 25 bp, Artificial
  probe
  misc_feature (1)..(25): SEQ ID NO: 673; WAN024B7X_at; Start 948; Stop 972
catcaagaataaatcagatatcgtt

SEQ ID NO: 74711 - DNA, 25 bp, Artificial
  probe
  misc_feature (1)..(25): SEQ ID NO: 673; WAN024B7X_at; Start 920; Stop 944
aaacactcactgaagattatgatta

SEQ ID NO: 74712 - DNA, 25 bp, Artificial
  probe
  misc_feature (1)..(25): SEQ ID NO: 673; WAN024B7X_at; Start 420; Stop 444
catcgaaggatataacgatcttttc

SEQ ID NO: 74713 - DNA, 25 bp, Artificial
  probe
  misc_feature (1)..(25): SEQ ID NO: 673; WAN024B7X_at; Start 424; Stop 448
gaaggatataacgatcttttcaaac

SEQ ID NO: 74714 - DNA, 25 bp, Artificial
  probe
  misc_feature (1)..(25): SEQ ID NO: 673; WAN024B7X_at; Start 979; Stop 1003
tacaacgaagtctttacagatatcc

SEQ ID NO: 74715 - DNA, 25 bp, Artificial
  probe
  misc_feature (1)..(25): SEQ ID NO: 673; WAN024B7X_at; Start 975; Stop 999
gaaatacaacgaagtctttacagat

SEQ ID NO: 74716 - DNA, 25 bp, Artificial
  probe
  misc_feature (1)..(25): SEQ ID NO: 673; WAN024B7X_at; Start 946; Stop 970
gtcatcaagaataaatcagatatcg

SEQ ID NO: 74717 - DNA, 25 bp, Artificial
  probe
  misc_feature (1)..(25): SEQ ID NO: 673; WAN024B7X_at; Start 966; Stop 990
tatcgttaagaaatacaacgaagtc

SEQ ID NO: 74718 - DNA, 25 bp, Artificial
  probe
  misc_feature (1)..(25): SEQ ID NO: 673; WAN024B7X_at; Start 927; Stop 951
cactgaagattatgattatgtcatc

SEQ ID NO: 74719 - DNA, 25 bp, Artificial
  probe
  misc_feature (1)..(25): SEQ ID NO: 673; WAN024B7X_at; Start 954; Stop 978
gaataaatcagatatcgttaagaaa

SEQ ID NO: 74720 - DNA, 25 bp, Artificial
  probe
  misc_feature (1)..(25): SEQ ID NO: 673; WAN024B7X_at; Start 997; Stop 1021
gatatccaatctaaacagtaactaa

SEQ ID NO: 74721 - DNA, 25 bp, Artificial
  probe
  misc_feature (1)..(25): SEQ ID NO: 673; WAN024B7X_at; Start 432; Stop 456
taacgatcttttcaaacctgaacta

SEQ ID NO: 74722 - DNA, 25 bp, Artificial
  probe
  misc_feature (1)..(25): SEQ ID NO: 673; WAN024B7X_at; Start 427; Stop 451
ggatataacgatcttttcaaacctg

SEQ ID NO: 74723 - DNA, 25 bp, Artificial
  probe
  misc_feature (1)..(25): SEQ ID NO: 673; WAN024B7X_at; Start 995; Stop 1019
cagatatccaatctaaacagtaact

SEQ ID NO: 74724 - DNA, 25 bp, Artificial
  probe
  misc_feature (1)..(25): SEQ ID NO: 673; WAN024B7X_at; Start 430; Stop 454
tataacgatcttttcaaacctgaac

SEQ ID NO: 74725 - DNA, 25 bp, Artificial
  probe
  misc_feature (1)..(25): SEQ ID NO: 673; WAN024B7X_at; Start 917; Stop 941
tcaaaacactcactgaagattatga

SEQ ID NO: 74726 - DNA, 25 bp, Artificial
  probe
  misc_feature (1)..(25): SEQ ID NO: 673; WAN024B7X_at; Start 962; Stop 986
cagatatcgttaagaaatacaacga

SEQ ID NO: 74727 - DNA, 25 bp, Artificial
  probe
  misc_feature (1)..(25): SEQ ID NO: 673; WAN024B7X_at; Start 986; Stop 1010
aagtctttacagatatccaatctaa

SEQ ID NO: 74728 - DNA, 25 bp, Artificial
  probe
  misc_feature (1)..(25): SEQ ID NO: 673; WAN024B7X_at; Start 940; Stop 964
gattatgtcatcaagaataaatcag

SEQ ID NO: 74729 - DNA, 25 bp, Artificial
  probe
  misc_feature (1)..(25): SEQ ID NO: 673; WAN024B7X_at; Start 981; Stop 1005
caacgaagtctttacagatatccaa

SEQ ID NO: 74730 - DNA, 25 bp, Artificial
  probe
  misc_feature (1)..(25): SEQ ID NO: 673; WAN024B7X_at; Start 931; Stop 955
gaagattatgattatgtcatcaaga

SEQ ID NO: 74731 - DNA, 25 bp, Artificial
  probe
  misc_feature (1)..(25): SEQ ID NO: 673; WAN024B7X_at; Start 943; Stop 967
tatgtcatcaagaataaatcagata

SEQ ID NO: 74732 - DNA, 25 bp, Artificial
  probe
  misc_feature (1)..(25): SEQ ID NO: 673; WAN024B7X_at; Start 428; Stop 452
gatataacgatcttttcaaacctga

SEQ ID NO: 74733 - DNA, 25 bp, Artificial
  probe
  misc_feature (1)..(25): SEQ ID NO: 673; WAN024B7X_at; Start 991; Stop 1015
tttacagatatccaatctaaacagt

SEQ ID NO: 74734 - DNA, 25 bp, Artificial
  probe
  misc_feature (1)..(25): SEQ ID NO: 673; WAN024B7X_at; Start 923; Stop 947
cactcactgaagattatgattatgt

SEQ ID NO: 74735 - DNA, 25 bp, Artificial
  probe
  misc_feature (1)..(25): SEQ ID NO: 673; WAN024B7X_at; Start 984; Stop 1008
cgaagtctttacagatatccaatct

SEQ ID NO: 74736 - DNA, 25 bp, Artificial
  probe
  misc_feature (1)..(25): SEQ ID NO: 1297; WAN024B7Y_at; Start 331; Stop 355
acaaccatatctgatttgctaaata

SEQ ID NO: 74737 - DNA, 25 bp, Artificial
  probe
  misc_feature (1)..(25): SEQ ID NO: 1297; WAN024B7Y_at; Start 335; Stop 359
ccatatctgatttgctaaatatcta

SEQ ID NO: 74738 - DNA, 25 bp, Artificial
  probe
  misc_feature (1)..(25): SEQ ID NO: 1297; WAN024B7Y_at; Start 330; Stop 354
tacaaccatatctgatttgctaaat

SEQ ID NO: 74739 - DNA, 25 bp, Artificial
  probe
  misc_feature (1)..(25): SEQ ID NO: 1297; WAN024B7Y_at; Start 333; Stop 357
aaccatatctgatttgctaaatatc

SEQ ID NO: 74740 - DNA, 25 bp, Artificial
  probe
  misc_feature (1)..(25): SEQ ID NO: 1297; WAN024B7Y_at; Start 338; Stop 362
tatctgatttgctaaatatctataa

SEQ ID NO: 74741 - DNA, 25 bp, Artificial
  probe
  misc_feature (1)..(25): SEQ ID NO: 1297; WAN024B7Y_at; Start 334; Stop 358
accatatctgatttgctaaatatct

SEQ ID NO: 74742 - DNA, 25 bp, Artificial
  probe
  misc_feature (1)..(25): SEQ ID NO: 1297; WAN024B7Y_at; Start 332; Stop 356
caaccatatctgatttgctaaatat

SEQ ID NO: 74743 - DNA, 25 bp, Artificial
  probe
  misc_feature (1)..(25): SEQ ID NO: 1297; WAN024B7Y_at; Start 339; Stop 363
atctgatttgctaaatatctataaa

SEQ ID NO: 74744 - DNA, 25 bp, Artificial
  probe
  misc_feature (1)..(25): SEQ ID NO: 1297; WAN024B7Y_at; Start 337; Stop 361
atatctgatttgctaaatatctata

SEQ ID NO: 74745 - DNA, 25 bp, Artificial
  probe
  misc_feature (1)..(25): SEQ ID NO: 1297; WAN024B7Y_at; Start 336; Stop 360
catatctgatttgctaaatatctat

SEQ ID NO: 74746 - DNA, 25 bp, Artificial
  probe
  misc_feature (1)..(25): SEQ ID NO: 3357; WAN024B7Z_at; Start 55; Stop 79
gaaattctagataaacttttgagct

SEQ ID NO: 74747 - DNA, 25 bp, Artificial
  probe
  misc_feature (1)..(25): SEQ ID NO: 3357; WAN024B7Z_at; Start 114; Stop 138
tcagctcttgcttttccacctctgt

SEQ ID NO: 74748 - DNA, 25 bp, Artificial
  probe
  misc_feature (1)..(25): SEQ ID NO: 3357; WAN024B7Z_at; Start 40; Stop 64
cacttgactaataaagaaattctag

SEQ ID NO: 74749 - DNA, 25 bp, Artificial
  probe
  misc_feature (1)..(25): SEQ ID NO: 3357; WAN024B7Z_at; Start 362; Stop 386
cgaaaaatgtctcgcctctaatata

SEQ ID NO: 74750 - DNA, 25 bp, Artificial
  probe
  misc_feature (1)..(25): SEQ ID NO: 3357; WAN024B7Z_at; Start 60; Stop 84
tctagataaacttttgagctattcc

SEQ ID NO: 74751 - DNA, 25 bp, Artificial
  probe
  misc_feature (1)..(25): SEQ ID NO: 3357; WAN024B7Z_at; Start 320; Stop 344
tagatcttcgctttcttcaacccac

SEQ ID NO: 74752 - DNA, 25 bp, Artificial
  probe
  misc_feature (1)..(25): SEQ ID NO: 3357; WAN024B7Z_at; Start 116; Stop 140
agctcttgcttttccacctctgttt

SEQ ID NO: 74753 - DNA, 25 bp, Artificial
  probe
  misc_feature (1)..(25): SEQ ID NO: 3357; WAN024B7Z_at; Start 31; Stop 55
tttcgtatgcacttgactaataaag

SEQ ID NO: 74754 - DNA, 25 bp, Artificial
  probe
  misc_feature (1)..(25): SEQ ID NO: 3357; WAN024B7Z_at; Start 321; Stop 345
agatcttcgctttcttcaacccact

SEQ ID NO: 74755 - DNA, 25 bp, Artificial
  probe
  misc_feature (1)..(25): SEQ ID NO: 3357; WAN024B7Z_at; Start 307; Stop 331
aatttgtcctttctagatcttcgct

SEQ ID NO: 74756 - DNA, 25 bp, Artificial
  probe
  misc_feature (1)..(25): SEQ ID NO: 3357; WAN024B7Z_at; Start 62; Stop 86
tagataaacttttgagctattccga

SEQ ID NO: 74757 - DNA, 25 bp, Artificial
  probe
  misc_feature (1)..(25): SEQ ID NO: 3357; WAN024B7Z_at; Start 359; Stop 383
aaccgaaaaatgtctcgcctctaat

SEQ ID NO: 74758 - DNA, 25 bp, Artificial
  probe
  misc_feature (1)..(25): SEQ ID NO: 3357; WAN024B7Z_at; Start 360; Stop 384
accgaaaaatgtctcgcctctaata

SEQ ID NO: 74759 - DNA, 25 bp, Artificial
  probe
  misc_feature (1)..(25): SEQ ID NO: 3357; WAN024B7Z_at; Start 28; Stop 52
acttttcgtatgcacttgactaata

SEQ ID NO: 74760 - DNA, 25 bp, Artificial
  probe
  misc_feature (1)..(25): SEQ ID NO: 3357; WAN024B7Z_at; Start 112; Stop 136
tatcagctcttgcttttccacctct

SEQ ID NO: 74761 - DNA, 25 bp, Artificial
  probe
  misc_feature (1)..(25): SEQ ID NO: 3357; WAN024B7Z_at; Start 64; Stop 88
gataaacttttgagctattccgaag

SEQ ID NO: 74762 - DNA, 25 bp, Artificial
  probe
  misc_feature (1)..(25): SEQ ID NO: 3357; WAN024B7Z_at; Start 120; Stop 144
cttgcttttccacctctgtttcaga

SEQ ID NO: 74763 - DNA, 25 bp, Artificial
  probe
  misc_feature (1)..(25): SEQ ID NO: 3357; WAN024B7Z_at; Start 21; Stop 45
tcgccctacttttcgtatgcacttg

SEQ ID NO: 74764 - DNA, 25 bp, Artificial
  probe
  misc_feature (1)..(25): SEQ ID NO: 3357; WAN024B7Z_at; Start 197; Stop 221
attaccttattccaacgccaaactg

SEQ ID NO: 74765 - DNA, 25 bp, Artificial
  probe
  misc_feature (1)..(25): SEQ ID NO: 3357; WAN024B7Z_at; Start 26; Stop 50
ctacttttcgtatgcacttgactaa

SEQ ID NO: 74766 - DNA, 25 bp, Artificial
  probe
  misc_feature (1)..(25): SEQ ID NO: 3357; WAN024B7Z_at; Start 34; Stop 58
cgtatgcacttgactaataaagaaa

SEQ ID NO: 74767 - DNA, 25 bp, Artificial
  probe
  misc_feature (1)..(25): SEQ ID NO: 3357; WAN024B7Z_at; Start 3; Stop 27
gagtgataaacgattttatcgccct

SEQ ID NO: 74768 - DNA, 25 bp, Artificial
  probe
  misc_feature (1)..(25): SEQ ID NO: 3357; WAN024B7Z_at; Start 306; Stop 330
aaatttgtcctttctagatcttcgc

SEQ ID NO: 74769 - DNA, 25 bp, Artificial
  probe
  misc_feature (1)..(25): SEQ ID NO: 3357; WAN024B7Z_at; Start 66; Stop 90
taaacttttgagctattccgaagac

SEQ ID NO: 74770 - DNA, 25 bp, Artificial
  probe
  misc_feature (1)..(25): SEQ ID NO: 3357; WAN024B7Z_at; Start 199; Stop 223
taccttattccaacgccaaactgga

SEQ ID NO: 74771 - DNA, 25 bp, Artificial
  probe
  misc_feature (1)..(25): SEQ ID NO: 3357; WAN024B7Z_at; Start 193; Stop 217
ttcaattaccttattccaacgccaa

SEQ ID NO: 74772 - DNA, 25 bp, Artificial
  probe
  misc_feature (1)..(25): SEQ ID NO: 3357; WAN024B7Z_at; Start 311; Stop 335
tgtcctttctagatcttcgctttct

SEQ ID NO: 74773 - DNA, 25 bp, Artificial
  probe
  misc_feature (1)..(25): SEQ ID NO: 3357; WAN024B7Z_at; Start 128; Stop 152
tccacctctgtttcagactttgttt

SEQ ID NO: 74774 - DNA, 25 bp, Artificial
  probe
  misc_feature (1)..(25): SEQ ID NO: 3357; WAN024B7Z_at; Start 110; Stop 134
tctatcagctcttgcttttccacct

SEQ ID NO: 74775 - DNA, 25 bp, Artificial
  probe
  misc_feature (1)..(25): SEQ ID NO: 3357; WAN024B7Z_at; Start 122; Stop 146
tgcttttccacctctgtttcagact

SEQ ID NO: 74776 - DNA, 25 bp, Artificial
  probe
  misc_feature (1)..(25): SEQ ID NO: 3357; WAN024B7Z_at; Start 125; Stop 149
ttttccacctctgtttcagactttg

SEQ ID NO: 74777 - DNA, 25 bp, Artificial
  probe
  misc_feature (1)..(25): SEQ ID NO: 3357; WAN024B7Z_at; Start 23; Stop 47
gccctacttttcgtatgcacttgac

SEQ ID NO: 74778 - DNA, 25 bp, Artificial
  probe
  misc_feature (1)..(25): SEQ ID NO: 3357; WAN024B7Z_at; Start 2; Stop 26
tgagtgataaacgattttatcgccc

SEQ ID NO: 74779 - DNA, 25 bp, Artificial
  probe
  misc_feature (1)..(25): SEQ ID NO: 3357; WAN024B7Z_at; Start 6; Stop 30
tgataaacgattttatcgccctact

SEQ ID NO: 74780 - DNA, 25 bp, Artificial
  probe
  misc_feature (1)..(25): SEQ ID NO: 2684; WAN024B82_at; Start 182; Stop 206
gcgaccatattctcgataaaaataa

SEQ ID NO: 74781 - DNA, 25 bp, Artificial
  probe
  misc_feature (1)..(25): SEQ ID NO: 2684; WAN024B82_at; Start 106; Stop 130
ttagacctgcaaccaaagaaatcct

SEQ ID NO: 74782 - DNA, 25 bp, Artificial
  probe
  misc_feature (1)..(25): SEQ ID NO: 2684; WAN024B82_at; Start 113; Stop 137
tgcaaccaaagaaatcctctgatat

SEQ ID NO: 74783 - DNA, 25 bp, Artificial
  probe
  misc_feature (1)..(25): SEQ ID NO: 2684; WAN024B82_at; Start 112; Stop 136
ctgcaaccaaagaaatcctctgata

SEQ ID NO: 74784 - DNA, 25 bp, Artificial
  probe
  misc_feature (1)..(25): SEQ ID NO: 2684; WAN024B82_at; Start 123; Stop 147
gaaatcctctgatatcttcttccag

SEQ ID NO: 74785 - DNA, 25 bp, Artificial
  probe
  misc_feature (1)..(25): SEQ ID NO: 2684; WAN024B82_at; Start 181; Stop 205
agcgaccatattctcgataaaaata

SEQ ID NO: 74786 - DNA, 25 bp, Artificial
  probe
  misc_feature (1)..(25): SEQ ID NO: 2684; WAN024B82_at; Start 108; Stop 132
agacctgcaaccaaagaaatcctct

SEQ ID NO: 74787 - DNA, 25 bp, Artificial
  probe
  misc_feature (1)..(25): SEQ ID NO: 2684; WAN024B82_at; Start 195; Stop 219
cgataaaaataagtatcgaatcctg

SEQ ID NO: 74788 - DNA, 25 bp, Artificial
  probe
  misc_feature (1)..(25): SEQ ID NO: 2684; WAN024B82_at; Start 174; Stop 198
tttaatgagcgaccatattctcgat

SEQ ID NO: 74789 - DNA, 25 bp, Artificial
  probe
  misc_feature (1)..(25): SEQ ID NO: 2684; WAN024B82_at; Start 187; Stop 211
catattctcgataaaaataagtatc

SEQ ID NO: 74790 - DNA, 25 bp, Artificial
  probe
  misc_feature (1)..(25): SEQ ID NO: 2684; WAN024B82_at; Start 118; Stop 142
ccaaagaaatcctctgatatcttct

SEQ ID NO: 74791 - DNA, 25 bp, Artificial
  probe
  misc_feature (1)..(25): SEQ ID NO: 2684; WAN024B82_at; Start 109; Stop 133
gacctgcaaccaaagaaatcctctg

SEQ ID NO: 74792 - DNA, 25 bp, Artificial
  probe
  misc_feature (1)..(25): SEQ ID NO: 2684; WAN024B82_at; Start 114; Stop 138
gcaaccaaagaaatcctctgatatc

SEQ ID NO: 74793 - DNA, 25 bp, Artificial
  probe
  misc_feature (1)..(25): SEQ ID NO: 2684; WAN024B82_at; Start 184; Stop 208
gaccatattctcgataaaaataagt

SEQ ID NO: 74794 - DNA, 25 bp, Artificial
  probe
  misc_feature (1)..(25): SEQ ID NO: 2684; WAN024B82_at; Start 196; Stop 220
gataaaaataagtatcgaatcctgt

SEQ ID NO: 74795 - DNA, 25 bp, Artificial
  probe
  misc_feature (1)..(25): SEQ ID NO: 2684; WAN024B82_at; Start 180; Stop 204
gagcgaccatattctcgataaaaat

SEQ ID NO: 74796 - DNA, 25 bp, Artificial
  probe
  misc_feature (1)..(25): SEQ ID NO: 2684; WAN024B82_at; Start 115; Stop 139
caaccaaagaaatcctctgatatct

SEQ ID NO: 74797 - DNA, 25 bp, Artificial
  probe
  misc_feature (1)..(25): SEQ ID NO: 2684; WAN024B82_at; Start 179; Stop 203
tgagcgaccatattctcgataaaaa

SEQ ID NO: 74798 - DNA, 25 bp, Artificial
  probe
  misc_feature (1)..(25): SEQ ID NO: 2684; WAN024B82_at; Start 111; Stop 135
cctgcaaccaaagaaatcctctgat

SEQ ID NO: 74799 - DNA, 25 bp, Artificial
  probe
  misc_feature (1)..(25): SEQ ID NO: 2684; WAN024B82_at; Start 130; Stop 154
tctgatatcttcttccagatacttt

SEQ ID NO: 74800 - DNA, 25 bp, Artificial
  probe
  misc_feature (1)..(25): SEQ ID NO: 2684; WAN024B82_at; Start 107; Stop 131
tagacctgcaaccaaagaaatcctc

SEQ ID NO: 74801 - DNA, 25 bp, Artificial
  probe
  misc_feature (1)..(25): SEQ ID NO: 2684; WAN024B82_at; Start 178; Stop 202
atgagcgaccatattctcgataaaa

SEQ ID NO: 74802 - DNA, 25 bp, Artificial
  probe
  misc_feature (1)..(25): SEQ ID NO: 2684; WAN024B82_at; Start 175; Stop 199
ttaatgagcgaccatattctcgata

SEQ ID NO: 74803 - DNA, 25 bp, Artificial
  probe
  misc_feature (1)..(25): SEQ ID NO: 2684; WAN024B82_at; Start 124; Stop 148
aaatcctctgatatcttcttccaga

SEQ ID NO: 74804 - DNA, 25 bp, Artificial
  probe
  misc_feature (1)..(25): SEQ ID NO: 2684; WAN024B82_at; Start 189; Stop 213
tattctcgataaaaataagtatcga

SEQ ID NO: 74805 - DNA, 25 bp, Artificial
  probe
  misc_feature (1)..(25): SEQ ID NO: 2684; WAN024B82_at; Start 125; Stop 149
aatcctctgatatcttcttccagat

SEQ ID NO: 74806 - DNA, 25 bp, Artificial
  probe
  misc_feature (1)..(25): SEQ ID NO: 2684; WAN024B82_at; Start 128; Stop 152
cctctgatatcttcttccagatact

SEQ ID NO: 74807 - DNA, 25 bp, Artificial
  probe
  misc_feature (1)..(25): SEQ ID NO: 2684; WAN024B82_at; Start 177; Stop 201
aatgagcgaccatattctcgataaa

SEQ ID NO: 74808 - DNA, 25 bp, Artificial
  probe
  misc_feature (1)..(25): SEQ ID NO: 2684; WAN024B82_at; Start 197; Stop 221
ataaaaataagtatcgaatcctgtt

SEQ ID NO: 74809 - DNA, 25 bp, Artificial
  probe
  misc_feature (1)..(25): SEQ ID NO: 2684; WAN024B82_at; Start 117; Stop 141
accaaagaaatcctctgatatcttc

SEQ ID NO: 74810 - DNA, 25 bp, Artificial
  probe
  misc_feature (1)..(25): SEQ ID NO: 2684; WAN024B82_at; Start 176; Stop 200
taatgagcgaccatattctcgataa

SEQ ID NO: 74811 - DNA, 25 bp, Artificial
  probe
  misc_feature (1)..(25): SEQ ID NO: 2684; WAN024B82_at; Start 173; Stop 197
ttttaatgagcgaccatattctcga

SEQ ID NO: 74812 - DNA, 25 bp, Artificial
  probe
  misc_feature (1)..(25): SEQ ID NO: 2684; WAN024B82_at; Start 110; Stop 134
acctgcaaccaaagaaatcctctga

SEQ ID NO: 74813 - DNA, 25 bp, Artificial
  probe
  misc_feature (1)..(25): SEQ ID NO: 2684; WAN024B82_at; Start 183; Stop 207
cgaccatattctcgataaaaataag

SEQ ID NO: 74814 - DNA, 25 bp, Artificial
  probe
  misc_feature (1)..(25): SEQ ID NO: 4876; WAN024B83_at; Start 592; Stop 616
gaaatcaatgccttccagccagaag

SEQ ID NO: 74815 - DNA, 25 bp, Artificial
  probe
  misc_feature (1)..(25): SEQ ID NO: 4876; WAN024B83_at; Start 1651; Stop 1675
cagtggcgacgggtcattgatgcct

SEQ ID NO: 74816 - DNA, 25 bp, Artificial
  probe
  misc_feature (1)..(25): SEQ ID NO: 4876; WAN024B83_at; Start 449; Stop 473
tcgatgcccaacaagctcgtcggat

SEQ ID NO: 74817 - DNA, 25 bp, Artificial
  probe
  misc_feature (1)..(25): SEQ ID NO: 4876; WAN024B83_at; Start 124; Stop 148
tacaaggttttagccagtgtcgggc

SEQ ID NO: 74818 - DNA, 25 bp, Artificial
  probe
  misc_feature (1)..(25): SEQ ID NO: 4876; WAN024B83_at; Start 1345; Stop 1369
gatgtggtcaaacaggtcaatagca

SEQ ID NO: 74819 - DNA, 25 bp, Artificial
  probe
  misc_feature (1)..(25): SEQ ID NO: 4876; WAN024B83_at; Start 1246; Stop 1270
caatttgctgccaatggtagtcagg

SEQ ID NO: 74820 - DNA, 25 bp, Artificial
  probe
  misc_feature (1)..(25): SEQ ID NO: 4876; WAN024B83_at; Start 969; Stop 993
tcctgtagcgcaaaatgaggcggca

SEQ ID NO: 74821 - DNA, 25 bp, Artificial
  probe
  misc_feature (1)..(25): SEQ ID NO: 4876; WAN024B83_at; Start 544; Stop 568
ggtcgcgttcagtccattgccctta

SEQ ID NO: 74822 - DNA, 25 bp, Artificial
  probe
  misc_feature (1)..(25): SEQ ID NO: 4876; WAN024B83_at; Start 723; Stop 747
caaggaagtcttgtctcgtctgacg

SEQ ID NO: 74823 - DNA, 25 bp, Artificial
  probe
  misc_feature (1)..(25): SEQ ID NO: 4876; WAN024B83_at; Start 1047; Stop 1071
caaaaacgcatcaggtgctcaggat

SEQ ID NO: 74824 - DNA, 25 bp, Artificial
  probe
  misc_feature (1)..(25): SEQ ID NO: 4876; WAN024B83_at; Start 857; Stop 881
tccgtactcgaaaaaccatgatggt

SEQ ID NO: 74825 - DNA, 25 bp, Artificial
  probe
  misc_feature (1)..(25): SEQ ID NO: 4876; WAN024B83_at; Start 273; Stop 297
taataaagtttttctcgcgagtgac

SEQ ID NO: 74826 - DNA, 25 bp, Artificial
  probe
  misc_feature (1)..(25): SEQ ID NO: 4876; WAN024B83_at; Start 226; Stop 250
ggaaaaggccctcttatcaatgact

SEQ ID NO: 74827 - DNA, 25 bp, Artificial
  probe
  misc_feature (1)..(25): SEQ ID NO: 4876; WAN024B83_at; Start 352; Stop 376
gatgaaaatgatgccaaccgtgtgg

SEQ ID NO: 74828 - DNA, 25 bp, Artificial
  probe
  misc_feature (1)..(25): SEQ ID NO: 4876; WAN024B83_at; Start 1491; Stop 1515
gaaacgttattatgttcgcctggca

SEQ ID NO: 74829 - DNA, 25 bp, Artificial
  probe
  misc_feature (1)..(25): SEQ ID NO: 4876; WAN024B83_at; Start 482; Stop 506
gcttggtagggtattcgatttcgcc

SEQ ID NO: 74830 - DNA, 25 bp, Artificial
  probe
  misc_feature (1)..(25): SEQ ID NO: 4876; WAN024B83_at; Start 59; Stop 83
aaaatctagtcatcgtggagtcgcc

SEQ ID NO: 74831 - DNA, 25 bp, Artificial
  probe
  misc_feature (1)..(25): SEQ ID NO: 4876; WAN024B83_at; Start 389; Stop 413
tcaccaaggatgcagtcaaaaatgc

SEQ ID NO: 74832 - DNA, 25 bp, Artificial
  probe
  misc_feature (1)..(25): SEQ ID NO: 4876; WAN024B83_at; Start 1446; Stop 1470
ggttggacgtccatcaacctacgcg

SEQ ID NO: 74833 - DNA, 25 bp, Artificial
  probe
  misc_feature (1)..(25): SEQ ID NO: 4876; WAN024B83_at; Start 1398; Stop 1422
tgcccgttattctgaagcaacactg

SEQ ID NO: 74834 - DNA, 25 bp, Artificial
  probe
  misc_feature (1)..(25): SEQ ID NO: 4876; WAN024B83_at; Start 1846; Stop 1870
catacccaagcaatcgtgaaagaga

SEQ ID NO: 74835 - DNA, 25 bp, Artificial
  probe
  misc_feature (1)..(25): SEQ ID NO: 4876; WAN024B83_at; Start 297; Stop 321
cccggaccgtgaaggagaagcgatt

SEQ ID NO: 74836 - DNA, 25 bp, Artificial
  probe
  misc_feature (1)..(25): SEQ ID NO: 4876; WAN024B83_at; Start 434; Stop 458
tcgatatggacttggtcgatgccca

SEQ ID NO: 74837 - DNA, 25 bp, Artificial
  probe
  misc_feature (1)..(25): SEQ ID NO: 4876; WAN024B83_at; Start 938; Stop 962
cctatatgcgtaccgattcgactcg

SEQ ID NO: 74838 - DNA, 25 bp, Artificial
  probe
  misc_feature (1)..(25): SEQ ID NO: 4876; WAN024B83_at; Start 1033; Stop 1057
cacggtagcaaggtcaaaaacgcat

SEQ ID NO: 74839 - DNA, 25 bp, Artificial
  probe
  misc_feature (1)..(25): SEQ ID NO: 4876; WAN024B83_at; Start 1072; Stop 1096
gcccatgaggctattcgtccgtcaa

SEQ ID NO: 74840 - DNA, 25 bp, Artificial
  probe
  misc_feature (1)..(25): SEQ ID NO: 4876; WAN024B83_at; Start 754; Stop 778
gacttttcagtagatcaggtggata

SEQ ID NO: 74841 - DNA, 25 bp, Artificial
  probe
  misc_feature (1)..(25): SEQ ID NO: 4876; WAN024B83_at; Start 161; Stop 185
tgaagaaatccagtatgtccgtcga

SEQ ID NO: 74842 - DNA, 25 bp, Artificial
  probe
  misc_feature (1)..(25): SEQ ID NO: 4876; WAN024B83_at; Start 1194; Stop 1218
gacagcggccgtttttgataccatg

SEQ ID NO: 74843 - DNA, 25 bp, Artificial
  probe
  misc_feature (1)..(25): SEQ ID NO: 4876; WAN024B83_at; Start 525; Stop 549
caagaagggcttgtcagcaggtcgc

SEQ ID NO: 74844 - DNA, 25 bp, Artificial
  probe
  misc_feature (1)..(25): SEQ ID NO: 4876; WAN024B83_at; Start 81; Stop 105
gcctgctaaggccaagacgattgaa

SEQ ID NO: 74845 - DNA, 25 bp, Artificial
  probe
  misc_feature (1)..(25): SEQ ID NO: 4876; WAN024B83_at; Start 313; Stop 337
gaagcgatttcttggcatttggccc

SEQ ID NO: 74846 - DNA, 25 bp, Artificial
  probe
  misc_feature (1)..(25): SEQ ID NO: 4876; WAN024B83_at; Start 1164; Stop 1188
tatctggaatcgttttgtggctagc

SEQ ID NO: 74847 - DNA, 25 bp, Artificial
  probe
  misc_feature (1)..(25): SEQ ID NO: 4876; WAN024B83_at; Start 878; Stop 902
tggttgcccaacagctctatgaagg

SEQ ID NO: 74848 - DNA, 25 bp, Artificial
  probe
  misc_feature (1)..(25): SEQ ID NO: 3116; WAN024B86_at; Start 273; Stop 297
ctgtcatccaactaccatccactat

SEQ ID NO: 74849 - DNA, 25 bp, Artificial
  probe
  misc_feature (1)..(25): SEQ ID NO: 3116; WAN024B86_at; Start 242; Stop 266
cttatttgactgaaatagcttctga

SEQ ID NO: 74850 - DNA, 25 bp, Artificial
  probe
  misc_feature (1)..(25): SEQ ID NO: 3116; WAN024B86_at; Start 241; Stop 265
gcttatttgactgaaatagcttctg

SEQ ID NO: 74851 - DNA, 25 bp, Artificial
  probe
  misc_feature (1)..(25): SEQ ID NO: 364; WAN024B87_at; Start 152; Stop 176
aaggtcaactcggtgttgtggttga

SEQ ID NO: 74852 - DNA, 25 bp, Artificial
  probe
  misc_feature (1)..(25): SEQ ID NO: 364; WAN024B87_at; Start 81; Stop 105
tatgaatgacaatccccaaaggctc

SEQ ID NO: 74853 - DNA, 25 bp, Artificial
  probe
  misc_feature (1)..(25): SEQ ID NO: 364; WAN024B87_at; Start 53; Stop 77
cccgtacagacgattttcccttgag

SEQ ID NO: 74854 - DNA, 25 bp, Artificial
  probe
  misc_feature (1)..(25): SEQ ID NO: 364; WAN024B87_at; Start 261; Stop 285
tagggacatttgcttgcttgagtag

SEQ ID NO: 74855 - DNA, 25 bp, Artificial
  probe
  misc_feature (1)..(25): SEQ ID NO: 364; WAN024B87_at; Start 22; Stop 46
tccaactggagtaaagtcgaactta

SEQ ID NO: 74856 - DNA, 25 bp, Artificial
  probe
  misc_feature (1)..(25): SEQ ID NO: 364; WAN024B87_at; Start 175; Stop 199
gatttcgtaaagtttggcgttgcgc

SEQ ID NO: 74857 - DNA, 25 bp, Artificial
  probe
  misc_feature (1)..(25): SEQ ID NO: 364; WAN024B87_at; Start 183; Stop 207
aaagtttggcgttgcgcaagaggcc

SEQ ID NO: 74858 - DNA, 25 bp, Artificial
  probe
  misc_feature (1)..(25): SEQ ID NO: 364; WAN024B87_at; Start 78; Stop 102
gagtatgaatgacaatccccaaagg

SEQ ID NO: 74859 - DNA, 25 bp, Artificial
  probe
  misc_feature (1)..(25): SEQ ID NO: 364; WAN024B87_at; Start 20; Stop 44
tctccaactggagtaaagtcgaact

SEQ ID NO: 74860 - DNA, 25 bp, Artificial
  probe
  misc_feature (1)..(25): SEQ ID NO: 364; WAN024B87_at; Start 94; Stop 118
ccccaaaggctctggaatagagtga

SEQ ID NO: 74861 - DNA, 25 bp, Artificial
  probe
  misc_feature (1)..(25): SEQ ID NO: 364; WAN024B87_at; Start 237; Stop 261
ccaaggcaagcggtccagcataaat

SEQ ID NO: 74862 - DNA, 25 bp, Artificial
  probe
  misc_feature (1)..(25): SEQ ID NO: 364; WAN024B87_at; Start 217; Stop 241
gagtttcccacggatcaaagccaag

SEQ ID NO: 74863 - DNA, 25 bp, Artificial
  probe
  misc_feature (1)..(25): SEQ ID NO: 364; WAN024B87_at; Start 192; Stop 216
cgttgcgcaagaggccgtgttcttc

SEQ ID NO: 74864 - DNA, 25 bp, Artificial
  probe
  misc_feature (1)..(25): SEQ ID NO: 364; WAN024B87_at; Start 88; Stop 112
gacaatccccaaaggctctggaata

SEQ ID NO: 74865 - DNA, 25 bp, Artificial
  probe
  misc_feature (1)..(25): SEQ ID NO: 364; WAN024B87_at; Start 38; Stop 62
tcgaacttaaagtcacccgtacaga

SEQ ID NO: 74866 - DNA, 25 bp, Artificial
  probe
  misc_feature (1)..(25): SEQ ID NO: 364; WAN024B87_at; Start 85; Stop 109
aatgacaatccccaaaggctctgga

SEQ ID NO: 74867 - DNA, 25 bp, Artificial
  probe
  misc_feature (1)..(25): SEQ ID NO: 364; WAN024B87_at; Start 246; Stop 270
gcggtccagcataaatagggacatt

SEQ ID NO: 74868 - DNA, 25 bp, Artificial
  probe
  misc_feature (1)..(25): SEQ ID NO: 364; WAN024B87_at; Start 229; Stop 253
gatcaaagccaaggcaagcggtcca

SEQ ID NO: 74869 - DNA, 25 bp, Artificial
  probe
  misc_feature (1)..(25): SEQ ID NO: 364; WAN024B87_at; Start 116; Stop 140
tgagtcgttctaaagaaagttgcct

SEQ ID NO: 74870 - DNA, 25 bp, Artificial
  probe
  misc_feature (1)..(25): SEQ ID NO: 364; WAN024B87_at; Start 70; Stop 94
cccttgaggagtatgaatgacaatc

SEQ ID NO: 74871 - DNA, 25 bp, Artificial
  probe
  misc_feature (1)..(25): SEQ ID NO: 364; WAN024B87_at; Start 102; Stop 126
gctctggaatagagtgagtcgttct

SEQ ID NO: 74872 - DNA, 25 bp, Artificial
  probe
  misc_feature (1)..(25): SEQ ID NO: 364; WAN024B87_at; Start 56; Stop 80
gtacagacgattttcccttgaggag

SEQ ID NO: 74873 - DNA, 25 bp, Artificial
  probe
  misc_feature (1)..(25): SEQ ID NO: 364; WAN024B87_at; Start 196; Stop 220
gcgcaagaggccgtgttcttcgagt

SEQ ID NO: 74874 - DNA, 25 bp, Artificial
  probe
  misc_feature (1)..(25): SEQ ID NO: 364; WAN024B87_at; Start 8; Stop 32
aagtccgcaggttctccaactggag

SEQ ID NO: 74875 - DNA, 25 bp, Artificial
  probe
  misc_feature (1)..(25): SEQ ID NO: 364; WAN024B87_at; Start 136; Stop 160
tgccttgagatttttaaaggtcaac

SEQ ID NO: 74876 - DNA, 25 bp, Artificial
  probe
  misc_feature (1)..(25): SEQ ID NO: 364; WAN024B87_at; Start 61; Stop 85
gacgattttcccttgaggagtatga

SEQ ID NO: 74877 - DNA, 25 bp, Artificial
  probe
  misc_feature (1)..(25): SEQ ID NO: 364; WAN024B87_at; Start 242; Stop 266
gcaagcggtccagcataaataggga

SEQ ID NO: 74878 - DNA, 25 bp, Artificial
  probe
  misc_feature (1)..(25): SEQ ID NO: 364; WAN024B87_at; Start 3; Stop 27
gatgcaagtccgcaggttctccaac

SEQ ID NO: 74879 - DNA, 25 bp, Artificial
  probe
  misc_feature (1)..(25): SEQ ID NO: 364; WAN024B87_at; Start 121; Stop 145
cgttctaaagaaagttgccttgaga

SEQ ID NO: 74880 - DNA, 25 bp, Artificial
  probe
  misc_feature (1)..(25): SEQ ID NO: 364; WAN024B87_at; Start 202; Stop 226
gaggccgtgttcttcgagtttccca

SEQ ID NO: 74881 - DNA, 25 bp, Artificial
  probe
  misc_feature (1)..(25): SEQ ID NO: 364; WAN024B87_at; Start 160; Stop 184
ctcggtgttgtggttgatttcgtaa

SEQ ID NO: 74882 - DNA, 25 bp, Artificial
  probe
  misc_feature (1)..(25): SEQ ID NO: 364; WAN024B87_at; Start 209; Stop 233
tgttcttcgagtttcccacggatca

SEQ ID NO: 74883 - DNA, 25 bp, Artificial
  probe
  misc_feature (1)..(25): SEQ ID NO: 364; WAN024B87_at; Start 220; Stop 244
tttcccacggatcaaagccaaggca

SEQ ID NO: 74884 - DNA, 25 bp, Artificial
  probe
  misc_feature (1)..(25): SEQ ID NO: 364; WAN024B87_at; Start 254; Stop 278
gcataaatagggacatttgcttgct

SEQ ID NO: 74885 - DNA, 25 bp, Artificial
  probe
  misc_feature (1)..(25): SEQ ID NO: 4196; WAN024B88_at; Start 226; Stop 250
tgcctgctggagacggaagatattt

SEQ ID NO: 74886 - DNA, 25 bp, Artificial
  probe
  misc_feature (1)..(25): SEQ ID NO: 4196; WAN024B88_at; Start 97; Stop 121
ttcatttggctcgataaaggttccc

SEQ ID NO: 74887 - DNA, 25 bp, Artificial
  probe
  misc_feature (1)..(25): SEQ ID NO: 4196; WAN024B88_at; Start 19; Stop 43
acgagagagggctgccataggctca

SEQ ID NO: 74888 - DNA, 25 bp, Artificial
  probe
  misc_feature (1)..(25): SEQ ID NO: 4196; WAN024B88_at; Start 133; Stop 157
gatgtagccaagatcgattccgttg

SEQ ID NO: 74889 - DNA, 25 bp, Artificial
  probe
  misc_feature (1)..(25): SEQ ID NO: 4196; WAN024B88_at; Start 123; Stop 147
taggagctttgatgtagccaagatc

SEQ ID NO: 74890 - DNA, 25 bp, Artificial
  probe
  misc_feature (1)..(25): SEQ ID NO: 4196; WAN024B88_at; Start 7; Stop 31
tccgttggcgatacgagagagggct

SEQ ID NO: 74891 - DNA, 25 bp, Artificial
  probe
  misc_feature (1)..(25): SEQ ID NO: 4196; WAN024B88_at; Start 215; Stop 239
gcagcttctgttgcctgctggagac

SEQ ID NO: 74892 - DNA, 25 bp, Artificial
  probe
  misc_feature (1)..(25): SEQ ID NO: 4196; WAN024B88_at; Start 218; Stop 242
gcttctgttgcctgctggagacgga

SEQ ID NO: 74893 - DNA, 25 bp, Artificial
  probe
  misc_feature (1)..(25): SEQ ID NO: 4196; WAN024B88_at; Start 130; Stop 154
tttgatgtagccaagatcgattccg

SEQ ID NO: 74894 - DNA, 25 bp, Artificial
  probe
  misc_feature (1)..(25): SEQ ID NO: 4196; WAN024B88_at; Start 207; Stop 231
tcttaacagcagcttctgttgcctg

SEQ ID NO: 74895 - DNA, 25 bp, Artificial
  probe
  misc_feature (1)..(25): SEQ ID NO: 4196; WAN024B88_at; Start 172; Stop 196
catagaacgaccaaagaccgcaatc

SEQ ID NO: 74896 - DNA, 25 bp, Artificial
  probe
  misc_feature (1)..(25): SEQ ID NO: 4196; WAN024B88_at; Start 157; Stop 181
gacaatggccttttccatagaacga

SEQ ID NO: 74897 - DNA, 25 bp, Artificial
  probe
  misc_feature (1)..(25): SEQ ID NO: 4196; WAN024B88_at; Start 106; Stop 130
ctcgataaaggttcccttaggagct

SEQ ID NO: 74898 - DNA, 25 bp, Artificial
  probe
  misc_feature (1)..(25): SEQ ID NO: 4196; WAN024B88_at; Start 144; Stop 168
gatcgattccgttgacaatggcctt

SEQ ID NO: 74899 - DNA, 25 bp, Artificial
  probe
  misc_feature (1)..(25): SEQ ID NO: 4196; WAN024B88_at; Start 148; Stop 172
gattccgttgacaatggccttttcc

SEQ ID NO: 74900 - DNA, 25 bp, Artificial
  probe
  misc_feature (1)..(25): SEQ ID NO: 4196; WAN024B88_at; Start 223; Stop 247
tgttgcctgctggagacggaagata

SEQ ID NO: 74901 - DNA, 25 bp, Artificial
  probe
  misc_feature (1)..(25): SEQ ID NO: 4196; WAN024B88_at; Start 168; Stop 192
tttccatagaacgaccaaagaccgc

SEQ ID NO: 74902 - DNA, 25 bp, Artificial
  probe
  misc_feature (1)..(25): SEQ ID NO: 4196; WAN024B88_at; Start 191; Stop 215
gcaatcttgcgtccagtcttaacag

SEQ ID NO: 74903 - DNA, 25 bp, Artificial
  probe
  misc_feature (1)..(25): SEQ ID NO: 4196; WAN024B88_at; Start 57; Stop 81
tacagaggataagaacttctcctgc

SEQ ID NO: 74904 - DNA, 25 bp, Artificial
  probe
  misc_feature (1)..(25): SEQ ID NO: 4196; WAN024B88_at; Start 45; Stop 69
cctgactacctgtacagaggataag

SEQ ID NO: 74905 - DNA, 25 bp, Artificial
  probe
  misc_feature (1)..(25): SEQ ID NO: 4196; WAN024B88_at; Start 51; Stop 75
tacctgtacagaggataagaacttc

SEQ ID NO: 74906 - DNA, 25 bp, Artificial
  probe
  misc_feature (1)..(25): SEQ ID NO: 4196; WAN024B88_at; Start 24; Stop 48
agagggctgccataggctcaccctg

SEQ ID NO: 74907 - DNA, 25 bp, Artificial
  probe
  misc_feature (1)..(25): SEQ ID NO: 4196; WAN024B88_at; Start 71; Stop 95
acttctcctgcaggataatctttga

SEQ ID NO: 74908 - DNA, 25 bp, Artificial
  probe
  misc_feature (1)..(25): SEQ ID NO: 4196; WAN024B88_at; Start 139; Stop 163
gccaagatcgattccgttgacaatg

SEQ ID NO: 74909 - DNA, 25 bp, Artificial
  probe
  misc_feature (1)..(25): SEQ ID NO: 4196; WAN024B88_at; Start 28; Stop 52
ggctgccataggctcaccctgacta

SEQ ID NO: 74910 - DNA, 25 bp, Artificial
  probe
  misc_feature (1)..(25): SEQ ID NO: 4196; WAN024B88_at; Start 38; Stop 62
ggctcaccctgactacctgtacaga

SEQ ID NO: 74911 - DNA, 25 bp, Artificial
  probe
  misc_feature (1)..(25): SEQ ID NO: 4196; WAN024B88_at; Start 86; Stop 110
taatctttgatttcatttggctcga

SEQ ID NO: 74912 - DNA, 25 bp, Artificial
  probe
  misc_feature (1)..(25): SEQ ID NO: 4196; WAN024B88_at; Start 183; Stop 207
caaagaccgcaatcttgcgtccagt

SEQ ID NO: 74913 - DNA, 25 bp, Artificial
  probe
  misc_feature (1)..(25): SEQ ID NO: 4196; WAN024B88_at; Start 118; Stop 142
tcccttaggagctttgatgtagcca

SEQ ID NO: 74914 - DNA, 25 bp, Artificial
  probe
  misc_feature (1)..(25): SEQ ID NO: 4196; WAN024B88_at; Start 162; Stop 186
tggccttttccatagaacgaccaaa

SEQ ID NO: 74915 - DNA, 25 bp, Artificial
  probe
  misc_feature (1)..(25): SEQ ID NO: 4196; WAN024B88_at; Start 176; Stop 200
gaacgaccaaagaccgcaatcttgc

SEQ ID NO: 74916 - DNA, 25 bp, Artificial
  probe
  misc_feature (1)..(25): SEQ ID NO: 4196; WAN024B88_at; Start 64; Stop 88
gataagaacttctcctgcaggataa

SEQ ID NO: 74917 - DNA, 25 bp, Artificial
  probe
  misc_feature (1)..(25): SEQ ID NO: 4196; WAN024B88_at; Start 199; Stop 223
gcgtccagtcttaacagcagcttct

SEQ ID NO: 74918 - DNA, 25 bp, Artificial
  probe
  misc_feature (1)..(25): SEQ ID NO: 4196; WAN024B88_at; Start 99; Stop 123
catttggctcgataaaggttccctt

SEQ ID NO: 74919 - DNA, 25 bp, Artificial
  probe
  misc_feature (1)..(25): SEQ ID NO: 4122; WAN024B89_at; Start 211; Stop 235
gaagataacggtatcacctggttgt

SEQ ID NO: 74920 - DNA, 25 bp, Artificial
  probe
  misc_feature (1)..(25): SEQ ID NO: 4122; WAN024B89_at; Start 105; Stop 129
tatggatattgttcactttaccgtg

SEQ ID NO: 74921 - DNA, 25 bp, Artificial
  probe
  misc_feature (1)..(25): SEQ ID NO: 4122; WAN024B89_at; Start 26; Stop 50
ccgtggacaggcatgaagtattttg

SEQ ID NO: 74922 - DNA, 25 bp, Artificial
  probe
  misc_feature (1)..(25): SEQ ID NO: 4122; WAN024B89_at; Start 89; Stop 113
ccaccgtgtccagatgtatggatat

SEQ ID NO: 74923 - DNA, 25 bp, Artificial
  probe
  misc_feature (1)..(25): SEQ ID NO: 4122; WAN024B89_at; Start 126; Stop 150
cgtggataacttcgacaccagcttc

SEQ ID NO: 74924 - DNA, 25 bp, Artificial
  probe
  misc_feature (1)..(25): SEQ ID NO: 4122; WAN024B89_at; Start 13; Stop 37
catgcggtattcaccgtggacaggc

SEQ ID NO: 74925 - DNA, 25 bp, Artificial
  probe
  misc_feature (1)..(25): SEQ ID NO: 4122; WAN024B89_at; Start 146; Stop 170
gcttcagaaatgatgttaatcagct

SEQ ID NO: 74926 - DNA, 25 bp, Artificial
  probe
  misc_feature (1)..(25): SEQ ID NO: 4122; WAN024B89_at; Start 136; Stop 160
ttcgacaccagcttcagaaatgatg

SEQ ID NO: 74927 - DNA, 25 bp, Artificial
  probe
  misc_feature (1)..(25): SEQ ID NO: 4122; WAN024B89_at; Start 198; Stop 222
tgggactagaagagaagataacggt

SEQ ID NO: 74928 - DNA, 25 bp, Artificial
  probe
  misc_feature (1)..(25): SEQ ID NO: 4122; WAN024B89_at; Start 186; Stop 210
tgtttccagggatgggactagaaga

SEQ ID NO: 74929 - DNA, 25 bp, Artificial
  probe
  misc_feature (1)..(25): SEQ ID NO: 4122; WAN024B89_at; Start 222; Stop 246
tatcacctggttgtaattgtacttg

SEQ ID NO: 74930 - DNA, 25 bp, Artificial
  probe
  misc_feature (1)..(25): SEQ ID NO: 4122; WAN024B89_at; Start 181; Stop 205
agtagtgtttccagggatgggacta

SEQ ID NO: 74931 - DNA, 25 bp, Artificial
  probe
  misc_feature (1)..(25): SEQ ID NO: 4122; WAN024B89_at; Start 153; Stop 177
aaatgatgttaatcagcttgttgac

SEQ ID NO: 74932 - DNA, 25 bp, Artificial
  probe
  misc_feature (1)..(25): SEQ ID NO: 4122; WAN024B89_at; Start 20; Stop 44
tattcaccgtggacaggcatgaagt

SEQ ID NO: 74933 - DNA, 25 bp, Artificial
  probe
  misc_feature (1)..(25): SEQ ID NO: 4122; WAN024B89_at; Start 98; Stop 122
ccagatgtatggatattgttcactt

SEQ ID NO: 74934 - DNA, 25 bp, Artificial
  probe
  misc_feature (1)..(25): SEQ ID NO: 4122; WAN024B89_at; Start 189; Stop 213
ttccagggatgggactagaagagaa

SEQ ID NO: 74935 - DNA, 25 bp, Artificial
  probe
  misc_feature (1)..(25): SEQ ID NO: 4122; WAN024B89_at; Start 201; Stop 225
gactagaagagaagataacggtatc

SEQ ID NO: 74936 - DNA, 25 bp, Artificial
  probe
  misc_feature (1)..(25): SEQ ID NO: 4122; WAN024B89_at; Start 108; Stop 132
ggatattgttcactttaccgtggat

SEQ ID NO: 74937 - DNA, 25 bp, Artificial
  probe
  misc_feature (1)..(25): SEQ ID NO: 4122; WAN024B89_at; Start 118; Stop 142
cactttaccgtggataacttcgaca

SEQ ID NO: 74938 - DNA, 25 bp, Artificial
  probe
  misc_feature (1)..(25): SEQ ID NO: 4122; WAN024B89_at; Start 9; Stop 33
tttgcatgcggtattcaccgtggac

SEQ ID NO: 74939 - DNA, 25 bp, Artificial
  probe
  misc_feature (1)..(25): SEQ ID NO: 4122; WAN024B89_at; Start 139; Stop 163
gacaccagcttcagaaatgatgtta

SEQ ID NO: 74940 - DNA, 25 bp, Artificial
  probe
  misc_feature (1)..(25): SEQ ID NO: 4122; WAN024B89_at; Start 216; Stop 240
taacggtatcacctggttgtaattg

SEQ ID NO: 74941 - DNA, 25 bp, Artificial
  probe
  misc_feature (1)..(25): SEQ ID NO: 4122; WAN024B89_at; Start 2; Stop 26
tggactttttgcatgcggtattcac

SEQ ID NO: 74942 - DNA, 25 bp, Artificial
  probe
  misc_feature (1)..(25): SEQ ID NO: 4122; WAN024B89_at; Start 23; Stop 47
tcaccgtggacaggcatgaagtatt

SEQ ID NO: 74943 - DNA, 25 bp, Artificial
  probe
  misc_feature (1)..(25): SEQ ID NO: 4122; WAN024B89_at; Start 38; Stop 62
atgaagtattttggcttaatcaagc

SEQ ID NO: 74944 - DNA, 25 bp, Artificial
  probe
  misc_feature (1)..(25): SEQ ID NO: 4122; WAN024B89_at; Start 123; Stop 147
taccgtggataacttcgacaccagc

SEQ ID NO: 74945 - DNA, 25 bp, Artificial
  probe
  misc_feature (1)..(25): SEQ ID NO: 4122; WAN024B89_at; Start 33; Stop 57
caggcatgaagtattttggcttaat

SEQ ID NO: 74946 - DNA, 25 bp, Artificial
  probe
  misc_feature (1)..(25): SEQ ID NO: 4122; WAN024B89_at; Start 17; Stop 41
cggtattcaccgtggacaggcatga

SEQ ID NO: 74947 - DNA, 25 bp, Artificial
  probe
  misc_feature (1)..(25): SEQ ID NO: 4122; WAN024B89_at; Start 29; Stop 53
tggacaggcatgaagtattttggct

SEQ ID NO: 74948 - DNA, 25 bp, Artificial
  probe
  misc_feature (1)..(25): SEQ ID NO: 4122; WAN024B89_at; Start 111; Stop 135
tattgttcactttaccgtggataac

SEQ ID NO: 74949 - DNA, 25 bp, Artificial
  probe
  misc_feature (1)..(25): SEQ ID NO: 4122; WAN024B89_at; Start 206; Stop 230
gaagagaagataacggtatcacctg

SEQ ID NO: 74950 - DNA, 25 bp, Artificial
  probe
  misc_feature (1)..(25): SEQ ID NO: 4122; WAN024B89_at; Start 4; Stop 28
gactttttgcatgcggtattcaccg

SEQ ID NO: 74951 - DNA, 25 bp, Artificial
  probe
  misc_feature (1)..(25): SEQ ID NO: 4122; WAN024B89_at; Start 129; Stop 153
ggataacttcgacaccagcttcaga

SEQ ID NO: 74952 - DNA, 25 bp, Artificial
  probe
  misc_feature (1)..(25): SEQ ID NO: 4122; WAN024B89_at; Start 143; Stop 167
ccagcttcagaaatgatgttaatca

SEQ ID NO: 74953 - DNA, 25 bp, Artificial
  probe
  misc_feature (1)..(25): SEQ ID NO: 3690; WAN024B8A_at; Start 1679; Stop 1703
cgatgatcctcacaccagatgaaga

SEQ ID NO: 74954 - DNA, 25 bp, Artificial
  probe
  misc_feature (1)..(25): SEQ ID NO: 3690; WAN024B8A_at; Start 1288; Stop 1312
gatgtgcttgcccttactgctgact

SEQ ID NO: 74955 - DNA, 25 bp, Artificial
  probe
  misc_feature (1)..(25): SEQ ID NO: 3690; WAN024B8A_at; Start 1647; Stop 1671
tgaaaataccgaacgtgaaccgatc

SEQ ID NO: 74956 - DNA, 25 bp, Artificial
  probe
  misc_feature (1)..(25): SEQ ID NO: 3690; WAN024B8A_at; Start 1324; Stop 1348
gcaggtcatttcaacgcccaagata

SEQ ID NO: 74957 - DNA, 25 bp, Artificial
  probe
  misc_feature (1)..(25): SEQ ID NO: 3690; WAN024B8A_at; Start 1404; Stop 1428
tcgcgatctatctgaagacggtgtc

SEQ ID NO: 74958 - DNA, 25 bp, Artificial
  probe
  misc_feature (1)..(25): SEQ ID NO: 3690; WAN024B8A_at; Start 1491; Stop 1515
cagccgaggctttgtctacatgaga

SEQ ID NO: 74959 - DNA, 25 bp, Artificial
  probe
  misc_feature (1)..(25): SEQ ID NO: 3690; WAN024B8A_at; Start 1207; Stop 1231
taccgcatgcaaaaagtccacgctg

SEQ ID NO: 74960 - DNA, 25 bp, Artificial
  probe
  misc_feature (1)..(25): SEQ ID NO: 3690; WAN024B8A_at; Start 219; Stop 243
tatcgaccgcgtcaaggctgtttta

SEQ ID NO: 74961 - DNA, 25 bp, Artificial
  probe
  misc_feature (1)..(25): SEQ ID NO: 3690; WAN024B8A_at; Start 1368; Stop 1392
tatcggtgaaattggcgcagctgtc

SEQ ID NO: 74962 - DNA, 25 bp, Artificial
  probe
  misc_feature (1)..(25): SEQ ID NO: 3690; WAN024B8A_at; Start 147; Stop 171
gattaaattcccagaagatgacttg

SEQ ID NO: 74963 - DNA, 25 bp, Artificial
  probe
  misc_feature (1)..(25): SEQ ID NO: 3690; WAN024B8A_at; Start 1576; Stop 1600
ctgaaaaataaggatgctagcgtgc

SEQ ID NO: 74964 - DNA, 25 bp, Artificial
  probe
  misc_feature (1)..(25): SEQ ID NO: 3690; WAN024B8A_at; Start 1309; Stop 1333
gactcagctcgtatcgcaggtcatt

SEQ ID NO: 74965 - DNA, 25 bp, Artificial
  probe
  misc_feature (1)..(25): SEQ ID NO: 3690; WAN024B8A_at; Start 1385; Stop 1409
cagctgtcctcaaagatcgtcgcga

SEQ ID NO: 74966 - DNA, 25 bp, Artificial
  probe
  misc_feature (1)..(25): SEQ ID NO: 3690; WAN024B8A_at; Start 345; Stop 369
tgggaaactcgaagaacacggcctc

SEQ ID NO: 74967 - DNA, 25 bp, Artificial
  probe
  misc_feature (1)..(25): SEQ ID NO: 3690; WAN024B8A_at; Start 1115; Stop 1139
atatccatacatctggacacggtgg

SEQ ID NO: 74968 - DNA, 25 bp, Artificial
  probe
  misc_feature (1)..(25): SEQ ID NO: 3690; WAN024B8A_at; Start 542; Stop 566
cagttggagaacctgcggacttgca

SEQ ID NO: 74969 - DNA, 25 bp, Artificial
  probe
  misc_feature (1)..(25): SEQ ID NO: 3690; WAN024B8A_at; Start 1557; Stop 1581
caatgccattcgtatcgcactgaaa

SEQ ID NO: 74970 - DNA, 25 bp, Artificial
  probe
  misc_feature (1)..(25): SEQ ID NO: 3690; WAN024B8A_at; Start 1591; Stop 1615
gctagcgtgcaatctgtcaatggtg

SEQ ID NO: 74971 - DNA, 25 bp, Artificial
  probe
  misc_feature (1)..(25): SEQ ID NO: 3690; WAN024B8A_at; Start 826; Stop 850
ggaatcgatcttggctacatcaaag

SEQ ID NO: 74972 - DNA, 25 bp, Artificial
  probe
  misc_feature (1)..(25): SEQ ID NO: 3690; WAN024B8A_at; Start 1612; Stop 1636
ggtgccattgtcaacgctattcgcc

SEQ ID NO: 74973 - DNA, 25 bp, Artificial
  probe
  misc_feature (1)..(25): SEQ ID NO: 3690; WAN024B8A_at; Start 1178; Stop 1202
caaaatacttcatgcctgtccacgg

SEQ ID NO: 74974 - DNA, 25 bp, Artificial
  probe
  misc_feature (1)..(25): SEQ ID NO: 3690; WAN024B8A_at; Start 808; Stop 832
gaaaaggccattgtcaacggaatcg

SEQ ID NO: 74975 - DNA, 25 bp, Artificial
  probe
  misc_feature (1)..(25): SEQ ID NO: 3690; WAN024B8A_at; Start 526; Stop 550
aagttcgactttactccagttggag

SEQ ID NO: 74976 - DNA, 25 bp, Artificial
  probe
  misc_feature (1)..(25): SEQ ID NO: 3690; WAN024B8A_at; Start 14; Stop 38
tacggagttctaatatggcctacac

SEQ ID NO: 74977 - DNA, 25 bp, Artificial
  probe
  misc_feature (1)..(25): SEQ ID NO: 3690; WAN024B8A_at; Start 388; Stop 412
tacgaaatcaaccacaacaccgagt

SEQ ID NO: 74978 - DNA, 25 bp, Artificial
  probe
  misc_feature (1)..(25): SEQ ID NO: 3690; WAN024B8A_at; Start 1078; Stop 1102
gaagctggtgtcgaagttatccacg

SEQ ID NO: 74979 - DNA, 25 bp, Artificial
  probe
  misc_feature (1)..(25): SEQ ID NO: 3690; WAN024B8A_at; Start 328; Stop 352
gccttggctttgatccgtgggaaac

SEQ ID NO: 74980 - DNA, 25 bp, Artificial
  probe
  misc_feature (1)..(25): SEQ ID NO: 3690; WAN024B8A_at; Start 132; Stop 156
catcgtcgatgctgggattaaattc

SEQ ID NO: 74981 - DNA, 25 bp, Artificial
  probe
  misc_feature (1)..(25): SEQ ID NO: 3690; WAN024B8A_at; Start 238; Stop 262
gttttaatcacacacggacacgagg

SEQ ID NO: 74982 - DNA, 25 bp, Artificial
  probe
  misc_feature (1)..(25): SEQ ID NO: 3690; WAN024B8A_at; Start 66; Stop 90
tgccatcggtggtctaggagaaatc

SEQ ID NO: 74983 - DNA, 25 bp, Artificial
  probe
  misc_feature (1)..(25): SEQ ID NO: 3690; WAN024B8A_at; Start 371; Stop 395
tgcgcaacgccaaactttacgaaat

SEQ ID NO: 74984 - DNA, 25 bp, Artificial
  probe
  misc_feature (1)..(25): SEQ ID NO: 3690; WAN024B8A_at; Start 1225; Stop 1249
cacgctggactagcagtggatactg

SEQ ID NO: 74985 - DNA, 25 bp, Artificial
  probe
  misc_feature (1)..(25): SEQ ID NO: 3690; WAN024B8A_at; Start 163; Stop 187
gatgacttgcttggtatcgactatg

SEQ ID NO: 74986 - DNA, 25 bp, Artificial
  probe
  misc_feature (1)..(25): SEQ ID NO: 3690; WAN024B8A_at; Start 274; Stop 298
gggattccgttcctactcaagcaag

SEQ ID NO: 74987 - DNA, 25 bp, Artificial
  probe
  misc_feature (1)..(25): SEQ ID NO: 5740; WAN024B8B_at; Start 87; Stop 111
tgccacaccacctgccacaactagg

SEQ ID NO: 74988 - DNA, 25 bp, Artificial
  probe
  misc_feature (1)..(25): SEQ ID NO: 5740; WAN024B8B_at; Start 150; Stop 174
tgccatgagaatgtccataactgct

SEQ ID NO: 74989 - DNA, 25 bp, Artificial
  probe
  misc_feature (1)..(25): SEQ ID NO: 5740; WAN024B8B_at; Start 169; Stop 193
actgctgcttggaaggaagcacaca

SEQ ID NO: 74990 - DNA, 25 bp, Artificial
  probe
  misc_feature (1)..(25): SEQ ID NO: 5740; WAN024B8B_at; Start 136; Stop 160
gccttcttggtttttgccatgagaa

SEQ ID NO: 74991 - DNA, 25 bp, Artificial
  probe
  misc_feature (1)..(25): SEQ ID NO: 5740; WAN024B8B_at; Start 172; Stop 196
gctgcttggaaggaagcacacaaat

SEQ ID NO: 74992 - DNA, 25 bp, Artificial
  probe
  misc_feature (1)..(25): SEQ ID NO: 5740; WAN024B8B_at; Start 144; Stop 168
ggtttttgccatgagaatgtccata

SEQ ID NO: 74993 - DNA, 25 bp, Artificial
  probe
  misc_feature (1)..(25): SEQ ID NO: 5740; WAN024B8B_at; Start 210; Stop 234
gctttctcccttttgctcggcattg

SEQ ID NO: 74994 - DNA, 25 bp, Artificial
  probe
  misc_feature (1)..(25): SEQ ID NO: 5740; WAN024B8B_at; Start 63; Stop 87
gcgttctctgagacctttattggct

SEQ ID NO: 74995 - DNA, 25 bp, Artificial
  probe
  misc_feature (1)..(25): SEQ ID NO: 5740; WAN024B8B_at; Start 183; Stop 207
ggaagcacacaaatcttctgtagac

SEQ ID NO: 74996 - DNA, 25 bp, Artificial
  probe
  misc_feature (1)..(25): SEQ ID NO: 5740; WAN024B8B_at; Start 133; Stop 157
aaagccttcttggtttttgccatga

SEQ ID NO: 74997 - DNA, 25 bp, Artificial
  probe
  misc_feature (1)..(25): SEQ ID NO: 5740; WAN024B8B_at; Start 164; Stop 188
ccataactgctgcttggaaggaagc

SEQ ID NO: 74998 - DNA, 25 bp, Artificial
  probe
  misc_feature (1)..(25): SEQ ID NO: 5740; WAN024B8B_at; Start 161; Stop 185
tgtccataactgctgcttggaagga

SEQ ID NO: 74999 - DNA, 25 bp, Artificial
  probe
  misc_feature (1)..(25): SEQ ID NO: 5740; WAN024B8B_at; Start 196; Stop 220
tcttctgtagacaggctttctccct

SEQ ID NO: 75000 - DNA, 25 bp, Artificial
  probe
  misc_feature (1)..(25): SEQ ID NO: 5740; WAN024B8B_at; Start 205; Stop 229
gacaggctttctcccttttgctcgg

SEQ ID NO: 75001 - DNA, 25 bp, Artificial
  probe
  misc_feature (1)..(25): SEQ ID NO: 5740; WAN024B8B_at; Start 121; Stop 145
ggatatttctccaaagccttcttgg

SEQ ID NO: 75002 - DNA, 25 bp, Artificial
  probe
  misc_feature (1)..(25): SEQ ID NO: 5740; WAN024B8B_at; Start 67; Stop 91
tctctgagacctttattggctgcca

SEQ ID NO: 75003 - DNA, 25 bp, Artificial
  probe
  misc_feature (1)..(25): SEQ ID NO: 5740; WAN024B8B_at; Start 175; Stop 199
gcttggaaggaagcacacaaatctt

SEQ ID NO: 75004 - DNA, 25 bp, Artificial
  probe
  misc_feature (1)..(25): SEQ ID NO: 5740; WAN024B8B_at; Start 148; Stop 172
tttgccatgagaatgtccataactg

SEQ ID NO: 75005 - DNA, 25 bp, Artificial
  probe
  misc_feature (1)..(25): SEQ ID NO: 5740; WAN024B8B_at; Start 115; Stop 139
ttaacaggatatttctccaaagcct

SEQ ID NO: 75006 - DNA, 25 bp, Artificial
  probe
  misc_feature (1)..(25): SEQ ID NO: 5740; WAN024B8B_at; Start 69; Stop 93
tctgagacctttattggctgccaca

SEQ ID NO: 75007 - DNA, 25 bp, Artificial
  probe
  misc_feature (1)..(25): SEQ ID NO: 5740; WAN024B8B_at; Start 186; Stop 210
agcacacaaatcttctgtagacagg

SEQ ID NO: 75008 - DNA, 25 bp, Artificial
  probe
  misc_feature (1)..(25): SEQ ID NO: 5740; WAN024B8B_at; Start 192; Stop 216
caaatcttctgtagacaggctttct

SEQ ID NO: 75009 - DNA, 25 bp, Artificial
  probe
  misc_feature (1)..(25): SEQ ID NO: 5740; WAN024B8B_at; Start 158; Stop 182
gaatgtccataactgctgcttggaa

SEQ ID NO: 75010 - DNA, 25 bp, Artificial
  probe
  misc_feature (1)..(25): SEQ ID NO: 5740; WAN024B8B_at; Start 57; Stop 81
tgctaggcgttctctgagaccttta

SEQ ID NO: 75011 - DNA, 25 bp, Artificial
  probe
  misc_feature (1)..(25): SEQ ID NO: 5740; WAN024B8B_at; Start 213; Stop 237
ttctcccttttgctcggcattgtga

SEQ ID NO: 75012 - DNA, 25 bp, Artificial
  probe
  misc_feature (1)..(25): SEQ ID NO: 5740; WAN024B8B_at; Start 72; Stop 96
gagacctttattggctgccacacca

SEQ ID NO: 75013 - DNA, 25 bp, Artificial
  probe
  misc_feature (1)..(25): SEQ ID NO: 5740; WAN024B8B_at; Start 78; Stop 102
tttattggctgccacaccacctgcc

SEQ ID NO: 75014 - DNA, 25 bp, Artificial
  probe
  misc_feature (1)..(25): SEQ ID NO: 5740; WAN024B8B_at; Start 167; Stop 191
taactgctgcttggaaggaagcaca

SEQ ID NO: 75015 - DNA, 25 bp, Artificial
  probe
  misc_feature (1)..(25): SEQ ID NO: 5740; WAN024B8B_at; Start 207; Stop 231
caggctttctcccttttgctcggca

SEQ ID NO: 75016 - DNA, 25 bp, Artificial
  probe
  misc_feature (1)..(25): SEQ ID NO: 5740; WAN024B8B_at; Start 178; Stop 202
tggaaggaagcacacaaatcttctg

SEQ ID NO: 75017 - DNA, 25 bp, Artificial
  probe
  misc_feature (1)..(25): SEQ ID NO: 5740; WAN024B8B_at; Start 156; Stop 180
gagaatgtccataactgctgcttgg

SEQ ID NO: 75018 - DNA, 25 bp, Artificial
  probe
  misc_feature (1)..(25): SEQ ID NO: 5740; WAN024B8B_at; Start 201; Stop 225
tgtagacaggctttctcccttttgc

SEQ ID NO: 75019 - DNA, 25 bp, Artificial
  probe
  misc_feature (1)..(25): SEQ ID NO: 5740; WAN024B8B_at; Start 188; Stop 212
cacacaaatcttctgtagacaggct

SEQ ID NO: 75020 - DNA, 25 bp, Artificial
  probe
  misc_feature (1)..(25): SEQ ID NO: 5740; WAN024B8B_at; Start 153; Stop 177
catgagaatgtccataactgctgct

SEQ ID NO: 75021 - DNA, 25 bp, Artificial
  probe
  misc_feature (1)..(25): SEQ ID NO: 1126; WAN024B8C_at; Start 342; Stop 366
catggctgggcacctcatggcagct

SEQ ID NO: 75022 - DNA, 25 bp, Artificial
  probe
  misc_feature (1)..(25): SEQ ID NO: 1126; WAN024B8C_at; Start 47; Stop 71
ccagtgtcgccgtcttgaaaaacga

SEQ ID NO: 75023 - DNA, 25 bp, Artificial
  probe
  misc_feature (1)..(25): SEQ ID NO: 1126; WAN024B8C_at; Start 206; Stop 230
cagggattaccgaagaggacgtgac

SEQ ID NO: 75024 - DNA, 25 bp, Artificial
  probe
  misc_feature (1)..(25): SEQ ID NO: 1126; WAN024B8C_at; Start 670; Stop 694
cacaatgccgagcaaaagggagaaa

SEQ ID NO: 75025 - DNA, 25 bp, Artificial
  probe
  misc_feature (1)..(25): SEQ ID NO: 1126; WAN024B8C_at; Start 819; Stop 843
agccaataaaggtctcagagaacgc

SEQ ID NO: 75026 - DNA, 25 bp, Artificial
  probe
  misc_feature (1)..(25): SEQ ID NO: 1126; WAN024B8C_at; Start 264; Stop 288
cggagccttgctagttggtttgtca

SEQ ID NO: 75027 - DNA, 25 bp, Artificial
  probe
  misc_feature (1)..(25): SEQ ID NO: 1126; WAN024B8C_at; Start 551; Stop 575
agattgacgagctggctcatcaggg

SEQ ID NO: 75028 - DNA, 25 bp, Artificial
  probe
  misc_feature (1)..(25): SEQ ID NO: 1126; WAN024B8C_at; Start 811; Stop 835
ggtgtggcagccaataaaggtctca

SEQ ID NO: 75029 - DNA, 25 bp, Artificial
  probe
  misc_feature (1)..(25): SEQ ID NO: 1126; WAN024B8C_at; Start 20; Stop 44
tagcatttgagacatcctgtgatga

SEQ ID NO: 75030 - DNA, 25 bp, Artificial
  probe
  misc_feature (1)..(25): SEQ ID NO: 1126; WAN024B8C_at; Start 34; Stop 58
tcctgtgatgagaccagtgtcgccg

SEQ ID NO: 75031 - DNA, 25 bp, Artificial
  probe
  misc_feature (1)..(25): SEQ ID NO: 1126; WAN024B8C_at; Start 932; Stop 956
tcagcgagtggaacaaagaaaactt

SEQ ID NO: 75032 - DNA, 25 bp, Artificial
  probe
  misc_feature (1)..(25): SEQ ID NO: 1126; WAN024B8C_at; Start 521; Stop 545
tcatgggcttgacctatcctgcagg

SEQ ID NO: 75033 - DNA, 25 bp, Artificial
  probe
  misc_feature (1)..(25): SEQ ID NO: 1126; WAN024B8C_at; Start 294; Stop 318
caaggcctttgcttgggctcacgga

SEQ ID NO: 75034 - DNA, 25 bp, Artificial
  probe
  misc_feature (1)..(25): SEQ ID NO: 1126; WAN024B8C_at; Start 369; Stop 393
gagtgtggagcctttggagtttccc

SEQ ID NO: 75035 - DNA, 25 bp, Artificial
  probe
  misc_feature (1)..(25): SEQ ID NO: 1126; WAN024B8C_at; Start 156; Stop 180
tcaccatgtcgaggtcattacagcc

SEQ ID NO: 75036 - DNA, 25 bp, Artificial
  probe
  misc_feature (1)..(25): SEQ ID NO: 1126; WAN024B8C_at; Start 535; Stop 559
tatcctgcaggtcgtgagattgacg

SEQ ID NO: 75037 - DNA, 25 bp, Artificial
  probe
  misc_feature (1)..(25): SEQ ID NO: 1126; WAN024B8C_at; Start 131; Stop 155
gcgtagtgcccgaagtagccagtcg

SEQ ID NO: 75038 - DNA, 25 bp, Artificial
  probe
  misc_feature (1)..(25): SEQ ID NO: 1126; WAN024B8C_at; Start 330; Stop 354
tcctgttaatcacatggctgggcac

SEQ ID NO: 75039 - DNA, 25 bp, Artificial
  probe
  misc_feature (1)..(25): SEQ ID NO: 1126; WAN024B8C_at; Start 893; Stop 917
tctgcggagacaatgcaggtatgat

SEQ ID NO: 75040 - DNA, 25 bp, Artificial
  probe
  misc_feature (1)..(25): SEQ ID NO: 1126; WAN024B8C_at; Start 247; Stop 271
tacggaccaggcttggtcggagcct

SEQ ID NO: 75041 - DNA, 25 bp, Artificial
  probe
  misc_feature (1)..(25): SEQ ID NO: 1126; WAN024B8C_at; Start 115; Stop 139
cacaaacgttttggtggcgtagtgc

SEQ ID NO: 75042 - DNA, 25 bp, Artificial
  probe
  misc_feature (1)..(25): SEQ ID NO: 1126; WAN024B8C_at; Start 709; Stop 733
gatttgtgtgcttccttccaagcag

SEQ ID NO: 75043 - DNA, 25 bp, Artificial
  probe
  misc_feature (1)..(25): SEQ ID NO: 1126; WAN024B8C_at; Start 87; Stop 111
caatgtcattgctagtcaaattgag

SEQ ID NO: 75044 - DNA, 25 bp, Artificial
  probe
  misc_feature (1)..(25): SEQ ID NO: 1126; WAN024B8C_at; Start 378; Stop 402
gcctttggagtttcccttgctagcc

SEQ ID NO: 75045 - DNA, 25 bp, Artificial
  probe
  misc_feature (1)..(25): SEQ ID NO: 1126; WAN024B8C_at; Start 356; Stop 380
tcatggcagctcagagtgtggagcc

SEQ ID NO: 75046 - DNA, 25 bp, Artificial
  probe
  misc_feature (1)..(25): SEQ ID NO: 1126; WAN024B8C_at; Start 215; Stop 239
ccgaagaggacgtgacagctgttgc

SEQ ID NO: 75047 - DNA, 25 bp, Artificial
  probe
  misc_feature (1)..(25): SEQ ID NO: 1126; WAN024B8C_at; Start 59; Stop 83
tcttgaaaaacgacgatgagctctt

SEQ ID NO: 75048 - DNA, 25 bp, Artificial
  probe
  misc_feature (1)..(25): SEQ ID NO: 1126; WAN024B8C_at; Start 70; Stop 94
gacgatgagctcttgtccaatgtca

SEQ ID NO: 75049 - DNA, 25 bp, Artificial
  probe
  misc_feature (1)..(25): SEQ ID NO: 1126; WAN024B8C_at; Start 194; Stop 218
cattggcagaagcagggattaccga

SEQ ID NO: 75050 - DNA, 25 bp, Artificial
  probe
  misc_feature (1)..(25): SEQ ID NO: 1126; WAN024B8C_at; Start 99; Stop 123
tagtcaaattgagagtcacaaacgt

SEQ ID NO: 75051 - DNA, 25 bp, Artificial
  probe
  misc_feature (1)..(25): SEQ ID NO: 1126; WAN024B8C_at; Start 307; Stop 331
tgggctcacggacttccactgattc

SEQ ID NO: 75052 - DNA, 25 bp, Artificial
  probe
  misc_feature (1)..(25): SEQ ID NO: 1126; WAN024B8C_at; Start 142; Stop 166
gaagtagccagtcgtcaccatgtcg

SEQ ID NO: 75053 - DNA, 25 bp, Artificial
  probe
  misc_feature (1)..(25): SEQ ID NO: 1126; WAN024B8C_at; Start 183; Stop 207
tatcgaggaggcattggcagaagca

SEQ ID NO: 75054 - DNA, 25 bp, Artificial
  probe
  misc_feature (1)..(25): SEQ ID NO: 1126; WAN024B8C_at; Start 171; Stop 195
cattacagcctgtatcgaggaggca

SEQ ID NO: 75055 - DNA, 25 bp, Artificial
  probe
  misc_feature (1)..(25): SEQ ID NO: 14; WAN024B8D_s_at; Start 40; Stop 64
ttccttctcacatgcgcccaacatc

SEQ ID NO: 75056 - DNA, 25 bp, Artificial
  probe
  misc_feature (1)..(25): SEQ ID NO: 14; WAN024B8D_s_at; Start 47; Stop 71
tcacatgcgcccaacatccaacaag

SEQ ID NO: 75057 - DNA, 25 bp, Artificial
  probe
  misc_feature (1)..(25): SEQ ID NO: 14; WAN024B8D_s_at; Start 48; Stop 72
cacatgcgcccaacatccaacaagt

SEQ ID NO: 75058 - DNA, 25 bp, Artificial
  probe
  misc_feature (1)..(25): SEQ ID NO: 14; WAN024B8D_s_at; Start 42; Stop 66
ccttctcacatgcgcccaacatcca

SEQ ID NO: 75059 - DNA, 25 bp, Artificial
  probe
  misc_feature (1)..(25): SEQ ID NO: 14; WAN024B8D_s_at; Start 41; Stop 65
tccttctcacatgcgcccaacatcc

SEQ ID NO: 75060 - DNA, 25 bp, Artificial
  probe
  misc_feature (1)..(25): SEQ ID NO: 14; WAN024B8D_s_at; Start 43; Stop 67
cttctcacatgcgcccaacatccaa

SEQ ID NO: 75061 - DNA, 25 bp, Artificial
  probe
  misc_feature (1)..(25): SEQ ID NO: 14; WAN024B8D_s_at; Start 38; Stop 62
acttccttctcacatgcgcccaaca

SEQ ID NO: 75062 - DNA, 25 bp, Artificial
  probe
  misc_feature (1)..(25): SEQ ID NO: 14; WAN024B8D_s_at; Start 34; Stop 58
aaaaacttccttctcacatgcgccc

SEQ ID NO: 75063 - DNA, 25 bp, Artificial
  probe
  misc_feature (1)..(25): SEQ ID NO: 14; WAN024B8D_s_at; Start 33; Stop 57
aaaaaacttccttctcacatgcgcc

SEQ ID NO: 75064 - DNA, 25 bp, Artificial
  probe
  misc_feature (1)..(25): SEQ ID NO: 14; WAN024B8D_s_at; Start 37; Stop 61
aacttccttctcacatgcgcccaac

SEQ ID NO: 75065 - DNA, 25 bp, Artificial
  probe
  misc_feature (1)..(25): SEQ ID NO: 14; WAN024B8D_s_at; Start 30; Stop 54
ttcaaaaaacttccttctcacatgc

SEQ ID NO: 75066 - DNA, 25 bp, Artificial
  probe
  misc_feature (1)..(25): SEQ ID NO: 14; WAN024B8D_s_at; Start 46; Stop 70
ctcacatgcgcccaacatccaacaa

SEQ ID NO: 75067 - DNA, 25 bp, Artificial
  probe
  misc_feature (1)..(25): SEQ ID NO: 14; WAN024B8D_s_at; Start 36; Stop 60
aaacttccttctcacatgcgcccaa

SEQ ID NO: 75068 - DNA, 25 bp, Artificial
  probe
  misc_feature (1)..(25): SEQ ID NO: 14; WAN024B8D_s_at; Start 35; Stop 59
aaaacttccttctcacatgcgccca

SEQ ID NO: 75069 - DNA, 25 bp, Artificial
  probe
  misc_feature (1)..(25): SEQ ID NO: 14; WAN024B8D_s_at; Start 39; Stop 63
cttccttctcacatgcgcccaacat

SEQ ID NO: 75070 - DNA, 25 bp, Artificial
  probe
  misc_feature (1)..(25): SEQ ID NO: 14; WAN024B8D_s_at; Start 32; Stop 56
caaaaaacttccttctcacatgcgc

SEQ ID NO: 75071 - DNA, 25 bp, Artificial
  probe
  misc_feature (1)..(25): SEQ ID NO: 14; WAN024B8D_s_at; Start 45; Stop 69
tctcacatgcgcccaacatccaaca

SEQ ID NO: 75072 - DNA, 25 bp, Artificial
  probe
  misc_feature (1)..(25): SEQ ID NO: 14; WAN024B8D_s_at; Start 31; Stop 55
tcaaaaaacttccttctcacatgcg

SEQ ID NO: 75073 - DNA, 25 bp, Artificial
  probe
  misc_feature (1)..(25): SEQ ID NO: 14; WAN024B8D_s_at; Start 29; Stop 53
cttcaaaaaacttccttctcacatg

SEQ ID NO: 75074 - DNA, 25 bp, Artificial
  probe
  misc_feature (1)..(25): SEQ ID NO: 14; WAN024B8D_s_at; Start 44; Stop 68
ttctcacatgcgcccaacatccaac

SEQ ID NO: 75075 - DNA, 25 bp, Artificial
  probe
  misc_feature (1)..(25): SEQ ID NO: 37; WAN024B8E_s_at; Start 52; Stop 76
caagaacatctccagcccttaatgg

SEQ ID NO: 75076 - DNA, 25 bp, Artificial
  probe
  misc_feature (1)..(25): SEQ ID NO: 37; WAN024B8E_s_at; Start 63; Stop 87
ccagcccttaatggaagacttcttt

SEQ ID NO: 75077 - DNA, 25 bp, Artificial
  probe
  misc_feature (1)..(25): SEQ ID NO: 37; WAN024B8E_s_at; Start 58; Stop 82
catctccagcccttaatggaagact

SEQ ID NO: 75078 - DNA, 25 bp, Artificial
  probe
  misc_feature (1)..(25): SEQ ID NO: 37; WAN024B8E_s_at; Start 49; Stop 73
cgtcaagaacatctccagcccttaa

SEQ ID NO: 75079 - DNA, 25 bp, Artificial
  probe
  misc_feature (1)..(25): SEQ ID NO: 37; WAN024B8E_s_at; Start 57; Stop 81
acatctccagcccttaatggaagac

SEQ ID NO: 75080 - DNA, 25 bp, Artificial
  probe
  misc_feature (1)..(25): SEQ ID NO: 37; WAN024B8E_s_at; Start 61; Stop 85
ctccagcccttaatggaagacttct

SEQ ID NO: 75081 - DNA, 25 bp, Artificial
  probe
  misc_feature (1)..(25): SEQ ID NO: 37; WAN024B8E_s_at; Start 59; Stop 83
atctccagcccttaatggaagactt

SEQ ID NO: 75082 - DNA, 25 bp, Artificial
  probe
  misc_feature (1)..(25): SEQ ID NO: 37; WAN024B8E_s_at; Start 54; Stop 78
agaacatctccagcccttaatggaa

SEQ ID NO: 75083 - DNA, 25 bp, Artificial
  probe
  misc_feature (1)..(25): SEQ ID NO: 37; WAN024B8E_s_at; Start 65; Stop 89
agcccttaatggaagacttctttgc

SEQ ID NO: 75084 - DNA, 25 bp, Artificial
  probe
  misc_feature (1)..(25): SEQ ID NO: 37; WAN024B8E_s_at; Start 43; Stop 67
cagaaacgtcaagaacatctccagc

SEQ ID NO: 75085 - DNA, 25 bp, Artificial
  probe
  misc_feature (1)..(25): SEQ ID NO: 37; WAN024B8E_s_at; Start 50; Stop 74
gtcaagaacatctccagcccttaat

SEQ ID NO: 75086 - DNA, 25 bp, Artificial
  probe
  misc_feature (1)..(25): SEQ ID NO: 37; WAN024B8E_s_at; Start 56; Stop 80
aacatctccagcccttaatggaaga

SEQ ID NO: 75087 - DNA, 25 bp, Artificial
  probe
  misc_feature (1)..(25): SEQ ID NO: 37; WAN024B8E_s_at; Start 48; Stop 72
acgtcaagaacatctccagccctta

SEQ ID NO: 75088 - DNA, 25 bp, Artificial
  probe
  misc_feature (1)..(25): SEQ ID NO: 37; WAN024B8E_s_at; Start 44; Stop 68
agaaacgtcaagaacatctccagcc

SEQ ID NO: 75089 - DNA, 25 bp, Artificial
  probe
  misc_feature (1)..(25): SEQ ID NO: 37; WAN024B8E_s_at; Start 46; Stop 70
aaacgtcaagaacatctccagccct

SEQ ID NO: 75090 - DNA, 25 bp, Artificial
  probe
  misc_feature (1)..(25): SEQ ID NO: 37; WAN024B8E_s_at; Start 62; Stop 86
tccagcccttaatggaagacttctt

SEQ ID NO: 75091 - DNA, 25 bp, Artificial
  probe
  misc_feature (1)..(25): SEQ ID NO: 37; WAN024B8E_s_at; Start 53; Stop 77
aagaacatctccagcccttaatgga

SEQ ID NO: 75092 - DNA, 25 bp, Artificial
  probe
  misc_feature (1)..(25): SEQ ID NO: 37; WAN024B8E_s_at; Start 55; Stop 79
gaacatctccagcccttaatggaag

SEQ ID NO: 75093 - DNA, 25 bp, Artificial
  probe
  misc_feature (1)..(25): SEQ ID NO: 37; WAN024B8E_s_at; Start 66; Stop 90
gcccttaatggaagacttctttgct

SEQ ID NO: 75094 - DNA, 25 bp, Artificial
  probe
  misc_feature (1)..(25): SEQ ID NO: 37; WAN024B8E_s_at; Start 47; Stop 71
aacgtcaagaacatctccagccctt

SEQ ID NO: 75095 - DNA, 25 bp, Artificial
  probe
  misc_feature (1)..(25): SEQ ID NO: 37; WAN024B8E_s_at; Start 45; Stop 69
gaaacgtcaagaacatctccagccc

SEQ ID NO: 75096 - DNA, 25 bp, Artificial
  probe
  misc_feature (1)..(25): SEQ ID NO: 37; WAN024B8E_s_at; Start 60; Stop 84
tctccagcccttaatggaagacttc

SEQ ID NO: 75097 - DNA, 25 bp, Artificial
  probe
  misc_feature (1)..(25): SEQ ID NO: 37; WAN024B8E_s_at; Start 51; Stop 75
tcaagaacatctccagcccttaatg

SEQ ID NO: 75098 - DNA, 25 bp, Artificial
  probe
  misc_feature (1)..(25): SEQ ID NO: 37; WAN024B8E_s_at; Start 64; Stop 88
cagcccttaatggaagacttctttg

SEQ ID NO: 75099 - DNA, 25 bp, Artificial
  probe
  misc_feature (1)..(25): SEQ ID NO: 6686; WAN024B8F_at; Start 87; Stop 111
tgacgataagcttctagctgttcgc

SEQ ID NO: 75100 - DNA, 25 bp, Artificial
  probe
  misc_feature (1)..(25): SEQ ID NO: 6686; WAN024B8F_at; Start 9; Stop 33
tctgcttgcttggggggcacttcaa

SEQ ID NO: 75101 - DNA, 25 bp, Artificial
  probe
  misc_feature (1)..(25): SEQ ID NO: 6686; WAN024B8F_at; Start 8; Stop 32
atctgcttgcttggggggcacttca

SEQ ID NO: 75102 - DNA, 25 bp, Artificial
  probe
  misc_feature (1)..(25): SEQ ID NO: 6686; WAN024B8F_at; Start 99; Stop 123
tctagctgttcgcagtttaccaagc

SEQ ID NO: 75103 - DNA, 25 bp, Artificial
  probe
  misc_feature (1)..(25): SEQ ID NO: 6686; WAN024B8F_at; Start 86; Stop 110
ttgacgataagcttctagctgttcg

SEQ ID NO: 75104 - DNA, 25 bp, Artificial
  probe
  misc_feature (1)..(25): SEQ ID NO: 6686; WAN024B8F_at; Start 94; Stop 118
aagcttctagctgttcgcagtttac

SEQ ID NO: 75105 - DNA, 25 bp, Artificial
  probe
  misc_feature (1)..(25): SEQ ID NO: 6686; WAN024B8F_at; Start 10; Stop 34
ctgcttgcttggggggcacttcaaa

SEQ ID NO: 75106 - DNA, 25 bp, Artificial
  probe
  misc_feature (1)..(25): SEQ ID NO: 6686; WAN024B8F_at; Start 85; Stop 109
gttgacgataagcttctagctgttc

SEQ ID NO: 75107 - DNA, 25 bp, Artificial
  probe
  misc_feature (1)..(25): SEQ ID NO: 6686; WAN024B8F_at; Start 90; Stop 114
cgataagcttctagctgttcgcagt

SEQ ID NO: 75108 - DNA, 25 bp, Artificial
  probe
  misc_feature (1)..(25): SEQ ID NO: 6686; WAN024B8F_at; Start 7; Stop 31
tatctgcttgcttggggggcacttc

SEQ ID NO: 75109 - DNA, 25 bp, Artificial
  probe
  misc_feature (1)..(25): SEQ ID NO: 6686; WAN024B8F_at; Start 91; Stop 115
gataagcttctagctgttcgcagtt

SEQ ID NO: 75110 - DNA, 25 bp, Artificial
  probe
  misc_feature (1)..(25): SEQ ID NO: 6686; WAN024B8F_at; Start 83; Stop 107
cagttgacgataagcttctagctgt

SEQ ID NO: 75111 - DNA, 25 bp, Artificial
  probe
  misc_feature (1)..(25): SEQ ID NO: 6686; WAN024B8F_at; Start 6; Stop 30
ttatctgcttgcttggggggcactt

SEQ ID NO: 75112 - DNA, 25 bp, Artificial
  probe
  misc_feature (1)..(25): SEQ ID NO: 6686; WAN024B8F_at; Start 4; Stop 28
atttatctgcttgcttggggggcac

SEQ ID NO: 75113 - DNA, 25 bp, Artificial
  probe
  misc_feature (1)..(25): SEQ ID NO: 6686; WAN024B8F_at; Start 98; Stop 122
ttctagctgttcgcagtttaccaag

SEQ ID NO: 75114 - DNA, 25 bp, Artificial
  probe
  misc_feature (1)..(25): SEQ ID NO: 6686; WAN024B8F_at; Start 100; Stop 124
ctagctgttcgcagtttaccaagct

SEQ ID NO: 75115 - DNA, 25 bp, Artificial
  probe
  misc_feature (1)..(25): SEQ ID NO: 6686; WAN024B8F_at; Start 92; Stop 116
ataagcttctagctgttcgcagttt

SEQ ID NO: 75116 - DNA, 25 bp, Artificial
  probe
  misc_feature (1)..(25): SEQ ID NO: 6686; WAN024B8F_at; Start 5; Stop 29
tttatctgcttgcttggggggcact

SEQ ID NO: 75117 - DNA, 25 bp, Artificial
  probe
  misc_feature (1)..(25): SEQ ID NO: 6686; WAN024B8F_at; Start 101; Stop 125
tagctgttcgcagtttaccaagctt

SEQ ID NO: 75118 - DNA, 25 bp, Artificial
  probe
  misc_feature (1)..(25): SEQ ID NO: 6686; WAN024B8F_at; Start 96; Stop 120
gcttctagctgttcgcagtttacca

SEQ ID NO: 75119 - DNA, 25 bp, Artificial
  probe
  misc_feature (1)..(25): SEQ ID NO: 6686; WAN024B8F_at; Start 95; Stop 119
agcttctagctgttcgcagtttacc

SEQ ID NO: 75120 - DNA, 25 bp, Artificial
  probe
  misc_feature (1)..(25): SEQ ID NO: 6686; WAN024B8F_at; Start 88; Stop 112
gacgataagcttctagctgttcgca

SEQ ID NO: 75121 - DNA, 25 bp, Artificial
  probe
  misc_feature (1)..(25): SEQ ID NO: 6686; WAN024B8F_at; Start 97; Stop 121
cttctagctgttcgcagtttaccaa

SEQ ID NO: 75122 - DNA, 25 bp, Artificial
  probe
  misc_feature (1)..(25): SEQ ID NO: 6686; WAN024B8F_at; Start 89; Stop 113
acgataagcttctagctgttcgcag

SEQ ID NO: 75123 - DNA, 25 bp, Artificial
  probe
  misc_feature (1)..(25): SEQ ID NO: 6686; WAN024B8F_at; Start 84; Stop 108
agttgacgataagcttctagctgtt

SEQ ID NO: 75124 - DNA, 25 bp, Artificial
  probe
  misc_feature (1)..(25): SEQ ID NO: 6686; WAN024B8F_at; Start 93; Stop 117
taagcttctagctgttcgcagttta

SEQ ID NO: 75125 - DNA, 25 bp, Artificial
  probe
  misc_feature (1)..(25): SEQ ID NO: 7598; WAN024B8H_s_at; Start 135; Stop 159
ccttggactgctatcgcataggcag

SEQ ID NO: 75126 - DNA, 25 bp, Artificial
  probe
  misc_feature (1)..(25): SEQ ID NO: 7598; WAN024B8H_s_at; Start 133; Stop 157
aaccttggactgctatcgcataggc

SEQ ID NO: 75127 - DNA, 25 bp, Artificial
  probe
  misc_feature (1)..(25): SEQ ID NO: 7598; WAN024B8H_s_at; Start 122; Stop 146
ccttgctcctaaaccttggactgct

SEQ ID NO: 75128 - DNA, 25 bp, Artificial
  probe
  misc_feature (1)..(25): SEQ ID NO: 7598; WAN024B8H_s_at; Start 121; Stop 145
gccttgctcctaaaccttggactgc

SEQ ID NO: 75129 - DNA, 25 bp, Artificial
  probe
  misc_feature (1)..(25): SEQ ID NO: 7598; WAN024B8H_s_at; Start 136; Stop 160
cttggactgctatcgcataggcaga

SEQ ID NO: 75130 - DNA, 25 bp, Artificial
  probe
  misc_feature (1)..(25): SEQ ID NO: 7598; WAN024B8H_s_at; Start 132; Stop 156
aaaccttggactgctatcgcatagg

SEQ ID NO: 75131 - DNA, 25 bp, Artificial
  probe
  misc_feature (1)..(25): SEQ ID NO: 7598; WAN024B8H_s_at; Start 123; Stop 147
cttgctcctaaaccttggactgcta

SEQ ID NO: 75132 - DNA, 25 bp, Artificial
  probe
  misc_feature (1)..(25): SEQ ID NO: 7598; WAN024B8H_s_at; Start 116; Stop 140
gcgtcgccttgctcctaaaccttgg

SEQ ID NO: 75133 - DNA, 25 bp, Artificial
  probe
  misc_feature (1)..(25): SEQ ID NO: 7598; WAN024B8H_s_at; Start 131; Stop 155
taaaccttggactgctatcgcatag

SEQ ID NO: 75134 - DNA, 25 bp, Artificial
  probe
  misc_feature (1)..(25): SEQ ID NO: 7598; WAN024B8H_s_at; Start 111; Stop 135
gcttagcgtcgccttgctcctaaac

SEQ ID NO: 75135 - DNA, 25 bp, Artificial
  probe
  misc_feature (1)..(25): SEQ ID NO: 7598; WAN024B8H_s_at; Start 84; Stop 108
gcagacgagcggttcgaagtttacc

SEQ ID NO: 75136 - DNA, 25 bp, Artificial
  probe
  misc_feature (1)..(25): SEQ ID NO: 7598; WAN024B8H_s_at; Start 74; Stop 98
ttgacgataagcagacgagcggttc

SEQ ID NO: 75137 - DNA, 25 bp, Artificial
  probe
  misc_feature (1)..(25): SEQ ID NO: 7598; WAN024B8H_s_at; Start 75; Stop 99
tgacgataagcagacgagcggttcg

SEQ ID NO: 75138 - DNA, 25 bp, Artificial
  probe
  misc_feature (1)..(25): SEQ ID NO: 7598; WAN024B8H_s_at; Start 130; Stop 154
ctaaaccttggactgctatcgcata

SEQ ID NO: 75139 - DNA, 25 bp, Artificial
  probe
  misc_feature (1)..(25): SEQ ID NO: 7598; WAN024B8H_s_at; Start 79; Stop 103
gataagcagacgagcggttcgaagt

SEQ ID NO: 75140 - DNA, 25 bp, Artificial
  probe
  misc_feature (1)..(25): SEQ ID NO: 7598; WAN024B8H_s_at; Start 118; Stop 142
gtcgccttgctcctaaaccttggac

SEQ ID NO: 75141 - DNA, 25 bp, Artificial
  probe
  misc_feature (1)..(25): SEQ ID NO: 7598; WAN024B8H_s_at; Start 126; Stop 150
gctcctaaaccttggactgctatcg

SEQ ID NO: 75142 - DNA, 25 bp, Artificial
  probe
  misc_feature (1)..(25): SEQ ID NO: 7598; WAN024B8H_s_at; Start 80; Stop 104
ataagcagacgagcggttcgaagtt

SEQ ID NO: 75143 - DNA, 25 bp, Artificial
  probe
  misc_feature (1)..(25): SEQ ID NO: 7598; WAN024B8H_s_at; Start 71; Stop 95
cagttgacgataagcagacgagcgg

SEQ ID NO: 75144 - DNA, 25 bp, Artificial
  probe
  misc_feature (1)..(25): SEQ ID NO: 7598; WAN024B8H_s_at; Start 134; Stop 158
accttggactgctatcgcataggca

SEQ ID NO: 75145 - DNA, 25 bp, Artificial
  probe
  misc_feature (1)..(25): SEQ ID NO: 7598; WAN024B8H_s_at; Start 129; Stop 153
cctaaaccttggactgctatcgcat

SEQ ID NO: 75146 - DNA, 25 bp, Artificial
  probe
  misc_feature (1)..(25): SEQ ID NO: 7598; WAN024B8H_s_at; Start 83; Stop 107
agcagacgagcggttcgaagtttac

SEQ ID NO: 75147 - DNA, 25 bp, Artificial
  probe
  misc_feature (1)..(25): SEQ ID NO: 7598; WAN024B8H_s_at; Start 78; Stop 102
cgataagcagacgagcggttcgaag

SEQ ID NO: 75148 - DNA, 25 bp, Artificial
  probe
  misc_feature (1)..(25): SEQ ID NO: 7598; WAN024B8H_s_at; Start 138; Stop 162
tggactgctatcgcataggcagaac

SEQ ID NO: 75149 - DNA, 25 bp, Artificial
  probe
  misc_feature (1)..(25): SEQ ID NO: 7598; WAN024B8H_s_at; Start 85; Stop 109
cagacgagcggttcgaagtttacca

SEQ ID NO: 75150 - DNA, 25 bp, Artificial
  probe
  misc_feature (1)..(25): SEQ ID NO: 7598; WAN024B8H_s_at; Start 128; Stop 152
tcctaaaccttggactgctatcgca

SEQ ID NO: 75151 - DNA, 25 bp, Artificial
  probe
  misc_feature (1)..(25): SEQ ID NO: 7598; WAN024B8H_s_at; Start 119; Stop 143
tcgccttgctcctaaaccttggact

SEQ ID NO: 75152 - DNA, 25 bp, Artificial
  probe
  misc_feature (1)..(25): SEQ ID NO: 7598; WAN024B8H_s_at; Start 137; Stop 161
ttggactgctatcgcataggcagaa

SEQ ID NO: 75153 - DNA, 25 bp, Artificial
  probe
  misc_feature (1)..(25): SEQ ID NO: 7598; WAN024B8H_s_at; Start 77; Stop 101
acgataagcagacgagcggttcgaa

SEQ ID NO: 75154 - DNA, 25 bp, Artificial
  probe
  misc_feature (1)..(25): SEQ ID NO: 7598; WAN024B8H_s_at; Start 76; Stop 100
gacgataagcagacgagcggttcga

SEQ ID NO: 75155 - DNA, 25 bp, Artificial
  probe
  misc_feature (1)..(25): SEQ ID NO: 7598; WAN024B8H_s_at; Start 72; Stop 96
agttgacgataagcagacgagcggt

SEQ ID NO: 75156 - DNA, 25 bp, Artificial
  probe
  misc_feature (1)..(25): SEQ ID NO: 7598; WAN024B8H_s_at; Start 113; Stop 137
ttagcgtcgccttgctcctaaacct

SEQ ID NO: 75157 - DNA, 25 bp, Artificial
  probe
  misc_feature (1)..(25): SEQ ID NO: 7598; WAN024B8H_s_at; Start 120; Stop 144
cgccttgctcctaaaccttggactg

SEQ ID NO: 75158 - DNA, 25 bp, Artificial
  probe
  misc_feature (1)..(25): SEQ ID NO: 7598; WAN024B8H_s_at; Start 117; Stop 141
cgtcgccttgctcctaaaccttgga

SEQ ID NO: 75159 - DNA, 25 bp, Artificial
  probe
  misc_feature (1)..(25): SEQ ID NO: 7647; WAN024B8I_x_at; Start 23; Stop 47
aagcttatcgtcaactggaagaagc

SEQ ID NO: 75160 - DNA, 25 bp, Artificial
  probe
  misc_feature (1)..(25): SEQ ID NO: 7647; WAN024B8I_x_at; Start 20; Stop 44
tagaagcttatcgtcaactggaaga

SEQ ID NO: 75161 - DNA, 25 bp, Artificial
  probe
  misc_feature (1)..(25): SEQ ID NO: 7647; WAN024B8I_x_at; Start 33; Stop 57
tcaactggaagaagctgaacttgtt

SEQ ID NO: 75162 - DNA, 25 bp, Artificial
  probe
  misc_feature (1)..(25): SEQ ID NO: 7647; WAN024B8I_x_at; Start 26; Stop 50
cttatcgtcaactggaagaagctga

SEQ ID NO: 75163 - DNA, 25 bp, Artificial
  probe
  misc_feature (1)..(25): SEQ ID NO: 7647; WAN024B8I_x_at; Start 54; Stop 78
tgttggatgttgggcactaactaat

SEQ ID NO: 75164 - DNA, 25 bp, Artificial
  probe
  misc_feature (1)..(25): SEQ ID NO: 7647; WAN024B8I_x_at; Start 22; Stop 46
gaagcttatcgtcaactggaagaag

SEQ ID NO: 75165 - DNA, 25 bp, Artificial
  probe
  misc_feature (1)..(25): SEQ ID NO: 7647; WAN024B8I_x_at; Start 14; Stop 38
aaccgctagaagcttatcgtcaact

SEQ ID NO: 75166 - DNA, 25 bp, Artificial
  probe
  misc_feature (1)..(25): SEQ ID NO: 7647; WAN024B8I_x_at; Start 6; Stop 30
aaactgcgaaccgctagaagcttat

SEQ ID NO: 75167 - DNA, 25 bp, Artificial
  probe
  misc_feature (1)..(25): SEQ ID NO: 7647; WAN024B8I_x_at; Start 30; Stop 54
tcgtcaactggaagaagctgaactt

SEQ ID NO: 75168 - DNA, 25 bp, Artificial
  probe
  misc_feature (1)..(25): SEQ ID NO: 7647; WAN024B8I_x_at; Start 16; Stop 40
ccgctagaagcttatcgtcaactgg

SEQ ID NO: 75169 - DNA, 25 bp, Artificial
  probe
  misc_feature (1)..(25): SEQ ID NO: 7647; WAN024B8I_x_at; Start 32; Stop 56
gtcaactggaagaagctgaacttgt

SEQ ID NO: 75170 - DNA, 25 bp, Artificial
  probe
  misc_feature (1)..(25): SEQ ID NO: 7647; WAN024B8I_x_at; Start 1; Stop 25
ttggtaaactgcgaaccgctagaag

SEQ ID NO: 75171 - DNA, 25 bp, Artificial
  probe
  misc_feature (1)..(25): SEQ ID NO: 7647; WAN024B8I_x_at; Start 5; Stop 29
taaactgcgaaccgctagaagctta

SEQ ID NO: 75172 - DNA, 25 bp, Artificial
  probe
  misc_feature (1)..(25): SEQ ID NO: 7647; WAN024B8I_x_at; Start 35; Stop 59
aactggaagaagctgaacttgttgg

SEQ ID NO: 75173 - DNA, 25 bp, Artificial
  probe
  misc_feature (1)..(25): SEQ ID NO: 7647; WAN024B8I_x_at; Start 18; Stop 42
gctagaagcttatcgtcaactggaa

SEQ ID NO: 75174 - DNA, 25 bp, Artificial
  probe
  misc_feature (1)..(25): SEQ ID NO: 7647; WAN024B8I_x_at; Start 10; Stop 34
tgcgaaccgctagaagcttatcgtc

SEQ ID NO: 75175 - DNA, 25 bp, Artificial
  probe
  misc_feature (1)..(25): SEQ ID NO: 7647; WAN024B8I_x_at; Start 11; Stop 35
gcgaaccgctagaagcttatcgtca

SEQ ID NO: 75176 - DNA, 25 bp, Artificial
  probe
  misc_feature (1)..(25): SEQ ID NO: 7647; WAN024B8I_x_at; Start 25; Stop 49
gcttatcgtcaactggaagaagctg

SEQ ID NO: 75177 - DNA, 25 bp, Artificial
  probe
  misc_feature (1)..(25): SEQ ID NO: 7647; WAN024B8I_x_at; Start 3; Stop 27
ggtaaactgcgaaccgctagaagct

SEQ ID NO: 75178 - DNA, 25 bp, Artificial
  probe
  misc_feature (1)..(25): SEQ ID NO: 7647; WAN024B8I_x_at; Start 24; Stop 48
agcttatcgtcaactggaagaagct

SEQ ID NO: 75179 - DNA, 25 bp, Artificial
  probe
  misc_feature (1)..(25): SEQ ID NO: 7647; WAN024B8I_x_at; Start 36; Stop 60
actggaagaagctgaacttgttgga

SEQ ID NO: 75180 - DNA, 25 bp, Artificial
  probe
  misc_feature (1)..(25): SEQ ID NO: 7647; WAN024B8I_x_at; Start 8; Stop 32
actgcgaaccgctagaagcttatcg

SEQ ID NO: 75181 - DNA, 25 bp, Artificial
  probe
  misc_feature (1)..(25): SEQ ID NO: 7647; WAN024B8I_x_at; Start 39; Stop 63
ggaagaagctgaacttgttggatgt

SEQ ID NO: 75182 - DNA, 25 bp, Artificial
  probe
  misc_feature (1)..(25): SEQ ID NO: 7647; WAN024B8I_x_at; Start 19; Stop 43
ctagaagcttatcgtcaactggaag

SEQ ID NO: 75183 - DNA, 25 bp, Artificial
  probe
  misc_feature (1)..(25): SEQ ID NO: 7647; WAN024B8I_x_at; Start 7; Stop 31
aactgcgaaccgctagaagcttatc

SEQ ID NO: 75184 - DNA, 25 bp, Artificial
  probe
  misc_feature (1)..(25): SEQ ID NO: 7647; WAN024B8I_x_at; Start 4; Stop 28
gtaaactgcgaaccgctagaagctt

SEQ ID NO: 75185 - DNA, 25 bp, Artificial
  probe
  misc_feature (1)..(25): SEQ ID NO: 7647; WAN024B8I_x_at; Start 9; Stop 33
ctgcgaaccgctagaagcttatcgt

SEQ ID NO: 75186 - DNA, 25 bp, Artificial
  probe
  misc_feature (1)..(25): SEQ ID NO: 7647; WAN024B8I_x_at; Start 15; Stop 39
accgctagaagcttatcgtcaactg

SEQ ID NO: 75187 - DNA, 25 bp, Artificial
  probe
  misc_feature (1)..(25): SEQ ID NO: 7647; WAN024B8I_x_at; Start 17; Stop 41
cgctagaagcttatcgtcaactgga

SEQ ID NO: 75188 - DNA, 25 bp, Artificial
  probe
  misc_feature (1)..(25): SEQ ID NO: 7647; WAN024B8I_x_at; Start 21; Stop 45
agaagcttatcgtcaactggaagaa

SEQ ID NO: 75189 - DNA, 25 bp, Artificial
  probe
  misc_feature (1)..(25): SEQ ID NO: 7647; WAN024B8I_x_at; Start 28; Stop 52
tatcgtcaactggaagaagctgaac

SEQ ID NO: 75190 - DNA, 25 bp, Artificial
  probe
  misc_feature (1)..(25): SEQ ID NO: 7647; WAN024B8I_x_at; Start 2; Stop 26
tggtaaactgcgaaccgctagaagc

SEQ ID NO: 75191 - DNA, 25 bp, Artificial
  probe
  misc_feature (1)..(25): SEQ ID NO: 7647; WAN024B8I_x_at; Start 31; Stop 55
cgtcaactggaagaagctgaacttg

SEQ ID NO: 75192 - DNA, 25 bp, Artificial
  probe
  misc_feature (1)..(25): SEQ ID NO: 7647; WAN024B8I_x_at; Start 37; Stop 61
ctggaagaagctgaacttgttggat

SEQ ID NO: 75193 - DNA, 25 bp, Artificial
  probe
  misc_feature (1)..(25): SEQ ID NO: 5587; WAN024B8K_at; Start 319; Stop 343
aagtatagcctcaagtataaagaaa

SEQ ID NO: 75194 - DNA, 25 bp, Artificial
  probe
  misc_feature (1)..(25): SEQ ID NO: 5587; WAN024B8K_at; Start 318; Stop 342
caagtatagcctcaagtataaagaa

SEQ ID NO: 75195 - DNA, 25 bp, Artificial
  probe
  misc_feature (1)..(25): SEQ ID NO: 5587; WAN024B8K_at; Start 317; Stop 341
tcaagtatagcctcaagtataaaga

SEQ ID NO: 75196 - DNA, 25 bp, Artificial
  probe
  misc_feature (1)..(25): SEQ ID NO: 5587; WAN024B8K_at; Start 316; Stop 340
ctcaagtatagcctcaagtataaag

SEQ ID NO: 75197 - DNA, 25 bp, Artificial
  probe
  misc_feature (1)..(25): SEQ ID NO: 5587; WAN024B8K_at; Start 310; Stop 334
tacagcctcaagtatagcctcaagt

SEQ ID NO: 75198 - DNA, 25 bp, Artificial
  probe
  misc_feature (1)..(25): SEQ ID NO: 5587; WAN024B8K_at; Start 313; Stop 337
agcctcaagtatagcctcaagtata

SEQ ID NO: 75199 - DNA, 25 bp, Artificial
  probe
  misc_feature (1)..(25): SEQ ID NO: 5587; WAN024B8K_at; Start 314; Stop 338
gcctcaagtatagcctcaagtataa

SEQ ID NO: 75200 - DNA, 25 bp, Artificial
  probe
  misc_feature (1)..(25): SEQ ID NO: 5587; WAN024B8K_at; Start 320; Stop 344
agtatagcctcaagtataaagaaac

SEQ ID NO: 75201 - DNA, 25 bp, Artificial
  probe
  misc_feature (1)..(25): SEQ ID NO: 5587; WAN024B8K_at; Start 312; Stop 336
cagcctcaagtatagcctcaagtat

SEQ ID NO: 75202 - DNA, 25 bp, Artificial
  probe
  misc_feature (1)..(25): SEQ ID NO: 5587; WAN024B8K_at; Start 311; Stop 335
acagcctcaagtatagcctcaagta

SEQ ID NO: 75203 - DNA, 25 bp, Artificial
  probe
  misc_feature (1)..(25): SEQ ID NO: 5587; WAN024B8K_at; Start 315; Stop 339
cctcaagtatagcctcaagtataaa

SEQ ID NO: 75204 - DNA, 25 bp, Artificial
  probe
  misc_feature (1)..(25): SEQ ID NO: 5588; WAN024B8L_s_at; Start 393; Stop 417
cattaaatcattggttatgggacgg

SEQ ID NO: 75205 - DNA, 25 bp, Artificial
  probe
  misc_feature (1)..(25): SEQ ID NO: 5588; WAN024B8L_s_at; Start 354; Stop 378
cggacatctggtcctttccaataat

SEQ ID NO: 75206 - DNA, 25 bp, Artificial
  probe
  misc_feature (1)..(25): SEQ ID NO: 5588; WAN024B8L_s_at; Start 352; Stop 376
gacggacatctggtcctttccaata

SEQ ID NO: 75207 - DNA, 25 bp, Artificial
  probe
  misc_feature (1)..(25): SEQ ID NO: 5588; WAN024B8L_s_at; Start 358; Stop 382
catctggtcctttccaataatctag

SEQ ID NO: 75208 - DNA, 25 bp, Artificial
  probe
  misc_feature (1)..(25): SEQ ID NO: 5588; WAN024B8L_s_at; Start 363; Stop 387
ggtcctttccaataatctagctgaa

SEQ ID NO: 75209 - DNA, 25 bp, Artificial
  probe
  misc_feature (1)..(25): SEQ ID NO: 5588; WAN024B8L_s_at; Start 395; Stop 419
ttaaatcattggttatgggacggag

SEQ ID NO: 75210 - DNA, 25 bp, Artificial
  probe
  misc_feature (1)..(25): SEQ ID NO: 5588; WAN024B8L_s_at; Start 353; Stop 377
acggacatctggtcctttccaataa

SEQ ID NO: 75211 - DNA, 25 bp, Artificial
  probe
  misc_feature (1)..(25): SEQ ID NO: 5588; WAN024B8L_s_at; Start 292; Stop 316
ctaggaagggcaattgaatacagcc

SEQ ID NO: 75212 - DNA, 25 bp, Artificial
  probe
  misc_feature (1)..(25): SEQ ID NO: 5588; WAN024B8L_s_at; Start 297; Stop 321
aagggcaattgaatacagcctcaag

SEQ ID NO: 75213 - DNA, 25 bp, Artificial
  probe
  misc_feature (1)..(25): SEQ ID NO: 5588; WAN024B8L_s_at; Start 291; Stop 315
actaggaagggcaattgaatacagc

SEQ ID NO: 75214 - DNA, 25 bp, Artificial
  probe
  misc_feature (1)..(25): SEQ ID NO: 5588; WAN024B8L_s_at; Start 294; Stop 318
aggaagggcaattgaatacagcctc

SEQ ID NO: 75215 - DNA, 25 bp, Artificial
  probe
  misc_feature (1)..(25): SEQ ID NO: 5588; WAN024B8L_s_at; Start 349; Stop 373
aaagacggacatctggtcctttcca

SEQ ID NO: 75216 - DNA, 25 bp, Artificial
  probe
  misc_feature (1)..(25): SEQ ID NO: 5588; WAN024B8L_s_at; Start 397; Stop 421
aaatcattggttatgggacggagta

SEQ ID NO: 75217 - DNA, 25 bp, Artificial
  probe
  misc_feature (1)..(25): SEQ ID NO: 5588; WAN024B8L_s_at; Start 360; Stop 384
tctggtcctttccaataatctagct

SEQ ID NO: 75218 - DNA, 25 bp, Artificial
  probe
  misc_feature (1)..(25): SEQ ID NO: 5588; WAN024B8L_s_at; Start 286; Stop 310
tcaaaactaggaagggcaattgaat

SEQ ID NO: 75219 - DNA, 25 bp, Artificial
  probe
  misc_feature (1)..(25): SEQ ID NO: 5588; WAN024B8L_s_at; Start 300; Stop 324
ggcaattgaatacagcctcaagtat

SEQ ID NO: 75220 - DNA, 25 bp, Artificial
  probe
  misc_feature (1)..(25): SEQ ID NO: 5588; WAN024B8L_s_at; Start 356; Stop 380
gacatctggtcctttccaataatct

SEQ ID NO: 75221 - DNA, 25 bp, Artificial
  probe
  misc_feature (1)..(25): SEQ ID NO: 5588; WAN024B8L_s_at; Start 295; Stop 319
ggaagggcaattgaatacagcctca

SEQ ID NO: 75222 - DNA, 25 bp, Artificial
  probe
  misc_feature (1)..(25): SEQ ID NO: 5588; WAN024B8L_s_at; Start 296; Stop 320
gaagggcaattgaatacagcctcaa

SEQ ID NO: 75223 - DNA, 25 bp, Artificial
  probe
  misc_feature (1)..(25): SEQ ID NO: 5588; WAN024B8L_s_at; Start 355; Stop 379
ggacatctggtcctttccaataatc

SEQ ID NO: 75224 - DNA, 25 bp, Artificial
  probe
  misc_feature (1)..(25): SEQ ID NO: 5588; WAN024B8L_s_at; Start 351; Stop 375
agacggacatctggtcctttccaat

SEQ ID NO: 75225 - DNA, 25 bp, Artificial
  probe
  misc_feature (1)..(25): SEQ ID NO: 5588; WAN024B8L_s_at; Start 398; Stop 422
aatcattggttatgggacggagtaa

SEQ ID NO: 75226 - DNA, 25 bp, Artificial
  probe
  misc_feature (1)..(25): SEQ ID NO: 5588; WAN024B8L_s_at; Start 359; Stop 383
atctggtcctttccaataatctagc

SEQ ID NO: 75227 - DNA, 25 bp, Artificial
  probe
  misc_feature (1)..(25): SEQ ID NO: 5588; WAN024B8L_s_at; Start 399; Stop 423
atcattggttatgggacggagtaaa

SEQ ID NO: 75228 - DNA, 25 bp, Artificial
  probe
  misc_feature (1)..(25): SEQ ID NO: 5588; WAN024B8L_s_at; Start 392; Stop 416
ccattaaatcattggttatgggacg

SEQ ID NO: 75229 - DNA, 25 bp, Artificial
  probe
  misc_feature (1)..(25): SEQ ID NO: 5588; WAN024B8L_s_at; Start 293; Stop 317
taggaagggcaattgaatacagcct

SEQ ID NO: 75230 - DNA, 25 bp, Artificial
  probe
  misc_feature (1)..(25): SEQ ID NO: 5588; WAN024B8L_s_at; Start 287; Stop 311
caaaactaggaagggcaattgaata

SEQ ID NO: 75231 - DNA, 25 bp, Artificial
  probe
  misc_feature (1)..(25): SEQ ID NO: 5588; WAN024B8L_s_at; Start 299; Stop 323
gggcaattgaatacagcctcaagta

SEQ ID NO: 75232 - DNA, 25 bp, Artificial
  probe
  misc_feature (1)..(25): SEQ ID NO: 5588; WAN024B8L_s_at; Start 362; Stop 386
tggtcctttccaataatctagctga

SEQ ID NO: 75233 - DNA, 25 bp, Artificial
  probe
  misc_feature (1)..(25): SEQ ID NO: 5588; WAN024B8L_s_at; Start 396; Stop 420
taaatcattggttatgggacggagt

SEQ ID NO: 75234 - DNA, 25 bp, Artificial
  probe
  misc_feature (1)..(25): SEQ ID NO: 5588; WAN024B8L_s_at; Start 401; Stop 425
cattggttatgggacggagtaaaag

SEQ ID NO: 75235 - DNA, 25 bp, Artificial
  probe
  misc_feature (1)..(25): SEQ ID NO: 5588; WAN024B8L_s_at; Start 284; Stop 308
gttcaaaactaggaagggcaattga

SEQ ID NO: 75236 - DNA, 25 bp, Artificial
  probe
  misc_feature (1)..(25): SEQ ID NO: 5588; WAN024B8L_s_at; Start 298; Stop 322
agggcaattgaatacagcctcaagt

SEQ ID NO: 75237 - DNA, 25 bp, Artificial
  probe
  misc_feature (1)..(25): SEQ ID NO: 5588; WAN024B8L_s_at; Start 350; Stop 374
aagacggacatctggtcctttccaa

SEQ ID NO: 75238 - DNA, 25 bp, Artificial
  probe
  misc_feature (1)..(25): SEQ ID NO: 2039; WAN024B8M_at; Start 279; Stop 303
caggagtcagatttgccgttacacc

SEQ ID NO: 75239 - DNA, 25 bp, Artificial
  probe
  misc_feature (1)..(25): SEQ ID NO: 2039; WAN024B8M_at; Start 81; Stop 105
tcccaagcccaaaattccaatcgta

SEQ ID NO: 75240 - DNA, 25 bp, Artificial
  probe
  misc_feature (1)..(25): SEQ ID NO: 2039; WAN024B8M_at; Start 26; Stop 50
cgataatattcatatcctgcttggc

SEQ ID NO: 75241 - DNA, 25 bp, Artificial
  probe
  misc_feature (1)..(25): SEQ ID NO: 2039; WAN024B8M_at; Start 112; Stop 136
gacatgctctttcctttcttaacca

SEQ ID NO: 75242 - DNA, 25 bp, Artificial
  probe
  misc_feature (1)..(25): SEQ ID NO: 2039; WAN024B8M_at; Start 7; Stop 31
tctgcgtggtcatcaatagcgataa

SEQ ID NO: 75243 - DNA, 25 bp, Artificial
  probe
  misc_feature (1)..(25): SEQ ID NO: 2039; WAN024B8M_at; Start 51; Stop 75
tagggcagctaggacactgctccca

SEQ ID NO: 75244 - DNA, 25 bp, Artificial
  probe
  misc_feature (1)..(25): SEQ ID NO: 2039; WAN024B8M_at; Start 140; Stop 164
ctaatatctgctttcatatagtgaa

SEQ ID NO: 75245 - DNA, 25 bp, Artificial
  probe
  misc_feature (1)..(25): SEQ ID NO: 2039; WAN024B8M_at; Start 199; Stop 223
gctaacaaacaaggtcaagggacca

SEQ ID NO: 75246 - DNA, 25 bp, Artificial
  probe
  misc_feature (1)..(25): SEQ ID NO: 2039; WAN024B8M_at; Start 32; Stop 56
tattcatatcctgcttggctagggc

SEQ ID NO: 75247 - DNA, 25 bp, Artificial
  probe
  misc_feature (1)..(25): SEQ ID NO: 2039; WAN024B8M_at; Start 204; Stop 228
caaacaaggtcaagggaccaattcg

SEQ ID NO: 75248 - DNA, 25 bp, Artificial
  probe
  misc_feature (1)..(25): SEQ ID NO: 2039; WAN024B8M_at; Start 188; Stop 212
taatctgccaagctaacaaacaagg

SEQ ID NO: 75249 - DNA, 25 bp, Artificial
  probe
  misc_feature (1)..(25): SEQ ID NO: 2039; WAN024B8M_at; Start 250; Stop 274
gataacactgagagccaatttccca

SEQ ID NO: 75250 - DNA, 25 bp, Artificial
  probe
  misc_feature (1)..(25): SEQ ID NO: 2039; WAN024B8M_at; Start 182; Stop 206
ggatggtaatctgccaagctaacaa

SEQ ID NO: 75251 - DNA, 25 bp, Artificial
  probe
  misc_feature (1)..(25): SEQ ID NO: 2039; WAN024B8M_at; Start 223; Stop 247
aattcgtcccataaacataagtggc

SEQ ID NO: 75252 - DNA, 25 bp, Artificial
  probe
  misc_feature (1)..(25): SEQ ID NO: 2039; WAN024B8M_at; Start 288; Stop 312
gatttgccgttacaccaactgtact

SEQ ID NO: 75253 - DNA, 25 bp, Artificial
  probe
  misc_feature (1)..(25): SEQ ID NO: 2039; WAN024B8M_at; Start 258; Stop 282
tgagagccaatttcccaaggtcagg

SEQ ID NO: 75254 - DNA, 25 bp, Artificial
  probe
  misc_feature (1)..(25): SEQ ID NO: 2039; WAN024B8M_at; Start 38; Stop 62
tatcctgcttggctagggcagctag

SEQ ID NO: 75255 - DNA, 25 bp, Artificial
  probe
  misc_feature (1)..(25): SEQ ID NO: 2039; WAN024B8M_at; Start 271; Stop 295
cccaaggtcaggagtcagatttgcc

SEQ ID NO: 75256 - DNA, 25 bp, Artificial
  probe
  misc_feature (1)..(25): SEQ ID NO: 2039; WAN024B8M_at; Start 147; Stop 171
ctgctttcatatagtgaatcatatc

SEQ ID NO: 75257 - DNA, 25 bp, Artificial
  probe
  misc_feature (1)..(25): SEQ ID NO: 2039; WAN024B8M_at; Start 193; Stop 217
tgccaagctaacaaacaaggtcaag

SEQ ID NO: 75258 - DNA, 25 bp, Artificial
  probe
  misc_feature (1)..(25): SEQ ID NO: 2039; WAN024B8M_at; Start 126; Stop 150
tttcttaaccaatactaatatctgc

SEQ ID NO: 75259 - DNA, 25 bp, Artificial
  probe
  misc_feature (1)..(25): SEQ ID NO: 2039; WAN024B8M_at; Start 11; Stop 35
cgtggtcatcaatagcgataatatt

SEQ ID NO: 75260 - DNA, 25 bp, Artificial
  probe
  misc_feature (1)..(25): SEQ ID NO: 2039; WAN024B8M_at; Start 296; Stop 320
gttacaccaactgtactaagagctg

SEQ ID NO: 75261 - DNA, 25 bp, Artificial
  probe
  misc_feature (1)..(25): SEQ ID NO: 2039; WAN024B8M_at; Start 1; Stop 25
atgcgctctgcgtggtcatcaatag

SEQ ID NO: 75262 - DNA, 25 bp, Artificial
  probe
  misc_feature (1)..(25): SEQ ID NO: 2039; WAN024B8M_at; Start 211; Stop 235
ggtcaagggaccaattcgtcccata

SEQ ID NO: 75263 - DNA, 25 bp, Artificial
  probe
  misc_feature (1)..(25): SEQ ID NO: 2039; WAN024B8M_at; Start 176; Stop 200
ttttctggatggtaatctgccaagc

SEQ ID NO: 75264 - DNA, 25 bp, Artificial
  probe
  misc_feature (1)..(25): SEQ ID NO: 2039; WAN024B8M_at; Start 87; Stop 111
gcccaaaattccaatcgtacgatct

SEQ ID NO: 75265 - DNA, 25 bp, Artificial
  probe
  misc_feature (1)..(25): SEQ ID NO: 2039; WAN024B8M_at; Start 98; Stop 122
caatcgtacgatctgacatgctctt

SEQ ID NO: 75266 - DNA, 25 bp, Artificial
  probe
  misc_feature (1)..(25): SEQ ID NO: 2039; WAN024B8M_at; Start 265; Stop 289
caatttcccaaggtcaggagtcaga

SEQ ID NO: 75267 - DNA, 25 bp, Artificial
  probe
  misc_feature (1)..(25): SEQ ID NO: 2039; WAN024B8M_at; Start 162; Stop 186
gaatcatatctttcttttctggatg

SEQ ID NO: 75268 - DNA, 25 bp, Artificial
  probe
  misc_feature (1)..(25): SEQ ID NO: 2039; WAN024B8M_at; Start 227; Stop 251
cgtcccataaacataagtggcatga

SEQ ID NO: 75269 - DNA, 25 bp, Artificial
  probe
  misc_feature (1)..(25): SEQ ID NO: 2039; WAN024B8M_at; Start 63; Stop 87
gacactgctcccaaaaattcccaag

SEQ ID NO: 75270 - DNA, 25 bp, Artificial
  probe
  misc_feature (1)..(25): SEQ ID NO: 2039; WAN024B8M_at; Start 46; Stop 70
ttggctagggcagctaggacactgc

SEQ ID NO: 75271 - DNA, 25 bp, Artificial
  probe
  misc_feature (1)..(25): SEQ ID NO: 2039; WAN024B8M_at; Start 240; Stop 264
taagtggcatgataacactgagagc

SEQ ID NO: 75272 - DNA, 25 bp, Artificial
  probe
  misc_feature (1)..(25): SEQ ID NO: 3020; WAN024B8N_at; Start 612; Stop 636
tgcaggcttgattattacaggcggc

SEQ ID NO: 75273 - DNA, 25 bp, Artificial
  probe
  misc_feature (1)..(25): SEQ ID NO: 3020; WAN024B8N_at; Start 1240; Stop 1264
aaattggctctcagtgttatcatgc

SEQ ID NO: 75274 - DNA, 25 bp, Artificial
  probe
  misc_feature (1)..(25): SEQ ID NO: 3020; WAN024B8N_at; Start 425; Stop 449
cctttttggttgagagcttgggagc

SEQ ID NO: 75275 - DNA, 25 bp, Artificial
  probe
  misc_feature (1)..(25): SEQ ID NO: 3020; WAN024B8N_at; Start 302; Stop 326
gggttttctatatccagagcaagca

SEQ ID NO: 75276 - DNA, 25 bp, Artificial
  probe
  misc_feature (1)..(25): SEQ ID NO: 3020; WAN024B8N_at; Start 800; Stop 824
gcaatctccctgttgccgataaggt

SEQ ID NO: 75277 - DNA, 25 bp, Artificial
  probe
  misc_feature (1)..(25): SEQ ID NO: 3020; WAN024B8N_at; Start 1224; Stop 1248
gactcctgaccttgggaaattggct

SEQ ID NO: 75278 - DNA, 25 bp, Artificial
  probe
  misc_feature (1)..(25): SEQ ID NO: 3020; WAN024B8N_at; Start 876; Stop 900
gatagattatactcaggctcatcct

SEQ ID NO: 75279 - DNA, 25 bp, Artificial
  probe
  misc_feature (1)..(25): SEQ ID NO: 3020; WAN024B8N_at; Start 857; Stop 881
gaacagctggcttttctacgataga

SEQ ID NO: 75280 - DNA, 25 bp, Artificial
  probe
  misc_feature (1)..(25): SEQ ID NO: 3020; WAN024B8N_at; Start 217; Stop 241
gtagctcacacctataatatctggg

SEQ ID NO: 75281 - DNA, 25 bp, Artificial
  probe
  misc_feature (1)..(25): SEQ ID NO: 3020; WAN024B8N_at; Start 1295; Stop 1319
tgaccttgtttgttagcttggcaga

SEQ ID NO: 75282 - DNA, 25 bp, Artificial
  probe
  misc_feature (1)..(25): SEQ ID NO: 3020; WAN024B8N_at; Start 325; Stop 349
caaaagcttagtcttcgtagccgtg

SEQ ID NO: 75283 - DNA, 25 bp, Artificial
  probe
  misc_feature (1)..(25): SEQ ID NO: 3020; WAN024B8N_at; Start 783; Stop 807
caatgctggaacgattggcaatctc

SEQ ID NO: 75284 - DNA, 25 bp, Artificial
  probe
  misc_feature (1)..(25): SEQ ID NO: 3020; WAN024B8N_at; Start 691; Stop 715
ggacgtctgcactttcatacgaagc

SEQ ID NO: 75285 - DNA, 25 bp, Artificial
  probe
  misc_feature (1)..(25): SEQ ID NO: 3020; WAN024B8N_at; Start 1004; Stop 1028
cacgaagtgagcttctaggcttgcc

SEQ ID NO: 75286 - DNA, 25 bp, Artificial
  probe
  misc_feature (1)..(25): SEQ ID NO: 3020; WAN024B8N_at; Start 38; Stop 62
gcttatctcgtttatcgccagcccg

SEQ ID NO: 75287 - DNA, 25 bp, Artificial
  probe
  misc_feature (1)..(25): SEQ ID NO: 3020; WAN024B8N_at; Start 767; Stop 791
tctttcttgagtggaacaatgctgg

SEQ ID NO: 75288 - DNA, 25 bp, Artificial
  probe
  misc_feature (1)..(25): SEQ ID NO: 3020; WAN024B8N_at; Start 545; Stop 569
gttttgataatttagggagcaccag

SEQ ID NO: 75289 - DNA, 25 bp, Artificial
  probe
  misc_feature (1)..(25): SEQ ID NO: 3020; WAN024B8N_at; Start 1180; Stop 1204
gaaaccatttcagctcttagtacag

SEQ ID NO: 75290 - DNA, 25 bp, Artificial
  probe
  misc_feature (1)..(25): SEQ ID NO: 3020; WAN024B8N_at; Start 840; Stop 864
tcaaacagtgacgatgcgaacagct

SEQ ID NO: 75291 - DNA, 25 bp, Artificial
  probe
  misc_feature (1)..(25): SEQ ID NO: 3020; WAN024B8N_at; Start 266; Stop 290
ttcagatcggtggtctagggctcat

SEQ ID NO: 75292 - DNA, 25 bp, Artificial
  probe
  misc_feature (1)..(25): SEQ ID NO: 3020; WAN024B8N_at; Start 126; Stop 150
tgtccaagttgaaagctcacgagcg

SEQ ID NO: 75293 - DNA, 25 bp, Artificial
  probe
  misc_feature (1)..(25): SEQ ID NO: 3020; WAN024B8N_at; Start 1036; Stop 1060
aatgttgcgagacgaacgatcgcgc

SEQ ID NO: 75294 - DNA, 25 bp, Artificial
  probe
  misc_feature (1)..(25): SEQ ID NO: 3020; WAN024B8N_at; Start 987; Stop 1011
tgtcctcttggtctttgcacgaagt

SEQ ID NO: 75295 - DNA, 25 bp, Artificial
  probe
  misc_feature (1)..(25): SEQ ID NO: 3020; WAN024B8N_at; Start 339; Stop 363
tcgtagccgtgcaactattcaggat

SEQ ID NO: 75296 - DNA, 25 bp, Artificial
  probe
  misc_feature (1)..(25): SEQ ID NO: 3020; WAN024B8N_at; Start 1128; Stop 1152
tctgctagggataacagccaaaggc

SEQ ID NO: 75297 - DNA, 25 bp, Artificial
  probe
  misc_feature (1)..(25): SEQ ID NO: 3020; WAN024B8N_at; Start 1260; Stop 1284
catgccacttatgtttatgggacga

SEQ ID NO: 75298 - DNA, 25 bp, Artificial
  probe
  misc_feature (1)..(25): SEQ ID NO: 3020; WAN024B8N_at; Start 1310; Stop 1334
gcttggcagattaccatccagaaaa

SEQ ID NO: 75299 - DNA, 25 bp, Artificial
  probe
  misc_feature (1)..(25): SEQ ID NO: 3020; WAN024B8N_at; Start 566; Stop 590
ccagtttatttgcttttcagaccga

SEQ ID NO: 75300 - DNA, 25 bp, Artificial
  probe
  misc_feature (1)..(25): SEQ ID NO: 3020; WAN024B8N_at; Start 1021; Stop 1045
ggcttgcctcatgccaatgttgcga

SEQ ID NO: 75301 - DNA, 25 bp, Artificial
  probe
  misc_feature (1)..(25): SEQ ID NO: 3020; WAN024B8N_at; Start 1207; Stop 1231
ggtgtaacggcaaatctgactcctg

SEQ ID NO: 75302 - DNA, 25 bp, Artificial
  probe
  misc_feature (1)..(25): SEQ ID NO: 3020; WAN024B8N_at; Start 627; Stop 651
tacaggcggccttggttttatggtc

SEQ ID NO: 75303 - DNA, 25 bp, Artificial
  probe
  misc_feature (1)..(25): SEQ ID NO: 3020; WAN024B8N_at; Start 527; Stop 551
cagccttctgtaatgccggttttga

SEQ ID NO: 75304 - DNA, 25 bp, Artificial
  probe
  misc_feature (1)..(25): SEQ ID NO: 3020; WAN024B8N_at; Start 1275; Stop 1299
tatgggacgaattggtcccttgacc

SEQ ID NO: 75305 - DNA, 25 bp, Artificial
  probe
  misc_feature (1)..(25): SEQ ID NO: 3020; WAN024B8N_at; Start 1053; Stop 1077
gatcgcgccgcgaacggttcaaaaa

SEQ ID NO: 75306 - DNA, 25 bp, Artificial
  probe
  misc_feature (1)..(25): SEQ ID NO: 2865; WAN024B8O_at; Start 117; Stop 141
caatcagtttgagccagttttggcg

SEQ ID NO: 75307 - DNA, 25 bp, Artificial
  probe
  misc_feature (1)..(25): SEQ ID NO: 2865; WAN024B8O_at; Start 231; Stop 255
aaatctggagtcgagtgtgcttgcg

SEQ ID NO: 75308 - DNA, 25 bp, Artificial
  probe
  misc_feature (1)..(25): SEQ ID NO: 2865; WAN024B8O_at; Start 445; Stop 469
tctatcgtggagatgaaaattcctc

SEQ ID NO: 75309 - DNA, 25 bp, Artificial
  probe
  misc_feature (1)..(25): SEQ ID NO: 2865; WAN024B8O_at; Start 472; Stop 496
tcttgggcaggtcaaagtctgagta

SEQ ID NO: 75310 - DNA, 25 bp, Artificial
  probe
  misc_feature (1)..(25): SEQ ID NO: 2865; WAN024B8O_at; Start 35; Stop 59
gaatttttgggagcagtgtcctagc

SEQ ID NO: 75311 - DNA, 25 bp, Artificial
  probe
  misc_feature (1)..(25): SEQ ID NO: 2865; WAN024B8O_at; Start 87; Stop 111
tatcgctattgatgaccacgcagag

SEQ ID NO: 75312 - DNA, 25 bp, Artificial
  probe
  misc_feature (1)..(25): SEQ ID NO: 2865; WAN024B8O_at; Start 248; Stop 272
tgcttgcggttatgcactgtaagag

SEQ ID NO: 75313 - DNA, 25 bp, Artificial
  probe
  misc_feature (1)..(25): SEQ ID NO: 2865; WAN024B8O_at; Start 190; Stop 214
gggattgatacctgcgataccgttg

SEQ ID NO: 75314 - DNA, 25 bp, Artificial
  probe
  misc_feature (1)..(25): SEQ ID NO: 2865; WAN024B8O_at; Start 57; Stop 81
agctgccctagccaagcaggatatg

SEQ ID NO: 75315 - DNA, 25 bp, Artificial
  probe
  misc_feature (1)..(25): SEQ ID NO: 2865; WAN024B8O_at; Start 328; Stop 352
ctagaaaagattggagctgactcgg

SEQ ID NO: 75316 - DNA, 25 bp, Artificial
  probe
  misc_feature (1)..(25): SEQ ID NO: 2865; WAN024B8O_at; Start 557; Stop 581
ccccattggatgttgaatttggacc

SEQ ID NO: 75317 - DNA, 25 bp, Artificial
  probe
  misc_feature (1)..(25): SEQ ID NO: 2865; WAN024B8O_at; Start 279; Stop 303
ggtaccgactgttattgctaaggtc

SEQ ID NO: 75318 - DNA, 25 bp, Artificial
  probe
  misc_feature (1)..(25): SEQ ID NO: 2865; WAN024B8O_at; Start 377; Stop 401
ggcagtctctagcacagaccattct

SEQ ID NO: 75319 - DNA, 25 bp, Artificial
  probe
  misc_feature (1)..(25): SEQ ID NO: 2865; WAN024B8O_at; Start 458; Stop 482
tgaaaattcctcagtcttgggcagg

SEQ ID NO: 75320 - DNA, 25 bp, Artificial
  probe
  misc_feature (1)..(25): SEQ ID NO: 2865; WAN024B8O_at; Start 526; Stop 550
aatattttgggtttccgagagcagg

SEQ ID NO: 75321 - DNA, 25 bp, Artificial
  probe
  misc_feature (1)..(25): SEQ ID NO: 2865; WAN024B8O_at; Start 615; Stop 639
ggcagtcatcaacaaccagtatttg

SEQ ID NO: 75322 - DNA, 25 bp, Artificial
  probe
  misc_feature (1)..(25): SEQ ID NO: 2865; WAN024B8O_at; Start 542; Stop 566
gagagcaggaaaattccccattgga

SEQ ID NO: 75323 - DNA, 25 bp, Artificial
  probe
  misc_feature (1)..(25): SEQ ID NO: 2865; WAN024B8O_at; Start 571; Stop 595
gaatttggaccagatgacctcttga

SEQ ID NO: 75324 - DNA, 25 bp, Artificial
  probe
  misc_feature (1)..(25): SEQ ID NO: 2865; WAN024B8O_at; Start 639; Stop 663
ggataccctagtagcattgaattcg

SEQ ID NO: 75325 - DNA, 25 bp, Artificial
  probe
  misc_feature (1)..(25): SEQ ID NO: 2865; WAN024B8O_at; Start 294; Stop 318
tgctaaggtcaaaagtcagaccgct

SEQ ID NO: 75326 - DNA, 25 bp, Artificial
  probe
  misc_feature (1)..(25): SEQ ID NO: 2865; WAN024B8O_at; Start 341; Stop 365
gagctgactcggttatctcgccaga

SEQ ID NO: 75327 - DNA, 25 bp, Artificial
  probe
  misc_feature (1)..(25): SEQ ID NO: 2865; WAN024B8O_at; Start 353; Stop 377
ttatctcgccagagtatgaaatggg

SEQ ID NO: 75328 - DNA, 25 bp, Artificial
  probe
  misc_feature (1)..(25): SEQ ID NO: 2865; WAN024B8O_at; Start 140; Stop 164
cgcgtggagtgattggtgacatcac

SEQ ID NO: 75329 - DNA, 25 bp, Artificial
  probe
  misc_feature (1)..(25): SEQ ID NO: 2865; WAN024B8O_at; Start 103; Stop 127
cacgcagagcgcatcaatcagtttg

SEQ ID NO: 75330 - DNA, 25 bp, Artificial
  probe
  misc_feature (1)..(25): SEQ ID NO: 2865; WAN024B8O_at; Start 7; Stop 31
gatcgtacgattggaattttgggct

SEQ ID NO: 75331 - DNA, 25 bp, Artificial
  probe
  misc_feature (1)..(25): SEQ ID NO: 2865; WAN024B8O_at; Start 218; Stop 242
tcgcgacaggtgaaaatctggagtc

SEQ ID NO: 75332 - DNA, 25 bp, Artificial
  probe
  misc_feature (1)..(25): SEQ ID NO: 2865; WAN024B8O_at; Start 502; Stop 526
gacctccgtggcaaatacaatctga

SEQ ID NO: 75333 - DNA, 25 bp, Artificial
  probe
  misc_feature (1)..(25): SEQ ID NO: 2865; WAN024B8O_at; Start 598; Stop 622
gcagatacctatattttggcagtca

SEQ ID NO: 75334 - DNA, 25 bp, Artificial
  probe
  misc_feature (1)..(25): SEQ ID NO: 2865; WAN024B8O_at; Start 583; Stop 607
gatgacctcttgaaagcagatacct

SEQ ID NO: 75335 - DNA, 25 bp, Artificial
  probe
  misc_feature (1)..(25): SEQ ID NO: 2865; WAN024B8O_at; Start 422; Stop 446
tctttcagttggataaaaatgtgtc

SEQ ID NO: 75336 - DNA, 25 bp, Artificial
  probe
  misc_feature (1)..(25): SEQ ID NO: 2865; WAN024B8O_at; Start 489; Stop 513
tctgagtaaattagacctccgtggc

SEQ ID NO: 75337 - DNA, 25 bp, Artificial
  probe
  misc_feature (1)..(25): SEQ ID NO: 2865; WAN024B8O_at; Start 205; Stop 229
gataccgttgtagtcgcgacaggtg

SEQ ID NO: 75338 - DNA, 25 bp, Artificial
  probe
  misc_feature (1)..(25): SEQ ID NO: 2865; WAN024B8O_at; Start 309; Stop 333
tcagaccgctaagaaagtgctagaa

SEQ ID NO: 75339 - DNA, 25 bp, Artificial
  probe
  misc_feature (1)..(25): SEQ ID NO: 2865; WAN024B8O_at; Start 169; Stop 193
gaagaattattgagatcagcaggga

SEQ ID NO: 75340 - DNA, 25 bp, Artificial
  probe
  misc_feature (1)..(25): SEQ ID NO: 7006; WAN024B8P_x_at; Start 11; Stop 35
cttcgtcagttctatctacaacctc

SEQ ID NO: 75341 - DNA, 25 bp, Artificial
  probe
  misc_feature (1)..(25): SEQ ID NO: 7006; WAN024B8P_x_at; Start 10; Stop 34
acttcgtcagttctatctacaacct

SEQ ID NO: 75342 - DNA, 25 bp, Artificial
  probe
  misc_feature (1)..(25): SEQ ID NO: 7006; WAN024B8P_x_at; Start 6; Stop 30
actgacttcgtcagttctatctaca

SEQ ID NO: 75343 - DNA, 25 bp, Artificial
  probe
  misc_feature (1)..(25): SEQ ID NO: 7006; WAN024B8P_x_at; Start 9; Stop 33
gacttcgtcagttctatctacaacc

SEQ ID NO: 75344 - DNA, 25 bp, Artificial
  probe
  misc_feature (1)..(25): SEQ ID NO: 7006; WAN024B8P_x_at; Start 17; Stop 41
cagttctatctacaacctcaaaaca

SEQ ID NO: 75345 - DNA, 25 bp, Artificial
  probe
  misc_feature (1)..(25): SEQ ID NO: 7006; WAN024B8P_x_at; Start 13; Stop 37
tcgtcagttctatctacaacctcaa

SEQ ID NO: 75346 - DNA, 25 bp, Artificial
  probe
  misc_feature (1)..(25): SEQ ID NO: 7006; WAN024B8P_x_at; Start 48; Stop 72
tgagcagcctgcagctagcttccta

SEQ ID NO: 75347 - DNA, 25 bp, Artificial
  probe
  misc_feature (1)..(25): SEQ ID NO: 7006; WAN024B8P_x_at; Start 16; Stop 40
tcagttctatctacaacctcaaaac

SEQ ID NO: 75348 - DNA, 25 bp, Artificial
  probe
  misc_feature (1)..(25): SEQ ID NO: 7006; WAN024B8P_x_at; Start 22; Stop 46
ctatctacaacctcaaaacagtgtt

SEQ ID NO: 75349 - DNA, 25 bp, Artificial
  probe
  misc_feature (1)..(25): SEQ ID NO: 7006; WAN024B8P_x_at; Start 47; Stop 71
ttgagcagcctgcagctagcttcct

SEQ ID NO: 75350 - DNA, 25 bp, Artificial
  probe
  misc_feature (1)..(25): SEQ ID NO: 7006; WAN024B8P_x_at; Start 91; Stop 115
attgagtataaggagaattgtaaaa

SEQ ID NO: 75351 - DNA, 25 bp, Artificial
  probe
  misc_feature (1)..(25): SEQ ID NO: 7006; WAN024B8P_x_at; Start 21; Stop 45
tctatctacaacctcaaaacagtgt

SEQ ID NO: 75352 - DNA, 25 bp, Artificial
  probe
  misc_feature (1)..(25): SEQ ID NO: 7006; WAN024B8P_x_at; Start 49; Stop 73
gagcagcctgcagctagcttcctag

SEQ ID NO: 75353 - DNA, 25 bp, Artificial
  probe
  misc_feature (1)..(25): SEQ ID NO: 7006; WAN024B8P_x_at; Start 14; Stop 38
cgtcagttctatctacaacctcaaa

SEQ ID NO: 75354 - DNA, 25 bp, Artificial
  probe
  misc_feature (1)..(25): SEQ ID NO: 7006; WAN024B8P_x_at; Start 8; Stop 32
tgacttcgtcagttctatctacaac

SEQ ID NO: 75355 - DNA, 25 bp, Artificial
  probe
  misc_feature (1)..(25): SEQ ID NO: 7006; WAN024B8P_x_at; Start 20; Stop 44
ttctatctacaacctcaaaacagtg

SEQ ID NO: 75356 - DNA, 25 bp, Artificial
  probe
  misc_feature (1)..(25): SEQ ID NO: 7006; WAN024B8P_x_at; Start 19; Stop 43
gttctatctacaacctcaaaacagt

SEQ ID NO: 75357 - DNA, 25 bp, Artificial
  probe
  misc_feature (1)..(25): SEQ ID NO: 7006; WAN024B8P_x_at; Start 93; Stop 117
tgagtataaggagaattgtaaaaac

SEQ ID NO: 75358 - DNA, 25 bp, Artificial
  probe
  misc_feature (1)..(25): SEQ ID NO: 7006; WAN024B8P_x_at; Start 50; Stop 74
agcagcctgcagctagcttcctagt

SEQ ID NO: 75359 - DNA, 25 bp, Artificial
  probe
  misc_feature (1)..(25): SEQ ID NO: 7006; WAN024B8P_x_at; Start 18; Stop 42
agttctatctacaacctcaaaacag

SEQ ID NO: 75360 - DNA, 25 bp, Artificial
  probe
  misc_feature (1)..(25): SEQ ID NO: 7006; WAN024B8P_x_at; Start 1; Stop 25
atgttactgacttcgtcagttctat

SEQ ID NO: 75361 - DNA, 25 bp, Artificial
  probe
  misc_feature (1)..(25): SEQ ID NO: 7006; WAN024B8P_x_at; Start 12; Stop 36
ttcgtcagttctatctacaacctca

SEQ ID NO: 75362 - DNA, 25 bp, Artificial
  probe
  misc_feature (1)..(25): SEQ ID NO: 7006; WAN024B8P_x_at; Start 4; Stop 28
ttactgacttcgtcagttctatcta

SEQ ID NO: 75363 - DNA, 25 bp, Artificial
  probe
  misc_feature (1)..(25): SEQ ID NO: 7006; WAN024B8P_x_at; Start 5; Stop 29
tactgacttcgtcagttctatctac

SEQ ID NO: 75364 - DNA, 25 bp, Artificial
  probe
  misc_feature (1)..(25): SEQ ID NO: 7006; WAN024B8P_x_at; Start 64; Stop 88
agcttcctagtttgctctttgattt

SEQ ID NO: 75365 - DNA, 25 bp, Artificial
  probe
  misc_feature (1)..(25): SEQ ID NO: 7006; WAN024B8P_x_at; Start 46; Stop 70
tttgagcagcctgcagctagcttcc

SEQ ID NO: 75366 - DNA, 25 bp, Artificial
  probe
  misc_feature (1)..(25): SEQ ID NO: 7006; WAN024B8P_x_at; Start 7; Stop 31
ctgacttcgtcagttctatctacaa

SEQ ID NO: 75367 - DNA, 25 bp, Artificial
  probe
  misc_feature (1)..(25): SEQ ID NO: 7006; WAN024B8P_x_at; Start 89; Stop 113
tcattgagtataaggagaattgtaa

SEQ ID NO: 75368 - DNA, 25 bp, Artificial
  probe
  misc_feature (1)..(25): SEQ ID NO: 7006; WAN024B8P_x_at; Start 92; Stop 116
ttgagtataaggagaattgtaaaaa

SEQ ID NO: 75369 - DNA, 25 bp, Artificial
  probe
  misc_feature (1)..(25): SEQ ID NO: 7006; WAN024B8P_x_at; Start 90; Stop 114
cattgagtataaggagaattgtaaa

SEQ ID NO: 75370 - DNA, 25 bp, Artificial
  probe
  misc_feature (1)..(25): SEQ ID NO: 7006; WAN024B8P_x_at; Start 45; Stop 69
ttttgagcagcctgcagctagcttc

SEQ ID NO: 75371 - DNA, 25 bp, Artificial
  probe
  misc_feature (1)..(25): SEQ ID NO: 7006; WAN024B8P_x_at; Start 94; Stop 118
gagtataaggagaattgtaaaaaca

SEQ ID NO: 75372 - DNA, 25 bp, Artificial
  probe
  misc_feature (1)..(25): SEQ ID NO: 7006; WAN024B8P_x_at; Start 51; Stop 75
gcagcctgcagctagcttcctagtt

SEQ ID NO: 75373 - DNA, 25 bp, Artificial
  probe
  misc_feature (1)..(25): SEQ ID NO: 7006; WAN024B8P_x_at; Start 15; Stop 39
gtcagttctatctacaacctcaaaa

SEQ ID NO: 75374 - DNA, 25 bp, Artificial
  probe
  misc_feature (1)..(25): SEQ ID NO: 6348; WAN024B8Q_x_at; Start 6; Stop 30
aatcaaagagcaaactaggaagcta

SEQ ID NO: 75375 - DNA, 25 bp, Artificial
  probe
  misc_feature (1)..(25): SEQ ID NO: 6348; WAN024B8Q_x_at; Start 36; Stop 60
aggttgctcaaaacactgttttgag

SEQ ID NO: 75376 - DNA, 25 bp, Artificial
  probe
  misc_feature (1)..(25): SEQ ID NO: 6348; WAN024B8Q_x_at; Start 15; Stop 39
gcaaactaggaagctagccacaggt

SEQ ID NO: 75377 - DNA, 25 bp, Artificial
  probe
  misc_feature (1)..(25): SEQ ID NO: 6348; WAN024B8Q_x_at; Start 41; Stop 65
gctcaaaacactgttttgaggttgc

SEQ ID NO: 75378 - DNA, 25 bp, Artificial
  probe
  misc_feature (1)..(25): SEQ ID NO: 6348; WAN024B8Q_x_at; Start 12; Stop 36
agagcaaactaggaagctagccaca

SEQ ID NO: 75379 - DNA, 25 bp, Artificial
  probe
  misc_feature (1)..(25): SEQ ID NO: 6348; WAN024B8Q_x_at; Start 4; Stop 28
aaaatcaaagagcaaactaggaagc

SEQ ID NO: 75380 - DNA, 25 bp, Artificial
  probe
  misc_feature (1)..(25): SEQ ID NO: 6348; WAN024B8Q_x_at; Start 10; Stop 34
aaagagcaaactaggaagctagcca

SEQ ID NO: 75381 - DNA, 25 bp, Artificial
  probe
  misc_feature (1)..(25): SEQ ID NO: 6348; WAN024B8Q_x_at; Start 8; Stop 32
tcaaagagcaaactaggaagctagc

SEQ ID NO: 75382 - DNA, 25 bp, Artificial
  probe
  misc_feature (1)..(25): SEQ ID NO: 6348; WAN024B8Q_x_at; Start 5; Stop 29
aaatcaaagagcaaactaggaagct

SEQ ID NO: 75383 - DNA, 25 bp, Artificial
  probe
  misc_feature (1)..(25): SEQ ID NO: 6348; WAN024B8Q_x_at; Start 35; Stop 59
caggttgctcaaaacactgttttga

SEQ ID NO: 75384 - DNA, 25 bp, Artificial
  probe
  misc_feature (1)..(25): SEQ ID NO: 6348; WAN024B8Q_x_at; Start 30; Stop 54
agccacaggttgctcaaaacactgt

SEQ ID NO: 75385 - DNA, 25 bp, Artificial
  probe
  misc_feature (1)..(25): SEQ ID NO: 6348; WAN024B8Q_x_at; Start 13; Stop 37
gagcaaactaggaagctagccacag

SEQ ID NO: 75386 - DNA, 25 bp, Artificial
  probe
  misc_feature (1)..(25): SEQ ID NO: 6348; WAN024B8Q_x_at; Start 39; Stop 63
ttgctcaaaacactgttttgaggtt

SEQ ID NO: 75387 - DNA, 25 bp, Artificial
  probe
  misc_feature (1)..(25): SEQ ID NO: 6348; WAN024B8Q_x_at; Start 34; Stop 58
acaggttgctcaaaacactgttttg

SEQ ID NO: 75388 - DNA, 25 bp, Artificial
  probe
  misc_feature (1)..(25): SEQ ID NO: 6348; WAN024B8Q_x_at; Start 11; Stop 35
aagagcaaactaggaagctagccac

SEQ ID NO: 75389 - DNA, 25 bp, Artificial
  probe
  misc_feature (1)..(25): SEQ ID NO: 6348; WAN024B8Q_x_at; Start 33; Stop 57
cacaggttgctcaaaacactgtttt

SEQ ID NO: 75390 - DNA, 25 bp, Artificial
  probe
  misc_feature (1)..(25): SEQ ID NO: 6348; WAN024B8Q_x_at; Start 40; Stop 64
tgctcaaaacactgttttgaggttg

SEQ ID NO: 75391 - DNA, 25 bp, Artificial
  probe
  misc_feature (1)..(25): SEQ ID NO: 6348; WAN024B8Q_x_at; Start 31; Stop 55
gccacaggttgctcaaaacactgtt

SEQ ID NO: 75392 - DNA, 25 bp, Artificial
  probe
  misc_feature (1)..(25): SEQ ID NO: 6348; WAN024B8Q_x_at; Start 38; Stop 62
gttgctcaaaacactgttttgaggt

SEQ ID NO: 75393 - DNA, 25 bp, Artificial
  probe
  misc_feature (1)..(25): SEQ ID NO: 6348; WAN024B8Q_x_at; Start 9; Stop 33
caaagagcaaactaggaagctagcc

SEQ ID NO: 75394 - DNA, 25 bp, Artificial
  probe
  misc_feature (1)..(25): SEQ ID NO: 6348; WAN024B8Q_x_at; Start 37; Stop 61
ggttgctcaaaacactgttttgagg

SEQ ID NO: 75395 - DNA, 25 bp, Artificial
  probe
  misc_feature (1)..(25): SEQ ID NO: 6348; WAN024B8Q_x_at; Start 32; Stop 56
ccacaggttgctcaaaacactgttt

SEQ ID NO: 75396 - DNA, 25 bp, Artificial
  probe
  misc_feature (1)..(25): SEQ ID NO: 6348; WAN024B8Q_x_at; Start 2; Stop 26
tgaaaatcaaagagcaaactaggaa

SEQ ID NO: 75397 - DNA, 25 bp, Artificial
  probe
  misc_feature (1)..(25): SEQ ID NO: 6348; WAN024B8Q_x_at; Start 7; Stop 31
atcaaagagcaaactaggaagctag

SEQ ID NO: 75398 - DNA, 25 bp, Artificial
  probe
  misc_feature (1)..(25): SEQ ID NO: 6348; WAN024B8Q_x_at; Start 1; Stop 25
atgaaaatcaaagagcaaactagga

SEQ ID NO: 75399 - DNA, 25 bp, Artificial
  probe
  misc_feature (1)..(25): SEQ ID NO: 6348; WAN024B8Q_x_at; Start 3; Stop 27
gaaaatcaaagagcaaactaggaag

SEQ ID NO: 75400 - DNA, 25 bp, Artificial
  probe
  misc_feature (1)..(25): SEQ ID NO: 30; WAN024B8R_s_at; Start 67; Stop 91
tttgatagaatagaagtagtaaaaa

SEQ ID NO: 75401 - DNA, 25 bp, Artificial
  probe
  misc_feature (1)..(25): SEQ ID NO: 30; WAN024B8R_s_at; Start 15; Stop 39
tatggtggctgaaatgagaagacac

SEQ ID NO: 75402 - DNA, 25 bp, Artificial
  probe
  misc_feature (1)..(25): SEQ ID NO: 30; WAN024B8R_s_at; Start 14; Stop 38
ttatggtggctgaaatgagaagaca

SEQ ID NO: 75403 - DNA, 25 bp, Artificial
  probe
  misc_feature (1)..(25): SEQ ID NO: 30; WAN024B8R_s_at; Start 69; Stop 93
tgatagaatagaagtagtaaaaaag

SEQ ID NO: 75404 - DNA, 25 bp, Artificial
  probe
  misc_feature (1)..(25): SEQ ID NO: 30; WAN024B8R_s_at; Start 10; Stop 34
tcttttatggtggctgaaatgagaa

SEQ ID NO: 75405 - DNA, 25 bp, Artificial
  probe
  misc_feature (1)..(25): SEQ ID NO: 30; WAN024B8R_s_at; Start 64; Stop 88
ttttttgatagaatagaagtagtaa

SEQ ID NO: 75406 - DNA, 25 bp, Artificial
  probe
  misc_feature (1)..(25): SEQ ID NO: 30; WAN024B8R_s_at; Start 11; Stop 35
cttttatggtggctgaaatgagaag

SEQ ID NO: 75407 - DNA, 25 bp, Artificial
  probe
  misc_feature (1)..(25): SEQ ID NO: 30; WAN024B8R_s_at; Start 8; Stop 32
cctcttttatggtggctgaaatgag

SEQ ID NO: 75408 - DNA, 25 bp, Artificial
  probe
  misc_feature (1)..(25): SEQ ID NO: 30; WAN024B8R_s_at; Start 66; Stop 90
ttttgatagaatagaagtagtaaaa

SEQ ID NO: 75409 - DNA, 25 bp, Artificial
  probe
  misc_feature (1)..(25): SEQ ID NO: 30; WAN024B8R_s_at; Start 20; Stop 44
tggctgaaatgagaagacacaaaaa

SEQ ID NO: 75410 - DNA, 25 bp, Artificial
  probe
  misc_feature (1)..(25): SEQ ID NO: 30; WAN024B8R_s_at; Start 70; Stop 94
gatagaatagaagtagtaaaaaaga

SEQ ID NO: 75411 - DNA, 25 bp, Artificial
  probe
  misc_feature (1)..(25): SEQ ID NO: 30; WAN024B8R_s_at; Start 19; Stop 43
gtggctgaaatgagaagacacaaaa

SEQ ID NO: 75412 - DNA, 25 bp, Artificial
  probe
  misc_feature (1)..(25): SEQ ID NO: 30; WAN024B8R_s_at; Start 16; Stop 40
atggtggctgaaatgagaagacaca

SEQ ID NO: 75413 - DNA, 25 bp, Artificial
  probe
  misc_feature (1)..(25): SEQ ID NO: 30; WAN024B8R_s_at; Start 9; Stop 33
ctcttttatggtggctgaaatgaga

SEQ ID NO: 75414 - DNA, 25 bp, Artificial
  probe
  misc_feature (1)..(25): SEQ ID NO: 30; WAN024B8R_s_at; Start 18; Stop 42
ggtggctgaaatgagaagacacaaa

SEQ ID NO: 75415 - DNA, 25 bp, Artificial
  probe
  misc_feature (1)..(25): SEQ ID NO: 30; WAN024B8R_s_at; Start 17; Stop 41
tggtggctgaaatgagaagacacaa

SEQ ID NO: 75416 - DNA, 25 bp, Artificial
  probe
  misc_feature (1)..(25): SEQ ID NO: 30; WAN024B8R_s_at; Start 68; Stop 92
ttgatagaatagaagtagtaaaaaa

SEQ ID NO: 75417 - DNA, 25 bp, Artificial
  probe
  misc_feature (1)..(25): SEQ ID NO: 30; WAN024B8R_s_at; Start 65; Stop 89
tttttgatagaatagaagtagtaaa

SEQ ID NO: 75418 - DNA, 25 bp, Artificial
  probe
  misc_feature (1)..(25): SEQ ID NO: 30; WAN024B8R_s_at; Start 13; Stop 37
tttatggtggctgaaatgagaagac

SEQ ID NO: 75419 - DNA, 25 bp, Artificial
  probe
  misc_feature (1)..(25): SEQ ID NO: 30; WAN024B8R_s_at; Start 12; Stop 36
ttttatggtggctgaaatgagaaga

SEQ ID NO: 75420 - DNA, 25 bp, Artificial
  probe
  misc_feature (1)..(25): SEQ ID NO: 6339; WAN024B8S_x_at; Start 36; Stop 60
aggttgctcaaaacactattttgag

SEQ ID NO: 75421 - DNA, 25 bp, Artificial
  probe
  misc_feature (1)..(25): SEQ ID NO: 6339; WAN024B8S_x_at; Start 41; Stop 65
gctcaaaacactattttgaggttgc

SEQ ID NO: 75422 - DNA, 25 bp, Artificial
  probe
  misc_feature (1)..(25): SEQ ID NO: 6339; WAN024B8S_x_at; Start 1; Stop 25
atgaaaatcaaagaacaaactagga

SEQ ID NO: 75423 - DNA, 25 bp, Artificial
  probe
  misc_feature (1)..(25): SEQ ID NO: 6339; WAN024B8S_x_at; Start 12; Stop 36
agaacaaactaggaagctagccaca

SEQ ID NO: 75424 - DNA, 25 bp, Artificial
  probe
  misc_feature (1)..(25): SEQ ID NO: 6339; WAN024B8S_x_at; Start 13; Stop 37
gaacaaactaggaagctagccacag

SEQ ID NO: 75425 - DNA, 25 bp, Artificial
  probe
  misc_feature (1)..(25): SEQ ID NO: 6339; WAN024B8S_x_at; Start 8; Stop 32
tcaaagaacaaactaggaagctagc

SEQ ID NO: 75426 - DNA, 25 bp, Artificial
  probe
  misc_feature (1)..(25): SEQ ID NO: 6339; WAN024B8S_x_at; Start 35; Stop 59
caggttgctcaaaacactattttga

SEQ ID NO: 75427 - DNA, 25 bp, Artificial
  probe
  misc_feature (1)..(25): SEQ ID NO: 6339; WAN024B8S_x_at; Start 30; Stop 54
agccacaggttgctcaaaacactat

SEQ ID NO: 75428 - DNA, 25 bp, Artificial
  probe
  misc_feature (1)..(25): SEQ ID NO: 6339; WAN024B8S_x_at; Start 39; Stop 63
ttgctcaaaacactattttgaggtt

SEQ ID NO: 75429 - DNA, 25 bp, Artificial
  probe
  misc_feature (1)..(25): SEQ ID NO: 6339; WAN024B8S_x_at; Start 47; Stop 71
aacactattttgaggttgcagatag

SEQ ID NO: 75430 - DNA, 25 bp, Artificial
  probe
  misc_feature (1)..(25): SEQ ID NO: 6339; WAN024B8S_x_at; Start 48; Stop 72
acactattttgaggttgcagataga

SEQ ID NO: 75431 - DNA, 25 bp, Artificial
  probe
  misc_feature (1)..(25): SEQ ID NO: 6339; WAN024B8S_x_at; Start 40; Stop 64
tgctcaaaacactattttgaggttg

SEQ ID NO: 75432 - DNA, 25 bp, Artificial
  probe
  misc_feature (1)..(25): SEQ ID NO: 6339; WAN024B8S_x_at; Start 42; Stop 66
ctcaaaacactattttgaggttgca

SEQ ID NO: 75433 - DNA, 25 bp, Artificial
  probe
  misc_feature (1)..(25): SEQ ID NO: 6339; WAN024B8S_x_at; Start 34; Stop 58
acaggttgctcaaaacactattttg

SEQ ID NO: 75434 - DNA, 25 bp, Artificial
  probe
  misc_feature (1)..(25): SEQ ID NO: 6339; WAN024B8S_x_at; Start 33; Stop 57
cacaggttgctcaaaacactatttt

SEQ ID NO: 75435 - DNA, 25 bp, Artificial
  probe
  misc_feature (1)..(25): SEQ ID NO: 6339; WAN024B8S_x_at; Start 31; Stop 55
gccacaggttgctcaaaacactatt

SEQ ID NO: 75436 - DNA, 25 bp, Artificial
  probe
  misc_feature (1)..(25): SEQ ID NO: 6339; WAN024B8S_x_at; Start 38; Stop 62
gttgctcaaaacactattttgaggt

SEQ ID NO: 75437 - DNA, 25 bp, Artificial
  probe
  misc_feature (1)..(25): SEQ ID NO: 6339; WAN024B8S_x_at; Start 7; Stop 31
atcaaagaacaaactaggaagctag

SEQ ID NO: 75438 - DNA, 25 bp, Artificial
  probe
  misc_feature (1)..(25): SEQ ID NO: 6339; WAN024B8S_x_at; Start 10; Stop 34
aaagaacaaactaggaagctagcca

SEQ ID NO: 75439 - DNA, 25 bp, Artificial
  probe
  misc_feature (1)..(25): SEQ ID NO: 6339; WAN024B8S_x_at; Start 49; Stop 73
cactattttgaggttgcagatagag

SEQ ID NO: 75440 - DNA, 25 bp, Artificial
  probe
  misc_feature (1)..(25): SEQ ID NO: 6339; WAN024B8S_x_at; Start 29; Stop 53
tagccacaggttgctcaaaacacta

SEQ ID NO: 75441 - DNA, 25 bp, Artificial
  probe
  misc_feature (1)..(25): SEQ ID NO: 6339; WAN024B8S_x_at; Start 14; Stop 38
aacaaactaggaagctagccacagg

SEQ ID NO: 75442 - DNA, 25 bp, Artificial
  probe
  misc_feature (1)..(25): SEQ ID NO: 6339; WAN024B8S_x_at; Start 45; Stop 69
aaaacactattttgaggttgcagat

SEQ ID NO: 75443 - DNA, 25 bp, Artificial
  probe
  misc_feature (1)..(25): SEQ ID NO: 6339; WAN024B8S_x_at; Start 37; Stop 61
ggttgctcaaaacactattttgagg

SEQ ID NO: 75444 - DNA, 25 bp, Artificial
  probe
  misc_feature (1)..(25): SEQ ID NO: 6339; WAN024B8S_x_at; Start 32; Stop 56
ccacaggttgctcaaaacactattt

SEQ ID NO: 75445 - DNA, 25 bp, Artificial
  probe
  misc_feature (1)..(25): SEQ ID NO: 6339; WAN024B8S_x_at; Start 2; Stop 26
tgaaaatcaaagaacaaactaggaa

SEQ ID NO: 75446 - DNA, 25 bp, Artificial
  probe
  misc_feature (1)..(25): SEQ ID NO: 6339; WAN024B8S_x_at; Start 43; Stop 67
tcaaaacactattttgaggttgcag

SEQ ID NO: 75447 - DNA, 25 bp, Artificial
  probe
  misc_feature (1)..(25): SEQ ID NO: 6339; WAN024B8S_x_at; Start 11; Stop 35
aagaacaaactaggaagctagccac

SEQ ID NO: 75448 - DNA, 25 bp, Artificial
  probe
  misc_feature (1)..(25): SEQ ID NO: 6339; WAN024B8S_x_at; Start 6; Stop 30
aatcaaagaacaaactaggaagcta

SEQ ID NO: 75449 - DNA, 25 bp, Artificial
  probe
  misc_feature (1)..(25): SEQ ID NO: 6339; WAN024B8S_x_at; Start 44; Stop 68
caaaacactattttgaggttgcaga

SEQ ID NO: 75450 - DNA, 25 bp, Artificial
  probe
  misc_feature (1)..(25): SEQ ID NO: 6339; WAN024B8S_x_at; Start 46; Stop 70
aaacactattttgaggttgcagata

SEQ ID NO: 75451 - DNA, 25 bp, Artificial
  probe
  misc_feature (1)..(25): SEQ ID NO: 12; WAN024B8T_s_at; Start 47; Stop 71
agcactactttgaggttgaagatgg

SEQ ID NO: 75452 - DNA, 25 bp, Artificial
  probe
  misc_feature (1)..(25): SEQ ID NO: 12; WAN024B8T_s_at; Start 48; Stop 72
gcactactttgaggttgaagatgga

SEQ ID NO: 75453 - DNA, 25 bp, Artificial
  probe
  misc_feature (1)..(25): SEQ ID NO: 12; WAN024B8T_s_at; Start 46; Stop 70
aagcactactttgaggttgaagatg

SEQ ID NO: 75454 - DNA, 25 bp, Artificial
  probe
  misc_feature (1)..(25): SEQ ID NO: 12; WAN024B8T_s_at; Start 51; Stop 75
ctactttgaggttgaagatggaagc

SEQ ID NO: 75455 - DNA, 25 bp, Artificial
  probe
  misc_feature (1)..(25): SEQ ID NO: 12; WAN024B8T_s_at; Start 49; Stop 73
cactactttgaggttgaagatggaa

SEQ ID NO: 75456 - DNA, 25 bp, Artificial
  probe
  misc_feature (1)..(25): SEQ ID NO: 12; WAN024B8T_s_at; Start 50; Stop 74
actactttgaggttgaagatggaag

SEQ ID NO: 75457 - DNA, 25 bp, Artificial
  probe
  misc_feature (1)..(25): SEQ ID NO: 7100; WAN024B8U_at; Start 83; Stop 107
tcattgagtattggcctcaggtttc

SEQ ID NO: 75458 - DNA, 25 bp, Artificial
  probe
  misc_feature (1)..(25): SEQ ID NO: 7100; WAN024B8U_at; Start 100; Stop 124
caggtttccatttgcaatcagaaag

SEQ ID NO: 75459 - DNA, 25 bp, Artificial
  probe
  misc_feature (1)..(25): SEQ ID NO: 7100; WAN024B8U_at; Start 106; Stop 130
tccatttgcaatcagaaagggattt

SEQ ID NO: 75460 - DNA, 25 bp, Artificial
  probe
  misc_feature (1)..(25): SEQ ID NO: 7100; WAN024B8U_at; Start 102; Stop 126
ggtttccatttgcaatcagaaaggg

SEQ ID NO: 75461 - DNA, 25 bp, Artificial
  probe
  misc_feature (1)..(25): SEQ ID NO: 7100; WAN024B8U_at; Start 85; Stop 109
attgagtattggcctcaggtttcca

SEQ ID NO: 75462 - DNA, 25 bp, Artificial
  probe
  misc_feature (1)..(25): SEQ ID NO: 7100; WAN024B8U_at; Start 107; Stop 131
ccatttgcaatcagaaagggatttt

SEQ ID NO: 75463 - DNA, 25 bp, Artificial
  probe
  misc_feature (1)..(25): SEQ ID NO: 7100; WAN024B8U_at; Start 103; Stop 127
gtttccatttgcaatcagaaaggga

SEQ ID NO: 75464 - DNA, 25 bp, Artificial
  probe
  misc_feature (1)..(25): SEQ ID NO: 7100; WAN024B8U_at; Start 105; Stop 129
ttccatttgcaatcagaaagggatt

SEQ ID NO: 75465 - DNA, 25 bp, Artificial
  probe
  misc_feature (1)..(25): SEQ ID NO: 7100; WAN024B8U_at; Start 98; Stop 122
ctcaggtttccatttgcaatcagaa

SEQ ID NO: 75466 - DNA, 25 bp, Artificial
  probe
  misc_feature (1)..(25): SEQ ID NO: 7100; WAN024B8U_at; Start 99; Stop 123
tcaggtttccatttgcaatcagaaa

SEQ ID NO: 75467 - DNA, 25 bp, Artificial
  probe
  misc_feature (1)..(25): SEQ ID NO: 7100; WAN024B8U_at; Start 82; Stop 106
ttcattgagtattggcctcaggttt

SEQ ID NO: 75468 - DNA, 25 bp, Artificial
  probe
  misc_feature (1)..(25): SEQ ID NO: 7100; WAN024B8U_at; Start 92; Stop 116
attggcctcaggtttccatttgcaa

SEQ ID NO: 75469 - DNA, 25 bp, Artificial
  probe
  misc_feature (1)..(25): SEQ ID NO: 7100; WAN024B8U_at; Start 93; Stop 117
ttggcctcaggtttccatttgcaat

SEQ ID NO: 75470 - DNA, 25 bp, Artificial
  probe
  misc_feature (1)..(25): SEQ ID NO: 7100; WAN024B8U_at; Start 96; Stop 120
gcctcaggtttccatttgcaatcag

SEQ ID NO: 75471 - DNA, 25 bp, Artificial
  probe
  misc_feature (1)..(25): SEQ ID NO: 7100; WAN024B8U_at; Start 89; Stop 113
agtattggcctcaggtttccatttg

SEQ ID NO: 75472 - DNA, 25 bp, Artificial
  probe
  misc_feature (1)..(25): SEQ ID NO: 7100; WAN024B8U_at; Start 90; Stop 114
gtattggcctcaggtttccatttgc

SEQ ID NO: 75473 - DNA, 25 bp, Artificial
  probe
  misc_feature (1)..(25): SEQ ID NO: 7100; WAN024B8U_at; Start 97; Stop 121
cctcaggtttccatttgcaatcaga

SEQ ID NO: 75474 - DNA, 25 bp, Artificial
  probe
  misc_feature (1)..(25): SEQ ID NO: 7100; WAN024B8U_at; Start 104; Stop 128
tttccatttgcaatcagaaagggat

SEQ ID NO: 75475 - DNA, 25 bp, Artificial
  probe
  misc_feature (1)..(25): SEQ ID NO: 7100; WAN024B8U_at; Start 81; Stop 105
tttcattgagtattggcctcaggtt

SEQ ID NO: 75476 - DNA, 25 bp, Artificial
  probe
  misc_feature (1)..(25): SEQ ID NO: 7100; WAN024B8U_at; Start 80; Stop 104
ttttcattgagtattggcctcaggt

SEQ ID NO: 75477 - DNA, 25 bp, Artificial
  probe
  misc_feature (1)..(25): SEQ ID NO: 7100; WAN024B8U_at; Start 88; Stop 112
gagtattggcctcaggtttccattt

SEQ ID NO: 75478 - DNA, 25 bp, Artificial
  probe
  misc_feature (1)..(25): SEQ ID NO: 7100; WAN024B8U_at; Start 84; Stop 108
cattgagtattggcctcaggtttcc

SEQ ID NO: 75479 - DNA, 25 bp, Artificial
  probe
  misc_feature (1)..(25): SEQ ID NO: 7100; WAN024B8U_at; Start 86; Stop 110
ttgagtattggcctcaggtttccat

SEQ ID NO: 75480 - DNA, 25 bp, Artificial
  probe
  misc_feature (1)..(25): SEQ ID NO: 7100; WAN024B8U_at; Start 95; Stop 119
ggcctcaggtttccatttgcaatca

SEQ ID NO: 75481 - DNA, 25 bp, Artificial
  probe
  misc_feature (1)..(25): SEQ ID NO: 7100; WAN024B8U_at; Start 94; Stop 118
tggcctcaggtttccatttgcaatc

SEQ ID NO: 75482 - DNA, 25 bp, Artificial
  probe
  misc_feature (1)..(25): SEQ ID NO: 7100; WAN024B8U_at; Start 87; Stop 111
tgagtattggcctcaggtttccatt

SEQ ID NO: 75483 - DNA, 25 bp, Artificial
  probe
  misc_feature (1)..(25): SEQ ID NO: 7100; WAN024B8U_at; Start 101; Stop 125
aggtttccatttgcaatcagaaagg

SEQ ID NO: 75484 - DNA, 25 bp, Artificial
  probe
  misc_feature (1)..(25): SEQ ID NO: 7100; WAN024B8U_at; Start 91; Stop 115
tattggcctcaggtttccatttgca

SEQ ID NO: 75485 - DNA, 25 bp, Artificial
  probe
  misc_feature (1)..(25): SEQ ID NO: 21; WAN024B8V_x_at; Start 41; Stop 65
ttaagcagcctacggctagcttcct

SEQ ID NO: 75486 - DNA, 25 bp, Artificial
  probe
  misc_feature (1)..(25): SEQ ID NO: 21; WAN024B8V_x_at; Start 42; Stop 66
taagcagcctacggctagcttccta

SEQ ID NO: 75487 - DNA, 25 bp, Artificial
  probe
  misc_feature (1)..(25): SEQ ID NO: 21; WAN024B8V_x_at; Start 5; Stop 29
cttcgtcagttctatccacaacctc

SEQ ID NO: 75488 - DNA, 25 bp, Artificial
  probe
  misc_feature (1)..(25): SEQ ID NO: 21; WAN024B8V_x_at; Start 4; Stop 28
acttcgtcagttctatccacaacct

SEQ ID NO: 75489 - DNA, 25 bp, Artificial
  probe
  misc_feature (1)..(25): SEQ ID NO: 21; WAN024B8V_x_at; Start 34; Stop 58
cactgttttaagcagcctacggcta

SEQ ID NO: 75490 - DNA, 25 bp, Artificial
  probe
  misc_feature (1)..(25): SEQ ID NO: 21; WAN024B8V_x_at; Start 33; Stop 57
acactgttttaagcagcctacggct

SEQ ID NO: 75491 - DNA, 25 bp, Artificial
  probe
  misc_feature (1)..(25): SEQ ID NO: 21; WAN024B8V_x_at; Start 37; Stop 61
tgttttaagcagcctacggctagct

SEQ ID NO: 75492 - DNA, 25 bp, Artificial
  probe
  misc_feature (1)..(25): SEQ ID NO: 21; WAN024B8V_x_at; Start 11; Stop 35
cagttctatccacaacctcaaaaca

SEQ ID NO: 75493 - DNA, 25 bp, Artificial
  probe
  misc_feature (1)..(25): SEQ ID NO: 21; WAN024B8V_x_at; Start 3; Stop 27
gacttcgtcagttctatccacaacc

SEQ ID NO: 75494 - DNA, 25 bp, Artificial
  probe
  misc_feature (1)..(25): SEQ ID NO: 21; WAN024B8V_x_at; Start 36; Stop 60
ctgttttaagcagcctacggctagc

SEQ ID NO: 75495 - DNA, 25 bp, Artificial
  probe
  misc_feature (1)..(25): SEQ ID NO: 21; WAN024B8V_x_at; Start 7; Stop 31
tcgtcagttctatccacaacctcaa

SEQ ID NO: 75496 - DNA, 25 bp, Artificial
  probe
  misc_feature (1)..(25): SEQ ID NO: 21; WAN024B8V_x_at; Start 16; Stop 40
ctatccacaacctcaaaacactgtt

SEQ ID NO: 75497 - DNA, 25 bp, Artificial
  probe
  misc_feature (1)..(25): SEQ ID NO: 21; WAN024B8V_x_at; Start 39; Stop 63
ttttaagcagcctacggctagcttc

SEQ ID NO: 75498 - DNA, 25 bp, Artificial
  probe
  misc_feature (1)..(25): SEQ ID NO: 21; WAN024B8V_x_at; Start 15; Stop 39
tctatccacaacctcaaaacactgt

SEQ ID NO: 75499 - DNA, 25 bp, Artificial
  probe
  misc_feature (1)..(25): SEQ ID NO: 21; WAN024B8V_x_at; Start 14; Stop 38
ttctatccacaacctcaaaacactg

SEQ ID NO: 75500 - DNA, 25 bp, Artificial
  probe
  misc_feature (1)..(25): SEQ ID NO: 21; WAN024B8V_x_at; Start 2; Stop 26
tgacttcgtcagttctatccacaac

SEQ ID NO: 75501 - DNA, 25 bp, Artificial
  probe
  misc_feature (1)..(25): SEQ ID NO: 21; WAN024B8V_x_at; Start 12; Stop 36
agttctatccacaacctcaaaacac

SEQ ID NO: 75502 - DNA, 25 bp, Artificial
  probe
  misc_feature (1)..(25): SEQ ID NO: 21; WAN024B8V_x_at; Start 38; Stop 62
gttttaagcagcctacggctagctt

SEQ ID NO: 75503 - DNA, 25 bp, Artificial
  probe
  misc_feature (1)..(25): SEQ ID NO: 21; WAN024B8V_x_at; Start 6; Stop 30
ttcgtcagttctatccacaacctca

SEQ ID NO: 75504 - DNA, 25 bp, Artificial
  probe
  misc_feature (1)..(25): SEQ ID NO: 21; WAN024B8V_x_at; Start 10; Stop 34
tcagttctatccacaacctcaaaac

SEQ ID NO: 75505 - DNA, 25 bp, Artificial
  probe
  misc_feature (1)..(25): SEQ ID NO: 21; WAN024B8V_x_at; Start 1; Stop 25
ctgacttcgtcagttctatccacaa

SEQ ID NO: 75506 - DNA, 25 bp, Artificial
  probe
  misc_feature (1)..(25): SEQ ID NO: 21; WAN024B8V_x_at; Start 8; Stop 32
cgtcagttctatccacaacctcaaa

SEQ ID NO: 75507 - DNA, 25 bp, Artificial
  probe
  misc_feature (1)..(25): SEQ ID NO: 21; WAN024B8V_x_at; Start 40; Stop 64
tttaagcagcctacggctagcttcc

SEQ ID NO: 75508 - DNA, 25 bp, Artificial
  probe
  misc_feature (1)..(25): SEQ ID NO: 21; WAN024B8V_x_at; Start 35; Stop 59
actgttttaagcagcctacggctag

SEQ ID NO: 75509 - DNA, 25 bp, Artificial
  probe
  misc_feature (1)..(25): SEQ ID NO: 21; WAN024B8V_x_at; Start 32; Stop 56
aacactgttttaagcagcctacggc

SEQ ID NO: 75510 - DNA, 25 bp, Artificial
  probe
  misc_feature (1)..(25): SEQ ID NO: 21; WAN024B8V_x_at; Start 9; Stop 33
gtcagttctatccacaacctcaaaa

SEQ ID NO: 75511 - DNA, 25 bp, Artificial
  probe
  misc_feature (1)..(25): SEQ ID NO: 21; WAN024B8V_x_at; Start 43; Stop 67
aagcagcctacggctagcttcctag

SEQ ID NO: 75512 - DNA, 25 bp, Artificial
  probe
  misc_feature (1)..(25): SEQ ID NO: 21; WAN024B8V_x_at; Start 31; Stop 55
aaacactgttttaagcagcctacgg

SEQ ID NO: 75513 - DNA, 25 bp, Artificial
  probe
  misc_feature (1)..(25): SEQ ID NO: 36; WAN024B8W_x_at; Start 35; Stop 59
gcttcctagtttgctctttgatttt

SEQ ID NO: 75514 - DNA, 25 bp, Artificial
  probe
  misc_feature (1)..(25): SEQ ID NO: 36; WAN024B8W_x_at; Start 19; Stop 43
gtacagcctgcggctcgcttcctag

SEQ ID NO: 75515 - DNA, 25 bp, Artificial
  probe
  misc_feature (1)..(25): SEQ ID NO: 36; WAN024B8W_x_at; Start 23; Stop 47
agcctgcggctcgcttcctagtttg

SEQ ID NO: 75516 - DNA, 25 bp, Artificial
  probe
  misc_feature (1)..(25): SEQ ID NO: 36; WAN024B8W_x_at; Start 21; Stop 45
acagcctgcggctcgcttcctagtt

SEQ ID NO: 75517 - DNA, 25 bp, Artificial
  probe
  misc_feature (1)..(25): SEQ ID NO: 36; WAN024B8W_x_at; Start 26; Stop 50
ctgcggctcgcttcctagtttgctc

SEQ ID NO: 75518 - DNA, 25 bp, Artificial
  probe
  misc_feature (1)..(25): SEQ ID NO: 36; WAN024B8W_x_at; Start 16; Stop 40
caagtacagcctgcggctcgcttcc

SEQ ID NO: 75519 - DNA, 25 bp, Artificial
  probe
  misc_feature (1)..(25): SEQ ID NO: 36; WAN024B8W_x_at; Start 14; Stop 38
ctcaagtacagcctgcggctcgctt

SEQ ID NO: 75520 - DNA, 25 bp, Artificial
  probe
  misc_feature (1)..(25): SEQ ID NO: 36; WAN024B8W_x_at; Start 39; Stop 63
cctagtttgctctttgattttcatt

SEQ ID NO: 75521 - DNA, 25 bp, Artificial
  probe
  misc_feature (1)..(25): SEQ ID NO: 36; WAN024B8W_x_at; Start 31; Stop 55
gctcgcttcctagtttgctctttga

SEQ ID NO: 75522 - DNA, 25 bp, Artificial
  probe
  misc_feature (1)..(25): SEQ ID NO: 36; WAN024B8W_x_at; Start 25; Stop 49
cctgcggctcgcttcctagtttgct

SEQ ID NO: 75523 - DNA, 25 bp, Artificial
  probe
  misc_feature (1)..(25): SEQ ID NO: 36; WAN024B8W_x_at; Start 1; Stop 25
ttgctttaccgtactcaagtacagc

SEQ ID NO: 75524 - DNA, 25 bp, Artificial
  probe
  misc_feature (1)..(25): SEQ ID NO: 36; WAN024B8W_x_at; Start 36; Stop 60
cttcctagtttgctctttgattttc

SEQ ID NO: 75525 - DNA, 25 bp, Artificial
  probe
  misc_feature (1)..(25): SEQ ID NO: 36; WAN024B8W_x_at; Start 2; Stop 26
tgctttaccgtactcaagtacagcc

SEQ ID NO: 75526 - DNA, 25 bp, Artificial
  probe
  misc_feature (1)..(25): SEQ ID NO: 36; WAN024B8W_x_at; Start 15; Stop 39
tcaagtacagcctgcggctcgcttc

SEQ ID NO: 75527 - DNA, 25 bp, Artificial
  probe
  misc_feature (1)..(25): SEQ ID NO: 36; WAN024B8W_x_at; Start 28; Stop 52
gcggctcgcttcctagtttgctctt

SEQ ID NO: 75528 - DNA, 25 bp, Artificial
  probe
  misc_feature (1)..(25): SEQ ID NO: 36; WAN024B8W_x_at; Start 22; Stop 46
cagcctgcggctcgcttcctagttt

SEQ ID NO: 75529 - DNA, 25 bp, Artificial
  probe
  misc_feature (1)..(25): SEQ ID NO: 36; WAN024B8W_x_at; Start 32; Stop 56
ctcgcttcctagtttgctctttgat

SEQ ID NO: 75530 - DNA, 25 bp, Artificial
  probe
  misc_feature (1)..(25): SEQ ID NO: 36; WAN024B8W_x_at; Start 17; Stop 41
aagtacagcctgcggctcgcttcct

SEQ ID NO: 75531 - DNA, 25 bp, Artificial
  probe
  misc_feature (1)..(25): SEQ ID NO: 36; WAN024B8W_x_at; Start 11; Stop 35
gtactcaagtacagcctgcggctcg

SEQ ID NO: 75532 - DNA, 25 bp, Artificial
  probe
  misc_feature (1)..(25): SEQ ID NO: 36; WAN024B8W_x_at; Start 29; Stop 53
cggctcgcttcctagtttgctcttt

SEQ ID NO: 75533 - DNA, 25 bp, Artificial
  probe
  misc_feature (1)..(25): SEQ ID NO: 36; WAN024B8W_x_at; Start 34; Stop 58
cgcttcctagtttgctctttgattt

SEQ ID NO: 75534 - DNA, 25 bp, Artificial
  probe
  misc_feature (1)..(25): SEQ ID NO: 36; WAN024B8W_x_at; Start 60; Stop 84
cattgagtataaaaagggtcaagta

SEQ ID NO: 75535 - DNA, 25 bp, Artificial
  probe
  misc_feature (1)..(25): SEQ ID NO: 36; WAN024B8W_x_at; Start 27; Stop 51
tgcggctcgcttcctagtttgctct

SEQ ID NO: 75536 - DNA, 25 bp, Artificial
  probe
  misc_feature (1)..(25): SEQ ID NO: 36; WAN024B8W_x_at; Start 4; Stop 28
ctttaccgtactcaagtacagcctg

SEQ ID NO: 75537 - DNA, 25 bp, Artificial
  probe
  misc_feature (1)..(25): SEQ ID NO: 36; WAN024B8W_x_at; Start 3; Stop 27
gctttaccgtactcaagtacagcct

SEQ ID NO: 75538 - DNA, 25 bp, Artificial
  probe
  misc_feature (1)..(25): SEQ ID NO: 36; WAN024B8W_x_at; Start 18; Stop 42
agtacagcctgcggctcgcttccta

SEQ ID NO: 75539 - DNA, 25 bp, Artificial
  probe
  misc_feature (1)..(25): SEQ ID NO: 36; WAN024B8W_x_at; Start 40; Stop 64
ctagtttgctctttgattttcattg

SEQ ID NO: 75540 - DNA, 25 bp, Artificial
  probe
  misc_feature (1)..(25): SEQ ID NO: 36; WAN024B8W_x_at; Start 38; Stop 62
tcctagtttgctctttgattttcat

SEQ ID NO: 75541 - DNA, 25 bp, Artificial
  probe
  misc_feature (1)..(25): SEQ ID NO: 36; WAN024B8W_x_at; Start 24; Stop 48
gcctgcggctcgcttcctagtttgc

SEQ ID NO: 75542 - DNA, 25 bp, Artificial
  probe
  misc_feature (1)..(25): SEQ ID NO: 36; WAN024B8W_x_at; Start 30; Stop 54
ggctcgcttcctagtttgctctttg

SEQ ID NO: 75543 - DNA, 25 bp, Artificial
  probe
  misc_feature (1)..(25): SEQ ID NO: 36; WAN024B8W_x_at; Start 20; Stop 44
tacagcctgcggctcgcttcctagt

SEQ ID NO: 75544 - DNA, 25 bp, Artificial
  probe
  misc_feature (1)..(25): SEQ ID NO: 36; WAN024B8W_x_at; Start 37; Stop 61
ttcctagtttgctctttgattttca

SEQ ID NO: 75545 - DNA, 25 bp, Artificial
  probe
  misc_feature (1)..(25): SEQ ID NO: 36; WAN024B8W_x_at; Start 5; Stop 29
tttaccgtactcaagtacagcctgc

SEQ ID NO: 75546 - DNA, 25 bp, Artificial
  probe
  misc_feature (1)..(25): SEQ ID NO: 36; WAN024B8W_x_at; Start 33; Stop 57
tcgcttcctagtttgctctttgatt

SEQ ID NO: 75547 - DNA, 25 bp, Artificial
  probe
  misc_feature (1)..(25): SEQ ID NO: 7273; WAN024B8Z_at; Start 1; Stop 25
gtgcagttcatcatttcaacatcct

SEQ ID NO: 75548 - DNA, 25 bp, Artificial
  probe
  misc_feature (1)..(25): SEQ ID NO: 7273; WAN024B8Z_at; Start 2; Stop 26
tgcagttcatcatttcaacatccta

SEQ ID NO: 75549 - DNA, 25 bp, Artificial
  probe
  misc_feature (1)..(25): SEQ ID NO: 7273; WAN024B8Z_at; Start 13; Stop 37
atttcaacatcctatattatgcgtt

SEQ ID NO: 75550 - DNA, 25 bp, Artificial
  probe
  misc_feature (1)..(25): SEQ ID NO: 7273; WAN024B8Z_at; Start 11; Stop 35
tcatttcaacatcctatattatgcg

SEQ ID NO: 75551 - DNA, 25 bp, Artificial
  probe
  misc_feature (1)..(25): SEQ ID NO: 7273; WAN024B8Z_at; Start 7; Stop 31
ttcatcatttcaacatcctatatta

SEQ ID NO: 75552 - DNA, 25 bp, Artificial
  probe
  misc_feature (1)..(25): SEQ ID NO: 7273; WAN024B8Z_at; Start 3; Stop 27
gcagttcatcatttcaacatcctat

SEQ ID NO: 75553 - DNA, 25 bp, Artificial
  probe
  misc_feature (1)..(25): SEQ ID NO: 7273; WAN024B8Z_at; Start 12; Stop 36
catttcaacatcctatattatgcgt

SEQ ID NO: 75554 - DNA, 25 bp, Artificial
  probe
  misc_feature (1)..(25): SEQ ID NO: 7273; WAN024B8Z_at; Start 5; Stop 29
agttcatcatttcaacatcctatat

SEQ ID NO: 75555 - DNA, 25 bp, Artificial
  probe
  misc_feature (1)..(25): SEQ ID NO: 7273; WAN024B8Z_at; Start 4; Stop 28
cagttcatcatttcaacatcctata

SEQ ID NO: 75556 - DNA, 25 bp, Artificial
  probe
  misc_feature (1)..(25): SEQ ID NO: 7273; WAN024B8Z_at; Start 10; Stop 34
atcatttcaacatcctatattatgc

SEQ ID NO: 75557 - DNA, 25 bp, Artificial
  probe
  misc_feature (1)..(25): SEQ ID NO: 7273; WAN024B8Z_at; Start 15; Stop 39
ttcaacatcctatattatgcgtttt

SEQ ID NO: 75558 - DNA, 25 bp, Artificial
  probe
  misc_feature (1)..(25): SEQ ID NO: 7273; WAN024B8Z_at; Start 6; Stop 30
gttcatcatttcaacatcctatatt

SEQ ID NO: 75559 - DNA, 25 bp, Artificial
  probe
  misc_feature (1)..(25): SEQ ID NO: 7273; WAN024B8Z_at; Start 8; Stop 32
tcatcatttcaacatcctatattat

SEQ ID NO: 75560 - DNA, 25 bp, Artificial
  probe
  misc_feature (1)..(25): SEQ ID NO: 7273; WAN024B8Z_at; Start 9; Stop 33
catcatttcaacatcctatattatg

SEQ ID NO: 75561 - DNA, 25 bp, Artificial
  probe
  misc_feature (1)..(25): SEQ ID NO: 7273; WAN024B8Z_at; Start 14; Stop 38
tttcaacatcctatattatgcgttt

SEQ ID NO: 75562 - DNA, 25 bp, Artificial
  probe
  misc_feature (1)..(25): SEQ ID NO: 7273; WAN024B8Z_at; Start 16; Stop 40
tcaacatcctatattatgcgttttt

SEQ ID NO: 75563 - DNA, 25 bp, Artificial
  probe
  misc_feature (1)..(25): SEQ ID NO: 7013; WAN024B96_at; Start 160; Stop 184
gatggcaagattttcaagggtaaag

SEQ ID NO: 75564 - DNA, 25 bp, Artificial
  probe
  misc_feature (1)..(25): SEQ ID NO: 7013; WAN024B96_at; Start 178; Stop 202
ggtaaagcctcaatatccgatggac

SEQ ID NO: 75565 - DNA, 25 bp, Artificial
  probe
  misc_feature (1)..(25): SEQ ID NO: 7013; WAN024B96_at; Start 180; Stop 204
taaagcctcaatatccgatggactt

SEQ ID NO: 75566 - DNA, 25 bp, Artificial
  probe
  misc_feature (1)..(25): SEQ ID NO: 7013; WAN024B96_at; Start 176; Stop 200
agggtaaagcctcaatatccgatgg

SEQ ID NO: 75567 - DNA, 25 bp, Artificial
  probe
  misc_feature (1)..(25): SEQ ID NO: 7013; WAN024B96_at; Start 131; Stop 155
agggcgacaccgtctacttctataa

SEQ ID NO: 75568 - DNA, 25 bp, Artificial
  probe
  misc_feature (1)..(25): SEQ ID NO: 7013; WAN024B96_at; Start 170; Stop 194
ttttcaagggtaaagcctcaatatc

SEQ ID NO: 75569 - DNA, 25 bp, Artificial
  probe
  misc_feature (1)..(25): SEQ ID NO: 7013; WAN024B96_at; Start 182; Stop 206
aagcctcaatatccgatggacttcc

SEQ ID NO: 75570 - DNA, 25 bp, Artificial
  probe
  misc_feature (1)..(25): SEQ ID NO: 7013; WAN024B96_at; Start 130; Stop 154
aagggcgacaccgtctacttctata

SEQ ID NO: 75571 - DNA, 25 bp, Artificial
  probe
  misc_feature (1)..(25): SEQ ID NO: 7013; WAN024B96_at; Start 155; Stop 179
aagttgatggcaagattttcaaggg

SEQ ID NO: 75572 - DNA, 25 bp, Artificial
  probe
  misc_feature (1)..(25): SEQ ID NO: 7013; WAN024B96_at; Start 162; Stop 186
tggcaagattttcaagggtaaagcc

SEQ ID NO: 75573 - DNA, 25 bp, Artificial
  probe
  misc_feature (1)..(25): SEQ ID NO: 7013; WAN024B96_at; Start 53; Stop 77
aaacagaccttgatattgacaatgc

SEQ ID NO: 75574 - DNA, 25 bp, Artificial
  probe
  misc_feature (1)..(25): SEQ ID NO: 7013; WAN024B96_at; Start 174; Stop 198
caagggtaaagcctcaatatccgat

SEQ ID NO: 75575 - DNA, 25 bp, Artificial
  probe
  misc_feature (1)..(25): SEQ ID NO: 7013; WAN024B96_at; Start 147; Stop 171
cttctataaagttgatggcaagatt

SEQ ID NO: 75576 - DNA, 25 bp, Artificial
  probe
  misc_feature (1)..(25): SEQ ID NO: 7013; WAN024B96_at; Start 189; Stop 213
aatatccgatggacttccttaccct

SEQ ID NO: 75577 - DNA, 25 bp, Artificial
  probe
  misc_feature (1)..(25): SEQ ID NO: 7013; WAN024B96_at; Start 175; Stop 199
aagggtaaagcctcaatatccgatg

SEQ ID NO: 75578 - DNA, 25 bp, Artificial
  probe
  misc_feature (1)..(25): SEQ ID NO: 7013; WAN024B96_at; Start 50; Stop 74
taaaaacagaccttgatattgacaa

SEQ ID NO: 75579 - DNA, 25 bp, Artificial
  probe
  misc_feature (1)..(25): SEQ ID NO: 7013; WAN024B96_at; Start 193; Stop 217
tccgatggacttccttaccctgaaa

SEQ ID NO: 75580 - DNA, 25 bp, Artificial
  probe
  misc_feature (1)..(25): SEQ ID NO: 7013; WAN024B96_at; Start 187; Stop 211
tcaatatccgatggacttccttacc

SEQ ID NO: 75581 - DNA, 25 bp, Artificial
  probe
  misc_feature (1)..(25): SEQ ID NO: 7013; WAN024B96_at; Start 172; Stop 196
ttcaagggtaaagcctcaatatccg

SEQ ID NO: 75582 - DNA, 25 bp, Artificial
  probe
  misc_feature (1)..(25): SEQ ID NO: 7013; WAN024B96_at; Start 128; Stop 152
tcaagggcgacaccgtctacttcta

SEQ ID NO: 75583 - DNA, 25 bp, Artificial
  probe
  misc_feature (1)..(25): SEQ ID NO: 7013; WAN024B96_at; Start 191; Stop 215
tatccgatggacttccttaccctga

SEQ ID NO: 75584 - DNA, 25 bp, Artificial
  probe
  misc_feature (1)..(25): SEQ ID NO: 7013; WAN024B96_at; Start 179; Stop 203
gtaaagcctcaatatccgatggact

SEQ ID NO: 75585 - DNA, 25 bp, Artificial
  probe
  misc_feature (1)..(25): SEQ ID NO: 7013; WAN024B96_at; Start 177; Stop 201
gggtaaagcctcaatatccgatgga

SEQ ID NO: 75586 - DNA, 25 bp, Artificial
  probe
  misc_feature (1)..(25): SEQ ID NO: 7013; WAN024B96_at; Start 134; Stop 158
gcgacaccgtctacttctataaagt

SEQ ID NO: 75587 - DNA, 25 bp, Artificial
  probe
  misc_feature (1)..(25): SEQ ID NO: 7013; WAN024B96_at; Start 165; Stop 189
caagattttcaagggtaaagcctca

SEQ ID NO: 75588 - DNA, 25 bp, Artificial
  probe
  misc_feature (1)..(25): SEQ ID NO: 7013; WAN024B96_at; Start 132; Stop 156
gggcgacaccgtctacttctataaa

SEQ ID NO: 75589 - DNA, 25 bp, Artificial
  probe
  misc_feature (1)..(25): SEQ ID NO: 7013; WAN024B96_at; Start 168; Stop 192
gattttcaagggtaaagcctcaata

SEQ ID NO: 75590 - DNA, 25 bp, Artificial
  probe
  misc_feature (1)..(25): SEQ ID NO: 7013; WAN024B96_at; Start 133; Stop 157
ggcgacaccgtctacttctataaag

SEQ ID NO: 75591 - DNA, 25 bp, Artificial
  probe
  misc_feature (1)..(25): SEQ ID NO: 7013; WAN024B96_at; Start 135; Stop 159
cgacaccgtctacttctataaagtt

SEQ ID NO: 75592 - DNA, 25 bp, Artificial
  probe
  misc_feature (1)..(25): SEQ ID NO: 7013; WAN024B96_at; Start 157; Stop 181
gttgatggcaagattttcaagggta

SEQ ID NO: 75593 - DNA, 25 bp, Artificial
  probe
  misc_feature (1)..(25): SEQ ID NO: 7013; WAN024B96_at; Start 164; Stop 188
gcaagattttcaagggtaaagcctc

SEQ ID NO: 75594 - DNA, 25 bp, Artificial
  probe
  misc_feature (1)..(25): SEQ ID NO: 7013; WAN024B96_at; Start 184; Stop 208
gcctcaatatccgatggacttcctt

SEQ ID NO: 75595 - DNA, 25 bp, Artificial
  probe
  misc_feature (1)..(25): SEQ ID NO: 7013; WAN024B96_at; Start 150; Stop 174
ctataaagttgatggcaagattttc

SEQ ID NO: 75596 - DNA, 25 bp, Artificial
  probe
  misc_feature (1)..(25): SEQ ID NO: 7013; WAN024B96_at; Start 197; Stop 221
atggacttccttaccctgaaaaatg

SEQ ID NO: 75597 - DNA, 25 bp, Artificial
  probe
  misc_feature (1)..(25): SEQ ID NO: 3; WAN024B9E_x_at; Start 6; Stop 30
aattaaagagcaaactaggaagcta

SEQ ID NO: 75598 - DNA, 25 bp, Artificial
  probe
  misc_feature (1)..(25): SEQ ID NO: 3; WAN024B9E_x_at; Start 36; Stop 60
aggttgctcaaaacactgttttgag

SEQ ID NO: 75599 - DNA, 25 bp, Artificial
  probe
  misc_feature (1)..(25): SEQ ID NO: 3; WAN024B9E_x_at; Start 15; Stop 39
gcaaactaggaagctagccacaggt

SEQ ID NO: 75600 - DNA, 25 bp, Artificial
  probe
  misc_feature (1)..(25): SEQ ID NO: 3; WAN024B9E_x_at; Start 41; Stop 65
gctcaaaacactgttttgaggttgc

SEQ ID NO: 75601 - DNA, 25 bp, Artificial
  probe
  misc_feature (1)..(25): SEQ ID NO: 3; WAN024B9E_x_at; Start 12; Stop 36
agagcaaactaggaagctagccaca

SEQ ID NO: 75602 - DNA, 25 bp, Artificial
  probe
  misc_feature (1)..(25): SEQ ID NO: 3; WAN024B9E_x_at; Start 1; Stop 25
atgaaaattaaagagcaaactagga

SEQ ID NO: 75603 - DNA, 25 bp, Artificial
  probe
  misc_feature (1)..(25): SEQ ID NO: 3; WAN024B9E_x_at; Start 10; Stop 34
aaagagcaaactaggaagctagcca

SEQ ID NO: 75604 - DNA, 25 bp, Artificial
  probe
  misc_feature (1)..(25): SEQ ID NO: 3; WAN024B9E_x_at; Start 7; Stop 31
attaaagagcaaactaggaagctag

SEQ ID NO: 75605 - DNA, 25 bp, Artificial
  probe
  misc_feature (1)..(25): SEQ ID NO: 3; WAN024B9E_x_at; Start 8; Stop 32
ttaaagagcaaactaggaagctagc

SEQ ID NO: 75606 - DNA, 25 bp, Artificial
  probe
  misc_feature (1)..(25): SEQ ID NO: 3; WAN024B9E_x_at; Start 34; Stop 58
acaggttgctcaaaacactgttttg

SEQ ID NO: 75607 - DNA, 25 bp, Artificial
  probe
  misc_feature (1)..(25): SEQ ID NO: 3; WAN024B9E_x_at; Start 35; Stop 59
caggttgctcaaaacactgttttga

SEQ ID NO: 75608 - DNA, 25 bp, Artificial
  probe
  misc_feature (1)..(25): SEQ ID NO: 3; WAN024B9E_x_at; Start 30; Stop 54
agccacaggttgctcaaaacactgt

SEQ ID NO: 75609 - DNA, 25 bp, Artificial
  probe
  misc_feature (1)..(25): SEQ ID NO: 3; WAN024B9E_x_at; Start 13; Stop 37
gagcaaactaggaagctagccacag

SEQ ID NO: 75610 - DNA, 25 bp, Artificial
  probe
  misc_feature (1)..(25): SEQ ID NO: 3; WAN024B9E_x_at; Start 39; Stop 63
ttgctcaaaacactgttttgaggtt

SEQ ID NO: 75611 - DNA, 25 bp, Artificial
  probe
  misc_feature (1)..(25): SEQ ID NO: 3; WAN024B9E_x_at; Start 2; Stop 26
tgaaaattaaagagcaaactaggaa

SEQ ID NO: 75612 - DNA, 25 bp, Artificial
  probe
  misc_feature (1)..(25): SEQ ID NO: 3; WAN024B9E_x_at; Start 49; Stop 73
cactgttttgaggttgcagatggaa

SEQ ID NO: 75613 - DNA, 25 bp, Artificial
  probe
  misc_feature (1)..(25): SEQ ID NO: 3; WAN024B9E_x_at; Start 47; Stop 71
aacactgttttgaggttgcagatgg

SEQ ID NO: 75614 - DNA, 25 bp, Artificial
  probe
  misc_feature (1)..(25): SEQ ID NO: 3; WAN024B9E_x_at; Start 48; Stop 72
acactgttttgaggttgcagatgga

SEQ ID NO: 75615 - DNA, 25 bp, Artificial
  probe
  misc_feature (1)..(25): SEQ ID NO: 3; WAN024B9E_x_at; Start 42; Stop 66
ctcaaaacactgttttgaggttgca

SEQ ID NO: 75616 - DNA, 25 bp, Artificial
  probe
  misc_feature (1)..(25): SEQ ID NO: 3; WAN024B9E_x_at; Start 11; Stop 35
aagagcaaactaggaagctagccac

SEQ ID NO: 75617 - DNA, 25 bp, Artificial
  probe
  misc_feature (1)..(25): SEQ ID NO: 3; WAN024B9E_x_at; Start 40; Stop 64
tgctcaaaacactgttttgaggttg

SEQ ID NO: 75618 - DNA, 25 bp, Artificial
  probe
  misc_feature (1)..(25): SEQ ID NO: 3; WAN024B9E_x_at; Start 33; Stop 57
cacaggttgctcaaaacactgtttt

SEQ ID NO: 75619 - DNA, 25 bp, Artificial
  probe
  misc_feature (1)..(25): SEQ ID NO: 3; WAN024B9E_x_at; Start 31; Stop 55
gccacaggttgctcaaaacactgtt

SEQ ID NO: 75620 - DNA, 25 bp, Artificial
  probe
  misc_feature (1)..(25): SEQ ID NO: 3; WAN024B9E_x_at; Start 38; Stop 62
gttgctcaaaacactgttttgaggt

SEQ ID NO: 75621 - DNA, 25 bp, Artificial
  probe
  misc_feature (1)..(25): SEQ ID NO: 3; WAN024B9E_x_at; Start 45; Stop 69
aaaacactgttttgaggttgcagat

SEQ ID NO: 75622 - DNA, 25 bp, Artificial
  probe
  misc_feature (1)..(25): SEQ ID NO: 3; WAN024B9E_x_at; Start 37; Stop 61
ggttgctcaaaacactgttttgagg

SEQ ID NO: 75623 - DNA, 25 bp, Artificial
  probe
  misc_feature (1)..(25): SEQ ID NO: 3; WAN024B9E_x_at; Start 32; Stop 56
ccacaggttgctcaaaacactgttt

SEQ ID NO: 75624 - DNA, 25 bp, Artificial
  probe
  misc_feature (1)..(25): SEQ ID NO: 3; WAN024B9E_x_at; Start 43; Stop 67
tcaaaacactgttttgaggttgcag

SEQ ID NO: 75625 - DNA, 25 bp, Artificial
  probe
  misc_feature (1)..(25): SEQ ID NO: 3; WAN024B9E_x_at; Start 44; Stop 68
caaaacactgttttgaggttgcaga

SEQ ID NO: 75626 - DNA, 25 bp, Artificial
  probe
  misc_feature (1)..(25): SEQ ID NO: 3; WAN024B9E_x_at; Start 46; Stop 70
aaacactgttttgaggttgcagatg

SEQ ID NO: 75627 - DNA, 25 bp, Artificial
  probe
  misc_feature (1)..(25): SEQ ID NO: 3; WAN024B9E_x_at; Start 9; Stop 33
taaagagcaaactaggaagctagcc

SEQ ID NO: 75628 - DNA, 25 bp, Artificial
  probe
  misc_feature (1)..(25): SEQ ID NO: 7626; WAN024B9F_at; Start 37; Stop 61
tcgcttcaaatttcggcccctggac

SEQ ID NO: 75629 - DNA, 25 bp, Artificial
  probe
  misc_feature (1)..(25): SEQ ID NO: 7626; WAN024B9F_at; Start 36; Stop 60
gtcgcttcaaatttcggcccctgga

SEQ ID NO: 75630 - DNA, 25 bp, Artificial
  probe
  misc_feature (1)..(25): SEQ ID NO: 7626; WAN024B9F_at; Start 449; Stop 473
ggaatatcgaaatcctcgatggtac

SEQ ID NO: 75631 - DNA, 25 bp, Artificial
  probe
  misc_feature (1)..(25): SEQ ID NO: 7626; WAN024B9F_at; Start 34; Stop 58
gagtcgcttcaaatttcggcccctg

SEQ ID NO: 75632 - DNA, 25 bp, Artificial
  probe
  misc_feature (1)..(25): SEQ ID NO: 7626; WAN024B9F_at; Start 206; Stop 230
tgattgaagagagtagtgtgcttga

SEQ ID NO: 75633 - DNA, 25 bp, Artificial
  probe
  misc_feature (1)..(25): SEQ ID NO: 7626; WAN024B9F_at; Start 112; Stop 136
caaaaattaggcttgactgttgtcc

SEQ ID NO: 75634 - DNA, 25 bp, Artificial
  probe
  misc_feature (1)..(25): SEQ ID NO: 7626; WAN024B9F_at; Start 29; Stop 53
cagacgagtcgcttcaaatttcggc

SEQ ID NO: 75635 - DNA, 25 bp, Artificial
  probe
  misc_feature (1)..(25): SEQ ID NO: 7626; WAN024B9F_at; Start 544; Stop 568
cgtcaagcaggcgtacagttaaaag

SEQ ID NO: 75636 - DNA, 25 bp, Artificial
  probe
  misc_feature (1)..(25): SEQ ID NO: 7626; WAN024B9F_at; Start 24; Stop 48
gatttcagacgagtcgcttcaaatt

SEQ ID NO: 75637 - DNA, 25 bp, Artificial
  probe
  misc_feature (1)..(25): SEQ ID NO: 7626; WAN024B9F_at; Start 540; Stop 564
cattcgtcaagcaggcgtacagtta

SEQ ID NO: 75638 - DNA, 25 bp, Artificial
  probe
  misc_feature (1)..(25): SEQ ID NO: 7626; WAN024B9F_at; Start 202; Stop 226
catttgattgaagagagtagtgtgc

SEQ ID NO: 75639 - DNA, 25 bp, Artificial
  probe
  misc_feature (1)..(25): SEQ ID NO: 7626; WAN024B9F_at; Start 123; Stop 147
cttgactgttgtcctgattacgcat

SEQ ID NO: 75640 - DNA, 25 bp, Artificial
  probe
  misc_feature (1)..(25): SEQ ID NO: 7626; WAN024B9F_at; Start 115; Stop 139
aaattaggcttgactgttgtcctga

SEQ ID NO: 75641 - DNA, 25 bp, Artificial
  probe
  misc_feature (1)..(25): SEQ ID NO: 7626; WAN024B9F_at; Start 550; Stop 574
gcaggcgtacagttaaaagtattga

SEQ ID NO: 75642 - DNA, 25 bp, Artificial
  probe
  misc_feature (1)..(25): SEQ ID NO: 7626; WAN024B9F_at; Start 447; Stop 471
tgggaatatcgaaatcctcgatggt

SEQ ID NO: 75643 - DNA, 25 bp, Artificial
  probe
  misc_feature (1)..(25): SEQ ID NO: 7626; WAN024B9F_at; Start 62; Stop 86
ccttaagaccaacccaagcagattt

SEQ ID NO: 75644 - DNA, 25 bp, Artificial
  probe
  misc_feature (1)..(25): SEQ ID NO: 7626; WAN024B9F_at; Start 31; Stop 55
gacgagtcgcttcaaatttcggccc

SEQ ID NO: 75645 - DNA, 25 bp, Artificial
  probe
  misc_feature (1)..(25): SEQ ID NO: 7626; WAN024B9F_at; Start 57; Stop 81
tggacccttaagaccaacccaagca

SEQ ID NO: 75646 - DNA, 25 bp, Artificial
  probe
  misc_feature (1)..(25): SEQ ID NO: 7626; WAN024B9F_at; Start 86; Stop 110
ttggcccttggttgcaagatttgaa

SEQ ID NO: 75647 - DNA, 25 bp, Artificial
  probe
  misc_feature (1)..(25): SEQ ID NO: 7626; WAN024B9F_at; Start 65; Stop 89
taagaccaacccaagcagattttgg

SEQ ID NO: 75648 - DNA, 25 bp, Artificial
  probe
  misc_feature (1)..(25): SEQ ID NO: 7626; WAN024B9F_at; Start 545; Stop 569
gtcaagcaggcgtacagttaaaagt

SEQ ID NO: 75649 - DNA, 25 bp, Artificial
  probe
  misc_feature (1)..(25): SEQ ID NO: 7626; WAN024B9F_at; Start 59; Stop 83
gacccttaagaccaacccaagcaga

SEQ ID NO: 75650 - DNA, 25 bp, Artificial
  probe
  misc_feature (1)..(25): SEQ ID NO: 7626; WAN024B9F_at; Start 219; Stop 243
tagtgtgcttgaaatcttctcagac

SEQ ID NO: 75651 - DNA, 25 bp, Artificial
  probe
  misc_feature (1)..(25): SEQ ID NO: 7626; WAN024B9F_at; Start 443; Stop 467
tctatgggaatatcgaaatcctcga

SEQ ID NO: 75652 - DNA, 25 bp, Artificial
  probe
  misc_feature (1)..(25): SEQ ID NO: 7626; WAN024B9F_at; Start 216; Stop 240
gagtagtgtgcttgaaatcttctca

SEQ ID NO: 75653 - DNA, 25 bp, Artificial
  probe
  misc_feature (1)..(25): SEQ ID NO: 7626; WAN024B9F_at; Start 547; Stop 571
caagcaggcgtacagttaaaagtat

SEQ ID NO: 75654 - DNA, 25 bp, Artificial
  probe
  misc_feature (1)..(25): SEQ ID NO: 7626; WAN024B9F_at; Start 119; Stop 143
taggcttgactgttgtcctgattac

SEQ ID NO: 75655 - DNA, 25 bp, Artificial
  probe
  misc_feature (1)..(25): SEQ ID NO: 7626; WAN024B9F_at; Start 28; Stop 52
tcagacgagtcgcttcaaatttcgg

SEQ ID NO: 75656 - DNA, 25 bp, Artificial
  probe
  misc_feature (1)..(25): SEQ ID NO: 7626; WAN024B9F_at; Start 122; Stop 146
gcttgactgttgtcctgattacgca

SEQ ID NO: 75657 - DNA, 25 bp, Artificial
  probe
  misc_feature (1)..(25): SEQ ID NO: 7626; WAN024B9F_at; Start 441; Stop 465
tctctatgggaatatcgaaatcctc

SEQ ID NO: 75658 - DNA, 25 bp, Artificial
  probe
  misc_feature (1)..(25): SEQ ID NO: 7626; WAN024B9F_at; Start 552; Stop 576
aggcgtacagttaaaagtattgaag

SEQ ID NO: 75659 - DNA, 25 bp, Artificial
  probe
  misc_feature (1)..(25): SEQ ID NO: 7626; WAN024B9F_at; Start 445; Stop 469
tatgggaatatcgaaatcctcgatg

SEQ ID NO: 75660 - DNA, 25 bp, Artificial
  probe
  misc_feature (1)..(25): SEQ ID NO: 7626; WAN024B9F_at; Start 211; Stop 235
gaagagagtagtgtgcttgaaatct

SEQ ID NO: 75661 - DNA, 25 bp, Artificial
  probe
  misc_feature (1)..(25): SEQ ID NO: 7626; WAN024B9F_at; Start 81; Stop 105
agattttggcccttggttgcaagat

SEQ ID NO: 75662 - DNA, 25 bp, Artificial
  probe
  misc_feature (1)..(25): SEQ ID NO: 6970; WAN024B9G_at; Start 804; Stop 828
ttctctcggtgtgtctagtagtttc

SEQ ID NO: 75663 - DNA, 25 bp, Artificial
  probe
  misc_feature (1)..(25): SEQ ID NO: 6970; WAN024B9G_at; Start 599; Stop 623
gggacagtctctaccagaccaatac

SEQ ID NO: 75664 - DNA, 25 bp, Artificial
  probe
  misc_feature (1)..(25): SEQ ID NO: 6970; WAN024B9G_at; Start 634; Stop 658
gcaaccattgtcaaactcacgcgaa

SEQ ID NO: 75665 - DNA, 25 bp, Artificial
  probe
  misc_feature (1)..(25): SEQ ID NO: 6970; WAN024B9G_at; Start 292; Stop 316
tcaatagccttgattgttgcctacc

SEQ ID NO: 75666 - DNA, 25 bp, Artificial
  probe
  misc_feature (1)..(25): SEQ ID NO: 6970; WAN024B9G_at; Start 926; Stop 950
gaaaaatccattgttctcggagccg

SEQ ID NO: 75667 - DNA, 25 bp, Artificial
  probe
  misc_feature (1)..(25): SEQ ID NO: 6970; WAN024B9G_at; Start 96; Stop 120
cgcgcccgtttttgcgatttttatg

SEQ ID NO: 75668 - DNA, 25 bp, Artificial
  probe
  misc_feature (1)..(25): SEQ ID NO: 6970; WAN024B9G_at; Start 187; Stop 211
aagaaattgctccagtatgccgtta

SEQ ID NO: 75669 - DNA, 25 bp, Artificial
  probe
  misc_feature (1)..(25): SEQ ID NO: 6970; WAN024B9G_at; Start 192; Stop 216
attgctccagtatgccgttatcttg

SEQ ID NO: 75670 - DNA, 25 bp, Artificial
  probe
  misc_feature (1)..(25): SEQ ID NO: 6970; WAN024B9G_at; Start 234; Stop 258
tatctctcaagtcttcgcagttggg

SEQ ID NO: 75671 - DNA, 25 bp, Artificial
  probe
  misc_feature (1)..(25): SEQ ID NO: 6970; WAN024B9G_at; Start 934; Stop 958
cattgttctcggagccgtctgctgg

SEQ ID NO: 75672 - DNA, 25 bp, Artificial
  probe
  misc_feature (1)..(25): SEQ ID NO: 6970; WAN024B9G_at; Start 576; Stop 600
tgtaaccgccacagctagcgcttgg

SEQ ID NO: 75673 - DNA, 25 bp, Artificial
  probe
  misc_feature (1)..(25): SEQ ID NO: 6970; WAN024B9G_at; Start 717; Stop 741
aaataagcaaggcttacaactgaaa

SEQ ID NO: 75674 - DNA, 25 bp, Artificial
  probe
  misc_feature (1)..(25): SEQ ID NO: 6970; WAN024B9G_at; Start 412; Stop 436
cctgttatccatgctaaggaaaagg

SEQ ID NO: 75675 - DNA, 25 bp, Artificial
  probe
  misc_feature (1)..(25): SEQ ID NO: 6970; WAN024B9G_at; Start 595; Stop 619
gcttgggacagtctctaccagacca

SEQ ID NO: 75676 - DNA, 25 bp, Artificial
  probe
  misc_feature (1)..(25): SEQ ID NO: 6970; WAN024B9G_at; Start 562; Stop 586
aatgatacttcctctgtaaccgcca

SEQ ID NO: 75677 - DNA, 25 bp, Artificial
  probe
  misc_feature (1)..(25): SEQ ID NO: 6970; WAN024B9G_at; Start 624; Stop 648
cctcgaatccgcaaccattgtcaaa

SEQ ID NO: 75678 - DNA, 25 bp, Artificial
  probe
  misc_feature (1)..(25): SEQ ID NO: 6970; WAN024B9G_at; Start 694; Stop 718
tactggcaaagtcgcgagcaaaaaa

SEQ ID NO: 75679 - DNA, 25 bp, Artificial
  probe
  misc_feature (1)..(25): SEQ ID NO: 6970; WAN024B9G_at; Start 580; Stop 604
accgccacagctagcgcttgggaca

SEQ ID NO: 75680 - DNA, 25 bp, Artificial
  probe
  misc_feature (1)..(25): SEQ ID NO: 6970; WAN024B9G_at; Start 297; Stop 321
agccttgattgttgcctacctcttc

SEQ ID NO: 75681 - DNA, 25 bp, Artificial
  probe
  misc_feature (1)..(25): SEQ ID NO: 6970; WAN024B9G_at; Start 551; Stop 575
gaactgcggtcaatgatacttcctc

SEQ ID NO: 75682 - DNA, 25 bp, Artificial
  probe
  misc_feature (1)..(25): SEQ ID NO: 6970; WAN024B9G_at; Start 240; Stop 264
tcaagtcttcgcagttgggcaatct

SEQ ID NO: 75683 - DNA, 25 bp, Artificial
  probe
  misc_feature (1)..(25): SEQ ID NO: 6970; WAN024B9G_at; Start 759; Stop 783
tatccttcacttcatccttgcatcg

SEQ ID NO: 75684 - DNA, 25 bp, Artificial
  probe
  misc_feature (1)..(25): SEQ ID NO: 6970; WAN024B9G_at; Start 404; Stop 428
cgacagcgcctgttatccatgctaa

SEQ ID NO: 75685 - DNA, 25 bp, Artificial
  probe
  misc_feature (1)..(25): SEQ ID NO: 6970; WAN024B9G_at; Start 792; Stop 816
cacccttctgacttctctcggtgtg

SEQ ID NO: 75686 - DNA, 25 bp, Artificial
  probe
  misc_feature (1)..(25): SEQ ID NO: 6970; WAN024B9G_at; Start 852; Stop 876
taaattcctcattatcatggccatg

SEQ ID NO: 75687 - DNA, 25 bp, Artificial
  probe
  misc_feature (1)..(25): SEQ ID NO: 6970; WAN024B9G_at; Start 920; Stop 944
ccagtggaaaaatccattgttctcg

SEQ ID NO: 75688 - DNA, 25 bp, Artificial
  probe
  misc_feature (1)..(25): SEQ ID NO: 6970; WAN024B9G_at; Start 945; Stop 969
gagccgtctgctggattgccatcat

SEQ ID NO: 75689 - DNA, 25 bp, Artificial
  probe
  misc_feature (1)..(25): SEQ ID NO: 6970; WAN024B9G_at; Start 274; Stop 298
gtcatcctttccaccatttcaatag

SEQ ID NO: 75690 - DNA, 25 bp, Artificial
  probe
  misc_feature (1)..(25): SEQ ID NO: 6970; WAN024B9G_at; Start 864; Stop 888
tatcatggccatgagtgccatcggt

SEQ ID NO: 75691 - DNA, 25 bp, Artificial
  probe
  misc_feature (1)..(25): SEQ ID NO: 6970; WAN024B9G_at; Start 647; Stop 671
aactcacgcgaaccctagctatcat

SEQ ID NO: 75692 - DNA, 25 bp, Artificial
  probe
  misc_feature (1)..(25): SEQ ID NO: 6970; WAN024B9G_at; Start 641; Stop 665
ttgtcaaactcacgcgaaccctagc

SEQ ID NO: 75693 - DNA, 25 bp, Artificial
  probe
  misc_feature (1)..(25): SEQ ID NO: 6970; WAN024B9G_at; Start 108; Stop 132
tgcgatttttatgggcatgctccta

SEQ ID NO: 75694 - DNA, 25 bp, Artificial
  probe
  misc_feature (1)..(25): SEQ ID NO: 6970; WAN024B9G_at; Start 36; Stop 60
ggtctgccttctcatttctatcgta

SEQ ID NO: 75695 - DNA, 25 bp, Artificial
  probe
  misc_feature (1)..(25): SEQ ID NO: 6970; WAN024B9G_at; Start 543; Stop 567
ctttgcaggaactgcggtcaatgat

SEQ ID NO: 75696 - DNA, 25 bp, Artificial
  probe
  misc_feature (1)..(25): SEQ ID NO: 6359; WAN024B9H_x_at; Start 6; Stop 30
aattaaagagcaaactaggaagcta

SEQ ID NO: 75697 - DNA, 25 bp, Artificial
  probe
  misc_feature (1)..(25): SEQ ID NO: 6359; WAN024B9H_x_at; Start 32; Stop 56
ccgcaggttgctcaaaacactgttt

SEQ ID NO: 75698 - DNA, 25 bp, Artificial
  probe
  misc_feature (1)..(25): SEQ ID NO: 6359; WAN024B9H_x_at; Start 36; Stop 60
aggttgctcaaaacactgttttgag

SEQ ID NO: 75699 - DNA, 25 bp, Artificial
  probe
  misc_feature (1)..(25): SEQ ID NO: 6359; WAN024B9H_x_at; Start 15; Stop 39
gcaaactaggaagctagccgcaggt

SEQ ID NO: 75700 - DNA, 25 bp, Artificial
  probe
  misc_feature (1)..(25): SEQ ID NO: 6359; WAN024B9H_x_at; Start 16; Stop 40
caaactaggaagctagccgcaggtt

SEQ ID NO: 75701 - DNA, 25 bp, Artificial
  probe
  misc_feature (1)..(25): SEQ ID NO: 6359; WAN024B9H_x_at; Start 41; Stop 65
gctcaaaacactgttttgaggttgc

SEQ ID NO: 75702 - DNA, 25 bp, Artificial
  probe
  misc_feature (1)..(25): SEQ ID NO: 6359; WAN024B9H_x_at; Start 12; Stop 36
agagcaaactaggaagctagccgca

SEQ ID NO: 75703 - DNA, 25 bp, Artificial
  probe
  misc_feature (1)..(25): SEQ ID NO: 6359; WAN024B9H_x_at; Start 1; Stop 25
atgaaaattaaagagcaaactagga

SEQ ID NO: 75704 - DNA, 25 bp, Artificial
  probe
  misc_feature (1)..(25): SEQ ID NO: 6359; WAN024B9H_x_at; Start 10; Stop 34
aaagagcaaactaggaagctagccg

SEQ ID NO: 75705 - DNA, 25 bp, Artificial
  probe
  misc_feature (1)..(25): SEQ ID NO: 6359; WAN024B9H_x_at; Start 7; Stop 31
attaaagagcaaactaggaagctag

SEQ ID NO: 75706 - DNA, 25 bp, Artificial
  probe
  misc_feature (1)..(25): SEQ ID NO: 6359; WAN024B9H_x_at; Start 8; Stop 32
ttaaagagcaaactaggaagctagc

SEQ ID NO: 75707 - DNA, 25 bp, Artificial
  probe
  misc_feature (1)..(25): SEQ ID NO: 6359; WAN024B9H_x_at; Start 35; Stop 59
caggttgctcaaaacactgttttga

SEQ ID NO: 75708 - DNA, 25 bp, Artificial
  probe
  misc_feature (1)..(25): SEQ ID NO: 6359; WAN024B9H_x_at; Start 30; Stop 54
agccgcaggttgctcaaaacactgt

SEQ ID NO: 75709 - DNA, 25 bp, Artificial
  probe
  misc_feature (1)..(25): SEQ ID NO: 6359; WAN024B9H_x_at; Start 13; Stop 37
gagcaaactaggaagctagccgcag

SEQ ID NO: 75710 - DNA, 25 bp, Artificial
  probe
  misc_feature (1)..(25): SEQ ID NO: 6359; WAN024B9H_x_at; Start 39; Stop 63
ttgctcaaaacactgttttgaggtt

SEQ ID NO: 75711 - DNA, 25 bp, Artificial
  probe
  misc_feature (1)..(25): SEQ ID NO: 6359; WAN024B9H_x_at; Start 2; Stop 26
tgaaaattaaagagcaaactaggaa

SEQ ID NO: 75712 - DNA, 25 bp, Artificial
  probe
  misc_feature (1)..(25): SEQ ID NO: 6359; WAN024B9H_x_at; Start 31; Stop 55
gccgcaggttgctcaaaacactgtt

SEQ ID NO: 75713 - DNA, 25 bp, Artificial
  probe
  misc_feature (1)..(25): SEQ ID NO: 6359; WAN024B9H_x_at; Start 42; Stop 66
ctcaaaacactgttttgaggttgca

SEQ ID NO: 75714 - DNA, 25 bp, Artificial
  probe
  misc_feature (1)..(25): SEQ ID NO: 6359; WAN024B9H_x_at; Start 11; Stop 35
aagagcaaactaggaagctagccgc

SEQ ID NO: 75715 - DNA, 25 bp, Artificial
  probe
  misc_feature (1)..(25): SEQ ID NO: 6359; WAN024B9H_x_at; Start 40; Stop 64
tgctcaaaacactgttttgaggttg

SEQ ID NO: 75716 - DNA, 25 bp, Artificial
  probe
  misc_feature (1)..(25): SEQ ID NO: 6359; WAN024B9H_x_at; Start 38; Stop 62
gttgctcaaaacactgttttgaggt

SEQ ID NO: 75717 - DNA, 25 bp, Artificial
  probe
  misc_feature (1)..(25): SEQ ID NO: 6359; WAN024B9H_x_at; Start 45; Stop 69
aaaacactgttttgaggttgcagat

SEQ ID NO: 75718 - DNA, 25 bp, Artificial
  probe
  misc_feature (1)..(25): SEQ ID NO: 6359; WAN024B9H_x_at; Start 37; Stop 61
ggttgctcaaaacactgttttgagg

SEQ ID NO: 75719 - DNA, 25 bp, Artificial
  probe
  misc_feature (1)..(25): SEQ ID NO: 6359; WAN024B9H_x_at; Start 17; Stop 41
aaactaggaagctagccgcaggttg

SEQ ID NO: 75720 - DNA, 25 bp, Artificial
  probe
  misc_feature (1)..(25): SEQ ID NO: 6359; WAN024B9H_x_at; Start 34; Stop 58
gcaggttgctcaaaacactgttttg

SEQ ID NO: 75721 - DNA, 25 bp, Artificial
  probe
  misc_feature (1)..(25): SEQ ID NO: 6359; WAN024B9H_x_at; Start 14; Stop 38
agcaaactaggaagctagccgcagg

SEQ ID NO: 75722 - DNA, 25 bp, Artificial
  probe
  misc_feature (1)..(25): SEQ ID NO: 6359; WAN024B9H_x_at; Start 33; Stop 57
cgcaggttgctcaaaacactgtttt

SEQ ID NO: 75723 - DNA, 25 bp, Artificial
  probe
  misc_feature (1)..(25): SEQ ID NO: 6359; WAN024B9H_x_at; Start 43; Stop 67
tcaaaacactgttttgaggttgcag

SEQ ID NO: 75724 - DNA, 25 bp, Artificial
  probe
  misc_feature (1)..(25): SEQ ID NO: 6359; WAN024B9H_x_at; Start 44; Stop 68
caaaacactgttttgaggttgcaga

SEQ ID NO: 75725 - DNA, 25 bp, Artificial
  probe
  misc_feature (1)..(25): SEQ ID NO: 6359; WAN024B9H_x_at; Start 24; Stop 48
gaagctagccgcaggttgctcaaaa

SEQ ID NO: 75726 - DNA, 25 bp, Artificial
  probe
  misc_feature (1)..(25): SEQ ID NO: 6359; WAN024B9H_x_at; Start 9; Stop 33
taaagagcaaactaggaagctagcc

SEQ ID NO: 75727 - DNA, 25 bp, Artificial
  probe
  misc_feature (1)..(25): SEQ ID NO: 6343; WAN024B9K_x_at; Start 5; Stop 29
aaatcaaagagcaaactagaaagct

SEQ ID NO: 75728 - DNA, 25 bp, Artificial
  probe
  misc_feature (1)..(25): SEQ ID NO: 6343; WAN024B9K_x_at; Start 50; Stop 74
agtgttttgaggttgcagatggaaa

SEQ ID NO: 75729 - DNA, 25 bp, Artificial
  probe
  misc_feature (1)..(25): SEQ ID NO: 6343; WAN024B9K_x_at; Start 32; Stop 56
ccgcaggttgttcaaaacagtgttt

SEQ ID NO: 75730 - DNA, 25 bp, Artificial
  probe
  misc_feature (1)..(25): SEQ ID NO: 6343; WAN024B9K_x_at; Start 6; Stop 30
aatcaaagagcaaactagaaagcta

SEQ ID NO: 75731 - DNA, 25 bp, Artificial
  probe
  misc_feature (1)..(25): SEQ ID NO: 6343; WAN024B9K_x_at; Start 48; Stop 72
acagtgttttgaggttgcagatgga

SEQ ID NO: 75732 - DNA, 25 bp, Artificial
  probe
  misc_feature (1)..(25): SEQ ID NO: 6343; WAN024B9K_x_at; Start 34; Stop 58
gcaggttgttcaaaacagtgttttg

SEQ ID NO: 75733 - DNA, 25 bp, Artificial
  probe
  misc_feature (1)..(25): SEQ ID NO: 6343; WAN024B9K_x_at; Start 36; Stop 60
aggttgttcaaaacagtgttttgag

SEQ ID NO: 75734 - DNA, 25 bp, Artificial
  probe
  misc_feature (1)..(25): SEQ ID NO: 6343; WAN024B9K_x_at; Start 12; Stop 36
agagcaaactagaaagctagccgca

SEQ ID NO: 75735 - DNA, 25 bp, Artificial
  probe
  misc_feature (1)..(25): SEQ ID NO: 6343; WAN024B9K_x_at; Start 49; Stop 73
cagtgttttgaggttgcagatggaa

SEQ ID NO: 75736 - DNA, 25 bp, Artificial
  probe
  misc_feature (1)..(25): SEQ ID NO: 6343; WAN024B9K_x_at; Start 4; Stop 28
aaaatcaaagagcaaactagaaagc

SEQ ID NO: 75737 - DNA, 25 bp, Artificial
  probe
  misc_feature (1)..(25): SEQ ID NO: 6343; WAN024B9K_x_at; Start 10; Stop 34
aaagagcaaactagaaagctagccg

SEQ ID NO: 75738 - DNA, 25 bp, Artificial
  probe
  misc_feature (1)..(25): SEQ ID NO: 6343; WAN024B9K_x_at; Start 8; Stop 32
tcaaagagcaaactagaaagctagc

SEQ ID NO: 75739 - DNA, 25 bp, Artificial
  probe
  misc_feature (1)..(25): SEQ ID NO: 6343; WAN024B9K_x_at; Start 42; Stop 66
ttcaaaacagtgttttgaggttgca

SEQ ID NO: 75740 - DNA, 25 bp, Artificial
  probe
  misc_feature (1)..(25): SEQ ID NO: 6343; WAN024B9K_x_at; Start 35; Stop 59
caggttgttcaaaacagtgttttga

SEQ ID NO: 75741 - DNA, 25 bp, Artificial
  probe
  misc_feature (1)..(25): SEQ ID NO: 6343; WAN024B9K_x_at; Start 13; Stop 37
gagcaaactagaaagctagccgcag

SEQ ID NO: 75742 - DNA, 25 bp, Artificial
  probe
  misc_feature (1)..(25): SEQ ID NO: 6343; WAN024B9K_x_at; Start 31; Stop 55
gccgcaggttgttcaaaacagtgtt

SEQ ID NO: 75743 - DNA, 25 bp, Artificial
  probe
  misc_feature (1)..(25): SEQ ID NO: 6343; WAN024B9K_x_at; Start 51; Stop 75
gtgttttgaggttgcagatggaaac

SEQ ID NO: 75744 - DNA, 25 bp, Artificial
  probe
  misc_feature (1)..(25): SEQ ID NO: 6343; WAN024B9K_x_at; Start 11; Stop 35
aagagcaaactagaaagctagccgc

SEQ ID NO: 75745 - DNA, 25 bp, Artificial
  probe
  misc_feature (1)..(25): SEQ ID NO: 6343; WAN024B9K_x_at; Start 9; Stop 33
caaagagcaaactagaaagctagcc

SEQ ID NO: 75746 - DNA, 25 bp, Artificial
  probe
  misc_feature (1)..(25): SEQ ID NO: 6343; WAN024B9K_x_at; Start 40; Stop 64
tgttcaaaacagtgttttgaggttg

SEQ ID NO: 75747 - DNA, 25 bp, Artificial
  probe
  misc_feature (1)..(25): SEQ ID NO: 6343; WAN024B9K_x_at; Start 45; Stop 69
aaaacagtgttttgaggttgcagat

SEQ ID NO: 75748 - DNA, 25 bp, Artificial
  probe
  misc_feature (1)..(25): SEQ ID NO: 6343; WAN024B9K_x_at; Start 2; Stop 26
tgaaaatcaaagagcaaactagaaa

SEQ ID NO: 75749 - DNA, 25 bp, Artificial
  probe
  misc_feature (1)..(25): SEQ ID NO: 6343; WAN024B9K_x_at; Start 41; Stop 65
gttcaaaacagtgttttgaggttgc

SEQ ID NO: 75750 - DNA, 25 bp, Artificial
  probe
  misc_feature (1)..(25): SEQ ID NO: 6343; WAN024B9K_x_at; Start 33; Stop 57
cgcaggttgttcaaaacagtgtttt

SEQ ID NO: 75751 - DNA, 25 bp, Artificial
  probe
  misc_feature (1)..(25): SEQ ID NO: 6343; WAN024B9K_x_at; Start 43; Stop 67
tcaaaacagtgttttgaggttgcag

SEQ ID NO: 75752 - DNA, 25 bp, Artificial
  probe
  misc_feature (1)..(25): SEQ ID NO: 6343; WAN024B9K_x_at; Start 47; Stop 71
aacagtgttttgaggttgcagatgg

SEQ ID NO: 75753 - DNA, 25 bp, Artificial
  probe
  misc_feature (1)..(25): SEQ ID NO: 6343; WAN024B9K_x_at; Start 24; Stop 48
aaagctagccgcaggttgttcaaaa

SEQ ID NO: 75754 - DNA, 25 bp, Artificial
  probe
  misc_feature (1)..(25): SEQ ID NO: 6343; WAN024B9K_x_at; Start 44; Stop 68
caaaacagtgttttgaggttgcaga

SEQ ID NO: 75755 - DNA, 25 bp, Artificial
  probe
  misc_feature (1)..(25): SEQ ID NO: 6343; WAN024B9K_x_at; Start 7; Stop 31
atcaaagagcaaactagaaagctag

SEQ ID NO: 75756 - DNA, 25 bp, Artificial
  probe
  misc_feature (1)..(25): SEQ ID NO: 6343; WAN024B9K_x_at; Start 1; Stop 25
atgaaaatcaaagagcaaactagaa

SEQ ID NO: 75757 - DNA, 25 bp, Artificial
  probe
  misc_feature (1)..(25): SEQ ID NO: 6343; WAN024B9K_x_at; Start 46; Stop 70
aaacagtgttttgaggttgcagatg

SEQ ID NO: 75758 - DNA, 25 bp, Artificial
  probe
  misc_feature (1)..(25): SEQ ID NO: 6343; WAN024B9K_x_at; Start 3; Stop 27
gaaaatcaaagagcaaactagaaag

SEQ ID NO: 75759 - DNA, 25 bp, Artificial
  probe
  misc_feature (1)..(25): SEQ ID NO: 6346; WAN024B9L_x_at; Start 8; Stop 32
tcaaagagcaaactaggaaactagc

SEQ ID NO: 75760 - DNA, 25 bp, Artificial
  probe
  misc_feature (1)..(25): SEQ ID NO: 6346; WAN024B9L_x_at; Start 6; Stop 30
aatcaaagagcaaactaggaaacta

SEQ ID NO: 75761 - DNA, 25 bp, Artificial
  probe
  misc_feature (1)..(25): SEQ ID NO: 6346; WAN024B9L_x_at; Start 35; Stop 59
caggctgctcaaaacactgttttga

SEQ ID NO: 75762 - DNA, 25 bp, Artificial
  probe
  misc_feature (1)..(25): SEQ ID NO: 6346; WAN024B9L_x_at; Start 30; Stop 54
agctgcaggctgctcaaaacactgt

SEQ ID NO: 75763 - DNA, 25 bp, Artificial
  probe
  misc_feature (1)..(25): SEQ ID NO: 6346; WAN024B9L_x_at; Start 33; Stop 57
tgcaggctgctcaaaacactgtttt

SEQ ID NO: 75764 - DNA, 25 bp, Artificial
  probe
  misc_feature (1)..(25): SEQ ID NO: 6346; WAN024B9L_x_at; Start 41; Stop 65
gctcaaaacactgttttgaggttgc

SEQ ID NO: 75765 - DNA, 25 bp, Artificial
  probe
  misc_feature (1)..(25): SEQ ID NO: 6346; WAN024B9L_x_at; Start 32; Stop 56
ctgcaggctgctcaaaacactgttt

SEQ ID NO: 75766 - DNA, 25 bp, Artificial
  probe
  misc_feature (1)..(25): SEQ ID NO: 6346; WAN024B9L_x_at; Start 51; Stop 75
ctgttttgaggttgcagatggaagc

SEQ ID NO: 75767 - DNA, 25 bp, Artificial
  probe
  misc_feature (1)..(25): SEQ ID NO: 6346; WAN024B9L_x_at; Start 38; Stop 62
gctgctcaaaacactgttttgaggt

SEQ ID NO: 75768 - DNA, 25 bp, Artificial
  probe
  misc_feature (1)..(25): SEQ ID NO: 6346; WAN024B9L_x_at; Start 50; Stop 74
actgttttgaggttgcagatggaag

SEQ ID NO: 75769 - DNA, 25 bp, Artificial
  probe
  misc_feature (1)..(25): SEQ ID NO: 6346; WAN024B9L_x_at; Start 25; Stop 49
aaactagctgcaggctgctcaaaac

SEQ ID NO: 75770 - DNA, 25 bp, Artificial
  probe
  misc_feature (1)..(25): SEQ ID NO: 6346; WAN024B9L_x_at; Start 49; Stop 73
cactgttttgaggttgcagatggaa

SEQ ID NO: 75771 - DNA, 25 bp, Artificial
  probe
  misc_feature (1)..(25): SEQ ID NO: 6346; WAN024B9L_x_at; Start 48; Stop 72
acactgttttgaggttgcagatgga

SEQ ID NO: 75772 - DNA, 25 bp, Artificial
  probe
  misc_feature (1)..(25): SEQ ID NO: 6346; WAN024B9L_x_at; Start 47; Stop 71
aacactgttttgaggttgcagatgg

SEQ ID NO: 75773 - DNA, 25 bp, Artificial
  probe
  misc_feature (1)..(25): SEQ ID NO: 6346; WAN024B9L_x_at; Start 42; Stop 66
ctcaaaacactgttttgaggttgca

SEQ ID NO: 75774 - DNA, 25 bp, Artificial
  probe
  misc_feature (1)..(25): SEQ ID NO: 6346; WAN024B9L_x_at; Start 40; Stop 64
tgctcaaaacactgttttgaggttg

SEQ ID NO: 75775 - DNA, 25 bp, Artificial
  probe
  misc_feature (1)..(25): SEQ ID NO: 6346; WAN024B9L_x_at; Start 34; Stop 58
gcaggctgctcaaaacactgttttg

SEQ ID NO: 75776 - DNA, 25 bp, Artificial
  probe
  misc_feature (1)..(25): SEQ ID NO: 6346; WAN024B9L_x_at; Start 45; Stop 69
aaaacactgttttgaggttgcagat

SEQ ID NO: 75777 - DNA, 25 bp, Artificial
  probe
  misc_feature (1)..(25): SEQ ID NO: 6346; WAN024B9L_x_at; Start 9; Stop 33
caaagagcaaactaggaaactagct

SEQ ID NO: 75778 - DNA, 25 bp, Artificial
  probe
  misc_feature (1)..(25): SEQ ID NO: 6346; WAN024B9L_x_at; Start 27; Stop 51
actagctgcaggctgctcaaaacac

SEQ ID NO: 75779 - DNA, 25 bp, Artificial
  probe
  misc_feature (1)..(25): SEQ ID NO: 6346; WAN024B9L_x_at; Start 39; Stop 63
ctgctcaaaacactgttttgaggtt

SEQ ID NO: 75780 - DNA, 25 bp, Artificial
  probe
  misc_feature (1)..(25): SEQ ID NO: 6346; WAN024B9L_x_at; Start 2; Stop 26
tgaaaatcaaagagcaaactaggaa

SEQ ID NO: 75781 - DNA, 25 bp, Artificial
  probe
  misc_feature (1)..(25): SEQ ID NO: 6346; WAN024B9L_x_at; Start 43; Stop 67
tcaaaacactgttttgaggttgcag

SEQ ID NO: 75782 - DNA, 25 bp, Artificial
  probe
  misc_feature (1)..(25): SEQ ID NO: 6346; WAN024B9L_x_at; Start 36; Stop 60
aggctgctcaaaacactgttttgag

SEQ ID NO: 75783 - DNA, 25 bp, Artificial
  probe
  misc_feature (1)..(25): SEQ ID NO: 6346; WAN024B9L_x_at; Start 31; Stop 55
gctgcaggctgctcaaaacactgtt

SEQ ID NO: 75784 - DNA, 25 bp, Artificial
  probe
  misc_feature (1)..(25): SEQ ID NO: 6346; WAN024B9L_x_at; Start 7; Stop 31
atcaaagagcaaactaggaaactag

SEQ ID NO: 75785 - DNA, 25 bp, Artificial
  probe
  misc_feature (1)..(25): SEQ ID NO: 6346; WAN024B9L_x_at; Start 1; Stop 25
atgaaaatcaaagagcaaactagga

SEQ ID NO: 75786 - DNA, 25 bp, Artificial
  probe
  misc_feature (1)..(25): SEQ ID NO: 6346; WAN024B9L_x_at; Start 44; Stop 68
caaaacactgttttgaggttgcaga

SEQ ID NO: 75787 - DNA, 25 bp, Artificial
  probe
  misc_feature (1)..(25): SEQ ID NO: 6346; WAN024B9L_x_at; Start 37; Stop 61
ggctgctcaaaacactgttttgagg

SEQ ID NO: 75788 - DNA, 25 bp, Artificial
  probe
  misc_feature (1)..(25): SEQ ID NO: 6346; WAN024B9L_x_at; Start 24; Stop 48
gaaactagctgcaggctgctcaaaa

SEQ ID NO: 75789 - DNA, 25 bp, Artificial
  probe
  misc_feature (1)..(25): SEQ ID NO: 6346; WAN024B9L_x_at; Start 46; Stop 70
aaacactgttttgaggttgcagatg

SEQ ID NO: 75790 - DNA, 25 bp, Artificial
  probe
  misc_feature (1)..(25): SEQ ID NO: 6346; WAN024B9L_x_at; Start 3; Stop 27
gaaaatcaaagagcaaactaggaaa

SEQ ID NO: 75791 - DNA, 25 bp, Artificial
  probe
  misc_feature (1)..(25): SEQ ID NO: 6350; WAN024B9N_x_at; Start 6; Stop 30
aatcaaagagcaaactaggaagcta

SEQ ID NO: 75792 - DNA, 25 bp, Artificial
  probe
  misc_feature (1)..(25): SEQ ID NO: 6350; WAN024B9N_x_at; Start 30; Stop 54
agctgcaggctgctcaaaacactgt

SEQ ID NO: 75793 - DNA, 25 bp, Artificial
  probe
  misc_feature (1)..(25): SEQ ID NO: 6350; WAN024B9N_x_at; Start 35; Stop 59
caggctgctcaaaacactgttttga

SEQ ID NO: 75794 - DNA, 25 bp, Artificial
  probe
  misc_feature (1)..(25): SEQ ID NO: 6350; WAN024B9N_x_at; Start 33; Stop 57
tgcaggctgctcaaaacactgtttt

SEQ ID NO: 75795 - DNA, 25 bp, Artificial
  probe
  misc_feature (1)..(25): SEQ ID NO: 6350; WAN024B9N_x_at; Start 41; Stop 65
gctcaaaacactgttttgaggttgt

SEQ ID NO: 75796 - DNA, 25 bp, Artificial
  probe
  misc_feature (1)..(25): SEQ ID NO: 6350; WAN024B9N_x_at; Start 32; Stop 56
ctgcaggctgctcaaaacactgttt

SEQ ID NO: 75797 - DNA, 25 bp, Artificial
  probe
  misc_feature (1)..(25): SEQ ID NO: 6350; WAN024B9N_x_at; Start 4; Stop 28
aaaatcaaagagcaaactaggaagc

SEQ ID NO: 75798 - DNA, 25 bp, Artificial
  probe
  misc_feature (1)..(25): SEQ ID NO: 6350; WAN024B9N_x_at; Start 51; Stop 75
ctgttttgaggttgtagatggaagc

SEQ ID NO: 75799 - DNA, 25 bp, Artificial
  probe
  misc_feature (1)..(25): SEQ ID NO: 6350; WAN024B9N_x_at; Start 38; Stop 62
gctgctcaaaacactgttttgaggt

SEQ ID NO: 75800 - DNA, 25 bp, Artificial
  probe
  misc_feature (1)..(25): SEQ ID NO: 6350; WAN024B9N_x_at; Start 8; Stop 32
tcaaagagcaaactaggaagctagc

SEQ ID NO: 75801 - DNA, 25 bp, Artificial
  probe
  misc_feature (1)..(25): SEQ ID NO: 6350; WAN024B9N_x_at; Start 49; Stop 73
cactgttttgaggttgtagatggaa

SEQ ID NO: 75802 - DNA, 25 bp, Artificial
  probe
  misc_feature (1)..(25): SEQ ID NO: 6350; WAN024B9N_x_at; Start 48; Stop 72
acactgttttgaggttgtagatgga

SEQ ID NO: 75803 - DNA, 25 bp, Artificial
  probe
  misc_feature (1)..(25): SEQ ID NO: 6350; WAN024B9N_x_at; Start 47; Stop 71
aacactgttttgaggttgtagatgg

SEQ ID NO: 75804 - DNA, 25 bp, Artificial
  probe
  misc_feature (1)..(25): SEQ ID NO: 6350; WAN024B9N_x_at; Start 25; Stop 49
aagctagctgcaggctgctcaaaac

SEQ ID NO: 75805 - DNA, 25 bp, Artificial
  probe
  misc_feature (1)..(25): SEQ ID NO: 6350; WAN024B9N_x_at; Start 24; Stop 48
gaagctagctgcaggctgctcaaaa

SEQ ID NO: 75806 - DNA, 25 bp, Artificial
  probe
  misc_feature (1)..(25): SEQ ID NO: 6350; WAN024B9N_x_at; Start 42; Stop 66
ctcaaaacactgttttgaggttgta

SEQ ID NO: 75807 - DNA, 25 bp, Artificial
  probe
  misc_feature (1)..(25): SEQ ID NO: 6350; WAN024B9N_x_at; Start 5; Stop 29
aaatcaaagagcaaactaggaagct

SEQ ID NO: 75808 - DNA, 25 bp, Artificial
  probe
  misc_feature (1)..(25): SEQ ID NO: 6350; WAN024B9N_x_at; Start 40; Stop 64
tgctcaaaacactgttttgaggttg

SEQ ID NO: 75809 - DNA, 25 bp, Artificial
  probe
  misc_feature (1)..(25): SEQ ID NO: 6350; WAN024B9N_x_at; Start 9; Stop 33
caaagagcaaactaggaagctagct

SEQ ID NO: 75810 - DNA, 25 bp, Artificial
  probe
  misc_feature (1)..(25): SEQ ID NO: 6350; WAN024B9N_x_at; Start 34; Stop 58
gcaggctgctcaaaacactgttttg

SEQ ID NO: 75811 - DNA, 25 bp, Artificial
  probe
  misc_feature (1)..(25): SEQ ID NO: 6350; WAN024B9N_x_at; Start 45; Stop 69
aaaacactgttttgaggttgtagat

SEQ ID NO: 75812 - DNA, 25 bp, Artificial
  probe
  misc_feature (1)..(25): SEQ ID NO: 6350; WAN024B9N_x_at; Start 39; Stop 63
ctgctcaaaacactgttttgaggtt

SEQ ID NO: 75813 - DNA, 25 bp, Artificial
  probe
  misc_feature (1)..(25): SEQ ID NO: 6350; WAN024B9N_x_at; Start 2; Stop 26
tgaaaatcaaagagcaaactaggaa

SEQ ID NO: 75814 - DNA, 25 bp, Artificial
  probe
  misc_feature (1)..(25): SEQ ID NO: 6350; WAN024B9N_x_at; Start 43; Stop 67
tcaaaacactgttttgaggttgtag

SEQ ID NO: 75815 - DNA, 25 bp, Artificial
  probe
  misc_feature (1)..(25): SEQ ID NO: 6350; WAN024B9N_x_at; Start 50; Stop 74
actgttttgaggttgtagatggaag

SEQ ID NO: 75816 - DNA, 25 bp, Artificial
  probe
  misc_feature (1)..(25): SEQ ID NO: 6350; WAN024B9N_x_at; Start 31; Stop 55
gctgcaggctgctcaaaacactgtt

SEQ ID NO: 75817 - DNA, 25 bp, Artificial
  probe
  misc_feature (1)..(25): SEQ ID NO: 6350; WAN024B9N_x_at; Start 36; Stop 60
aggctgctcaaaacactgttttgag

SEQ ID NO: 75818 - DNA, 25 bp, Artificial
  probe
  misc_feature (1)..(25): SEQ ID NO: 6350; WAN024B9N_x_at; Start 7; Stop 31
atcaaagagcaaactaggaagctag

SEQ ID NO: 75819 - DNA, 25 bp, Artificial
  probe
  misc_feature (1)..(25): SEQ ID NO: 6350; WAN024B9N_x_at; Start 44; Stop 68
caaaacactgttttgaggttgtaga

SEQ ID NO: 75820 - DNA, 25 bp, Artificial
  probe
  misc_feature (1)..(25): SEQ ID NO: 6350; WAN024B9N_x_at; Start 1; Stop 25
atgaaaatcaaagagcaaactagga

SEQ ID NO: 75821 - DNA, 25 bp, Artificial
  probe
  misc_feature (1)..(25): SEQ ID NO: 6350; WAN024B9N_x_at; Start 37; Stop 61
ggctgctcaaaacactgttttgagg

SEQ ID NO: 75822 - DNA, 25 bp, Artificial
  probe
  misc_feature (1)..(25): SEQ ID NO: 6350; WAN024B9N_x_at; Start 46; Stop 70
aaacactgttttgaggttgtagatg

SEQ ID NO: 75823 - DNA, 25 bp, Artificial
  probe
  misc_feature (1)..(25): SEQ ID NO: 6350; WAN024B9N_x_at; Start 27; Stop 51
gctagctgcaggctgctcaaaacac

SEQ ID NO: 75824 - DNA, 25 bp, Artificial
  probe
  misc_feature (1)..(25): SEQ ID NO: 6350; WAN024B9N_x_at; Start 3; Stop 27
gaaaatcaaagagcaaactaggaag

SEQ ID NO: 75825 - DNA, 25 bp, Artificial
  probe
  misc_feature (1)..(25): SEQ ID NO: 2; WAN024B9O_x_at; Start 6; Stop 30
aatcaaagagcaaactaggaagcta

SEQ ID NO: 75826 - DNA, 25 bp, Artificial
  probe
  misc_feature (1)..(25): SEQ ID NO: 2; WAN024B9O_x_at; Start 33; Stop 57
cgtaggttgctcaaagcacagcttt

SEQ ID NO: 75827 - DNA, 25 bp, Artificial
  probe
  misc_feature (1)..(25): SEQ ID NO: 2; WAN024B9O_x_at; Start 36; Stop 60
aggttgctcaaagcacagctttgag

SEQ ID NO: 75828 - DNA, 25 bp, Artificial
  probe
  misc_feature (1)..(25): SEQ ID NO: 2; WAN024B9O_x_at; Start 15; Stop 39
gcaaactaggaagctagccgtaggt

SEQ ID NO: 75829 - DNA, 25 bp, Artificial
  probe
  misc_feature (1)..(25): SEQ ID NO: 2; WAN024B9O_x_at; Start 59; Stop 83
aggttgcagataaagctgacgtggt

SEQ ID NO: 75830 - DNA, 25 bp, Artificial
  probe
  misc_feature (1)..(25): SEQ ID NO: 2; WAN024B9O_x_at; Start 12; Stop 36
agagcaaactaggaagctagccgta

SEQ ID NO: 75831 - DNA, 25 bp, Artificial
  probe
  misc_feature (1)..(25): SEQ ID NO: 2; WAN024B9O_x_at; Start 4; Stop 28
aaaatcaaagagcaaactaggaagc

SEQ ID NO: 75832 - DNA, 25 bp, Artificial
  probe
  misc_feature (1)..(25): SEQ ID NO: 2; WAN024B9O_x_at; Start 10; Stop 34
aaagagcaaactaggaagctagccg

SEQ ID NO: 75833 - DNA, 25 bp, Artificial
  probe
  misc_feature (1)..(25): SEQ ID NO: 2; WAN024B9O_x_at; Start 8; Stop 32
tcaaagagcaaactaggaagctagc

SEQ ID NO: 75834 - DNA, 25 bp, Artificial
  probe
  misc_feature (1)..(25): SEQ ID NO: 2; WAN024B9O_x_at; Start 31; Stop 55
gccgtaggttgctcaaagcacagct

SEQ ID NO: 75835 - DNA, 25 bp, Artificial
  probe
  misc_feature (1)..(25): SEQ ID NO: 2; WAN024B9O_x_at; Start 39; Stop 63
ttgctcaaagcacagctttgaggtt

SEQ ID NO: 75836 - DNA, 25 bp, Artificial
  probe
  misc_feature (1)..(25): SEQ ID NO: 2; WAN024B9O_x_at; Start 13; Stop 37
gagcaaactaggaagctagccgtag

SEQ ID NO: 75837 - DNA, 25 bp, Artificial
  probe
  misc_feature (1)..(25): SEQ ID NO: 2; WAN024B9O_x_at; Start 38; Stop 62
gttgctcaaagcacagctttgaggt

SEQ ID NO: 75838 - DNA, 25 bp, Artificial
  probe
  misc_feature (1)..(25): SEQ ID NO: 2; WAN024B9O_x_at; Start 30; Stop 54
agccgtaggttgctcaaagcacagc

SEQ ID NO: 75839 - DNA, 25 bp, Artificial
  probe
  misc_feature (1)..(25): SEQ ID NO: 2; WAN024B9O_x_at; Start 60; Stop 84
ggttgcagataaagctgacgtggtt

SEQ ID NO: 75840 - DNA, 25 bp, Artificial
  probe
  misc_feature (1)..(25): SEQ ID NO: 2; WAN024B9O_x_at; Start 11; Stop 35
aagagcaaactaggaagctagccgt

SEQ ID NO: 75841 - DNA, 25 bp, Artificial
  probe
  misc_feature (1)..(25): SEQ ID NO: 2; WAN024B9O_x_at; Start 42; Stop 66
ctcaaagcacagctttgaggttgca

SEQ ID NO: 75842 - DNA, 25 bp, Artificial
  probe
  misc_feature (1)..(25): SEQ ID NO: 2; WAN024B9O_x_at; Start 9; Stop 33
caaagagcaaactaggaagctagcc

SEQ ID NO: 75843 - DNA, 25 bp, Artificial
  probe
  misc_feature (1)..(25): SEQ ID NO: 2; WAN024B9O_x_at; Start 37; Stop 61
ggttgctcaaagcacagctttgagg

SEQ ID NO: 75844 - DNA, 25 bp, Artificial
  probe
  misc_feature (1)..(25): SEQ ID NO: 2; WAN024B9O_x_at; Start 34; Stop 58
gtaggttgctcaaagcacagctttg

SEQ ID NO: 75845 - DNA, 25 bp, Artificial
  probe
  misc_feature (1)..(25): SEQ ID NO: 2; WAN024B9O_x_at; Start 35; Stop 59
taggttgctcaaagcacagctttga

SEQ ID NO: 75846 - DNA, 25 bp, Artificial
  probe
  misc_feature (1)..(25): SEQ ID NO: 2; WAN024B9O_x_at; Start 2; Stop 26
tgaaaatcaaagagcaaactaggaa

SEQ ID NO: 75847 - DNA, 25 bp, Artificial
  probe
  misc_feature (1)..(25): SEQ ID NO: 2; WAN024B9O_x_at; Start 14; Stop 38
agcaaactaggaagctagccgtagg

SEQ ID NO: 75848 - DNA, 25 bp, Artificial
  probe
  misc_feature (1)..(25): SEQ ID NO: 2; WAN024B9O_x_at; Start 7; Stop 31
atcaaagagcaaactaggaagctag

SEQ ID NO: 75849 - DNA, 25 bp, Artificial
  probe
  misc_feature (1)..(25): SEQ ID NO: 2; WAN024B9O_x_at; Start 5; Stop 29
aaatcaaagagcaaactaggaagct

SEQ ID NO: 75850 - DNA, 25 bp, Artificial
  probe
  misc_feature (1)..(25): SEQ ID NO: 2; WAN024B9O_x_at; Start 1; Stop 25
atgaaaatcaaagagcaaactagga

SEQ ID NO: 75851 - DNA, 25 bp, Artificial
  probe
  misc_feature (1)..(25): SEQ ID NO: 2; WAN024B9O_x_at; Start 44; Stop 68
caaagcacagctttgaggttgcaga

SEQ ID NO: 75852 - DNA, 25 bp, Artificial
  probe
  misc_feature (1)..(25): SEQ ID NO: 2; WAN024B9O_x_at; Start 32; Stop 56
ccgtaggttgctcaaagcacagctt

SEQ ID NO: 75853 - DNA, 25 bp, Artificial
  probe
  misc_feature (1)..(25): SEQ ID NO: 2; WAN024B9O_x_at; Start 43; Stop 67
tcaaagcacagctttgaggttgcag

SEQ ID NO: 75854 - DNA, 25 bp, Artificial
  probe
  misc_feature (1)..(25): SEQ ID NO: 2; WAN024B9O_x_at; Start 3; Stop 27
gaaaatcaaagagcaaactaggaag

SEQ ID NO: 75855 - DNA, 25 bp, Artificial
  probe
  misc_feature (1)..(25): SEQ ID NO: 19; WAN024B9P_x_at; Start 11; Stop 35
cttcgtcagttctatctgcaacctc

SEQ ID NO: 75856 - DNA, 25 bp, Artificial
  probe
  misc_feature (1)..(25): SEQ ID NO: 19; WAN024B9P_x_at; Start 10; Stop 34
acttcgtcagttctatctgcaacct

SEQ ID NO: 75857 - DNA, 25 bp, Artificial
  probe
  misc_feature (1)..(25): SEQ ID NO: 19; WAN024B9P_x_at; Start 6; Stop 30
actgacttcgtcagttctatctgca

SEQ ID NO: 75858 - DNA, 25 bp, Artificial
  probe
  misc_feature (1)..(25): SEQ ID NO: 19; WAN024B9P_x_at; Start 8; Stop 32
tgacttcgtcagttctatctgcaac

SEQ ID NO: 75859 - DNA, 25 bp, Artificial
  probe
  misc_feature (1)..(25): SEQ ID NO: 19; WAN024B9P_x_at; Start 9; Stop 33
gacttcgtcagttctatctgcaacc

SEQ ID NO: 75860 - DNA, 25 bp, Artificial
  probe
  misc_feature (1)..(25): SEQ ID NO: 19; WAN024B9P_x_at; Start 32; Stop 56
cctcaaaacagtgttttgagcagcc

SEQ ID NO: 75861 - DNA, 25 bp, Artificial
  probe
  misc_feature (1)..(25): SEQ ID NO: 19; WAN024B9P_x_at; Start 19; Stop 43
gttctatctgcaacctcaaaacagt

SEQ ID NO: 75862 - DNA, 25 bp, Artificial
  probe
  misc_feature (1)..(25): SEQ ID NO: 19; WAN024B9P_x_at; Start 30; Stop 54
aacctcaaaacagtgttttgagcag

SEQ ID NO: 75863 - DNA, 25 bp, Artificial
  probe
  misc_feature (1)..(25): SEQ ID NO: 19; WAN024B9P_x_at; Start 13; Stop 37
tcgtcagttctatctgcaacctcaa

SEQ ID NO: 75864 - DNA, 25 bp, Artificial
  probe
  misc_feature (1)..(25): SEQ ID NO: 19; WAN024B9P_x_at; Start 28; Stop 52
gcaacctcaaaacagtgttttgagc

SEQ ID NO: 75865 - DNA, 25 bp, Artificial
  probe
  misc_feature (1)..(25): SEQ ID NO: 19; WAN024B9P_x_at; Start 27; Stop 51
tgcaacctcaaaacagtgttttgag

SEQ ID NO: 75866 - DNA, 25 bp, Artificial
  probe
  misc_feature (1)..(25): SEQ ID NO: 19; WAN024B9P_x_at; Start 16; Stop 40
tcagttctatctgcaacctcaaaac

SEQ ID NO: 75867 - DNA, 25 bp, Artificial
  probe
  misc_feature (1)..(25): SEQ ID NO: 19; WAN024B9P_x_at; Start 25; Stop 49
tctgcaacctcaaaacagtgttttg

SEQ ID NO: 75868 - DNA, 25 bp, Artificial
  probe
  misc_feature (1)..(25): SEQ ID NO: 19; WAN024B9P_x_at; Start 18; Stop 42
agttctatctgcaacctcaaaacag

SEQ ID NO: 75869 - DNA, 25 bp, Artificial
  probe
  misc_feature (1)..(25): SEQ ID NO: 19; WAN024B9P_x_at; Start 20; Stop 44
ttctatctgcaacctcaaaacagtg

SEQ ID NO: 75870 - DNA, 25 bp, Artificial
  probe
  misc_feature (1)..(25): SEQ ID NO: 19; WAN024B9P_x_at; Start 17; Stop 41
cagttctatctgcaacctcaaaaca

SEQ ID NO: 75871 - DNA, 25 bp, Artificial
  probe
  misc_feature (1)..(25): SEQ ID NO: 19; WAN024B9P_x_at; Start 26; Stop 50
ctgcaacctcaaaacagtgttttga

SEQ ID NO: 75872 - DNA, 25 bp, Artificial
  probe
  misc_feature (1)..(25): SEQ ID NO: 19; WAN024B9P_x_at; Start 12; Stop 36
ttcgtcagttctatctgcaacctca

SEQ ID NO: 75873 - DNA, 25 bp, Artificial
  probe
  misc_feature (1)..(25): SEQ ID NO: 19; WAN024B9P_x_at; Start 23; Stop 47
tatctgcaacctcaaaacagtgttt

SEQ ID NO: 75874 - DNA, 25 bp, Artificial
  probe
  misc_feature (1)..(25): SEQ ID NO: 19; WAN024B9P_x_at; Start 1; Stop 25
atgttactgacttcgtcagttctat

SEQ ID NO: 75875 - DNA, 25 bp, Artificial
  probe
  misc_feature (1)..(25): SEQ ID NO: 19; WAN024B9P_x_at; Start 21; Stop 45
tctatctgcaacctcaaaacagtgt

SEQ ID NO: 75876 - DNA, 25 bp, Artificial
  probe
  misc_feature (1)..(25): SEQ ID NO: 19; WAN024B9P_x_at; Start 7; Stop 31
ctgacttcgtcagttctatctgcaa

SEQ ID NO: 75877 - DNA, 25 bp, Artificial
  probe
  misc_feature (1)..(25): SEQ ID NO: 19; WAN024B9P_x_at; Start 33; Stop 57
ctcaaaacagtgttttgagcagccc

SEQ ID NO: 75878 - DNA, 25 bp, Artificial
  probe
  misc_feature (1)..(25): SEQ ID NO: 19; WAN024B9P_x_at; Start 22; Stop 46
ctatctgcaacctcaaaacagtgtt

SEQ ID NO: 75879 - DNA, 25 bp, Artificial
  probe
  misc_feature (1)..(25): SEQ ID NO: 19; WAN024B9P_x_at; Start 14; Stop 38
cgtcagttctatctgcaacctcaaa

SEQ ID NO: 75880 - DNA, 25 bp, Artificial
  probe
  misc_feature (1)..(25): SEQ ID NO: 19; WAN024B9P_x_at; Start 29; Stop 53
caacctcaaaacagtgttttgagca

SEQ ID NO: 75881 - DNA, 25 bp, Artificial
  probe
  misc_feature (1)..(25): SEQ ID NO: 19; WAN024B9P_x_at; Start 36; Stop 60
aaaacagtgttttgagcagcccgta

SEQ ID NO: 75882 - DNA, 25 bp, Artificial
  probe
  misc_feature (1)..(25): SEQ ID NO: 19; WAN024B9P_x_at; Start 24; Stop 48
atctgcaacctcaaaacagtgtttt

SEQ ID NO: 75883 - DNA, 25 bp, Artificial
  probe
  misc_feature (1)..(25): SEQ ID NO: 19; WAN024B9P_x_at; Start 3; Stop 27
gttactgacttcgtcagttctatct

SEQ ID NO: 75884 - DNA, 25 bp, Artificial
  probe
  misc_feature (1)..(25): SEQ ID NO: 19; WAN024B9P_x_at; Start 34; Stop 58
tcaaaacagtgttttgagcagcccg

SEQ ID NO: 75885 - DNA, 25 bp, Artificial
  probe
  misc_feature (1)..(25): SEQ ID NO: 19; WAN024B9P_x_at; Start 2; Stop 26
tgttactgacttcgtcagttctatc

SEQ ID NO: 75886 - DNA, 25 bp, Artificial
  probe
  misc_feature (1)..(25): SEQ ID NO: 19; WAN024B9P_x_at; Start 31; Stop 55
acctcaaaacagtgttttgagcagc

SEQ ID NO: 75887 - DNA, 25 bp, Artificial
  probe
  misc_feature (1)..(25): SEQ ID NO: 19; WAN024B9P_x_at; Start 35; Stop 59
caaaacagtgttttgagcagcccgt

SEQ ID NO: 75888 - DNA, 25 bp, Artificial
  probe
  misc_feature (1)..(25): SEQ ID NO: 19; WAN024B9P_x_at; Start 15; Stop 39
gtcagttctatctgcaacctcaaaa

SEQ ID NO: 75889 - DNA, 25 bp, Artificial
  probe
  misc_feature (1)..(25): SEQ ID NO: 7360; WAN024B9R_x_at; Start 18; Stop 42
gtgctttgagcaacctacggctagc

SEQ ID NO: 75890 - DNA, 25 bp, Artificial
  probe
  misc_feature (1)..(25): SEQ ID NO: 7360; WAN024B9R_x_at; Start 41; Stop 65
gcttcctagtttgctctttgatttt

SEQ ID NO: 75891 - DNA, 25 bp, Artificial
  probe
  misc_feature (1)..(25): SEQ ID NO: 7360; WAN024B9R_x_at; Start 24; Stop 48
tgagcaacctacggctagcttccta

SEQ ID NO: 75892 - DNA, 25 bp, Artificial
  probe
  misc_feature (1)..(25): SEQ ID NO: 7360; WAN024B9R_x_at; Start 30; Stop 54
acctacggctagcttcctagtttgc

SEQ ID NO: 75893 - DNA, 25 bp, Artificial
  probe
  misc_feature (1)..(25): SEQ ID NO: 7360; WAN024B9R_x_at; Start 36; Stop 60
ggctagcttcctagtttgctctttg

SEQ ID NO: 75894 - DNA, 25 bp, Artificial
  probe
  misc_feature (1)..(25): SEQ ID NO: 7360; WAN024B9R_x_at; Start 14; Stop 38
agctgtgctttgagcaacctacggc

SEQ ID NO: 75895 - DNA, 25 bp, Artificial
  probe
  misc_feature (1)..(25): SEQ ID NO: 7360; WAN024B9R_x_at; Start 16; Stop 40
ctgtgctttgagcaacctacggcta

SEQ ID NO: 75896 - DNA, 25 bp, Artificial
  probe
  misc_feature (1)..(25): SEQ ID NO: 7360; WAN024B9R_x_at; Start 38; Stop 62
ctagcttcctagtttgctctttgat

SEQ ID NO: 75897 - DNA, 25 bp, Artificial
  probe
  misc_feature (1)..(25): SEQ ID NO: 7360; WAN024B9R_x_at; Start 45; Stop 69
cctagtttgctctttgattttcatt

SEQ ID NO: 75898 - DNA, 25 bp, Artificial
  probe
  misc_feature (1)..(25): SEQ ID NO: 7360; WAN024B9R_x_at; Start 17; Stop 41
tgtgctttgagcaacctacggctag

SEQ ID NO: 75899 - DNA, 25 bp, Artificial
  probe
  misc_feature (1)..(25): SEQ ID NO: 7360; WAN024B9R_x_at; Start 42; Stop 66
cttcctagtttgctctttgattttc

SEQ ID NO: 75900 - DNA, 25 bp, Artificial
  probe
  misc_feature (1)..(25): SEQ ID NO: 7360; WAN024B9R_x_at; Start 33; Stop 57
tacggctagcttcctagtttgctct

SEQ ID NO: 75901 - DNA, 25 bp, Artificial
  probe
  misc_feature (1)..(25): SEQ ID NO: 7360; WAN024B9R_x_at; Start 32; Stop 56
ctacggctagcttcctagtttgctc

SEQ ID NO: 75902 - DNA, 25 bp, Artificial
  probe
  misc_feature (1)..(25): SEQ ID NO: 7360; WAN024B9R_x_at; Start 19; Stop 43
tgctttgagcaacctacggctagct

SEQ ID NO: 75903 - DNA, 25 bp, Artificial
  probe
  misc_feature (1)..(25): SEQ ID NO: 7360; WAN024B9R_x_at; Start 27; Stop 51
gcaacctacggctagcttcctagtt

SEQ ID NO: 75904 - DNA, 25 bp, Artificial
  probe
  misc_feature (1)..(25): SEQ ID NO: 7360; WAN024B9R_x_at; Start 34; Stop 58
acggctagcttcctagtttgctctt

SEQ ID NO: 75905 - DNA, 25 bp, Artificial
  probe
  misc_feature (1)..(25): SEQ ID NO: 7360; WAN024B9R_x_at; Start 23; Stop 47
ttgagcaacctacggctagcttcct

SEQ ID NO: 75906 - DNA, 25 bp, Artificial
  probe
  misc_feature (1)..(25): SEQ ID NO: 7360; WAN024B9R_x_at; Start 40; Stop 64
agcttcctagtttgctctttgattt

SEQ ID NO: 75907 - DNA, 25 bp, Artificial
  probe
  misc_feature (1)..(25): SEQ ID NO: 7360; WAN024B9R_x_at; Start 37; Stop 61
gctagcttcctagtttgctctttga

SEQ ID NO: 75908 - DNA, 25 bp, Artificial
  probe
  misc_feature (1)..(25): SEQ ID NO: 7360; WAN024B9R_x_at; Start 26; Stop 50
agcaacctacggctagcttcctagt

SEQ ID NO: 75909 - DNA, 25 bp, Artificial
  probe
  misc_feature (1)..(25): SEQ ID NO: 7360; WAN024B9R_x_at; Start 22; Stop 46
tttgagcaacctacggctagcttcc

SEQ ID NO: 75910 - DNA, 25 bp, Artificial
  probe
  misc_feature (1)..(25): SEQ ID NO: 7360; WAN024B9R_x_at; Start 20; Stop 44
gctttgagcaacctacggctagctt

SEQ ID NO: 75911 - DNA, 25 bp, Artificial
  probe
  misc_feature (1)..(25): SEQ ID NO: 7360; WAN024B9R_x_at; Start 28; Stop 52
caacctacggctagcttcctagttt

SEQ ID NO: 75912 - DNA, 25 bp, Artificial
  probe
  misc_feature (1)..(25): SEQ ID NO: 7360; WAN024B9R_x_at; Start 35; Stop 59
cggctagcttcctagtttgctcttt

SEQ ID NO: 75913 - DNA, 25 bp, Artificial
  probe
  misc_feature (1)..(25): SEQ ID NO: 7360; WAN024B9R_x_at; Start 29; Stop 53
aacctacggctagcttcctagtttg

SEQ ID NO: 75914 - DNA, 25 bp, Artificial
  probe
  misc_feature (1)..(25): SEQ ID NO: 7360; WAN024B9R_x_at; Start 39; Stop 63
tagcttcctagtttgctctttgatt

SEQ ID NO: 75915 - DNA, 25 bp, Artificial
  probe
  misc_feature (1)..(25): SEQ ID NO: 7360; WAN024B9R_x_at; Start 31; Stop 55
cctacggctagcttcctagtttgct

SEQ ID NO: 75916 - DNA, 25 bp, Artificial
  probe
  misc_feature (1)..(25): SEQ ID NO: 7360; WAN024B9R_x_at; Start 44; Stop 68
tcctagtttgctctttgattttcat

SEQ ID NO: 75917 - DNA, 25 bp, Artificial
  probe
  misc_feature (1)..(25): SEQ ID NO: 7360; WAN024B9R_x_at; Start 13; Stop 37
aagctgtgctttgagcaacctacgg

SEQ ID NO: 75918 - DNA, 25 bp, Artificial
  probe
  misc_feature (1)..(25): SEQ ID NO: 7360; WAN024B9R_x_at; Start 12; Stop 36
aaagctgtgctttgagcaacctacg

SEQ ID NO: 75919 - DNA, 25 bp, Artificial
  probe
  misc_feature (1)..(25): SEQ ID NO: 7360; WAN024B9R_x_at; Start 25; Stop 49
gagcaacctacggctagcttcctag

SEQ ID NO: 75920 - DNA, 25 bp, Artificial
  probe
  misc_feature (1)..(25): SEQ ID NO: 7360; WAN024B9R_x_at; Start 43; Stop 67
ttcctagtttgctctttgattttca

SEQ ID NO: 75921 - DNA, 25 bp, Artificial
  probe
  misc_feature (1)..(25): SEQ ID NO: 7360; WAN024B9R_x_at; Start 21; Stop 45
ctttgagcaacctacggctagcttc

SEQ ID NO: 75922 - DNA, 25 bp, Artificial
  probe
  misc_feature (1)..(25): SEQ ID NO: 7360; WAN024B9R_x_at; Start 15; Stop 39
gctgtgctttgagcaacctacggct

SEQ ID NO: 75923 - DNA, 25 bp, Artificial
  probe
  misc_feature (1)..(25): SEQ ID NO: 42; WAN024B9S_at; Start 12; Stop 36
tttcttttctatctatttatactca

SEQ ID NO: 75924 - DNA, 25 bp, Artificial
  probe
  misc_feature (1)..(25): SEQ ID NO: 42; WAN024B9S_at; Start 6; Stop 30
caagattttcttttctatctattta

SEQ ID NO: 75925 - DNA, 25 bp, Artificial
  probe
  misc_feature (1)..(25): SEQ ID NO: 42; WAN024B9S_at; Start 5; Stop 29
acaagattttcttttctatctattt

SEQ ID NO: 75926 - DNA, 25 bp, Artificial
  probe
  misc_feature (1)..(25): SEQ ID NO: 42; WAN024B9S_at; Start 3; Stop 27
gtacaagattttcttttctatctat

SEQ ID NO: 75927 - DNA, 25 bp, Artificial
  probe
  misc_feature (1)..(25): SEQ ID NO: 42; WAN024B9S_at; Start 16; Stop 40
ttttctatctatttatactcaatga

SEQ ID NO: 75928 - DNA, 25 bp, Artificial
  probe
  misc_feature (1)..(25): SEQ ID NO: 42; WAN024B9S_at; Start 9; Stop 33
gattttcttttctatctatttatac

SEQ ID NO: 75929 - DNA, 25 bp, Artificial
  probe
  misc_feature (1)..(25): SEQ ID NO: 42; WAN024B9S_at; Start 2; Stop 26
tgtacaagattttcttttctatcta

SEQ ID NO: 75930 - DNA, 25 bp, Artificial
  probe
  misc_feature (1)..(25): SEQ ID NO: 42; WAN024B9S_at; Start 1; Stop 25
ttgtacaagattttcttttctatct

SEQ ID NO: 75931 - DNA, 25 bp, Artificial
  probe
  misc_feature (1)..(25): SEQ ID NO: 42; WAN024B9S_at; Start 14; Stop 38
tcttttctatctatttatactcaat

SEQ ID NO: 75932 - DNA, 25 bp, Artificial
  probe
  misc_feature (1)..(25): SEQ ID NO: 42; WAN024B9S_at; Start 13; Stop 37
ttcttttctatctatttatactcaa

SEQ ID NO: 75933 - DNA, 25 bp, Artificial
  probe
  misc_feature (1)..(25): SEQ ID NO: 42; WAN024B9S_at; Start 15; Stop 39
cttttctatctatttatactcaatg

SEQ ID NO: 75934 - DNA, 25 bp, Artificial
  probe
  misc_feature (1)..(25): SEQ ID NO: 42; WAN024B9S_at; Start 4; Stop 28
tacaagattttcttttctatctatt

SEQ ID NO: 75935 - DNA, 25 bp, Artificial
  probe
  misc_feature (1)..(25): SEQ ID NO: 7132; WAN024B9T_x_at; Start 3; Stop 27
ggacttcttagcagtctttccaaca

SEQ ID NO: 75936 - DNA, 25 bp, Artificial
  probe
  misc_feature (1)..(25): SEQ ID NO: 7132; WAN024B9T_x_at; Start 75; Stop 99
tggagtagtcttgattgccgtcttg

SEQ ID NO: 75937 - DNA, 25 bp, Artificial
  probe
  misc_feature (1)..(25): SEQ ID NO: 7132; WAN024B9T_x_at; Start 13; Stop 37
gcagtctttccaacagcttgggtag

SEQ ID NO: 75938 - DNA, 25 bp, Artificial
  probe
  misc_feature (1)..(25): SEQ ID NO: 7132; WAN024B9T_x_at; Start 48; Stop 72
ccgcaatctagtcggtacggttctc

SEQ ID NO: 75939 - DNA, 25 bp, Artificial
  probe
  misc_feature (1)..(25): SEQ ID NO: 7132; WAN024B9T_x_at; Start 35; Stop 59
tagcttttcgctaccgcaatctagt

SEQ ID NO: 75940 - DNA, 25 bp, Artificial
  probe
  misc_feature (1)..(25): SEQ ID NO: 7132; WAN024B9T_x_at; Start 46; Stop 70
taccgcaatctagtcggtacggttc

SEQ ID NO: 75941 - DNA, 25 bp, Artificial
  probe
  misc_feature (1)..(25): SEQ ID NO: 7132; WAN024B9T_x_at; Start 65; Stop 89
cggttctctttggagtagtcttgat

SEQ ID NO: 75942 - DNA, 25 bp, Artificial
  probe
  misc_feature (1)..(25): SEQ ID NO: 7132; WAN024B9T_x_at; Start 82; Stop 106
gtcttgattgccgtcttgcgtttgg

SEQ ID NO: 75943 - DNA, 25 bp, Artificial
  probe
  misc_feature (1)..(25): SEQ ID NO: 7132; WAN024B9T_x_at; Start 28; Stop 52
gcttgggtagcttttcgctaccgca

SEQ ID NO: 75944 - DNA, 25 bp, Artificial
  probe
  misc_feature (1)..(25): SEQ ID NO: 7132; WAN024B9T_x_at; Start 8; Stop 32
tcttagcagtctttccaacagcttg

SEQ ID NO: 75945 - DNA, 25 bp, Artificial
  probe
  misc_feature (1)..(25): SEQ ID NO: 7132; WAN024B9T_x_at; Start 31; Stop 55
tgggtagcttttcgctaccgcaatc

SEQ ID NO: 75946 - DNA, 25 bp, Artificial
  probe
  misc_feature (1)..(25): SEQ ID NO: 7132; WAN024B9T_x_at; Start 23; Stop 47
caacagcttgggtagcttttcgcta

SEQ ID NO: 75947 - DNA, 25 bp, Artificial
  probe
  misc_feature (1)..(25): SEQ ID NO: 7132; WAN024B9T_x_at; Start 24; Stop 48
aacagcttgggtagcttttcgctac

SEQ ID NO: 75948 - DNA, 25 bp, Artificial
  probe
  misc_feature (1)..(25): SEQ ID NO: 7132; WAN024B9T_x_at; Start 84; Stop 108
cttgattgccgtcttgcgtttggtc

SEQ ID NO: 75949 - DNA, 25 bp, Artificial
  probe
  misc_feature (1)..(25): SEQ ID NO: 7132; WAN024B9T_x_at; Start 11; Stop 35
tagcagtctttccaacagcttgggt

SEQ ID NO: 75950 - DNA, 25 bp, Artificial
  probe
  misc_feature (1)..(25): SEQ ID NO: 7132; WAN024B9T_x_at; Start 44; Stop 68
gctaccgcaatctagtcggtacggt

SEQ ID NO: 75951 - DNA, 25 bp, Artificial
  probe
  misc_feature (1)..(25): SEQ ID NO: 7132; WAN024B9T_x_at; Start 14; Stop 38
cagtctttccaacagcttgggtagc

SEQ ID NO: 75952 - DNA, 25 bp, Artificial
  probe
  misc_feature (1)..(25): SEQ ID NO: 7132; WAN024B9T_x_at; Start 26; Stop 50
cagcttgggtagcttttcgctaccg

SEQ ID NO: 75953 - DNA, 25 bp, Artificial
  probe
  misc_feature (1)..(25): SEQ ID NO: 7132; WAN024B9T_x_at; Start 63; Stop 87
tacggttctctttggagtagtcttg

SEQ ID NO: 75954 - DNA, 25 bp, Artificial
  probe
  misc_feature (1)..(25): SEQ ID NO: 7132; WAN024B9T_x_at; Start 22; Stop 46
ccaacagcttgggtagcttttcgct

SEQ ID NO: 75955 - DNA, 25 bp, Artificial
  probe
  misc_feature (1)..(25): SEQ ID NO: 7132; WAN024B9T_x_at; Start 39; Stop 63
ttttcgctaccgcaatctagtcggt

SEQ ID NO: 75956 - DNA, 25 bp, Artificial
  probe
  misc_feature (1)..(25): SEQ ID NO: 7132; WAN024B9T_x_at; Start 20; Stop 44
ttccaacagcttgggtagcttttcg

SEQ ID NO: 75957 - DNA, 25 bp, Artificial
  probe
  misc_feature (1)..(25): SEQ ID NO: 7132; WAN024B9T_x_at; Start 72; Stop 96
ctttggagtagtcttgattgccgtc

SEQ ID NO: 75958 - DNA, 25 bp, Artificial
  probe
  misc_feature (1)..(25): SEQ ID NO: 7132; WAN024B9T_x_at; Start 73; Stop 97
tttggagtagtcttgattgccgtct

SEQ ID NO: 75959 - DNA, 25 bp, Artificial
  probe
  misc_feature (1)..(25): SEQ ID NO: 7132; WAN024B9T_x_at; Start 42; Stop 66
tcgctaccgcaatctagtcggtacg

SEQ ID NO: 75960 - DNA, 25 bp, Artificial
  probe
  misc_feature (1)..(25): SEQ ID NO: 7132; WAN024B9T_x_at; Start 69; Stop 93
tctctttggagtagtcttgattgcc

SEQ ID NO: 75961 - DNA, 25 bp, Artificial
  probe
  misc_feature (1)..(25): SEQ ID NO: 7132; WAN024B9T_x_at; Start 5; Stop 29
acttcttagcagtctttccaacagc

SEQ ID NO: 75962 - DNA, 25 bp, Artificial
  probe
  misc_feature (1)..(25): SEQ ID NO: 7132; WAN024B9T_x_at; Start 87; Stop 111
gattgccgtcttgcgtttggtcttt

SEQ ID NO: 75963 - DNA, 25 bp, Artificial
  probe
  misc_feature (1)..(25): SEQ ID NO: 7132; WAN024B9T_x_at; Start 36; Stop 60
agcttttcgctaccgcaatctagtc

SEQ ID NO: 75964 - DNA, 25 bp, Artificial
  probe
  misc_feature (1)..(25): SEQ ID NO: 7132; WAN024B9T_x_at; Start 77; Stop 101
gagtagtcttgattgccgtcttgcg

SEQ ID NO: 75965 - DNA, 25 bp, Artificial
  probe
  misc_feature (1)..(25): SEQ ID NO: 7132; WAN024B9T_x_at; Start 79; Stop 103
gtagtcttgattgccgtcttgcgtt

SEQ ID NO: 75966 - DNA, 25 bp, Artificial
  probe
  misc_feature (1)..(25): SEQ ID NO: 7132; WAN024B9T_x_at; Start 10; Stop 34
ttagcagtctttccaacagcttggg

SEQ ID NO: 75967 - DNA, 25 bp, Artificial
  probe
  misc_feature (1)..(25): SEQ ID NO: 7132; WAN024B9T_x_at; Start 70; Stop 94
ctctttggagtagtcttgattgccg

SEQ ID NO: 75968 - DNA, 25 bp, Artificial
  probe
  misc_feature (1)..(25): SEQ ID NO: 7132; WAN024B9T_x_at; Start 17; Stop 41
tctttccaacagcttgggtagcttt

SEQ ID NO: 75969 - DNA, 25 bp, Artificial
  probe
  misc_feature (1)..(25): SEQ ID NO: 7095; WAN024B9U_x_at; Start 5; Stop 29
cttcgtcagttctatccacaacctc

SEQ ID NO: 75970 - DNA, 25 bp, Artificial
  probe
  misc_feature (1)..(25): SEQ ID NO: 7095; WAN024B9U_x_at; Start 4; Stop 28
acttcgtcagttctatccacaacct

SEQ ID NO: 75971 - DNA, 25 bp, Artificial
  probe
  misc_feature (1)..(25): SEQ ID NO: 7095; WAN024B9U_x_at; Start 3; Stop 27
gacttcgtcagttctatccacaacc

SEQ ID NO: 75972 - DNA, 25 bp, Artificial
  probe
  misc_feature (1)..(25): SEQ ID NO: 7095; WAN024B9U_x_at; Start 26; Stop 50
cctcaaaacagtgttttgagcaacc

SEQ ID NO: 75973 - DNA, 25 bp, Artificial
  probe
  misc_feature (1)..(25): SEQ ID NO: 7095; WAN024B9U_x_at; Start 7; Stop 31
tcgtcagttctatccacaacctcaa

SEQ ID NO: 75974 - DNA, 25 bp, Artificial
  probe
  misc_feature (1)..(25): SEQ ID NO: 7095; WAN024B9U_x_at; Start 24; Stop 48
aacctcaaaacagtgttttgagcaa

SEQ ID NO: 75975 - DNA, 25 bp, Artificial
  probe
  misc_feature (1)..(25): SEQ ID NO: 7095; WAN024B9U_x_at; Start 50; Stop 74
ctgcggctagtttcctagtttactc

SEQ ID NO: 75976 - DNA, 25 bp, Artificial
  probe
  misc_feature (1)..(25): SEQ ID NO: 7095; WAN024B9U_x_at; Start 16; Stop 40
ctatccacaacctcaaaacagtgtt

SEQ ID NO: 75977 - DNA, 25 bp, Artificial
  probe
  misc_feature (1)..(25): SEQ ID NO: 7095; WAN024B9U_x_at; Start 15; Stop 39
tctatccacaacctcaaaacagtgt

SEQ ID NO: 75978 - DNA, 25 bp, Artificial
  probe
  misc_feature (1)..(25): SEQ ID NO: 7095; WAN024B9U_x_at; Start 14; Stop 38
ttctatccacaacctcaaaacagtg

SEQ ID NO: 75979 - DNA, 25 bp, Artificial
  probe
  misc_feature (1)..(25): SEQ ID NO: 7095; WAN024B9U_x_at; Start 13; Stop 37
gttctatccacaacctcaaaacagt

SEQ ID NO: 75980 - DNA, 25 bp, Artificial
  probe
  misc_feature (1)..(25): SEQ ID NO: 7095; WAN024B9U_x_at; Start 22; Stop 46
acaacctcaaaacagtgttttgagc

SEQ ID NO: 75981 - DNA, 25 bp, Artificial
  probe
  misc_feature (1)..(25): SEQ ID NO: 7095; WAN024B9U_x_at; Start 17; Stop 41
tatccacaacctcaaaacagtgttt

SEQ ID NO: 75982 - DNA, 25 bp, Artificial
  probe
  misc_feature (1)..(25): SEQ ID NO: 7095; WAN024B9U_x_at; Start 34; Stop 58
cagtgttttgagcaacctgcggcta

SEQ ID NO: 75983 - DNA, 25 bp, Artificial
  probe
  misc_feature (1)..(25): SEQ ID NO: 7095; WAN024B9U_x_at; Start 2; Stop 26
tgacttcgtcagttctatccacaac

SEQ ID NO: 75984 - DNA, 25 bp, Artificial
  probe
  misc_feature (1)..(25): SEQ ID NO: 7095; WAN024B9U_x_at; Start 49; Stop 73
cctgcggctagtttcctagtttact

SEQ ID NO: 75985 - DNA, 25 bp, Artificial
  probe
  misc_feature (1)..(25): SEQ ID NO: 7095; WAN024B9U_x_at; Start 20; Stop 44
ccacaacctcaaaacagtgttttga

SEQ ID NO: 75986 - DNA, 25 bp, Artificial
  probe
  misc_feature (1)..(25): SEQ ID NO: 7095; WAN024B9U_x_at; Start 12; Stop 36
agttctatccacaacctcaaaacag

SEQ ID NO: 75987 - DNA, 25 bp, Artificial
  probe
  misc_feature (1)..(25): SEQ ID NO: 7095; WAN024B9U_x_at; Start 6; Stop 30
ttcgtcagttctatccacaacctca

SEQ ID NO: 75988 - DNA, 25 bp, Artificial
  probe
  misc_feature (1)..(25): SEQ ID NO: 7095; WAN024B9U_x_at; Start 51; Stop 75
tgcggctagtttcctagtttactct

SEQ ID NO: 75989 - DNA, 25 bp, Artificial
  probe
  misc_feature (1)..(25): SEQ ID NO: 7095; WAN024B9U_x_at; Start 21; Stop 45
cacaacctcaaaacagtgttttgag

SEQ ID NO: 75990 - DNA, 25 bp, Artificial
  probe
  misc_feature (1)..(25): SEQ ID NO: 7095; WAN024B9U_x_at; Start 1; Stop 25
ctgacttcgtcagttctatccacaa

SEQ ID NO: 75991 - DNA, 25 bp, Artificial
  probe
  misc_feature (1)..(25): SEQ ID NO: 7095; WAN024B9U_x_at; Start 19; Stop 43
tccacaacctcaaaacagtgttttg

SEQ ID NO: 75992 - DNA, 25 bp, Artificial
  probe
  misc_feature (1)..(25): SEQ ID NO: 7095; WAN024B9U_x_at; Start 27; Stop 51
ctcaaaacagtgttttgagcaacct

SEQ ID NO: 75993 - DNA, 25 bp, Artificial
  probe
  misc_feature (1)..(25): SEQ ID NO: 7095; WAN024B9U_x_at; Start 18; Stop 42
atccacaacctcaaaacagtgtttt

SEQ ID NO: 75994 - DNA, 25 bp, Artificial
  probe
  misc_feature (1)..(25): SEQ ID NO: 7095; WAN024B9U_x_at; Start 8; Stop 32
cgtcagttctatccacaacctcaaa

SEQ ID NO: 75995 - DNA, 25 bp, Artificial
  probe
  misc_feature (1)..(25): SEQ ID NO: 7095; WAN024B9U_x_at; Start 23; Stop 47
caacctcaaaacagtgttttgagca

SEQ ID NO: 75996 - DNA, 25 bp, Artificial
  probe
  misc_feature (1)..(25): SEQ ID NO: 7095; WAN024B9U_x_at; Start 30; Stop 54
aaaacagtgttttgagcaacctgcg

SEQ ID NO: 75997 - DNA, 25 bp, Artificial
  probe
  misc_feature (1)..(25): SEQ ID NO: 7095; WAN024B9U_x_at; Start 33; Stop 57
acagtgttttgagcaacctgcggct

SEQ ID NO: 75998 - DNA, 25 bp, Artificial
  probe
  misc_feature (1)..(25): SEQ ID NO: 7095; WAN024B9U_x_at; Start 32; Stop 56
aacagtgttttgagcaacctgcggc

SEQ ID NO: 75999 - DNA, 25 bp, Artificial
  probe
  misc_feature (1)..(25): SEQ ID NO: 7095; WAN024B9U_x_at; Start 28; Stop 52
tcaaaacagtgttttgagcaacctg

SEQ ID NO: 76000 - DNA, 25 bp, Artificial
  probe
  misc_feature (1)..(25): SEQ ID NO: 7095; WAN024B9U_x_at; Start 31; Stop 55
aaacagtgttttgagcaacctgcgg

SEQ ID NO: 76001 - DNA, 25 bp, Artificial
  probe
  misc_feature (1)..(25): SEQ ID NO: 7095; WAN024B9U_x_at; Start 29; Stop 53
caaaacagtgttttgagcaacctgc

SEQ ID NO: 76002 - DNA, 25 bp, Artificial
  probe
  misc_feature (1)..(25): SEQ ID NO: 7095; WAN024B9U_x_at; Start 25; Stop 49
acctcaaaacagtgttttgagcaac

SEQ ID NO: 76003 - DNA, 25 bp, Artificial
  probe
  misc_feature (1)..(25): SEQ ID NO: 7571; WAN024B9W_x_at; Start 29; Stop 53
cgactcgcttcctagtttgctcttt

SEQ ID NO: 76004 - DNA, 25 bp, Artificial
  probe
  misc_feature (1)..(25): SEQ ID NO: 7571; WAN024B9W_x_at; Start 35; Stop 59
gcttcctagtttgctctttgatttt

SEQ ID NO: 76005 - DNA, 25 bp, Artificial
  probe
  misc_feature (1)..(25): SEQ ID NO: 7571; WAN024B9W_x_at; Start 42; Stop 66
agtttgctctttgattttcattgag

SEQ ID NO: 76006 - DNA, 25 bp, Artificial
  probe
  misc_feature (1)..(25): SEQ ID NO: 7571; WAN024B9W_x_at; Start 19; Stop 43
gtacagcctgcgactcgcttcctag

SEQ ID NO: 76007 - DNA, 25 bp, Artificial
  probe
  misc_feature (1)..(25): SEQ ID NO: 7571; WAN024B9W_x_at; Start 23; Stop 47
agcctgcgactcgcttcctagtttg

SEQ ID NO: 76008 - DNA, 25 bp, Artificial
  probe
  misc_feature (1)..(25): SEQ ID NO: 7571; WAN024B9W_x_at; Start 31; Stop 55
actcgcttcctagtttgctctttga

SEQ ID NO: 76009 - DNA, 25 bp, Artificial
  probe
  misc_feature (1)..(25): SEQ ID NO: 7571; WAN024B9W_x_at; Start 21; Stop 45
acagcctgcgactcgcttcctagtt

SEQ ID NO: 76010 - DNA, 25 bp, Artificial
  probe
  misc_feature (1)..(25): SEQ ID NO: 7571; WAN024B9W_x_at; Start 26; Stop 50
ctgcgactcgcttcctagtttgctc

SEQ ID NO: 76011 - DNA, 25 bp, Artificial
  probe
  misc_feature (1)..(25): SEQ ID NO: 7571; WAN024B9W_x_at; Start 16; Stop 40
caagtacagcctgcgactcgcttcc

SEQ ID NO: 76012 - DNA, 25 bp, Artificial
  probe
  misc_feature (1)..(25): SEQ ID NO: 7571; WAN024B9W_x_at; Start 44; Stop 68
tttgctctttgattttcattgagta

SEQ ID NO: 76013 - DNA, 25 bp, Artificial
  probe
  misc_feature (1)..(25): SEQ ID NO: 7571; WAN024B9W_x_at; Start 27; Stop 51
tgcgactcgcttcctagtttgctct

SEQ ID NO: 76014 - DNA, 25 bp, Artificial
  probe
  misc_feature (1)..(25): SEQ ID NO: 7571; WAN024B9W_x_at; Start 14; Stop 38
ctcaagtacagcctgcgactcgctt

SEQ ID NO: 76015 - DNA, 25 bp, Artificial
  probe
  misc_feature (1)..(25): SEQ ID NO: 7571; WAN024B9W_x_at; Start 39; Stop 63
cctagtttgctctttgattttcatt

SEQ ID NO: 76016 - DNA, 25 bp, Artificial
  probe
  misc_feature (1)..(25): SEQ ID NO: 7571; WAN024B9W_x_at; Start 25; Stop 49
cctgcgactcgcttcctagtttgct

SEQ ID NO: 76017 - DNA, 25 bp, Artificial
  probe
  misc_feature (1)..(25): SEQ ID NO: 7571; WAN024B9W_x_at; Start 36; Stop 60
cttcctagtttgctctttgattttc

SEQ ID NO: 76018 - DNA, 25 bp, Artificial
  probe
  misc_feature (1)..(25): SEQ ID NO: 7571; WAN024B9W_x_at; Start 15; Stop 39
tcaagtacagcctgcgactcgcttc

SEQ ID NO: 76019 - DNA, 25 bp, Artificial
  probe
  misc_feature (1)..(25): SEQ ID NO: 7571; WAN024B9W_x_at; Start 30; Stop 54
gactcgcttcctagtttgctctttg

SEQ ID NO: 76020 - DNA, 25 bp, Artificial
  probe
  misc_feature (1)..(25): SEQ ID NO: 7571; WAN024B9W_x_at; Start 28; Stop 52
gcgactcgcttcctagtttgctctt

SEQ ID NO: 76021 - DNA, 25 bp, Artificial
  probe
  misc_feature (1)..(25): SEQ ID NO: 7571; WAN024B9W_x_at; Start 22; Stop 46
cagcctgcgactcgcttcctagttt

SEQ ID NO: 76022 - DNA, 25 bp, Artificial
  probe
  misc_feature (1)..(25): SEQ ID NO: 7571; WAN024B9W_x_at; Start 41; Stop 65
tagtttgctctttgattttcattga

SEQ ID NO: 76023 - DNA, 25 bp, Artificial
  probe
  misc_feature (1)..(25): SEQ ID NO: 7571; WAN024B9W_x_at; Start 32; Stop 56
ctcgcttcctagtttgctctttgat

SEQ ID NO: 76024 - DNA, 25 bp, Artificial
  probe
  misc_feature (1)..(25): SEQ ID NO: 7571; WAN024B9W_x_at; Start 17; Stop 41
aagtacagcctgcgactcgcttcct

SEQ ID NO: 76025 - DNA, 25 bp, Artificial
  probe
  misc_feature (1)..(25): SEQ ID NO: 7571; WAN024B9W_x_at; Start 34; Stop 58
cgcttcctagtttgctctttgattt

SEQ ID NO: 76026 - DNA, 25 bp, Artificial
  probe
  misc_feature (1)..(25): SEQ ID NO: 7571; WAN024B9W_x_at; Start 18; Stop 42
agtacagcctgcgactcgcttccta

SEQ ID NO: 76027 - DNA, 25 bp, Artificial
  probe
  misc_feature (1)..(25): SEQ ID NO: 7571; WAN024B9W_x_at; Start 43; Stop 67
gtttgctctttgattttcattgagt

SEQ ID NO: 76028 - DNA, 25 bp, Artificial
  probe
  misc_feature (1)..(25): SEQ ID NO: 7571; WAN024B9W_x_at; Start 40; Stop 64
ctagtttgctctttgattttcattg

SEQ ID NO: 76029 - DNA, 25 bp, Artificial
  probe
  misc_feature (1)..(25): SEQ ID NO: 7571; WAN024B9W_x_at; Start 45; Stop 69
ttgctctttgattttcattgagtat

SEQ ID NO: 76030 - DNA, 25 bp, Artificial
  probe
  misc_feature (1)..(25): SEQ ID NO: 7571; WAN024B9W_x_at; Start 46; Stop 70
tgctctttgattttcattgagtata

SEQ ID NO: 76031 - DNA, 25 bp, Artificial
  probe
  misc_feature (1)..(25): SEQ ID NO: 7571; WAN024B9W_x_at; Start 47; Stop 71
gctctttgattttcattgagtataa

SEQ ID NO: 76032 - DNA, 25 bp, Artificial
  probe
  misc_feature (1)..(25): SEQ ID NO: 7571; WAN024B9W_x_at; Start 38; Stop 62
tcctagtttgctctttgattttcat

SEQ ID NO: 76033 - DNA, 25 bp, Artificial
  probe
  misc_feature (1)..(25): SEQ ID NO: 7571; WAN024B9W_x_at; Start 20; Stop 44
tacagcctgcgactcgcttcctagt

SEQ ID NO: 76034 - DNA, 25 bp, Artificial
  probe
  misc_feature (1)..(25): SEQ ID NO: 7571; WAN024B9W_x_at; Start 24; Stop 48
gcctgcgactcgcttcctagtttgc

SEQ ID NO: 76035 - DNA, 25 bp, Artificial
  probe
  misc_feature (1)..(25): SEQ ID NO: 7571; WAN024B9W_x_at; Start 37; Stop 61
ttcctagtttgctctttgattttca

SEQ ID NO: 76036 - DNA, 25 bp, Artificial
  probe
  misc_feature (1)..(25): SEQ ID NO: 7571; WAN024B9W_x_at; Start 33; Stop 57
tcgcttcctagtttgctctttgatt

SEQ ID NO: 76037 - DNA, 25 bp, Artificial
  probe
  misc_feature (1)..(25): SEQ ID NO: 7572; WAN024B9X_x_at; Start 35; Stop 59
gcttcctagtttgctctttgatttt

SEQ ID NO: 76038 - DNA, 25 bp, Artificial
  probe
  misc_feature (1)..(25): SEQ ID NO: 7572; WAN024B9X_x_at; Start 19; Stop 43
gtacagcctgcggctcgcttcctag

SEQ ID NO: 76039 - DNA, 25 bp, Artificial
  probe
  misc_feature (1)..(25): SEQ ID NO: 7572; WAN024B9X_x_at; Start 42; Stop 66
agtttgctctttgattttcattgag

SEQ ID NO: 76040 - DNA, 25 bp, Artificial
  probe
  misc_feature (1)..(25): SEQ ID NO: 7572; WAN024B9X_x_at; Start 23; Stop 47
agcctgcggctcgcttcctagtttg

SEQ ID NO: 76041 - DNA, 25 bp, Artificial
  probe
  misc_feature (1)..(25): SEQ ID NO: 7572; WAN024B9X_x_at; Start 1; Stop 25
ttgccttgccgtactcaagtacagc

SEQ ID NO: 76042 - DNA, 25 bp, Artificial
  probe
  misc_feature (1)..(25): SEQ ID NO: 7572; WAN024B9X_x_at; Start 21; Stop 45
acagcctgcggctcgcttcctagtt

SEQ ID NO: 76043 - DNA, 25 bp, Artificial
  probe
  misc_feature (1)..(25): SEQ ID NO: 7572; WAN024B9X_x_at; Start 26; Stop 50
ctgcggctcgcttcctagtttgctc

SEQ ID NO: 76044 - DNA, 25 bp, Artificial
  probe
  misc_feature (1)..(25): SEQ ID NO: 7572; WAN024B9X_x_at; Start 16; Stop 40
caagtacagcctgcggctcgcttcc

SEQ ID NO: 76045 - DNA, 25 bp, Artificial
  probe
  misc_feature (1)..(25): SEQ ID NO: 7572; WAN024B9X_x_at; Start 44; Stop 68
tttgctctttgattttcattgagta

SEQ ID NO: 76046 - DNA, 25 bp, Artificial
  probe
  misc_feature (1)..(25): SEQ ID NO: 7572; WAN024B9X_x_at; Start 14; Stop 38
ctcaagtacagcctgcggctcgctt

SEQ ID NO: 76047 - DNA, 25 bp, Artificial
  probe
  misc_feature (1)..(25): SEQ ID NO: 7572; WAN024B9X_x_at; Start 39; Stop 63
cctagtttgctctttgattttcatt

SEQ ID NO: 76048 - DNA, 25 bp, Artificial
  probe
  misc_feature (1)..(25): SEQ ID NO: 7572; WAN024B9X_x_at; Start 31; Stop 55
gctcgcttcctagtttgctctttga

SEQ ID NO: 76049 - DNA, 25 bp, Artificial
  probe
  misc_feature (1)..(25): SEQ ID NO: 7572; WAN024B9X_x_at; Start 25; Stop 49
cctgcggctcgcttcctagtttgct

SEQ ID NO: 76050 - DNA, 25 bp, Artificial
  probe
  misc_feature (1)..(25): SEQ ID NO: 7572; WAN024B9X_x_at; Start 36; Stop 60
cttcctagtttgctctttgattttc

SEQ ID NO: 76051 - DNA, 25 bp, Artificial
  probe
  misc_feature (1)..(25): SEQ ID NO: 7572; WAN024B9X_x_at; Start 15; Stop 39
tcaagtacagcctgcggctcgcttc

SEQ ID NO: 76052 - DNA, 25 bp, Artificial
  probe
  misc_feature (1)..(25): SEQ ID NO: 7572; WAN024B9X_x_at; Start 28; Stop 52
gcggctcgcttcctagtttgctctt

SEQ ID NO: 76053 - DNA, 25 bp, Artificial
  probe
  misc_feature (1)..(25): SEQ ID NO: 7572; WAN024B9X_x_at; Start 22; Stop 46
cagcctgcggctcgcttcctagttt

SEQ ID NO: 76054 - DNA, 25 bp, Artificial
  probe
  misc_feature (1)..(25): SEQ ID NO: 7572; WAN024B9X_x_at; Start 32; Stop 56
ctcgcttcctagtttgctctttgat

SEQ ID NO: 76055 - DNA, 25 bp, Artificial
  probe
  misc_feature (1)..(25): SEQ ID NO: 7572; WAN024B9X_x_at; Start 41; Stop 65
tagtttgctctttgattttcattga

SEQ ID NO: 76056 - DNA, 25 bp, Artificial
  probe
  misc_feature (1)..(25): SEQ ID NO: 7572; WAN024B9X_x_at; Start 17; Stop 41
aagtacagcctgcggctcgcttcct

SEQ ID NO: 76057 - DNA, 25 bp, Artificial
  probe
  misc_feature (1)..(25): SEQ ID NO: 7572; WAN024B9X_x_at; Start 29; Stop 53
cggctcgcttcctagtttgctcttt

SEQ ID NO: 76058 - DNA, 25 bp, Artificial
  probe
  misc_feature (1)..(25): SEQ ID NO: 7572; WAN024B9X_x_at; Start 34; Stop 58
cgcttcctagtttgctctttgattt

SEQ ID NO: 76059 - DNA, 25 bp, Artificial
  probe
  misc_feature (1)..(25): SEQ ID NO: 7572; WAN024B9X_x_at; Start 27; Stop 51
tgcggctcgcttcctagtttgctct

SEQ ID NO: 76060 - DNA, 25 bp, Artificial
  probe
  misc_feature (1)..(25): SEQ ID NO: 7572; WAN024B9X_x_at; Start 18; Stop 42
agtacagcctgcggctcgcttccta

SEQ ID NO: 76061 - DNA, 25 bp, Artificial
  probe
  misc_feature (1)..(25): SEQ ID NO: 7572; WAN024B9X_x_at; Start 43; Stop 67
gtttgctctttgattttcattgagt

SEQ ID NO: 76062 - DNA, 25 bp, Artificial
  probe
  misc_feature (1)..(25): SEQ ID NO: 7572; WAN024B9X_x_at; Start 40; Stop 64
ctagtttgctctttgattttcattg

SEQ ID NO: 76063 - DNA, 25 bp, Artificial
  probe
  misc_feature (1)..(25): SEQ ID NO: 7572; WAN024B9X_x_at; Start 45; Stop 69
ttgctctttgattttcattgagtat

SEQ ID NO: 76064 - DNA, 25 bp, Artificial
  probe
  misc_feature (1)..(25): SEQ ID NO: 7572; WAN024B9X_x_at; Start 46; Stop 70
tgctctttgattttcattgagtata

SEQ ID NO: 76065 - DNA, 25 bp, Artificial
  probe
  misc_feature (1)..(25): SEQ ID NO: 7572; WAN024B9X_x_at; Start 38; Stop 62
tcctagtttgctctttgattttcat

SEQ ID NO: 76066 - DNA, 25 bp, Artificial
  probe
  misc_feature (1)..(25): SEQ ID NO: 7572; WAN024B9X_x_at; Start 24; Stop 48
gcctgcggctcgcttcctagtttgc

SEQ ID NO: 76067 - DNA, 25 bp, Artificial
  probe
  misc_feature (1)..(25): SEQ ID NO: 7572; WAN024B9X_x_at; Start 30; Stop 54
ggctcgcttcctagtttgctctttg

SEQ ID NO: 76068 - DNA, 25 bp, Artificial
  probe
  misc_feature (1)..(25): SEQ ID NO: 7572; WAN024B9X_x_at; Start 20; Stop 44
tacagcctgcggctcgcttcctagt

SEQ ID NO: 76069 - DNA, 25 bp, Artificial
  probe
  misc_feature (1)..(25): SEQ ID NO: 7572; WAN024B9X_x_at; Start 37; Stop 61
ttcctagtttgctctttgattttca

SEQ ID NO: 76070 - DNA, 25 bp, Artificial
  probe
  misc_feature (1)..(25): SEQ ID NO: 7572; WAN024B9X_x_at; Start 33; Stop 57
tcgcttcctagtttgctctttgatt

SEQ ID NO: 76071 - DNA, 25 bp, Artificial
  probe
  misc_feature (1)..(25): SEQ ID NO: 7570; WAN024BA2_x_at; Start 14; Stop 38
atcaagtacagcctgcggctcgctt

SEQ ID NO: 76072 - DNA, 25 bp, Artificial
  probe
  misc_feature (1)..(25): SEQ ID NO: 7570; WAN024BA2_x_at; Start 10; Stop 34
cgtaatcaagtacagcctgcggctc

SEQ ID NO: 76073 - DNA, 25 bp, Artificial
  probe
  misc_feature (1)..(25): SEQ ID NO: 7570; WAN024BA2_x_at; Start 19; Stop 43
gtacagcctgcggctcgcttcctag

SEQ ID NO: 76074 - DNA, 25 bp, Artificial
  probe
  misc_feature (1)..(25): SEQ ID NO: 7570; WAN024BA2_x_at; Start 1; Stop 25
ttgccttgccgtaatcaagtacagc

SEQ ID NO: 76075 - DNA, 25 bp, Artificial
  probe
  misc_feature (1)..(25): SEQ ID NO: 7570; WAN024BA2_x_at; Start 52; Stop 76
ttgattttcattgagtataaaaagg

SEQ ID NO: 76076 - DNA, 25 bp, Artificial
  probe
  misc_feature (1)..(25): SEQ ID NO: 7570; WAN024BA2_x_at; Start 21; Stop 45
acagcctgcggctcgcttcctagtt

SEQ ID NO: 76077 - DNA, 25 bp, Artificial
  probe
  misc_feature (1)..(25): SEQ ID NO: 7570; WAN024BA2_x_at; Start 16; Stop 40
caagtacagcctgcggctcgcttcc

SEQ ID NO: 76078 - DNA, 25 bp, Artificial
  probe
  misc_feature (1)..(25): SEQ ID NO: 7570; WAN024BA2_x_at; Start 12; Stop 36
taatcaagtacagcctgcggctcgc

SEQ ID NO: 76079 - DNA, 25 bp, Artificial
  probe
  misc_feature (1)..(25): SEQ ID NO: 7570; WAN024BA2_x_at; Start 51; Stop 75
tttgattttcattgagtataaaaag

SEQ ID NO: 76080 - DNA, 25 bp, Artificial
  probe
  misc_feature (1)..(25): SEQ ID NO: 7570; WAN024BA2_x_at; Start 15; Stop 39
tcaagtacagcctgcggctcgcttc

SEQ ID NO: 76081 - DNA, 25 bp, Artificial
  probe
  misc_feature (1)..(25): SEQ ID NO: 7570; WAN024BA2_x_at; Start 8; Stop 32
gccgtaatcaagtacagcctgcggc

SEQ ID NO: 76082 - DNA, 25 bp, Artificial
  probe
  misc_feature (1)..(25): SEQ ID NO: 7570; WAN024BA2_x_at; Start 5; Stop 29
cttgccgtaatcaagtacagcctgc

SEQ ID NO: 76083 - DNA, 25 bp, Artificial
  probe
  misc_feature (1)..(25): SEQ ID NO: 7570; WAN024BA2_x_at; Start 50; Stop 74
ctttgattttcattgagtataaaaa

SEQ ID NO: 76084 - DNA, 25 bp, Artificial
  probe
  misc_feature (1)..(25): SEQ ID NO: 7570; WAN024BA2_x_at; Start 49; Stop 73
tctttgattttcattgagtataaaa

SEQ ID NO: 76085 - DNA, 25 bp, Artificial
  probe
  misc_feature (1)..(25): SEQ ID NO: 7570; WAN024BA2_x_at; Start 17; Stop 41
aagtacagcctgcggctcgcttcct

SEQ ID NO: 76086 - DNA, 25 bp, Artificial
  probe
  misc_feature (1)..(25): SEQ ID NO: 7570; WAN024BA2_x_at; Start 3; Stop 27
gccttgccgtaatcaagtacagcct

SEQ ID NO: 76087 - DNA, 25 bp, Artificial
  probe
  misc_feature (1)..(25): SEQ ID NO: 7570; WAN024BA2_x_at; Start 53; Stop 77
tgattttcattgagtataaaaaggg

SEQ ID NO: 76088 - DNA, 25 bp, Artificial
  probe
  misc_feature (1)..(25): SEQ ID NO: 7570; WAN024BA2_x_at; Start 11; Stop 35
gtaatcaagtacagcctgcggctcg

SEQ ID NO: 76089 - DNA, 25 bp, Artificial
  probe
  misc_feature (1)..(25): SEQ ID NO: 7570; WAN024BA2_x_at; Start 48; Stop 72
ctctttgattttcattgagtataaa

SEQ ID NO: 76090 - DNA, 25 bp, Artificial
  probe
  misc_feature (1)..(25): SEQ ID NO: 7570; WAN024BA2_x_at; Start 18; Stop 42
agtacagcctgcggctcgcttccta

SEQ ID NO: 76091 - DNA, 25 bp, Artificial
  probe
  misc_feature (1)..(25): SEQ ID NO: 7570; WAN024BA2_x_at; Start 47; Stop 71
gctctttgattttcattgagtataa

SEQ ID NO: 76092 - DNA, 25 bp, Artificial
  probe
  misc_feature (1)..(25): SEQ ID NO: 7570; WAN024BA2_x_at; Start 7; Stop 31
tgccgtaatcaagtacagcctgcgg

SEQ ID NO: 76093 - DNA, 25 bp, Artificial
  probe
  misc_feature (1)..(25): SEQ ID NO: 7570; WAN024BA2_x_at; Start 9; Stop 33
ccgtaatcaagtacagcctgcggct

SEQ ID NO: 76094 - DNA, 25 bp, Artificial
  probe
  misc_feature (1)..(25): SEQ ID NO: 7570; WAN024BA2_x_at; Start 20; Stop 44
tacagcctgcggctcgcttcctagt

SEQ ID NO: 76095 - DNA, 25 bp, Artificial
  probe
  misc_feature (1)..(25): SEQ ID NO: 7570; WAN024BA2_x_at; Start 2; Stop 26
tgccttgccgtaatcaagtacagcc

SEQ ID NO: 76096 - DNA, 25 bp, Artificial
  probe
  misc_feature (1)..(25): SEQ ID NO: 7570; WAN024BA2_x_at; Start 6; Stop 30
ttgccgtaatcaagtacagcctgcg

SEQ ID NO: 76097 - DNA, 25 bp, Artificial
  probe
  misc_feature (1)..(25): SEQ ID NO: 7570; WAN024BA2_x_at; Start 13; Stop 37
aatcaagtacagcctgcggctcgct

SEQ ID NO: 76098 - DNA, 25 bp, Artificial
  probe
  misc_feature (1)..(25): SEQ ID NO: 7570; WAN024BA2_x_at; Start 4; Stop 28
ccttgccgtaatcaagtacagcctg

SEQ ID NO: 76099 - DNA, 25 bp, Artificial
  probe
  misc_feature (1)..(25): SEQ ID NO: 7480; WAN024BA3_at; Start 53; Stop 77
gctgttttgttgacttgtactcaat

SEQ ID NO: 76100 - DNA, 25 bp, Artificial
  probe
  misc_feature (1)..(25): SEQ ID NO: 7480; WAN024BA3_at; Start 43; Stop 67
cgaagacggggctgttttgttgact

SEQ ID NO: 76101 - DNA, 25 bp, Artificial
  probe
  misc_feature (1)..(25): SEQ ID NO: 7480; WAN024BA3_at; Start 353; Stop 377
aacaaattttagacaatactgattt

SEQ ID NO: 76102 - DNA, 25 bp, Artificial
  probe
  misc_feature (1)..(25): SEQ ID NO: 7480; WAN024BA3_at; Start 50; Stop 74
ggggctgttttgttgacttgtactc

SEQ ID NO: 76103 - DNA, 25 bp, Artificial
  probe
  misc_feature (1)..(25): SEQ ID NO: 7480; WAN024BA3_at; Start 54; Stop 78
ctgttttgttgacttgtactcaatg

SEQ ID NO: 76104 - DNA, 25 bp, Artificial
  probe
  misc_feature (1)..(25): SEQ ID NO: 7480; WAN024BA3_at; Start 47; Stop 71
gacggggctgttttgttgacttgta

SEQ ID NO: 76105 - DNA, 25 bp, Artificial
  probe
  misc_feature (1)..(25): SEQ ID NO: 7480; WAN024BA3_at; Start 352; Stop 376
aaacaaattttagacaatactgatt

SEQ ID NO: 76106 - DNA, 25 bp, Artificial
  probe
  misc_feature (1)..(25): SEQ ID NO: 7480; WAN024BA3_at; Start 41; Stop 65
tccgaagacggggctgttttgttga

SEQ ID NO: 76107 - DNA, 25 bp, Artificial
  probe
  misc_feature (1)..(25): SEQ ID NO: 7480; WAN024BA3_at; Start 56; Stop 80
gttttgttgacttgtactcaatgaa

SEQ ID NO: 76108 - DNA, 25 bp, Artificial
  probe
  misc_feature (1)..(25): SEQ ID NO: 7480; WAN024BA3_at; Start 46; Stop 70
agacggggctgttttgttgacttgt

SEQ ID NO: 76109 - DNA, 25 bp, Artificial
  probe
  misc_feature (1)..(25): SEQ ID NO: 7480; WAN024BA3_at; Start 354; Stop 378
acaaattttagacaatactgatttg

SEQ ID NO: 76110 - DNA, 25 bp, Artificial
  probe
  misc_feature (1)..(25): SEQ ID NO: 7480; WAN024BA3_at; Start 45; Stop 69
aagacggggctgttttgttgacttg

SEQ ID NO: 76111 - DNA, 25 bp, Artificial
  probe
  misc_feature (1)..(25): SEQ ID NO: 7480; WAN024BA3_at; Start 52; Stop 76
ggctgttttgttgacttgtactcaa

SEQ ID NO: 76112 - DNA, 25 bp, Artificial
  probe
  misc_feature (1)..(25): SEQ ID NO: 7480; WAN024BA3_at; Start 51; Stop 75
gggctgttttgttgacttgtactca

SEQ ID NO: 76113 - DNA, 25 bp, Artificial
  probe
  misc_feature (1)..(25): SEQ ID NO: 7480; WAN024BA3_at; Start 168; Stop 192
acaccgttttgagtcacttcgtcag

SEQ ID NO: 76114 - DNA, 25 bp, Artificial
  probe
  misc_feature (1)..(25): SEQ ID NO: 7480; WAN024BA3_at; Start 55; Stop 79
tgttttgttgacttgtactcaatga

SEQ ID NO: 76115 - DNA, 25 bp, Artificial
  probe
  misc_feature (1)..(25): SEQ ID NO: 7480; WAN024BA3_at; Start 167; Stop 191
aacaccgttttgagtcacttcgtca

SEQ ID NO: 76116 - DNA, 25 bp, Artificial
  probe
  misc_feature (1)..(25): SEQ ID NO: 7480; WAN024BA3_at; Start 169; Stop 193
caccgttttgagtcacttcgtcagg

SEQ ID NO: 76117 - DNA, 25 bp, Artificial
  probe
  misc_feature (1)..(25): SEQ ID NO: 7480; WAN024BA3_at; Start 49; Stop 73
cggggctgttttgttgacttgtact

SEQ ID NO: 76118 - DNA, 25 bp, Artificial
  probe
  misc_feature (1)..(25): SEQ ID NO: 7480; WAN024BA3_at; Start 57; Stop 81
ttttgttgacttgtactcaatgaaa

SEQ ID NO: 76119 - DNA, 25 bp, Artificial
  probe
  misc_feature (1)..(25): SEQ ID NO: 35; WAN024BA5_at; Start 19; Stop 43
tttttagatattgaactaatactca

SEQ ID NO: 76120 - DNA, 25 bp, Artificial
  probe
  misc_feature (1)..(25): SEQ ID NO: 35; WAN024BA5_at; Start 18; Stop 42
ttttttagatattgaactaatactc

SEQ ID NO: 76121 - DNA, 25 bp, Artificial
  probe
  misc_feature (1)..(25): SEQ ID NO: 35; WAN024BA5_at; Start 21; Stop 45
tttagatattgaactaatactcaat

SEQ ID NO: 76122 - DNA, 25 bp, Artificial
  probe
  misc_feature (1)..(25): SEQ ID NO: 35; WAN024BA5_at; Start 55; Stop 79
agagcaaactataatatattgaaac

SEQ ID NO: 76123 - DNA, 25 bp, Artificial
  probe
  misc_feature (1)..(25): SEQ ID NO: 35; WAN024BA5_at; Start 54; Stop 78
aagagcaaactataatatattgaaa

SEQ ID NO: 76124 - DNA, 25 bp, Artificial
  probe
  misc_feature (1)..(25): SEQ ID NO: 35; WAN024BA5_at; Start 53; Stop 77
aaagagcaaactataatatattgaa

SEQ ID NO: 76125 - DNA, 25 bp, Artificial
  probe
  misc_feature (1)..(25): SEQ ID NO: 35; WAN024BA5_at; Start 56; Stop 80
gagcaaactataatatattgaaact

SEQ ID NO: 76126 - DNA, 25 bp, Artificial
  probe
  misc_feature (1)..(25): SEQ ID NO: 35; WAN024BA5_at; Start 20; Stop 44
ttttagatattgaactaatactcaa

SEQ ID NO: 76127 - DNA, 25 bp, Artificial
  probe
  misc_feature (1)..(25): SEQ ID NO: 35; WAN024BA5_at; Start 23; Stop 47
tagatattgaactaatactcaatga

SEQ ID NO: 76128 - DNA, 25 bp, Artificial
  probe
  misc_feature (1)..(25): SEQ ID NO: 35; WAN024BA5_at; Start 15; Stop 39
tctttttttagatattgaactaata

SEQ ID NO: 76129 - DNA, 25 bp, Artificial
  probe
  misc_feature (1)..(25): SEQ ID NO: 35; WAN024BA5_at; Start 22; Stop 46
ttagatattgaactaatactcaatg

SEQ ID NO: 76130 - DNA, 25 bp, Artificial
  probe
  misc_feature (1)..(25): SEQ ID NO: 35; WAN024BA5_at; Start 57; Stop 81
agcaaactataatatattgaaacta

SEQ ID NO: 76131 - DNA, 25 bp, Artificial
  probe
  misc_feature (1)..(25): SEQ ID NO: 32; WAN024BA6_at; Start 7; Stop 31
ataaaaacaagaacaccttgcttgg

SEQ ID NO: 76132 - DNA, 25 bp, Artificial
  probe
  misc_feature (1)..(25): SEQ ID NO: 32; WAN024BA6_at; Start 6; Stop 30
tataaaaacaagaacaccttgcttg

SEQ ID NO: 76133 - DNA, 25 bp, Artificial
  probe
  misc_feature (1)..(25): SEQ ID NO: 32; WAN024BA6_at; Start 3; Stop 27
gagtataaaaacaagaacaccttgc

SEQ ID NO: 76134 - DNA, 25 bp, Artificial
  probe
  misc_feature (1)..(25): SEQ ID NO: 32; WAN024BA6_at; Start 8; Stop 32
taaaaacaagaacaccttgcttggc

SEQ ID NO: 76135 - DNA, 25 bp, Artificial
  probe
  misc_feature (1)..(25): SEQ ID NO: 32; WAN024BA6_at; Start 2; Stop 26
tgagtataaaaacaagaacaccttg

SEQ ID NO: 76136 - DNA, 25 bp, Artificial
  probe
  misc_feature (1)..(25): SEQ ID NO: 32; WAN024BA6_at; Start 4; Stop 28
agtataaaaacaagaacaccttgct

SEQ ID NO: 76137 - DNA, 25 bp, Artificial
  probe
  misc_feature (1)..(25): SEQ ID NO: 7179; WAN024BA8_x_at; Start 85; Stop 109
agctgacttcgtcagtcttatctac

SEQ ID NO: 76138 - DNA, 25 bp, Artificial
  probe
  misc_feature (1)..(25): SEQ ID NO: 7179; WAN024BA8_x_at; Start 45; Stop 69
acttcgtcagtttcatctacaacct

SEQ ID NO: 76139 - DNA, 25 bp, Artificial
  probe
  misc_feature (1)..(25): SEQ ID NO: 7179; WAN024BA8_x_at; Start 83; Stop 107
tgagctgacttcgtcagtcttatct

SEQ ID NO: 76140 - DNA, 25 bp, Artificial
  probe
  misc_feature (1)..(25): SEQ ID NO: 7179; WAN024BA8_x_at; Start 93; Stop 117
tcgtcagtcttatctacaacctcaa

SEQ ID NO: 76141 - DNA, 25 bp, Artificial
  probe
  misc_feature (1)..(25): SEQ ID NO: 7179; WAN024BA8_x_at; Start 20; Stop 44
aacctcaaaaccatgttttgagctg

SEQ ID NO: 76142 - DNA, 25 bp, Artificial
  probe
  misc_feature (1)..(25): SEQ ID NO: 7179; WAN024BA8_x_at; Start 54; Stop 78
gtttcatctacaacctcaaaaccat

SEQ ID NO: 76143 - DNA, 25 bp, Artificial
  probe
  misc_feature (1)..(25): SEQ ID NO: 7179; WAN024BA8_x_at; Start 71; Stop 95
aaaaccatgttttgagctgacttcg

SEQ ID NO: 76144 - DNA, 25 bp, Artificial
  probe
  misc_feature (1)..(25): SEQ ID NO: 7179; WAN024BA8_x_at; Start 41; Stop 65
gctgacttcgtcagtttcatctaca

SEQ ID NO: 76145 - DNA, 25 bp, Artificial
  probe
  misc_feature (1)..(25): SEQ ID NO: 7179; WAN024BA8_x_at; Start 4; Stop 28
cgtcagtttcatctacaacctcaaa

SEQ ID NO: 76146 - DNA, 25 bp, Artificial
  probe
  misc_feature (1)..(25): SEQ ID NO: 7179; WAN024BA8_x_at; Start 122; Stop 146
gtgtttttagcaacctgcggctagt

SEQ ID NO: 76147 - DNA, 25 bp, Artificial
  probe
  misc_feature (1)..(25): SEQ ID NO: 7179; WAN024BA8_x_at; Start 120; Stop 144
ctgtgtttttagcaacctgcggcta

SEQ ID NO: 76148 - DNA, 25 bp, Artificial
  probe
  misc_feature (1)..(25): SEQ ID NO: 7179; WAN024BA8_x_at; Start 79; Stop 103
gttttgagctgacttcgtcagtctt

SEQ ID NO: 76149 - DNA, 25 bp, Artificial
  probe
  misc_feature (1)..(25): SEQ ID NO: 7179; WAN024BA8_x_at; Start 32; Stop 56
atgttttgagctgacttcgtcagtt

SEQ ID NO: 76150 - DNA, 25 bp, Artificial
  probe
  misc_feature (1)..(25): SEQ ID NO: 7179; WAN024BA8_x_at; Start 29; Stop 53
accatgttttgagctgacttcgtca

SEQ ID NO: 76151 - DNA, 25 bp, Artificial
  probe
  misc_feature (1)..(25): SEQ ID NO: 7179; WAN024BA8_x_at; Start 77; Stop 101
atgttttgagctgacttcgtcagtc

SEQ ID NO: 76152 - DNA, 25 bp, Artificial
  probe
  misc_feature (1)..(25): SEQ ID NO: 7179; WAN024BA8_x_at; Start 75; Stop 99
ccatgttttgagctgacttcgtcag

SEQ ID NO: 76153 - DNA, 25 bp, Artificial
  probe
  misc_feature (1)..(25): SEQ ID NO: 7179; WAN024BA8_x_at; Start 2; Stop 26
ttcgtcagtttcatctacaacctca

SEQ ID NO: 76154 - DNA, 25 bp, Artificial
  probe
  misc_feature (1)..(25): SEQ ID NO: 7179; WAN024BA8_x_at; Start 31; Stop 55
catgttttgagctgacttcgtcagt

SEQ ID NO: 76155 - DNA, 25 bp, Artificial
  probe
  misc_feature (1)..(25): SEQ ID NO: 7179; WAN024BA8_x_at; Start 78; Stop 102
tgttttgagctgacttcgtcagtct

SEQ ID NO: 76156 - DNA, 25 bp, Artificial
  probe
  misc_feature (1)..(25): SEQ ID NO: 7179; WAN024BA8_x_at; Start 73; Stop 97
aaccatgttttgagctgacttcgtc

SEQ ID NO: 76157 - DNA, 25 bp, Artificial
  probe
  misc_feature (1)..(25): SEQ ID NO: 7179; WAN024BA8_x_at; Start 125; Stop 149
tttttagcaacctgcggctagtttc

SEQ ID NO: 76158 - DNA, 25 bp, Artificial
  probe
  misc_feature (1)..(25): SEQ ID NO: 7179; WAN024BA8_x_at; Start 84; Stop 108
gagctgacttcgtcagtcttatcta

SEQ ID NO: 76159 - DNA, 25 bp, Artificial
  probe
  misc_feature (1)..(25): SEQ ID NO: 7179; WAN024BA8_x_at; Start 121; Stop 145
tgtgtttttagcaacctgcggctag

SEQ ID NO: 76160 - DNA, 25 bp, Artificial
  probe
  misc_feature (1)..(25): SEQ ID NO: 7179; WAN024BA8_x_at; Start 119; Stop 143
actgtgtttttagcaacctgcggct

SEQ ID NO: 76161 - DNA, 25 bp, Artificial
  probe
  misc_feature (1)..(25): SEQ ID NO: 7179; WAN024BA8_x_at; Start 24; Stop 48
tcaaaaccatgttttgagctgactt

SEQ ID NO: 76162 - DNA, 25 bp, Artificial
  probe
  misc_feature (1)..(25): SEQ ID NO: 7179; WAN024BA8_x_at; Start 118; Stop 142
aactgtgtttttagcaacctgcggc

SEQ ID NO: 76163 - DNA, 25 bp, Artificial
  probe
  misc_feature (1)..(25): SEQ ID NO: 7179; WAN024BA8_x_at; Start 21; Stop 45
acctcaaaaccatgttttgagctga

SEQ ID NO: 76164 - DNA, 25 bp, Artificial
  probe
  misc_feature (1)..(25): SEQ ID NO: 7179; WAN024BA8_x_at; Start 70; Stop 94
caaaaccatgttttgagctgacttc

SEQ ID NO: 76165 - DNA, 25 bp, Artificial
  probe
  misc_feature (1)..(25): SEQ ID NO: 7179; WAN024BA8_x_at; Start 52; Stop 76
cagtttcatctacaacctcaaaacc

SEQ ID NO: 76166 - DNA, 25 bp, Artificial
  probe
  misc_feature (1)..(25): SEQ ID NO: 7179; WAN024BA8_x_at; Start 123; Stop 147
tgtttttagcaacctgcggctagtt

SEQ ID NO: 76167 - DNA, 25 bp, Artificial
  probe
  misc_feature (1)..(25): SEQ ID NO: 7179; WAN024BA8_x_at; Start 27; Stop 51
aaaccatgttttgagctgacttcgt

SEQ ID NO: 76168 - DNA, 25 bp, Artificial
  probe
  misc_feature (1)..(25): SEQ ID NO: 7179; WAN024BA8_x_at; Start 80; Stop 104
ttttgagctgacttcgtcagtctta

SEQ ID NO: 76169 - DNA, 25 bp, Artificial
  probe
  misc_feature (1)..(25): SEQ ID NO: 7098; WAN024BAA_x_at; Start 86; Stop 110
tagagcagcccgcagctagtttcct

SEQ ID NO: 76170 - DNA, 25 bp, Artificial
  probe
  misc_feature (1)..(25): SEQ ID NO: 7098; WAN024BAA_x_at; Start 5; Stop 29
cttcgtcagttctatccacaacctc

SEQ ID NO: 76171 - DNA, 25 bp, Artificial
  probe
  misc_feature (1)..(25): SEQ ID NO: 7098; WAN024BAA_x_at; Start 4; Stop 28
acttcgtcagttctatccacaacct

SEQ ID NO: 76172 - DNA, 25 bp, Artificial
  probe
  misc_feature (1)..(25): SEQ ID NO: 7098; WAN024BAA_x_at; Start 56; Stop 80
cagttccatctacaaccttaaaaca

SEQ ID NO: 76173 - DNA, 25 bp, Artificial
  probe
  misc_feature (1)..(25): SEQ ID NO: 7098; WAN024BAA_x_at; Start 3; Stop 27
gacttcgtcagttctatccacaacc

SEQ ID NO: 76174 - DNA, 25 bp, Artificial
  probe
  misc_feature (1)..(25): SEQ ID NO: 7098; WAN024BAA_x_at; Start 7; Stop 31
tcgtcagttctatccacaacctcaa

SEQ ID NO: 76175 - DNA, 25 bp, Artificial
  probe
  misc_feature (1)..(25): SEQ ID NO: 7098; WAN024BAA_x_at; Start 61; Stop 85
ccatctacaaccttaaaacagtgtt

SEQ ID NO: 76176 - DNA, 25 bp, Artificial
  probe
  misc_feature (1)..(25): SEQ ID NO: 7098; WAN024BAA_x_at; Start 60; Stop 84
tccatctacaaccttaaaacagtgt

SEQ ID NO: 76177 - DNA, 25 bp, Artificial
  probe
  misc_feature (1)..(25): SEQ ID NO: 7098; WAN024BAA_x_at; Start 16; Stop 40
ctatccacaacctcaaaacagtgtt

SEQ ID NO: 76178 - DNA, 25 bp, Artificial
  probe
  misc_feature (1)..(25): SEQ ID NO: 7098; WAN024BAA_x_at; Start 15; Stop 39
tctatccacaacctcaaaacagtgt

SEQ ID NO: 76179 - DNA, 25 bp, Artificial
  probe
  misc_feature (1)..(25): SEQ ID NO: 7098; WAN024BAA_x_at; Start 35; Stop 59
agtgttttgagctgacttcgtcagt

SEQ ID NO: 76180 - DNA, 25 bp, Artificial
  probe
  misc_feature (1)..(25): SEQ ID NO: 7098; WAN024BAA_x_at; Start 87; Stop 111
agagcagcccgcagctagtttccta

SEQ ID NO: 76181 - DNA, 25 bp, Artificial
  probe
  misc_feature (1)..(25): SEQ ID NO: 7098; WAN024BAA_x_at; Start 14; Stop 38
ttctatccacaacctcaaaacagtg

SEQ ID NO: 76182 - DNA, 25 bp, Artificial
  probe
  misc_feature (1)..(25): SEQ ID NO: 7098; WAN024BAA_x_at; Start 13; Stop 37
gttctatccacaacctcaaaacagt

SEQ ID NO: 76183 - DNA, 25 bp, Artificial
  probe
  misc_feature (1)..(25): SEQ ID NO: 7098; WAN024BAA_x_at; Start 17; Stop 41
tatccacaacctcaaaacagtgttt

SEQ ID NO: 76184 - DNA, 25 bp, Artificial
  probe
  misc_feature (1)..(25): SEQ ID NO: 7098; WAN024BAA_x_at; Start 2; Stop 26
tgacttcgtcagttctatccacaac

SEQ ID NO: 76185 - DNA, 25 bp, Artificial
  probe
  misc_feature (1)..(25): SEQ ID NO: 7098; WAN024BAA_x_at; Start 105; Stop 129
tttcctagtttgctatttgattttc

SEQ ID NO: 76186 - DNA, 25 bp, Artificial
  probe
  misc_feature (1)..(25): SEQ ID NO: 7098; WAN024BAA_x_at; Start 57; Stop 81
agttccatctacaaccttaaaacag

SEQ ID NO: 76187 - DNA, 25 bp, Artificial
  probe
  misc_feature (1)..(25): SEQ ID NO: 7098; WAN024BAA_x_at; Start 12; Stop 36
agttctatccacaacctcaaaacag

SEQ ID NO: 76188 - DNA, 25 bp, Artificial
  probe
  misc_feature (1)..(25): SEQ ID NO: 7098; WAN024BAA_x_at; Start 6; Stop 30
ttcgtcagttctatccacaacctca

SEQ ID NO: 76189 - DNA, 25 bp, Artificial
  probe
  misc_feature (1)..(25): SEQ ID NO: 7098; WAN024BAA_x_at; Start 1; Stop 25
ctgacttcgtcagttctatccacaa

SEQ ID NO: 76190 - DNA, 25 bp, Artificial
  probe
  misc_feature (1)..(25): SEQ ID NO: 7098; WAN024BAA_x_at; Start 84; Stop 108
tttagagcagcccgcagctagtttc

SEQ ID NO: 76191 - DNA, 25 bp, Artificial
  probe
  misc_feature (1)..(25): SEQ ID NO: 7098; WAN024BAA_x_at; Start 18; Stop 42
atccacaacctcaaaacagtgtttt

SEQ ID NO: 76192 - DNA, 25 bp, Artificial
  probe
  misc_feature (1)..(25): SEQ ID NO: 7098; WAN024BAA_x_at; Start 8; Stop 32
cgtcagttctatccacaacctcaaa

SEQ ID NO: 76193 - DNA, 25 bp, Artificial
  probe
  misc_feature (1)..(25): SEQ ID NO: 7098; WAN024BAA_x_at; Start 82; Stop 106
tgtttagagcagcccgcagctagtt

SEQ ID NO: 76194 - DNA, 25 bp, Artificial
  probe
  misc_feature (1)..(25): SEQ ID NO: 7098; WAN024BAA_x_at; Start 89; Stop 113
agcagcccgcagctagtttcctagt

SEQ ID NO: 76195 - DNA, 25 bp, Artificial
  probe
  misc_feature (1)..(25): SEQ ID NO: 7098; WAN024BAA_x_at; Start 59; Stop 83
ttccatctacaaccttaaaacagtg

SEQ ID NO: 76196 - DNA, 25 bp, Artificial
  probe
  misc_feature (1)..(25): SEQ ID NO: 7098; WAN024BAA_x_at; Start 33; Stop 57
acagtgttttgagctgacttcgtca

SEQ ID NO: 76197 - DNA, 25 bp, Artificial
  probe
  misc_feature (1)..(25): SEQ ID NO: 7098; WAN024BAA_x_at; Start 129; Stop 153
cattgagtattacttcattttcttc

SEQ ID NO: 76198 - DNA, 25 bp, Artificial
  probe
  misc_feature (1)..(25): SEQ ID NO: 7098; WAN024BAA_x_at; Start 90; Stop 114
gcagcccgcagctagtttcctagtt

SEQ ID NO: 76199 - DNA, 25 bp, Artificial
  probe
  misc_feature (1)..(25): SEQ ID NO: 7098; WAN024BAA_x_at; Start 36; Stop 60
gtgttttgagctgacttcgtcagtt

SEQ ID NO: 76200 - DNA, 25 bp, Artificial
  probe
  misc_feature (1)..(25): SEQ ID NO: 7098; WAN024BAA_x_at; Start 81; Stop 105
gtgtttagagcagcccgcagctagt

SEQ ID NO: 76201 - DNA, 25 bp, Artificial
  probe
  misc_feature (1)..(25): SEQ ID NO: 7098; WAN024BAA_x_at; Start 9; Stop 33
gtcagttctatccacaacctcaaaa

SEQ ID NO: 76202 - DNA, 25 bp, Artificial
  probe
  misc_feature (1)..(25): SEQ ID NO: 7098; WAN024BAA_x_at; Start 83; Stop 107
gtttagagcagcccgcagctagttt

SEQ ID NO: 76203 - DNA, 25 bp, Artificial
  probe
  misc_feature (1)..(25): SEQ ID NO: 7091; WAN024BAB_x_at; Start 4; Stop 28
acttcgtcagtcgtatctacaacct

SEQ ID NO: 76204 - DNA, 25 bp, Artificial
  probe
  misc_feature (1)..(25): SEQ ID NO: 7091; WAN024BAB_x_at; Start 47; Stop 71
tgacttcgtcagttctatctgcaac

SEQ ID NO: 76205 - DNA, 25 bp, Artificial
  probe
  misc_feature (1)..(25): SEQ ID NO: 7091; WAN024BAB_x_at; Start 42; Stop 66
tgagctgacttcgtcagttctatct

SEQ ID NO: 76206 - DNA, 25 bp, Artificial
  probe
  misc_feature (1)..(25): SEQ ID NO: 7091; WAN024BAB_x_at; Start 48; Stop 72
gacttcgtcagttctatctgcaacc

SEQ ID NO: 76207 - DNA, 25 bp, Artificial
  probe
  misc_feature (1)..(25): SEQ ID NO: 7091; WAN024BAB_x_at; Start 13; Stop 37
gtcgtatctacaacctcaaaacagt

SEQ ID NO: 76208 - DNA, 25 bp, Artificial
  probe
  misc_feature (1)..(25): SEQ ID NO: 7091; WAN024BAB_x_at; Start 15; Stop 39
cgtatctacaacctcaaaacagtgt

SEQ ID NO: 76209 - DNA, 25 bp, Artificial
  probe
  misc_feature (1)..(25): SEQ ID NO: 7091; WAN024BAB_x_at; Start 82; Stop 106
tgttttgagcagcccgtggctagtt

SEQ ID NO: 76210 - DNA, 25 bp, Artificial
  probe
  misc_feature (1)..(25): SEQ ID NO: 7091; WAN024BAB_x_at; Start 16; Stop 40
gtatctacaacctcaaaacagtgtt

SEQ ID NO: 76211 - DNA, 25 bp, Artificial
  probe
  misc_feature (1)..(25): SEQ ID NO: 7091; WAN024BAB_x_at; Start 35; Stop 59
agtgttttgagctgacttcgtcagt

SEQ ID NO: 76212 - DNA, 25 bp, Artificial
  probe
  misc_feature (1)..(25): SEQ ID NO: 7091; WAN024BAB_x_at; Start 45; Stop 69
gctgacttcgtcagttctatctgca

SEQ ID NO: 76213 - DNA, 25 bp, Artificial
  probe
  misc_feature (1)..(25): SEQ ID NO: 7091; WAN024BAB_x_at; Start 8; Stop 32
cgtcagtcgtatctacaacctcaaa

SEQ ID NO: 76214 - DNA, 25 bp, Artificial
  probe
  misc_feature (1)..(25): SEQ ID NO: 7091; WAN024BAB_x_at; Start 17; Stop 41
tatctacaacctcaaaacagtgttt

SEQ ID NO: 76215 - DNA, 25 bp, Artificial
  probe
  misc_feature (1)..(25): SEQ ID NO: 7091; WAN024BAB_x_at; Start 81; Stop 105
gtgttttgagcagcccgtggctagt

SEQ ID NO: 76216 - DNA, 25 bp, Artificial
  probe
  misc_feature (1)..(25): SEQ ID NO: 7091; WAN024BAB_x_at; Start 56; Stop 80
cagttctatctgcaacctcaaaaca

SEQ ID NO: 76217 - DNA, 25 bp, Artificial
  probe
  misc_feature (1)..(25): SEQ ID NO: 7091; WAN024BAB_x_at; Start 83; Stop 107
gttttgagcagcccgtggctagttt

SEQ ID NO: 76218 - DNA, 25 bp, Artificial
  probe
  misc_feature (1)..(25): SEQ ID NO: 7091; WAN024BAB_x_at; Start 38; Stop 62
gttttgagctgacttcgtcagttct

SEQ ID NO: 76219 - DNA, 25 bp, Artificial
  probe
  misc_feature (1)..(25): SEQ ID NO: 7091; WAN024BAB_x_at; Start 85; Stop 109
tttgagcagcccgtggctagtttcc

SEQ ID NO: 76220 - DNA, 25 bp, Artificial
  probe
  misc_feature (1)..(25): SEQ ID NO: 7091; WAN024BAB_x_at; Start 86; Stop 110
ttgagcagcccgtggctagtttcct

SEQ ID NO: 76221 - DNA, 25 bp, Artificial
  probe
  misc_feature (1)..(25): SEQ ID NO: 7091; WAN024BAB_x_at; Start 37; Stop 61
tgttttgagctgacttcgtcagttc

SEQ ID NO: 76222 - DNA, 25 bp, Artificial
  probe
  misc_feature (1)..(25): SEQ ID NO: 7091; WAN024BAB_x_at; Start 40; Stop 64
tttgagctgacttcgtcagttctat

SEQ ID NO: 76223 - DNA, 25 bp, Artificial
  probe
  misc_feature (1)..(25): SEQ ID NO: 7091; WAN024BAB_x_at; Start 84; Stop 108
ttttgagcagcccgtggctagtttc

SEQ ID NO: 76224 - DNA, 25 bp, Artificial
  probe
  misc_feature (1)..(25): SEQ ID NO: 7091; WAN024BAB_x_at; Start 41; Stop 65
ttgagctgacttcgtcagttctatc

SEQ ID NO: 76225 - DNA, 25 bp, Artificial
  probe
  misc_feature (1)..(25): SEQ ID NO: 7091; WAN024BAB_x_at; Start 46; Stop 70
ctgacttcgtcagttctatctgcaa

SEQ ID NO: 76226 - DNA, 25 bp, Artificial
  probe
  misc_feature (1)..(25): SEQ ID NO: 7091; WAN024BAB_x_at; Start 10; Stop 34
tcagtcgtatctacaacctcaaaac

SEQ ID NO: 76227 - DNA, 25 bp, Artificial
  probe
  misc_feature (1)..(25): SEQ ID NO: 7091; WAN024BAB_x_at; Start 18; Stop 42
atctacaacctcaaaacagtgtttt

SEQ ID NO: 76228 - DNA, 25 bp, Artificial
  probe
  misc_feature (1)..(25): SEQ ID NO: 7091; WAN024BAB_x_at; Start 43; Stop 67
gagctgacttcgtcagttctatctg

SEQ ID NO: 76229 - DNA, 25 bp, Artificial
  probe
  misc_feature (1)..(25): SEQ ID NO: 7091; WAN024BAB_x_at; Start 14; Stop 38
tcgtatctacaacctcaaaacagtg

SEQ ID NO: 76230 - DNA, 25 bp, Artificial
  probe
  misc_feature (1)..(25): SEQ ID NO: 7091; WAN024BAB_x_at; Start 12; Stop 36
agtcgtatctacaacctcaaaacag

SEQ ID NO: 76231 - DNA, 25 bp, Artificial
  probe
  misc_feature (1)..(25): SEQ ID NO: 7091; WAN024BAB_x_at; Start 33; Stop 57
acagtgttttgagctgacttcgtca

SEQ ID NO: 76232 - DNA, 25 bp, Artificial
  probe
  misc_feature (1)..(25): SEQ ID NO: 7091; WAN024BAB_x_at; Start 9; Stop 33
gtcagtcgtatctacaacctcaaaa

SEQ ID NO: 76233 - DNA, 25 bp, Artificial
  probe
  misc_feature (1)..(25): SEQ ID NO: 7091; WAN024BAB_x_at; Start 11; Stop 35
cagtcgtatctacaacctcaaaaca

SEQ ID NO: 76234 - DNA, 25 bp, Artificial
  probe
  misc_feature (1)..(25): SEQ ID NO: 7091; WAN024BAB_x_at; Start 36; Stop 60
gtgttttgagctgacttcgtcagtt

SEQ ID NO: 76235 - DNA, 25 bp, Artificial
  probe
  misc_feature (1)..(25): SEQ ID NO: 7091; WAN024BAB_x_at; Start 44; Stop 68
agctgacttcgtcagttctatctgc

SEQ ID NO: 76236 - DNA, 25 bp, Artificial
  probe
  misc_feature (1)..(25): SEQ ID NO: 7091; WAN024BAB_x_at; Start 39; Stop 63
ttttgagctgacttcgtcagttcta

SEQ ID NO: 76237 - DNA, 25 bp, Artificial
  probe
  misc_feature (1)..(25): SEQ ID NO: 7068; WAN024BAD_x_at; Start 53; Stop 77
attgtgttttgagtaacctgcggct

SEQ ID NO: 76238 - DNA, 25 bp, Artificial
  probe
  misc_feature (1)..(25): SEQ ID NO: 7068; WAN024BAD_x_at; Start 104; Stop 128
cattgagtattagaacagaaaaatg

SEQ ID NO: 76239 - DNA, 25 bp, Artificial
  probe
  misc_feature (1)..(25): SEQ ID NO: 7068; WAN024BAD_x_at; Start 76; Stop 100
ctagcttcctagtttgctctttgat

SEQ ID NO: 76240 - DNA, 25 bp, Artificial
  probe
  misc_feature (1)..(25): SEQ ID NO: 7068; WAN024BAD_x_at; Start 6; Stop 30
ctgtatgtatggttactgacttcgt

SEQ ID NO: 76241 - DNA, 25 bp, Artificial
  probe
  misc_feature (1)..(25): SEQ ID NO: 7068; WAN024BAD_x_at; Start 105; Stop 129
attgagtattagaacagaaaaatgc

SEQ ID NO: 76242 - DNA, 25 bp, Artificial
  probe
  misc_feature (1)..(25): SEQ ID NO: 7068; WAN024BAD_x_at; Start 12; Stop 36
gtatggttactgacttcgtcagttt

SEQ ID NO: 76243 - DNA, 25 bp, Artificial
  probe
  misc_feature (1)..(25): SEQ ID NO: 7068; WAN024BAD_x_at; Start 14; Stop 38
atggttactgacttcgtcagtttca

SEQ ID NO: 76244 - DNA, 25 bp, Artificial
  probe
  misc_feature (1)..(25): SEQ ID NO: 7068; WAN024BAD_x_at; Start 4; Stop 28
tactgtatgtatggttactgacttc

SEQ ID NO: 76245 - DNA, 25 bp, Artificial
  probe
  misc_feature (1)..(25): SEQ ID NO: 7068; WAN024BAD_x_at; Start 11; Stop 35
tgtatggttactgacttcgtcagtt

SEQ ID NO: 76246 - DNA, 25 bp, Artificial
  probe
  misc_feature (1)..(25): SEQ ID NO: 7068; WAN024BAD_x_at; Start 48; Stop 72
tcaaaattgtgttttgagtaacctg

SEQ ID NO: 76247 - DNA, 25 bp, Artificial
  probe
  misc_feature (1)..(25): SEQ ID NO: 7068; WAN024BAD_x_at; Start 47; Stop 71
ctcaaaattgtgttttgagtaacct

SEQ ID NO: 76248 - DNA, 25 bp, Artificial
  probe
  misc_feature (1)..(25): SEQ ID NO: 7068; WAN024BAD_x_at; Start 9; Stop 33
tatgtatggttactgacttcgtcag

SEQ ID NO: 76249 - DNA, 25 bp, Artificial
  probe
  misc_feature (1)..(25): SEQ ID NO: 7068; WAN024BAD_x_at; Start 7; Stop 31
tgtatgtatggttactgacttcgtc

SEQ ID NO: 76250 - DNA, 25 bp, Artificial
  probe
  misc_feature (1)..(25): SEQ ID NO: 7068; WAN024BAD_x_at; Start 5; Stop 29
actgtatgtatggttactgacttcg

SEQ ID NO: 76251 - DNA, 25 bp, Artificial
  probe
  misc_feature (1)..(25): SEQ ID NO: 7068; WAN024BAD_x_at; Start 52; Stop 76
aattgtgttttgagtaacctgcggc

SEQ ID NO: 76252 - DNA, 25 bp, Artificial
  probe
  misc_feature (1)..(25): SEQ ID NO: 7068; WAN024BAD_x_at; Start 3; Stop 27
ttactgtatgtatggttactgactt

SEQ ID NO: 76253 - DNA, 25 bp, Artificial
  probe
  misc_feature (1)..(25): SEQ ID NO: 7068; WAN024BAD_x_at; Start 50; Stop 74
aaaattgtgttttgagtaacctgcg

SEQ ID NO: 76254 - DNA, 25 bp, Artificial
  probe
  misc_feature (1)..(25): SEQ ID NO: 7068; WAN024BAD_x_at; Start 18; Stop 42
ttactgacttcgtcagtttcatcta

SEQ ID NO: 76255 - DNA, 25 bp, Artificial
  probe
  misc_feature (1)..(25): SEQ ID NO: 7068; WAN024BAD_x_at; Start 15; Stop 39
tggttactgacttcgtcagtttcat

SEQ ID NO: 76256 - DNA, 25 bp, Artificial
  probe
  misc_feature (1)..(25): SEQ ID NO: 7068; WAN024BAD_x_at; Start 49; Stop 73
caaaattgtgttttgagtaacctgc

SEQ ID NO: 76257 - DNA, 25 bp, Artificial
  probe
  misc_feature (1)..(25): SEQ ID NO: 7068; WAN024BAD_x_at; Start 1; Stop 25
ccttactgtatgtatggttactgac

SEQ ID NO: 76258 - DNA, 25 bp, Artificial
  probe
  misc_feature (1)..(25): SEQ ID NO: 7068; WAN024BAD_x_at; Start 102; Stop 126
ttcattgagtattagaacagaaaaa

SEQ ID NO: 76259 - DNA, 25 bp, Artificial
  probe
  misc_feature (1)..(25): SEQ ID NO: 7068; WAN024BAD_x_at; Start 43; Stop 67
caacctcaaaattgtgttttgagta

SEQ ID NO: 76260 - DNA, 25 bp, Artificial
  probe
  misc_feature (1)..(25): SEQ ID NO: 7068; WAN024BAD_x_at; Start 54; Stop 78
ttgtgttttgagtaacctgcggcta

SEQ ID NO: 76261 - DNA, 25 bp, Artificial
  probe
  misc_feature (1)..(25): SEQ ID NO: 7068; WAN024BAD_x_at; Start 101; Stop 125
tttcattgagtattagaacagaaaa

SEQ ID NO: 76262 - DNA, 25 bp, Artificial
  probe
  misc_feature (1)..(25): SEQ ID NO: 7068; WAN024BAD_x_at; Start 55; Stop 79
tgtgttttgagtaacctgcggctag

SEQ ID NO: 76263 - DNA, 25 bp, Artificial
  probe
  misc_feature (1)..(25): SEQ ID NO: 7068; WAN024BAD_x_at; Start 103; Stop 127
tcattgagtattagaacagaaaaat

SEQ ID NO: 76264 - DNA, 25 bp, Artificial
  probe
  misc_feature (1)..(25): SEQ ID NO: 7068; WAN024BAD_x_at; Start 10; Stop 34
atgtatggttactgacttcgtcagt

SEQ ID NO: 76265 - DNA, 25 bp, Artificial
  probe
  misc_feature (1)..(25): SEQ ID NO: 7068; WAN024BAD_x_at; Start 8; Stop 32
gtatgtatggttactgacttcgtca

SEQ ID NO: 76266 - DNA, 25 bp, Artificial
  probe
  misc_feature (1)..(25): SEQ ID NO: 7068; WAN024BAD_x_at; Start 107; Stop 131
tgagtattagaacagaaaaatgctt

SEQ ID NO: 76267 - DNA, 25 bp, Artificial
  probe
  misc_feature (1)..(25): SEQ ID NO: 7068; WAN024BAD_x_at; Start 2; Stop 26
cttactgtatgtatggttactgact

SEQ ID NO: 76268 - DNA, 25 bp, Artificial
  probe
  misc_feature (1)..(25): SEQ ID NO: 7068; WAN024BAD_x_at; Start 13; Stop 37
tatggttactgacttcgtcagtttc

SEQ ID NO: 76269 - DNA, 25 bp, Artificial
  probe
  misc_feature (1)..(25): SEQ ID NO: 7068; WAN024BAD_x_at; Start 51; Stop 75
aaattgtgttttgagtaacctgcgg

SEQ ID NO: 76270 - DNA, 25 bp, Artificial
  probe
  misc_feature (1)..(25): SEQ ID NO: 7068; WAN024BAD_x_at; Start 106; Stop 130
ttgagtattagaacagaaaaatgct

SEQ ID NO: 76271 - DNA, 25 bp, Artificial
  probe
  misc_feature (1)..(25): SEQ ID NO: 7090; WAN024BAE_x_at; Start 4; Stop 28
acttcgtcagtcctatctacaacct

SEQ ID NO: 76272 - DNA, 25 bp, Artificial
  probe
  misc_feature (1)..(25): SEQ ID NO: 7090; WAN024BAE_x_at; Start 5; Stop 29
cttcgtcagtcctatctacaacctc

SEQ ID NO: 76273 - DNA, 25 bp, Artificial
  probe
  misc_feature (1)..(25): SEQ ID NO: 7090; WAN024BAE_x_at; Start 13; Stop 37
gtcctatctacaacctcaaaacagt

SEQ ID NO: 76274 - DNA, 25 bp, Artificial
  probe
  misc_feature (1)..(25): SEQ ID NO: 7090; WAN024BAE_x_at; Start 47; Stop 71
agcctgcggctagtttcctagtttg

SEQ ID NO: 76275 - DNA, 25 bp, Artificial
  probe
  misc_feature (1)..(25): SEQ ID NO: 7090; WAN024BAE_x_at; Start 24; Stop 48
aacctcaaaacagtgttttgagcag

SEQ ID NO: 76276 - DNA, 25 bp, Artificial
  probe
  misc_feature (1)..(25): SEQ ID NO: 7090; WAN024BAE_x_at; Start 42; Stop 66
tgagcagcctgcggctagtttccta

SEQ ID NO: 76277 - DNA, 25 bp, Artificial
  probe
  misc_feature (1)..(25): SEQ ID NO: 7090; WAN024BAE_x_at; Start 50; Stop 74
ctgcggctagtttcctagtttgctc

SEQ ID NO: 76278 - DNA, 25 bp, Artificial
  probe
  misc_feature (1)..(25): SEQ ID NO: 7090; WAN024BAE_x_at; Start 15; Stop 39
cctatctacaacctcaaaacagtgt

SEQ ID NO: 76279 - DNA, 25 bp, Artificial
  probe
  misc_feature (1)..(25): SEQ ID NO: 7090; WAN024BAE_x_at; Start 41; Stop 65
ttgagcagcctgcggctagtttcct

SEQ ID NO: 76280 - DNA, 25 bp, Artificial
  probe
  misc_feature (1)..(25): SEQ ID NO: 7090; WAN024BAE_x_at; Start 16; Stop 40
ctatctacaacctcaaaacagtgtt

SEQ ID NO: 76281 - DNA, 25 bp, Artificial
  probe
  misc_feature (1)..(25): SEQ ID NO: 7090; WAN024BAE_x_at; Start 43; Stop 67
gagcagcctgcggctagtttcctag

SEQ ID NO: 76282 - DNA, 25 bp, Artificial
  probe
  misc_feature (1)..(25): SEQ ID NO: 7090; WAN024BAE_x_at; Start 8; Stop 32
cgtcagtcctatctacaacctcaaa

SEQ ID NO: 76283 - DNA, 25 bp, Artificial
  probe
  misc_feature (1)..(25): SEQ ID NO: 7090; WAN024BAE_x_at; Start 17; Stop 41
tatctacaacctcaaaacagtgttt

SEQ ID NO: 76284 - DNA, 25 bp, Artificial
  probe
  misc_feature (1)..(25): SEQ ID NO: 7090; WAN024BAE_x_at; Start 22; Stop 46
acaacctcaaaacagtgttttgagc

SEQ ID NO: 76285 - DNA, 25 bp, Artificial
  probe
  misc_feature (1)..(25): SEQ ID NO: 7090; WAN024BAE_x_at; Start 49; Stop 73
cctgcggctagtttcctagtttgct

SEQ ID NO: 76286 - DNA, 25 bp, Artificial
  probe
  misc_feature (1)..(25): SEQ ID NO: 7090; WAN024BAE_x_at; Start 12; Stop 36
agtcctatctacaacctcaaaacag

SEQ ID NO: 76287 - DNA, 25 bp, Artificial
  probe
  misc_feature (1)..(25): SEQ ID NO: 7090; WAN024BAE_x_at; Start 40; Stop 64
tttgagcagcctgcggctagtttcc

SEQ ID NO: 76288 - DNA, 25 bp, Artificial
  probe
  misc_feature (1)..(25): SEQ ID NO: 7090; WAN024BAE_x_at; Start 46; Stop 70
cagcctgcggctagtttcctagttt

SEQ ID NO: 76289 - DNA, 25 bp, Artificial
  probe
  misc_feature (1)..(25): SEQ ID NO: 7090; WAN024BAE_x_at; Start 19; Stop 43
tctacaacctcaaaacagtgttttg

SEQ ID NO: 76290 - DNA, 25 bp, Artificial
  probe
  misc_feature (1)..(25): SEQ ID NO: 7090; WAN024BAE_x_at; Start 6; Stop 30
ttcgtcagtcctatctacaacctca

SEQ ID NO: 76291 - DNA, 25 bp, Artificial
  probe
  misc_feature (1)..(25): SEQ ID NO: 7090; WAN024BAE_x_at; Start 51; Stop 75
tgcggctagtttcctagtttgctct

SEQ ID NO: 76292 - DNA, 25 bp, Artificial
  probe
  misc_feature (1)..(25): SEQ ID NO: 7090; WAN024BAE_x_at; Start 39; Stop 63
ttttgagcagcctgcggctagtttc

SEQ ID NO: 76293 - DNA, 25 bp, Artificial
  probe
  misc_feature (1)..(25): SEQ ID NO: 7090; WAN024BAE_x_at; Start 10; Stop 34
tcagtcctatctacaacctcaaaac

SEQ ID NO: 76294 - DNA, 25 bp, Artificial
  probe
  misc_feature (1)..(25): SEQ ID NO: 7090; WAN024BAE_x_at; Start 18; Stop 42
atctacaacctcaaaacagtgtttt

SEQ ID NO: 76295 - DNA, 25 bp, Artificial
  probe
  misc_feature (1)..(25): SEQ ID NO: 7090; WAN024BAE_x_at; Start 52; Stop 76
gcggctagtttcctagtttgctctt

SEQ ID NO: 76296 - DNA, 25 bp, Artificial
  probe
  misc_feature (1)..(25): SEQ ID NO: 7090; WAN024BAE_x_at; Start 44; Stop 68
agcagcctgcggctagtttcctagt

SEQ ID NO: 76297 - DNA, 25 bp, Artificial
  probe
  misc_feature (1)..(25): SEQ ID NO: 7090; WAN024BAE_x_at; Start 23; Stop 47
caacctcaaaacagtgttttgagca

SEQ ID NO: 76298 - DNA, 25 bp, Artificial
  probe
  misc_feature (1)..(25): SEQ ID NO: 7090; WAN024BAE_x_at; Start 21; Stop 45
tacaacctcaaaacagtgttttgag

SEQ ID NO: 76299 - DNA, 25 bp, Artificial
  probe
  misc_feature (1)..(25): SEQ ID NO: 7090; WAN024BAE_x_at; Start 48; Stop 72
gcctgcggctagtttcctagtttgc

SEQ ID NO: 76300 - DNA, 25 bp, Artificial
  probe
  misc_feature (1)..(25): SEQ ID NO: 7090; WAN024BAE_x_at; Start 20; Stop 44
ctacaacctcaaaacagtgttttga

SEQ ID NO: 76301 - DNA, 25 bp, Artificial
  probe
  misc_feature (1)..(25): SEQ ID NO: 7090; WAN024BAE_x_at; Start 45; Stop 69
gcagcctgcggctagtttcctagtt

SEQ ID NO: 76302 - DNA, 25 bp, Artificial
  probe
  misc_feature (1)..(25): SEQ ID NO: 7090; WAN024BAE_x_at; Start 14; Stop 38
tcctatctacaacctcaaaacagtg

SEQ ID NO: 76303 - DNA, 25 bp, Artificial
  probe
  misc_feature (1)..(25): SEQ ID NO: 7090; WAN024BAE_x_at; Start 11; Stop 35
cagtcctatctacaacctcaaaaca

SEQ ID NO: 76304 - DNA, 25 bp, Artificial
  probe
  misc_feature (1)..(25): SEQ ID NO: 7090; WAN024BAE_x_at; Start 9; Stop 33
gtcagtcctatctacaacctcaaaa

SEQ ID NO: 76305 - DNA, 25 bp, Artificial
  probe
  misc_feature (1)..(25): SEQ ID NO: 6292; WAN024BAF_s_at; Start 34; Stop 58
cagcgtcggcttgtcgtatctacaa

SEQ ID NO: 76306 - DNA, 25 bp, Artificial
  probe
  misc_feature (1)..(25): SEQ ID NO: 6292; WAN024BAF_s_at; Start 31; Stop 55
cgtcagcgtcggcttgtcgtatcta

SEQ ID NO: 76307 - DNA, 25 bp, Artificial
  probe
  misc_feature (1)..(25): SEQ ID NO: 6292; WAN024BAF_s_at; Start 35; Stop 59
agcgtcggcttgtcgtatctacaac

SEQ ID NO: 76308 - DNA, 25 bp, Artificial
  probe
  misc_feature (1)..(25): SEQ ID NO: 6292; WAN024BAF_s_at; Start 32; Stop 56
gtcagcgtcggcttgtcgtatctac

SEQ ID NO: 76309 - DNA, 25 bp, Artificial
  probe
  misc_feature (1)..(25): SEQ ID NO: 6292; WAN024BAF_s_at; Start 36; Stop 60
gcgtcggcttgtcgtatctacaacc

SEQ ID NO: 76310 - DNA, 25 bp, Artificial
  probe
  misc_feature (1)..(25): SEQ ID NO: 6292; WAN024BAF_s_at; Start 33; Stop 57
tcagcgtcggcttgtcgtatctaca

SEQ ID NO: 76311 - DNA, 25 bp, Artificial
  probe
  misc_feature (1)..(25): SEQ ID NO: 7096; WAN024BAJ_at; Start 41; Stop 65
ttgagcatcatgcggctagcttctt

SEQ ID NO: 76312 - DNA, 25 bp, Artificial
  probe
  misc_feature (1)..(25): SEQ ID NO: 7096; WAN024BAJ_at; Start 42; Stop 66
tgagcatcatgcggctagcttctta

SEQ ID NO: 76313 - DNA, 25 bp, Artificial
  probe
  misc_feature (1)..(25): SEQ ID NO: 7096; WAN024BAJ_at; Start 44; Stop 68
agcatcatgcggctagcttcttagt

SEQ ID NO: 76314 - DNA, 25 bp, Artificial
  probe
  misc_feature (1)..(25): SEQ ID NO: 7096; WAN024BAJ_at; Start 43; Stop 67
gagcatcatgcggctagcttcttag

SEQ ID NO: 76315 - DNA, 25 bp, Artificial
  probe
  misc_feature (1)..(25): SEQ ID NO: 7099; WAN024BAK_x_at; Start 36; Stop 60
gtgctttgagcaacctacggctagc

SEQ ID NO: 76316 - DNA, 25 bp, Artificial
  probe
  misc_feature (1)..(25): SEQ ID NO: 7099; WAN024BAK_x_at; Start 5; Stop 29
cttcgtcagttctatctacaacctc

SEQ ID NO: 76317 - DNA, 25 bp, Artificial
  probe
  misc_feature (1)..(25): SEQ ID NO: 7099; WAN024BAK_x_at; Start 4; Stop 28
acttcgtcagttctatctacaacct

SEQ ID NO: 76318 - DNA, 25 bp, Artificial
  probe
  misc_feature (1)..(25): SEQ ID NO: 7099; WAN024BAK_x_at; Start 17; Stop 41
tatctacaacctcaaagcagtgctt

SEQ ID NO: 76319 - DNA, 25 bp, Artificial
  probe
  misc_feature (1)..(25): SEQ ID NO: 7099; WAN024BAK_x_at; Start 11; Stop 35
cagttctatctacaacctcaaagca

SEQ ID NO: 76320 - DNA, 25 bp, Artificial
  probe
  misc_feature (1)..(25): SEQ ID NO: 7099; WAN024BAK_x_at; Start 35; Stop 59
agtgctttgagcaacctacggctag

SEQ ID NO: 76321 - DNA, 25 bp, Artificial
  probe
  misc_feature (1)..(25): SEQ ID NO: 7099; WAN024BAK_x_at; Start 3; Stop 27
gacttcgtcagttctatctacaacc

SEQ ID NO: 76322 - DNA, 25 bp, Artificial
  probe
  misc_feature (1)..(25): SEQ ID NO: 7099; WAN024BAK_x_at; Start 32; Stop 56
agcagtgctttgagcaacctacggc

SEQ ID NO: 76323 - DNA, 25 bp, Artificial
  probe
  misc_feature (1)..(25): SEQ ID NO: 7099; WAN024BAK_x_at; Start 7; Stop 31
tcgtcagttctatctacaacctcaa

SEQ ID NO: 76324 - DNA, 25 bp, Artificial
  probe
  misc_feature (1)..(25): SEQ ID NO: 7099; WAN024BAK_x_at; Start 33; Stop 57
gcagtgctttgagcaacctacggct

SEQ ID NO: 76325 - DNA, 25 bp, Artificial
  probe
  misc_feature (1)..(25): SEQ ID NO: 7099; WAN024BAK_x_at; Start 10; Stop 34
tcagttctatctacaacctcaaagc

SEQ ID NO: 76326 - DNA, 25 bp, Artificial
  probe
  misc_feature (1)..(25): SEQ ID NO: 7099; WAN024BAK_x_at; Start 16; Stop 40
ctatctacaacctcaaagcagtgct

SEQ ID NO: 76327 - DNA, 25 bp, Artificial
  probe
  misc_feature (1)..(25): SEQ ID NO: 7099; WAN024BAK_x_at; Start 8; Stop 32
cgtcagttctatctacaacctcaaa

SEQ ID NO: 76328 - DNA, 25 bp, Artificial
  probe
  misc_feature (1)..(25): SEQ ID NO: 7099; WAN024BAK_x_at; Start 14; Stop 38
ttctatctacaacctcaaagcagtg

SEQ ID NO: 76329 - DNA, 25 bp, Artificial
  probe
  misc_feature (1)..(25): SEQ ID NO: 7099; WAN024BAK_x_at; Start 2; Stop 26
tgacttcgtcagttctatctacaac

SEQ ID NO: 76330 - DNA, 25 bp, Artificial
  probe
  misc_feature (1)..(25): SEQ ID NO: 7099; WAN024BAK_x_at; Start 13; Stop 37
gttctatctacaacctcaaagcagt

SEQ ID NO: 76331 - DNA, 25 bp, Artificial
  probe
  misc_feature (1)..(25): SEQ ID NO: 7099; WAN024BAK_x_at; Start 37; Stop 61
tgctttgagcaacctacggctagct

SEQ ID NO: 76332 - DNA, 25 bp, Artificial
  probe
  misc_feature (1)..(25): SEQ ID NO: 7099; WAN024BAK_x_at; Start 12; Stop 36
agttctatctacaacctcaaagcag

SEQ ID NO: 76333 - DNA, 25 bp, Artificial
  probe
  misc_feature (1)..(25): SEQ ID NO: 7099; WAN024BAK_x_at; Start 6; Stop 30
ttcgtcagttctatctacaacctca

SEQ ID NO: 76334 - DNA, 25 bp, Artificial
  probe
  misc_feature (1)..(25): SEQ ID NO: 7099; WAN024BAK_x_at; Start 65; Stop 89
tagtttgctctttgattttcattga

SEQ ID NO: 76335 - DNA, 25 bp, Artificial
  probe
  misc_feature (1)..(25): SEQ ID NO: 7099; WAN024BAK_x_at; Start 15; Stop 39
tctatctacaacctcaaagcagtgc

SEQ ID NO: 76336 - DNA, 25 bp, Artificial
  probe
  misc_feature (1)..(25): SEQ ID NO: 7099; WAN024BAK_x_at; Start 1; Stop 25
ctgacttcgtcagttctatctacaa

SEQ ID NO: 76337 - DNA, 25 bp, Artificial
  probe
  misc_feature (1)..(25): SEQ ID NO: 7099; WAN024BAK_x_at; Start 40; Stop 64
tttgagcaacctacggctagcttcc

SEQ ID NO: 76338 - DNA, 25 bp, Artificial
  probe
  misc_feature (1)..(25): SEQ ID NO: 7099; WAN024BAK_x_at; Start 38; Stop 62
gctttgagcaacctacggctagctt

SEQ ID NO: 76339 - DNA, 25 bp, Artificial
  probe
  misc_feature (1)..(25): SEQ ID NO: 7099; WAN024BAK_x_at; Start 34; Stop 58
cagtgctttgagcaacctacggcta

SEQ ID NO: 76340 - DNA, 25 bp, Artificial
  probe
  misc_feature (1)..(25): SEQ ID NO: 7099; WAN024BAK_x_at; Start 9; Stop 33
gtcagttctatctacaacctcaaag

SEQ ID NO: 76341 - DNA, 25 bp, Artificial
  probe
  misc_feature (1)..(25): SEQ ID NO: 7099; WAN024BAK_x_at; Start 39; Stop 63
ctttgagcaacctacggctagcttc

SEQ ID NO: 76342 - DNA, 25 bp, Artificial
  probe
  misc_feature (1)..(25): SEQ ID NO: 6597; WAN024BAM_s_at; Start 42; Stop 66
tgagctgaatggcactcgttttcta

SEQ ID NO: 76343 - DNA, 25 bp, Artificial
  probe
  misc_feature (1)..(25): SEQ ID NO: 6597; WAN024BAM_s_at; Start 47; Stop 71
tgaatggcactcgttttctagtttg

SEQ ID NO: 76344 - DNA, 25 bp, Artificial
  probe
  misc_feature (1)..(25): SEQ ID NO: 6597; WAN024BAM_s_at; Start 44; Stop 68
agctgaatggcactcgttttctagt

SEQ ID NO: 76345 - DNA, 25 bp, Artificial
  probe
  misc_feature (1)..(25): SEQ ID NO: 6597; WAN024BAM_s_at; Start 45; Stop 69
gctgaatggcactcgttttctagtt

SEQ ID NO: 76346 - DNA, 25 bp, Artificial
  probe
  misc_feature (1)..(25): SEQ ID NO: 6597; WAN024BAM_s_at; Start 35; Stop 59
agtgttttgagctgaatggcactcg

SEQ ID NO: 76347 - DNA, 25 bp, Artificial
  probe
  misc_feature (1)..(25): SEQ ID NO: 6597; WAN024BAM_s_at; Start 5; Stop 29
gggggctagtcttatctgcaatctc

SEQ ID NO: 76348 - DNA, 25 bp, Artificial
  probe
  misc_feature (1)..(25): SEQ ID NO: 6597; WAN024BAM_s_at; Start 39; Stop 63
ttttgagctgaatggcactcgtttt

SEQ ID NO: 76349 - DNA, 25 bp, Artificial
  probe
  misc_feature (1)..(25): SEQ ID NO: 6597; WAN024BAM_s_at; Start 38; Stop 62
gttttgagctgaatggcactcgttt

SEQ ID NO: 76350 - DNA, 25 bp, Artificial
  probe
  misc_feature (1)..(25): SEQ ID NO: 6597; WAN024BAM_s_at; Start 6; Stop 30
ggggctagtcttatctgcaatctca

SEQ ID NO: 76351 - DNA, 25 bp, Artificial
  probe
  misc_feature (1)..(25): SEQ ID NO: 6597; WAN024BAM_s_at; Start 37; Stop 61
tgttttgagctgaatggcactcgtt

SEQ ID NO: 76352 - DNA, 25 bp, Artificial
  probe
  misc_feature (1)..(25): SEQ ID NO: 6597; WAN024BAM_s_at; Start 1; Stop 25
atgagggggctagtcttatctgcaa

SEQ ID NO: 76353 - DNA, 25 bp, Artificial
  probe
  misc_feature (1)..(25): SEQ ID NO: 6597; WAN024BAM_s_at; Start 40; Stop 64
tttgagctgaatggcactcgttttc

SEQ ID NO: 76354 - DNA, 25 bp, Artificial
  probe
  misc_feature (1)..(25): SEQ ID NO: 6597; WAN024BAM_s_at; Start 41; Stop 65
ttgagctgaatggcactcgttttct

SEQ ID NO: 76355 - DNA, 25 bp, Artificial
  probe
  misc_feature (1)..(25): SEQ ID NO: 6597; WAN024BAM_s_at; Start 3; Stop 27
gagggggctagtcttatctgcaatc

SEQ ID NO: 76356 - DNA, 25 bp, Artificial
  probe
  misc_feature (1)..(25): SEQ ID NO: 6597; WAN024BAM_s_at; Start 43; Stop 67
gagctgaatggcactcgttttctag

SEQ ID NO: 76357 - DNA, 25 bp, Artificial
  probe
  misc_feature (1)..(25): SEQ ID NO: 6597; WAN024BAM_s_at; Start 2; Stop 26
tgagggggctagtcttatctgcaat

SEQ ID NO: 76358 - DNA, 25 bp, Artificial
  probe
  misc_feature (1)..(25): SEQ ID NO: 6597; WAN024BAM_s_at; Start 48; Stop 72
gaatggcactcgttttctagtttgc

SEQ ID NO: 76359 - DNA, 25 bp, Artificial
  probe
  misc_feature (1)..(25): SEQ ID NO: 6597; WAN024BAM_s_at; Start 4; Stop 28
agggggctagtcttatctgcaatct

SEQ ID NO: 76360 - DNA, 25 bp, Artificial
  probe
  misc_feature (1)..(25): SEQ ID NO: 6597; WAN024BAM_s_at; Start 36; Stop 60
gtgttttgagctgaatggcactcgt

SEQ ID NO: 76361 - DNA, 25 bp, Artificial
  probe
  misc_feature (1)..(25): SEQ ID NO: 6597; WAN024BAM_s_at; Start 49; Stop 73
aatggcactcgttttctagtttgct

SEQ ID NO: 76362 - DNA, 25 bp, Artificial
  probe
  misc_feature (1)..(25): SEQ ID NO: 6597; WAN024BAM_s_at; Start 46; Stop 70
ctgaatggcactcgttttctagttt

SEQ ID NO: 76363 - DNA, 25 bp, Artificial
  probe
  misc_feature (1)..(25): SEQ ID NO: 7566; WAN024BAN_x_at; Start 14; Stop 38
ggttactgacttcgtcagtttcatc

SEQ ID NO: 76364 - DNA, 25 bp, Artificial
  probe
  misc_feature (1)..(25): SEQ ID NO: 7566; WAN024BAN_x_at; Start 22; Stop 46
acttcgtcagtttcatctacaacct

SEQ ID NO: 76365 - DNA, 25 bp, Artificial
  probe
  misc_feature (1)..(25): SEQ ID NO: 7566; WAN024BAN_x_at; Start 23; Stop 47
cttcgtcagtttcatctacaacctc

SEQ ID NO: 76366 - DNA, 25 bp, Artificial
  probe
  misc_feature (1)..(25): SEQ ID NO: 7566; WAN024BAN_x_at; Start 18; Stop 42
actgacttcgtcagtttcatctaca

SEQ ID NO: 76367 - DNA, 25 bp, Artificial
  probe
  misc_feature (1)..(25): SEQ ID NO: 7566; WAN024BAN_x_at; Start 21; Stop 45
gacttcgtcagtttcatctacaacc

SEQ ID NO: 76368 - DNA, 25 bp, Artificial
  probe
  misc_feature (1)..(25): SEQ ID NO: 7566; WAN024BAN_x_at; Start 25; Stop 49
tcgtcagtttcatctacaacctcaa

SEQ ID NO: 76369 - DNA, 25 bp, Artificial
  probe
  misc_feature (1)..(25): SEQ ID NO: 7566; WAN024BAN_x_at; Start 4; Stop 28
ccgtatgtatggttactgacttcgt

SEQ ID NO: 76370 - DNA, 25 bp, Artificial
  probe
  misc_feature (1)..(25): SEQ ID NO: 7566; WAN024BAN_x_at; Start 74; Stop 98
ctagcttcctagtttgctctttgat

SEQ ID NO: 76371 - DNA, 25 bp, Artificial
  probe
  misc_feature (1)..(25): SEQ ID NO: 7566; WAN024BAN_x_at; Start 10; Stop 34
gtatggttactgacttcgtcagttt

SEQ ID NO: 76372 - DNA, 25 bp, Artificial
  probe
  misc_feature (1)..(25): SEQ ID NO: 7566; WAN024BAN_x_at; Start 32; Stop 56
tttcatctacaacctcaaaacagtg

SEQ ID NO: 76373 - DNA, 25 bp, Artificial
  probe
  misc_feature (1)..(25): SEQ ID NO: 7566; WAN024BAN_x_at; Start 31; Stop 55
gtttcatctacaacctcaaaacagt

SEQ ID NO: 76374 - DNA, 25 bp, Artificial
  probe
  misc_feature (1)..(25): SEQ ID NO: 7566; WAN024BAN_x_at; Start 28; Stop 52
tcagtttcatctacaacctcaaaac

SEQ ID NO: 76375 - DNA, 25 bp, Artificial
  probe
  misc_feature (1)..(25): SEQ ID NO: 7566; WAN024BAN_x_at; Start 12; Stop 36
atggttactgacttcgtcagtttca

SEQ ID NO: 76376 - DNA, 25 bp, Artificial
  probe
  misc_feature (1)..(25): SEQ ID NO: 7566; WAN024BAN_x_at; Start 20; Stop 44
tgacttcgtcagtttcatctacaac

SEQ ID NO: 76377 - DNA, 25 bp, Artificial
  probe
  misc_feature (1)..(25): SEQ ID NO: 7566; WAN024BAN_x_at; Start 26; Stop 50
cgtcagtttcatctacaacctcaaa

SEQ ID NO: 76378 - DNA, 25 bp, Artificial
  probe
  misc_feature (1)..(25): SEQ ID NO: 7566; WAN024BAN_x_at; Start 9; Stop 33
tgtatggttactgacttcgtcagtt

SEQ ID NO: 76379 - DNA, 25 bp, Artificial
  probe
  misc_feature (1)..(25): SEQ ID NO: 7566; WAN024BAN_x_at; Start 7; Stop 31
tatgtatggttactgacttcgtcag

SEQ ID NO: 76380 - DNA, 25 bp, Artificial
  probe
  misc_feature (1)..(25): SEQ ID NO: 7566; WAN024BAN_x_at; Start 30; Stop 54
agtttcatctacaacctcaaaacag

SEQ ID NO: 76381 - DNA, 25 bp, Artificial
  probe
  misc_feature (1)..(25): SEQ ID NO: 7566; WAN024BAN_x_at; Start 24; Stop 48
ttcgtcagtttcatctacaacctca

SEQ ID NO: 76382 - DNA, 25 bp, Artificial
  probe
  misc_feature (1)..(25): SEQ ID NO: 7566; WAN024BAN_x_at; Start 16; Stop 40
ttactgacttcgtcagtttcatcta

SEQ ID NO: 76383 - DNA, 25 bp, Artificial
  probe
  misc_feature (1)..(25): SEQ ID NO: 7566; WAN024BAN_x_at; Start 17; Stop 41
tactgacttcgtcagtttcatctac

SEQ ID NO: 76384 - DNA, 25 bp, Artificial
  probe
  misc_feature (1)..(25): SEQ ID NO: 7566; WAN024BAN_x_at; Start 33; Stop 57
ttcatctacaacctcaaaacagtgt

SEQ ID NO: 76385 - DNA, 25 bp, Artificial
  probe
  misc_feature (1)..(25): SEQ ID NO: 7566; WAN024BAN_x_at; Start 13; Stop 37
tggttactgacttcgtcagtttcat

SEQ ID NO: 76386 - DNA, 25 bp, Artificial
  probe
  misc_feature (1)..(25): SEQ ID NO: 7566; WAN024BAN_x_at; Start 19; Stop 43
ctgacttcgtcagtttcatctacaa

SEQ ID NO: 76387 - DNA, 25 bp, Artificial
  probe
  misc_feature (1)..(25): SEQ ID NO: 7566; WAN024BAN_x_at; Start 8; Stop 32
atgtatggttactgacttcgtcagt

SEQ ID NO: 76388 - DNA, 25 bp, Artificial
  probe
  misc_feature (1)..(25): SEQ ID NO: 7566; WAN024BAN_x_at; Start 99; Stop 123
tttcattgagtataagttttcaaaa

SEQ ID NO: 76389 - DNA, 25 bp, Artificial
  probe
  misc_feature (1)..(25): SEQ ID NO: 7566; WAN024BAN_x_at; Start 15; Stop 39
gttactgacttcgtcagtttcatct

SEQ ID NO: 76390 - DNA, 25 bp, Artificial
  probe
  misc_feature (1)..(25): SEQ ID NO: 7566; WAN024BAN_x_at; Start 3; Stop 27
gccgtatgtatggttactgacttcg

SEQ ID NO: 76391 - DNA, 25 bp, Artificial
  probe
  misc_feature (1)..(25): SEQ ID NO: 7566; WAN024BAN_x_at; Start 6; Stop 30
gtatgtatggttactgacttcgtca

SEQ ID NO: 76392 - DNA, 25 bp, Artificial
  probe
  misc_feature (1)..(25): SEQ ID NO: 7566; WAN024BAN_x_at; Start 5; Stop 29
cgtatgtatggttactgacttcgtc

SEQ ID NO: 76393 - DNA, 25 bp, Artificial
  probe
  misc_feature (1)..(25): SEQ ID NO: 7566; WAN024BAN_x_at; Start 29; Stop 53
cagtttcatctacaacctcaaaaca

SEQ ID NO: 76394 - DNA, 25 bp, Artificial
  probe
  misc_feature (1)..(25): SEQ ID NO: 7566; WAN024BAN_x_at; Start 49; Stop 73
aaacagtgttttgagcagcctgcgg

SEQ ID NO: 76395 - DNA, 25 bp, Artificial
  probe
  misc_feature (1)..(25): SEQ ID NO: 7566; WAN024BAN_x_at; Start 27; Stop 51
gtcagtttcatctacaacctcaaaa

SEQ ID NO: 76396 - DNA, 25 bp, Artificial
  probe
  misc_feature (1)..(25): SEQ ID NO: 7566; WAN024BAN_x_at; Start 11; Stop 35
tatggttactgacttcgtcagtttc

SEQ ID NO: 76397 - DNA, 25 bp, Artificial
  probe
  misc_feature (1)..(25): SEQ ID NO: 6351; WAN024BAO_x_at; Start 32; Stop 56
ccgcaggttgctcaaaacactggtt

SEQ ID NO: 76398 - DNA, 25 bp, Artificial
  probe
  misc_feature (1)..(25): SEQ ID NO: 6351; WAN024BAO_x_at; Start 8; Stop 32
tcaaagagcaaactaggcagctagc

SEQ ID NO: 76399 - DNA, 25 bp, Artificial
  probe
  misc_feature (1)..(25): SEQ ID NO: 6351; WAN024BAO_x_at; Start 36; Stop 60
aggttgctcaaaacactggtttgag

SEQ ID NO: 76400 - DNA, 25 bp, Artificial
  probe
  misc_feature (1)..(25): SEQ ID NO: 6351; WAN024BAO_x_at; Start 15; Stop 39
gcaaactaggcagctagccgcaggt

SEQ ID NO: 76401 - DNA, 25 bp, Artificial
  probe
  misc_feature (1)..(25): SEQ ID NO: 6351; WAN024BAO_x_at; Start 41; Stop 65
gctcaaaacactggtttgaggttgc

SEQ ID NO: 76402 - DNA, 25 bp, Artificial
  probe
  misc_feature (1)..(25): SEQ ID NO: 6351; WAN024BAO_x_at; Start 12; Stop 36
agagcaaactaggcagctagccgca

SEQ ID NO: 76403 - DNA, 25 bp, Artificial
  probe
  misc_feature (1)..(25): SEQ ID NO: 6351; WAN024BAO_x_at; Start 59; Stop 83
aggttgcagatagagctgacgtggt

SEQ ID NO: 76404 - DNA, 25 bp, Artificial
  probe
  misc_feature (1)..(25): SEQ ID NO: 6351; WAN024BAO_x_at; Start 4; Stop 28
aaaatcaaagagcaaactaggcagc

SEQ ID NO: 76405 - DNA, 25 bp, Artificial
  probe
  misc_feature (1)..(25): SEQ ID NO: 6351; WAN024BAO_x_at; Start 16; Stop 40
caaactaggcagctagccgcaggtt

SEQ ID NO: 76406 - DNA, 25 bp, Artificial
  probe
  misc_feature (1)..(25): SEQ ID NO: 6351; WAN024BAO_x_at; Start 18; Stop 42
aactaggcagctagccgcaggttgc

SEQ ID NO: 76407 - DNA, 25 bp, Artificial
  probe
  misc_feature (1)..(25): SEQ ID NO: 6351; WAN024BAO_x_at; Start 10; Stop 34
aaagagcaaactaggcagctagccg

SEQ ID NO: 76408 - DNA, 25 bp, Artificial
  probe
  misc_feature (1)..(25): SEQ ID NO: 6351; WAN024BAO_x_at; Start 35; Stop 59
caggttgctcaaaacactggtttga

SEQ ID NO: 76409 - DNA, 25 bp, Artificial
  probe
  misc_feature (1)..(25): SEQ ID NO: 6351; WAN024BAO_x_at; Start 9; Stop 33
caaagagcaaactaggcagctagcc

SEQ ID NO: 76410 - DNA, 25 bp, Artificial
  probe
  misc_feature (1)..(25): SEQ ID NO: 6351; WAN024BAO_x_at; Start 13; Stop 37
gagcaaactaggcagctagccgcag

SEQ ID NO: 76411 - DNA, 25 bp, Artificial
  probe
  misc_feature (1)..(25): SEQ ID NO: 6351; WAN024BAO_x_at; Start 39; Stop 63
ttgctcaaaacactggtttgaggtt

SEQ ID NO: 76412 - DNA, 25 bp, Artificial
  probe
  misc_feature (1)..(25): SEQ ID NO: 6351; WAN024BAO_x_at; Start 31; Stop 55
gccgcaggttgctcaaaacactggt

SEQ ID NO: 76413 - DNA, 25 bp, Artificial
  probe
  misc_feature (1)..(25): SEQ ID NO: 6351; WAN024BAO_x_at; Start 60; Stop 84
ggttgcagatagagctgacgtggtt

SEQ ID NO: 76414 - DNA, 25 bp, Artificial
  probe
  misc_feature (1)..(25): SEQ ID NO: 6351; WAN024BAO_x_at; Start 42; Stop 66
ctcaaaacactggtttgaggttgca

SEQ ID NO: 76415 - DNA, 25 bp, Artificial
  probe
  misc_feature (1)..(25): SEQ ID NO: 6351; WAN024BAO_x_at; Start 5; Stop 29
aaatcaaagagcaaactaggcagct

SEQ ID NO: 76416 - DNA, 25 bp, Artificial
  probe
  misc_feature (1)..(25): SEQ ID NO: 6351; WAN024BAO_x_at; Start 40; Stop 64
tgctcaaaacactggtttgaggttg

SEQ ID NO: 76417 - DNA, 25 bp, Artificial
  probe
  misc_feature (1)..(25): SEQ ID NO: 6351; WAN024BAO_x_at; Start 17; Stop 41
aaactaggcagctagccgcaggttg

SEQ ID NO: 76418 - DNA, 25 bp, Artificial
  probe
  misc_feature (1)..(25): SEQ ID NO: 6351; WAN024BAO_x_at; Start 38; Stop 62
gttgctcaaaacactggtttgaggt

SEQ ID NO: 76419 - DNA, 25 bp, Artificial
  probe
  misc_feature (1)..(25): SEQ ID NO: 6351; WAN024BAO_x_at; Start 37; Stop 61
ggttgctcaaaacactggtttgagg

SEQ ID NO: 76420 - DNA, 25 bp, Artificial
  probe
  misc_feature (1)..(25): SEQ ID NO: 6351; WAN024BAO_x_at; Start 2; Stop 26
tgaaaatcaaagagcaaactaggca

SEQ ID NO: 76421 - DNA, 25 bp, Artificial
  probe
  misc_feature (1)..(25): SEQ ID NO: 6351; WAN024BAO_x_at; Start 14; Stop 38
agcaaactaggcagctagccgcagg

SEQ ID NO: 76422 - DNA, 25 bp, Artificial
  probe
  misc_feature (1)..(25): SEQ ID NO: 6351; WAN024BAO_x_at; Start 33; Stop 57
cgcaggttgctcaaaacactggttt

SEQ ID NO: 76423 - DNA, 25 bp, Artificial
  probe
  misc_feature (1)..(25): SEQ ID NO: 6351; WAN024BAO_x_at; Start 43; Stop 67
tcaaaacactggtttgaggttgcag

SEQ ID NO: 76424 - DNA, 25 bp, Artificial
  probe
  misc_feature (1)..(25): SEQ ID NO: 6351; WAN024BAO_x_at; Start 7; Stop 31
atcaaagagcaaactaggcagctag

SEQ ID NO: 76425 - DNA, 25 bp, Artificial
  probe
  misc_feature (1)..(25): SEQ ID NO: 6351; WAN024BAO_x_at; Start 1; Stop 25
atgaaaatcaaagagcaaactaggc

SEQ ID NO: 76426 - DNA, 25 bp, Artificial
  probe
  misc_feature (1)..(25): SEQ ID NO: 6351; WAN024BAO_x_at; Start 44; Stop 68
caaaacactggtttgaggttgcaga

SEQ ID NO: 76427 - DNA, 25 bp, Artificial
  probe
  misc_feature (1)..(25): SEQ ID NO: 6351; WAN024BAO_x_at; Start 34; Stop 58
gcaggttgctcaaaacactggtttg

SEQ ID NO: 76428 - DNA, 25 bp, Artificial
  probe
  misc_feature (1)..(25): SEQ ID NO: 6351; WAN024BAO_x_at; Start 6; Stop 30
aatcaaagagcaaactaggcagcta

SEQ ID NO: 76429 - DNA, 25 bp, Artificial
  probe
  misc_feature (1)..(25): SEQ ID NO: 6351; WAN024BAO_x_at; Start 3; Stop 27
gaaaatcaaagagcaaactaggcag

SEQ ID NO: 76430 - DNA, 25 bp, Artificial
  probe
  misc_feature (1)..(25): SEQ ID NO: 6351; WAN024BAO_x_at; Start 11; Stop 35
aagagcaaactaggcagctagccgc

SEQ ID NO: 76431 - DNA, 25 bp, Artificial
  probe
  misc_feature (1)..(25): SEQ ID NO: 7447; WAN024BAQ_s_at; Start 22; Stop 46
ctcaaaatcaaagacttatactctt

SEQ ID NO: 76432 - DNA, 25 bp, Artificial
  probe
  misc_feature (1)..(25): SEQ ID NO: 7447; WAN024BAQ_s_at; Start 1; Stop 25
ttgaccctgactctccttagtctca

SEQ ID NO: 76433 - DNA, 25 bp, Artificial
  probe
  misc_feature (1)..(25): SEQ ID NO: 7447; WAN024BAQ_s_at; Start 18; Stop 42
tagtctcaaaatcaaagacttatac

SEQ ID NO: 76434 - DNA, 25 bp, Artificial
  probe
  misc_feature (1)..(25): SEQ ID NO: 7447; WAN024BAQ_s_at; Start 4; Stop 28
accctgactctccttagtctcaaaa

SEQ ID NO: 76435 - DNA, 25 bp, Artificial
  probe
  misc_feature (1)..(25): SEQ ID NO: 7447; WAN024BAQ_s_at; Start 27; Stop 51
aatcaaagacttatactcttcaaaa

SEQ ID NO: 76436 - DNA, 25 bp, Artificial
  probe
  misc_feature (1)..(25): SEQ ID NO: 7447; WAN024BAQ_s_at; Start 23; Stop 47
tcaaaatcaaagacttatactcttc

SEQ ID NO: 76437 - DNA, 25 bp, Artificial
  probe
  misc_feature (1)..(25): SEQ ID NO: 7447; WAN024BAQ_s_at; Start 3; Stop 27
gaccctgactctccttagtctcaaa

SEQ ID NO: 76438 - DNA, 25 bp, Artificial
  probe
  misc_feature (1)..(25): SEQ ID NO: 7447; WAN024BAQ_s_at; Start 17; Stop 41
ttagtctcaaaatcaaagacttata

SEQ ID NO: 76439 - DNA, 25 bp, Artificial
  probe
  misc_feature (1)..(25): SEQ ID NO: 7447; WAN024BAQ_s_at; Start 8; Stop 32
tgactctccttagtctcaaaatcaa

SEQ ID NO: 76440 - DNA, 25 bp, Artificial
  probe
  misc_feature (1)..(25): SEQ ID NO: 7447; WAN024BAQ_s_at; Start 25; Stop 49
aaaatcaaagacttatactcttcaa

SEQ ID NO: 76441 - DNA, 25 bp, Artificial
  probe
  misc_feature (1)..(25): SEQ ID NO: 7447; WAN024BAQ_s_at; Start 2; Stop 26
tgaccctgactctccttagtctcaa

SEQ ID NO: 76442 - DNA, 25 bp, Artificial
  probe
  misc_feature (1)..(25): SEQ ID NO: 7447; WAN024BAQ_s_at; Start 14; Stop 38
tccttagtctcaaaatcaaagactt

SEQ ID NO: 76443 - DNA, 25 bp, Artificial
  probe
  misc_feature (1)..(25): SEQ ID NO: 7447; WAN024BAQ_s_at; Start 20; Stop 44
gtctcaaaatcaaagacttatactc

SEQ ID NO: 76444 - DNA, 25 bp, Artificial
  probe
  misc_feature (1)..(25): SEQ ID NO: 7447; WAN024BAQ_s_at; Start 9; Stop 33
gactctccttagtctcaaaatcaaa

SEQ ID NO: 76445 - DNA, 25 bp, Artificial
  probe
  misc_feature (1)..(25): SEQ ID NO: 7447; WAN024BAQ_s_at; Start 5; Stop 29
ccctgactctccttagtctcaaaat

SEQ ID NO: 76446 - DNA, 25 bp, Artificial
  probe
  misc_feature (1)..(25): SEQ ID NO: 7447; WAN024BAQ_s_at; Start 10; Stop 34
actctccttagtctcaaaatcaaag

SEQ ID NO: 76447 - DNA, 25 bp, Artificial
  probe
  misc_feature (1)..(25): SEQ ID NO: 7447; WAN024BAQ_s_at; Start 6; Stop 30
cctgactctccttagtctcaaaatc

SEQ ID NO: 76448 - DNA, 25 bp, Artificial
  probe
  misc_feature (1)..(25): SEQ ID NO: 7447; WAN024BAQ_s_at; Start 11; Stop 35
ctctccttagtctcaaaatcaaaga

SEQ ID NO: 76449 - DNA, 25 bp, Artificial
  probe
  misc_feature (1)..(25): SEQ ID NO: 7447; WAN024BAQ_s_at; Start 13; Stop 37
ctccttagtctcaaaatcaaagact

SEQ ID NO: 76450 - DNA, 25 bp, Artificial
  probe
  misc_feature (1)..(25): SEQ ID NO: 7447; WAN024BAQ_s_at; Start 12; Stop 36
tctccttagtctcaaaatcaaagac

SEQ ID NO: 76451 - DNA, 25 bp, Artificial
  probe
  misc_feature (1)..(25): SEQ ID NO: 7447; WAN024BAQ_s_at; Start 26; Stop 50
aaatcaaagacttatactcttcaaa

SEQ ID NO: 76452 - DNA, 25 bp, Artificial
  probe
  misc_feature (1)..(25): SEQ ID NO: 7447; WAN024BAQ_s_at; Start 19; Stop 43
agtctcaaaatcaaagacttatact

SEQ ID NO: 76453 - DNA, 25 bp, Artificial
  probe
  misc_feature (1)..(25): SEQ ID NO: 7447; WAN024BAQ_s_at; Start 29; Stop 53
tcaaagacttatactcttcaaaaat

SEQ ID NO: 76454 - DNA, 25 bp, Artificial
  probe
  misc_feature (1)..(25): SEQ ID NO: 7447; WAN024BAQ_s_at; Start 24; Stop 48
caaaatcaaagacttatactcttca

SEQ ID NO: 76455 - DNA, 25 bp, Artificial
  probe
  misc_feature (1)..(25): SEQ ID NO: 7447; WAN024BAQ_s_at; Start 28; Stop 52
atcaaagacttatactcttcaaaaa

SEQ ID NO: 76456 - DNA, 25 bp, Artificial
  probe
  misc_feature (1)..(25): SEQ ID NO: 7447; WAN024BAQ_s_at; Start 16; Stop 40
cttagtctcaaaatcaaagacttat

SEQ ID NO: 76457 - DNA, 25 bp, Artificial
  probe
  misc_feature (1)..(25): SEQ ID NO: 7447; WAN024BAQ_s_at; Start 21; Stop 45
tctcaaaatcaaagacttatactct

SEQ ID NO: 76458 - DNA, 25 bp, Artificial
  probe
  misc_feature (1)..(25): SEQ ID NO: 7447; WAN024BAQ_s_at; Start 7; Stop 31
ctgactctccttagtctcaaaatca

SEQ ID NO: 76459 - DNA, 25 bp, Artificial
  probe
  misc_feature (1)..(25): SEQ ID NO: 7447; WAN024BAQ_s_at; Start 15; Stop 39
ccttagtctcaaaatcaaagactta

SEQ ID NO: 76460 - DNA, 25 bp, Artificial
  probe
  misc_feature (1)..(25): SEQ ID NO: 7061; WAN024BAR_at; Start 29; Stop 53
tgtggctagctacctagtttgatct

SEQ ID NO: 76461 - DNA, 25 bp, Artificial
  probe
  misc_feature (1)..(25): SEQ ID NO: 7061; WAN024BAR_at; Start 30; Stop 54
gtggctagctacctagtttgatctt

SEQ ID NO: 76462 - DNA, 25 bp, Artificial
  probe
  misc_feature (1)..(25): SEQ ID NO: 7061; WAN024BAR_at; Start 28; Stop 52
ctgtggctagctacctagtttgatc

SEQ ID NO: 76463 - DNA, 25 bp, Artificial
  probe
  misc_feature (1)..(25): SEQ ID NO: 7061; WAN024BAR_at; Start 31; Stop 55
tggctagctacctagtttgatcttt

SEQ ID NO: 76464 - DNA, 25 bp, Artificial
  probe
  misc_feature (1)..(25): SEQ ID NO: 13; WAN024BAU_x_at; Start 17; Stop 41
cagttctatccacaacctcaaaaca

SEQ ID NO: 76465 - DNA, 25 bp, Artificial
  probe
  misc_feature (1)..(25): SEQ ID NO: 13; WAN024BAU_x_at; Start 32; Stop 56
cctcaaaacagtgttttgagcaacc

SEQ ID NO: 76466 - DNA, 25 bp, Artificial
  probe
  misc_feature (1)..(25): SEQ ID NO: 13; WAN024BAU_x_at; Start 10; Stop 34
actctgtcagttctatccacaacct

SEQ ID NO: 76467 - DNA, 25 bp, Artificial
  probe
  misc_feature (1)..(25): SEQ ID NO: 13; WAN024BAU_x_at; Start 30; Stop 54
aacctcaaaacagtgttttgagcaa

SEQ ID NO: 76468 - DNA, 25 bp, Artificial
  probe
  misc_feature (1)..(25): SEQ ID NO: 13; WAN024BAU_x_at; Start 22; Stop 46
ctatccacaacctcaaaacagtgtt

SEQ ID NO: 76469 - DNA, 25 bp, Artificial
  probe
  misc_feature (1)..(25): SEQ ID NO: 13; WAN024BAU_x_at; Start 21; Stop 45
tctatccacaacctcaaaacagtgt

SEQ ID NO: 76470 - DNA, 25 bp, Artificial
  probe
  misc_feature (1)..(25): SEQ ID NO: 13; WAN024BAU_x_at; Start 13; Stop 37
ctgtcagttctatccacaacctcaa

SEQ ID NO: 76471 - DNA, 25 bp, Artificial
  probe
  misc_feature (1)..(25): SEQ ID NO: 13; WAN024BAU_x_at; Start 14; Stop 38
tgtcagttctatccacaacctcaaa

SEQ ID NO: 76472 - DNA, 25 bp, Artificial
  probe
  misc_feature (1)..(25): SEQ ID NO: 13; WAN024BAU_x_at; Start 3; Stop 27
gatactgactctgtcagttctatcc

SEQ ID NO: 76473 - DNA, 25 bp, Artificial
  probe
  misc_feature (1)..(25): SEQ ID NO: 13; WAN024BAU_x_at; Start 20; Stop 44
ttctatccacaacctcaaaacagtg

SEQ ID NO: 76474 - DNA, 25 bp, Artificial
  probe
  misc_feature (1)..(25): SEQ ID NO: 13; WAN024BAU_x_at; Start 19; Stop 43
gttctatccacaacctcaaaacagt

SEQ ID NO: 76475 - DNA, 25 bp, Artificial
  probe
  misc_feature (1)..(25): SEQ ID NO: 13; WAN024BAU_x_at; Start 28; Stop 52
acaacctcaaaacagtgttttgagc

SEQ ID NO: 76476 - DNA, 25 bp, Artificial
  probe
  misc_feature (1)..(25): SEQ ID NO: 13; WAN024BAU_x_at; Start 23; Stop 47
tatccacaacctcaaaacagtgttt

SEQ ID NO: 76477 - DNA, 25 bp, Artificial
  probe
  misc_feature (1)..(25): SEQ ID NO: 13; WAN024BAU_x_at; Start 11; Stop 35
ctctgtcagttctatccacaacctc

SEQ ID NO: 76478 - DNA, 25 bp, Artificial
  probe
  misc_feature (1)..(25): SEQ ID NO: 13; WAN024BAU_x_at; Start 1; Stop 25
atgatactgactctgtcagttctat

SEQ ID NO: 76479 - DNA, 25 bp, Artificial
  probe
  misc_feature (1)..(25): SEQ ID NO: 13; WAN024BAU_x_at; Start 12; Stop 36
tctgtcagttctatccacaacctca

SEQ ID NO: 76480 - DNA, 25 bp, Artificial
  probe
  misc_feature (1)..(25): SEQ ID NO: 13; WAN024BAU_x_at; Start 2; Stop 26
tgatactgactctgtcagttctatc

SEQ ID NO: 76481 - DNA, 25 bp, Artificial
  probe
  misc_feature (1)..(25): SEQ ID NO: 13; WAN024BAU_x_at; Start 26; Stop 50
ccacaacctcaaaacagtgttttga

SEQ ID NO: 76482 - DNA, 25 bp, Artificial
  probe
  misc_feature (1)..(25): SEQ ID NO: 13; WAN024BAU_x_at; Start 18; Stop 42
agttctatccacaacctcaaaacag

SEQ ID NO: 76483 - DNA, 25 bp, Artificial
  probe
  misc_feature (1)..(25): SEQ ID NO: 13; WAN024BAU_x_at; Start 9; Stop 33
gactctgtcagttctatccacaacc

SEQ ID NO: 76484 - DNA, 25 bp, Artificial
  probe
  misc_feature (1)..(25): SEQ ID NO: 13; WAN024BAU_x_at; Start 16; Stop 40
tcagttctatccacaacctcaaaac

SEQ ID NO: 76485 - DNA, 25 bp, Artificial
  probe
  misc_feature (1)..(25): SEQ ID NO: 13; WAN024BAU_x_at; Start 27; Stop 51
cacaacctcaaaacagtgttttgag

SEQ ID NO: 76486 - DNA, 25 bp, Artificial
  probe
  misc_feature (1)..(25): SEQ ID NO: 13; WAN024BAU_x_at; Start 25; Stop 49
tccacaacctcaaaacagtgttttg

SEQ ID NO: 76487 - DNA, 25 bp, Artificial
  probe
  misc_feature (1)..(25): SEQ ID NO: 13; WAN024BAU_x_at; Start 33; Stop 57
ctcaaaacagtgttttgagcaacct

SEQ ID NO: 76488 - DNA, 25 bp, Artificial
  probe
  misc_feature (1)..(25): SEQ ID NO: 13; WAN024BAU_x_at; Start 24; Stop 48
atccacaacctcaaaacagtgtttt

SEQ ID NO: 76489 - DNA, 25 bp, Artificial
  probe
  misc_feature (1)..(25): SEQ ID NO: 13; WAN024BAU_x_at; Start 29; Stop 53
caacctcaaaacagtgttttgagca

SEQ ID NO: 76490 - DNA, 25 bp, Artificial
  probe
  misc_feature (1)..(25): SEQ ID NO: 13; WAN024BAU_x_at; Start 36; Stop 60
aaaacagtgttttgagcaacctgcg

SEQ ID NO: 76491 - DNA, 25 bp, Artificial
  probe
  misc_feature (1)..(25): SEQ ID NO: 13; WAN024BAU_x_at; Start 34; Stop 58
tcaaaacagtgttttgagcaacctg

SEQ ID NO: 76492 - DNA, 25 bp, Artificial
  probe
  misc_feature (1)..(25): SEQ ID NO: 13; WAN024BAU_x_at; Start 4; Stop 28
atactgactctgtcagttctatcca

SEQ ID NO: 76493 - DNA, 25 bp, Artificial
  probe
  misc_feature (1)..(25): SEQ ID NO: 13; WAN024BAU_x_at; Start 5; Stop 29
tactgactctgtcagttctatccac

SEQ ID NO: 76494 - DNA, 25 bp, Artificial
  probe
  misc_feature (1)..(25): SEQ ID NO: 13; WAN024BAU_x_at; Start 15; Stop 39
gtcagttctatccacaacctcaaaa

SEQ ID NO: 76495 - DNA, 25 bp, Artificial
  probe
  misc_feature (1)..(25): SEQ ID NO: 13; WAN024BAU_x_at; Start 37; Stop 61
aaacagtgttttgagcaacctgcgg

SEQ ID NO: 76496 - DNA, 25 bp, Artificial
  probe
  misc_feature (1)..(25): SEQ ID NO: 13; WAN024BAU_x_at; Start 31; Stop 55
acctcaaaacagtgttttgagcaac

SEQ ID NO: 76497 - DNA, 25 bp, Artificial
  probe
  misc_feature (1)..(25): SEQ ID NO: 13; WAN024BAU_x_at; Start 35; Stop 59
caaaacagtgttttgagcaacctgc

SEQ ID NO: 76498 - DNA, 25 bp, Artificial
  probe
  misc_feature (1)..(25): SEQ ID NO: 6342; WAN024BAV_x_at; Start 41; Stop 65
gttcaaagcactgctttgaggttgc

SEQ ID NO: 76499 - DNA, 25 bp, Artificial
  probe
  misc_feature (1)..(25): SEQ ID NO: 6342; WAN024BAV_x_at; Start 6; Stop 30
aatcaaagagcaaactagaaagcta

SEQ ID NO: 76500 - DNA, 25 bp, Artificial
  probe
  misc_feature (1)..(25): SEQ ID NO: 6342; WAN024BAV_x_at; Start 32; Stop 56
ccgcaggctgttcaaagcactgctt

SEQ ID NO: 76501 - DNA, 25 bp, Artificial
  probe
  misc_feature (1)..(25): SEQ ID NO: 6342; WAN024BAV_x_at; Start 35; Stop 59
caggctgttcaaagcactgctttga

SEQ ID NO: 76502 - DNA, 25 bp, Artificial
  probe
  misc_feature (1)..(25): SEQ ID NO: 6342; WAN024BAV_x_at; Start 15; Stop 39
gcaaactagaaagctagccgcaggc

SEQ ID NO: 76503 - DNA, 25 bp, Artificial
  probe
  misc_feature (1)..(25): SEQ ID NO: 6342; WAN024BAV_x_at; Start 5; Stop 29
aaatcaaagagcaaactagaaagct

SEQ ID NO: 76504 - DNA, 25 bp, Artificial
  probe
  misc_feature (1)..(25): SEQ ID NO: 6342; WAN024BAV_x_at; Start 12; Stop 36
agagcaaactagaaagctagccgca

SEQ ID NO: 76505 - DNA, 25 bp, Artificial
  probe
  misc_feature (1)..(25): SEQ ID NO: 6342; WAN024BAV_x_at; Start 4; Stop 28
aaaatcaaagagcaaactagaaagc

SEQ ID NO: 76506 - DNA, 25 bp, Artificial
  probe
  misc_feature (1)..(25): SEQ ID NO: 6342; WAN024BAV_x_at; Start 38; Stop 62
gctgttcaaagcactgctttgaggt

SEQ ID NO: 76507 - DNA, 25 bp, Artificial
  probe
  misc_feature (1)..(25): SEQ ID NO: 6342; WAN024BAV_x_at; Start 10; Stop 34
aaagagcaaactagaaagctagccg

SEQ ID NO: 76508 - DNA, 25 bp, Artificial
  probe
  misc_feature (1)..(25): SEQ ID NO: 6342; WAN024BAV_x_at; Start 8; Stop 32
tcaaagagcaaactagaaagctagc

SEQ ID NO: 76509 - DNA, 25 bp, Artificial
  probe
  misc_feature (1)..(25): SEQ ID NO: 6342; WAN024BAV_x_at; Start 39; Stop 63
ctgttcaaagcactgctttgaggtt

SEQ ID NO: 76510 - DNA, 25 bp, Artificial
  probe
  misc_feature (1)..(25): SEQ ID NO: 6342; WAN024BAV_x_at; Start 31; Stop 55
gccgcaggctgttcaaagcactgct

SEQ ID NO: 76511 - DNA, 25 bp, Artificial
  probe
  misc_feature (1)..(25): SEQ ID NO: 6342; WAN024BAV_x_at; Start 13; Stop 37
gagcaaactagaaagctagccgcag

SEQ ID NO: 76512 - DNA, 25 bp, Artificial
  probe
  misc_feature (1)..(25): SEQ ID NO: 6342; WAN024BAV_x_at; Start 36; Stop 60
aggctgttcaaagcactgctttgag

SEQ ID NO: 76513 - DNA, 25 bp, Artificial
  probe
  misc_feature (1)..(25): SEQ ID NO: 6342; WAN024BAV_x_at; Start 42; Stop 66
ttcaaagcactgctttgaggttgca

SEQ ID NO: 76514 - DNA, 25 bp, Artificial
  probe
  misc_feature (1)..(25): SEQ ID NO: 6342; WAN024BAV_x_at; Start 11; Stop 35
aagagcaaactagaaagctagccgc

SEQ ID NO: 76515 - DNA, 25 bp, Artificial
  probe
  misc_feature (1)..(25): SEQ ID NO: 6342; WAN024BAV_x_at; Start 9; Stop 33
caaagagcaaactagaaagctagcc

SEQ ID NO: 76516 - DNA, 25 bp, Artificial
  probe
  misc_feature (1)..(25): SEQ ID NO: 6342; WAN024BAV_x_at; Start 34; Stop 58
gcaggctgttcaaagcactgctttg

SEQ ID NO: 76517 - DNA, 25 bp, Artificial
  probe
  misc_feature (1)..(25): SEQ ID NO: 6342; WAN024BAV_x_at; Start 30; Stop 54
agccgcaggctgttcaaagcactgc

SEQ ID NO: 76518 - DNA, 25 bp, Artificial
  probe
  misc_feature (1)..(25): SEQ ID NO: 6342; WAN024BAV_x_at; Start 2; Stop 26
tgaaaatcaaagagcaaactagaaa

SEQ ID NO: 76519 - DNA, 25 bp, Artificial
  probe
  misc_feature (1)..(25): SEQ ID NO: 6342; WAN024BAV_x_at; Start 33; Stop 57
cgcaggctgttcaaagcactgcttt

SEQ ID NO: 76520 - DNA, 25 bp, Artificial
  probe
  misc_feature (1)..(25): SEQ ID NO: 6342; WAN024BAV_x_at; Start 7; Stop 31
atcaaagagcaaactagaaagctag

SEQ ID NO: 76521 - DNA, 25 bp, Artificial
  probe
  misc_feature (1)..(25): SEQ ID NO: 6342; WAN024BAV_x_at; Start 45; Stop 69
aaagcactgctttgaggttgcagat

SEQ ID NO: 76522 - DNA, 25 bp, Artificial
  probe
  misc_feature (1)..(25): SEQ ID NO: 6342; WAN024BAV_x_at; Start 44; Stop 68
caaagcactgctttgaggttgcaga

SEQ ID NO: 76523 - DNA, 25 bp, Artificial
  probe
  misc_feature (1)..(25): SEQ ID NO: 6342; WAN024BAV_x_at; Start 1; Stop 25
atgaaaatcaaagagcaaactagaa

SEQ ID NO: 76524 - DNA, 25 bp, Artificial
  probe
  misc_feature (1)..(25): SEQ ID NO: 6342; WAN024BAV_x_at; Start 37; Stop 61
ggctgttcaaagcactgctttgagg

SEQ ID NO: 76525 - DNA, 25 bp, Artificial
  probe
  misc_feature (1)..(25): SEQ ID NO: 6342; WAN024BAV_x_at; Start 43; Stop 67
tcaaagcactgctttgaggttgcag

SEQ ID NO: 76526 - DNA, 25 bp, Artificial
  probe
  misc_feature (1)..(25): SEQ ID NO: 6342; WAN024BAV_x_at; Start 3; Stop 27
gaaaatcaaagagcaaactagaaag

SEQ ID NO: 76527 - DNA, 25 bp, Artificial
  probe
  misc_feature (1)..(25): SEQ ID NO: 7178; WAN024BAW_x_at; Start 74; Stop 98
gcagtgctttgagtaacccgcggct

SEQ ID NO: 76528 - DNA, 25 bp, Artificial
  probe
  misc_feature (1)..(25): SEQ ID NO: 7178; WAN024BAW_x_at; Start 1; Stop 25
cttcgtcagttctatccacaacctc

SEQ ID NO: 76529 - DNA, 25 bp, Artificial
  probe
  misc_feature (1)..(25): SEQ ID NO: 7178; WAN024BAW_x_at; Start 52; Stop 76
cagttctatccacaacctcaaagca

SEQ ID NO: 76530 - DNA, 25 bp, Artificial
  probe
  misc_feature (1)..(25): SEQ ID NO: 7178; WAN024BAW_x_at; Start 73; Stop 97
agcagtgctttgagtaacccgcggc

SEQ ID NO: 76531 - DNA, 25 bp, Artificial
  probe
  misc_feature (1)..(25): SEQ ID NO: 7178; WAN024BAW_x_at; Start 57; Stop 81
ctatccacaacctcaaagcagtgct

SEQ ID NO: 76532 - DNA, 25 bp, Artificial
  probe
  misc_feature (1)..(25): SEQ ID NO: 7178; WAN024BAW_x_at; Start 12; Stop 36
ctatccacaacctcaaaacagtgtt

SEQ ID NO: 76533 - DNA, 25 bp, Artificial
  probe
  misc_feature (1)..(25): SEQ ID NO: 7178; WAN024BAW_x_at; Start 11; Stop 35
tctatccacaacctcaaaacagtgt

SEQ ID NO: 76534 - DNA, 25 bp, Artificial
  probe
  misc_feature (1)..(25): SEQ ID NO: 7178; WAN024BAW_x_at; Start 31; Stop 55
agtgttttgagctgacttcgtcagt

SEQ ID NO: 76535 - DNA, 25 bp, Artificial
  probe
  misc_feature (1)..(25): SEQ ID NO: 7178; WAN024BAW_x_at; Start 10; Stop 34
ttctatccacaacctcaaaacagtg

SEQ ID NO: 76536 - DNA, 25 bp, Artificial
  probe
  misc_feature (1)..(25): SEQ ID NO: 7178; WAN024BAW_x_at; Start 9; Stop 33
gttctatccacaacctcaaaacagt

SEQ ID NO: 76537 - DNA, 25 bp, Artificial
  probe
  misc_feature (1)..(25): SEQ ID NO: 7178; WAN024BAW_x_at; Start 13; Stop 37
tatccacaacctcaaaacagtgttt

SEQ ID NO: 76538 - DNA, 25 bp, Artificial
  probe
  misc_feature (1)..(25): SEQ ID NO: 7178; WAN024BAW_x_at; Start 77; Stop 101
gtgctttgagtaacccgcggctagt

SEQ ID NO: 76539 - DNA, 25 bp, Artificial
  probe
  misc_feature (1)..(25): SEQ ID NO: 7178; WAN024BAW_x_at; Start 8; Stop 32
agttctatccacaacctcaaaacag

SEQ ID NO: 76540 - DNA, 25 bp, Artificial
  probe
  misc_feature (1)..(25): SEQ ID NO: 7178; WAN024BAW_x_at; Start 53; Stop 77
agttctatccacaacctcaaagcag

SEQ ID NO: 76541 - DNA, 25 bp, Artificial
  probe
  misc_feature (1)..(25): SEQ ID NO: 7178; WAN024BAW_x_at; Start 2; Stop 26
ttcgtcagttctatccacaacctca

SEQ ID NO: 76542 - DNA, 25 bp, Artificial
  probe
  misc_feature (1)..(25): SEQ ID NO: 7178; WAN024BAW_x_at; Start 56; Stop 80
tctatccacaacctcaaagcagtgc

SEQ ID NO: 76543 - DNA, 25 bp, Artificial
  probe
  misc_feature (1)..(25): SEQ ID NO: 7178; WAN024BAW_x_at; Start 78; Stop 102
tgctttgagtaacccgcggctagtt

SEQ ID NO: 76544 - DNA, 25 bp, Artificial
  probe
  misc_feature (1)..(25): SEQ ID NO: 7178; WAN024BAW_x_at; Start 14; Stop 38
atccacaacctcaaaacagtgtttt

SEQ ID NO: 76545 - DNA, 25 bp, Artificial
  probe
  misc_feature (1)..(25): SEQ ID NO: 7178; WAN024BAW_x_at; Start 29; Stop 53
acagtgttttgagctgacttcgtca

SEQ ID NO: 76546 - DNA, 25 bp, Artificial
  probe
  misc_feature (1)..(25): SEQ ID NO: 7178; WAN024BAW_x_at; Start 75; Stop 99
cagtgctttgagtaacccgcggcta

SEQ ID NO: 76547 - DNA, 25 bp, Artificial
  probe
  misc_feature (1)..(25): SEQ ID NO: 7178; WAN024BAW_x_at; Start 72; Stop 96
aagcagtgctttgagtaacccgcgg

SEQ ID NO: 76548 - DNA, 25 bp, Artificial
  probe
  misc_feature (1)..(25): SEQ ID NO: 7178; WAN024BAW_x_at; Start 32; Stop 56
gtgttttgagctgacttcgtcagtt

SEQ ID NO: 76549 - DNA, 25 bp, Artificial
  probe
  misc_feature (1)..(25): SEQ ID NO: 7178; WAN024BAW_x_at; Start 5; Stop 29
gtcagttctatccacaacctcaaaa

SEQ ID NO: 76550 - DNA, 25 bp, Artificial
  probe
  misc_feature (1)..(25): SEQ ID NO: 7178; WAN024BAW_x_at; Start 76; Stop 100
agtgctttgagtaacccgcggctag

SEQ ID NO: 76551 - DNA, 25 bp, Artificial
  probe
  misc_feature (1)..(25): SEQ ID NO: 6268; WAN024BAX_x_at; Start 8; Stop 32
tactcttcgaaaatctcttcaaacc

SEQ ID NO: 76552 - DNA, 25 bp, Artificial
  probe
  misc_feature (1)..(25): SEQ ID NO: 6268; WAN024BAX_x_at; Start 32; Stop 56
cacgtcagtttccatctgcgacctc

SEQ ID NO: 76553 - DNA, 25 bp, Artificial
  probe
  misc_feature (1)..(25): SEQ ID NO: 6268; WAN024BAX_x_at; Start 6; Stop 30
catactcttcgaaaatctcttcaaa

SEQ ID NO: 76554 - DNA, 25 bp, Artificial
  probe
  misc_feature (1)..(25): SEQ ID NO: 6268; WAN024BAX_x_at; Start 1; Stop 25
aatctcatactcttcgaaaatctct

SEQ ID NO: 76555 - DNA, 25 bp, Artificial
  probe
  misc_feature (1)..(25): SEQ ID NO: 6268; WAN024BAX_x_at; Start 33; Stop 57
acgtcagtttccatctgcgacctca

SEQ ID NO: 76556 - DNA, 25 bp, Artificial
  probe
  misc_feature (1)..(25): SEQ ID NO: 6268; WAN024BAX_x_at; Start 57; Stop 81
aaaacactattttgagcaacctgcg

SEQ ID NO: 76557 - DNA, 25 bp, Artificial
  probe
  misc_feature (1)..(25): SEQ ID NO: 6268; WAN024BAX_x_at; Start 40; Stop 64
tttccatctgcgacctcaaaacact

SEQ ID NO: 76558 - DNA, 25 bp, Artificial
  probe
  misc_feature (1)..(25): SEQ ID NO: 6268; WAN024BAX_x_at; Start 11; Stop 35
tcttcgaaaatctcttcaaaccacg

SEQ ID NO: 76559 - DNA, 25 bp, Artificial
  probe
  misc_feature (1)..(25): SEQ ID NO: 6268; WAN024BAX_x_at; Start 34; Stop 58
cgtcagtttccatctgcgacctcaa

SEQ ID NO: 76560 - DNA, 25 bp, Artificial
  probe
  misc_feature (1)..(25): SEQ ID NO: 6268; WAN024BAX_x_at; Start 46; Stop 70
tctgcgacctcaaaacactattttg

SEQ ID NO: 76561 - DNA, 25 bp, Artificial
  probe
  misc_feature (1)..(25): SEQ ID NO: 6268; WAN024BAX_x_at; Start 36; Stop 60
tcagtttccatctgcgacctcaaaa

SEQ ID NO: 76562 - DNA, 25 bp, Artificial
  probe
  misc_feature (1)..(25): SEQ ID NO: 6268; WAN024BAX_x_at; Start 9; Stop 33
actcttcgaaaatctcttcaaacca

SEQ ID NO: 76563 - DNA, 25 bp, Artificial
  probe
  misc_feature (1)..(25): SEQ ID NO: 6268; WAN024BAX_x_at; Start 50; Stop 74
cgacctcaaaacactattttgagca

SEQ ID NO: 76564 - DNA, 25 bp, Artificial
  probe
  misc_feature (1)..(25): SEQ ID NO: 6268; WAN024BAX_x_at; Start 5; Stop 29
tcatactcttcgaaaatctcttcaa

SEQ ID NO: 76565 - DNA, 25 bp, Artificial
  probe
  misc_feature (1)..(25): SEQ ID NO: 6268; WAN024BAX_x_at; Start 48; Stop 72
tgcgacctcaaaacactattttgag

SEQ ID NO: 76566 - DNA, 25 bp, Artificial
  probe
  misc_feature (1)..(25): SEQ ID NO: 6268; WAN024BAX_x_at; Start 4; Stop 28
ctcatactcttcgaaaatctcttca

SEQ ID NO: 76567 - DNA, 25 bp, Artificial
  probe
  misc_feature (1)..(25): SEQ ID NO: 6268; WAN024BAX_x_at; Start 47; Stop 71
ctgcgacctcaaaacactattttga

SEQ ID NO: 76568 - DNA, 25 bp, Artificial
  probe
  misc_feature (1)..(25): SEQ ID NO: 6268; WAN024BAX_x_at; Start 10; Stop 34
ctcttcgaaaatctcttcaaaccac

SEQ ID NO: 76569 - DNA, 25 bp, Artificial
  probe
  misc_feature (1)..(25): SEQ ID NO: 6268; WAN024BAX_x_at; Start 7; Stop 31
atactcttcgaaaatctcttcaaac

SEQ ID NO: 76570 - DNA, 25 bp, Artificial
  probe
  misc_feature (1)..(25): SEQ ID NO: 6268; WAN024BAX_x_at; Start 51; Stop 75
gacctcaaaacactattttgagcaa

SEQ ID NO: 76571 - DNA, 25 bp, Artificial
  probe
  misc_feature (1)..(25): SEQ ID NO: 6268; WAN024BAX_x_at; Start 31; Stop 55
ccacgtcagtttccatctgcgacct

SEQ ID NO: 76572 - DNA, 25 bp, Artificial
  probe
  misc_feature (1)..(25): SEQ ID NO: 6268; WAN024BAX_x_at; Start 39; Stop 63
gtttccatctgcgacctcaaaacac

SEQ ID NO: 76573 - DNA, 25 bp, Artificial
  probe
  misc_feature (1)..(25): SEQ ID NO: 6268; WAN024BAX_x_at; Start 42; Stop 66
tccatctgcgacctcaaaacactat

SEQ ID NO: 76574 - DNA, 25 bp, Artificial
  probe
  misc_feature (1)..(25): SEQ ID NO: 6268; WAN024BAX_x_at; Start 2; Stop 26
atctcatactcttcgaaaatctctt

SEQ ID NO: 76575 - DNA, 25 bp, Artificial
  probe
  misc_feature (1)..(25): SEQ ID NO: 6268; WAN024BAX_x_at; Start 35; Stop 59
gtcagtttccatctgcgacctcaaa

SEQ ID NO: 76576 - DNA, 25 bp, Artificial
  probe
  misc_feature (1)..(25): SEQ ID NO: 6268; WAN024BAX_x_at; Start 30; Stop 54
accacgtcagtttccatctgcgacc

SEQ ID NO: 76577 - DNA, 25 bp, Artificial
  probe
  misc_feature (1)..(25): SEQ ID NO: 6268; WAN024BAX_x_at; Start 44; Stop 68
catctgcgacctcaaaacactattt

SEQ ID NO: 76578 - DNA, 25 bp, Artificial
  probe
  misc_feature (1)..(25): SEQ ID NO: 6268; WAN024BAX_x_at; Start 3; Stop 27
tctcatactcttcgaaaatctcttc

SEQ ID NO: 76579 - DNA, 25 bp, Artificial
  probe
  misc_feature (1)..(25): SEQ ID NO: 6268; WAN024BAX_x_at; Start 56; Stop 80
caaaacactattttgagcaacctgc

SEQ ID NO: 76580 - DNA, 25 bp, Artificial
  probe
  misc_feature (1)..(25): SEQ ID NO: 6268; WAN024BAX_x_at; Start 41; Stop 65
ttccatctgcgacctcaaaacacta

SEQ ID NO: 76581 - DNA, 25 bp, Artificial
  probe
  misc_feature (1)..(25): SEQ ID NO: 6268; WAN024BAX_x_at; Start 12; Stop 36
cttcgaaaatctcttcaaaccacgt

SEQ ID NO: 76582 - DNA, 25 bp, Artificial
  probe
  misc_feature (1)..(25): SEQ ID NO: 6268; WAN024BAX_x_at; Start 29; Stop 53
aaccacgtcagtttccatctgcgac

SEQ ID NO: 76583 - DNA, 25 bp, Artificial
  probe
  misc_feature (1)..(25): SEQ ID NO: 6268; WAN024BAX_x_at; Start 13; Stop 37
ttcgaaaatctcttcaaaccacgtc

SEQ ID NO: 76584 - DNA, 25 bp, Artificial
  probe
  misc_feature (1)..(25): SEQ ID NO: 6767; WAN024BB2_at; Start 10; Stop 34
cttctattttatactctcttcaaac

SEQ ID NO: 76585 - DNA, 25 bp, Artificial
  probe
  misc_feature (1)..(25): SEQ ID NO: 6767; WAN024BB2_at; Start 11; Stop 35
ttctattttatactctcttcaaacc

SEQ ID NO: 76586 - DNA, 25 bp, Artificial
  probe
  misc_feature (1)..(25): SEQ ID NO: 6767; WAN024BB2_at; Start 9; Stop 33
ccttctattttatactctcttcaaa

SEQ ID NO: 76587 - DNA, 25 bp, Artificial
  probe
  misc_feature (1)..(25): SEQ ID NO: 6767; WAN024BB2_at; Start 12; Stop 36
tctattttatactctcttcaaacca

SEQ ID NO: 76588 - DNA, 25 bp, Artificial
  probe
  misc_feature (1)..(25): SEQ ID NO: 6767; WAN024BB2_at; Start 7; Stop 31
ctccttctattttatactctcttca

SEQ ID NO: 76589 - DNA, 25 bp, Artificial
  probe
  misc_feature (1)..(25): SEQ ID NO: 6767; WAN024BB2_at; Start 8; Stop 32
tccttctattttatactctcttcaa

SEQ ID NO: 76590 - DNA, 25 bp, Artificial
  probe
  misc_feature (1)..(25): SEQ ID NO: 7582; WAN024BB3_x_at; Start 57; Stop 81
ggttactgactttgtcagtttcatc

SEQ ID NO: 76591 - DNA, 25 bp, Artificial
  probe
  misc_feature (1)..(25): SEQ ID NO: 7582; WAN024BB3_x_at; Start 1; Stop 25
ttgctactcttcgaaaatctcttca

SEQ ID NO: 76592 - DNA, 25 bp, Artificial
  probe
  misc_feature (1)..(25): SEQ ID NO: 7582; WAN024BB3_x_at; Start 3; Stop 27
gctactcttcgaaaatctcttcaaa

SEQ ID NO: 76593 - DNA, 25 bp, Artificial
  probe
  misc_feature (1)..(25): SEQ ID NO: 7582; WAN024BB3_x_at; Start 66; Stop 90
ctttgtcagtttcatctacaacctc

SEQ ID NO: 76594 - DNA, 25 bp, Artificial
  probe
  misc_feature (1)..(25): SEQ ID NO: 7582; WAN024BB3_x_at; Start 61; Stop 85
actgactttgtcagtttcatctaca

SEQ ID NO: 76595 - DNA, 25 bp, Artificial
  probe
  misc_feature (1)..(25): SEQ ID NO: 7582; WAN024BB3_x_at; Start 64; Stop 88
gactttgtcagtttcatctacaacc

SEQ ID NO: 76596 - DNA, 25 bp, Artificial
  probe
  misc_feature (1)..(25): SEQ ID NO: 7582; WAN024BB3_x_at; Start 13; Stop 37
gaaaatctcttcaaaccacgtcagc

SEQ ID NO: 76597 - DNA, 25 bp, Artificial
  probe
  misc_feature (1)..(25): SEQ ID NO: 7582; WAN024BB3_x_at; Start 69; Stop 93
tgtcagtttcatctacaacctcaaa

SEQ ID NO: 76598 - DNA, 25 bp, Artificial
  probe
  misc_feature (1)..(25): SEQ ID NO: 7582; WAN024BB3_x_at; Start 38; Stop 62
gtcgccttgccgtatgtatggttac

SEQ ID NO: 76599 - DNA, 25 bp, Artificial
  probe
  misc_feature (1)..(25): SEQ ID NO: 7582; WAN024BB3_x_at; Start 5; Stop 29
tactcttcgaaaatctcttcaaacc

SEQ ID NO: 76600 - DNA, 25 bp, Artificial
  probe
  misc_feature (1)..(25): SEQ ID NO: 7582; WAN024BB3_x_at; Start 39; Stop 63
tcgccttgccgtatgtatggttact

SEQ ID NO: 76601 - DNA, 25 bp, Artificial
  probe
  misc_feature (1)..(25): SEQ ID NO: 7582; WAN024BB3_x_at; Start 19; Stop 43
ctcttcaaaccacgtcagcgtcgcc

SEQ ID NO: 76602 - DNA, 25 bp, Artificial
  probe
  misc_feature (1)..(25): SEQ ID NO: 7582; WAN024BB3_x_at; Start 63; Stop 87
tgactttgtcagtttcatctacaac

SEQ ID NO: 76603 - DNA, 25 bp, Artificial
  probe
  misc_feature (1)..(25): SEQ ID NO: 7582; WAN024BB3_x_at; Start 8; Stop 32
tcttcgaaaatctcttcaaaccacg

SEQ ID NO: 76604 - DNA, 25 bp, Artificial
  probe
  misc_feature (1)..(25): SEQ ID NO: 7582; WAN024BB3_x_at; Start 55; Stop 79
atggttactgactttgtcagtttca

SEQ ID NO: 76605 - DNA, 25 bp, Artificial
  probe
  misc_feature (1)..(25): SEQ ID NO: 7582; WAN024BB3_x_at; Start 34; Stop 58
cagcgtcgccttgccgtatgtatgg

SEQ ID NO: 76606 - DNA, 25 bp, Artificial
  probe
  misc_feature (1)..(25): SEQ ID NO: 7582; WAN024BB3_x_at; Start 6; Stop 30
actcttcgaaaatctcttcaaacca

SEQ ID NO: 76607 - DNA, 25 bp, Artificial
  probe
  misc_feature (1)..(25): SEQ ID NO: 7582; WAN024BB3_x_at; Start 4; Stop 28
ctactcttcgaaaatctcttcaaac

SEQ ID NO: 76608 - DNA, 25 bp, Artificial
  probe
  misc_feature (1)..(25): SEQ ID NO: 7582; WAN024BB3_x_at; Start 68; Stop 92
ttgtcagtttcatctacaacctcaa

SEQ ID NO: 76609 - DNA, 25 bp, Artificial
  probe
  misc_feature (1)..(25): SEQ ID NO: 7582; WAN024BB3_x_at; Start 2; Stop 26
tgctactcttcgaaaatctcttcaa

SEQ ID NO: 76610 - DNA, 25 bp, Artificial
  probe
  misc_feature (1)..(25): SEQ ID NO: 7582; WAN024BB3_x_at; Start 7; Stop 31
ctcttcgaaaatctcttcaaaccac

SEQ ID NO: 76611 - DNA, 25 bp, Artificial
  probe
  misc_feature (1)..(25): SEQ ID NO: 7582; WAN024BB3_x_at; Start 59; Stop 83
ttactgactttgtcagtttcatcta

SEQ ID NO: 76612 - DNA, 25 bp, Artificial
  probe
  misc_feature (1)..(25): SEQ ID NO: 7582; WAN024BB3_x_at; Start 60; Stop 84
tactgactttgtcagtttcatctac

SEQ ID NO: 76613 - DNA, 25 bp, Artificial
  probe
  misc_feature (1)..(25): SEQ ID NO: 7582; WAN024BB3_x_at; Start 56; Stop 80
tggttactgactttgtcagtttcat

SEQ ID NO: 76614 - DNA, 25 bp, Artificial
  probe
  misc_feature (1)..(25): SEQ ID NO: 7582; WAN024BB3_x_at; Start 62; Stop 86
ctgactttgtcagtttcatctacaa

SEQ ID NO: 76615 - DNA, 25 bp, Artificial
  probe
  misc_feature (1)..(25): SEQ ID NO: 7582; WAN024BB3_x_at; Start 11; Stop 35
tcgaaaatctcttcaaaccacgtca

SEQ ID NO: 76616 - DNA, 25 bp, Artificial
  probe
  misc_feature (1)..(25): SEQ ID NO: 7582; WAN024BB3_x_at; Start 35; Stop 59
agcgtcgccttgccgtatgtatggt

SEQ ID NO: 76617 - DNA, 25 bp, Artificial
  probe
  misc_feature (1)..(25): SEQ ID NO: 7582; WAN024BB3_x_at; Start 65; Stop 89
actttgtcagtttcatctacaacct

SEQ ID NO: 76618 - DNA, 25 bp, Artificial
  probe
  misc_feature (1)..(25): SEQ ID NO: 7582; WAN024BB3_x_at; Start 58; Stop 82
gttactgactttgtcagtttcatct

SEQ ID NO: 76619 - DNA, 25 bp, Artificial
  probe
  misc_feature (1)..(25): SEQ ID NO: 7582; WAN024BB3_x_at; Start 67; Stop 91
tttgtcagtttcatctacaacctca

SEQ ID NO: 76620 - DNA, 25 bp, Artificial
  probe
  misc_feature (1)..(25): SEQ ID NO: 7582; WAN024BB3_x_at; Start 9; Stop 33
cttcgaaaatctcttcaaaccacgt

SEQ ID NO: 76621 - DNA, 25 bp, Artificial
  probe
  misc_feature (1)..(25): SEQ ID NO: 7582; WAN024BB3_x_at; Start 12; Stop 36
cgaaaatctcttcaaaccacgtcag

SEQ ID NO: 76622 - DNA, 25 bp, Artificial
  probe
  misc_feature (1)..(25): SEQ ID NO: 7582; WAN024BB3_x_at; Start 54; Stop 78
tatggttactgactttgtcagtttc

SEQ ID NO: 76623 - DNA, 25 bp, Artificial
  probe
  misc_feature (1)..(25): SEQ ID NO: 7582; WAN024BB3_x_at; Start 10; Stop 34
ttcgaaaatctcttcaaaccacgtc

SEQ ID NO: 76624 - DNA, 25 bp, Artificial
  probe
  misc_feature (1)..(25): SEQ ID NO: 6341; WAN024BB5_s_at; Start 79; Stop 103
gaagtcagtcacatatataatccaa

SEQ ID NO: 76625 - DNA, 25 bp, Artificial
  probe
  misc_feature (1)..(25): SEQ ID NO: 6341; WAN024BB5_s_at; Start 78; Stop 102
cgaagtcagtcacatatataatcca

SEQ ID NO: 76626 - DNA, 25 bp, Artificial
  probe
  misc_feature (1)..(25): SEQ ID NO: 6341; WAN024BB5_s_at; Start 81; Stop 105
agtcagtcacatatataatccaagg

SEQ ID NO: 76627 - DNA, 25 bp, Artificial
  probe
  misc_feature (1)..(25): SEQ ID NO: 6341; WAN024BB5_s_at; Start 80; Stop 104
aagtcagtcacatatataatccaag

SEQ ID NO: 76628 - DNA, 25 bp, Artificial
  probe
  misc_feature (1)..(25): SEQ ID NO: 6341; WAN024BB5_s_at; Start 82; Stop 106
gtcagtcacatatataatccaaggc

SEQ ID NO: 76629 - DNA, 25 bp, Artificial
  probe
  misc_feature (1)..(25): SEQ ID NO: 6341; WAN024BB5_s_at; Start 77; Stop 101
acgaagtcagtcacatatataatcc

SEQ ID NO: 76630 - DNA, 25 bp, Artificial
  probe
  misc_feature (1)..(25): SEQ ID NO: 6340; WAN024BB6_at; Start 12; Stop 36
agagaaaactaggaagcaagtcgca

SEQ ID NO: 76631 - DNA, 25 bp, Artificial
  probe
  misc_feature (1)..(25): SEQ ID NO: 6340; WAN024BB6_at; Start 9; Stop 33
caaagagaaaactaggaagcaagtc

SEQ ID NO: 76632 - DNA, 25 bp, Artificial
  probe
  misc_feature (1)..(25): SEQ ID NO: 6340; WAN024BB6_at; Start 10; Stop 34
aaagagaaaactaggaagcaagtcg

SEQ ID NO: 76633 - DNA, 25 bp, Artificial
  probe
  misc_feature (1)..(25): SEQ ID NO: 6340; WAN024BB6_at; Start 11; Stop 35
aagagaaaactaggaagcaagtcgc

SEQ ID NO: 76634 - DNA, 25 bp, Artificial
  probe
  misc_feature (1)..(25): SEQ ID NO: 6345; WAN024BB8_x_at; Start 132; Stop 156
taacatctatacggcaagacgacgc

SEQ ID NO: 76635 - DNA, 25 bp, Artificial
  probe
  misc_feature (1)..(25): SEQ ID NO: 6345; WAN024BB8_x_at; Start 102; Stop 126
tgaggttgcagatagaactgacgaa

SEQ ID NO: 76636 - DNA, 25 bp, Artificial
  probe
  misc_feature (1)..(25): SEQ ID NO: 6345; WAN024BB8_x_at; Start 49; Stop 73
caccgttttgaggtagtagataaga

SEQ ID NO: 76637 - DNA, 25 bp, Artificial
  probe
  misc_feature (1)..(25): SEQ ID NO: 6345; WAN024BB8_x_at; Start 24; Stop 48
gaaactagctacaggttgctcaaaa

SEQ ID NO: 76638 - DNA, 25 bp, Artificial
  probe
  misc_feature (1)..(25): SEQ ID NO: 6345; WAN024BB8_x_at; Start 53; Stop 77
gttttgaggtagtagataagactga

SEQ ID NO: 76639 - DNA, 25 bp, Artificial
  probe
  misc_feature (1)..(25): SEQ ID NO: 6345; WAN024BB8_x_at; Start 22; Stop 46
aggaaactagctacaggttgctcaa

SEQ ID NO: 76640 - DNA, 25 bp, Artificial
  probe
  misc_feature (1)..(25): SEQ ID NO: 6345; WAN024BB8_x_at; Start 63; Stop 87
agtagataagactgacgaagtcagc

SEQ ID NO: 76641 - DNA, 25 bp, Artificial
  probe
  misc_feature (1)..(25): SEQ ID NO: 6345; WAN024BB8_x_at; Start 60; Stop 84
ggtagtagataagactgacgaagtc

SEQ ID NO: 76642 - DNA, 25 bp, Artificial
  probe
  misc_feature (1)..(25): SEQ ID NO: 6345; WAN024BB8_x_at; Start 59; Stop 83
aggtagtagataagactgacgaagt

SEQ ID NO: 76643 - DNA, 25 bp, Artificial
  probe
  misc_feature (1)..(25): SEQ ID NO: 6345; WAN024BB8_x_at; Start 21; Stop 45
taggaaactagctacaggttgctca

SEQ ID NO: 76644 - DNA, 25 bp, Artificial
  probe
  misc_feature (1)..(25): SEQ ID NO: 6345; WAN024BB8_x_at; Start 58; Stop 82
gaggtagtagataagactgacgaag

SEQ ID NO: 76645 - DNA, 25 bp, Artificial
  probe
  misc_feature (1)..(25): SEQ ID NO: 6345; WAN024BB8_x_at; Start 127; Stop 151
gtcagtaacatctatacggcaagac

SEQ ID NO: 76646 - DNA, 25 bp, Artificial
  probe
  misc_feature (1)..(25): SEQ ID NO: 6345; WAN024BB8_x_at; Start 19; Stop 43
actaggaaactagctacaggttgct

SEQ ID NO: 76647 - DNA, 25 bp, Artificial
  probe
  misc_feature (1)..(25): SEQ ID NO: 6345; WAN024BB8_x_at; Start 30; Stop 54
agctacaggttgctcaaaacaccgt

SEQ ID NO: 76648 - DNA, 25 bp, Artificial
  probe
  misc_feature (1)..(25): SEQ ID NO: 6345; WAN024BB8_x_at; Start 29; Stop 53
tagctacaggttgctcaaaacaccg

SEQ ID NO: 76649 - DNA, 25 bp, Artificial
  probe
  misc_feature (1)..(25): SEQ ID NO: 6345; WAN024BB8_x_at; Start 131; Stop 155
gtaacatctatacggcaagacgacg

SEQ ID NO: 76650 - DNA, 25 bp, Artificial
  probe
  misc_feature (1)..(25): SEQ ID NO: 6345; WAN024BB8_x_at; Start 52; Stop 76
cgttttgaggtagtagataagactg

SEQ ID NO: 76651 - DNA, 25 bp, Artificial
  probe
  misc_feature (1)..(25): SEQ ID NO: 6345; WAN024BB8_x_at; Start 54; Stop 78
ttttgaggtagtagataagactgac

SEQ ID NO: 76652 - DNA, 25 bp, Artificial
  probe
  misc_feature (1)..(25): SEQ ID NO: 6345; WAN024BB8_x_at; Start 48; Stop 72
acaccgttttgaggtagtagataag

SEQ ID NO: 76653 - DNA, 25 bp, Artificial
  probe
  misc_feature (1)..(25): SEQ ID NO: 6345; WAN024BB8_x_at; Start 130; Stop 154
agtaacatctatacggcaagacgac

SEQ ID NO: 76654 - DNA, 25 bp, Artificial
  probe
  misc_feature (1)..(25): SEQ ID NO: 6345; WAN024BB8_x_at; Start 62; Stop 86
tagtagataagactgacgaagtcag

SEQ ID NO: 76655 - DNA, 25 bp, Artificial
  probe
  misc_feature (1)..(25): SEQ ID NO: 6345; WAN024BB8_x_at; Start 129; Stop 153
cagtaacatctatacggcaagacga

SEQ ID NO: 76656 - DNA, 25 bp, Artificial
  probe
  misc_feature (1)..(25): SEQ ID NO: 6345; WAN024BB8_x_at; Start 77; Stop 101
acgaagtcagctcaaaacactgttt

SEQ ID NO: 76657 - DNA, 25 bp, Artificial
  probe
  misc_feature (1)..(25): SEQ ID NO: 6345; WAN024BB8_x_at; Start 55; Stop 79
tttgaggtagtagataagactgacg

SEQ ID NO: 76658 - DNA, 25 bp, Artificial
  probe
  misc_feature (1)..(25): SEQ ID NO: 6345; WAN024BB8_x_at; Start 32; Stop 56
ctacaggttgctcaaaacaccgttt

SEQ ID NO: 76659 - DNA, 25 bp, Artificial
  probe
  misc_feature (1)..(25): SEQ ID NO: 6345; WAN024BB8_x_at; Start 25; Stop 49
aaactagctacaggttgctcaaaac

SEQ ID NO: 76660 - DNA, 25 bp, Artificial
  probe
  misc_feature (1)..(25): SEQ ID NO: 6345; WAN024BB8_x_at; Start 20; Stop 44
ctaggaaactagctacaggttgctc

SEQ ID NO: 76661 - DNA, 25 bp, Artificial
  probe
  misc_feature (1)..(25): SEQ ID NO: 6345; WAN024BB8_x_at; Start 23; Stop 47
ggaaactagctacaggttgctcaaa

SEQ ID NO: 76662 - DNA, 25 bp, Artificial
  probe
  misc_feature (1)..(25): SEQ ID NO: 6345; WAN024BB8_x_at; Start 56; Stop 80
ttgaggtagtagataagactgacga

SEQ ID NO: 76663 - DNA, 25 bp, Artificial
  probe
  misc_feature (1)..(25): SEQ ID NO: 6345; WAN024BB8_x_at; Start 128; Stop 152
tcagtaacatctatacggcaagacg

SEQ ID NO: 76664 - DNA, 25 bp, Artificial
  probe
  misc_feature (1)..(25): SEQ ID NO: 6345; WAN024BB8_x_at; Start 1; Stop 25
atgaaaatcaaagagcaaactagga

SEQ ID NO: 76665 - DNA, 25 bp, Artificial
  probe
  misc_feature (1)..(25): SEQ ID NO: 6345; WAN024BB8_x_at; Start 61; Stop 85
gtagtagataagactgacgaagtca

SEQ ID NO: 76666 - DNA, 25 bp, Artificial
  probe
  misc_feature (1)..(25): SEQ ID NO: 6345; WAN024BB8_x_at; Start 31; Stop 55
gctacaggttgctcaaaacaccgtt

SEQ ID NO: 76667 - DNA, 25 bp, Artificial
  probe
  misc_feature (1)..(25): SEQ ID NO: 6345; WAN024BB8_x_at; Start 57; Stop 81
tgaggtagtagataagactgacgaa

SEQ ID NO: 76668 - DNA, 25 bp, Artificial
  probe
  misc_feature (1)..(25): SEQ ID NO: 6344; WAN024BB9_x_at; Start 132; Stop 156
taacatctatacggcaaggcgacgt

SEQ ID NO: 76669 - DNA, 25 bp, Artificial
  probe
  misc_feature (1)..(25): SEQ ID NO: 6344; WAN024BB9_x_at; Start 126; Stop 150
agtcagtaacatctatacggcaagg

SEQ ID NO: 76670 - DNA, 25 bp, Artificial
  probe
  misc_feature (1)..(25): SEQ ID NO: 6344; WAN024BB9_x_at; Start 98; Stop 122
gttttgaggttgcagatagaactga

SEQ ID NO: 76671 - DNA, 25 bp, Artificial
  probe
  misc_feature (1)..(25): SEQ ID NO: 6344; WAN024BB9_x_at; Start 12; Stop 36
agagcaaactaggaaactagccgca

SEQ ID NO: 76672 - DNA, 25 bp, Artificial
  probe
  misc_feature (1)..(25): SEQ ID NO: 6344; WAN024BB9_x_at; Start 74; Stop 98
ctaacgaagtcagctcaaaacactg

SEQ ID NO: 76673 - DNA, 25 bp, Artificial
  probe
  misc_feature (1)..(25): SEQ ID NO: 6344; WAN024BB9_x_at; Start 27; Stop 51
actagccgcaggttgctcaaatcac

SEQ ID NO: 76674 - DNA, 25 bp, Artificial
  probe
  misc_feature (1)..(25): SEQ ID NO: 6344; WAN024BB9_x_at; Start 72; Stop 96
aactaacgaagtcagctcaaaacac

SEQ ID NO: 76675 - DNA, 25 bp, Artificial
  probe
  misc_feature (1)..(25): SEQ ID NO: 6344; WAN024BB9_x_at; Start 73; Stop 97
actaacgaagtcagctcaaaacact

SEQ ID NO: 76676 - DNA, 25 bp, Artificial
  probe
  misc_feature (1)..(25): SEQ ID NO: 6344; WAN024BB9_x_at; Start 46; Stop 70
aatcactgctttgaggttgtagata

SEQ ID NO: 76677 - DNA, 25 bp, Artificial
  probe
  misc_feature (1)..(25): SEQ ID NO: 6344; WAN024BB9_x_at; Start 70; Stop 94
agaactaacgaagtcagctcaaaac

SEQ ID NO: 76678 - DNA, 25 bp, Artificial
  probe
  misc_feature (1)..(25): SEQ ID NO: 6344; WAN024BB9_x_at; Start 48; Stop 72
tcactgctttgaggttgtagataga

SEQ ID NO: 76679 - DNA, 25 bp, Artificial
  probe
  misc_feature (1)..(25): SEQ ID NO: 6344; WAN024BB9_x_at; Start 45; Stop 69
aaatcactgctttgaggttgtagat

SEQ ID NO: 76680 - DNA, 25 bp, Artificial
  probe
  misc_feature (1)..(25): SEQ ID NO: 6344; WAN024BB9_x_at; Start 71; Stop 95
gaactaacgaagtcagctcaaaaca

SEQ ID NO: 76681 - DNA, 25 bp, Artificial
  probe
  misc_feature (1)..(25): SEQ ID NO: 6344; WAN024BB9_x_at; Start 66; Stop 90
agatagaactaacgaagtcagctca

SEQ ID NO: 76682 - DNA, 25 bp, Artificial
  probe
  misc_feature (1)..(25): SEQ ID NO: 6344; WAN024BB9_x_at; Start 123; Stop 147
cgaagtcagtaacatctatacggca

SEQ ID NO: 76683 - DNA, 25 bp, Artificial
  probe
  misc_feature (1)..(25): SEQ ID NO: 6344; WAN024BB9_x_at; Start 131; Stop 155
gtaacatctatacggcaaggcgacg

SEQ ID NO: 76684 - DNA, 25 bp, Artificial
  probe
  misc_feature (1)..(25): SEQ ID NO: 6344; WAN024BB9_x_at; Start 76; Stop 100
aacgaagtcagctcaaaacactgtt

SEQ ID NO: 76685 - DNA, 25 bp, Artificial
  probe
  misc_feature (1)..(25): SEQ ID NO: 6344; WAN024BB9_x_at; Start 47; Stop 71
atcactgctttgaggttgtagatag

SEQ ID NO: 76686 - DNA, 25 bp, Artificial
  probe
  misc_feature (1)..(25): SEQ ID NO: 6344; WAN024BB9_x_at; Start 65; Stop 89
tagatagaactaacgaagtcagctc

SEQ ID NO: 76687 - DNA, 25 bp, Artificial
  probe
  misc_feature (1)..(25): SEQ ID NO: 6344; WAN024BB9_x_at; Start 130; Stop 154
agtaacatctatacggcaaggcgac

SEQ ID NO: 76688 - DNA, 25 bp, Artificial
  probe
  misc_feature (1)..(25): SEQ ID NO: 6344; WAN024BB9_x_at; Start 5; Stop 29
aaatcaaagagcaaactaggaaact

SEQ ID NO: 76689 - DNA, 25 bp, Artificial
  probe
  misc_feature (1)..(25): SEQ ID NO: 6344; WAN024BB9_x_at; Start 68; Stop 92
atagaactaacgaagtcagctcaaa

SEQ ID NO: 76690 - DNA, 25 bp, Artificial
  probe
  misc_feature (1)..(25): SEQ ID NO: 6344; WAN024BB9_x_at; Start 42; Stop 66
ctcaaatcactgctttgaggttgta

SEQ ID NO: 76691 - DNA, 25 bp, Artificial
  probe
  misc_feature (1)..(25): SEQ ID NO: 6344; WAN024BB9_x_at; Start 63; Stop 87
tgtagatagaactaacgaagtcagc

SEQ ID NO: 76692 - DNA, 25 bp, Artificial
  probe
  misc_feature (1)..(25): SEQ ID NO: 6344; WAN024BB9_x_at; Start 44; Stop 68
caaatcactgctttgaggttgtaga

SEQ ID NO: 76693 - DNA, 25 bp, Artificial
  probe
  misc_feature (1)..(25): SEQ ID NO: 6344; WAN024BB9_x_at; Start 69; Stop 93
tagaactaacgaagtcagctcaaaa

SEQ ID NO: 76694 - DNA, 25 bp, Artificial
  probe
  misc_feature (1)..(25): SEQ ID NO: 6344; WAN024BB9_x_at; Start 2; Stop 26
tgaaaatcaaagagcaaactaggaa

SEQ ID NO: 76695 - DNA, 25 bp, Artificial
  probe
  misc_feature (1)..(25): SEQ ID NO: 6344; WAN024BB9_x_at; Start 75; Stop 99
taacgaagtcagctcaaaacactgt

SEQ ID NO: 76696 - DNA, 25 bp, Artificial
  probe
  misc_feature (1)..(25): SEQ ID NO: 6344; WAN024BB9_x_at; Start 1; Stop 25
atgaaaatcaaagagcaaactagga

SEQ ID NO: 76697 - DNA, 25 bp, Artificial
  probe
  misc_feature (1)..(25): SEQ ID NO: 6344; WAN024BB9_x_at; Start 43; Stop 67
tcaaatcactgctttgaggttgtag

SEQ ID NO: 76698 - DNA, 25 bp, Artificial
  probe
  misc_feature (1)..(25): SEQ ID NO: 6344; WAN024BB9_x_at; Start 67; Stop 91
gatagaactaacgaagtcagctcaa

SEQ ID NO: 76699 - DNA, 25 bp, Artificial
  probe
  misc_feature (1)..(25): SEQ ID NO: 6344; WAN024BB9_x_at; Start 3; Stop 27
gaaaatcaaagagcaaactaggaaa

SEQ ID NO: 76700 - DNA, 25 bp, Artificial
  probe
  misc_feature (1)..(25): SEQ ID NO: 7092; WAN024BBA_x_at; Start 4; Stop 28
acttcgtcagtcttatctacaacct

SEQ ID NO: 76701 - DNA, 25 bp, Artificial
  probe
  misc_feature (1)..(25): SEQ ID NO: 7092; WAN024BBA_x_at; Start 5; Stop 29
cttcgtcagtcttatctacaacctc

SEQ ID NO: 76702 - DNA, 25 bp, Artificial
  probe
  misc_feature (1)..(25): SEQ ID NO: 7092; WAN024BBA_x_at; Start 26; Stop 50
cctcaaaacagtgttttgagcaacc

SEQ ID NO: 76703 - DNA, 25 bp, Artificial
  probe
  misc_feature (1)..(25): SEQ ID NO: 7092; WAN024BBA_x_at; Start 7; Stop 31
tcgtcagtcttatctacaacctcaa

SEQ ID NO: 76704 - DNA, 25 bp, Artificial
  probe
  misc_feature (1)..(25): SEQ ID NO: 7092; WAN024BBA_x_at; Start 24; Stop 48
aacctcaaaacagtgttttgagcaa

SEQ ID NO: 76705 - DNA, 25 bp, Artificial
  probe
  misc_feature (1)..(25): SEQ ID NO: 7092; WAN024BBA_x_at; Start 13; Stop 37
gtcttatctacaacctcaaaacagt

SEQ ID NO: 76706 - DNA, 25 bp, Artificial
  probe
  misc_feature (1)..(25): SEQ ID NO: 7092; WAN024BBA_x_at; Start 2; Stop 26
tgacttcgtcagtcttatctacaac

SEQ ID NO: 76707 - DNA, 25 bp, Artificial
  probe
  misc_feature (1)..(25): SEQ ID NO: 7092; WAN024BBA_x_at; Start 47; Stop 71
aacctgcgactagcttcctagttta

SEQ ID NO: 76708 - DNA, 25 bp, Artificial
  probe
  misc_feature (1)..(25): SEQ ID NO: 7092; WAN024BBA_x_at; Start 8; Stop 32
cgtcagtcttatctacaacctcaaa

SEQ ID NO: 76709 - DNA, 25 bp, Artificial
  probe
  misc_feature (1)..(25): SEQ ID NO: 7092; WAN024BBA_x_at; Start 17; Stop 41
tatctacaacctcaaaacagtgttt

SEQ ID NO: 76710 - DNA, 25 bp, Artificial
  probe
  misc_feature (1)..(25): SEQ ID NO: 7092; WAN024BBA_x_at; Start 22; Stop 46
acaacctcaaaacagtgttttgagc

SEQ ID NO: 76711 - DNA, 25 bp, Artificial
  probe
  misc_feature (1)..(25): SEQ ID NO: 7092; WAN024BBA_x_at; Start 12; Stop 36
agtcttatctacaacctcaaaacag

SEQ ID NO: 76712 - DNA, 25 bp, Artificial
  probe
  misc_feature (1)..(25): SEQ ID NO: 7092; WAN024BBA_x_at; Start 15; Stop 39
cttatctacaacctcaaaacagtgt

SEQ ID NO: 76713 - DNA, 25 bp, Artificial
  probe
  misc_feature (1)..(25): SEQ ID NO: 7092; WAN024BBA_x_at; Start 19; Stop 43
tctacaacctcaaaacagtgttttg

SEQ ID NO: 76714 - DNA, 25 bp, Artificial
  probe
  misc_feature (1)..(25): SEQ ID NO: 7092; WAN024BBA_x_at; Start 6; Stop 30
ttcgtcagtcttatctacaacctca

SEQ ID NO: 76715 - DNA, 25 bp, Artificial
  probe
  misc_feature (1)..(25): SEQ ID NO: 7092; WAN024BBA_x_at; Start 1; Stop 25
ctgacttcgtcagtcttatctacaa

SEQ ID NO: 76716 - DNA, 25 bp, Artificial
  probe
  misc_feature (1)..(25): SEQ ID NO: 7092; WAN024BBA_x_at; Start 10; Stop 34
tcagtcttatctacaacctcaaaac

SEQ ID NO: 76717 - DNA, 25 bp, Artificial
  probe
  misc_feature (1)..(25): SEQ ID NO: 7092; WAN024BBA_x_at; Start 27; Stop 51
ctcaaaacagtgttttgagcaacct

SEQ ID NO: 76718 - DNA, 25 bp, Artificial
  probe
  misc_feature (1)..(25): SEQ ID NO: 7092; WAN024BBA_x_at; Start 18; Stop 42
atctacaacctcaaaacagtgtttt

SEQ ID NO: 76719 - DNA, 25 bp, Artificial
  probe
  misc_feature (1)..(25): SEQ ID NO: 7092; WAN024BBA_x_at; Start 23; Stop 47
caacctcaaaacagtgttttgagca

SEQ ID NO: 76720 - DNA, 25 bp, Artificial
  probe
  misc_feature (1)..(25): SEQ ID NO: 7092; WAN024BBA_x_at; Start 16; Stop 40
ttatctacaacctcaaaacagtgtt

SEQ ID NO: 76721 - DNA, 25 bp, Artificial
  probe
  misc_feature (1)..(25): SEQ ID NO: 7092; WAN024BBA_x_at; Start 21; Stop 45
tacaacctcaaaacagtgttttgag

SEQ ID NO: 76722 - DNA, 25 bp, Artificial
  probe
  misc_feature (1)..(25): SEQ ID NO: 7092; WAN024BBA_x_at; Start 30; Stop 54
aaaacagtgttttgagcaacctgcg

SEQ ID NO: 76723 - DNA, 25 bp, Artificial
  probe
  misc_feature (1)..(25): SEQ ID NO: 7092; WAN024BBA_x_at; Start 32; Stop 56
aacagtgttttgagcaacctgcgac

SEQ ID NO: 76724 - DNA, 25 bp, Artificial
  probe
  misc_feature (1)..(25): SEQ ID NO: 7092; WAN024BBA_x_at; Start 28; Stop 52
tcaaaacagtgttttgagcaacctg

SEQ ID NO: 76725 - DNA, 25 bp, Artificial
  probe
  misc_feature (1)..(25): SEQ ID NO: 7092; WAN024BBA_x_at; Start 20; Stop 44
ctacaacctcaaaacagtgttttga

SEQ ID NO: 76726 - DNA, 25 bp, Artificial
  probe
  misc_feature (1)..(25): SEQ ID NO: 7092; WAN024BBA_x_at; Start 29; Stop 53
caaaacagtgttttgagcaacctgc

SEQ ID NO: 76727 - DNA, 25 bp, Artificial
  probe
  misc_feature (1)..(25): SEQ ID NO: 7092; WAN024BBA_x_at; Start 25; Stop 49
acctcaaaacagtgttttgagcaac

SEQ ID NO: 76728 - DNA, 25 bp, Artificial
  probe
  misc_feature (1)..(25): SEQ ID NO: 7092; WAN024BBA_x_at; Start 31; Stop 55
aaacagtgttttgagcaacctgcga

SEQ ID NO: 76729 - DNA, 25 bp, Artificial
  probe
  misc_feature (1)..(25): SEQ ID NO: 7092; WAN024BBA_x_at; Start 14; Stop 38
tcttatctacaacctcaaaacagtg

SEQ ID NO: 76730 - DNA, 25 bp, Artificial
  probe
  misc_feature (1)..(25): SEQ ID NO: 7092; WAN024BBA_x_at; Start 9; Stop 33
gtcagtcttatctacaacctcaaaa

SEQ ID NO: 76731 - DNA, 25 bp, Artificial
  probe
  misc_feature (1)..(25): SEQ ID NO: 7092; WAN024BBA_x_at; Start 3; Stop 27
gacttcgtcagtcttatctacaacc

SEQ ID NO: 76732 - DNA, 25 bp, Artificial
  probe
  misc_feature (1)..(25): SEQ ID NO: 6349; WAN024BBB_x_at; Start 50; Stop 74
agtgttttgaggttgtggatagaac

SEQ ID NO: 76733 - DNA, 25 bp, Artificial
  probe
  misc_feature (1)..(25): SEQ ID NO: 6349; WAN024BBB_x_at; Start 32; Stop 56
ccgcaggctgctcaaaacagtgttt

SEQ ID NO: 76734 - DNA, 25 bp, Artificial
  probe
  misc_feature (1)..(25): SEQ ID NO: 6349; WAN024BBB_x_at; Start 143; Stop 167
acggtaaggtgacgctgacgtggtt

SEQ ID NO: 76735 - DNA, 25 bp, Artificial
  probe
  misc_feature (1)..(25): SEQ ID NO: 6349; WAN024BBB_x_at; Start 76; Stop 100
gacgacgtcagctcaagacactgtt

SEQ ID NO: 76736 - DNA, 25 bp, Artificial
  probe
  misc_feature (1)..(25): SEQ ID NO: 6349; WAN024BBB_x_at; Start 48; Stop 72
acagtgttttgaggttgtggataga

SEQ ID NO: 76737 - DNA, 25 bp, Artificial
  probe
  misc_feature (1)..(25): SEQ ID NO: 6349; WAN024BBB_x_at; Start 79; Stop 103
gacgtcagctcaagacactgttttg

SEQ ID NO: 76738 - DNA, 25 bp, Artificial
  probe
  misc_feature (1)..(25): SEQ ID NO: 6349; WAN024BBB_x_at; Start 80; Stop 104
acgtcagctcaagacactgttttga

SEQ ID NO: 76739 - DNA, 25 bp, Artificial
  probe
  misc_feature (1)..(25): SEQ ID NO: 6349; WAN024BBB_x_at; Start 75; Stop 99
tgacgacgtcagctcaagacactgt

SEQ ID NO: 76740 - DNA, 25 bp, Artificial
  probe
  misc_feature (1)..(25): SEQ ID NO: 6349; WAN024BBB_x_at; Start 142; Stop 166
tacggtaaggtgacgctgacgtggt

SEQ ID NO: 76741 - DNA, 25 bp, Artificial
  probe
  misc_feature (1)..(25): SEQ ID NO: 6349; WAN024BBB_x_at; Start 15; Stop 39
gcaaactaggaagctagccgcaggc

SEQ ID NO: 76742 - DNA, 25 bp, Artificial
  probe
  misc_feature (1)..(25): SEQ ID NO: 6349; WAN024BBB_x_at; Start 74; Stop 98
ctgacgacgtcagctcaagacactg

SEQ ID NO: 76743 - DNA, 25 bp, Artificial
  probe
  misc_feature (1)..(25): SEQ ID NO: 6349; WAN024BBB_x_at; Start 49; Stop 73
cagtgttttgaggttgtggatagaa

SEQ ID NO: 76744 - DNA, 25 bp, Artificial
  probe
  misc_feature (1)..(25): SEQ ID NO: 6349; WAN024BBB_x_at; Start 72; Stop 96
aactgacgacgtcagctcaagacac

SEQ ID NO: 76745 - DNA, 25 bp, Artificial
  probe
  misc_feature (1)..(25): SEQ ID NO: 6349; WAN024BBB_x_at; Start 109; Stop 133
gcagatagaactgacgaagtcagta

SEQ ID NO: 76746 - DNA, 25 bp, Artificial
  probe
  misc_feature (1)..(25): SEQ ID NO: 6349; WAN024BBB_x_at; Start 144; Stop 168
cggtaaggtgacgctgacgtggttt

SEQ ID NO: 76747 - DNA, 25 bp, Artificial
  probe
  misc_feature (1)..(25): SEQ ID NO: 6349; WAN024BBB_x_at; Start 83; Stop 107
tcagctcaagacactgttttgaggt

SEQ ID NO: 76748 - DNA, 25 bp, Artificial
  probe
  misc_feature (1)..(25): SEQ ID NO: 6349; WAN024BBB_x_at; Start 31; Stop 55
gccgcaggctgctcaaaacagtgtt

SEQ ID NO: 76749 - DNA, 25 bp, Artificial
  probe
  misc_feature (1)..(25): SEQ ID NO: 6349; WAN024BBB_x_at; Start 146; Stop 170
gtaaggtgacgctgacgtggtttga

SEQ ID NO: 76750 - DNA, 25 bp, Artificial
  probe
  misc_feature (1)..(25): SEQ ID NO: 6349; WAN024BBB_x_at; Start 140; Stop 164
cctacggtaaggtgacgctgacgtg

SEQ ID NO: 76751 - DNA, 25 bp, Artificial
  probe
  misc_feature (1)..(25): SEQ ID NO: 6349; WAN024BBB_x_at; Start 134; Stop 158
accatacctacggtaaggtgacgct

SEQ ID NO: 76752 - DNA, 25 bp, Artificial
  probe
  misc_feature (1)..(25): SEQ ID NO: 6349; WAN024BBB_x_at; Start 51; Stop 75
gtgttttgaggttgtggatagaact

SEQ ID NO: 76753 - DNA, 25 bp, Artificial
  probe
  misc_feature (1)..(25): SEQ ID NO: 6349; WAN024BBB_x_at; Start 141; Stop 165
ctacggtaaggtgacgctgacgtgg

SEQ ID NO: 76754 - DNA, 25 bp, Artificial
  probe
  misc_feature (1)..(25): SEQ ID NO: 6349; WAN024BBB_x_at; Start 147; Stop 171
taaggtgacgctgacgtggtttgaa

SEQ ID NO: 76755 - DNA, 25 bp, Artificial
  probe
  misc_feature (1)..(25): SEQ ID NO: 6349; WAN024BBB_x_at; Start 73; Stop 97
actgacgacgtcagctcaagacact

SEQ ID NO: 76756 - DNA, 25 bp, Artificial
  probe
  misc_feature (1)..(25): SEQ ID NO: 6349; WAN024BBB_x_at; Start 77; Stop 101
acgacgtcagctcaagacactgttt

SEQ ID NO: 76757 - DNA, 25 bp, Artificial
  probe
  misc_feature (1)..(25): SEQ ID NO: 6349; WAN024BBB_x_at; Start 139; Stop 163
acctacggtaaggtgacgctgacgt

SEQ ID NO: 76758 - DNA, 25 bp, Artificial
  probe
  misc_feature (1)..(25): SEQ ID NO: 6349; WAN024BBB_x_at; Start 136; Stop 160
catacctacggtaaggtgacgctga

SEQ ID NO: 76759 - DNA, 25 bp, Artificial
  probe
  misc_feature (1)..(25): SEQ ID NO: 6349; WAN024BBB_x_at; Start 81; Stop 105
cgtcagctcaagacactgttttgag

SEQ ID NO: 76760 - DNA, 25 bp, Artificial
  probe
  misc_feature (1)..(25): SEQ ID NO: 6349; WAN024BBB_x_at; Start 145; Stop 169
ggtaaggtgacgctgacgtggtttg

SEQ ID NO: 76761 - DNA, 25 bp, Artificial
  probe
  misc_feature (1)..(25): SEQ ID NO: 6349; WAN024BBB_x_at; Start 135; Stop 159
ccatacctacggtaaggtgacgctg

SEQ ID NO: 76762 - DNA, 25 bp, Artificial
  probe
  misc_feature (1)..(25): SEQ ID NO: 6349; WAN024BBB_x_at; Start 82; Stop 106
gtcagctcaagacactgttttgagg

SEQ ID NO: 76763 - DNA, 25 bp, Artificial
  probe
  misc_feature (1)..(25): SEQ ID NO: 6349; WAN024BBB_x_at; Start 138; Stop 162
tacctacggtaaggtgacgctgacg

SEQ ID NO: 76764 - DNA, 25 bp, Artificial
  probe
  misc_feature (1)..(25): SEQ ID NO: 6349; WAN024BBB_x_at; Start 84; Stop 108
cagctcaagacactgttttgaggtt

SEQ ID NO: 76765 - DNA, 25 bp, Artificial
  probe
  misc_feature (1)..(25): SEQ ID NO: 6349; WAN024BBB_x_at; Start 57; Stop 81
tgaggttgtggatagaactgacgac

SEQ ID NO: 76766 - DNA, 25 bp, Artificial
  probe
  misc_feature (1)..(25): SEQ ID NO: 6354; WAN024BBD_x_at; Start 132; Stop 156
taacatctatacggcaaggcgacgt

SEQ ID NO: 76767 - DNA, 25 bp, Artificial
  probe
  misc_feature (1)..(25): SEQ ID NO: 6354; WAN024BBD_x_at; Start 126; Stop 150
agtcagtaacatctatacggcaagg

SEQ ID NO: 76768 - DNA, 25 bp, Artificial
  probe
  misc_feature (1)..(25): SEQ ID NO: 6354; WAN024BBD_x_at; Start 29; Stop 53
tagctgcgggctgctcaaaacactg

SEQ ID NO: 76769 - DNA, 25 bp, Artificial
  probe
  misc_feature (1)..(25): SEQ ID NO: 6354; WAN024BBD_x_at; Start 30; Stop 54
agctgcgggctgctcaaaacactgt

SEQ ID NO: 76770 - DNA, 25 bp, Artificial
  probe
  misc_feature (1)..(25): SEQ ID NO: 6354; WAN024BBD_x_at; Start 98; Stop 122
gttttgaggttgcagatagaactga

SEQ ID NO: 76771 - DNA, 25 bp, Artificial
  probe
  misc_feature (1)..(25): SEQ ID NO: 6354; WAN024BBD_x_at; Start 41; Stop 65
gctcaaaacactgttttgaggttgt

SEQ ID NO: 76772 - DNA, 25 bp, Artificial
  probe
  misc_feature (1)..(25): SEQ ID NO: 6354; WAN024BBD_x_at; Start 28; Stop 52
ctagctgcgggctgctcaaaacact

SEQ ID NO: 76773 - DNA, 25 bp, Artificial
  probe
  misc_feature (1)..(25): SEQ ID NO: 6354; WAN024BBD_x_at; Start 27; Stop 51
actagctgcgggctgctcaaaacac

SEQ ID NO: 76774 - DNA, 25 bp, Artificial
  probe
  misc_feature (1)..(25): SEQ ID NO: 6354; WAN024BBD_x_at; Start 38; Stop 62
gctgctcaaaacactgttttgaggt

SEQ ID NO: 76775 - DNA, 25 bp, Artificial
  probe
  misc_feature (1)..(25): SEQ ID NO: 6354; WAN024BBD_x_at; Start 31; Stop 55
gctgcgggctgctcaaaacactgtt

SEQ ID NO: 76776 - DNA, 25 bp, Artificial
  probe
  misc_feature (1)..(25): SEQ ID NO: 6354; WAN024BBD_x_at; Start 19; Stop 43
actaggaaactagctgcgggctgct

SEQ ID NO: 76777 - DNA, 25 bp, Artificial
  probe
  misc_feature (1)..(25): SEQ ID NO: 6354; WAN024BBD_x_at; Start 123; Stop 147
cgaagtcagtaacatctatacggca

SEQ ID NO: 76778 - DNA, 25 bp, Artificial
  probe
  misc_feature (1)..(25): SEQ ID NO: 6354; WAN024BBD_x_at; Start 131; Stop 155
gtaacatctatacggcaaggcgacg

SEQ ID NO: 76779 - DNA, 25 bp, Artificial
  probe
  misc_feature (1)..(25): SEQ ID NO: 6354; WAN024BBD_x_at; Start 48; Stop 72
acactgttttgaggttgtggataga

SEQ ID NO: 76780 - DNA, 25 bp, Artificial
  probe
  misc_feature (1)..(25): SEQ ID NO: 6354; WAN024BBD_x_at; Start 47; Stop 71
aacactgttttgaggttgtggatag

SEQ ID NO: 76781 - DNA, 25 bp, Artificial
  probe
  misc_feature (1)..(25): SEQ ID NO: 6354; WAN024BBD_x_at; Start 36; Stop 60
gggctgctcaaaacactgttttgag

SEQ ID NO: 76782 - DNA, 25 bp, Artificial
  probe
  misc_feature (1)..(25): SEQ ID NO: 6354; WAN024BBD_x_at; Start 130; Stop 154
agtaacatctatacggcaaggcgac

SEQ ID NO: 76783 - DNA, 25 bp, Artificial
  probe
  misc_feature (1)..(25): SEQ ID NO: 6354; WAN024BBD_x_at; Start 42; Stop 66
ctcaaaacactgttttgaggttgtg

SEQ ID NO: 76784 - DNA, 25 bp, Artificial
  probe
  misc_feature (1)..(25): SEQ ID NO: 6354; WAN024BBD_x_at; Start 40; Stop 64
tgctcaaaacactgttttgaggttg

SEQ ID NO: 76785 - DNA, 25 bp, Artificial
  probe
  misc_feature (1)..(25): SEQ ID NO: 6354; WAN024BBD_x_at; Start 33; Stop 57
tgcgggctgctcaaaacactgtttt

SEQ ID NO: 76786 - DNA, 25 bp, Artificial
  probe
  misc_feature (1)..(25): SEQ ID NO: 6354; WAN024BBD_x_at; Start 73; Stop 97
actgacgaagtcagctcaaaacact

SEQ ID NO: 76787 - DNA, 25 bp, Artificial
  probe
  misc_feature (1)..(25): SEQ ID NO: 6354; WAN024BBD_x_at; Start 45; Stop 69
aaaacactgttttgaggttgtggat

SEQ ID NO: 76788 - DNA, 25 bp, Artificial
  probe
  misc_feature (1)..(25): SEQ ID NO: 6354; WAN024BBD_x_at; Start 2; Stop 26
tgaaaatcaaagatcaaactaggaa

SEQ ID NO: 76789 - DNA, 25 bp, Artificial
  probe
  misc_feature (1)..(25): SEQ ID NO: 6354; WAN024BBD_x_at; Start 39; Stop 63
ctgctcaaaacactgttttgaggtt

SEQ ID NO: 76790 - DNA, 25 bp, Artificial
  probe
  misc_feature (1)..(25): SEQ ID NO: 6354; WAN024BBD_x_at; Start 43; Stop 67
tcaaaacactgttttgaggttgtgg

SEQ ID NO: 76791 - DNA, 25 bp, Artificial
  probe
  misc_feature (1)..(25): SEQ ID NO: 6354; WAN024BBD_x_at; Start 20; Stop 44
ctaggaaactagctgcgggctgctc

SEQ ID NO: 76792 - DNA, 25 bp, Artificial
  probe
  misc_feature (1)..(25): SEQ ID NO: 6354; WAN024BBD_x_at; Start 34; Stop 58
gcgggctgctcaaaacactgttttg

SEQ ID NO: 76793 - DNA, 25 bp, Artificial
  probe
  misc_feature (1)..(25): SEQ ID NO: 6354; WAN024BBD_x_at; Start 32; Stop 56
ctgcgggctgctcaaaacactgttt

SEQ ID NO: 76794 - DNA, 25 bp, Artificial
  probe
  misc_feature (1)..(25): SEQ ID NO: 6354; WAN024BBD_x_at; Start 1; Stop 25
atgaaaatcaaagatcaaactagga

SEQ ID NO: 76795 - DNA, 25 bp, Artificial
  probe
  misc_feature (1)..(25): SEQ ID NO: 6354; WAN024BBD_x_at; Start 44; Stop 68
caaaacactgttttgaggttgtgga

SEQ ID NO: 76796 - DNA, 25 bp, Artificial
  probe
  misc_feature (1)..(25): SEQ ID NO: 6354; WAN024BBD_x_at; Start 35; Stop 59
cgggctgctcaaaacactgttttga

SEQ ID NO: 76797 - DNA, 25 bp, Artificial
  probe
  misc_feature (1)..(25): SEQ ID NO: 6354; WAN024BBD_x_at; Start 37; Stop 61
ggctgctcaaaacactgttttgagg

SEQ ID NO: 76798 - DNA, 25 bp, Artificial
  probe
  misc_feature (1)..(25): SEQ ID NO: 6354; WAN024BBD_x_at; Start 46; Stop 70
aaacactgttttgaggttgtggata

SEQ ID NO: 76799 - DNA, 25 bp, Artificial
  probe
  misc_feature (1)..(25): SEQ ID NO: 6354; WAN024BBD_x_at; Start 3; Stop 27
gaaaatcaaagatcaaactaggaaa

SEQ ID NO: 76800 - DNA, 25 bp, Artificial
  probe
  misc_feature (1)..(25): SEQ ID NO: 6347; WAN024BBE_x_at; Start 50; Stop 74
agtgttttgaggttgtggatagaac

SEQ ID NO: 76801 - DNA, 25 bp, Artificial
  probe
  misc_feature (1)..(25): SEQ ID NO: 6347; WAN024BBE_x_at; Start 98; Stop 122
acggcaaggcgacgttgacgtggtt

SEQ ID NO: 76802 - DNA, 25 bp, Artificial
  probe
  misc_feature (1)..(25): SEQ ID NO: 6347; WAN024BBE_x_at; Start 89; Stop 113
acaatacctacggcaaggcgacgtt

SEQ ID NO: 76803 - DNA, 25 bp, Artificial
  probe
  misc_feature (1)..(25): SEQ ID NO: 6347; WAN024BBE_x_at; Start 48; Stop 72
acagtgttttgaggttgtggataga

SEQ ID NO: 76804 - DNA, 25 bp, Artificial
  probe
  misc_feature (1)..(25): SEQ ID NO: 6347; WAN024BBE_x_at; Start 29; Stop 53
tagctgcaggttgctcaaaacagtg

SEQ ID NO: 76805 - DNA, 25 bp, Artificial
  probe
  misc_feature (1)..(25): SEQ ID NO: 6347; WAN024BBE_x_at; Start 61; Stop 85
gttgtggatagaactgacgaagtca

SEQ ID NO: 76806 - DNA, 25 bp, Artificial
  probe
  misc_feature (1)..(25): SEQ ID NO: 6347; WAN024BBE_x_at; Start 86; Stop 110
gtaacaatacctacggcaaggcgac

SEQ ID NO: 76807 - DNA, 25 bp, Artificial
  probe
  misc_feature (1)..(25): SEQ ID NO: 6347; WAN024BBE_x_at; Start 24; Stop 48
gaaactagctgcaggttgctcaaaa

SEQ ID NO: 76808 - DNA, 25 bp, Artificial
  probe
  misc_feature (1)..(25): SEQ ID NO: 6347; WAN024BBE_x_at; Start 90; Stop 114
caatacctacggcaaggcgacgttg

SEQ ID NO: 76809 - DNA, 25 bp, Artificial
  probe
  misc_feature (1)..(25): SEQ ID NO: 6347; WAN024BBE_x_at; Start 28; Stop 52
ctagctgcaggttgctcaaaacagt

SEQ ID NO: 76810 - DNA, 25 bp, Artificial
  probe
  misc_feature (1)..(25): SEQ ID NO: 6347; WAN024BBE_x_at; Start 32; Stop 56
ctgcaggttgctcaaaacagtgttt

SEQ ID NO: 76811 - DNA, 25 bp, Artificial
  probe
  misc_feature (1)..(25): SEQ ID NO: 6347; WAN024BBE_x_at; Start 49; Stop 73
cagtgttttgaggttgtggatagaa

SEQ ID NO: 76812 - DNA, 25 bp, Artificial
  probe
  misc_feature (1)..(25): SEQ ID NO: 6347; WAN024BBE_x_at; Start 103; Stop 127
aaggcgacgttgacgtggtttgaag

SEQ ID NO: 76813 - DNA, 25 bp, Artificial
  probe
  misc_feature (1)..(25): SEQ ID NO: 6347; WAN024BBE_x_at; Start 96; Stop 120
ctacggcaaggcgacgttgacgtgg

SEQ ID NO: 76814 - DNA, 25 bp, Artificial
  probe
  misc_feature (1)..(25): SEQ ID NO: 6347; WAN024BBE_x_at; Start 31; Stop 55
gctgcaggttgctcaaaacagtgtt

SEQ ID NO: 76815 - DNA, 25 bp, Artificial
  probe
  misc_feature (1)..(25): SEQ ID NO: 6347; WAN024BBE_x_at; Start 114; Stop 138
gacgtggtttgaagagagtataaaa

SEQ ID NO: 76816 - DNA, 25 bp, Artificial
  probe
  misc_feature (1)..(25): SEQ ID NO: 6347; WAN024BBE_x_at; Start 53; Stop 77
gttttgaggttgtggatagaactga

SEQ ID NO: 76817 - DNA, 25 bp, Artificial
  probe
  misc_feature (1)..(25): SEQ ID NO: 6347; WAN024BBE_x_at; Start 88; Stop 112
aacaatacctacggcaaggcgacgt

SEQ ID NO: 76818 - DNA, 25 bp, Artificial
  probe
  misc_feature (1)..(25): SEQ ID NO: 6347; WAN024BBE_x_at; Start 51; Stop 75
gtgttttgaggttgtggatagaact

SEQ ID NO: 76819 - DNA, 25 bp, Artificial
  probe
  misc_feature (1)..(25): SEQ ID NO: 6347; WAN024BBE_x_at; Start 54; Stop 78
ttttgaggttgtggatagaactgac

SEQ ID NO: 76820 - DNA, 25 bp, Artificial
  probe
  misc_feature (1)..(25): SEQ ID NO: 6347; WAN024BBE_x_at; Start 101; Stop 125
gcaaggcgacgttgacgtggtttga

SEQ ID NO: 76821 - DNA, 25 bp, Artificial
  probe
  misc_feature (1)..(25): SEQ ID NO: 6347; WAN024BBE_x_at; Start 100; Stop 124
ggcaaggcgacgttgacgtggtttg

SEQ ID NO: 76822 - DNA, 25 bp, Artificial
  probe
  misc_feature (1)..(25): SEQ ID NO: 6347; WAN024BBE_x_at; Start 91; Stop 115
aatacctacggcaaggcgacgttga

SEQ ID NO: 76823 - DNA, 25 bp, Artificial
  probe
  misc_feature (1)..(25): SEQ ID NO: 6347; WAN024BBE_x_at; Start 94; Stop 118
acctacggcaaggcgacgttgacgt

SEQ ID NO: 76824 - DNA, 25 bp, Artificial
  probe
  misc_feature (1)..(25): SEQ ID NO: 6347; WAN024BBE_x_at; Start 9; Stop 33
caaagagcaaactaggaaactagct

SEQ ID NO: 76825 - DNA, 25 bp, Artificial
  probe
  misc_feature (1)..(25): SEQ ID NO: 6347; WAN024BBE_x_at; Start 27; Stop 51
actagctgcaggttgctcaaaacag

SEQ ID NO: 76826 - DNA, 25 bp, Artificial
  probe
  misc_feature (1)..(25): SEQ ID NO: 6347; WAN024BBE_x_at; Start 2; Stop 26
tgaaaatcaaagagcaaactaggaa

SEQ ID NO: 76827 - DNA, 25 bp, Artificial
  probe
  misc_feature (1)..(25): SEQ ID NO: 6347; WAN024BBE_x_at; Start 99; Stop 123
cggcaaggcgacgttgacgtggttt

SEQ ID NO: 76828 - DNA, 25 bp, Artificial
  probe
  misc_feature (1)..(25): SEQ ID NO: 6347; WAN024BBE_x_at; Start 102; Stop 126
caaggcgacgttgacgtggtttgaa

SEQ ID NO: 76829 - DNA, 25 bp, Artificial
  probe
  misc_feature (1)..(25): SEQ ID NO: 6347; WAN024BBE_x_at; Start 1; Stop 25
atgaaaatcaaagagcaaactagga

SEQ ID NO: 76830 - DNA, 25 bp, Artificial
  probe
  misc_feature (1)..(25): SEQ ID NO: 6347; WAN024BBE_x_at; Start 52; Stop 76
tgttttgaggttgtggatagaactg

SEQ ID NO: 76831 - DNA, 25 bp, Artificial
  probe
  misc_feature (1)..(25): SEQ ID NO: 6347; WAN024BBE_x_at; Start 3; Stop 27
gaaaatcaaagagcaaactaggaaa

SEQ ID NO: 76832 - DNA, 25 bp, Artificial
  probe
  misc_feature (1)..(25): SEQ ID NO: 6347; WAN024BBE_x_at; Start 87; Stop 111
taacaatacctacggcaaggcgacg

SEQ ID NO: 76833 - DNA, 25 bp, Artificial
  probe
  misc_feature (1)..(25): SEQ ID NO: 6347; WAN024BBE_x_at; Start 57; Stop 81
tgaggttgtggatagaactgacgaa

SEQ ID NO: 76834 - DNA, 25 bp, Artificial
  probe
  misc_feature (1)..(25): SEQ ID NO: 7170; WAN024BBI_x_at; Start 50; Stop 74
acttcgtcagtttcatctacaacct

SEQ ID NO: 76835 - DNA, 25 bp, Artificial
  probe
  misc_feature (1)..(25): SEQ ID NO: 7170; WAN024BBI_x_at; Start 46; Stop 70
agtgacttcgtcagtttcatctaca

SEQ ID NO: 76836 - DNA, 25 bp, Artificial
  probe
  misc_feature (1)..(25): SEQ ID NO: 7170; WAN024BBI_x_at; Start 7; Stop 31
cttcgtcagtttcatctacaacctc

SEQ ID NO: 76837 - DNA, 25 bp, Artificial
  probe
  misc_feature (1)..(25): SEQ ID NO: 7170; WAN024BBI_x_at; Start 28; Stop 52
cctcaaaaccatgttttgagtgact

SEQ ID NO: 76838 - DNA, 25 bp, Artificial
  probe
  misc_feature (1)..(25): SEQ ID NO: 7170; WAN024BBI_x_at; Start 49; Stop 73
gacttcgtcagtttcatctacaacc

SEQ ID NO: 76839 - DNA, 25 bp, Artificial
  probe
  misc_feature (1)..(25): SEQ ID NO: 7170; WAN024BBI_x_at; Start 53; Stop 77
tcgtcagtttcatctacaacctcaa

SEQ ID NO: 76840 - DNA, 25 bp, Artificial
  probe
  misc_feature (1)..(25): SEQ ID NO: 7170; WAN024BBI_x_at; Start 26; Stop 50
aacctcaaaaccatgttttgagtga

SEQ ID NO: 76841 - DNA, 25 bp, Artificial
  probe
  misc_feature (1)..(25): SEQ ID NO: 7170; WAN024BBI_x_at; Start 45; Stop 69
gagtgacttcgtcagtttcatctac

SEQ ID NO: 76842 - DNA, 25 bp, Artificial
  probe
  misc_feature (1)..(25): SEQ ID NO: 7170; WAN024BBI_x_at; Start 44; Stop 68
tgagtgacttcgtcagtttcatcta

SEQ ID NO: 76843 - DNA, 25 bp, Artificial
  probe
  misc_feature (1)..(25): SEQ ID NO: 7170; WAN024BBI_x_at; Start 59; Stop 83
gtttcatctacaacctcaaaactgt

SEQ ID NO: 76844 - DNA, 25 bp, Artificial
  probe
  misc_feature (1)..(25): SEQ ID NO: 7170; WAN024BBI_x_at; Start 32; Stop 56
aaaaccatgttttgagtgacttcgt

SEQ ID NO: 76845 - DNA, 25 bp, Artificial
  probe
  misc_feature (1)..(25): SEQ ID NO: 7170; WAN024BBI_x_at; Start 3; Stop 27
gttgcttcgtcagtttcatctacaa

SEQ ID NO: 76846 - DNA, 25 bp, Artificial
  probe
  misc_feature (1)..(25): SEQ ID NO: 7170; WAN024BBI_x_at; Start 56; Stop 80
tcagtttcatctacaacctcaaaac

SEQ ID NO: 76847 - DNA, 25 bp, Artificial
  probe
  misc_feature (1)..(25): SEQ ID NO: 7170; WAN024BBI_x_at; Start 10; Stop 34
cgtcagtttcatctacaacctcaaa

SEQ ID NO: 76848 - DNA, 25 bp, Artificial
  probe
  misc_feature (1)..(25): SEQ ID NO: 7170; WAN024BBI_x_at; Start 48; Stop 72
tgacttcgtcagtttcatctacaac

SEQ ID NO: 76849 - DNA, 25 bp, Artificial
  probe
  misc_feature (1)..(25): SEQ ID NO: 7170; WAN024BBI_x_at; Start 2; Stop 26
tgttgcttcgtcagtttcatctaca

SEQ ID NO: 76850 - DNA, 25 bp, Artificial
  probe
  misc_feature (1)..(25): SEQ ID NO: 7170; WAN024BBI_x_at; Start 58; Stop 82
agtttcatctacaacctcaaaactg

SEQ ID NO: 76851 - DNA, 25 bp, Artificial
  probe
  misc_feature (1)..(25): SEQ ID NO: 7170; WAN024BBI_x_at; Start 8; Stop 32
ttcgtcagtttcatctacaacctca

SEQ ID NO: 76852 - DNA, 25 bp, Artificial
  probe
  misc_feature (1)..(25): SEQ ID NO: 7170; WAN024BBI_x_at; Start 42; Stop 66
tttgagtgacttcgtcagtttcatc

SEQ ID NO: 76853 - DNA, 25 bp, Artificial
  probe
  misc_feature (1)..(25): SEQ ID NO: 7170; WAN024BBI_x_at; Start 1; Stop 25
ctgttgcttcgtcagtttcatctac

SEQ ID NO: 76854 - DNA, 25 bp, Artificial
  probe
  misc_feature (1)..(25): SEQ ID NO: 7170; WAN024BBI_x_at; Start 43; Stop 67
ttgagtgacttcgtcagtttcatct

SEQ ID NO: 76855 - DNA, 25 bp, Artificial
  probe
  misc_feature (1)..(25): SEQ ID NO: 7170; WAN024BBI_x_at; Start 34; Stop 58
aaccatgttttgagtgacttcgtca

SEQ ID NO: 76856 - DNA, 25 bp, Artificial
  probe
  misc_feature (1)..(25): SEQ ID NO: 7170; WAN024BBI_x_at; Start 29; Stop 53
ctcaaaaccatgttttgagtgactt

SEQ ID NO: 76857 - DNA, 25 bp, Artificial
  probe
  misc_feature (1)..(25): SEQ ID NO: 7170; WAN024BBI_x_at; Start 6; Stop 30
gcttcgtcagtttcatctacaacct

SEQ ID NO: 76858 - DNA, 25 bp, Artificial
  probe
  misc_feature (1)..(25): SEQ ID NO: 7170; WAN024BBI_x_at; Start 30; Stop 54
tcaaaaccatgttttgagtgacttc

SEQ ID NO: 76859 - DNA, 25 bp, Artificial
  probe
  misc_feature (1)..(25): SEQ ID NO: 7170; WAN024BBI_x_at; Start 5; Stop 29
tgcttcgtcagtttcatctacaacc

SEQ ID NO: 76860 - DNA, 25 bp, Artificial
  probe
  misc_feature (1)..(25): SEQ ID NO: 7170; WAN024BBI_x_at; Start 4; Stop 28
ttgcttcgtcagtttcatctacaac

SEQ ID NO: 76861 - DNA, 25 bp, Artificial
  probe
  misc_feature (1)..(25): SEQ ID NO: 7170; WAN024BBI_x_at; Start 27; Stop 51
acctcaaaaccatgttttgagtgac

SEQ ID NO: 76862 - DNA, 25 bp, Artificial
  probe
  misc_feature (1)..(25): SEQ ID NO: 7170; WAN024BBI_x_at; Start 31; Stop 55
caaaaccatgttttgagtgacttcg

SEQ ID NO: 76863 - DNA, 25 bp, Artificial
  probe
  misc_feature (1)..(25): SEQ ID NO: 7170; WAN024BBI_x_at; Start 57; Stop 81
cagtttcatctacaacctcaaaact

SEQ ID NO: 76864 - DNA, 25 bp, Artificial
  probe
  misc_feature (1)..(25): SEQ ID NO: 7170; WAN024BBI_x_at; Start 47; Stop 71
gtgacttcgtcagtttcatctacaa

SEQ ID NO: 76865 - DNA, 25 bp, Artificial
  probe
  misc_feature (1)..(25): SEQ ID NO: 7170; WAN024BBI_x_at; Start 33; Stop 57
aaaccatgttttgagtgacttcgtc

SEQ ID NO: 76866 - DNA, 25 bp, Artificial
  probe
  misc_feature (1)..(25): SEQ ID NO: 7170; WAN024BBI_x_at; Start 11; Stop 35
gtcagtttcatctacaacctcaaaa

SEQ ID NO: 76867 - DNA, 25 bp, Artificial
  probe
  misc_feature (1)..(25): SEQ ID NO: 7170; WAN024BBI_x_at; Start 41; Stop 65
ttttgagtgacttcgtcagtttcat

SEQ ID NO: 76868 - DNA, 25 bp, Artificial
  probe
  misc_feature (1)..(25): SEQ ID NO: 7683; WAN024BBJ_at; Start 234; Stop 258
ggtaaggaaggtcatcggatactga

SEQ ID NO: 76869 - DNA, 25 bp, Artificial
  probe
  misc_feature (1)..(25): SEQ ID NO: 7683; WAN024BBJ_at; Start 135; Stop 159
agatagagctagagattttcgaaga

SEQ ID NO: 76870 - DNA, 25 bp, Artificial
  probe
  misc_feature (1)..(25): SEQ ID NO: 7683; WAN024BBJ_at; Start 171; Stop 195
ctttaaaggtcttgagataattgtc

SEQ ID NO: 76871 - DNA, 25 bp, Artificial
  probe
  misc_feature (1)..(25): SEQ ID NO: 7683; WAN024BBJ_at; Start 167; Stop 191
tgtactttaaaggtcttgagataat

SEQ ID NO: 76872 - DNA, 25 bp, Artificial
  probe
  misc_feature (1)..(25): SEQ ID NO: 7683; WAN024BBJ_at; Start 154; Stop 178
cgaagagtattattgtactttaaag

SEQ ID NO: 76873 - DNA, 25 bp, Artificial
  probe
  misc_feature (1)..(25): SEQ ID NO: 7683; WAN024BBJ_at; Start 133; Stop 157
gcagatagagctagagattttcgaa

SEQ ID NO: 76874 - DNA, 25 bp, Artificial
  probe
  misc_feature (1)..(25): SEQ ID NO: 7683; WAN024BBJ_at; Start 2; Stop 26
tgtcctccattaggcttaatttacc

SEQ ID NO: 76875 - DNA, 25 bp, Artificial
  probe
  misc_feature (1)..(25): SEQ ID NO: 7683; WAN024BBJ_at; Start 184; Stop 208
gagataattgtcttttcctacttga

SEQ ID NO: 76876 - DNA, 25 bp, Artificial
  probe
  misc_feature (1)..(25): SEQ ID NO: 7683; WAN024BBJ_at; Start 228; Stop 252
tttcaaggtaaggaaggtcatcgga

SEQ ID NO: 76877 - DNA, 25 bp, Artificial
  probe
  misc_feature (1)..(25): SEQ ID NO: 7683; WAN024BBJ_at; Start 230; Stop 254
tcaaggtaaggaaggtcatcggata

SEQ ID NO: 76878 - DNA, 25 bp, Artificial
  probe
  misc_feature (1)..(25): SEQ ID NO: 7683; WAN024BBJ_at; Start 162; Stop 186
attattgtactttaaaggtcttgag

SEQ ID NO: 76879 - DNA, 25 bp, Artificial
  probe
  misc_feature (1)..(25): SEQ ID NO: 7683; WAN024BBJ_at; Start 173; Stop 197
ttaaaggtcttgagataattgtctt

SEQ ID NO: 76880 - DNA, 25 bp, Artificial
  probe
  misc_feature (1)..(25): SEQ ID NO: 7683; WAN024BBJ_at; Start 229; Stop 253
ttcaaggtaaggaaggtcatcggat

SEQ ID NO: 76881 - DNA, 25 bp, Artificial
  probe
  misc_feature (1)..(25): SEQ ID NO: 7683; WAN024BBJ_at; Start 6; Stop 30
ctccattaggcttaatttaccttat

SEQ ID NO: 76882 - DNA, 25 bp, Artificial
  probe
  misc_feature (1)..(25): SEQ ID NO: 7683; WAN024BBJ_at; Start 180; Stop 204
tcttgagataattgtcttttcctac

SEQ ID NO: 76883 - DNA, 25 bp, Artificial
  probe
  misc_feature (1)..(25): SEQ ID NO: 7683; WAN024BBJ_at; Start 15; Stop 39
gcttaatttaccttattataacata

SEQ ID NO: 76884 - DNA, 25 bp, Artificial
  probe
  misc_feature (1)..(25): SEQ ID NO: 7683; WAN024BBJ_at; Start 169; Stop 193
tactttaaaggtcttgagataattg

SEQ ID NO: 76885 - DNA, 25 bp, Artificial
  probe
  misc_feature (1)..(25): SEQ ID NO: 7683; WAN024BBJ_at; Start 232; Stop 256
aaggtaaggaaggtcatcggatact

SEQ ID NO: 76886 - DNA, 25 bp, Artificial
  probe
  misc_feature (1)..(25): SEQ ID NO: 7683; WAN024BBJ_at; Start 192; Stop 216
tgtcttttcctacttgaccttcgaa

SEQ ID NO: 76887 - DNA, 25 bp, Artificial
  probe
  misc_feature (1)..(25): SEQ ID NO: 7683; WAN024BBJ_at; Start 231; Stop 255
caaggtaaggaaggtcatcggatac

SEQ ID NO: 76888 - DNA, 25 bp, Artificial
  probe
  misc_feature (1)..(25): SEQ ID NO: 7683; WAN024BBJ_at; Start 164; Stop 188
tattgtactttaaaggtcttgagat

SEQ ID NO: 76889 - DNA, 25 bp, Artificial
  probe
  misc_feature (1)..(25): SEQ ID NO: 7683; WAN024BBJ_at; Start 191; Stop 215
ttgtcttttcctacttgaccttcga

SEQ ID NO: 76890 - DNA, 25 bp, Artificial
  probe
  misc_feature (1)..(25): SEQ ID NO: 7683; WAN024BBJ_at; Start 225; Stop 249
cattttcaaggtaaggaaggtcatc

SEQ ID NO: 76891 - DNA, 25 bp, Artificial
  probe
  misc_feature (1)..(25): SEQ ID NO: 7683; WAN024BBJ_at; Start 131; Stop 155
ttgcagatagagctagagattttcg

SEQ ID NO: 76892 - DNA, 25 bp, Artificial
  probe
  misc_feature (1)..(25): SEQ ID NO: 7683; WAN024BBJ_at; Start 190; Stop 214
attgtcttttcctacttgaccttcg

SEQ ID NO: 76893 - DNA, 25 bp, Artificial
  probe
  misc_feature (1)..(25): SEQ ID NO: 7683; WAN024BBJ_at; Start 178; Stop 202
ggtcttgagataattgtcttttcct

SEQ ID NO: 76894 - DNA, 25 bp, Artificial
  probe
  misc_feature (1)..(25): SEQ ID NO: 7683; WAN024BBJ_at; Start 224; Stop 248
ccattttcaaggtaaggaaggtcat

SEQ ID NO: 76895 - DNA, 25 bp, Artificial
  probe
  misc_feature (1)..(25): SEQ ID NO: 7683; WAN024BBJ_at; Start 233; Stop 257
aggtaaggaaggtcatcggatactg

SEQ ID NO: 76896 - DNA, 25 bp, Artificial
  probe
  misc_feature (1)..(25): SEQ ID NO: 7683; WAN024BBJ_at; Start 134; Stop 158
cagatagagctagagattttcgaag

SEQ ID NO: 76897 - DNA, 25 bp, Artificial
  probe
  misc_feature (1)..(25): SEQ ID NO: 7683; WAN024BBJ_at; Start 226; Stop 250
attttcaaggtaaggaaggtcatcg

SEQ ID NO: 76898 - DNA, 25 bp, Artificial
  probe
  misc_feature (1)..(25): SEQ ID NO: 7683; WAN024BBJ_at; Start 130; Stop 154
gttgcagatagagctagagattttc

SEQ ID NO: 76899 - DNA, 25 bp, Artificial
  probe
  misc_feature (1)..(25): SEQ ID NO: 7683; WAN024BBJ_at; Start 186; Stop 210
gataattgtcttttcctacttgacc

SEQ ID NO: 76900 - DNA, 25 bp, Artificial
  probe
  misc_feature (1)..(25): SEQ ID NO: 7683; WAN024BBJ_at; Start 132; Stop 156
tgcagatagagctagagattttcga

SEQ ID NO: 76901 - DNA, 25 bp, Artificial
  probe
  misc_feature (1)..(25): SEQ ID NO: 7683; WAN024BBJ_at; Start 177; Stop 201
aggtcttgagataattgtcttttcc

SEQ ID NO: 76902 - DNA, 25 bp, Artificial
  probe
  misc_feature (1)..(25): SEQ ID NO: 6355; WAN024BBK_x_at; Start 50; Stop 74
agtgttttgaagttatggatagaac

SEQ ID NO: 76903 - DNA, 25 bp, Artificial
  probe
  misc_feature (1)..(25): SEQ ID NO: 6355; WAN024BBK_x_at; Start 32; Stop 56
ccgcaggttgctcaaaacagtgttt

SEQ ID NO: 76904 - DNA, 25 bp, Artificial
  probe
  misc_feature (1)..(25): SEQ ID NO: 6355; WAN024BBK_x_at; Start 88; Stop 112
aaccatacctacggcaaggcgacgt

SEQ ID NO: 76905 - DNA, 25 bp, Artificial
  probe
  misc_feature (1)..(25): SEQ ID NO: 6355; WAN024BBK_x_at; Start 13; Stop 37
gggcaaactagaaaactagccgcag

SEQ ID NO: 76906 - DNA, 25 bp, Artificial
  probe
  misc_feature (1)..(25): SEQ ID NO: 6355; WAN024BBK_x_at; Start 55; Stop 79
tttgaagttatggatagaactgacg

SEQ ID NO: 76907 - DNA, 25 bp, Artificial
  probe
  misc_feature (1)..(25): SEQ ID NO: 6355; WAN024BBK_x_at; Start 54; Stop 78
ttttgaagttatggatagaactgac

SEQ ID NO: 76908 - DNA, 25 bp, Artificial
  probe
  misc_feature (1)..(25): SEQ ID NO: 6355; WAN024BBK_x_at; Start 22; Stop 46
agaaaactagccgcaggttgctcaa

SEQ ID NO: 76909 - DNA, 25 bp, Artificial
  probe
  misc_feature (1)..(25): SEQ ID NO: 6355; WAN024BBK_x_at; Start 28; Stop 52
ctagccgcaggttgctcaaaacagt

SEQ ID NO: 76910 - DNA, 25 bp, Artificial
  probe
  misc_feature (1)..(25): SEQ ID NO: 6355; WAN024BBK_x_at; Start 27; Stop 51
actagccgcaggttgctcaaaacag

SEQ ID NO: 76911 - DNA, 25 bp, Artificial
  probe
  misc_feature (1)..(25): SEQ ID NO: 6355; WAN024BBK_x_at; Start 49; Stop 73
cagtgttttgaagttatggatagaa

SEQ ID NO: 76912 - DNA, 25 bp, Artificial
  probe
  misc_feature (1)..(25): SEQ ID NO: 6355; WAN024BBK_x_at; Start 19; Stop 43
actagaaaactagccgcaggttgct

SEQ ID NO: 76913 - DNA, 25 bp, Artificial
  probe
  misc_feature (1)..(25): SEQ ID NO: 6355; WAN024BBK_x_at; Start 53; Stop 77
gttttgaagttatggatagaactga

SEQ ID NO: 76914 - DNA, 25 bp, Artificial
  probe
  misc_feature (1)..(25): SEQ ID NO: 6355; WAN024BBK_x_at; Start 21; Stop 45
tagaaaactagccgcaggttgctca

SEQ ID NO: 76915 - DNA, 25 bp, Artificial
  probe
  misc_feature (1)..(25): SEQ ID NO: 6355; WAN024BBK_x_at; Start 31; Stop 55
gccgcaggttgctcaaaacagtgtt

SEQ ID NO: 76916 - DNA, 25 bp, Artificial
  probe
  misc_feature (1)..(25): SEQ ID NO: 6355; WAN024BBK_x_at; Start 89; Stop 113
accatacctacggcaaggcgacgtt

SEQ ID NO: 76917 - DNA, 25 bp, Artificial
  probe
  misc_feature (1)..(25): SEQ ID NO: 6355; WAN024BBK_x_at; Start 51; Stop 75
gtgttttgaagttatggatagaact

SEQ ID NO: 76918 - DNA, 25 bp, Artificial
  probe
  misc_feature (1)..(25): SEQ ID NO: 6355; WAN024BBK_x_at; Start 56; Stop 80
ttgaagttatggatagaactgacga

SEQ ID NO: 76919 - DNA, 25 bp, Artificial
  probe
  misc_feature (1)..(25): SEQ ID NO: 6355; WAN024BBK_x_at; Start 87; Stop 111
taaccatacctacggcaaggcgacg

SEQ ID NO: 76920 - DNA, 25 bp, Artificial
  probe
  misc_feature (1)..(25): SEQ ID NO: 6355; WAN024BBK_x_at; Start 29; Stop 53
tagccgcaggttgctcaaaacagtg

SEQ ID NO: 76921 - DNA, 25 bp, Artificial
  probe
  misc_feature (1)..(25): SEQ ID NO: 6355; WAN024BBK_x_at; Start 92; Stop 116
atacctacggcaaggcgacgttgac

SEQ ID NO: 76922 - DNA, 25 bp, Artificial
  probe
  misc_feature (1)..(25): SEQ ID NO: 6355; WAN024BBK_x_at; Start 93; Stop 117
tacctacggcaaggcgacgttgacg

SEQ ID NO: 76923 - DNA, 25 bp, Artificial
  probe
  misc_feature (1)..(25): SEQ ID NO: 6355; WAN024BBK_x_at; Start 25; Stop 49
aaactagccgcaggttgctcaaaac

SEQ ID NO: 76924 - DNA, 25 bp, Artificial
  probe
  misc_feature (1)..(25): SEQ ID NO: 6355; WAN024BBK_x_at; Start 18; Stop 42
aactagaaaactagccgcaggttgc

SEQ ID NO: 76925 - DNA, 25 bp, Artificial
  probe
  misc_feature (1)..(25): SEQ ID NO: 6355; WAN024BBK_x_at; Start 14; Stop 38
ggcaaactagaaaactagccgcagg

SEQ ID NO: 76926 - DNA, 25 bp, Artificial
  probe
  misc_feature (1)..(25): SEQ ID NO: 6355; WAN024BBK_x_at; Start 12; Stop 36
agggcaaactagaaaactagccgca

SEQ ID NO: 76927 - DNA, 25 bp, Artificial
  probe
  misc_feature (1)..(25): SEQ ID NO: 6355; WAN024BBK_x_at; Start 62; Stop 86
ttatggatagaactgacgaagtcag

SEQ ID NO: 76928 - DNA, 25 bp, Artificial
  probe
  misc_feature (1)..(25): SEQ ID NO: 6355; WAN024BBK_x_at; Start 33; Stop 57
cgcaggttgctcaaaacagtgtttt

SEQ ID NO: 76929 - DNA, 25 bp, Artificial
  probe
  misc_feature (1)..(25): SEQ ID NO: 6355; WAN024BBK_x_at; Start 20; Stop 44
ctagaaaactagccgcaggttgctc

SEQ ID NO: 76930 - DNA, 25 bp, Artificial
  probe
  misc_feature (1)..(25): SEQ ID NO: 6355; WAN024BBK_x_at; Start 57; Stop 81
tgaagttatggatagaactgacgaa

SEQ ID NO: 76931 - DNA, 25 bp, Artificial
  probe
  misc_feature (1)..(25): SEQ ID NO: 6355; WAN024BBK_x_at; Start 90; Stop 114
ccatacctacggcaaggcgacgttg

SEQ ID NO: 76932 - DNA, 25 bp, Artificial
  probe
  misc_feature (1)..(25): SEQ ID NO: 6355; WAN024BBK_x_at; Start 26; Stop 50
aactagccgcaggttgctcaaaaca

SEQ ID NO: 76933 - DNA, 25 bp, Artificial
  probe
  misc_feature (1)..(25): SEQ ID NO: 6355; WAN024BBK_x_at; Start 91; Stop 115
catacctacggcaaggcgacgttga

SEQ ID NO: 76934 - DNA, 25 bp, Artificial
  probe
  misc_feature (1)..(25): SEQ ID NO: 6355; WAN024BBK_x_at; Start 52; Stop 76
tgttttgaagttatggatagaactg

SEQ ID NO: 76935 - DNA, 25 bp, Artificial
  probe
  misc_feature (1)..(25): SEQ ID NO: 6355; WAN024BBK_x_at; Start 24; Stop 48
aaaactagccgcaggttgctcaaaa

SEQ ID NO: 76936 - DNA, 25 bp, Artificial
  probe
  misc_feature (1)..(25): SEQ ID NO: 38; WAN024BBM_at; Start 13; Stop 37
tcaaagtacagctttaaggtggtag

SEQ ID NO: 76937 - DNA, 25 bp, Artificial
  probe
  misc_feature (1)..(25): SEQ ID NO: 38; WAN024BBM_at; Start 15; Stop 39
aaagtacagctttaaggtggtagat

SEQ ID NO: 76938 - DNA, 25 bp, Artificial
  probe
  misc_feature (1)..(25): SEQ ID NO: 38; WAN024BBM_at; Start 17; Stop 41
agtacagctttaaggtggtagatag

SEQ ID NO: 76939 - DNA, 25 bp, Artificial
  probe
  misc_feature (1)..(25): SEQ ID NO: 38; WAN024BBM_at; Start 21; Stop 45
cagctttaaggtggtagatagaact

SEQ ID NO: 76940 - DNA, 25 bp, Artificial
  probe
  misc_feature (1)..(25): SEQ ID NO: 38; WAN024BBM_at; Start 19; Stop 43
tacagctttaaggtggtagatagaa

SEQ ID NO: 76941 - DNA, 25 bp, Artificial
  probe
  misc_feature (1)..(25): SEQ ID NO: 38; WAN024BBM_at; Start 20; Stop 44
acagctttaaggtggtagatagaac

SEQ ID NO: 76942 - DNA, 25 bp, Artificial
  probe
  misc_feature (1)..(25): SEQ ID NO: 38; WAN024BBM_at; Start 16; Stop 40
aagtacagctttaaggtggtagata

SEQ ID NO: 76943 - DNA, 25 bp, Artificial
  probe
  misc_feature (1)..(25): SEQ ID NO: 38; WAN024BBM_at; Start 1; Stop 25
ttggaagttagctcaaagtacagct

SEQ ID NO: 76944 - DNA, 25 bp, Artificial
  probe
  misc_feature (1)..(25): SEQ ID NO: 38; WAN024BBM_at; Start 22; Stop 46
agctttaaggtggtagatagaactg

SEQ ID NO: 76945 - DNA, 25 bp, Artificial
  probe
  misc_feature (1)..(25): SEQ ID NO: 38; WAN024BBM_at; Start 18; Stop 42
gtacagctttaaggtggtagataga

SEQ ID NO: 76946 - DNA, 25 bp, Artificial
  probe
  misc_feature (1)..(25): SEQ ID NO: 38; WAN024BBM_at; Start 14; Stop 38
caaagtacagctttaaggtggtaga

SEQ ID NO: 76947 - DNA, 25 bp, Artificial
  probe
  misc_feature (1)..(25): SEQ ID NO: 7358; WAN024BBN_x_at; Start 23; Stop 47
cttcgtcagttctatctacaacctc

SEQ ID NO: 76948 - DNA, 25 bp, Artificial
  probe
  misc_feature (1)..(25): SEQ ID NO: 7358; WAN024BBN_x_at; Start 15; Stop 39
tgagctgacttcgtcagttctatct

SEQ ID NO: 76949 - DNA, 25 bp, Artificial
  probe
  misc_feature (1)..(25): SEQ ID NO: 7358; WAN024BBN_x_at; Start 22; Stop 46
acttcgtcagttctatctacaacct

SEQ ID NO: 76950 - DNA, 25 bp, Artificial
  probe
  misc_feature (1)..(25): SEQ ID NO: 7358; WAN024BBN_x_at; Start 65; Stop 89
agcccgaggctagtttcctagtttg

SEQ ID NO: 76951 - DNA, 25 bp, Artificial
  probe
  misc_feature (1)..(25): SEQ ID NO: 7358; WAN024BBN_x_at; Start 21; Stop 45
gacttcgtcagttctatctacaacc

SEQ ID NO: 76952 - DNA, 25 bp, Artificial
  probe
  misc_feature (1)..(25): SEQ ID NO: 7358; WAN024BBN_x_at; Start 29; Stop 53
cagttctatctacaacctcaaaaca

SEQ ID NO: 76953 - DNA, 25 bp, Artificial
  probe
  misc_feature (1)..(25): SEQ ID NO: 7358; WAN024BBN_x_at; Start 55; Stop 79
tgttttgagcagcccgaggctagtt

SEQ ID NO: 76954 - DNA, 25 bp, Artificial
  probe
  misc_feature (1)..(25): SEQ ID NO: 7358; WAN024BBN_x_at; Start 25; Stop 49
tcgtcagttctatctacaacctcaa

SEQ ID NO: 76955 - DNA, 25 bp, Artificial
  probe
  misc_feature (1)..(25): SEQ ID NO: 7358; WAN024BBN_x_at; Start 8; Stop 32
ggtgttttgagctgacttcgtcagt

SEQ ID NO: 76956 - DNA, 25 bp, Artificial
  probe
  misc_feature (1)..(25): SEQ ID NO: 7358; WAN024BBN_x_at; Start 28; Stop 52
tcagttctatctacaacctcaaaac

SEQ ID NO: 76957 - DNA, 25 bp, Artificial
  probe
  misc_feature (1)..(25): SEQ ID NO: 7358; WAN024BBN_x_at; Start 66; Stop 90
gcccgaggctagtttcctagtttgc

SEQ ID NO: 76958 - DNA, 25 bp, Artificial
  probe
  misc_feature (1)..(25): SEQ ID NO: 7358; WAN024BBN_x_at; Start 18; Stop 42
gctgacttcgtcagttctatctaca

SEQ ID NO: 76959 - DNA, 25 bp, Artificial
  probe
  misc_feature (1)..(25): SEQ ID NO: 7358; WAN024BBN_x_at; Start 64; Stop 88
cagcccgaggctagtttcctagttt

SEQ ID NO: 76960 - DNA, 25 bp, Artificial
  probe
  misc_feature (1)..(25): SEQ ID NO: 7358; WAN024BBN_x_at; Start 26; Stop 50
cgtcagttctatctacaacctcaaa

SEQ ID NO: 76961 - DNA, 25 bp, Artificial
  probe
  misc_feature (1)..(25): SEQ ID NO: 7358; WAN024BBN_x_at; Start 62; Stop 86
agcagcccgaggctagtttcctagt

SEQ ID NO: 76962 - DNA, 25 bp, Artificial
  probe
  misc_feature (1)..(25): SEQ ID NO: 7358; WAN024BBN_x_at; Start 20; Stop 44
tgacttcgtcagttctatctacaac

SEQ ID NO: 76963 - DNA, 25 bp, Artificial
  probe
  misc_feature (1)..(25): SEQ ID NO: 7358; WAN024BBN_x_at; Start 54; Stop 78
gtgttttgagcagcccgaggctagt

SEQ ID NO: 76964 - DNA, 25 bp, Artificial
  probe
  misc_feature (1)..(25): SEQ ID NO: 7358; WAN024BBN_x_at; Start 7; Stop 31
cggtgttttgagctgacttcgtcag

SEQ ID NO: 76965 - DNA, 25 bp, Artificial
  probe
  misc_feature (1)..(25): SEQ ID NO: 7358; WAN024BBN_x_at; Start 56; Stop 80
gttttgagcagcccgaggctagttt

SEQ ID NO: 76966 - DNA, 25 bp, Artificial
  probe
  misc_feature (1)..(25): SEQ ID NO: 7358; WAN024BBN_x_at; Start 11; Stop 35
gttttgagctgacttcgtcagttct

SEQ ID NO: 76967 - DNA, 25 bp, Artificial
  probe
  misc_feature (1)..(25): SEQ ID NO: 7358; WAN024BBN_x_at; Start 58; Stop 82
tttgagcagcccgaggctagtttcc

SEQ ID NO: 76968 - DNA, 25 bp, Artificial
  probe
  misc_feature (1)..(25): SEQ ID NO: 7358; WAN024BBN_x_at; Start 24; Stop 48
ttcgtcagttctatctacaacctca

SEQ ID NO: 76969 - DNA, 25 bp, Artificial
  probe
  misc_feature (1)..(25): SEQ ID NO: 7358; WAN024BBN_x_at; Start 10; Stop 34
tgttttgagctgacttcgtcagttc

SEQ ID NO: 76970 - DNA, 25 bp, Artificial
  probe
  misc_feature (1)..(25): SEQ ID NO: 7358; WAN024BBN_x_at; Start 13; Stop 37
tttgagctgacttcgtcagttctat

SEQ ID NO: 76971 - DNA, 25 bp, Artificial
  probe
  misc_feature (1)..(25): SEQ ID NO: 7358; WAN024BBN_x_at; Start 57; Stop 81
ttttgagcagcccgaggctagtttc

SEQ ID NO: 76972 - DNA, 25 bp, Artificial
  probe
  misc_feature (1)..(25): SEQ ID NO: 7358; WAN024BBN_x_at; Start 14; Stop 38
ttgagctgacttcgtcagttctatc

SEQ ID NO: 76973 - DNA, 25 bp, Artificial
  probe
  misc_feature (1)..(25): SEQ ID NO: 7358; WAN024BBN_x_at; Start 19; Stop 43
ctgacttcgtcagttctatctacaa

SEQ ID NO: 76974 - DNA, 25 bp, Artificial
  probe
  misc_feature (1)..(25): SEQ ID NO: 7358; WAN024BBN_x_at; Start 16; Stop 40
gagctgacttcgtcagttctatcta

SEQ ID NO: 76975 - DNA, 25 bp, Artificial
  probe
  misc_feature (1)..(25): SEQ ID NO: 7358; WAN024BBN_x_at; Start 6; Stop 30
acggtgttttgagctgacttcgtca

SEQ ID NO: 76976 - DNA, 25 bp, Artificial
  probe
  misc_feature (1)..(25): SEQ ID NO: 7358; WAN024BBN_x_at; Start 5; Stop 29
aacggtgttttgagctgacttcgtc

SEQ ID NO: 76977 - DNA, 25 bp, Artificial
  probe
  misc_feature (1)..(25): SEQ ID NO: 7358; WAN024BBN_x_at; Start 9; Stop 33
gtgttttgagctgacttcgtcagtt

SEQ ID NO: 76978 - DNA, 25 bp, Artificial
  probe
  misc_feature (1)..(25): SEQ ID NO: 7358; WAN024BBN_x_at; Start 27; Stop 51
gtcagttctatctacaacctcaaaa

SEQ ID NO: 76979 - DNA, 25 bp, Artificial
  probe
  misc_feature (1)..(25): SEQ ID NO: 7358; WAN024BBN_x_at; Start 17; Stop 41
agctgacttcgtcagttctatctac

SEQ ID NO: 76980 - DNA, 25 bp, Artificial
  probe
  misc_feature (1)..(25): SEQ ID NO: 7358; WAN024BBN_x_at; Start 12; Stop 36
ttttgagctgacttcgtcagttcta

SEQ ID NO: 76981 - DNA, 25 bp, Artificial
  probe
  misc_feature (1)..(25): SEQ ID NO: 6658; WAN024BBR_x_at; Start 15; Stop 39
tgatcgttacggaatagagttcgtc

SEQ ID NO: 76982 - DNA, 25 bp, Artificial
  probe
  misc_feature (1)..(25): SEQ ID NO: 6658; WAN024BBR_x_at; Start 53; Stop 77
atcgttactattctcctgatttaaa

SEQ ID NO: 76983 - DNA, 25 bp, Artificial
  probe
  misc_feature (1)..(25): SEQ ID NO: 6658; WAN024BBR_x_at; Start 6; Stop 30
taaattgattgatcgttacggaata

SEQ ID NO: 76984 - DNA, 25 bp, Artificial
  probe
  misc_feature (1)..(25): SEQ ID NO: 6658; WAN024BBR_x_at; Start 52; Stop 76
aatcgttactattctcctgatttaa

SEQ ID NO: 76985 - DNA, 25 bp, Artificial
  probe
  misc_feature (1)..(25): SEQ ID NO: 6658; WAN024BBR_x_at; Start 56; Stop 80
gttactattctcctgatttaaaaca

SEQ ID NO: 76986 - DNA, 25 bp, Artificial
  probe
  misc_feature (1)..(25): SEQ ID NO: 6658; WAN024BBR_x_at; Start 64; Stop 88
tctcctgatttaaaacaagaaatga

SEQ ID NO: 76987 - DNA, 25 bp, Artificial
  probe
  misc_feature (1)..(25): SEQ ID NO: 6658; WAN024BBR_x_at; Start 54; Stop 78
tcgttactattctcctgatttaaaa

SEQ ID NO: 76988 - DNA, 25 bp, Artificial
  probe
  misc_feature (1)..(25): SEQ ID NO: 6658; WAN024BBR_x_at; Start 4; Stop 28
attaaattgattgatcgttacggaa

SEQ ID NO: 76989 - DNA, 25 bp, Artificial
  probe
  misc_feature (1)..(25): SEQ ID NO: 6658; WAN024BBR_x_at; Start 60; Stop 84
ctattctcctgatttaaaacaagaa

SEQ ID NO: 76990 - DNA, 25 bp, Artificial
  probe
  misc_feature (1)..(25): SEQ ID NO: 6658; WAN024BBR_x_at; Start 5; Stop 29
ttaaattgattgatcgttacggaat

SEQ ID NO: 76991 - DNA, 25 bp, Artificial
  probe
  misc_feature (1)..(25): SEQ ID NO: 6658; WAN024BBR_x_at; Start 2; Stop 26
tgattaaattgattgatcgttacgg

SEQ ID NO: 76992 - DNA, 25 bp, Artificial
  probe
  misc_feature (1)..(25): SEQ ID NO: 6658; WAN024BBR_x_at; Start 70; Stop 94
gatttaaaacaagaaatgattaata

SEQ ID NO: 76993 - DNA, 25 bp, Artificial
  probe
  misc_feature (1)..(25): SEQ ID NO: 6658; WAN024BBR_x_at; Start 51; Stop 75
aaatcgttactattctcctgattta

SEQ ID NO: 76994 - DNA, 25 bp, Artificial
  probe
  misc_feature (1)..(25): SEQ ID NO: 6658; WAN024BBR_x_at; Start 62; Stop 86
attctcctgatttaaaacaagaaat

SEQ ID NO: 76995 - DNA, 25 bp, Artificial
  probe
  misc_feature (1)..(25): SEQ ID NO: 6658; WAN024BBR_x_at; Start 57; Stop 81
ttactattctcctgatttaaaacaa

SEQ ID NO: 76996 - DNA, 25 bp, Artificial
  probe
  misc_feature (1)..(25): SEQ ID NO: 6658; WAN024BBR_x_at; Start 14; Stop 38
ttgatcgttacggaatagagttcgt

SEQ ID NO: 76997 - DNA, 25 bp, Artificial
  probe
  misc_feature (1)..(25): SEQ ID NO: 6658; WAN024BBR_x_at; Start 16; Stop 40
gatcgttacggaatagagttcgtca

SEQ ID NO: 76998 - DNA, 25 bp, Artificial
  probe
  misc_feature (1)..(25): SEQ ID NO: 6658; WAN024BBR_x_at; Start 68; Stop 92
ctgatttaaaacaagaaatgattaa

SEQ ID NO: 76999 - DNA, 25 bp, Artificial
  probe
  misc_feature (1)..(25): SEQ ID NO: 6658; WAN024BBR_x_at; Start 47; Stop 71
ggaaaaatcgttactattctcctga

SEQ ID NO: 77000 - DNA, 25 bp, Artificial
  probe
  misc_feature (1)..(25): SEQ ID NO: 6658; WAN024BBR_x_at; Start 61; Stop 85
tattctcctgatttaaaacaagaaa

SEQ ID NO: 77001 - DNA, 25 bp, Artificial
  probe
  misc_feature (1)..(25): SEQ ID NO: 6658; WAN024BBR_x_at; Start 69; Stop 93
tgatttaaaacaagaaatgattaat

SEQ ID NO: 77002 - DNA, 25 bp, Artificial
  probe
  misc_feature (1)..(25): SEQ ID NO: 6658; WAN024BBR_x_at; Start 50; Stop 74
aaaatcgttactattctcctgattt

SEQ ID NO: 77003 - DNA, 25 bp, Artificial
  probe
  misc_feature (1)..(25): SEQ ID NO: 6658; WAN024BBR_x_at; Start 59; Stop 83
actattctcctgatttaaaacaaga

SEQ ID NO: 77004 - DNA, 25 bp, Artificial
  probe
  misc_feature (1)..(25): SEQ ID NO: 6658; WAN024BBR_x_at; Start 63; Stop 87
ttctcctgatttaaaacaagaaatg

SEQ ID NO: 77005 - DNA, 25 bp, Artificial
  probe
  misc_feature (1)..(25): SEQ ID NO: 6658; WAN024BBR_x_at; Start 58; Stop 82
tactattctcctgatttaaaacaag

SEQ ID NO: 77006 - DNA, 25 bp, Artificial
  probe
  misc_feature (1)..(25): SEQ ID NO: 6658; WAN024BBR_x_at; Start 65; Stop 89
ctcctgatttaaaacaagaaatgat

SEQ ID NO: 77007 - DNA, 25 bp, Artificial
  probe
  misc_feature (1)..(25): SEQ ID NO: 6658; WAN024BBR_x_at; Start 17; Stop 41
atcgttacggaatagagttcgtcaa

SEQ ID NO: 77008 - DNA, 25 bp, Artificial
  probe
  misc_feature (1)..(25): SEQ ID NO: 6658; WAN024BBR_x_at; Start 48; Stop 72
gaaaaatcgttactattctcctgat

SEQ ID NO: 77009 - DNA, 25 bp, Artificial
  probe
  misc_feature (1)..(25): SEQ ID NO: 6658; WAN024BBR_x_at; Start 49; Stop 73
aaaaatcgttactattctcctgatt

SEQ ID NO: 77010 - DNA, 25 bp, Artificial
  probe
  misc_feature (1)..(25): SEQ ID NO: 6658; WAN024BBR_x_at; Start 18; Stop 42
tcgttacggaatagagttcgtcaaa

SEQ ID NO: 77011 - DNA, 25 bp, Artificial
  probe
  misc_feature (1)..(25): SEQ ID NO: 6658; WAN024BBR_x_at; Start 66; Stop 90
tcctgatttaaaacaagaaatgatt

SEQ ID NO: 77012 - DNA, 25 bp, Artificial
  probe
  misc_feature (1)..(25): SEQ ID NO: 6658; WAN024BBR_x_at; Start 67; Stop 91
cctgatttaaaacaagaaatgatta

SEQ ID NO: 77013 - DNA, 25 bp, Artificial
  probe
  misc_feature (1)..(25): SEQ ID NO: 6658; WAN024BBR_x_at; Start 3; Stop 27
gattaaattgattgatcgttacgga

SEQ ID NO: 77014 - DNA, 25 bp, Artificial
  probe
  misc_feature (1)..(25): SEQ ID NO: 24; WAN024BBS_at; Start 29; Stop 53
aatattatcagaagaaagttgagaa

SEQ ID NO: 77015 - DNA, 25 bp, Artificial
  probe
  misc_feature (1)..(25): SEQ ID NO: 24; WAN024BBS_at; Start 7; Stop 31
cttcacataattttctttagaaaat

SEQ ID NO: 77016 - DNA, 25 bp, Artificial
  probe
  misc_feature (1)..(25): SEQ ID NO: 24; WAN024BBS_at; Start 28; Stop 52
aaatattatcagaagaaagttgaga

SEQ ID NO: 77017 - DNA, 25 bp, Artificial
  probe
  misc_feature (1)..(25): SEQ ID NO: 24; WAN024BBS_at; Start 31; Stop 55
tattatcagaagaaagttgagaaaa

SEQ ID NO: 77018 - DNA, 25 bp, Artificial
  probe
  misc_feature (1)..(25): SEQ ID NO: 24; WAN024BBS_at; Start 32; Stop 56
attatcagaagaaagttgagaaaaa

SEQ ID NO: 77019 - DNA, 25 bp, Artificial
  probe
  misc_feature (1)..(25): SEQ ID NO: 24; WAN024BBS_at; Start 27; Stop 51
aaaatattatcagaagaaagttgag

SEQ ID NO: 77020 - DNA, 25 bp, Artificial
  probe
  misc_feature (1)..(25): SEQ ID NO: 24; WAN024BBS_at; Start 2; Stop 26
tgatacttcacataattttctttag

SEQ ID NO: 77021 - DNA, 25 bp, Artificial
  probe
  misc_feature (1)..(25): SEQ ID NO: 24; WAN024BBS_at; Start 4; Stop 28
atacttcacataattttctttagaa

SEQ ID NO: 77022 - DNA, 25 bp, Artificial
  probe
  misc_feature (1)..(25): SEQ ID NO: 24; WAN024BBS_at; Start 30; Stop 54
atattatcagaagaaagttgagaaa

SEQ ID NO: 77023 - DNA, 25 bp, Artificial
  probe
  misc_feature (1)..(25): SEQ ID NO: 24; WAN024BBS_at; Start 26; Stop 50
gaaaatattatcagaagaaagttga

SEQ ID NO: 77024 - DNA, 25 bp, Artificial
  probe
  misc_feature (1)..(25): SEQ ID NO: 24; WAN024BBS_at; Start 5; Stop 29
tacttcacataattttctttagaaa

SEQ ID NO: 77025 - DNA, 25 bp, Artificial
  probe
  misc_feature (1)..(25): SEQ ID NO: 24; WAN024BBS_at; Start 1; Stop 25
gtgatacttcacataattttcttta

SEQ ID NO: 77026 - DNA, 25 bp, Artificial
  probe
  misc_feature (1)..(25): SEQ ID NO: 24; WAN024BBS_at; Start 3; Stop 27
gatacttcacataattttctttaga

SEQ ID NO: 77027 - DNA, 25 bp, Artificial
  probe
  misc_feature (1)..(25): SEQ ID NO: 6283; WAN024BBT_x_at; Start 56; Stop 80
gcttcctagtttgctctttgatttt

SEQ ID NO: 77028 - DNA, 25 bp, Artificial
  probe
  misc_feature (1)..(25): SEQ ID NO: 6283; WAN024BBT_x_at; Start 44; Stop 68
agcctgcggctagcttcctagtttg

SEQ ID NO: 77029 - DNA, 25 bp, Artificial
  probe
  misc_feature (1)..(25): SEQ ID NO: 6283; WAN024BBT_x_at; Start 51; Stop 75
ggctagcttcctagtttgctctttg

SEQ ID NO: 77030 - DNA, 25 bp, Artificial
  probe
  misc_feature (1)..(25): SEQ ID NO: 6283; WAN024BBT_x_at; Start 30; Stop 54
acggtgttttgagcagcctgcggct

SEQ ID NO: 77031 - DNA, 25 bp, Artificial
  probe
  misc_feature (1)..(25): SEQ ID NO: 6283; WAN024BBT_x_at; Start 53; Stop 77
ctagcttcctagtttgctctttgat

SEQ ID NO: 77032 - DNA, 25 bp, Artificial
  probe
  misc_feature (1)..(25): SEQ ID NO: 6283; WAN024BBT_x_at; Start 39; Stop 63
tgagcagcctgcggctagcttccta

SEQ ID NO: 77033 - DNA, 25 bp, Artificial
  probe
  misc_feature (1)..(25): SEQ ID NO: 6283; WAN024BBT_x_at; Start 47; Stop 71
ctgcggctagcttcctagtttgctc

SEQ ID NO: 77034 - DNA, 25 bp, Artificial
  probe
  misc_feature (1)..(25): SEQ ID NO: 6283; WAN024BBT_x_at; Start 38; Stop 62
ttgagcagcctgcggctagcttcct

SEQ ID NO: 77035 - DNA, 25 bp, Artificial
  probe
  misc_feature (1)..(25): SEQ ID NO: 6283; WAN024BBT_x_at; Start 32; Stop 56
ggtgttttgagcagcctgcggctag

SEQ ID NO: 77036 - DNA, 25 bp, Artificial
  probe
  misc_feature (1)..(25): SEQ ID NO: 6283; WAN024BBT_x_at; Start 13; Stop 37
ctatccacaacctcaaaacggtgtt

SEQ ID NO: 77037 - DNA, 25 bp, Artificial
  probe
  misc_feature (1)..(25): SEQ ID NO: 6283; WAN024BBT_x_at; Start 12; Stop 36
tctatccacaacctcaaaacggtgt

SEQ ID NO: 77038 - DNA, 25 bp, Artificial
  probe
  misc_feature (1)..(25): SEQ ID NO: 6283; WAN024BBT_x_at; Start 40; Stop 64
gagcagcctgcggctagcttcctag

SEQ ID NO: 77039 - DNA, 25 bp, Artificial
  probe
  misc_feature (1)..(25): SEQ ID NO: 6283; WAN024BBT_x_at; Start 46; Stop 70
cctgcggctagcttcctagtttgct

SEQ ID NO: 77040 - DNA, 25 bp, Artificial
  probe
  misc_feature (1)..(25): SEQ ID NO: 6283; WAN024BBT_x_at; Start 57; Stop 81
cttcctagtttgctctttgattttc

SEQ ID NO: 77041 - DNA, 25 bp, Artificial
  probe
  misc_feature (1)..(25): SEQ ID NO: 6283; WAN024BBT_x_at; Start 11; Stop 35
ttctatccacaacctcaaaacggtg

SEQ ID NO: 77042 - DNA, 25 bp, Artificial
  probe
  misc_feature (1)..(25): SEQ ID NO: 6283; WAN024BBT_x_at; Start 31; Stop 55
cggtgttttgagcagcctgcggcta

SEQ ID NO: 77043 - DNA, 25 bp, Artificial
  probe
  misc_feature (1)..(25): SEQ ID NO: 6283; WAN024BBT_x_at; Start 49; Stop 73
gcggctagcttcctagtttgctctt

SEQ ID NO: 77044 - DNA, 25 bp, Artificial
  probe
  misc_feature (1)..(25): SEQ ID NO: 6283; WAN024BBT_x_at; Start 35; Stop 59
gttttgagcagcctgcggctagctt

SEQ ID NO: 77045 - DNA, 25 bp, Artificial
  probe
  misc_feature (1)..(25): SEQ ID NO: 6283; WAN024BBT_x_at; Start 37; Stop 61
tttgagcagcctgcggctagcttcc

SEQ ID NO: 77046 - DNA, 25 bp, Artificial
  probe
  misc_feature (1)..(25): SEQ ID NO: 6283; WAN024BBT_x_at; Start 43; Stop 67
cagcctgcggctagcttcctagttt

SEQ ID NO: 77047 - DNA, 25 bp, Artificial
  probe
  misc_feature (1)..(25): SEQ ID NO: 6283; WAN024BBT_x_at; Start 55; Stop 79
agcttcctagtttgctctttgattt

SEQ ID NO: 77048 - DNA, 25 bp, Artificial
  probe
  misc_feature (1)..(25): SEQ ID NO: 6283; WAN024BBT_x_at; Start 52; Stop 76
gctagcttcctagtttgctctttga

SEQ ID NO: 77049 - DNA, 25 bp, Artificial
  probe
  misc_feature (1)..(25): SEQ ID NO: 6283; WAN024BBT_x_at; Start 36; Stop 60
ttttgagcagcctgcggctagcttc

SEQ ID NO: 77050 - DNA, 25 bp, Artificial
  probe
  misc_feature (1)..(25): SEQ ID NO: 6283; WAN024BBT_x_at; Start 41; Stop 65
agcagcctgcggctagcttcctagt

SEQ ID NO: 77051 - DNA, 25 bp, Artificial
  probe
  misc_feature (1)..(25): SEQ ID NO: 6283; WAN024BBT_x_at; Start 34; Stop 58
tgttttgagcagcctgcggctagct

SEQ ID NO: 77052 - DNA, 25 bp, Artificial
  probe
  misc_feature (1)..(25): SEQ ID NO: 6283; WAN024BBT_x_at; Start 50; Stop 74
cggctagcttcctagtttgctcttt

SEQ ID NO: 77053 - DNA, 25 bp, Artificial
  probe
  misc_feature (1)..(25): SEQ ID NO: 6283; WAN024BBT_x_at; Start 54; Stop 78
tagcttcctagtttgctctttgatt

SEQ ID NO: 77054 - DNA, 25 bp, Artificial
  probe
  misc_feature (1)..(25): SEQ ID NO: 6283; WAN024BBT_x_at; Start 48; Stop 72
tgcggctagcttcctagtttgctct

SEQ ID NO: 77055 - DNA, 25 bp, Artificial
  probe
  misc_feature (1)..(25): SEQ ID NO: 6283; WAN024BBT_x_at; Start 59; Stop 83
tcctagtttgctctttgattttcat

SEQ ID NO: 77056 - DNA, 25 bp, Artificial
  probe
  misc_feature (1)..(25): SEQ ID NO: 6283; WAN024BBT_x_at; Start 29; Stop 53
aacggtgttttgagcagcctgcggc

SEQ ID NO: 77057 - DNA, 25 bp, Artificial
  probe
  misc_feature (1)..(25): SEQ ID NO: 6283; WAN024BBT_x_at; Start 45; Stop 69
gcctgcggctagcttcctagtttgc

SEQ ID NO: 77058 - DNA, 25 bp, Artificial
  probe
  misc_feature (1)..(25): SEQ ID NO: 6283; WAN024BBT_x_at; Start 42; Stop 66
gcagcctgcggctagcttcctagtt

SEQ ID NO: 77059 - DNA, 25 bp, Artificial
  probe
  misc_feature (1)..(25): SEQ ID NO: 6283; WAN024BBT_x_at; Start 33; Stop 57
gtgttttgagcagcctgcggctagc

SEQ ID NO: 77060 - DNA, 25 bp, Artificial
  probe
  misc_feature (1)..(25): SEQ ID NO: 6283; WAN024BBT_x_at; Start 58; Stop 82
ttcctagtttgctctttgattttca

SEQ ID NO: 77061 - DNA, 25 bp, Artificial
  probe
  misc_feature (1)..(25): SEQ ID NO: 20; WAN024BBU_s_at; Start 15; Stop 39
cttatctaaaacctcaaggcagtac

SEQ ID NO: 77062 - DNA, 25 bp, Artificial
  probe
  misc_feature (1)..(25): SEQ ID NO: 20; WAN024BBU_s_at; Start 16; Stop 40
ttatctaaaacctcaaggcagtact

SEQ ID NO: 77063 - DNA, 25 bp, Artificial
  probe
  misc_feature (1)..(25): SEQ ID NO: 20; WAN024BBU_s_at; Start 14; Stop 38
tcttatctaaaacctcaaggcagta

SEQ ID NO: 77064 - DNA, 25 bp, Artificial
  probe
  misc_feature (1)..(25): SEQ ID NO: 1; WAN024BBV_s_at; Start 68; Stop 92
tcaaagagtacaagaagtttagtta

SEQ ID NO: 77065 - DNA, 25 bp, Artificial
  probe
  misc_feature (1)..(25): SEQ ID NO: 1; WAN024BBV_s_at; Start 59; Stop 83
aagagattttcaaagagtacaagaa

SEQ ID NO: 77066 - DNA, 25 bp, Artificial
  probe
  misc_feature (1)..(25): SEQ ID NO: 1; WAN024BBV_s_at; Start 61; Stop 85
gagattttcaaagagtacaagaagt

SEQ ID NO: 77067 - DNA, 25 bp, Artificial
  probe
  misc_feature (1)..(25): SEQ ID NO: 1; WAN024BBV_s_at; Start 69; Stop 93
caaagagtacaagaagtttagttat

SEQ ID NO: 77068 - DNA, 25 bp, Artificial
  probe
  misc_feature (1)..(25): SEQ ID NO: 1; WAN024BBV_s_at; Start 60; Stop 84
agagattttcaaagagtacaagaag

SEQ ID NO: 77069 - DNA, 25 bp, Artificial
  probe
  misc_feature (1)..(25): SEQ ID NO: 1; WAN024BBV_s_at; Start 62; Stop 86
agattttcaaagagtacaagaagtt

SEQ ID NO: 77070 - DNA, 25 bp, Artificial
  probe
  misc_feature (1)..(25): SEQ ID NO: 7297; WAN024BBW_at; Start 78; Stop 102
gtataagtctctacataataaaacg

SEQ ID NO: 77071 - DNA, 25 bp, Artificial
  probe
  misc_feature (1)..(25): SEQ ID NO: 7297; WAN024BBW_at; Start 81; Stop 105
taagtctctacataataaaacgcat

SEQ ID NO: 77072 - DNA, 25 bp, Artificial
  probe
  misc_feature (1)..(25): SEQ ID NO: 7297; WAN024BBW_at; Start 79; Stop 103
tataagtctctacataataaaacgc

SEQ ID NO: 77073 - DNA, 25 bp, Artificial
  probe
  misc_feature (1)..(25): SEQ ID NO: 7297; WAN024BBW_at; Start 96; Stop 120
taaaacgcatattaccaaggttgtg

SEQ ID NO: 77074 - DNA, 25 bp, Artificial
  probe
  misc_feature (1)..(25): SEQ ID NO: 7297; WAN024BBW_at; Start 77; Stop 101
agtataagtctctacataataaaac

SEQ ID NO: 77075 - DNA, 25 bp, Artificial
  probe
  misc_feature (1)..(25): SEQ ID NO: 7297; WAN024BBW_at; Start 80; Stop 104
ataagtctctacataataaaacgca

SEQ ID NO: 77076 - DNA, 25 bp, Artificial
  probe
  misc_feature (1)..(25): SEQ ID NO: 7297; WAN024BBW_at; Start 95; Stop 119
ataaaacgcatattaccaaggttgt

SEQ ID NO: 77077 - DNA, 25 bp, Artificial
  probe
  misc_feature (1)..(25): SEQ ID NO: 29; WAN024BBX_s_at; Start 15; Stop 39
ttcttctgtttcacgcgaaacaccc

SEQ ID NO: 77078 - DNA, 25 bp, Artificial
  probe
  misc_feature (1)..(25): SEQ ID NO: 29; WAN024BBX_s_at; Start 47; Stop 71
agcaaggtgttcttgtttttatact

SEQ ID NO: 77079 - DNA, 25 bp, Artificial
  probe
  misc_feature (1)..(25): SEQ ID NO: 29; WAN024BBX_s_at; Start 19; Stop 43
tctgtttcacgcgaaacaccctgcg

SEQ ID NO: 77080 - DNA, 25 bp, Artificial
  probe
  misc_feature (1)..(25): SEQ ID NO: 29; WAN024BBX_s_at; Start 5; Stop 29
aaccagataattcttctgtttcacg

SEQ ID NO: 77081 - DNA, 25 bp, Artificial
  probe
  misc_feature (1)..(25): SEQ ID NO: 29; WAN024BBX_s_at; Start 39; Stop 63
ctgcgccaagcaaggtgttcttgtt

SEQ ID NO: 77082 - DNA, 25 bp, Artificial
  probe
  misc_feature (1)..(25): SEQ ID NO: 29; WAN024BBX_s_at; Start 10; Stop 34
gataattcttctgtttcacgcgaaa

SEQ ID NO: 77083 - DNA, 25 bp, Artificial
  probe
  misc_feature (1)..(25): SEQ ID NO: 29; WAN024BBX_s_at; Start 34; Stop 58
acaccctgcgccaagcaaggtgttc

SEQ ID NO: 77084 - DNA, 25 bp, Artificial
  probe
  misc_feature (1)..(25): SEQ ID NO: 29; WAN024BBX_s_at; Start 42; Stop 66
cgccaagcaaggtgttcttgttttt

SEQ ID NO: 77085 - DNA, 25 bp, Artificial
  probe
  misc_feature (1)..(25): SEQ ID NO: 29; WAN024BBX_s_at; Start 23; Stop 47
tttcacgcgaaacaccctgcgccaa

SEQ ID NO: 77086 - DNA, 25 bp, Artificial
  probe
  misc_feature (1)..(25): SEQ ID NO: 29; WAN024BBX_s_at; Start 21; Stop 45
tgtttcacgcgaaacaccctgcgcc

SEQ ID NO: 77087 - DNA, 25 bp, Artificial
  probe
  misc_feature (1)..(25): SEQ ID NO: 29; WAN024BBX_s_at; Start 8; Stop 32
cagataattcttctgtttcacgcga

SEQ ID NO: 77088 - DNA, 25 bp, Artificial
  probe
  misc_feature (1)..(25): SEQ ID NO: 29; WAN024BBX_s_at; Start 9; Stop 33
agataattcttctgtttcacgcgaa

SEQ ID NO: 77089 - DNA, 25 bp, Artificial
  probe
  misc_feature (1)..(25): SEQ ID NO: 29; WAN024BBX_s_at; Start 52; Stop 76
ggtgttcttgtttttatactcaatg

SEQ ID NO: 77090 - DNA, 25 bp, Artificial
  probe
  misc_feature (1)..(25): SEQ ID NO: 29; WAN024BBX_s_at; Start 40; Stop 64
tgcgccaagcaaggtgttcttgttt

SEQ ID NO: 77091 - DNA, 25 bp, Artificial
  probe
  misc_feature (1)..(25): SEQ ID NO: 29; WAN024BBX_s_at; Start 11; Stop 35
ataattcttctgtttcacgcgaaac

SEQ ID NO: 77092 - DNA, 25 bp, Artificial
  probe
  misc_feature (1)..(25): SEQ ID NO: 29; WAN024BBX_s_at; Start 48; Stop 72
gcaaggtgttcttgtttttatactc

SEQ ID NO: 77093 - DNA, 25 bp, Artificial
  probe
  misc_feature (1)..(25): SEQ ID NO: 29; WAN024BBX_s_at; Start 18; Stop 42
ttctgtttcacgcgaaacaccctgc

SEQ ID NO: 77094 - DNA, 25 bp, Artificial
  probe
  misc_feature (1)..(25): SEQ ID NO: 29; WAN024BBX_s_at; Start 45; Stop 69
caagcaaggtgttcttgtttttata

SEQ ID NO: 77095 - DNA, 25 bp, Artificial
  probe
  misc_feature (1)..(25): SEQ ID NO: 29; WAN024BBX_s_at; Start 49; Stop 73
caaggtgttcttgtttttatactca

SEQ ID NO: 77096 - DNA, 25 bp, Artificial
  probe
  misc_feature (1)..(25): SEQ ID NO: 29; WAN024BBX_s_at; Start 14; Stop 38
attcttctgtttcacgcgaaacacc

SEQ ID NO: 77097 - DNA, 25 bp, Artificial
  probe
  misc_feature (1)..(25): SEQ ID NO: 29; WAN024BBX_s_at; Start 13; Stop 37
aattcttctgtttcacgcgaaacac

SEQ ID NO: 77098 - DNA, 25 bp, Artificial
  probe
  misc_feature (1)..(25): SEQ ID NO: 29; WAN024BBX_s_at; Start 7; Stop 31
ccagataattcttctgtttcacgcg

SEQ ID NO: 77099 - DNA, 25 bp, Artificial
  probe
  misc_feature (1)..(25): SEQ ID NO: 29; WAN024BBX_s_at; Start 41; Stop 65
gcgccaagcaaggtgttcttgtttt

SEQ ID NO: 77100 - DNA, 25 bp, Artificial
  probe
  misc_feature (1)..(25): SEQ ID NO: 29; WAN024BBX_s_at; Start 38; Stop 62
cctgcgccaagcaaggtgttcttgt

SEQ ID NO: 77101 - DNA, 25 bp, Artificial
  probe
  misc_feature (1)..(25): SEQ ID NO: 29; WAN024BBX_s_at; Start 36; Stop 60
accctgcgccaagcaaggtgttctt

SEQ ID NO: 77102 - DNA, 25 bp, Artificial
  probe
  misc_feature (1)..(25): SEQ ID NO: 29; WAN024BBX_s_at; Start 6; Stop 30
accagataattcttctgtttcacgc

SEQ ID NO: 77103 - DNA, 25 bp, Artificial
  probe
  misc_feature (1)..(25): SEQ ID NO: 29; WAN024BBX_s_at; Start 44; Stop 68
ccaagcaaggtgttcttgtttttat

SEQ ID NO: 77104 - DNA, 25 bp, Artificial
  probe
  misc_feature (1)..(25): SEQ ID NO: 29; WAN024BBX_s_at; Start 43; Stop 67
gccaagcaaggtgttcttgttttta

SEQ ID NO: 77105 - DNA, 25 bp, Artificial
  probe
  misc_feature (1)..(25): SEQ ID NO: 29; WAN024BBX_s_at; Start 3; Stop 27
gaaaccagataattcttctgtttca

SEQ ID NO: 77106 - DNA, 25 bp, Artificial
  probe
  misc_feature (1)..(25): SEQ ID NO: 29; WAN024BBX_s_at; Start 33; Stop 57
aacaccctgcgccaagcaaggtgtt

SEQ ID NO: 77107 - DNA, 25 bp, Artificial
  probe
  misc_feature (1)..(25): SEQ ID NO: 29; WAN024BBX_s_at; Start 37; Stop 61
ccctgcgccaagcaaggtgttcttg

SEQ ID NO: 77108 - DNA, 25 bp, Artificial
  probe
  misc_feature (1)..(25): SEQ ID NO: 29; WAN024BBX_s_at; Start 12; Stop 36
taattcttctgtttcacgcgaaaca

SEQ ID NO: 77109 - DNA, 25 bp, Artificial
  probe
  misc_feature (1)..(25): SEQ ID NO: 29; WAN024BBX_s_at; Start 16; Stop 40
tcttctgtttcacgcgaaacaccct

SEQ ID NO: 77110 - DNA, 25 bp, Artificial
  probe
  misc_feature (1)..(25): SEQ ID NO: 29; WAN024BBX_s_at; Start 35; Stop 59
caccctgcgccaagcaaggtgttct

SEQ ID NO: 77111 - DNA, 25 bp, Artificial
  probe
  misc_feature (1)..(25): SEQ ID NO: 7087; WAN024BBY_s_at; Start 63; Stop 87
cgaagagtatcatttcatctcactc

SEQ ID NO: 77112 - DNA, 25 bp, Artificial
  probe
  misc_feature (1)..(25): SEQ ID NO: 7087; WAN024BBY_s_at; Start 62; Stop 86
tcgaagagtatcatttcatctcact

SEQ ID NO: 77113 - DNA, 25 bp, Artificial
  probe
  misc_feature (1)..(25): SEQ ID NO: 7087; WAN024BBY_s_at; Start 61; Stop 85
ttcgaagagtatcatttcatctcac

SEQ ID NO: 77114 - DNA, 25 bp, Artificial
  probe
  misc_feature (1)..(25): SEQ ID NO: 7087; WAN024BBY_s_at; Start 60; Stop 84
tttcgaagagtatcatttcatctca

SEQ ID NO: 77115 - DNA, 25 bp, Artificial
  probe
  misc_feature (1)..(25): SEQ ID NO: 22; WAN024BC4_x_at; Start 5; Stop 29
cttcgtcagttctatctacaacctc

SEQ ID NO: 77116 - DNA, 25 bp, Artificial
  probe
  misc_feature (1)..(25): SEQ ID NO: 22; WAN024BC4_x_at; Start 4; Stop 28
acttcgtcagttctatctacaacct

SEQ ID NO: 77117 - DNA, 25 bp, Artificial
  probe
  misc_feature (1)..(25): SEQ ID NO: 22; WAN024BC4_x_at; Start 48; Stop 72
acctgcgactagttttctagtttgc

SEQ ID NO: 77118 - DNA, 25 bp, Artificial
  probe
  misc_feature (1)..(25): SEQ ID NO: 22; WAN024BC4_x_at; Start 11; Stop 35
cagttctatctacaacctcaaagca

SEQ ID NO: 77119 - DNA, 25 bp, Artificial
  probe
  misc_feature (1)..(25): SEQ ID NO: 22; WAN024BC4_x_at; Start 3; Stop 27
gacttcgtcagttctatctacaacc

SEQ ID NO: 77120 - DNA, 25 bp, Artificial
  probe
  misc_feature (1)..(25): SEQ ID NO: 22; WAN024BC4_x_at; Start 36; Stop 60
gtactttgagcaacctgcgactagt

SEQ ID NO: 77121 - DNA, 25 bp, Artificial
  probe
  misc_feature (1)..(25): SEQ ID NO: 22; WAN024BC4_x_at; Start 7; Stop 31
tcgtcagttctatctacaacctcaa

SEQ ID NO: 77122 - DNA, 25 bp, Artificial
  probe
  misc_feature (1)..(25): SEQ ID NO: 22; WAN024BC4_x_at; Start 50; Stop 74
ctgcgactagttttctagtttgctc

SEQ ID NO: 77123 - DNA, 25 bp, Artificial
  probe
  misc_feature (1)..(25): SEQ ID NO: 22; WAN024BC4_x_at; Start 10; Stop 34
tcagttctatctacaacctcaaagc

SEQ ID NO: 77124 - DNA, 25 bp, Artificial
  probe
  misc_feature (1)..(25): SEQ ID NO: 22; WAN024BC4_x_at; Start 16; Stop 40
ctatctacaacctcaaagcagtact

SEQ ID NO: 77125 - DNA, 25 bp, Artificial
  probe
  misc_feature (1)..(25): SEQ ID NO: 22; WAN024BC4_x_at; Start 37; Stop 61
tactttgagcaacctgcgactagtt

SEQ ID NO: 77126 - DNA, 25 bp, Artificial
  probe
  misc_feature (1)..(25): SEQ ID NO: 22; WAN024BC4_x_at; Start 47; Stop 71
aacctgcgactagttttctagtttg

SEQ ID NO: 77127 - DNA, 25 bp, Artificial
  probe
  misc_feature (1)..(25): SEQ ID NO: 22; WAN024BC4_x_at; Start 33; Stop 57
gcagtactttgagcaacctgcgact

SEQ ID NO: 77128 - DNA, 25 bp, Artificial
  probe
  misc_feature (1)..(25): SEQ ID NO: 22; WAN024BC4_x_at; Start 8; Stop 32
cgtcagttctatctacaacctcaaa

SEQ ID NO: 77129 - DNA, 25 bp, Artificial
  probe
  misc_feature (1)..(25): SEQ ID NO: 22; WAN024BC4_x_at; Start 14; Stop 38
ttctatctacaacctcaaagcagta

SEQ ID NO: 77130 - DNA, 25 bp, Artificial
  probe
  misc_feature (1)..(25): SEQ ID NO: 22; WAN024BC4_x_at; Start 2; Stop 26
tgacttcgtcagttctatctacaac

SEQ ID NO: 77131 - DNA, 25 bp, Artificial
  probe
  misc_feature (1)..(25): SEQ ID NO: 22; WAN024BC4_x_at; Start 49; Stop 73
cctgcgactagttttctagtttgct

SEQ ID NO: 77132 - DNA, 25 bp, Artificial
  probe
  misc_feature (1)..(25): SEQ ID NO: 22; WAN024BC4_x_at; Start 53; Stop 77
cgactagttttctagtttgctcttt

SEQ ID NO: 77133 - DNA, 25 bp, Artificial
  probe
  misc_feature (1)..(25): SEQ ID NO: 22; WAN024BC4_x_at; Start 35; Stop 59
agtactttgagcaacctgcgactag

SEQ ID NO: 77134 - DNA, 25 bp, Artificial
  probe
  misc_feature (1)..(25): SEQ ID NO: 22; WAN024BC4_x_at; Start 12; Stop 36
agttctatctacaacctcaaagcag

SEQ ID NO: 77135 - DNA, 25 bp, Artificial
  probe
  misc_feature (1)..(25): SEQ ID NO: 22; WAN024BC4_x_at; Start 6; Stop 30
ttcgtcagttctatctacaacctca

SEQ ID NO: 77136 - DNA, 25 bp, Artificial
  probe
  misc_feature (1)..(25): SEQ ID NO: 22; WAN024BC4_x_at; Start 51; Stop 75
tgcgactagttttctagtttgctct

SEQ ID NO: 77137 - DNA, 25 bp, Artificial
  probe
  misc_feature (1)..(25): SEQ ID NO: 22; WAN024BC4_x_at; Start 15; Stop 39
tctatctacaacctcaaagcagtac

SEQ ID NO: 77138 - DNA, 25 bp, Artificial
  probe
  misc_feature (1)..(25): SEQ ID NO: 22; WAN024BC4_x_at; Start 1; Stop 25
ctgacttcgtcagttctatctacaa

SEQ ID NO: 77139 - DNA, 25 bp, Artificial
  probe
  misc_feature (1)..(25): SEQ ID NO: 22; WAN024BC4_x_at; Start 31; Stop 55
aagcagtactttgagcaacctgcga

SEQ ID NO: 77140 - DNA, 25 bp, Artificial
  probe
  misc_feature (1)..(25): SEQ ID NO: 22; WAN024BC4_x_at; Start 32; Stop 56
agcagtactttgagcaacctgcgac

SEQ ID NO: 77141 - DNA, 25 bp, Artificial
  probe
  misc_feature (1)..(25): SEQ ID NO: 22; WAN024BC4_x_at; Start 54; Stop 78
gactagttttctagtttgctctttg

SEQ ID NO: 77142 - DNA, 25 bp, Artificial
  probe
  misc_feature (1)..(25): SEQ ID NO: 22; WAN024BC4_x_at; Start 52; Stop 76
gcgactagttttctagtttgctctt

SEQ ID NO: 77143 - DNA, 25 bp, Artificial
  probe
  misc_feature (1)..(25): SEQ ID NO: 22; WAN024BC4_x_at; Start 38; Stop 62
actttgagcaacctgcgactagttt

SEQ ID NO: 77144 - DNA, 25 bp, Artificial
  probe
  misc_feature (1)..(25): SEQ ID NO: 22; WAN024BC4_x_at; Start 34; Stop 58
cagtactttgagcaacctgcgacta

SEQ ID NO: 77145 - DNA, 25 bp, Artificial
  probe
  misc_feature (1)..(25): SEQ ID NO: 22; WAN024BC4_x_at; Start 9; Stop 33
gtcagttctatctacaacctcaaag

SEQ ID NO: 77146 - DNA, 25 bp, Artificial
  probe
  misc_feature (1)..(25): SEQ ID NO: 22; WAN024BC4_x_at; Start 39; Stop 63
ctttgagcaacctgcgactagtttt

SEQ ID NO: 77147 - DNA, 25 bp, Artificial
  probe
  misc_feature (1)..(25): SEQ ID NO: 6736; WAN024BC6_at; Start 207; Stop 231
ctgcaatcaagttgagcagggttga

SEQ ID NO: 77148 - DNA, 25 bp, Artificial
  probe
  misc_feature (1)..(25): SEQ ID NO: 6736; WAN024BC6_at; Start 96; Stop 120
ggtaattgataactctcttgctttc

SEQ ID NO: 77149 - DNA, 25 bp, Artificial
  probe
  misc_feature (1)..(25): SEQ ID NO: 6736; WAN024BC6_at; Start 184; Stop 208
tcctttagttggctcaagacttcct

SEQ ID NO: 77150 - DNA, 25 bp, Artificial
  probe
  misc_feature (1)..(25): SEQ ID NO: 6736; WAN024BC6_at; Start 94; Stop 118
caggtaattgataactctcttgctt

SEQ ID NO: 77151 - DNA, 25 bp, Artificial
  probe
  misc_feature (1)..(25): SEQ ID NO: 6736; WAN024BC6_at; Start 182; Stop 206
tgtcctttagttggctcaagacttc

SEQ ID NO: 77152 - DNA, 25 bp, Artificial
  probe
  misc_feature (1)..(25): SEQ ID NO: 6736; WAN024BC6_at; Start 201; Stop 225
gacttcctgcaatcaagttgagcag

SEQ ID NO: 77153 - DNA, 25 bp, Artificial
  probe
  misc_feature (1)..(25): SEQ ID NO: 6736; WAN024BC6_at; Start 17; Stop 41
aaaaggaactgctccagcaactctg

SEQ ID NO: 77154 - DNA, 25 bp, Artificial
  probe
  misc_feature (1)..(25): SEQ ID NO: 6736; WAN024BC6_at; Start 36; Stop 60
actctgcaatcgaagtcgtagaacc

SEQ ID NO: 77155 - DNA, 25 bp, Artificial
  probe
  misc_feature (1)..(25): SEQ ID NO: 6736; WAN024BC6_at; Start 16; Stop 40
gaaaaggaactgctccagcaactct

SEQ ID NO: 77156 - DNA, 25 bp, Artificial
  probe
  misc_feature (1)..(25): SEQ ID NO: 6736; WAN024BC6_at; Start 26; Stop 50
tgctccagcaactctgcaatcgaag

SEQ ID NO: 77157 - DNA, 25 bp, Artificial
  probe
  misc_feature (1)..(25): SEQ ID NO: 6736; WAN024BC6_at; Start 27; Stop 51
gctccagcaactctgcaatcgaagt

SEQ ID NO: 77158 - DNA, 25 bp, Artificial
  probe
  misc_feature (1)..(25): SEQ ID NO: 6736; WAN024BC6_at; Start 23; Stop 47
aactgctccagcaactctgcaatcg

SEQ ID NO: 77159 - DNA, 25 bp, Artificial
  probe
  misc_feature (1)..(25): SEQ ID NO: 6736; WAN024BC6_at; Start 29; Stop 53
tccagcaactctgcaatcgaagtcg

SEQ ID NO: 77160 - DNA, 25 bp, Artificial
  probe
  misc_feature (1)..(25): SEQ ID NO: 6736; WAN024BC6_at; Start 43; Stop 67
aatcgaagtcgtagaaccgccactg

SEQ ID NO: 77161 - DNA, 25 bp, Artificial
  probe
  misc_feature (1)..(25): SEQ ID NO: 6736; WAN024BC6_at; Start 19; Stop 43
aaggaactgctccagcaactctgca

SEQ ID NO: 77162 - DNA, 25 bp, Artificial
  probe
  misc_feature (1)..(25): SEQ ID NO: 6736; WAN024BC6_at; Start 34; Stop 58
caactctgcaatcgaagtcgtagaa

SEQ ID NO: 77163 - DNA, 25 bp, Artificial
  probe
  misc_feature (1)..(25): SEQ ID NO: 6736; WAN024BC6_at; Start 42; Stop 66
caatcgaagtcgtagaaccgccact

SEQ ID NO: 77164 - DNA, 25 bp, Artificial
  probe
  misc_feature (1)..(25): SEQ ID NO: 6736; WAN024BC6_at; Start 205; Stop 229
tcctgcaatcaagttgagcagggtt

SEQ ID NO: 77165 - DNA, 25 bp, Artificial
  probe
  misc_feature (1)..(25): SEQ ID NO: 6736; WAN024BC6_at; Start 38; Stop 62
tctgcaatcgaagtcgtagaaccgc

SEQ ID NO: 77166 - DNA, 25 bp, Artificial
  probe
  misc_feature (1)..(25): SEQ ID NO: 6736; WAN024BC6_at; Start 18; Stop 42
aaaggaactgctccagcaactctgc

SEQ ID NO: 77167 - DNA, 25 bp, Artificial
  probe
  misc_feature (1)..(25): SEQ ID NO: 6736; WAN024BC6_at; Start 203; Stop 227
cttcctgcaatcaagttgagcaggg

SEQ ID NO: 77168 - DNA, 25 bp, Artificial
  probe
  misc_feature (1)..(25): SEQ ID NO: 6736; WAN024BC6_at; Start 40; Stop 64
tgcaatcgaagtcgtagaaccgcca

SEQ ID NO: 77169 - DNA, 25 bp, Artificial
  probe
  misc_feature (1)..(25): SEQ ID NO: 6736; WAN024BC6_at; Start 102; Stop 126
tgataactctcttgctttcatccaa

SEQ ID NO: 77170 - DNA, 25 bp, Artificial
  probe
  misc_feature (1)..(25): SEQ ID NO: 6736; WAN024BC6_at; Start 21; Stop 45
ggaactgctccagcaactctgcaat

SEQ ID NO: 77171 - DNA, 25 bp, Artificial
  probe
  misc_feature (1)..(25): SEQ ID NO: 6736; WAN024BC6_at; Start 92; Stop 116
tgcaggtaattgataactctcttgc

SEQ ID NO: 77172 - DNA, 25 bp, Artificial
  probe
  misc_feature (1)..(25): SEQ ID NO: 6736; WAN024BC6_at; Start 31; Stop 55
cagcaactctgcaatcgaagtcgta

SEQ ID NO: 77173 - DNA, 25 bp, Artificial
  probe
  misc_feature (1)..(25): SEQ ID NO: 6736; WAN024BC6_at; Start 179; Stop 203
acttgtcctttagttggctcaagac

SEQ ID NO: 77174 - DNA, 25 bp, Artificial
  probe
  misc_feature (1)..(25): SEQ ID NO: 6736; WAN024BC6_at; Start 33; Stop 57
gcaactctgcaatcgaagtcgtaga

SEQ ID NO: 77175 - DNA, 25 bp, Artificial
  probe
  misc_feature (1)..(25): SEQ ID NO: 6736; WAN024BC6_at; Start 41; Stop 65
gcaatcgaagtcgtagaaccgccac

SEQ ID NO: 77176 - DNA, 25 bp, Artificial
  probe
  misc_feature (1)..(25): SEQ ID NO: 6736; WAN024BC6_at; Start 175; Stop 199
cacaacttgtcctttagttggctca

SEQ ID NO: 77177 - DNA, 25 bp, Artificial
  probe
  misc_feature (1)..(25): SEQ ID NO: 6736; WAN024BC6_at; Start 24; Stop 48
actgctccagcaactctgcaatcga

SEQ ID NO: 77178 - DNA, 25 bp, Artificial
  probe
  misc_feature (1)..(25): SEQ ID NO: 6736; WAN024BC6_at; Start 177; Stop 201
caacttgtcctttagttggctcaag

SEQ ID NO: 77179 - DNA, 25 bp, Artificial
  probe
  misc_feature (1)..(25): SEQ ID NO: 6736; WAN024BC6_at; Start 91; Stop 115
ctgcaggtaattgataactctcttg

SEQ ID NO: 77180 - DNA, 25 bp, Artificial
  probe
  misc_feature (1)..(25): SEQ ID NO: 6736; WAN024BC6_at; Start 35; Stop 59
aactctgcaatcgaagtcgtagaac

SEQ ID NO: 77181 - DNA, 25 bp, Artificial
  probe
  misc_feature (1)..(25): SEQ ID NO: 6737; WAN024BC7_at; Start 96; Stop 120
ggtaattgatcacacgcttgctttc

SEQ ID NO: 77182 - DNA, 25 bp, Artificial
  probe
  misc_feature (1)..(25): SEQ ID NO: 6737; WAN024BC7_at; Start 21; Stop 45
ggaattgctccagcaactcagcgat

SEQ ID NO: 77183 - DNA, 25 bp, Artificial
  probe
  misc_feature (1)..(25): SEQ ID NO: 6737; WAN024BC7_at; Start 179; Stop 203
acttgtcctgctgtcggctcaagac

SEQ ID NO: 77184 - DNA, 25 bp, Artificial
  probe
  misc_feature (1)..(25): SEQ ID NO: 6737; WAN024BC7_at; Start 94; Stop 118
caggtaattgatcacacgcttgctt

SEQ ID NO: 77185 - DNA, 25 bp, Artificial
  probe
  misc_feature (1)..(25): SEQ ID NO: 6737; WAN024BC7_at; Start 201; Stop 225
gacttcctgcaatcaggttaagtag

SEQ ID NO: 77186 - DNA, 25 bp, Artificial
  probe
  misc_feature (1)..(25): SEQ ID NO: 6737; WAN024BC7_at; Start 36; Stop 60
actcagcgatggaagtcgtagaacc

SEQ ID NO: 77187 - DNA, 25 bp, Artificial
  probe
  misc_feature (1)..(25): SEQ ID NO: 6737; WAN024BC7_at; Start 26; Stop 50
tgctccagcaactcagcgatggaag

SEQ ID NO: 77188 - DNA, 25 bp, Artificial
  probe
  misc_feature (1)..(25): SEQ ID NO: 6737; WAN024BC7_at; Start 27; Stop 51
gctccagcaactcagcgatggaagt

SEQ ID NO: 77189 - DNA, 25 bp, Artificial
  probe
  misc_feature (1)..(25): SEQ ID NO: 6737; WAN024BC7_at; Start 29; Stop 53
tccagcaactcagcgatggaagtcg

SEQ ID NO: 77190 - DNA, 25 bp, Artificial
  probe
  misc_feature (1)..(25): SEQ ID NO: 6737; WAN024BC7_at; Start 38; Stop 62
tcagcgatggaagtcgtagaaccac

SEQ ID NO: 77191 - DNA, 25 bp, Artificial
  probe
  misc_feature (1)..(25): SEQ ID NO: 6737; WAN024BC7_at; Start 178; Stop 202
aacttgtcctgctgtcggctcaaga

SEQ ID NO: 77192 - DNA, 25 bp, Artificial
  probe
  misc_feature (1)..(25): SEQ ID NO: 6737; WAN024BC7_at; Start 43; Stop 67
gatggaagtcgtagaaccaccactg

SEQ ID NO: 77193 - DNA, 25 bp, Artificial
  probe
  misc_feature (1)..(25): SEQ ID NO: 6737; WAN024BC7_at; Start 34; Stop 58
caactcagcgatggaagtcgtagaa

SEQ ID NO: 77194 - DNA, 25 bp, Artificial
  probe
  misc_feature (1)..(25): SEQ ID NO: 6737; WAN024BC7_at; Start 102; Stop 126
tgatcacacgcttgctttcatccaa

SEQ ID NO: 77195 - DNA, 25 bp, Artificial
  probe
  misc_feature (1)..(25): SEQ ID NO: 6737; WAN024BC7_at; Start 98; Stop 122
taattgatcacacgcttgctttcat

SEQ ID NO: 77196 - DNA, 25 bp, Artificial
  probe
  misc_feature (1)..(25): SEQ ID NO: 6737; WAN024BC7_at; Start 181; Stop 205
ttgtcctgctgtcggctcaagactt

SEQ ID NO: 77197 - DNA, 25 bp, Artificial
  probe
  misc_feature (1)..(25): SEQ ID NO: 6737; WAN024BC7_at; Start 22; Stop 46
gaattgctccagcaactcagcgatg

SEQ ID NO: 77198 - DNA, 25 bp, Artificial
  probe
  misc_feature (1)..(25): SEQ ID NO: 6737; WAN024BC7_at; Start 177; Stop 201
caacttgtcctgctgtcggctcaag

SEQ ID NO: 77199 - DNA, 25 bp, Artificial
  probe
  misc_feature (1)..(25): SEQ ID NO: 6737; WAN024BC7_at; Start 16; Stop 40
gaagaggaattgctccagcaactca

SEQ ID NO: 77200 - DNA, 25 bp, Artificial
  probe
  misc_feature (1)..(25): SEQ ID NO: 6737; WAN024BC7_at; Start 184; Stop 208
tcctgctgtcggctcaagacttcct

SEQ ID NO: 77201 - DNA, 25 bp, Artificial
  probe
  misc_feature (1)..(25): SEQ ID NO: 6737; WAN024BC7_at; Start 41; Stop 65
gcgatggaagtcgtagaaccaccac

SEQ ID NO: 77202 - DNA, 25 bp, Artificial
  probe
  misc_feature (1)..(25): SEQ ID NO: 6737; WAN024BC7_at; Start 19; Stop 43
gaggaattgctccagcaactcagcg

SEQ ID NO: 77203 - DNA, 25 bp, Artificial
  probe
  misc_feature (1)..(25): SEQ ID NO: 6737; WAN024BC7_at; Start 175; Stop 199
cacaacttgtcctgctgtcggctca

SEQ ID NO: 77204 - DNA, 25 bp, Artificial
  probe
  misc_feature (1)..(25): SEQ ID NO: 6737; WAN024BC7_at; Start 92; Stop 116
tgcaggtaattgatcacacgcttgc

SEQ ID NO: 77205 - DNA, 25 bp, Artificial
  probe
  misc_feature (1)..(25): SEQ ID NO: 6737; WAN024BC7_at; Start 23; Stop 47
aattgctccagcaactcagcgatgg

SEQ ID NO: 77206 - DNA, 25 bp, Artificial
  probe
  misc_feature (1)..(25): SEQ ID NO: 6737; WAN024BC7_at; Start 173; Stop 197
atcacaacttgtcctgctgtcggct

SEQ ID NO: 77207 - DNA, 25 bp, Artificial
  probe
  misc_feature (1)..(25): SEQ ID NO: 6737; WAN024BC7_at; Start 31; Stop 55
cagcaactcagcgatggaagtcgta

SEQ ID NO: 77208 - DNA, 25 bp, Artificial
  probe
  misc_feature (1)..(25): SEQ ID NO: 6737; WAN024BC7_at; Start 42; Stop 66
cgatggaagtcgtagaaccaccact

SEQ ID NO: 77209 - DNA, 25 bp, Artificial
  probe
  misc_feature (1)..(25): SEQ ID NO: 6737; WAN024BC7_at; Start 176; Stop 200
acaacttgtcctgctgtcggctcaa

SEQ ID NO: 77210 - DNA, 25 bp, Artificial
  probe
  misc_feature (1)..(25): SEQ ID NO: 6737; WAN024BC7_at; Start 33; Stop 57
gcaactcagcgatggaagtcgtaga

SEQ ID NO: 77211 - DNA, 25 bp, Artificial
  probe
  misc_feature (1)..(25): SEQ ID NO: 6737; WAN024BC7_at; Start 39; Stop 63
cagcgatggaagtcgtagaaccacc

SEQ ID NO: 77212 - DNA, 25 bp, Artificial
  probe
  misc_feature (1)..(25): SEQ ID NO: 6737; WAN024BC7_at; Start 91; Stop 115
ctgcaggtaattgatcacacgcttg

SEQ ID NO: 77213 - DNA, 25 bp, Artificial
  probe
  misc_feature (1)..(25): SEQ ID NO: 6737; WAN024BC7_at; Start 24; Stop 48
attgctccagcaactcagcgatgga

SEQ ID NO: 77214 - DNA, 25 bp, Artificial
  probe
  misc_feature (1)..(25): SEQ ID NO: 6737; WAN024BC7_at; Start 35; Stop 59
aactcagcgatggaagtcgtagaac

SEQ ID NO: 77215 - DNA, 25 bp, Artificial
  probe
  misc_feature (1)..(25): SEQ ID NO: 7348; WAN024BC9_x_at; Start 23; Stop 47
accacgttagtttccatctgcaacc

SEQ ID NO: 77216 - DNA, 25 bp, Artificial
  probe
  misc_feature (1)..(25): SEQ ID NO: 7348; WAN024BC9_x_at; Start 46; Stop 70
cctcaaaacactgttttgagcaacc

SEQ ID NO: 77217 - DNA, 25 bp, Artificial
  probe
  misc_feature (1)..(25): SEQ ID NO: 7348; WAN024BC9_x_at; Start 92; Stop 116
ctttttgatttttattgagtatgag

SEQ ID NO: 77218 - DNA, 25 bp, Artificial
  probe
  misc_feature (1)..(25): SEQ ID NO: 7348; WAN024BC9_x_at; Start 36; Stop 60
ccatctgcaacctcaaaacactgtt

SEQ ID NO: 77219 - DNA, 25 bp, Artificial
  probe
  misc_feature (1)..(25): SEQ ID NO: 7348; WAN024BC9_x_at; Start 44; Stop 68
aacctcaaaacactgttttgagcaa

SEQ ID NO: 77220 - DNA, 25 bp, Artificial
  probe
  misc_feature (1)..(25): SEQ ID NO: 7348; WAN024BC9_x_at; Start 42; Stop 66
gcaacctcaaaacactgttttgagc

SEQ ID NO: 77221 - DNA, 25 bp, Artificial
  probe
  misc_feature (1)..(25): SEQ ID NO: 7348; WAN024BC9_x_at; Start 41; Stop 65
tgcaacctcaaaacactgttttgag

SEQ ID NO: 77222 - DNA, 25 bp, Artificial
  probe
  misc_feature (1)..(25): SEQ ID NO: 7348; WAN024BC9_x_at; Start 1; Stop 25
tactcttcgaaaatctcttcaaacc

SEQ ID NO: 77223 - DNA, 25 bp, Artificial
  probe
  misc_feature (1)..(25): SEQ ID NO: 7348; WAN024BC9_x_at; Start 26; Stop 50
acgttagtttccatctgcaacctca

SEQ ID NO: 77224 - DNA, 25 bp, Artificial
  probe
  misc_feature (1)..(25): SEQ ID NO: 7348; WAN024BC9_x_at; Start 22; Stop 46
aaccacgttagtttccatctgcaac

SEQ ID NO: 77225 - DNA, 25 bp, Artificial
  probe
  misc_feature (1)..(25): SEQ ID NO: 7348; WAN024BC9_x_at; Start 21; Stop 45
aaaccacgttagtttccatctgcaa

SEQ ID NO: 77226 - DNA, 25 bp, Artificial
  probe
  misc_feature (1)..(25): SEQ ID NO: 7348; WAN024BC9_x_at; Start 33; Stop 57
tttccatctgcaacctcaaaacact

SEQ ID NO: 77227 - DNA, 25 bp, Artificial
  probe
  misc_feature (1)..(25): SEQ ID NO: 7348; WAN024BC9_x_at; Start 4; Stop 28
tcttcgaaaatctcttcaaaccacg

SEQ ID NO: 77228 - DNA, 25 bp, Artificial
  probe
  misc_feature (1)..(25): SEQ ID NO: 7348; WAN024BC9_x_at; Start 67; Stop 91
aacctgcggctagctttctagtttg

SEQ ID NO: 77229 - DNA, 25 bp, Artificial
  probe
  misc_feature (1)..(25): SEQ ID NO: 7348; WAN024BC9_x_at; Start 39; Stop 63
tctgcaacctcaaaacactgttttg

SEQ ID NO: 77230 - DNA, 25 bp, Artificial
  probe
  misc_feature (1)..(25): SEQ ID NO: 7348; WAN024BC9_x_at; Start 2; Stop 26
actcttcgaaaatctcttcaaacca

SEQ ID NO: 77231 - DNA, 25 bp, Artificial
  probe
  misc_feature (1)..(25): SEQ ID NO: 7348; WAN024BC9_x_at; Start 29; Stop 53
ttagtttccatctgcaacctcaaaa

SEQ ID NO: 77232 - DNA, 25 bp, Artificial
  probe
  misc_feature (1)..(25): SEQ ID NO: 7348; WAN024BC9_x_at; Start 31; Stop 55
agtttccatctgcaacctcaaaaca

SEQ ID NO: 77233 - DNA, 25 bp, Artificial
  probe
  misc_feature (1)..(25): SEQ ID NO: 7348; WAN024BC9_x_at; Start 19; Stop 43
tcaaaccacgttagtttccatctgc

SEQ ID NO: 77234 - DNA, 25 bp, Artificial
  probe
  misc_feature (1)..(25): SEQ ID NO: 7348; WAN024BC9_x_at; Start 27; Stop 51
cgttagtttccatctgcaacctcaa

SEQ ID NO: 77235 - DNA, 25 bp, Artificial
  probe
  misc_feature (1)..(25): SEQ ID NO: 7348; WAN024BC9_x_at; Start 40; Stop 64
ctgcaacctcaaaacactgttttga

SEQ ID NO: 77236 - DNA, 25 bp, Artificial
  probe
  misc_feature (1)..(25): SEQ ID NO: 7348; WAN024BC9_x_at; Start 3; Stop 27
ctcttcgaaaatctcttcaaaccac

SEQ ID NO: 77237 - DNA, 25 bp, Artificial
  probe
  misc_feature (1)..(25): SEQ ID NO: 7348; WAN024BC9_x_at; Start 25; Stop 49
cacgttagtttccatctgcaacctc

SEQ ID NO: 77238 - DNA, 25 bp, Artificial
  probe
  misc_feature (1)..(25): SEQ ID NO: 7348; WAN024BC9_x_at; Start 28; Stop 52
gttagtttccatctgcaacctcaaa

SEQ ID NO: 77239 - DNA, 25 bp, Artificial
  probe
  misc_feature (1)..(25): SEQ ID NO: 7348; WAN024BC9_x_at; Start 32; Stop 56
gtttccatctgcaacctcaaaacac

SEQ ID NO: 77240 - DNA, 25 bp, Artificial
  probe
  misc_feature (1)..(25): SEQ ID NO: 7348; WAN024BC9_x_at; Start 30; Stop 54
tagtttccatctgcaacctcaaaac

SEQ ID NO: 77241 - DNA, 25 bp, Artificial
  probe
  misc_feature (1)..(25): SEQ ID NO: 7348; WAN024BC9_x_at; Start 43; Stop 67
caacctcaaaacactgttttgagca

SEQ ID NO: 77242 - DNA, 25 bp, Artificial
  probe
  misc_feature (1)..(25): SEQ ID NO: 7348; WAN024BC9_x_at; Start 35; Stop 59
tccatctgcaacctcaaaacactgt

SEQ ID NO: 77243 - DNA, 25 bp, Artificial
  probe
  misc_feature (1)..(25): SEQ ID NO: 7348; WAN024BC9_x_at; Start 38; Stop 62
atctgcaacctcaaaacactgtttt

SEQ ID NO: 77244 - DNA, 25 bp, Artificial
  probe
  misc_feature (1)..(25): SEQ ID NO: 7348; WAN024BC9_x_at; Start 20; Stop 44
caaaccacgttagtttccatctgca

SEQ ID NO: 77245 - DNA, 25 bp, Artificial
  probe
  misc_feature (1)..(25): SEQ ID NO: 7348; WAN024BC9_x_at; Start 37; Stop 61
catctgcaacctcaaaacactgttt

SEQ ID NO: 77246 - DNA, 25 bp, Artificial
  probe
  misc_feature (1)..(25): SEQ ID NO: 7348; WAN024BC9_x_at; Start 24; Stop 48
ccacgttagtttccatctgcaacct

SEQ ID NO: 77247 - DNA, 25 bp, Artificial
  probe
  misc_feature (1)..(25): SEQ ID NO: 7348; WAN024BC9_x_at; Start 45; Stop 69
acctcaaaacactgttttgagcaac

SEQ ID NO: 77248 - DNA, 25 bp, Artificial
  probe
  misc_feature (1)..(25): SEQ ID NO: 7348; WAN024BC9_x_at; Start 34; Stop 58
ttccatctgcaacctcaaaacactg

SEQ ID NO: 77249 - DNA, 25 bp, Artificial
  probe
  misc_feature (1)..(25): SEQ ID NO: 6922; WAN024BCB_at; Start 39; Stop 63
tggtcttgtgacctggattccccgt

SEQ ID NO: 77250 - DNA, 25 bp, Artificial
  probe
  misc_feature (1)..(25): SEQ ID NO: 6922; WAN024BCB_at; Start 20; Stop 44
tattagcggttattttctctggtct

SEQ ID NO: 77251 - DNA, 25 bp, Artificial
  probe
  misc_feature (1)..(25): SEQ ID NO: 6922; WAN024BCB_at; Start 29; Stop 53
ttattttctctggtcttgtgacctg

SEQ ID NO: 77252 - DNA, 25 bp, Artificial
  probe
  misc_feature (1)..(25): SEQ ID NO: 6922; WAN024BCB_at; Start 40; Stop 64
ggtcttgtgacctggattccccgta

SEQ ID NO: 77253 - DNA, 25 bp, Artificial
  probe
  misc_feature (1)..(25): SEQ ID NO: 6922; WAN024BCB_at; Start 22; Stop 46
ttagcggttattttctctggtcttg

SEQ ID NO: 77254 - DNA, 25 bp, Artificial
  probe
  misc_feature (1)..(25): SEQ ID NO: 6922; WAN024BCB_at; Start 38; Stop 62
ctggtcttgtgacctggattccccg

SEQ ID NO: 77255 - DNA, 25 bp, Artificial
  probe
  misc_feature (1)..(25): SEQ ID NO: 6922; WAN024BCB_at; Start 25; Stop 49
gcggttattttctctggtcttgtga

SEQ ID NO: 77256 - DNA, 25 bp, Artificial
  probe
  misc_feature (1)..(25): SEQ ID NO: 6922; WAN024BCB_at; Start 41; Stop 65
gtcttgtgacctggattccccgtat

SEQ ID NO: 77257 - DNA, 25 bp, Artificial
  probe
  misc_feature (1)..(25): SEQ ID NO: 6922; WAN024BCB_at; Start 42; Stop 66
tcttgtgacctggattccccgtatg

SEQ ID NO: 77258 - DNA, 25 bp, Artificial
  probe
  misc_feature (1)..(25): SEQ ID NO: 6922; WAN024BCB_at; Start 24; Stop 48
agcggttattttctctggtcttgtg

SEQ ID NO: 77259 - DNA, 25 bp, Artificial
  probe
  misc_feature (1)..(25): SEQ ID NO: 6922; WAN024BCB_at; Start 36; Stop 60
ctctggtcttgtgacctggattccc

SEQ ID NO: 77260 - DNA, 25 bp, Artificial
  probe
  misc_feature (1)..(25): SEQ ID NO: 6922; WAN024BCB_at; Start 33; Stop 57
tttctctggtcttgtgacctggatt

SEQ ID NO: 77261 - DNA, 25 bp, Artificial
  probe
  misc_feature (1)..(25): SEQ ID NO: 6922; WAN024BCB_at; Start 21; Stop 45
attagcggttattttctctggtctt

SEQ ID NO: 77262 - DNA, 25 bp, Artificial
  probe
  misc_feature (1)..(25): SEQ ID NO: 6922; WAN024BCB_at; Start 32; Stop 56
ttttctctggtcttgtgacctggat

SEQ ID NO: 77263 - DNA, 25 bp, Artificial
  probe
  misc_feature (1)..(25): SEQ ID NO: 6922; WAN024BCB_at; Start 37; Stop 61
tctggtcttgtgacctggattcccc

SEQ ID NO: 77264 - DNA, 25 bp, Artificial
  probe
  misc_feature (1)..(25): SEQ ID NO: 6922; WAN024BCB_at; Start 28; Stop 52
gttattttctctggtcttgtgacct

SEQ ID NO: 77265 - DNA, 25 bp, Artificial
  probe
  misc_feature (1)..(25): SEQ ID NO: 6922; WAN024BCB_at; Start 31; Stop 55
attttctctggtcttgtgacctgga

SEQ ID NO: 77266 - DNA, 25 bp, Artificial
  probe
  misc_feature (1)..(25): SEQ ID NO: 6922; WAN024BCB_at; Start 35; Stop 59
tctctggtcttgtgacctggattcc

SEQ ID NO: 77267 - DNA, 25 bp, Artificial
  probe
  misc_feature (1)..(25): SEQ ID NO: 6922; WAN024BCB_at; Start 26; Stop 50
cggttattttctctggtcttgtgac

SEQ ID NO: 77268 - DNA, 25 bp, Artificial
  probe
  misc_feature (1)..(25): SEQ ID NO: 6922; WAN024BCB_at; Start 30; Stop 54
tattttctctggtcttgtgacctgg

SEQ ID NO: 77269 - DNA, 25 bp, Artificial
  probe
  misc_feature (1)..(25): SEQ ID NO: 6922; WAN024BCB_at; Start 34; Stop 58
ttctctggtcttgtgacctggattc

SEQ ID NO: 77270 - DNA, 25 bp, Artificial
  probe
  misc_feature (1)..(25): SEQ ID NO: 6922; WAN024BCB_at; Start 23; Stop 47
tagcggttattttctctggtcttgt

SEQ ID NO: 77271 - DNA, 25 bp, Artificial
  probe
  misc_feature (1)..(25): SEQ ID NO: 6922; WAN024BCB_at; Start 27; Stop 51
ggttattttctctggtcttgtgacc

SEQ ID NO: 77272 - DNA, 25 bp, Artificial
  probe
  misc_feature (1)..(25): SEQ ID NO: 6921; WAN024BCD_at; Start 96; Stop 120
cttgcctgcaatcgttgagcgtttt

SEQ ID NO: 77273 - DNA, 25 bp, Artificial
  probe
  misc_feature (1)..(25): SEQ ID NO: 6921; WAN024BCD_at; Start 90; Stop 114
taagggcttgcctgcaatcgttgag

SEQ ID NO: 77274 - DNA, 25 bp, Artificial
  probe
  misc_feature (1)..(25): SEQ ID NO: 6921; WAN024BCD_at; Start 98; Stop 122
tgcctgcaatcgttgagcgtttttt

SEQ ID NO: 77275 - DNA, 25 bp, Artificial
  probe
  misc_feature (1)..(25): SEQ ID NO: 6921; WAN024BCD_at; Start 89; Stop 113
ataagggcttgcctgcaatcgttga

SEQ ID NO: 77276 - DNA, 25 bp, Artificial
  probe
  misc_feature (1)..(25): SEQ ID NO: 6921; WAN024BCD_at; Start 85; Stop 109
aagtataagggcttgcctgcaatcg

SEQ ID NO: 77277 - DNA, 25 bp, Artificial
  probe
  misc_feature (1)..(25): SEQ ID NO: 6921; WAN024BCD_at; Start 91; Stop 115
aagggcttgcctgcaatcgttgagc

SEQ ID NO: 77278 - DNA, 25 bp, Artificial
  probe
  misc_feature (1)..(25): SEQ ID NO: 6921; WAN024BCD_at; Start 79; Stop 103
ttagtcaagtataagggcttgcctg

SEQ ID NO: 77279 - DNA, 25 bp, Artificial
  probe
  misc_feature (1)..(25): SEQ ID NO: 6921; WAN024BCD_at; Start 80; Stop 104
tagtcaagtataagggcttgcctgc

SEQ ID NO: 77280 - DNA, 25 bp, Artificial
  probe
  misc_feature (1)..(25): SEQ ID NO: 6921; WAN024BCD_at; Start 86; Stop 110
agtataagggcttgcctgcaatcgt

SEQ ID NO: 77281 - DNA, 25 bp, Artificial
  probe
  misc_feature (1)..(25): SEQ ID NO: 6921; WAN024BCD_at; Start 99; Stop 123
gcctgcaatcgttgagcgttttttg

SEQ ID NO: 77282 - DNA, 25 bp, Artificial
  probe
  misc_feature (1)..(25): SEQ ID NO: 6921; WAN024BCD_at; Start 95; Stop 119
gcttgcctgcaatcgttgagcgttt

SEQ ID NO: 77283 - DNA, 25 bp, Artificial
  probe
  misc_feature (1)..(25): SEQ ID NO: 6921; WAN024BCD_at; Start 97; Stop 121
ttgcctgcaatcgttgagcgttttt

SEQ ID NO: 77284 - DNA, 25 bp, Artificial
  probe
  misc_feature (1)..(25): SEQ ID NO: 6921; WAN024BCD_at; Start 92; Stop 116
agggcttgcctgcaatcgttgagcg

SEQ ID NO: 77285 - DNA, 25 bp, Artificial
  probe
  misc_feature (1)..(25): SEQ ID NO: 6921; WAN024BCD_at; Start 83; Stop 107
tcaagtataagggcttgcctgcaat

SEQ ID NO: 77286 - DNA, 25 bp, Artificial
  probe
  misc_feature (1)..(25): SEQ ID NO: 6921; WAN024BCD_at; Start 84; Stop 108
caagtataagggcttgcctgcaatc

SEQ ID NO: 77287 - DNA, 25 bp, Artificial
  probe
  misc_feature (1)..(25): SEQ ID NO: 6921; WAN024BCD_at; Start 87; Stop 111
gtataagggcttgcctgcaatcgtt

SEQ ID NO: 77288 - DNA, 25 bp, Artificial
  probe
  misc_feature (1)..(25): SEQ ID NO: 6921; WAN024BCD_at; Start 93; Stop 117
gggcttgcctgcaatcgttgagcgt

SEQ ID NO: 77289 - DNA, 25 bp, Artificial
  probe
  misc_feature (1)..(25): SEQ ID NO: 6921; WAN024BCD_at; Start 94; Stop 118
ggcttgcctgcaatcgttgagcgtt

SEQ ID NO: 77290 - DNA, 25 bp, Artificial
  probe
  misc_feature (1)..(25): SEQ ID NO: 6921; WAN024BCD_at; Start 88; Stop 112
tataagggcttgcctgcaatcgttg

SEQ ID NO: 77291 - DNA, 25 bp, Artificial
  probe
  misc_feature (1)..(25): SEQ ID NO: 6921; WAN024BCD_at; Start 82; Stop 106
gtcaagtataagggcttgcctgcaa

SEQ ID NO: 77292 - DNA, 25 bp, Artificial
  probe
  misc_feature (1)..(25): SEQ ID NO: 6921; WAN024BCD_at; Start 81; Stop 105
agtcaagtataagggcttgcctgca

SEQ ID NO: 77293 - DNA, 25 bp, Artificial
  probe
  misc_feature (1)..(25): SEQ ID NO: 7363; WAN024BCH_at; Start 1; Stop 25
tgccgtaggtataggtaacgacttc

SEQ ID NO: 77294 - DNA, 25 bp, Artificial
  probe
  misc_feature (1)..(25): SEQ ID NO: 7363; WAN024BCH_at; Start 8; Stop 32
ggtataggtaacgacttcgtcagtc

SEQ ID NO: 77295 - DNA, 25 bp, Artificial
  probe
  misc_feature (1)..(25): SEQ ID NO: 7363; WAN024BCH_at; Start 6; Stop 30
taggtataggtaacgacttcgtcag

SEQ ID NO: 77296 - DNA, 25 bp, Artificial
  probe
  misc_feature (1)..(25): SEQ ID NO: 7363; WAN024BCH_at; Start 7; Stop 31
aggtataggtaacgacttcgtcagt

SEQ ID NO: 77297 - DNA, 25 bp, Artificial
  probe
  misc_feature (1)..(25): SEQ ID NO: 7363; WAN024BCH_at; Start 9; Stop 33
gtataggtaacgacttcgtcagtct

SEQ ID NO: 77298 - DNA, 25 bp, Artificial
  probe
  misc_feature (1)..(25): SEQ ID NO: 7363; WAN024BCH_at; Start 10; Stop 34
tataggtaacgacttcgtcagtctt

SEQ ID NO: 77299 - DNA, 25 bp, Artificial
  probe
  misc_feature (1)..(25): SEQ ID NO: 7363; WAN024BCH_at; Start 5; Stop 29
gtaggtataggtaacgacttcgtca

SEQ ID NO: 77300 - DNA, 25 bp, Artificial
  probe
  misc_feature (1)..(25): SEQ ID NO: 23; WAN024BCJ_at; Start 37; Stop 61
aatctccccacaactatagaaaaag

SEQ ID NO: 77301 - DNA, 25 bp, Artificial
  probe
  misc_feature (1)..(25): SEQ ID NO: 23; WAN024BCJ_at; Start 27; Stop 51
aaatgaagtaaatctccccacaact

SEQ ID NO: 77302 - DNA, 25 bp, Artificial
  probe
  misc_feature (1)..(25): SEQ ID NO: 23; WAN024BCJ_at; Start 28; Stop 52
aatgaagtaaatctccccacaacta

SEQ ID NO: 77303 - DNA, 25 bp, Artificial
  probe
  misc_feature (1)..(25): SEQ ID NO: 23; WAN024BCJ_at; Start 33; Stop 57
agtaaatctccccacaactatagaa

SEQ ID NO: 77304 - DNA, 25 bp, Artificial
  probe
  misc_feature (1)..(25): SEQ ID NO: 23; WAN024BCJ_at; Start 43; Stop 67
cccacaactatagaaaaagatttga

SEQ ID NO: 77305 - DNA, 25 bp, Artificial
  probe
  misc_feature (1)..(25): SEQ ID NO: 23; WAN024BCJ_at; Start 10; Stop 34
aactcaatctcaggagaaaatgaag

SEQ ID NO: 77306 - DNA, 25 bp, Artificial
  probe
  misc_feature (1)..(25): SEQ ID NO: 23; WAN024BCJ_at; Start 56; Stop 80
aaaaagatttgattctgctcctcac

SEQ ID NO: 77307 - DNA, 25 bp, Artificial
  probe
  misc_feature (1)..(25): SEQ ID NO: 23; WAN024BCJ_at; Start 7; Stop 31
aaaaactcaatctcaggagaaaatg

SEQ ID NO: 77308 - DNA, 25 bp, Artificial
  probe
  misc_feature (1)..(25): SEQ ID NO: 23; WAN024BCJ_at; Start 25; Stop 49
gaaaatgaagtaaatctccccacaa

SEQ ID NO: 77309 - DNA, 25 bp, Artificial
  probe
  misc_feature (1)..(25): SEQ ID NO: 23; WAN024BCJ_at; Start 54; Stop 78
agaaaaagatttgattctgctcctc

SEQ ID NO: 77310 - DNA, 25 bp, Artificial
  probe
  misc_feature (1)..(25): SEQ ID NO: 23; WAN024BCJ_at; Start 59; Stop 83
aagatttgattctgctcctcacaca

SEQ ID NO: 77311 - DNA, 25 bp, Artificial
  probe
  misc_feature (1)..(25): SEQ ID NO: 23; WAN024BCJ_at; Start 53; Stop 77
tagaaaaagatttgattctgctcct

SEQ ID NO: 77312 - DNA, 25 bp, Artificial
  probe
  misc_feature (1)..(25): SEQ ID NO: 23; WAN024BCJ_at; Start 55; Stop 79
gaaaaagatttgattctgctcctca

SEQ ID NO: 77313 - DNA, 25 bp, Artificial
  probe
  misc_feature (1)..(25): SEQ ID NO: 23; WAN024BCJ_at; Start 39; Stop 63
tctccccacaactatagaaaaagat

SEQ ID NO: 77314 - DNA, 25 bp, Artificial
  probe
  misc_feature (1)..(25): SEQ ID NO: 23; WAN024BCJ_at; Start 57; Stop 81
aaaagatttgattctgctcctcaca

SEQ ID NO: 77315 - DNA, 25 bp, Artificial
  probe
  misc_feature (1)..(25): SEQ ID NO: 23; WAN024BCJ_at; Start 40; Stop 64
ctccccacaactatagaaaaagatt

SEQ ID NO: 77316 - DNA, 25 bp, Artificial
  probe
  misc_feature (1)..(25): SEQ ID NO: 23; WAN024BCJ_at; Start 24; Stop 48
agaaaatgaagtaaatctccccaca

SEQ ID NO: 77317 - DNA, 25 bp, Artificial
  probe
  misc_feature (1)..(25): SEQ ID NO: 23; WAN024BCJ_at; Start 51; Stop 75
tatagaaaaagatttgattctgctc

SEQ ID NO: 77318 - DNA, 25 bp, Artificial
  probe
  misc_feature (1)..(25): SEQ ID NO: 23; WAN024BCJ_at; Start 8; Stop 32
aaaactcaatctcaggagaaaatga

SEQ ID NO: 77319 - DNA, 25 bp, Artificial
  probe
  misc_feature (1)..(25): SEQ ID NO: 23; WAN024BCJ_at; Start 14; Stop 38
caatctcaggagaaaatgaagtaaa

SEQ ID NO: 77320 - DNA, 25 bp, Artificial
  probe
  misc_feature (1)..(25): SEQ ID NO: 23; WAN024BCJ_at; Start 6; Stop 30
caaaaactcaatctcaggagaaaat

SEQ ID NO: 77321 - DNA, 25 bp, Artificial
  probe
  misc_feature (1)..(25): SEQ ID NO: 23; WAN024BCJ_at; Start 30; Stop 54
tgaagtaaatctccccacaactata

SEQ ID NO: 77322 - DNA, 25 bp, Artificial
  probe
  misc_feature (1)..(25): SEQ ID NO: 23; WAN024BCJ_at; Start 34; Stop 58
gtaaatctccccacaactatagaaa

SEQ ID NO: 77323 - DNA, 25 bp, Artificial
  probe
  misc_feature (1)..(25): SEQ ID NO: 23; WAN024BCJ_at; Start 5; Stop 29
gcaaaaactcaatctcaggagaaaa

SEQ ID NO: 77324 - DNA, 25 bp, Artificial
  probe
  misc_feature (1)..(25): SEQ ID NO: 23; WAN024BCJ_at; Start 12; Stop 36
ctcaatctcaggagaaaatgaagta

SEQ ID NO: 77325 - DNA, 25 bp, Artificial
  probe
  misc_feature (1)..(25): SEQ ID NO: 23; WAN024BCJ_at; Start 13; Stop 37
tcaatctcaggagaaaatgaagtaa

SEQ ID NO: 77326 - DNA, 25 bp, Artificial
  probe
  misc_feature (1)..(25): SEQ ID NO: 23; WAN024BCJ_at; Start 47; Stop 71
caactatagaaaaagatttgattct

SEQ ID NO: 77327 - DNA, 25 bp, Artificial
  probe
  misc_feature (1)..(25): SEQ ID NO: 23; WAN024BCJ_at; Start 58; Stop 82
aaagatttgattctgctcctcacac

SEQ ID NO: 77328 - DNA, 25 bp, Artificial
  probe
  misc_feature (1)..(25): SEQ ID NO: 23; WAN024BCJ_at; Start 42; Stop 66
ccccacaactatagaaaaagatttg

SEQ ID NO: 77329 - DNA, 25 bp, Artificial
  probe
  misc_feature (1)..(25): SEQ ID NO: 23; WAN024BCJ_at; Start 4; Stop 28
ggcaaaaactcaatctcaggagaaa

SEQ ID NO: 77330 - DNA, 25 bp, Artificial
  probe
  misc_feature (1)..(25): SEQ ID NO: 23; WAN024BCJ_at; Start 35; Stop 59
taaatctccccacaactatagaaaa

SEQ ID NO: 77331 - DNA, 25 bp, Artificial
  probe
  misc_feature (1)..(25): SEQ ID NO: 23; WAN024BCJ_at; Start 44; Stop 68
ccacaactatagaaaaagatttgat

SEQ ID NO: 77332 - DNA, 25 bp, Artificial
  probe
  misc_feature (1)..(25): SEQ ID NO: 23; WAN024BCJ_at; Start 60; Stop 84
agatttgattctgctcctcacacaa

SEQ ID NO: 77333 - DNA, 25 bp, Artificial
  probe
  misc_feature (1)..(25): SEQ ID NO: 23; WAN024BCJ_at; Start 23; Stop 47
gagaaaatgaagtaaatctccccac

SEQ ID NO: 77334 - DNA, 25 bp, Artificial
  probe
  misc_feature (1)..(25): SEQ ID NO: 7094; WAN024BCK_x_at; Start 48; Stop 72
acctgcggctagtttcctagtttgc

SEQ ID NO: 77335 - DNA, 25 bp, Artificial
  probe
  misc_feature (1)..(25): SEQ ID NO: 7094; WAN024BCK_x_at; Start 66; Stop 90
agtttgctctttgattttcattgag

SEQ ID NO: 77336 - DNA, 25 bp, Artificial
  probe
  misc_feature (1)..(25): SEQ ID NO: 7094; WAN024BCK_x_at; Start 32; Stop 56
agcagtgctttgagcaacctgcggc

SEQ ID NO: 77337 - DNA, 25 bp, Artificial
  probe
  misc_feature (1)..(25): SEQ ID NO: 7094; WAN024BCK_x_at; Start 54; Stop 78
ggctagtttcctagtttgctctttg

SEQ ID NO: 77338 - DNA, 25 bp, Artificial
  probe
  misc_feature (1)..(25): SEQ ID NO: 7094; WAN024BCK_x_at; Start 50; Stop 74
ctgcggctagtttcctagtttgctc

SEQ ID NO: 77339 - DNA, 25 bp, Artificial
  probe
  misc_feature (1)..(25): SEQ ID NO: 7094; WAN024BCK_x_at; Start 68; Stop 92
tttgctctttgattttcattgagta

SEQ ID NO: 77340 - DNA, 25 bp, Artificial
  probe
  misc_feature (1)..(25): SEQ ID NO: 7094; WAN024BCK_x_at; Start 38; Stop 62
gctttgagcaacctgcggctagttt

SEQ ID NO: 77341 - DNA, 25 bp, Artificial
  probe
  misc_feature (1)..(25): SEQ ID NO: 7094; WAN024BCK_x_at; Start 63; Stop 87
cctagtttgctctttgattttcatt

SEQ ID NO: 77342 - DNA, 25 bp, Artificial
  probe
  misc_feature (1)..(25): SEQ ID NO: 7094; WAN024BCK_x_at; Start 47; Stop 71
aacctgcggctagtttcctagtttg

SEQ ID NO: 77343 - DNA, 25 bp, Artificial
  probe
  misc_feature (1)..(25): SEQ ID NO: 7094; WAN024BCK_x_at; Start 45; Stop 69
gcaacctgcggctagtttcctagtt

SEQ ID NO: 77344 - DNA, 25 bp, Artificial
  probe
  misc_feature (1)..(25): SEQ ID NO: 7094; WAN024BCK_x_at; Start 33; Stop 57
gcagtgctttgagcaacctgcggct

SEQ ID NO: 77345 - DNA, 25 bp, Artificial
  probe
  misc_feature (1)..(25): SEQ ID NO: 7094; WAN024BCK_x_at; Start 29; Stop 53
caaagcagtgctttgagcaacctgc

SEQ ID NO: 77346 - DNA, 25 bp, Artificial
  probe
  misc_feature (1)..(25): SEQ ID NO: 7094; WAN024BCK_x_at; Start 36; Stop 60
gtgctttgagcaacctgcggctagt

SEQ ID NO: 77347 - DNA, 25 bp, Artificial
  probe
  misc_feature (1)..(25): SEQ ID NO: 7094; WAN024BCK_x_at; Start 49; Stop 73
cctgcggctagtttcctagtttgct

SEQ ID NO: 77348 - DNA, 25 bp, Artificial
  probe
  misc_feature (1)..(25): SEQ ID NO: 7094; WAN024BCK_x_at; Start 57; Stop 81
tagtttcctagtttgctctttgatt

SEQ ID NO: 77349 - DNA, 25 bp, Artificial
  probe
  misc_feature (1)..(25): SEQ ID NO: 7094; WAN024BCK_x_at; Start 60; Stop 84
tttcctagtttgctctttgattttc

SEQ ID NO: 77350 - DNA, 25 bp, Artificial
  probe
  misc_feature (1)..(25): SEQ ID NO: 7094; WAN024BCK_x_at; Start 43; Stop 67
gagcaacctgcggctagtttcctag

SEQ ID NO: 77351 - DNA, 25 bp, Artificial
  probe
  misc_feature (1)..(25): SEQ ID NO: 7094; WAN024BCK_x_at; Start 15; Stop 39
cttatctacaacctcaaagcagtgc

SEQ ID NO: 77352 - DNA, 25 bp, Artificial
  probe
  misc_feature (1)..(25): SEQ ID NO: 7094; WAN024BCK_x_at; Start 56; Stop 80
ctagtttcctagtttgctctttgat

SEQ ID NO: 77353 - DNA, 25 bp, Artificial
  probe
  misc_feature (1)..(25): SEQ ID NO: 7094; WAN024BCK_x_at; Start 51; Stop 75
tgcggctagtttcctagtttgctct

SEQ ID NO: 77354 - DNA, 25 bp, Artificial
  probe
  misc_feature (1)..(25): SEQ ID NO: 7094; WAN024BCK_x_at; Start 41; Stop 65
ttgagcaacctgcggctagtttcct

SEQ ID NO: 77355 - DNA, 25 bp, Artificial
  probe
  misc_feature (1)..(25): SEQ ID NO: 7094; WAN024BCK_x_at; Start 65; Stop 89
tagtttgctctttgattttcattga

SEQ ID NO: 77356 - DNA, 25 bp, Artificial
  probe
  misc_feature (1)..(25): SEQ ID NO: 7094; WAN024BCK_x_at; Start 40; Stop 64
tttgagcaacctgcggctagtttcc

SEQ ID NO: 77357 - DNA, 25 bp, Artificial
  probe
  misc_feature (1)..(25): SEQ ID NO: 7094; WAN024BCK_x_at; Start 52; Stop 76
gcggctagtttcctagtttgctctt

SEQ ID NO: 77358 - DNA, 25 bp, Artificial
  probe
  misc_feature (1)..(25): SEQ ID NO: 7094; WAN024BCK_x_at; Start 58; Stop 82
agtttcctagtttgctctttgattt

SEQ ID NO: 77359 - DNA, 25 bp, Artificial
  probe
  misc_feature (1)..(25): SEQ ID NO: 7094; WAN024BCK_x_at; Start 53; Stop 77
cggctagtttcctagtttgctcttt

SEQ ID NO: 77360 - DNA, 25 bp, Artificial
  probe
  misc_feature (1)..(25): SEQ ID NO: 7094; WAN024BCK_x_at; Start 64; Stop 88
ctagtttgctctttgattttcattg

SEQ ID NO: 77361 - DNA, 25 bp, Artificial
  probe
  misc_feature (1)..(25): SEQ ID NO: 7094; WAN024BCK_x_at; Start 67; Stop 91
gtttgctctttgattttcattgagt

SEQ ID NO: 77362 - DNA, 25 bp, Artificial
  probe
  misc_feature (1)..(25): SEQ ID NO: 7094; WAN024BCK_x_at; Start 62; Stop 86
tcctagtttgctctttgattttcat

SEQ ID NO: 77363 - DNA, 25 bp, Artificial
  probe
  misc_feature (1)..(25): SEQ ID NO: 7094; WAN024BCK_x_at; Start 55; Stop 79
gctagtttcctagtttgctctttga

SEQ ID NO: 77364 - DNA, 25 bp, Artificial
  probe
  misc_feature (1)..(25): SEQ ID NO: 7094; WAN024BCK_x_at; Start 14; Stop 38
tcttatctacaacctcaaagcagtg

SEQ ID NO: 77365 - DNA, 25 bp, Artificial
  probe
  misc_feature (1)..(25): SEQ ID NO: 7094; WAN024BCK_x_at; Start 30; Stop 54
aaagcagtgctttgagcaacctgcg

SEQ ID NO: 77366 - DNA, 25 bp, Artificial
  probe
  misc_feature (1)..(25): SEQ ID NO: 7094; WAN024BCK_x_at; Start 61; Stop 85
ttcctagtttgctctttgattttca

SEQ ID NO: 77367 - DNA, 25 bp, Artificial
  probe
  misc_feature (1)..(25): SEQ ID NO: 7094; WAN024BCK_x_at; Start 39; Stop 63
ctttgagcaacctgcggctagtttc

SEQ ID NO: 77368 - DNA, 25 bp, Artificial
  probe
  misc_feature (1)..(25): SEQ ID NO: 7390; WAN024BCL_x_at; Start 57; Stop 81
cgactcgcttcctagtttgctcttt

SEQ ID NO: 77369 - DNA, 25 bp, Artificial
  probe
  misc_feature (1)..(25): SEQ ID NO: 7390; WAN024BCL_x_at; Start 63; Stop 87
gcttcctagtttgctctttgatttt

SEQ ID NO: 77370 - DNA, 25 bp, Artificial
  probe
  misc_feature (1)..(25): SEQ ID NO: 7390; WAN024BCL_x_at; Start 47; Stop 71
gtacagcctgcgactcgcttcctag

SEQ ID NO: 77371 - DNA, 25 bp, Artificial
  probe
  misc_feature (1)..(25): SEQ ID NO: 7390; WAN024BCL_x_at; Start 51; Stop 75
agcctgcgactcgcttcctagtttg

SEQ ID NO: 77372 - DNA, 25 bp, Artificial
  probe
  misc_feature (1)..(25): SEQ ID NO: 7390; WAN024BCL_x_at; Start 59; Stop 83
actcgcttcctagtttgctctttga

SEQ ID NO: 77373 - DNA, 25 bp, Artificial
  probe
  misc_feature (1)..(25): SEQ ID NO: 7390; WAN024BCL_x_at; Start 3; Stop 27
gaaaatctcttcaaaccacgtcagc

SEQ ID NO: 77374 - DNA, 25 bp, Artificial
  probe
  misc_feature (1)..(25): SEQ ID NO: 7390; WAN024BCL_x_at; Start 49; Stop 73
acagcctgcgactcgcttcctagtt

SEQ ID NO: 77375 - DNA, 25 bp, Artificial
  probe
  misc_feature (1)..(25): SEQ ID NO: 7390; WAN024BCL_x_at; Start 54; Stop 78
ctgcgactcgcttcctagtttgctc

SEQ ID NO: 77376 - DNA, 25 bp, Artificial
  probe
  misc_feature (1)..(25): SEQ ID NO: 7390; WAN024BCL_x_at; Start 44; Stop 68
caagtacagcctgcgactcgcttcc

SEQ ID NO: 77377 - DNA, 25 bp, Artificial
  probe
  misc_feature (1)..(25): SEQ ID NO: 7390; WAN024BCL_x_at; Start 20; Stop 44
acgtcagctttgccttgccgtactc

SEQ ID NO: 77378 - DNA, 25 bp, Artificial
  probe
  misc_feature (1)..(25): SEQ ID NO: 7390; WAN024BCL_x_at; Start 42; Stop 66
ctcaagtacagcctgcgactcgctt

SEQ ID NO: 77379 - DNA, 25 bp, Artificial
  probe
  misc_feature (1)..(25): SEQ ID NO: 7390; WAN024BCL_x_at; Start 53; Stop 77
cctgcgactcgcttcctagtttgct

SEQ ID NO: 77380 - DNA, 25 bp, Artificial
  probe
  misc_feature (1)..(25): SEQ ID NO: 7390; WAN024BCL_x_at; Start 21; Stop 45
cgtcagctttgccttgccgtactca

SEQ ID NO: 77381 - DNA, 25 bp, Artificial
  probe
  misc_feature (1)..(25): SEQ ID NO: 7390; WAN024BCL_x_at; Start 2; Stop 26
tgaaaatctcttcaaaccacgtcag

SEQ ID NO: 77382 - DNA, 25 bp, Artificial
  probe
  misc_feature (1)..(25): SEQ ID NO: 7390; WAN024BCL_x_at; Start 55; Stop 79
tgcgactcgcttcctagtttgctct

SEQ ID NO: 77383 - DNA, 25 bp, Artificial
  probe
  misc_feature (1)..(25): SEQ ID NO: 7390; WAN024BCL_x_at; Start 43; Stop 67
tcaagtacagcctgcgactcgcttc

SEQ ID NO: 77384 - DNA, 25 bp, Artificial
  probe
  misc_feature (1)..(25): SEQ ID NO: 7390; WAN024BCL_x_at; Start 58; Stop 82
gactcgcttcctagtttgctctttg

SEQ ID NO: 77385 - DNA, 25 bp, Artificial
  probe
  misc_feature (1)..(25): SEQ ID NO: 7390; WAN024BCL_x_at; Start 56; Stop 80
gcgactcgcttcctagtttgctctt

SEQ ID NO: 77386 - DNA, 25 bp, Artificial
  probe
  misc_feature (1)..(25): SEQ ID NO: 7390; WAN024BCL_x_at; Start 50; Stop 74
cagcctgcgactcgcttcctagttt

SEQ ID NO: 77387 - DNA, 25 bp, Artificial
  probe
  misc_feature (1)..(25): SEQ ID NO: 7390; WAN024BCL_x_at; Start 60; Stop 84
ctcgcttcctagtttgctctttgat

SEQ ID NO: 77388 - DNA, 25 bp, Artificial
  probe
  misc_feature (1)..(25): SEQ ID NO: 7390; WAN024BCL_x_at; Start 45; Stop 69
aagtacagcctgcgactcgcttcct

SEQ ID NO: 77389 - DNA, 25 bp, Artificial
  probe
  misc_feature (1)..(25): SEQ ID NO: 7390; WAN024BCL_x_at; Start 25; Stop 49
agctttgccttgccgtactcaagta

SEQ ID NO: 77390 - DNA, 25 bp, Artificial
  probe
  misc_feature (1)..(25): SEQ ID NO: 7390; WAN024BCL_x_at; Start 4; Stop 28
aaaatctcttcaaaccacgtcagct

SEQ ID NO: 77391 - DNA, 25 bp, Artificial
  probe
  misc_feature (1)..(25): SEQ ID NO: 7390; WAN024BCL_x_at; Start 1; Stop 25
ttgaaaatctcttcaaaccacgtca

SEQ ID NO: 77392 - DNA, 25 bp, Artificial
  probe
  misc_feature (1)..(25): SEQ ID NO: 7390; WAN024BCL_x_at; Start 62; Stop 86
cgcttcctagtttgctctttgattt

SEQ ID NO: 77393 - DNA, 25 bp, Artificial
  probe
  misc_feature (1)..(25): SEQ ID NO: 7390; WAN024BCL_x_at; Start 22; Stop 46
gtcagctttgccttgccgtactcaa

SEQ ID NO: 77394 - DNA, 25 bp, Artificial
  probe
  misc_feature (1)..(25): SEQ ID NO: 7390; WAN024BCL_x_at; Start 27; Stop 51
ctttgccttgccgtactcaagtaca

SEQ ID NO: 77395 - DNA, 25 bp, Artificial
  probe
  misc_feature (1)..(25): SEQ ID NO: 7390; WAN024BCL_x_at; Start 46; Stop 70
agtacagcctgcgactcgcttccta

SEQ ID NO: 77396 - DNA, 25 bp, Artificial
  probe
  misc_feature (1)..(25): SEQ ID NO: 7390; WAN024BCL_x_at; Start 19; Stop 43
cacgtcagctttgccttgccgtact

SEQ ID NO: 77397 - DNA, 25 bp, Artificial
  probe
  misc_feature (1)..(25): SEQ ID NO: 7390; WAN024BCL_x_at; Start 23; Stop 47
tcagctttgccttgccgtactcaag

SEQ ID NO: 77398 - DNA, 25 bp, Artificial
  probe
  misc_feature (1)..(25): SEQ ID NO: 7390; WAN024BCL_x_at; Start 48; Stop 72
tacagcctgcgactcgcttcctagt

SEQ ID NO: 77399 - DNA, 25 bp, Artificial
  probe
  misc_feature (1)..(25): SEQ ID NO: 7390; WAN024BCL_x_at; Start 52; Stop 76
gcctgcgactcgcttcctagtttgc

SEQ ID NO: 77400 - DNA, 25 bp, Artificial
  probe
  misc_feature (1)..(25): SEQ ID NO: 7390; WAN024BCL_x_at; Start 24; Stop 48
cagctttgccttgccgtactcaagt

SEQ ID NO: 77401 - DNA, 25 bp, Artificial
  probe
  misc_feature (1)..(25): SEQ ID NO: 7390; WAN024BCL_x_at; Start 61; Stop 85
tcgcttcctagtttgctctttgatt

SEQ ID NO: 77402 - DNA, 25 bp, Artificial
  probe
  misc_feature (1)..(25): SEQ ID NO: 7189; WAN024BCN_x_at; Start 97; Stop 121
atcagtaacatatacatacggcaag

SEQ ID NO: 77403 - DNA, 25 bp, Artificial
  probe
  misc_feature (1)..(25): SEQ ID NO: 7189; WAN024BCN_x_at; Start 114; Stop 138
acggcaaggcgacgttgacgtggtt

SEQ ID NO: 77404 - DNA, 25 bp, Artificial
  probe
  misc_feature (1)..(25): SEQ ID NO: 7189; WAN024BCN_x_at; Start 95; Stop 119
aaatcagtaacatatacatacggca

SEQ ID NO: 77405 - DNA, 25 bp, Artificial
  probe
  misc_feature (1)..(25): SEQ ID NO: 7189; WAN024BCN_x_at; Start 106; Stop 130
atatacatacggcaaggcgacgttg

SEQ ID NO: 77406 - DNA, 25 bp, Artificial
  probe
  misc_feature (1)..(25): SEQ ID NO: 7189; WAN024BCN_x_at; Start 31; Stop 55
gttgtggatggaactgacgaagtca

SEQ ID NO: 77407 - DNA, 25 bp, Artificial
  probe
  misc_feature (1)..(25): SEQ ID NO: 7189; WAN024BCN_x_at; Start 96; Stop 120
aatcagtaacatatacatacggcaa

SEQ ID NO: 77408 - DNA, 25 bp, Artificial
  probe
  misc_feature (1)..(25): SEQ ID NO: 7189; WAN024BCN_x_at; Start 109; Stop 133
tacatacggcaaggcgacgttgacg

SEQ ID NO: 77409 - DNA, 25 bp, Artificial
  probe
  misc_feature (1)..(25): SEQ ID NO: 7189; WAN024BCN_x_at; Start 69; Stop 93
ttttaaggttgcagatagaactgac

SEQ ID NO: 77410 - DNA, 25 bp, Artificial
  probe
  misc_feature (1)..(25): SEQ ID NO: 7189; WAN024BCN_x_at; Start 29; Stop 53
aggttgtggatggaactgacgaagt

SEQ ID NO: 77411 - DNA, 25 bp, Artificial
  probe
  misc_feature (1)..(25): SEQ ID NO: 7189; WAN024BCN_x_at; Start 27; Stop 51
taaggttgtggatggaactgacgaa

SEQ ID NO: 77412 - DNA, 25 bp, Artificial
  probe
  misc_feature (1)..(25): SEQ ID NO: 7189; WAN024BCN_x_at; Start 42; Stop 66
aactgacgaagtcagctcaaaacac

SEQ ID NO: 77413 - DNA, 25 bp, Artificial
  probe
  misc_feature (1)..(25): SEQ ID NO: 7189; WAN024BCN_x_at; Start 21; Stop 45
ctgttttaaggttgtggatggaact

SEQ ID NO: 77414 - DNA, 25 bp, Artificial
  probe
  misc_feature (1)..(25): SEQ ID NO: 7189; WAN024BCN_x_at; Start 79; Stop 103
gcagatagaactgacgaaatcagta

SEQ ID NO: 77415 - DNA, 25 bp, Artificial
  probe
  misc_feature (1)..(25): SEQ ID NO: 7189; WAN024BCN_x_at; Start 102; Stop 126
taacatatacatacggcaaggcgac

SEQ ID NO: 77416 - DNA, 25 bp, Artificial
  probe
  misc_feature (1)..(25): SEQ ID NO: 7189; WAN024BCN_x_at; Start 77; Stop 101
ttgcagatagaactgacgaaatcag

SEQ ID NO: 77417 - DNA, 25 bp, Artificial
  probe
  misc_feature (1)..(25): SEQ ID NO: 7189; WAN024BCN_x_at; Start 68; Stop 92
gttttaaggttgcagatagaactga

SEQ ID NO: 77418 - DNA, 25 bp, Artificial
  probe
  misc_feature (1)..(25): SEQ ID NO: 7189; WAN024BCN_x_at; Start 104; Stop 128
acatatacatacggcaaggcgacgt

SEQ ID NO: 77419 - DNA, 25 bp, Artificial
  probe
  misc_feature (1)..(25): SEQ ID NO: 7189; WAN024BCN_x_at; Start 110; Stop 134
acatacggcaaggcgacgttgacgt

SEQ ID NO: 77420 - DNA, 25 bp, Artificial
  probe
  misc_feature (1)..(25): SEQ ID NO: 7189; WAN024BCN_x_at; Start 117; Stop 141
gcaaggcgacgttgacgtggtttga

SEQ ID NO: 77421 - DNA, 25 bp, Artificial
  probe
  misc_feature (1)..(25): SEQ ID NO: 7189; WAN024BCN_x_at; Start 28; Stop 52
aaggttgtggatggaactgacgaag

SEQ ID NO: 77422 - DNA, 25 bp, Artificial
  probe
  misc_feature (1)..(25): SEQ ID NO: 7189; WAN024BCN_x_at; Start 116; Stop 140
ggcaaggcgacgttgacgtggtttg

SEQ ID NO: 77423 - DNA, 25 bp, Artificial
  probe
  misc_feature (1)..(25): SEQ ID NO: 7189; WAN024BCN_x_at; Start 94; Stop 118
gaaatcagtaacatatacatacggc

SEQ ID NO: 77424 - DNA, 25 bp, Artificial
  probe
  misc_feature (1)..(25): SEQ ID NO: 7189; WAN024BCN_x_at; Start 30; Stop 54
ggttgtggatggaactgacgaagtc

SEQ ID NO: 77425 - DNA, 25 bp, Artificial
  probe
  misc_feature (1)..(25): SEQ ID NO: 7189; WAN024BCN_x_at; Start 2; Stop 26
acgaagtcagctcaaaacactgttt

SEQ ID NO: 77426 - DNA, 25 bp, Artificial
  probe
  misc_feature (1)..(25): SEQ ID NO: 7189; WAN024BCN_x_at; Start 103; Stop 127
aacatatacatacggcaaggcgacg

SEQ ID NO: 77427 - DNA, 25 bp, Artificial
  probe
  misc_feature (1)..(25): SEQ ID NO: 7189; WAN024BCN_x_at; Start 105; Stop 129
catatacatacggcaaggcgacgtt

SEQ ID NO: 77428 - DNA, 25 bp, Artificial
  probe
  misc_feature (1)..(25): SEQ ID NO: 7189; WAN024BCN_x_at; Start 78; Stop 102
tgcagatagaactgacgaaatcagt

SEQ ID NO: 77429 - DNA, 25 bp, Artificial
  probe
  misc_feature (1)..(25): SEQ ID NO: 7189; WAN024BCN_x_at; Start 98; Stop 122
tcagtaacatatacatacggcaagg

SEQ ID NO: 77430 - DNA, 25 bp, Artificial
  probe
  misc_feature (1)..(25): SEQ ID NO: 7189; WAN024BCN_x_at; Start 115; Stop 139
cggcaaggcgacgttgacgtggttt

SEQ ID NO: 77431 - DNA, 25 bp, Artificial
  probe
  misc_feature (1)..(25): SEQ ID NO: 7189; WAN024BCN_x_at; Start 107; Stop 131
tatacatacggcaaggcgacgttga

SEQ ID NO: 77432 - DNA, 25 bp, Artificial
  probe
  misc_feature (1)..(25): SEQ ID NO: 7189; WAN024BCN_x_at; Start 111; Stop 135
catacggcaaggcgacgttgacgtg

SEQ ID NO: 77433 - DNA, 25 bp, Artificial
  probe
  misc_feature (1)..(25): SEQ ID NO: 7189; WAN024BCN_x_at; Start 76; Stop 100
gttgcagatagaactgacgaaatca

SEQ ID NO: 77434 - DNA, 25 bp, Artificial
  probe
  misc_feature (1)..(25): SEQ ID NO: 7189; WAN024BCN_x_at; Start 6; Stop 30
agtcagctcaaaacactgttttaag

SEQ ID NO: 77435 - DNA, 25 bp, Artificial
  probe
  misc_feature (1)..(25): SEQ ID NO: 7189; WAN024BCN_x_at; Start 67; Stop 91
tgttttaaggttgcagatagaactg

SEQ ID NO: 77436 - DNA, 25 bp, Artificial
  probe
  misc_feature (1)..(25): SEQ ID NO: 17; WAN024BCO_x_at; Start 11; Stop 35
catccgcaacctcaaaacagtgttt

SEQ ID NO: 77437 - DNA, 25 bp, Artificial
  probe
  misc_feature (1)..(25): SEQ ID NO: 17; WAN024BCO_x_at; Start 42; Stop 66
acctgaggctagctttctagtttgc

SEQ ID NO: 77438 - DNA, 25 bp, Artificial
  probe
  misc_feature (1)..(25): SEQ ID NO: 17; WAN024BCO_x_at; Start 20; Stop 44
cctcaaaacagtgttttgagcaacc

SEQ ID NO: 77439 - DNA, 25 bp, Artificial
  probe
  misc_feature (1)..(25): SEQ ID NO: 17; WAN024BCO_x_at; Start 48; Stop 72
ggctagctttctagtttgctctttg

SEQ ID NO: 77440 - DNA, 25 bp, Artificial
  probe
  misc_feature (1)..(25): SEQ ID NO: 17; WAN024BCO_x_at; Start 10; Stop 34
ccatccgcaacctcaaaacagtgtt

SEQ ID NO: 77441 - DNA, 25 bp, Artificial
  probe
  misc_feature (1)..(25): SEQ ID NO: 17; WAN024BCO_x_at; Start 18; Stop 42
aacctcaaaacagtgttttgagcaa

SEQ ID NO: 77442 - DNA, 25 bp, Artificial
  probe
  misc_feature (1)..(25): SEQ ID NO: 17; WAN024BCO_x_at; Start 9; Stop 33
cccatccgcaacctcaaaacagtgt

SEQ ID NO: 77443 - DNA, 25 bp, Artificial
  probe
  misc_feature (1)..(25): SEQ ID NO: 17; WAN024BCO_x_at; Start 16; Stop 40
gcaacctcaaaacagtgttttgagc

SEQ ID NO: 77444 - DNA, 25 bp, Artificial
  probe
  misc_feature (1)..(25): SEQ ID NO: 17; WAN024BCO_x_at; Start 7; Stop 31
gccccatccgcaacctcaaaacagt

SEQ ID NO: 77445 - DNA, 25 bp, Artificial
  probe
  misc_feature (1)..(25): SEQ ID NO: 17; WAN024BCO_x_at; Start 46; Stop 70
gaggctagctttctagtttgctctt

SEQ ID NO: 77446 - DNA, 25 bp, Artificial
  probe
  misc_feature (1)..(25): SEQ ID NO: 17; WAN024BCO_x_at; Start 43; Stop 67
cctgaggctagctttctagtttgct

SEQ ID NO: 77447 - DNA, 25 bp, Artificial
  probe
  misc_feature (1)..(25): SEQ ID NO: 17; WAN024BCO_x_at; Start 44; Stop 68
ctgaggctagctttctagtttgctc

SEQ ID NO: 77448 - DNA, 25 bp, Artificial
  probe
  misc_feature (1)..(25): SEQ ID NO: 17; WAN024BCO_x_at; Start 2; Stop 26
tgtcagccccatccgcaacctcaaa

SEQ ID NO: 77449 - DNA, 25 bp, Artificial
  probe
  misc_feature (1)..(25): SEQ ID NO: 17; WAN024BCO_x_at; Start 47; Stop 71
aggctagctttctagtttgctcttt

SEQ ID NO: 77450 - DNA, 25 bp, Artificial
  probe
  misc_feature (1)..(25): SEQ ID NO: 17; WAN024BCO_x_at; Start 1; Stop 25
atgtcagccccatccgcaacctcaa

SEQ ID NO: 77451 - DNA, 25 bp, Artificial
  probe
  misc_feature (1)..(25): SEQ ID NO: 17; WAN024BCO_x_at; Start 14; Stop 38
ccgcaacctcaaaacagtgttttga

SEQ ID NO: 77452 - DNA, 25 bp, Artificial
  probe
  misc_feature (1)..(25): SEQ ID NO: 17; WAN024BCO_x_at; Start 4; Stop 28
tcagccccatccgcaacctcaaaac

SEQ ID NO: 77453 - DNA, 25 bp, Artificial
  probe
  misc_feature (1)..(25): SEQ ID NO: 17; WAN024BCO_x_at; Start 21; Stop 45
ctcaaaacagtgttttgagcaacct

SEQ ID NO: 77454 - DNA, 25 bp, Artificial
  probe
  misc_feature (1)..(25): SEQ ID NO: 17; WAN024BCO_x_at; Start 13; Stop 37
tccgcaacctcaaaacagtgttttg

SEQ ID NO: 77455 - DNA, 25 bp, Artificial
  probe
  misc_feature (1)..(25): SEQ ID NO: 17; WAN024BCO_x_at; Start 3; Stop 27
gtcagccccatccgcaacctcaaaa

SEQ ID NO: 77456 - DNA, 25 bp, Artificial
  probe
  misc_feature (1)..(25): SEQ ID NO: 17; WAN024BCO_x_at; Start 12; Stop 36
atccgcaacctcaaaacagtgtttt

SEQ ID NO: 77457 - DNA, 25 bp, Artificial
  probe
  misc_feature (1)..(25): SEQ ID NO: 17; WAN024BCO_x_at; Start 17; Stop 41
caacctcaaaacagtgttttgagca

SEQ ID NO: 77458 - DNA, 25 bp, Artificial
  probe
  misc_feature (1)..(25): SEQ ID NO: 17; WAN024BCO_x_at; Start 6; Stop 30
agccccatccgcaacctcaaaacag

SEQ ID NO: 77459 - DNA, 25 bp, Artificial
  probe
  misc_feature (1)..(25): SEQ ID NO: 17; WAN024BCO_x_at; Start 24; Stop 48
aaaacagtgttttgagcaacctgag

SEQ ID NO: 77460 - DNA, 25 bp, Artificial
  probe
  misc_feature (1)..(25): SEQ ID NO: 17; WAN024BCO_x_at; Start 8; Stop 32
ccccatccgcaacctcaaaacagtg

SEQ ID NO: 77461 - DNA, 25 bp, Artificial
  probe
  misc_feature (1)..(25): SEQ ID NO: 17; WAN024BCO_x_at; Start 5; Stop 29
cagccccatccgcaacctcaaaaca

SEQ ID NO: 77462 - DNA, 25 bp, Artificial
  probe
  misc_feature (1)..(25): SEQ ID NO: 17; WAN024BCO_x_at; Start 27; Stop 51
acagtgttttgagcaacctgaggct

SEQ ID NO: 77463 - DNA, 25 bp, Artificial
  probe
  misc_feature (1)..(25): SEQ ID NO: 17; WAN024BCO_x_at; Start 15; Stop 39
cgcaacctcaaaacagtgttttgag

SEQ ID NO: 77464 - DNA, 25 bp, Artificial
  probe
  misc_feature (1)..(25): SEQ ID NO: 17; WAN024BCO_x_at; Start 22; Stop 46
tcaaaacagtgttttgagcaacctg

SEQ ID NO: 77465 - DNA, 25 bp, Artificial
  probe
  misc_feature (1)..(25): SEQ ID NO: 17; WAN024BCO_x_at; Start 26; Stop 50
aacagtgttttgagcaacctgaggc

SEQ ID NO: 77466 - DNA, 25 bp, Artificial
  probe
  misc_feature (1)..(25): SEQ ID NO: 17; WAN024BCO_x_at; Start 25; Stop 49
aaacagtgttttgagcaacctgagg

SEQ ID NO: 77467 - DNA, 25 bp, Artificial
  probe
  misc_feature (1)..(25): SEQ ID NO: 17; WAN024BCO_x_at; Start 45; Stop 69
tgaggctagctttctagtttgctct

SEQ ID NO: 77468 - DNA, 25 bp, Artificial
  probe
  misc_feature (1)..(25): SEQ ID NO: 17; WAN024BCO_x_at; Start 19; Stop 43
acctcaaaacagtgttttgagcaac

SEQ ID NO: 77469 - DNA, 25 bp, Artificial
  probe
  misc_feature (1)..(25): SEQ ID NO: 17; WAN024BCO_x_at; Start 23; Stop 47
caaaacagtgttttgagcaacctga

SEQ ID NO: 77470 - DNA, 25 bp, Artificial
  probe
  misc_feature (1)..(25): SEQ ID NO: 7093; WAN024BCP_x_at; Start 4; Stop 28
acttcgtcagtcttatctacaacct

SEQ ID NO: 77471 - DNA, 25 bp, Artificial
  probe
  misc_feature (1)..(25): SEQ ID NO: 7093; WAN024BCP_x_at; Start 5; Stop 29
cttcgtcagtcttatctacaacctc

SEQ ID NO: 77472 - DNA, 25 bp, Artificial
  probe
  misc_feature (1)..(25): SEQ ID NO: 7093; WAN024BCP_x_at; Start 37; Stop 61
tgttttgagcaacctgcggctagct

SEQ ID NO: 77473 - DNA, 25 bp, Artificial
  probe
  misc_feature (1)..(25): SEQ ID NO: 7093; WAN024BCP_x_at; Start 34; Stop 58
ctgtgttttgagcaacctgcggcta

SEQ ID NO: 77474 - DNA, 25 bp, Artificial
  probe
  misc_feature (1)..(25): SEQ ID NO: 7093; WAN024BCP_x_at; Start 33; Stop 57
actgtgttttgagcaacctgcggct

SEQ ID NO: 77475 - DNA, 25 bp, Artificial
  probe
  misc_feature (1)..(25): SEQ ID NO: 7093; WAN024BCP_x_at; Start 30; Stop 54
aaaactgtgttttgagcaacctgcg

SEQ ID NO: 77476 - DNA, 25 bp, Artificial
  probe
  misc_feature (1)..(25): SEQ ID NO: 7093; WAN024BCP_x_at; Start 7; Stop 31
tcgtcagtcttatctacaacctcaa

SEQ ID NO: 77477 - DNA, 25 bp, Artificial
  probe
  misc_feature (1)..(25): SEQ ID NO: 7093; WAN024BCP_x_at; Start 13; Stop 37
gtcttatctacaacctcaaaactgt

SEQ ID NO: 77478 - DNA, 25 bp, Artificial
  probe
  misc_feature (1)..(25): SEQ ID NO: 7093; WAN024BCP_x_at; Start 39; Stop 63
ttttgagcaacctgcggctagcttc

SEQ ID NO: 77479 - DNA, 25 bp, Artificial
  probe
  misc_feature (1)..(25): SEQ ID NO: 7093; WAN024BCP_x_at; Start 2; Stop 26
tgacttcgtcagtcttatctacaac

SEQ ID NO: 77480 - DNA, 25 bp, Artificial
  probe
  misc_feature (1)..(25): SEQ ID NO: 7093; WAN024BCP_x_at; Start 17; Stop 41
tatctacaacctcaaaactgtgttt

SEQ ID NO: 77481 - DNA, 25 bp, Artificial
  probe
  misc_feature (1)..(25): SEQ ID NO: 7093; WAN024BCP_x_at; Start 8; Stop 32
cgtcagtcttatctacaacctcaaa

SEQ ID NO: 77482 - DNA, 25 bp, Artificial
  probe
  misc_feature (1)..(25): SEQ ID NO: 7093; WAN024BCP_x_at; Start 45; Stop 69
gcaacctgcggctagcttcctagtt

SEQ ID NO: 77483 - DNA, 25 bp, Artificial
  probe
  misc_feature (1)..(25): SEQ ID NO: 7093; WAN024BCP_x_at; Start 44; Stop 68
agcaacctgcggctagcttcctagt

SEQ ID NO: 77484 - DNA, 25 bp, Artificial
  probe
  misc_feature (1)..(25): SEQ ID NO: 7093; WAN024BCP_x_at; Start 42; Stop 66
tgagcaacctgcggctagcttccta

SEQ ID NO: 77485 - DNA, 25 bp, Artificial
  probe
  misc_feature (1)..(25): SEQ ID NO: 7093; WAN024BCP_x_at; Start 38; Stop 62
gttttgagcaacctgcggctagctt

SEQ ID NO: 77486 - DNA, 25 bp, Artificial
  probe
  misc_feature (1)..(25): SEQ ID NO: 7093; WAN024BCP_x_at; Start 43; Stop 67
gagcaacctgcggctagcttcctag

SEQ ID NO: 77487 - DNA, 25 bp, Artificial
  probe
  misc_feature (1)..(25): SEQ ID NO: 7093; WAN024BCP_x_at; Start 12; Stop 36
agtcttatctacaacctcaaaactg

SEQ ID NO: 77488 - DNA, 25 bp, Artificial
  probe
  misc_feature (1)..(25): SEQ ID NO: 7093; WAN024BCP_x_at; Start 15; Stop 39
cttatctacaacctcaaaactgtgt

SEQ ID NO: 77489 - DNA, 25 bp, Artificial
  probe
  misc_feature (1)..(25): SEQ ID NO: 7093; WAN024BCP_x_at; Start 46; Stop 70
caacctgcggctagcttcctagttt

SEQ ID NO: 77490 - DNA, 25 bp, Artificial
  probe
  misc_feature (1)..(25): SEQ ID NO: 7093; WAN024BCP_x_at; Start 6; Stop 30
ttcgtcagtcttatctacaacctca

SEQ ID NO: 77491 - DNA, 25 bp, Artificial
  probe
  misc_feature (1)..(25): SEQ ID NO: 7093; WAN024BCP_x_at; Start 41; Stop 65
ttgagcaacctgcggctagcttcct

SEQ ID NO: 77492 - DNA, 25 bp, Artificial
  probe
  misc_feature (1)..(25): SEQ ID NO: 7093; WAN024BCP_x_at; Start 1; Stop 25
ctgacttcgtcagtcttatctacaa

SEQ ID NO: 77493 - DNA, 25 bp, Artificial
  probe
  misc_feature (1)..(25): SEQ ID NO: 7093; WAN024BCP_x_at; Start 10; Stop 34
tcagtcttatctacaacctcaaaac

SEQ ID NO: 77494 - DNA, 25 bp, Artificial
  probe
  misc_feature (1)..(25): SEQ ID NO: 7093; WAN024BCP_x_at; Start 40; Stop 64
tttgagcaacctgcggctagcttcc

SEQ ID NO: 77495 - DNA, 25 bp, Artificial
  probe
  misc_feature (1)..(25): SEQ ID NO: 7093; WAN024BCP_x_at; Start 16; Stop 40
ttatctacaacctcaaaactgtgtt

SEQ ID NO: 77496 - DNA, 25 bp, Artificial
  probe
  misc_feature (1)..(25): SEQ ID NO: 7093; WAN024BCP_x_at; Start 35; Stop 59
tgtgttttgagcaacctgcggctag

SEQ ID NO: 77497 - DNA, 25 bp, Artificial
  probe
  misc_feature (1)..(25): SEQ ID NO: 7093; WAN024BCP_x_at; Start 32; Stop 56
aactgtgttttgagcaacctgcggc

SEQ ID NO: 77498 - DNA, 25 bp, Artificial
  probe
  misc_feature (1)..(25): SEQ ID NO: 7093; WAN024BCP_x_at; Start 11; Stop 35
cagtcttatctacaacctcaaaact

SEQ ID NO: 77499 - DNA, 25 bp, Artificial
  probe
  misc_feature (1)..(25): SEQ ID NO: 7093; WAN024BCP_x_at; Start 36; Stop 60
gtgttttgagcaacctgcggctagc

SEQ ID NO: 77500 - DNA, 25 bp, Artificial
  probe
  misc_feature (1)..(25): SEQ ID NO: 7093; WAN024BCP_x_at; Start 14; Stop 38
tcttatctacaacctcaaaactgtg

SEQ ID NO: 77501 - DNA, 25 bp, Artificial
  probe
  misc_feature (1)..(25): SEQ ID NO: 7093; WAN024BCP_x_at; Start 31; Stop 55
aaactgtgttttgagcaacctgcgg

SEQ ID NO: 77502 - DNA, 25 bp, Artificial
  probe
  misc_feature (1)..(25): SEQ ID NO: 7093; WAN024BCP_x_at; Start 9; Stop 33
gtcagtcttatctacaacctcaaaa

SEQ ID NO: 77503 - DNA, 25 bp, Artificial
  probe
  misc_feature (1)..(25): SEQ ID NO: 7093; WAN024BCP_x_at; Start 3; Stop 27
gacttcgtcagtcttatctacaacc

SEQ ID NO: 77504 - DNA, 25 bp, Artificial
  probe
  misc_feature (1)..(25): SEQ ID NO: 7101; WAN024BCT_x_at; Start 34; Stop 58
cagtgctttgagcaacctgcggcta

SEQ ID NO: 77505 - DNA, 25 bp, Artificial
  probe
  misc_feature (1)..(25): SEQ ID NO: 7101; WAN024BCT_x_at; Start 21; Stop 45
tgcaacctcaaagcagtgctttgag

SEQ ID NO: 77506 - DNA, 25 bp, Artificial
  probe
  misc_feature (1)..(25): SEQ ID NO: 7101; WAN024BCT_x_at; Start 48; Stop 72
acctgcggctagtttcctagtttgc

SEQ ID NO: 77507 - DNA, 25 bp, Artificial
  probe
  misc_feature (1)..(25): SEQ ID NO: 7101; WAN024BCT_x_at; Start 32; Stop 56
agcagtgctttgagcaacctgcggc

SEQ ID NO: 77508 - DNA, 25 bp, Artificial
  probe
  misc_feature (1)..(25): SEQ ID NO: 7101; WAN024BCT_x_at; Start 13; Stop 37
gttctatctgcaacctcaaagcagt

SEQ ID NO: 77509 - DNA, 25 bp, Artificial
  probe
  misc_feature (1)..(25): SEQ ID NO: 7101; WAN024BCT_x_at; Start 19; Stop 43
tctgcaacctcaaagcagtgctttg

SEQ ID NO: 77510 - DNA, 25 bp, Artificial
  probe
  misc_feature (1)..(25): SEQ ID NO: 7101; WAN024BCT_x_at; Start 50; Stop 74
ctgcggctagtttcctagtttgctc

SEQ ID NO: 77511 - DNA, 25 bp, Artificial
  probe
  misc_feature (1)..(25): SEQ ID NO: 7101; WAN024BCT_x_at; Start 38; Stop 62
gctttgagcaacctgcggctagttt

SEQ ID NO: 77512 - DNA, 25 bp, Artificial
  probe
  misc_feature (1)..(25): SEQ ID NO: 7101; WAN024BCT_x_at; Start 47; Stop 71
aacctgcggctagtttcctagtttg

SEQ ID NO: 77513 - DNA, 25 bp, Artificial
  probe
  misc_feature (1)..(25): SEQ ID NO: 7101; WAN024BCT_x_at; Start 45; Stop 69
gcaacctgcggctagtttcctagtt

SEQ ID NO: 77514 - DNA, 25 bp, Artificial
  probe
  misc_feature (1)..(25): SEQ ID NO: 7101; WAN024BCT_x_at; Start 12; Stop 36
agttctatctgcaacctcaaagcag

SEQ ID NO: 77515 - DNA, 25 bp, Artificial
  probe
  misc_feature (1)..(25): SEQ ID NO: 7101; WAN024BCT_x_at; Start 44; Stop 68
agcaacctgcggctagtttcctagt

SEQ ID NO: 77516 - DNA, 25 bp, Artificial
  probe
  misc_feature (1)..(25): SEQ ID NO: 7101; WAN024BCT_x_at; Start 29; Stop 53
caaagcagtgctttgagcaacctgc

SEQ ID NO: 77517 - DNA, 25 bp, Artificial
  probe
  misc_feature (1)..(25): SEQ ID NO: 7101; WAN024BCT_x_at; Start 42; Stop 66
tgagcaacctgcggctagtttccta

SEQ ID NO: 77518 - DNA, 25 bp, Artificial
  probe
  misc_feature (1)..(25): SEQ ID NO: 7101; WAN024BCT_x_at; Start 36; Stop 60
gtgctttgagcaacctgcggctagt

SEQ ID NO: 77519 - DNA, 25 bp, Artificial
  probe
  misc_feature (1)..(25): SEQ ID NO: 7101; WAN024BCT_x_at; Start 49; Stop 73
cctgcggctagtttcctagtttgct

SEQ ID NO: 77520 - DNA, 25 bp, Artificial
  probe
  misc_feature (1)..(25): SEQ ID NO: 7101; WAN024BCT_x_at; Start 11; Stop 35
cagttctatctgcaacctcaaagca

SEQ ID NO: 77521 - DNA, 25 bp, Artificial
  probe
  misc_feature (1)..(25): SEQ ID NO: 7101; WAN024BCT_x_at; Start 43; Stop 67
gagcaacctgcggctagtttcctag

SEQ ID NO: 77522 - DNA, 25 bp, Artificial
  probe
  misc_feature (1)..(25): SEQ ID NO: 7101; WAN024BCT_x_at; Start 15; Stop 39
tctatctgcaacctcaaagcagtgc

SEQ ID NO: 77523 - DNA, 25 bp, Artificial
  probe
  misc_feature (1)..(25): SEQ ID NO: 7101; WAN024BCT_x_at; Start 33; Stop 57
gcagtgctttgagcaacctgcggct

SEQ ID NO: 77524 - DNA, 25 bp, Artificial
  probe
  misc_feature (1)..(25): SEQ ID NO: 7101; WAN024BCT_x_at; Start 17; Stop 41
tatctgcaacctcaaagcagtgctt

SEQ ID NO: 77525 - DNA, 25 bp, Artificial
  probe
  misc_feature (1)..(25): SEQ ID NO: 7101; WAN024BCT_x_at; Start 20; Stop 44
ctgcaacctcaaagcagtgctttga

SEQ ID NO: 77526 - DNA, 25 bp, Artificial
  probe
  misc_feature (1)..(25): SEQ ID NO: 7101; WAN024BCT_x_at; Start 41; Stop 65
ttgagcaacctgcggctagtttcct

SEQ ID NO: 77527 - DNA, 25 bp, Artificial
  probe
  misc_feature (1)..(25): SEQ ID NO: 7101; WAN024BCT_x_at; Start 51; Stop 75
tgcggctagtttcctagtttgctct

SEQ ID NO: 77528 - DNA, 25 bp, Artificial
  probe
  misc_feature (1)..(25): SEQ ID NO: 7101; WAN024BCT_x_at; Start 46; Stop 70
caacctgcggctagtttcctagttt

SEQ ID NO: 77529 - DNA, 25 bp, Artificial
  probe
  misc_feature (1)..(25): SEQ ID NO: 7101; WAN024BCT_x_at; Start 16; Stop 40
ctatctgcaacctcaaagcagtgct

SEQ ID NO: 77530 - DNA, 25 bp, Artificial
  probe
  misc_feature (1)..(25): SEQ ID NO: 7101; WAN024BCT_x_at; Start 40; Stop 64
tttgagcaacctgcggctagtttcc

SEQ ID NO: 77531 - DNA, 25 bp, Artificial
  probe
  misc_feature (1)..(25): SEQ ID NO: 7101; WAN024BCT_x_at; Start 52; Stop 76
gcggctagtttcctagtttgctctt

SEQ ID NO: 77532 - DNA, 25 bp, Artificial
  probe
  misc_feature (1)..(25): SEQ ID NO: 7101; WAN024BCT_x_at; Start 18; Stop 42
atctgcaacctcaaagcagtgcttt

SEQ ID NO: 77533 - DNA, 25 bp, Artificial
  probe
  misc_feature (1)..(25): SEQ ID NO: 7101; WAN024BCT_x_at; Start 37; Stop 61
tgctttgagcaacctgcggctagtt

SEQ ID NO: 77534 - DNA, 25 bp, Artificial
  probe
  misc_feature (1)..(25): SEQ ID NO: 7101; WAN024BCT_x_at; Start 35; Stop 59
agtgctttgagcaacctgcggctag

SEQ ID NO: 77535 - DNA, 25 bp, Artificial
  probe
  misc_feature (1)..(25): SEQ ID NO: 7101; WAN024BCT_x_at; Start 22; Stop 46
gcaacctcaaagcagtgctttgagc

SEQ ID NO: 77536 - DNA, 25 bp, Artificial
  probe
  misc_feature (1)..(25): SEQ ID NO: 7101; WAN024BCT_x_at; Start 30; Stop 54
aaagcagtgctttgagcaacctgcg

SEQ ID NO: 77537 - DNA, 25 bp, Artificial
  probe
  misc_feature (1)..(25): SEQ ID NO: 7101; WAN024BCT_x_at; Start 39; Stop 63
ctttgagcaacctgcggctagtttc

SEQ ID NO: 77538 - DNA, 25 bp, Artificial
  probe
  misc_feature (1)..(25): SEQ ID NO: 7066; WAN024BCX_at; Start 65; Stop 89
gtataaacagccactctccagttca

SEQ ID NO: 77539 - DNA, 25 bp, Artificial
  probe
  misc_feature (1)..(25): SEQ ID NO: 7066; WAN024BCX_at; Start 57; Stop 81
ttcattgagtataaacagccactct

SEQ ID NO: 77540 - DNA, 25 bp, Artificial
  probe
  misc_feature (1)..(25): SEQ ID NO: 7066; WAN024BCX_at; Start 61; Stop 85
ttgagtataaacagccactctccag

SEQ ID NO: 77541 - DNA, 25 bp, Artificial
  probe
  misc_feature (1)..(25): SEQ ID NO: 7066; WAN024BCX_at; Start 79; Stop 103
tctccagttcaattggagagttttt

SEQ ID NO: 77542 - DNA, 25 bp, Artificial
  probe
  misc_feature (1)..(25): SEQ ID NO: 7066; WAN024BCX_at; Start 70; Stop 94
aacagccactctccagttcaattgg

SEQ ID NO: 77543 - DNA, 25 bp, Artificial
  probe
  misc_feature (1)..(25): SEQ ID NO: 7066; WAN024BCX_at; Start 81; Stop 105
tccagttcaattggagagttttttg

SEQ ID NO: 77544 - DNA, 25 bp, Artificial
  probe
  misc_feature (1)..(25): SEQ ID NO: 7066; WAN024BCX_at; Start 60; Stop 84
attgagtataaacagccactctcca

SEQ ID NO: 77545 - DNA, 25 bp, Artificial
  probe
  misc_feature (1)..(25): SEQ ID NO: 7066; WAN024BCX_at; Start 64; Stop 88
agtataaacagccactctccagttc

SEQ ID NO: 77546 - DNA, 25 bp, Artificial
  probe
  misc_feature (1)..(25): SEQ ID NO: 7066; WAN024BCX_at; Start 82; Stop 106
ccagttcaattggagagttttttga

SEQ ID NO: 77547 - DNA, 25 bp, Artificial
  probe
  misc_feature (1)..(25): SEQ ID NO: 7066; WAN024BCX_at; Start 69; Stop 93
aaacagccactctccagttcaattg

SEQ ID NO: 77548 - DNA, 25 bp, Artificial
  probe
  misc_feature (1)..(25): SEQ ID NO: 7066; WAN024BCX_at; Start 62; Stop 86
tgagtataaacagccactctccagt

SEQ ID NO: 77549 - DNA, 25 bp, Artificial
  probe
  misc_feature (1)..(25): SEQ ID NO: 7066; WAN024BCX_at; Start 76; Stop 100
cactctccagttcaattggagagtt

SEQ ID NO: 77550 - DNA, 25 bp, Artificial
  probe
  misc_feature (1)..(25): SEQ ID NO: 7066; WAN024BCX_at; Start 84; Stop 108
agttcaattggagagttttttgatg

SEQ ID NO: 77551 - DNA, 25 bp, Artificial
  probe
  misc_feature (1)..(25): SEQ ID NO: 7066; WAN024BCX_at; Start 75; Stop 99
ccactctccagttcaattggagagt

SEQ ID NO: 77552 - DNA, 25 bp, Artificial
  probe
  misc_feature (1)..(25): SEQ ID NO: 7066; WAN024BCX_at; Start 80; Stop 104
ctccagttcaattggagagtttttt

SEQ ID NO: 77553 - DNA, 25 bp, Artificial
  probe
  misc_feature (1)..(25): SEQ ID NO: 7066; WAN024BCX_at; Start 73; Stop 97
agccactctccagttcaattggaga

SEQ ID NO: 77554 - DNA, 25 bp, Artificial
  probe
  misc_feature (1)..(25): SEQ ID NO: 7066; WAN024BCX_at; Start 71; Stop 95
acagccactctccagttcaattgga

SEQ ID NO: 77555 - DNA, 25 bp, Artificial
  probe
  misc_feature (1)..(25): SEQ ID NO: 7066; WAN024BCX_at; Start 83; Stop 107
cagttcaattggagagttttttgat

SEQ ID NO: 77556 - DNA, 25 bp, Artificial
  probe
  misc_feature (1)..(25): SEQ ID NO: 7066; WAN024BCX_at; Start 72; Stop 96
cagccactctccagttcaattggag

SEQ ID NO: 77557 - DNA, 25 bp, Artificial
  probe
  misc_feature (1)..(25): SEQ ID NO: 7066; WAN024BCX_at; Start 78; Stop 102
ctctccagttcaattggagagtttt

SEQ ID NO: 77558 - DNA, 25 bp, Artificial
  probe
  misc_feature (1)..(25): SEQ ID NO: 7066; WAN024BCX_at; Start 85; Stop 109
gttcaattggagagttttttgatga

SEQ ID NO: 77559 - DNA, 25 bp, Artificial
  probe
  misc_feature (1)..(25): SEQ ID NO: 7066; WAN024BCX_at; Start 58; Stop 82
tcattgagtataaacagccactctc

SEQ ID NO: 77560 - DNA, 25 bp, Artificial
  probe
  misc_feature (1)..(25): SEQ ID NO: 7066; WAN024BCX_at; Start 59; Stop 83
cattgagtataaacagccactctcc

SEQ ID NO: 77561 - DNA, 25 bp, Artificial
  probe
  misc_feature (1)..(25): SEQ ID NO: 7066; WAN024BCX_at; Start 68; Stop 92
taaacagccactctccagttcaatt

SEQ ID NO: 77562 - DNA, 25 bp, Artificial
  probe
  misc_feature (1)..(25): SEQ ID NO: 7066; WAN024BCX_at; Start 77; Stop 101
actctccagttcaattggagagttt

SEQ ID NO: 77563 - DNA, 25 bp, Artificial
  probe
  misc_feature (1)..(25): SEQ ID NO: 7066; WAN024BCX_at; Start 67; Stop 91
ataaacagccactctccagttcaat

SEQ ID NO: 77564 - DNA, 25 bp, Artificial
  probe
  misc_feature (1)..(25): SEQ ID NO: 7066; WAN024BCX_at; Start 63; Stop 87
gagtataaacagccactctccagtt

SEQ ID NO: 77565 - DNA, 25 bp, Artificial
  probe
  misc_feature (1)..(25): SEQ ID NO: 7066; WAN024BCX_at; Start 86; Stop 110
ttcaattggagagttttttgatgag

SEQ ID NO: 77566 - DNA, 25 bp, Artificial
  probe
  misc_feature (1)..(25): SEQ ID NO: 7066; WAN024BCX_at; Start 74; Stop 98
gccactctccagttcaattggagag

SEQ ID NO: 77567 - DNA, 25 bp, Artificial
  probe
  misc_feature (1)..(25): SEQ ID NO: 7066; WAN024BCX_at; Start 66; Stop 90
tataaacagccactctccagttcaa

SEQ ID NO: 77568 - DNA, 25 bp, Artificial
  probe
  misc_feature (1)..(25): SEQ ID NO: 28; WAN024BCZ_s_at; Start 74; Stop 98
ttagatttactcaaaatcaaggatt

SEQ ID NO: 77569 - DNA, 25 bp, Artificial
  probe
  misc_feature (1)..(25): SEQ ID NO: 28; WAN024BCZ_s_at; Start 68; Stop 92
tgagtattagatttactcaaaatca

SEQ ID NO: 77570 - DNA, 25 bp, Artificial
  probe
  misc_feature (1)..(25): SEQ ID NO: 28; WAN024BCZ_s_at; Start 62; Stop 86
tgattttgagtattagatttactca

SEQ ID NO: 77571 - DNA, 25 bp, Artificial
  probe
  misc_feature (1)..(25): SEQ ID NO: 28; WAN024BCZ_s_at; Start 70; Stop 94
agtattagatttactcaaaatcaag

SEQ ID NO: 77572 - DNA, 25 bp, Artificial
  probe
  misc_feature (1)..(25): SEQ ID NO: 28; WAN024BCZ_s_at; Start 72; Stop 96
tattagatttactcaaaatcaagga

SEQ ID NO: 77573 - DNA, 25 bp, Artificial
  probe
  misc_feature (1)..(25): SEQ ID NO: 28; WAN024BCZ_s_at; Start 67; Stop 91
ttgagtattagatttactcaaaatc

SEQ ID NO: 77574 - DNA, 25 bp, Artificial
  probe
  misc_feature (1)..(25): SEQ ID NO: 28; WAN024BCZ_s_at; Start 71; Stop 95
gtattagatttactcaaaatcaagg

SEQ ID NO: 77575 - DNA, 25 bp, Artificial
  probe
  misc_feature (1)..(25): SEQ ID NO: 28; WAN024BCZ_s_at; Start 69; Stop 93
gagtattagatttactcaaaatcaa

SEQ ID NO: 77576 - DNA, 25 bp, Artificial
  probe
  misc_feature (1)..(25): SEQ ID NO: 28; WAN024BCZ_s_at; Start 63; Stop 87
gattttgagtattagatttactcaa

SEQ ID NO: 77577 - DNA, 25 bp, Artificial
  probe
  misc_feature (1)..(25): SEQ ID NO: 28; WAN024BCZ_s_at; Start 73; Stop 97
attagatttactcaaaatcaaggat

SEQ ID NO: 77578 - DNA, 25 bp, Artificial
  probe
  misc_feature (1)..(25): SEQ ID NO: 28; WAN024BCZ_s_at; Start 75; Stop 99
tagatttactcaaaatcaaggattt

SEQ ID NO: 77579 - DNA, 25 bp, Artificial
  probe
  misc_feature (1)..(25): SEQ ID NO: 28; WAN024BCZ_s_at; Start 61; Stop 85
ttgattttgagtattagatttactc

SEQ ID NO: 77580 - DNA, 25 bp, Artificial
  probe
  misc_feature (1)..(25): SEQ ID NO: 3392; WAN024BD9_at; Start 9; Stop 33
tttatggtggttgatactcttcgaa

SEQ ID NO: 77581 - DNA, 25 bp, Artificial
  probe
  misc_feature (1)..(25): SEQ ID NO: 3392; WAN024BD9_at; Start 118; Stop 142
attgagtatgaaatgagaagacaaa

SEQ ID NO: 77582 - DNA, 25 bp, Artificial
  probe
  misc_feature (1)..(25): SEQ ID NO: 3392; WAN024BD9_at; Start 6; Stop 30
tcttttatggtggttgatactcttc

SEQ ID NO: 77583 - DNA, 25 bp, Artificial
  probe
  misc_feature (1)..(25): SEQ ID NO: 3392; WAN024BD9_at; Start 5; Stop 29
ctcttttatggtggttgatactctt

SEQ ID NO: 77584 - DNA, 25 bp, Artificial
  probe
  misc_feature (1)..(25): SEQ ID NO: 3392; WAN024BD9_at; Start 4; Stop 28
cctcttttatggtggttgatactct

SEQ ID NO: 77585 - DNA, 25 bp, Artificial
  probe
  misc_feature (1)..(25): SEQ ID NO: 3392; WAN024BD9_at; Start 120; Stop 144
tgagtatgaaatgagaagacaaaaa

SEQ ID NO: 77586 - DNA, 25 bp, Artificial
  probe
  misc_feature (1)..(25): SEQ ID NO: 3392; WAN024BD9_at; Start 119; Stop 143
ttgagtatgaaatgagaagacaaaa

SEQ ID NO: 77587 - DNA, 25 bp, Artificial
  probe
  misc_feature (1)..(25): SEQ ID NO: 3392; WAN024BD9_at; Start 7; Stop 31
cttttatggtggttgatactcttcg

SEQ ID NO: 77588 - DNA, 25 bp, Artificial
  probe
  misc_feature (1)..(25): SEQ ID NO: 3392; WAN024BD9_at; Start 117; Stop 141
cattgagtatgaaatgagaagacaa

SEQ ID NO: 77589 - DNA, 25 bp, Artificial
  probe
  misc_feature (1)..(25): SEQ ID NO: 3392; WAN024BD9_at; Start 8; Stop 32
ttttatggtggttgatactcttcga

SEQ ID NO: 77590 - DNA, 25 bp, Artificial
  probe
  misc_feature (1)..(25): SEQ ID NO: 1497; WAN024BDA_at; Start 58; Stop 82
aggagcagaatcaaatctttttcta

SEQ ID NO: 77591 - DNA, 25 bp, Artificial
  probe
  misc_feature (1)..(25): SEQ ID NO: 1497; WAN024BDA_at; Start 39; Stop 63
aaaaagattttattgtgtgaggagc

SEQ ID NO: 77592 - DNA, 25 bp, Artificial
  probe
  misc_feature (1)..(25): SEQ ID NO: 1497; WAN024BDA_at; Start 60; Stop 84
gagcagaatcaaatctttttctata

SEQ ID NO: 77593 - DNA, 25 bp, Artificial
  probe
  misc_feature (1)..(25): SEQ ID NO: 1497; WAN024BDA_at; Start 53; Stop 77
gtgtgaggagcagaatcaaatcttt

SEQ ID NO: 77594 - DNA, 25 bp, Artificial
  probe
  misc_feature (1)..(25): SEQ ID NO: 1497; WAN024BDA_at; Start 47; Stop 71
tttattgtgtgaggagcagaatcaa

SEQ ID NO: 77595 - DNA, 25 bp, Artificial
  probe
  misc_feature (1)..(25): SEQ ID NO: 1497; WAN024BDA_at; Start 84; Stop 108
agttgtggggagatttacttcattt

SEQ ID NO: 77596 - DNA, 25 bp, Artificial
  probe
  misc_feature (1)..(25): SEQ ID NO: 1497; WAN024BDA_at; Start 42; Stop 66
aagattttattgtgtgaggagcaga

SEQ ID NO: 77597 - DNA, 25 bp, Artificial
  probe
  misc_feature (1)..(25): SEQ ID NO: 1497; WAN024BDA_at; Start 122; Stop 146
agtttttgcccagccgatttatcca

SEQ ID NO: 77598 - DNA, 25 bp, Artificial
  probe
  misc_feature (1)..(25): SEQ ID NO: 1497; WAN024BDA_at; Start 121; Stop 145
gagtttttgcccagccgatttatcc

SEQ ID NO: 77599 - DNA, 25 bp, Artificial
  probe
  misc_feature (1)..(25): SEQ ID NO: 1497; WAN024BDA_at; Start 50; Stop 74
attgtgtgaggagcagaatcaaatc

SEQ ID NO: 77600 - DNA, 25 bp, Artificial
  probe
  misc_feature (1)..(25): SEQ ID NO: 1497; WAN024BDA_at; Start 123; Stop 147
gtttttgcccagccgatttatccac

SEQ ID NO: 77601 - DNA, 25 bp, Artificial
  probe
  misc_feature (1)..(25): SEQ ID NO: 1497; WAN024BDA_at; Start 62; Stop 86
gcagaatcaaatctttttctatagt

SEQ ID NO: 77602 - DNA, 25 bp, Artificial
  probe
  misc_feature (1)..(25): SEQ ID NO: 1497; WAN024BDA_at; Start 61; Stop 85
agcagaatcaaatctttttctatag

SEQ ID NO: 77603 - DNA, 25 bp, Artificial
  probe
  misc_feature (1)..(25): SEQ ID NO: 1497; WAN024BDA_at; Start 59; Stop 83
ggagcagaatcaaatctttttctat

SEQ ID NO: 77604 - DNA, 25 bp, Artificial
  probe
  misc_feature (1)..(25): SEQ ID NO: 1497; WAN024BDA_at; Start 81; Stop 105
tatagttgtggggagatttacttca

SEQ ID NO: 77605 - DNA, 25 bp, Artificial
  probe
  misc_feature (1)..(25): SEQ ID NO: 1497; WAN024BDA_at; Start 55; Stop 79
gtgaggagcagaatcaaatcttttt

SEQ ID NO: 77606 - DNA, 25 bp, Artificial
  probe
  misc_feature (1)..(25): SEQ ID NO: 1497; WAN024BDA_at; Start 65; Stop 89
gaatcaaatctttttctatagttgt

SEQ ID NO: 77607 - DNA, 25 bp, Artificial
  probe
  misc_feature (1)..(25): SEQ ID NO: 1497; WAN024BDA_at; Start 51; Stop 75
ttgtgtgaggagcagaatcaaatct

SEQ ID NO: 77608 - DNA, 25 bp, Artificial
  probe
  misc_feature (1)..(25): SEQ ID NO: 1497; WAN024BDA_at; Start 54; Stop 78
tgtgaggagcagaatcaaatctttt

SEQ ID NO: 77609 - DNA, 25 bp, Artificial
  probe
  misc_feature (1)..(25): SEQ ID NO: 1497; WAN024BDA_at; Start 41; Stop 65
aaagattttattgtgtgaggagcag

SEQ ID NO: 77610 - DNA, 25 bp, Artificial
  probe
  misc_feature (1)..(25): SEQ ID NO: 1497; WAN024BDA_at; Start 57; Stop 81
gaggagcagaatcaaatctttttct

SEQ ID NO: 77611 - DNA, 25 bp, Artificial
  probe
  misc_feature (1)..(25): SEQ ID NO: 1497; WAN024BDA_at; Start 44; Stop 68
gattttattgtgtgaggagcagaat

SEQ ID NO: 77612 - DNA, 25 bp, Artificial
  probe
  misc_feature (1)..(25): SEQ ID NO: 1497; WAN024BDA_at; Start 48; Stop 72
ttattgtgtgaggagcagaatcaaa

SEQ ID NO: 77613 - DNA, 25 bp, Artificial
  probe
  misc_feature (1)..(25): SEQ ID NO: 1497; WAN024BDA_at; Start 49; Stop 73
tattgtgtgaggagcagaatcaaat

SEQ ID NO: 77614 - DNA, 25 bp, Artificial
  probe
  misc_feature (1)..(25): SEQ ID NO: 1497; WAN024BDA_at; Start 45; Stop 69
attttattgtgtgaggagcagaatc

SEQ ID NO: 77615 - DNA, 25 bp, Artificial
  probe
  misc_feature (1)..(25): SEQ ID NO: 1497; WAN024BDA_at; Start 71; Stop 95
aatctttttctatagttgtggggag

SEQ ID NO: 77616 - DNA, 25 bp, Artificial
  probe
  misc_feature (1)..(25): SEQ ID NO: 1497; WAN024BDA_at; Start 46; Stop 70
ttttattgtgtgaggagcagaatca

SEQ ID NO: 77617 - DNA, 25 bp, Artificial
  probe
  misc_feature (1)..(25): SEQ ID NO: 1497; WAN024BDA_at; Start 40; Stop 64
aaaagattttattgtgtgaggagca

SEQ ID NO: 77618 - DNA, 25 bp, Artificial
  probe
  misc_feature (1)..(25): SEQ ID NO: 1497; WAN024BDA_at; Start 52; Stop 76
tgtgtgaggagcagaatcaaatctt

SEQ ID NO: 77619 - DNA, 25 bp, Artificial
  probe
  misc_feature (1)..(25): SEQ ID NO: 1497; WAN024BDA_at; Start 153; Stop 177
caaaacagtgttttatactcttcga

SEQ ID NO: 77620 - DNA, 25 bp, Artificial
  probe
  misc_feature (1)..(25): SEQ ID NO: 1497; WAN024BDA_at; Start 68; Stop 92
tcaaatctttttctatagttgtggg

SEQ ID NO: 77621 - DNA, 25 bp, Artificial
  probe
  misc_feature (1)..(25): SEQ ID NO: 1497; WAN024BDA_at; Start 152; Stop 176
tcaaaacagtgttttatactcttcg

SEQ ID NO: 77622 - DNA, 25 bp, Artificial
  probe
  misc_feature (1)..(25): SEQ ID NO: 1497; WAN024BDA_at; Start 56; Stop 80
tgaggagcagaatcaaatctttttc

SEQ ID NO: 77623 - DNA, 25 bp, Artificial
  probe
  misc_feature (1)..(25): SEQ ID NO: 1497; WAN024BDA_at; Start 43; Stop 67
agattttattgtgtgaggagcagaa

SEQ ID NO: 77624 - DNA, 25 bp, Artificial
  probe
  misc_feature (1)..(25): SEQ ID NO: 1111; WAN024BDB_at; Start 36; Stop 60
cagccaagacattgaagaaaaagat

SEQ ID NO: 77625 - DNA, 25 bp, Artificial
  probe
  misc_feature (1)..(25): SEQ ID NO: 1111; WAN024BDB_at; Start 186; Stop 210
caaagaaacgctggaagaggtaggc

SEQ ID NO: 77626 - DNA, 25 bp, Artificial
  probe
  misc_feature (1)..(25): SEQ ID NO: 1111; WAN024BDB_at; Start 149; Stop 173
cctactccaaccaaggtagccagtt

SEQ ID NO: 77627 - DNA, 25 bp, Artificial
  probe
  misc_feature (1)..(25): SEQ ID NO: 1111; WAN024BDB_at; Start 60; Stop 84
taacggaaatggcttgggctacttc

SEQ ID NO: 77628 - DNA, 25 bp, Artificial
  probe
  misc_feature (1)..(25): SEQ ID NO: 1111; WAN024BDB_at; Start 107; Stop 131
ggcgctgtcgctgcaatggcagaac

SEQ ID NO: 77629 - DNA, 25 bp, Artificial
  probe
  misc_feature (1)..(25): SEQ ID NO: 1111; WAN024BDB_at; Start 123; Stop 147
tggcagaacccccacagatagaaga

SEQ ID NO: 77630 - DNA, 25 bp, Artificial
  probe
  misc_feature (1)..(25): SEQ ID NO: 1111; WAN024BDB_at; Start 159; Stop 183
ccaaggtagccagttttgtatccag

SEQ ID NO: 77631 - DNA, 25 bp, Artificial
  probe
  misc_feature (1)..(25): SEQ ID NO: 1111; WAN024BDB_at; Start 57; Stop 81
agataacggaaatggcttgggctac

SEQ ID NO: 77632 - DNA, 25 bp, Artificial
  probe
  misc_feature (1)..(25): SEQ ID NO: 1111; WAN024BDB_at; Start 68; Stop 92
atggcttgggctacttccttttcct

SEQ ID NO: 77633 - DNA, 25 bp, Artificial
  probe
  misc_feature (1)..(25): SEQ ID NO: 1111; WAN024BDB_at; Start 1; Stop 25
atgaagccaggtgccgagggttgga

SEQ ID NO: 77634 - DNA, 25 bp, Artificial
  probe
  misc_feature (1)..(25): SEQ ID NO: 1111; WAN024BDB_at; Start 152; Stop 176
actccaaccaaggtagccagttttg

SEQ ID NO: 77635 - DNA, 25 bp, Artificial
  probe
  misc_feature (1)..(25): SEQ ID NO: 1111; WAN024BDB_at; Start 26; Stop 50
aagatgagcgcagccaagacattga

SEQ ID NO: 77636 - DNA, 25 bp, Artificial
  probe
  misc_feature (1)..(25): SEQ ID NO: 1111; WAN024BDB_at; Start 21; Stop 45
ttggaaagatgagcgcagccaagac

SEQ ID NO: 77637 - DNA, 25 bp, Artificial
  probe
  misc_feature (1)..(25): SEQ ID NO: 1111; WAN024BDB_at; Start 30; Stop 54
tgagcgcagccaagacattgaagaa

SEQ ID NO: 77638 - DNA, 25 bp, Artificial
  probe
  misc_feature (1)..(25): SEQ ID NO: 1111; WAN024BDB_at; Start 6; Stop 30
gccaggtgccgagggttggaaagat

SEQ ID NO: 77639 - DNA, 25 bp, Artificial
  probe
  misc_feature (1)..(25): SEQ ID NO: 1111; WAN024BDB_at; Start 155; Stop 179
ccaaccaaggtagccagttttgtat

SEQ ID NO: 77640 - DNA, 25 bp, Artificial
  probe
  misc_feature (1)..(25): SEQ ID NO: 1111; WAN024BDB_at; Start 43; Stop 67
gacattgaagaaaaagataacggaa

SEQ ID NO: 77641 - DNA, 25 bp, Artificial
  probe
  misc_feature (1)..(25): SEQ ID NO: 1111; WAN024BDB_at; Start 133; Stop 157
cccacagatagaagaacctactcca

SEQ ID NO: 77642 - DNA, 25 bp, Artificial
  probe
  misc_feature (1)..(25): SEQ ID NO: 1111; WAN024BDB_at; Start 39; Stop 63
ccaagacattgaagaaaaagataac

SEQ ID NO: 77643 - DNA, 25 bp, Artificial
  probe
  misc_feature (1)..(25): SEQ ID NO: 1111; WAN024BDB_at; Start 190; Stop 214
gaaacgctggaagaggtaggcaata

SEQ ID NO: 77644 - DNA, 25 bp, Artificial
  probe
  misc_feature (1)..(25): SEQ ID NO: 1111; WAN024BDB_at; Start 110; Stop 134
gctgtcgctgcaatggcagaacccc

SEQ ID NO: 77645 - DNA, 25 bp, Artificial
  probe
  misc_feature (1)..(25): SEQ ID NO: 1111; WAN024BDB_at; Start 33; Stop 57
gcgcagccaagacattgaagaaaaa

SEQ ID NO: 77646 - DNA, 25 bp, Artificial
  probe
  misc_feature (1)..(25): SEQ ID NO: 1111; WAN024BDB_at; Start 194; Stop 218
cgctggaagaggtaggcaataatca

SEQ ID NO: 77647 - DNA, 25 bp, Artificial
  probe
  misc_feature (1)..(25): SEQ ID NO: 1111; WAN024BDB_at; Start 204; Stop 228
ggtaggcaataatcagagctattga

SEQ ID NO: 77648 - DNA, 25 bp, Artificial
  probe
  misc_feature (1)..(25): SEQ ID NO: 1111; WAN024BDB_at; Start 146; Stop 170
gaacctactccaaccaaggtagcca

SEQ ID NO: 77649 - DNA, 25 bp, Artificial
  probe
  misc_feature (1)..(25): SEQ ID NO: 1111; WAN024BDB_at; Start 28; Stop 52
gatgagcgcagccaagacattgaag

SEQ ID NO: 77650 - DNA, 25 bp, Artificial
  probe
  misc_feature (1)..(25): SEQ ID NO: 1111; WAN024BDB_at; Start 139; Stop 163
gatagaagaacctactccaaccaag

SEQ ID NO: 77651 - DNA, 25 bp, Artificial
  probe
  misc_feature (1)..(25): SEQ ID NO: 1111; WAN024BDB_at; Start 24; Stop 48
gaaagatgagcgcagccaagacatt

SEQ ID NO: 77652 - DNA, 25 bp, Artificial
  probe
  misc_feature (1)..(25): SEQ ID NO: 1111; WAN024BDB_at; Start 48; Stop 72
tgaagaaaaagataacggaaatggc

SEQ ID NO: 77653 - DNA, 25 bp, Artificial
  probe
  misc_feature (1)..(25): SEQ ID NO: 1111; WAN024BDB_at; Start 202; Stop 226
gaggtaggcaataatcagagctatt

SEQ ID NO: 77654 - DNA, 25 bp, Artificial
  probe
  misc_feature (1)..(25): SEQ ID NO: 1111; WAN024BDB_at; Start 74; Stop 98
tgggctacttccttttccttagcat

SEQ ID NO: 77655 - DNA, 25 bp, Artificial
  probe
  misc_feature (1)..(25): SEQ ID NO: 1111; WAN024BDB_at; Start 63; Stop 87
cggaaatggcttgggctacttcctt

SEQ ID NO: 77656 - DNA, 25 bp, Artificial
  probe
  misc_feature (1)..(25): SEQ ID NO: 1111; WAN024BDB_at; Start 135; Stop 159
cacagatagaagaacctactccaac

SEQ ID NO: 77657 - DNA, 25 bp, Artificial
  probe
  misc_feature (1)..(25): SEQ ID NO: 1111; WAN024BDB_at; Start 199; Stop 223
gaagaggtaggcaataatcagagct

SEQ ID NO: 77658 - DNA, 25 bp, Artificial
  probe
  misc_feature (1)..(25): SEQ ID NO: 2064; WAN024BDC_s_at; Start 31; Stop 55
atagaagctgaaaagccagcatctg

SEQ ID NO: 77659 - DNA, 25 bp, Artificial
  probe
  misc_feature (1)..(25): SEQ ID NO: 2064; WAN024BDC_s_at; Start 25; Stop 49
caagaaatagaagctgaaaagccag

SEQ ID NO: 77660 - DNA, 25 bp, Artificial
  probe
  misc_feature (1)..(25): SEQ ID NO: 2064; WAN024BDC_s_at; Start 18; Stop 42
agtaaaacaagaaatagaagctgaa

SEQ ID NO: 77661 - DNA, 25 bp, Artificial
  probe
  misc_feature (1)..(25): SEQ ID NO: 2064; WAN024BDC_s_at; Start 37; Stop 61
gctgaaaagccagcatctgtagaag

SEQ ID NO: 77662 - DNA, 25 bp, Artificial
  probe
  misc_feature (1)..(25): SEQ ID NO: 2064; WAN024BDC_s_at; Start 28; Stop 52
gaaatagaagctgaaaagccagcat

SEQ ID NO: 77663 - DNA, 25 bp, Artificial
  probe
  misc_feature (1)..(25): SEQ ID NO: 2064; WAN024BDC_s_at; Start 36; Stop 60
agctgaaaagccagcatctgtagaa

SEQ ID NO: 77664 - DNA, 25 bp, Artificial
  probe
  misc_feature (1)..(25): SEQ ID NO: 2064; WAN024BDC_s_at; Start 32; Stop 56
tagaagctgaaaagccagcatctgt

SEQ ID NO: 77665 - DNA, 25 bp, Artificial
  probe
  misc_feature (1)..(25): SEQ ID NO: 2064; WAN024BDC_s_at; Start 21; Stop 45
aaaacaagaaatagaagctgaaaag

SEQ ID NO: 77666 - DNA, 25 bp, Artificial
  probe
  misc_feature (1)..(25): SEQ ID NO: 2064; WAN024BDC_s_at; Start 33; Stop 57
agaagctgaaaagccagcatctgta

SEQ ID NO: 77667 - DNA, 25 bp, Artificial
  probe
  misc_feature (1)..(25): SEQ ID NO: 2064; WAN024BDC_s_at; Start 20; Stop 44
taaaacaagaaatagaagctgaaaa

SEQ ID NO: 77668 - DNA, 25 bp, Artificial
  probe
  misc_feature (1)..(25): SEQ ID NO: 2064; WAN024BDC_s_at; Start 83; Stop 107
taaaaaaggttgctaccgacatata

SEQ ID NO: 77669 - DNA, 25 bp, Artificial
  probe
  misc_feature (1)..(25): SEQ ID NO: 2064; WAN024BDC_s_at; Start 38; Stop 62
ctgaaaagccagcatctgtagaagc

SEQ ID NO: 77670 - DNA, 25 bp, Artificial
  probe
  misc_feature (1)..(25): SEQ ID NO: 2064; WAN024BDC_s_at; Start 22; Stop 46
aaacaagaaatagaagctgaaaagc

SEQ ID NO: 77671 - DNA, 25 bp, Artificial
  probe
  misc_feature (1)..(25): SEQ ID NO: 2064; WAN024BDC_s_at; Start 35; Stop 59
aagctgaaaagccagcatctgtaga

SEQ ID NO: 77672 - DNA, 25 bp, Artificial
  probe
  misc_feature (1)..(25): SEQ ID NO: 2064; WAN024BDC_s_at; Start 34; Stop 58
gaagctgaaaagccagcatctgtag

SEQ ID NO: 77673 - DNA, 25 bp, Artificial
  probe
  misc_feature (1)..(25): SEQ ID NO: 2064; WAN024BDC_s_at; Start 42; Stop 66
aaagccagcatctgtagaagcttgg

SEQ ID NO: 77674 - DNA, 25 bp, Artificial
  probe
  misc_feature (1)..(25): SEQ ID NO: 2064; WAN024BDC_s_at; Start 17; Stop 41
tagtaaaacaagaaatagaagctga

SEQ ID NO: 77675 - DNA, 25 bp, Artificial
  probe
  misc_feature (1)..(25): SEQ ID NO: 2064; WAN024BDC_s_at; Start 41; Stop 65
aaaagccagcatctgtagaagcttg

SEQ ID NO: 77676 - DNA, 25 bp, Artificial
  probe
  misc_feature (1)..(25): SEQ ID NO: 2064; WAN024BDC_s_at; Start 24; Stop 48
acaagaaatagaagctgaaaagcca

SEQ ID NO: 77677 - DNA, 25 bp, Artificial
  probe
  misc_feature (1)..(25): SEQ ID NO: 2064; WAN024BDC_s_at; Start 16; Stop 40
ttagtaaaacaagaaatagaagctg

SEQ ID NO: 77678 - DNA, 25 bp, Artificial
  probe
  misc_feature (1)..(25): SEQ ID NO: 2064; WAN024BDC_s_at; Start 26; Stop 50
aagaaatagaagctgaaaagccagc

SEQ ID NO: 77679 - DNA, 25 bp, Artificial
  probe
  misc_feature (1)..(25): SEQ ID NO: 2064; WAN024BDC_s_at; Start 29; Stop 53
aaatagaagctgaaaagccagcatc

SEQ ID NO: 77680 - DNA, 25 bp, Artificial
  probe
  misc_feature (1)..(25): SEQ ID NO: 2064; WAN024BDC_s_at; Start 19; Stop 43
gtaaaacaagaaatagaagctgaaa

SEQ ID NO: 77681 - DNA, 25 bp, Artificial
  probe
  misc_feature (1)..(25): SEQ ID NO: 2064; WAN024BDC_s_at; Start 39; Stop 63
tgaaaagccagcatctgtagaagct

SEQ ID NO: 77682 - DNA, 25 bp, Artificial
  probe
  misc_feature (1)..(25): SEQ ID NO: 2064; WAN024BDC_s_at; Start 23; Stop 47
aacaagaaatagaagctgaaaagcc

SEQ ID NO: 77683 - DNA, 25 bp, Artificial
  probe
  misc_feature (1)..(25): SEQ ID NO: 2064; WAN024BDC_s_at; Start 40; Stop 64
gaaaagccagcatctgtagaagctt

SEQ ID NO: 77684 - DNA, 25 bp, Artificial
  probe
  misc_feature (1)..(25): SEQ ID NO: 2064; WAN024BDC_s_at; Start 30; Stop 54
aatagaagctgaaaagccagcatct

SEQ ID NO: 77685 - DNA, 25 bp, Artificial
  probe
  misc_feature (1)..(25): SEQ ID NO: 2064; WAN024BDC_s_at; Start 27; Stop 51
agaaatagaagctgaaaagccagca

SEQ ID NO: 77686 - DNA, 25 bp, Artificial
  probe
  misc_feature (1)..(25): SEQ ID NO: 4235; WAN024BDD_at; Start 65; Stop 89
tatacactatttatctggaattgca

SEQ ID NO: 77687 - DNA, 25 bp, Artificial
  probe
  misc_feature (1)..(25): SEQ ID NO: 4235; WAN024BDD_at; Start 52; Stop 76
catacccatccattatacactattt

SEQ ID NO: 77688 - DNA, 25 bp, Artificial
  probe
  misc_feature (1)..(25): SEQ ID NO: 4235; WAN024BDD_at; Start 28; Stop 52
tacctcccacaagtatgtttttcac

SEQ ID NO: 77689 - DNA, 25 bp, Artificial
  probe
  misc_feature (1)..(25): SEQ ID NO: 4235; WAN024BDD_at; Start 14; Stop 38
taattagagatttttacctcccaca

SEQ ID NO: 77690 - DNA, 25 bp, Artificial
  probe
  misc_feature (1)..(25): SEQ ID NO: 4235; WAN024BDD_at; Start 68; Stop 92
acactatttatctggaattgcaaga

SEQ ID NO: 77691 - DNA, 25 bp, Artificial
  probe
  misc_feature (1)..(25): SEQ ID NO: 4235; WAN024BDD_at; Start 29; Stop 53
acctcccacaagtatgtttttcaca

SEQ ID NO: 77692 - DNA, 25 bp, Artificial
  probe
  misc_feature (1)..(25): SEQ ID NO: 4235; WAN024BDD_at; Start 16; Stop 40
attagagatttttacctcccacaag

SEQ ID NO: 77693 - DNA, 25 bp, Artificial
  probe
  misc_feature (1)..(25): SEQ ID NO: 4235; WAN024BDD_at; Start 79; Stop 103
ctggaattgcaagagaaaagtttac

SEQ ID NO: 77694 - DNA, 25 bp, Artificial
  probe
  misc_feature (1)..(25): SEQ ID NO: 4235; WAN024BDD_at; Start 31; Stop 55
ctcccacaagtatgtttttcacata

SEQ ID NO: 77695 - DNA, 25 bp, Artificial
  probe
  misc_feature (1)..(25): SEQ ID NO: 4235; WAN024BDD_at; Start 72; Stop 96
tatttatctggaattgcaagagaaa

SEQ ID NO: 77696 - DNA, 25 bp, Artificial
  probe
  misc_feature (1)..(25): SEQ ID NO: 4235; WAN024BDD_at; Start 76; Stop 100
tatctggaattgcaagagaaaagtt

SEQ ID NO: 77697 - DNA, 25 bp, Artificial
  probe
  misc_feature (1)..(25): SEQ ID NO: 4235; WAN024BDD_at; Start 69; Stop 93
cactatttatctggaattgcaagag

SEQ ID NO: 77698 - DNA, 25 bp, Artificial
  probe
  misc_feature (1)..(25): SEQ ID NO: 4235; WAN024BDD_at; Start 20; Stop 44
gagatttttacctcccacaagtatg

SEQ ID NO: 77699 - DNA, 25 bp, Artificial
  probe
  misc_feature (1)..(25): SEQ ID NO: 4235; WAN024BDD_at; Start 61; Stop 85
ccattatacactatttatctggaat

SEQ ID NO: 77700 - DNA, 25 bp, Artificial
  probe
  misc_feature (1)..(25): SEQ ID NO: 4235; WAN024BDD_at; Start 18; Stop 42
tagagatttttacctcccacaagta

SEQ ID NO: 77701 - DNA, 25 bp, Artificial
  probe
  misc_feature (1)..(25): SEQ ID NO: 4235; WAN024BDD_at; Start 58; Stop 82
catccattatacactatttatctgg

SEQ ID NO: 77702 - DNA, 25 bp, Artificial
  probe
  misc_feature (1)..(25): SEQ ID NO: 4235; WAN024BDD_at; Start 30; Stop 54
cctcccacaagtatgtttttcacat

SEQ ID NO: 77703 - DNA, 25 bp, Artificial
  probe
  misc_feature (1)..(25): SEQ ID NO: 4235; WAN024BDD_at; Start 46; Stop 70
ttttcacatacccatccattataca

SEQ ID NO: 77704 - DNA, 25 bp, Artificial
  probe
  misc_feature (1)..(25): SEQ ID NO: 4235; WAN024BDD_at; Start 70; Stop 94
actatttatctggaattgcaagaga

SEQ ID NO: 77705 - DNA, 25 bp, Artificial
  probe
  misc_feature (1)..(25): SEQ ID NO: 4235; WAN024BDD_at; Start 78; Stop 102
tctggaattgcaagagaaaagttta

SEQ ID NO: 77706 - DNA, 25 bp, Artificial
  probe
  misc_feature (1)..(25): SEQ ID NO: 4235; WAN024BDD_at; Start 50; Stop 74
cacatacccatccattatacactat

SEQ ID NO: 77707 - DNA, 25 bp, Artificial
  probe
  misc_feature (1)..(25): SEQ ID NO: 4235; WAN024BDD_at; Start 71; Stop 95
ctatttatctggaattgcaagagaa

SEQ ID NO: 77708 - DNA, 25 bp, Artificial
  probe
  misc_feature (1)..(25): SEQ ID NO: 4235; WAN024BDD_at; Start 44; Stop 68
gtttttcacatacccatccattata

SEQ ID NO: 77709 - DNA, 25 bp, Artificial
  probe
  misc_feature (1)..(25): SEQ ID NO: 4235; WAN024BDD_at; Start 74; Stop 98
tttatctggaattgcaagagaaaag

SEQ ID NO: 77710 - DNA, 25 bp, Artificial
  probe
  misc_feature (1)..(25): SEQ ID NO: 4235; WAN024BDD_at; Start 67; Stop 91
tacactatttatctggaattgcaag

SEQ ID NO: 77711 - DNA, 25 bp, Artificial
  probe
  misc_feature (1)..(25): SEQ ID NO: 4235; WAN024BDD_at; Start 35; Stop 59
cacaagtatgtttttcacataccca

SEQ ID NO: 77712 - DNA, 25 bp, Artificial
  probe
  misc_feature (1)..(25): SEQ ID NO: 4235; WAN024BDD_at; Start 37; Stop 61
caagtatgtttttcacatacccatc

SEQ ID NO: 77713 - DNA, 25 bp, Artificial
  probe
  misc_feature (1)..(25): SEQ ID NO: 4235; WAN024BDD_at; Start 75; Stop 99
ttatctggaattgcaagagaaaagt

SEQ ID NO: 77714 - DNA, 25 bp, Artificial
  probe
  misc_feature (1)..(25): SEQ ID NO: 4235; WAN024BDD_at; Start 19; Stop 43
agagatttttacctcccacaagtat

SEQ ID NO: 77715 - DNA, 25 bp, Artificial
  probe
  misc_feature (1)..(25): SEQ ID NO: 4235; WAN024BDD_at; Start 27; Stop 51
ttacctcccacaagtatgtttttca

SEQ ID NO: 77716 - DNA, 25 bp, Artificial
  probe
  misc_feature (1)..(25): SEQ ID NO: 4235; WAN024BDD_at; Start 21; Stop 45
agatttttacctcccacaagtatgt

SEQ ID NO: 77717 - DNA, 25 bp, Artificial
  probe
  misc_feature (1)..(25): SEQ ID NO: 4235; WAN024BDD_at; Start 39; Stop 63
agtatgtttttcacatacccatcca

SEQ ID NO: 77718 - DNA, 25 bp, Artificial
  probe
  misc_feature (1)..(25): SEQ ID NO: 4235; WAN024BDD_at; Start 43; Stop 67
tgtttttcacatacccatccattat

SEQ ID NO: 77719 - DNA, 25 bp, Artificial
  probe
  misc_feature (1)..(25): SEQ ID NO: 4235; WAN024BDD_at; Start 80; Stop 104
tggaattgcaagagaaaagtttact

SEQ ID NO: 77720 - DNA, 25 bp, Artificial
  probe
  misc_feature (1)..(25): SEQ ID NO: 1571; WAN024BDE_at; Start 15; Stop 39
ggtaaatatccctggcgaatgcttg

SEQ ID NO: 77721 - DNA, 25 bp, Artificial
  probe
  misc_feature (1)..(25): SEQ ID NO: 1571; WAN024BDE_at; Start 62; Stop 86
catttataatttacaacatatcaac

SEQ ID NO: 77722 - DNA, 25 bp, Artificial
  probe
  misc_feature (1)..(25): SEQ ID NO: 1571; WAN024BDE_at; Start 137; Stop 161
gcatcacttttgaatggaaggctaa

SEQ ID NO: 77723 - DNA, 25 bp, Artificial
  probe
  misc_feature (1)..(25): SEQ ID NO: 1571; WAN024BDE_at; Start 135; Stop 159
tagcatcacttttgaatggaaggct

SEQ ID NO: 77724 - DNA, 25 bp, Artificial
  probe
  misc_feature (1)..(25): SEQ ID NO: 1571; WAN024BDE_at; Start 21; Stop 45
tatccctggcgaatgcttgtatgac

SEQ ID NO: 77725 - DNA, 25 bp, Artificial
  probe
  misc_feature (1)..(25): SEQ ID NO: 1571; WAN024BDE_at; Start 24; Stop 48
ccctggcgaatgcttgtatgacaag

SEQ ID NO: 77726 - DNA, 25 bp, Artificial
  probe
  misc_feature (1)..(25): SEQ ID NO: 1571; WAN024BDE_at; Start 133; Stop 157
gatagcatcacttttgaatggaagg

SEQ ID NO: 77727 - DNA, 25 bp, Artificial
  probe
  misc_feature (1)..(25): SEQ ID NO: 1571; WAN024BDE_at; Start 27; Stop 51
tggcgaatgcttgtatgacaaggta

SEQ ID NO: 77728 - DNA, 25 bp, Artificial
  probe
  misc_feature (1)..(25): SEQ ID NO: 1571; WAN024BDE_at; Start 138; Stop 162
catcacttttgaatggaaggctaaa

SEQ ID NO: 77729 - DNA, 25 bp, Artificial
  probe
  misc_feature (1)..(25): SEQ ID NO: 1571; WAN024BDE_at; Start 120; Stop 144
tcaagctaagaaagatagcatcact

SEQ ID NO: 77730 - DNA, 25 bp, Artificial
  probe
  misc_feature (1)..(25): SEQ ID NO: 1571; WAN024BDE_at; Start 129; Stop 153
gaaagatagcatcacttttgaatgg

SEQ ID NO: 77731 - DNA, 25 bp, Artificial
  probe
  misc_feature (1)..(25): SEQ ID NO: 1571; WAN024BDE_at; Start 9; Stop 33
tattcaggtaaatatccctggcgaa

SEQ ID NO: 77732 - DNA, 25 bp, Artificial
  probe
  misc_feature (1)..(25): SEQ ID NO: 1571; WAN024BDE_at; Start 147; Stop 171
tgaatggaaggctaaagagcaaact

SEQ ID NO: 77733 - DNA, 25 bp, Artificial
  probe
  misc_feature (1)..(25): SEQ ID NO: 1571; WAN024BDE_at; Start 2; Stop 26
tgagcgatattcaggtaaatatccc

SEQ ID NO: 77734 - DNA, 25 bp, Artificial
  probe
  misc_feature (1)..(25): SEQ ID NO: 1571; WAN024BDE_at; Start 7; Stop 31
gatattcaggtaaatatccctggcg

SEQ ID NO: 77735 - DNA, 25 bp, Artificial
  probe
  misc_feature (1)..(25): SEQ ID NO: 1571; WAN024BDE_at; Start 106; Stop 130
gggatattttatattcaagctaaga

SEQ ID NO: 77736 - DNA, 25 bp, Artificial
  probe
  misc_feature (1)..(25): SEQ ID NO: 1571; WAN024BDE_at; Start 149; Stop 173
aatggaaggctaaagagcaaactag

SEQ ID NO: 77737 - DNA, 25 bp, Artificial
  probe
  misc_feature (1)..(25): SEQ ID NO: 1571; WAN024BDE_at; Start 19; Stop 43
aatatccctggcgaatgcttgtatg

SEQ ID NO: 77738 - DNA, 25 bp, Artificial
  probe
  misc_feature (1)..(25): SEQ ID NO: 1571; WAN024BDE_at; Start 45; Stop 69
caaggtatttgttctttcatttata

SEQ ID NO: 77739 - DNA, 25 bp, Artificial
  probe
  misc_feature (1)..(25): SEQ ID NO: 1571; WAN024BDE_at; Start 86; Stop 110
caaatttaaatatagtaaatgggat

SEQ ID NO: 77740 - DNA, 25 bp, Artificial
  probe
  misc_feature (1)..(25): SEQ ID NO: 1571; WAN024BDE_at; Start 25; Stop 49
cctggcgaatgcttgtatgacaagg

SEQ ID NO: 77741 - DNA, 25 bp, Artificial
  probe
  misc_feature (1)..(25): SEQ ID NO: 1571; WAN024BDE_at; Start 143; Stop 167
cttttgaatggaaggctaaagagca

SEQ ID NO: 77742 - DNA, 25 bp, Artificial
  probe
  misc_feature (1)..(25): SEQ ID NO: 1571; WAN024BDE_at; Start 22; Stop 46
atccctggcgaatgcttgtatgaca

SEQ ID NO: 77743 - DNA, 25 bp, Artificial
  probe
  misc_feature (1)..(25): SEQ ID NO: 1571; WAN024BDE_at; Start 16; Stop 40
gtaaatatccctggcgaatgcttgt

SEQ ID NO: 77744 - DNA, 25 bp, Artificial
  probe
  misc_feature (1)..(25): SEQ ID NO: 1571; WAN024BDE_at; Start 39; Stop 63
gtatgacaaggtatttgttctttca

SEQ ID NO: 77745 - DNA, 25 bp, Artificial
  probe
  misc_feature (1)..(25): SEQ ID NO: 1571; WAN024BDE_at; Start 35; Stop 59
gcttgtatgacaaggtatttgttct

SEQ ID NO: 77746 - DNA, 25 bp, Artificial
  probe
  misc_feature (1)..(25): SEQ ID NO: 1571; WAN024BDE_at; Start 23; Stop 47
tccctggcgaatgcttgtatgacaa

SEQ ID NO: 77747 - DNA, 25 bp, Artificial
  probe
  misc_feature (1)..(25): SEQ ID NO: 1571; WAN024BDE_at; Start 29; Stop 53
gcgaatgcttgtatgacaaggtatt

SEQ ID NO: 77748 - DNA, 25 bp, Artificial
  probe
  misc_feature (1)..(25): SEQ ID NO: 1571; WAN024BDE_at; Start 5; Stop 29
gcgatattcaggtaaatatccctgg

SEQ ID NO: 77749 - DNA, 25 bp, Artificial
  probe
  misc_feature (1)..(25): SEQ ID NO: 1571; WAN024BDE_at; Start 141; Stop 165
cacttttgaatggaaggctaaagag

SEQ ID NO: 77750 - DNA, 25 bp, Artificial
  probe
  misc_feature (1)..(25): SEQ ID NO: 1571; WAN024BDE_at; Start 101; Stop 125
taaatgggatattttatattcaagc

SEQ ID NO: 77751 - DNA, 25 bp, Artificial
  probe
  misc_feature (1)..(25): SEQ ID NO: 1571; WAN024BDE_at; Start 206; Stop 230
ttgaggttgtagatatagtaaaatg

SEQ ID NO: 77752 - DNA, 25 bp, Artificial
  probe
  misc_feature (1)..(25): SEQ ID NO: 1571; WAN024BDE_at; Start 12; Stop 36
tcaggtaaatatccctggcgaatgc

SEQ ID NO: 77753 - DNA, 25 bp, Artificial
  probe
  misc_feature (1)..(25): SEQ ID NO: 1571; WAN024BDE_at; Start 124; Stop 148
gctaagaaagatagcatcacttttg

SEQ ID NO: 77754 - DNA, 25 bp, Artificial
  probe
  misc_feature (1)..(25): SEQ ID NO: 3033; WAN024BDF_at; Start 97; Stop 121
ggaatggatttcatttatccgctac

SEQ ID NO: 77755 - DNA, 25 bp, Artificial
  probe
  misc_feature (1)..(25): SEQ ID NO: 3033; WAN024BDF_at; Start 65; Stop 89
aaatttcctaccagcctatcatcta

SEQ ID NO: 77756 - DNA, 25 bp, Artificial
  probe
  misc_feature (1)..(25): SEQ ID NO: 3033; WAN024BDF_at; Start 128; Stop 152
tcaacaacaacgtcaatacaagaaa

SEQ ID NO: 77757 - DNA, 25 bp, Artificial
  probe
  misc_feature (1)..(25): SEQ ID NO: 3033; WAN024BDF_at; Start 25; Stop 49
taccagaactccatacatctatttc

SEQ ID NO: 77758 - DNA, 25 bp, Artificial
  probe
  misc_feature (1)..(25): SEQ ID NO: 3033; WAN024BDF_at; Start 63; Stop 87
gaaaatttcctaccagcctatcatc

SEQ ID NO: 77759 - DNA, 25 bp, Artificial
  probe
  misc_feature (1)..(25): SEQ ID NO: 3033; WAN024BDF_at; Start 22; Stop 46
tactaccagaactccatacatctat

SEQ ID NO: 77760 - DNA, 25 bp, Artificial
  probe
  misc_feature (1)..(25): SEQ ID NO: 3033; WAN024BDF_at; Start 126; Stop 150
tgtcaacaacaacgtcaatacaaga

SEQ ID NO: 77761 - DNA, 25 bp, Artificial
  probe
  misc_feature (1)..(25): SEQ ID NO: 3033; WAN024BDF_at; Start 151; Stop 175
aaatcattcatcttgcagcttatac

SEQ ID NO: 77762 - DNA, 25 bp, Artificial
  probe
  misc_feature (1)..(25): SEQ ID NO: 3033; WAN024BDF_at; Start 146; Stop 170
caagaaaatcattcatcttgcagct

SEQ ID NO: 77763 - DNA, 25 bp, Artificial
  probe
  misc_feature (1)..(25): SEQ ID NO: 3033; WAN024BDF_at; Start 154; Stop 178
tcattcatcttgcagcttatactct

SEQ ID NO: 77764 - DNA, 25 bp, Artificial
  probe
  misc_feature (1)..(25): SEQ ID NO: 3033; WAN024BDF_at; Start 149; Stop 173
gaaaatcattcatcttgcagcttat

SEQ ID NO: 77765 - DNA, 25 bp, Artificial
  probe
  misc_feature (1)..(25): SEQ ID NO: 3033; WAN024BDF_at; Start 40; Stop 64
catctatttcctgtatgctatttga

SEQ ID NO: 77766 - DNA, 25 bp, Artificial
  probe
  misc_feature (1)..(25): SEQ ID NO: 3033; WAN024BDF_at; Start 73; Stop 97
taccagcctatcatctatgataatg

SEQ ID NO: 77767 - DNA, 25 bp, Artificial
  probe
  misc_feature (1)..(25): SEQ ID NO: 3033; WAN024BDF_at; Start 117; Stop 141
gctactttttgtcaacaacaacgtc

SEQ ID NO: 77768 - DNA, 25 bp, Artificial
  probe
  misc_feature (1)..(25): SEQ ID NO: 3033; WAN024BDF_at; Start 60; Stop 84
tttgaaaatttcctaccagcctatc

SEQ ID NO: 77769 - DNA, 25 bp, Artificial
  probe
  misc_feature (1)..(25): SEQ ID NO: 3033; WAN024BDF_at; Start 135; Stop 159
caacgtcaatacaagaaaatcattc

SEQ ID NO: 77770 - DNA, 25 bp, Artificial
  probe
  misc_feature (1)..(25): SEQ ID NO: 3033; WAN024BDF_at; Start 17; Stop 41
ctttctactaccagaactccataca

SEQ ID NO: 77771 - DNA, 25 bp, Artificial
  probe
  misc_feature (1)..(25): SEQ ID NO: 3033; WAN024BDF_at; Start 84; Stop 108
catctatgataatggaatggatttc

SEQ ID NO: 77772 - DNA, 25 bp, Artificial
  probe
  misc_feature (1)..(25): SEQ ID NO: 3033; WAN024BDF_at; Start 113; Stop 137
atccgctactttttgtcaacaacaa

SEQ ID NO: 77773 - DNA, 25 bp, Artificial
  probe
  misc_feature (1)..(25): SEQ ID NO: 3033; WAN024BDF_at; Start 132; Stop 156
caacaacgtcaatacaagaaaatca

SEQ ID NO: 77774 - DNA, 25 bp, Artificial
  probe
  misc_feature (1)..(25): SEQ ID NO: 3033; WAN024BDF_at; Start 94; Stop 118
aatggaatggatttcatttatccgc

SEQ ID NO: 77775 - DNA, 25 bp, Artificial
  probe
  misc_feature (1)..(25): SEQ ID NO: 3033; WAN024BDF_at; Start 48; Stop 72
tcctgtatgctatttgaaaatttcc

SEQ ID NO: 77776 - DNA, 25 bp, Artificial
  probe
  misc_feature (1)..(25): SEQ ID NO: 3033; WAN024BDF_at; Start 122; Stop 146
tttttgtcaacaacaacgtcaatac

SEQ ID NO: 77777 - DNA, 25 bp, Artificial
  probe
  misc_feature (1)..(25): SEQ ID NO: 3033; WAN024BDF_at; Start 70; Stop 94
tcctaccagcctatcatctatgata

SEQ ID NO: 77778 - DNA, 25 bp, Artificial
  probe
  misc_feature (1)..(25): SEQ ID NO: 3033; WAN024BDF_at; Start 138; Stop 162
cgtcaatacaagaaaatcattcatc

SEQ ID NO: 77779 - DNA, 25 bp, Artificial
  probe
  misc_feature (1)..(25): SEQ ID NO: 3033; WAN024BDF_at; Start 68; Stop 92
tttcctaccagcctatcatctatga

SEQ ID NO: 77780 - DNA, 25 bp, Artificial
  probe
  misc_feature (1)..(25): SEQ ID NO: 3033; WAN024BDF_at; Start 119; Stop 143
tactttttgtcaacaacaacgtcaa

SEQ ID NO: 77781 - DNA, 25 bp, Artificial
  probe
  misc_feature (1)..(25): SEQ ID NO: 3033; WAN024BDF_at; Start 20; Stop 44
tctactaccagaactccatacatct

SEQ ID NO: 77782 - DNA, 25 bp, Artificial
  probe
  misc_feature (1)..(25): SEQ ID NO: 3033; WAN024BDF_at; Start 98; Stop 122
gaatggatttcatttatccgctact

SEQ ID NO: 77783 - DNA, 25 bp, Artificial
  probe
  misc_feature (1)..(25): SEQ ID NO: 3033; WAN024BDF_at; Start 30; Stop 54
gaactccatacatctatttcctgta

SEQ ID NO: 77784 - DNA, 25 bp, Artificial
  probe
  misc_feature (1)..(25): SEQ ID NO: 3033; WAN024BDF_at; Start 2; Stop 26
tgttcatctctctccctttctacta

SEQ ID NO: 77785 - DNA, 25 bp, Artificial
  probe
  misc_feature (1)..(25): SEQ ID NO: 3033; WAN024BDF_at; Start 158; Stop 182
tcatcttgcagcttatactcttcga

SEQ ID NO: 77786 - DNA, 25 bp, Artificial
  probe
  misc_feature (1)..(25): SEQ ID NO: 3033; WAN024BDF_at; Start 56; Stop 80
gctatttgaaaatttcctaccagcc

SEQ ID NO: 77787 - DNA, 25 bp, Artificial
  probe
  misc_feature (1)..(25): SEQ ID NO: 3033; WAN024BDF_at; Start 76; Stop 100
cagcctatcatctatgataatggaa

SEQ ID NO: 77788 - DNA, 25 bp, Artificial
  probe
  misc_feature (1)..(25): SEQ ID NO: 5308; WAN024BDG_at; Start 186; Stop 210
caatatcaccttcaatacttgccca

SEQ ID NO: 77789 - DNA, 25 bp, Artificial
  probe
  misc_feature (1)..(25): SEQ ID NO: 5308; WAN024BDG_at; Start 342; Stop 366
gaccaaagaaaggacgaatcttgcc

SEQ ID NO: 77790 - DNA, 25 bp, Artificial
  probe
  misc_feature (1)..(25): SEQ ID NO: 5308; WAN024BDG_at; Start 323; Stop 347
tcaagatagtcggtgtaatgaccaa

SEQ ID NO: 77791 - DNA, 25 bp, Artificial
  probe
  misc_feature (1)..(25): SEQ ID NO: 5308; WAN024BDG_at; Start 149; Stop 173
tcctcttcaatagcagcgatacgtt

SEQ ID NO: 77792 - DNA, 25 bp, Artificial
  probe
  misc_feature (1)..(25): SEQ ID NO: 5308; WAN024BDG_at; Start 291; Stop 315
gattggccatatctgtttcaaaagc

SEQ ID NO: 77793 - DNA, 25 bp, Artificial
  probe
  misc_feature (1)..(25): SEQ ID NO: 5308; WAN024BDG_at; Start 243; Stop 267
tgtcttctcgaaccttgaccacttt

SEQ ID NO: 77794 - DNA, 25 bp, Artificial
  probe
  misc_feature (1)..(25): SEQ ID NO: 5308; WAN024BDG_at; Start 33; Stop 57
caaattcactgagatactcatagcg

SEQ ID NO: 77795 - DNA, 25 bp, Artificial
  probe
  misc_feature (1)..(25): SEQ ID NO: 5308; WAN024BDG_at; Start 408; Stop 432
aatagcggtcgtgactgactgttaa

SEQ ID NO: 77796 - DNA, 25 bp, Artificial
  probe
  misc_feature (1)..(25): SEQ ID NO: 5308; WAN024BDG_at; Start 396; Stop 420
ccttatccaagaaatagcggtcgtg

SEQ ID NO: 77797 - DNA, 25 bp, Artificial
  probe
  misc_feature (1)..(25): SEQ ID NO: 5308; WAN024BDG_at; Start 311; Stop 335
aaagctttttcatcaagatagtcgg

SEQ ID NO: 77798 - DNA, 25 bp, Artificial
  probe
  misc_feature (1)..(25): SEQ ID NO: 5308; WAN024BDG_at; Start 357; Stop 381
gaatcttgccatcctcaaaagcgag

SEQ ID NO: 77799 - DNA, 25 bp, Artificial
  probe
  misc_feature (1)..(25): SEQ ID NO: 5308; WAN024BDG_at; Start 279; Stop 303
ccttttgcacttgattggccatatc

SEQ ID NO: 77800 - DNA, 25 bp, Artificial
  probe
  misc_feature (1)..(25): SEQ ID NO: 5308; WAN024BDG_at; Start 222; Stop 246
cttggtaggtcatgcgtttcttgtc

SEQ ID NO: 77801 - DNA, 25 bp, Artificial
  probe
  misc_feature (1)..(25): SEQ ID NO: 5308; WAN024BDG_at; Start 94; Stop 118
caattctttttggagagtagccagc

SEQ ID NO: 77802 - DNA, 25 bp, Artificial
  probe
  misc_feature (1)..(25): SEQ ID NO: 5308; WAN024BDG_at; Start 201; Stop 225
tacttgcccactcctgcttttcttg

SEQ ID NO: 77803 - DNA, 25 bp, Artificial
  probe
  misc_feature (1)..(25): SEQ ID NO: 5308; WAN024BDG_at; Start 143; Stop 167
tgcatttcctcttcaatagcagcga

SEQ ID NO: 77804 - DNA, 25 bp, Artificial
  probe
  misc_feature (1)..(25): SEQ ID NO: 5308; WAN024BDG_at; Start 120; Stop 144
taccaaagtcagagccgttagcctg

SEQ ID NO: 77805 - DNA, 25 bp, Artificial
  probe
  misc_feature (1)..(25): SEQ ID NO: 5308; WAN024BDG_at; Start 3; Stop 27
gcactttgattttcgaatagtctta

SEQ ID NO: 77806 - DNA, 25 bp, Artificial
  probe
  misc_feature (1)..(25): SEQ ID NO: 5308; WAN024BDG_at; Start 381; Stop 405
gaatcttggtcgctaccttatccaa

SEQ ID NO: 77807 - DNA, 25 bp, Artificial
  probe
  misc_feature (1)..(25): SEQ ID NO: 5308; WAN024BDG_at; Start 159; Stop 183
tagcagcgatacgtttttccaaggt

SEQ ID NO: 77808 - DNA, 25 bp, Artificial
  probe
  misc_feature (1)..(25): SEQ ID NO: 5308; WAN024BDG_at; Start 403; Stop 427
caagaaatagcggtcgtgactgact

SEQ ID NO: 77809 - DNA, 25 bp, Artificial
  probe
  misc_feature (1)..(25): SEQ ID NO: 5308; WAN024BDG_at; Start 72; Stop 96
ggagtgcttcatttttctcatccaa

SEQ ID NO: 77810 - DNA, 25 bp, Artificial
  probe
  misc_feature (1)..(25): SEQ ID NO: 5308; WAN024BDG_at; Start 174; Stop 198
tttccaaggtttcaatatcaccttc

SEQ ID NO: 77811 - DNA, 25 bp, Artificial
  probe
  misc_feature (1)..(25): SEQ ID NO: 5308; WAN024BDG_at; Start 21; Stop 45
agtcttaactatcaaattcactgag

SEQ ID NO: 77812 - DNA, 25 bp, Artificial
  probe
  misc_feature (1)..(25): SEQ ID NO: 5308; WAN024BDG_at; Start 232; Stop 256
catgcgtttcttgtcttctcgaacc

SEQ ID NO: 77813 - DNA, 25 bp, Artificial
  probe
  misc_feature (1)..(25): SEQ ID NO: 5308; WAN024BDG_at; Start 54; Stop 78
agcgttcgtatttttcaaggagtgc

SEQ ID NO: 77814 - DNA, 25 bp, Artificial
  probe
  misc_feature (1)..(25): SEQ ID NO: 5308; WAN024BDG_at; Start 128; Stop 152
tcagagccgttagcctgcatttcct

SEQ ID NO: 77815 - DNA, 25 bp, Artificial
  probe
  misc_feature (1)..(25): SEQ ID NO: 5308; WAN024BDG_at; Start 368; Stop 392
tcctcaaaagcgagaatcttggtcg

SEQ ID NO: 77816 - DNA, 25 bp, Artificial
  probe
  misc_feature (1)..(25): SEQ ID NO: 5308; WAN024BDG_at; Start 295; Stop 319
ggccatatctgtttcaaaagctttt

SEQ ID NO: 77817 - DNA, 25 bp, Artificial
  probe
  misc_feature (1)..(25): SEQ ID NO: 5308; WAN024BDG_at; Start 108; Stop 132
gagtagccagcttaccaaagtcaga

SEQ ID NO: 77818 - DNA, 25 bp, Artificial
  probe
  misc_feature (1)..(25): SEQ ID NO: 5308; WAN024BDG_at; Start 59; Stop 83
tcgtatttttcaaggagtgcttcat

SEQ ID NO: 77819 - DNA, 25 bp, Artificial
  probe
  misc_feature (1)..(25): SEQ ID NO: 5308; WAN024BDG_at; Start 332; Stop 356
tcggtgtaatgaccaaagaaaggac

SEQ ID NO: 77820 - DNA, 25 bp, Artificial
  probe
  misc_feature (1)..(25): SEQ ID NO: 5308; WAN024BDG_at; Start 39; Stop 63
cactgagatactcatagcgttcgta

SEQ ID NO: 77821 - DNA, 25 bp, Artificial
  probe
  misc_feature (1)..(25): SEQ ID NO: 5308; WAN024BDG_at; Start 209; Stop 233
cactcctgcttttcttggtaggtca

SEQ ID NO: 77822 - DNA, 25 bp, Artificial
  probe
  misc_feature (1)..(25): SEQ ID NO: 4175; WAN024BDH_at; Start 6; Stop 30
atttcagaagaatacttttaatact

SEQ ID NO: 77823 - DNA, 25 bp, Artificial
  probe
  misc_feature (1)..(25): SEQ ID NO: 4175; WAN024BDH_at; Start 1; Stop 25
gtgggatttcagaagaatactttta

SEQ ID NO: 77824 - DNA, 25 bp, Artificial
  probe
  misc_feature (1)..(25): SEQ ID NO: 4175; WAN024BDH_at; Start 5; Stop 29
gatttcagaagaatacttttaatac

SEQ ID NO: 77825 - DNA, 25 bp, Artificial
  probe
  misc_feature (1)..(25): SEQ ID NO: 4175; WAN024BDH_at; Start 2; Stop 26
tgggatttcagaagaatacttttaa

SEQ ID NO: 77826 - DNA, 25 bp, Artificial
  probe
  misc_feature (1)..(25): SEQ ID NO: 4175; WAN024BDH_at; Start 4; Stop 28
ggatttcagaagaatacttttaata

SEQ ID NO: 77827 - DNA, 25 bp, Artificial
  probe
  misc_feature (1)..(25): SEQ ID NO: 4175; WAN024BDH_at; Start 8; Stop 32
ttcagaagaatacttttaatactct

SEQ ID NO: 77828 - DNA, 25 bp, Artificial
  probe
  misc_feature (1)..(25): SEQ ID NO: 4175; WAN024BDH_at; Start 11; Stop 35
agaagaatacttttaatactcttcg

SEQ ID NO: 77829 - DNA, 25 bp, Artificial
  probe
  misc_feature (1)..(25): SEQ ID NO: 4175; WAN024BDH_at; Start 9; Stop 33
tcagaagaatacttttaatactctt

SEQ ID NO: 77830 - DNA, 25 bp, Artificial
  probe
  misc_feature (1)..(25): SEQ ID NO: 4175; WAN024BDH_at; Start 12; Stop 36
gaagaatacttttaatactcttcga

SEQ ID NO: 77831 - DNA, 25 bp, Artificial
  probe
  misc_feature (1)..(25): SEQ ID NO: 4175; WAN024BDH_at; Start 10; Stop 34
cagaagaatacttttaatactcttc

SEQ ID NO: 77832 - DNA, 25 bp, Artificial
  probe
  misc_feature (1)..(25): SEQ ID NO: 4175; WAN024BDH_at; Start 7; Stop 31
tttcagaagaatacttttaatactc

SEQ ID NO: 77833 - DNA, 25 bp, Artificial
  probe
  misc_feature (1)..(25): SEQ ID NO: 3498; WAN024BDI_x_at; Start 23; Stop 47
cttcgtcagttctatccacaacctc

SEQ ID NO: 77834 - DNA, 25 bp, Artificial
  probe
  misc_feature (1)..(25): SEQ ID NO: 3498; WAN024BDI_x_at; Start 22; Stop 46
acttcgtcagttctatccacaacct

SEQ ID NO: 77835 - DNA, 25 bp, Artificial
  probe
  misc_feature (1)..(25): SEQ ID NO: 3498; WAN024BDI_x_at; Start 18; Stop 42
actgacttcgtcagttctatccaca

SEQ ID NO: 77836 - DNA, 25 bp, Artificial
  probe
  misc_feature (1)..(25): SEQ ID NO: 3498; WAN024BDI_x_at; Start 21; Stop 45
gacttcgtcagttctatccacaacc

SEQ ID NO: 77837 - DNA, 25 bp, Artificial
  probe
  misc_feature (1)..(25): SEQ ID NO: 3498; WAN024BDI_x_at; Start 29; Stop 53
cagttctatccacaacctcaaaaca

SEQ ID NO: 77838 - DNA, 25 bp, Artificial
  probe
  misc_feature (1)..(25): SEQ ID NO: 3498; WAN024BDI_x_at; Start 25; Stop 49
tcgtcagttctatccacaacctcaa

SEQ ID NO: 77839 - DNA, 25 bp, Artificial
  probe
  misc_feature (1)..(25): SEQ ID NO: 3498; WAN024BDI_x_at; Start 20; Stop 44
tgacttcgtcagttctatccacaac

SEQ ID NO: 77840 - DNA, 25 bp, Artificial
  probe
  misc_feature (1)..(25): SEQ ID NO: 3498; WAN024BDI_x_at; Start 24; Stop 48
ttcgtcagttctatccacaacctca

SEQ ID NO: 77841 - DNA, 25 bp, Artificial
  probe
  misc_feature (1)..(25): SEQ ID NO: 3498; WAN024BDI_x_at; Start 16; Stop 40
ttactgacttcgtcagttctatcca

SEQ ID NO: 77842 - DNA, 25 bp, Artificial
  probe
  misc_feature (1)..(25): SEQ ID NO: 3498; WAN024BDI_x_at; Start 17; Stop 41
tactgacttcgtcagttctatccac

SEQ ID NO: 77843 - DNA, 25 bp, Artificial
  probe
  misc_feature (1)..(25): SEQ ID NO: 3498; WAN024BDI_x_at; Start 28; Stop 52
tcagttctatccacaacctcaaaac

SEQ ID NO: 77844 - DNA, 25 bp, Artificial
  probe
  misc_feature (1)..(25): SEQ ID NO: 3498; WAN024BDI_x_at; Start 19; Stop 43
ctgacttcgtcagttctatccacaa

SEQ ID NO: 77845 - DNA, 25 bp, Artificial
  probe
  misc_feature (1)..(25): SEQ ID NO: 3498; WAN024BDI_x_at; Start 26; Stop 50
cgtcagttctatccacaacctcaaa

SEQ ID NO: 77846 - DNA, 25 bp, Artificial
  probe
  misc_feature (1)..(25): SEQ ID NO: 3498; WAN024BDI_x_at; Start 15; Stop 39
gttactgacttcgtcagttctatcc

SEQ ID NO: 77847 - DNA, 25 bp, Artificial
  probe
  misc_feature (1)..(25): SEQ ID NO: 3498; WAN024BDI_x_at; Start 27; Stop 51
gtcagttctatccacaacctcaaaa

SEQ ID NO: 77848 - DNA, 25 bp, Artificial
  probe
  misc_feature (1)..(25): SEQ ID NO: 4219; WAN024BDJ_at; Start 41; Stop 65
tgtctaagtcatggataataaagga

SEQ ID NO: 77849 - DNA, 25 bp, Artificial
  probe
  misc_feature (1)..(25): SEQ ID NO: 4219; WAN024BDJ_at; Start 122; Stop 146
aatcactcattttttctccctcagg

SEQ ID NO: 77850 - DNA, 25 bp, Artificial
  probe
  misc_feature (1)..(25): SEQ ID NO: 4219; WAN024BDJ_at; Start 9; Stop 33
gccagtcccattgacaccgattaaa

SEQ ID NO: 77851 - DNA, 25 bp, Artificial
  probe
  misc_feature (1)..(25): SEQ ID NO: 4219; WAN024BDJ_at; Start 83; Stop 107
tcttgtcaccaacggatttacttag

SEQ ID NO: 77852 - DNA, 25 bp, Artificial
  probe
  misc_feature (1)..(25): SEQ ID NO: 4219; WAN024BDJ_at; Start 219; Stop 243
tctcccaagtctgggcctggctgat

SEQ ID NO: 77853 - DNA, 25 bp, Artificial
  probe
  misc_feature (1)..(25): SEQ ID NO: 4219; WAN024BDJ_at; Start 30; Stop 54
taaaccaattctgtctaagtcatgg

SEQ ID NO: 77854 - DNA, 25 bp, Artificial
  probe
  misc_feature (1)..(25): SEQ ID NO: 4219; WAN024BDJ_at; Start 166; Stop 190
gattattctccaattctccatcgac

SEQ ID NO: 77855 - DNA, 25 bp, Artificial
  probe
  misc_feature (1)..(25): SEQ ID NO: 4219; WAN024BDJ_at; Start 158; Stop 182
ggcttcacgattattctccaattct

SEQ ID NO: 77856 - DNA, 25 bp, Artificial
  probe
  misc_feature (1)..(25): SEQ ID NO: 4219; WAN024BDJ_at; Start 174; Stop 198
tccaattctccatcgacaatggcaa

SEQ ID NO: 77857 - DNA, 25 bp, Artificial
  probe
  misc_feature (1)..(25): SEQ ID NO: 4219; WAN024BDJ_at; Start 19; Stop 43
ttgacaccgattaaaccaattctgt

SEQ ID NO: 77858 - DNA, 25 bp, Artificial
  probe
  misc_feature (1)..(25): SEQ ID NO: 4219; WAN024BDJ_at; Start 109; Stop 133
ttttcaacgataaaatcactcattt

SEQ ID NO: 77859 - DNA, 25 bp, Artificial
  probe
  misc_feature (1)..(25): SEQ ID NO: 4219; WAN024BDJ_at; Start 132; Stop 156
tttttctccctcaggtaagcatgga

SEQ ID NO: 77860 - DNA, 25 bp, Artificial
  probe
  misc_feature (1)..(25): SEQ ID NO: 4219; WAN024BDJ_at; Start 224; Stop 248
caagtctgggcctggctgatagcca

SEQ ID NO: 77861 - DNA, 25 bp, Artificial
  probe
  misc_feature (1)..(25): SEQ ID NO: 4219; WAN024BDJ_at; Start 34; Stop 58
ccaattctgtctaagtcatggataa

SEQ ID NO: 77862 - DNA, 25 bp, Artificial
  probe
  misc_feature (1)..(25): SEQ ID NO: 4219; WAN024BDJ_at; Start 180; Stop 204
tctccatcgacaatggcaaactcaa

SEQ ID NO: 77863 - DNA, 25 bp, Artificial
  probe
  misc_feature (1)..(25): SEQ ID NO: 4219; WAN024BDJ_at; Start 143; Stop 167
caggtaagcatggatggcttcacga

SEQ ID NO: 77864 - DNA, 25 bp, Artificial
  probe
  misc_feature (1)..(25): SEQ ID NO: 4219; WAN024BDJ_at; Start 154; Stop 178
ggatggcttcacgattattctccaa

SEQ ID NO: 77865 - DNA, 25 bp, Artificial
  probe
  misc_feature (1)..(25): SEQ ID NO: 4219; WAN024BDJ_at; Start 214; Stop 238
aaatctctcccaagtctgggcctgg

SEQ ID NO: 77866 - DNA, 25 bp, Artificial
  probe
  misc_feature (1)..(25): SEQ ID NO: 4219; WAN024BDJ_at; Start 80; Stop 104
cggtcttgtcaccaacggatttact

SEQ ID NO: 77867 - DNA, 25 bp, Artificial
  probe
  misc_feature (1)..(25): SEQ ID NO: 4219; WAN024BDJ_at; Start 186; Stop 210
tcgacaatggcaaactcaatctctg

SEQ ID NO: 77868 - DNA, 25 bp, Artificial
  probe
  misc_feature (1)..(25): SEQ ID NO: 4219; WAN024BDJ_at; Start 233; Stop 257
gcctggctgatagccatattccttg

SEQ ID NO: 77869 - DNA, 25 bp, Artificial
  probe
  misc_feature (1)..(25): SEQ ID NO: 4219; WAN024BDJ_at; Start 230; Stop 254
tgggcctggctgatagccatattcc

SEQ ID NO: 77870 - DNA, 25 bp, Artificial
  probe
  misc_feature (1)..(25): SEQ ID NO: 4219; WAN024BDJ_at; Start 212; Stop 236
taaaatctctcccaagtctgggcct

SEQ ID NO: 77871 - DNA, 25 bp, Artificial
  probe
  misc_feature (1)..(25): SEQ ID NO: 4219; WAN024BDJ_at; Start 190; Stop 214
caatggcaaactcaatctctgttaa

SEQ ID NO: 77872 - DNA, 25 bp, Artificial
  probe
  misc_feature (1)..(25): SEQ ID NO: 4219; WAN024BDJ_at; Start 151; Stop 175
catggatggcttcacgattattctc

SEQ ID NO: 77873 - DNA, 25 bp, Artificial
  probe
  misc_feature (1)..(25): SEQ ID NO: 4219; WAN024BDJ_at; Start 171; Stop 195
ttctccaattctccatcgacaatgg

SEQ ID NO: 77874 - DNA, 25 bp, Artificial
  probe
  misc_feature (1)..(25): SEQ ID NO: 4219; WAN024BDJ_at; Start 5; Stop 29
tcttgccagtcccattgacaccgat

SEQ ID NO: 77875 - DNA, 25 bp, Artificial
  probe
  misc_feature (1)..(25): SEQ ID NO: 4219; WAN024BDJ_at; Start 139; Stop 163
ccctcaggtaagcatggatggcttc

SEQ ID NO: 77876 - DNA, 25 bp, Artificial
  probe
  misc_feature (1)..(25): SEQ ID NO: 4219; WAN024BDJ_at; Start 194; Stop 218
ggcaaactcaatctctgttaaaatc

SEQ ID NO: 77877 - DNA, 25 bp, Artificial
  probe
  misc_feature (1)..(25): SEQ ID NO: 4219; WAN024BDJ_at; Start 125; Stop 149
cactcattttttctccctcaggtaa

SEQ ID NO: 77878 - DNA, 25 bp, Artificial
  probe
  misc_feature (1)..(25): SEQ ID NO: 4219; WAN024BDJ_at; Start 1; Stop 25
gtggtcttgccagtcccattgacac

SEQ ID NO: 77879 - DNA, 25 bp, Artificial
  probe
  misc_feature (1)..(25): SEQ ID NO: 4219; WAN024BDJ_at; Start 136; Stop 160
tctccctcaggtaagcatggatggc

SEQ ID NO: 77880 - DNA, 25 bp, Artificial
  probe
  misc_feature (1)..(25): SEQ ID NO: 4219; WAN024BDJ_at; Start 209; Stop 233
tgttaaaatctctcccaagtctggg

SEQ ID NO: 77881 - DNA, 25 bp, Artificial
  probe
  misc_feature (1)..(25): SEQ ID NO: 4219; WAN024BDJ_at; Start 13; Stop 37
gtcccattgacaccgattaaaccaa

SEQ ID NO: 77882 - DNA, 25 bp, Artificial
  probe
  misc_feature (1)..(25): SEQ ID NO: 773; WAN024BDK_at; Start 88; Stop 112
ggcttggatcgacaatacctaacaa

SEQ ID NO: 77883 - DNA, 25 bp, Artificial
  probe
  misc_feature (1)..(25): SEQ ID NO: 773; WAN024BDK_at; Start 110; Stop 134
caactgagtccatatattgggtgat

SEQ ID NO: 77884 - DNA, 25 bp, Artificial
  probe
  misc_feature (1)..(25): SEQ ID NO: 773; WAN024BDK_at; Start 152; Stop 176
gaaatattctagtagctgtgtttag

SEQ ID NO: 77885 - DNA, 25 bp, Artificial
  probe
  misc_feature (1)..(25): SEQ ID NO: 773; WAN024BDK_at; Start 68; Stop 92
tactattccatttaaaggatggctt

SEQ ID NO: 77886 - DNA, 25 bp, Artificial
  probe
  misc_feature (1)..(25): SEQ ID NO: 773; WAN024BDK_at; Start 85; Stop 109
gatggcttggatcgacaatacctaa

SEQ ID NO: 77887 - DNA, 25 bp, Artificial
  probe
  misc_feature (1)..(25): SEQ ID NO: 773; WAN024BDK_at; Start 93; Stop 117
ggatcgacaatacctaacaactgag

SEQ ID NO: 77888 - DNA, 25 bp, Artificial
  probe
  misc_feature (1)..(25): SEQ ID NO: 773; WAN024BDK_at; Start 122; Stop 146
tatattgggtgataggcacctttat

SEQ ID NO: 77889 - DNA, 25 bp, Artificial
  probe
  misc_feature (1)..(25): SEQ ID NO: 773; WAN024BDK_at; Start 76; Stop 100
catttaaaggatggcttggatcgac

SEQ ID NO: 77890 - DNA, 25 bp, Artificial
  probe
  misc_feature (1)..(25): SEQ ID NO: 773; WAN024BDK_at; Start 107; Stop 131
taacaactgagtccatatattgggt

SEQ ID NO: 77891 - DNA, 25 bp, Artificial
  probe
  misc_feature (1)..(25): SEQ ID NO: 773; WAN024BDK_at; Start 190; Stop 214
tgggataaaaagaaaaatggcagta

SEQ ID NO: 77892 - DNA, 25 bp, Artificial
  probe
  misc_feature (1)..(25): SEQ ID NO: 773; WAN024BDK_at; Start 170; Stop 194
tgtttagtaatatgaaaatttggga

SEQ ID NO: 77893 - DNA, 25 bp, Artificial
  probe
  misc_feature (1)..(25): SEQ ID NO: 773; WAN024BDK_at; Start 98; Stop 122
gacaatacctaacaactgagtccat

SEQ ID NO: 77894 - DNA, 25 bp, Artificial
  probe
  misc_feature (1)..(25): SEQ ID NO: 773; WAN024BDK_at; Start 84; Stop 108
ggatggcttggatcgacaataccta

SEQ ID NO: 77895 - DNA, 25 bp, Artificial
  probe
  misc_feature (1)..(25): SEQ ID NO: 773; WAN024BDK_at; Start 96; Stop 120
tcgacaatacctaacaactgagtcc

SEQ ID NO: 77896 - DNA, 25 bp, Artificial
  probe
  misc_feature (1)..(25): SEQ ID NO: 773; WAN024BDK_at; Start 54; Stop 78
taaccaaactgctatactattccat

SEQ ID NO: 77897 - DNA, 25 bp, Artificial
  probe
  misc_feature (1)..(25): SEQ ID NO: 773; WAN024BDK_at; Start 29; Stop 53
gtttctggccaacctttatgattgt

SEQ ID NO: 77898 - DNA, 25 bp, Artificial
  probe
  misc_feature (1)..(25): SEQ ID NO: 773; WAN024BDK_at; Start 33; Stop 57
ctggccaacctttatgattgttaac

SEQ ID NO: 77899 - DNA, 25 bp, Artificial
  probe
  misc_feature (1)..(25): SEQ ID NO: 773; WAN024BDK_at; Start 26; Stop 50
aaagtttctggccaacctttatgat

SEQ ID NO: 77900 - DNA, 25 bp, Artificial
  probe
  misc_feature (1)..(25): SEQ ID NO: 773; WAN024BDK_at; Start 48; Stop 72
gattgttaaccaaactgctatacta

SEQ ID NO: 77901 - DNA, 25 bp, Artificial
  probe
  misc_feature (1)..(25): SEQ ID NO: 773; WAN024BDK_at; Start 193; Stop 217
gataaaaagaaaaatggcagtaaga

SEQ ID NO: 77902 - DNA, 25 bp, Artificial
  probe
  misc_feature (1)..(25): SEQ ID NO: 773; WAN024BDK_at; Start 209; Stop 233
gcagtaagaaaaaatatatcctgaa

SEQ ID NO: 77903 - DNA, 25 bp, Artificial
  probe
  misc_feature (1)..(25): SEQ ID NO: 773; WAN024BDK_at; Start 36; Stop 60
gccaacctttatgattgttaaccaa

SEQ ID NO: 77904 - DNA, 25 bp, Artificial
  probe
  misc_feature (1)..(25): SEQ ID NO: 773; WAN024BDK_at; Start 41; Stop 65
cctttatgattgttaaccaaactgc

SEQ ID NO: 77905 - DNA, 25 bp, Artificial
  probe
  misc_feature (1)..(25): SEQ ID NO: 773; WAN024BDK_at; Start 146; Stop 170
tatttggaaatattctagtagctgt

SEQ ID NO: 77906 - DNA, 25 bp, Artificial
  probe
  misc_feature (1)..(25): SEQ ID NO: 773; WAN024BDK_at; Start 119; Stop 143
ccatatattgggtgataggcacctt

SEQ ID NO: 77907 - DNA, 25 bp, Artificial
  probe
  misc_feature (1)..(25): SEQ ID NO: 773; WAN024BDK_at; Start 52; Stop 76
gttaaccaaactgctatactattcc

SEQ ID NO: 77908 - DNA, 25 bp, Artificial
  probe
  misc_feature (1)..(25): SEQ ID NO: 773; WAN024BDK_at; Start 115; Stop 139
gagtccatatattgggtgataggca

SEQ ID NO: 77909 - DNA, 25 bp, Artificial
  probe
  misc_feature (1)..(25): SEQ ID NO: 773; WAN024BDK_at; Start 74; Stop 98
tccatttaaaggatggcttggatcg

SEQ ID NO: 77910 - DNA, 25 bp, Artificial
  probe
  misc_feature (1)..(25): SEQ ID NO: 773; WAN024BDK_at; Start 81; Stop 105
aaaggatggcttggatcgacaatac

SEQ ID NO: 77911 - DNA, 25 bp, Artificial
  probe
  misc_feature (1)..(25): SEQ ID NO: 773; WAN024BDK_at; Start 160; Stop 184
ctagtagctgtgtttagtaatatga

SEQ ID NO: 77912 - DNA, 25 bp, Artificial
  probe
  misc_feature (1)..(25): SEQ ID NO: 773; WAN024BDK_at; Start 207; Stop 231
tggcagtaagaaaaaatatatcctg

SEQ ID NO: 77913 - DNA, 25 bp, Artificial
  probe
  misc_feature (1)..(25): SEQ ID NO: 773; WAN024BDK_at; Start 129; Stop 153
ggtgataggcacctttatatttgga

SEQ ID NO: 77914 - DNA, 25 bp, Artificial
  probe
  misc_feature (1)..(25): SEQ ID NO: 773; WAN024BDK_at; Start 132; Stop 156
gataggcacctttatatttggaaat

SEQ ID NO: 77915 - DNA, 25 bp, Artificial
  probe
  misc_feature (1)..(25): SEQ ID NO: 773; WAN024BDK_at; Start 78; Stop 102
tttaaaggatggcttggatcgacaa

SEQ ID NO: 77916 - DNA, 25 bp, Artificial
  probe
  misc_feature (1)..(25): SEQ ID NO: 5350; WAN024BDL_x_at; Start 4; Stop 28
ccgtacgtatggttactgacttcgt

SEQ ID NO: 77917 - DNA, 25 bp, Artificial
  probe
  misc_feature (1)..(25): SEQ ID NO: 5350; WAN024BDL_x_at; Start 121; Stop 145
agtttactctttgattttcatctaa

SEQ ID NO: 77918 - DNA, 25 bp, Artificial
  probe
  misc_feature (1)..(25): SEQ ID NO: 5350; WAN024BDL_x_at; Start 3; Stop 27
gccgtacgtatggttactgacttcg

SEQ ID NO: 77919 - DNA, 25 bp, Artificial
  probe
  misc_feature (1)..(25): SEQ ID NO: 5350; WAN024BDL_x_at; Start 125; Stop 149
tactctttgattttcatctaactaa

SEQ ID NO: 77920 - DNA, 25 bp, Artificial
  probe
  misc_feature (1)..(25): SEQ ID NO: 5350; WAN024BDL_x_at; Start 111; Stop 135
acctacggctagtttactctttgat

SEQ ID NO: 77921 - DNA, 25 bp, Artificial
  probe
  misc_feature (1)..(25): SEQ ID NO: 5350; WAN024BDL_x_at; Start 123; Stop 147
tttactctttgattttcatctaact

SEQ ID NO: 77922 - DNA, 25 bp, Artificial
  probe
  misc_feature (1)..(25): SEQ ID NO: 5350; WAN024BDL_x_at; Start 42; Stop 66
aacctcaaaaccatgttttgagctg

SEQ ID NO: 77923 - DNA, 25 bp, Artificial
  probe
  misc_feature (1)..(25): SEQ ID NO: 5350; WAN024BDL_x_at; Start 122; Stop 146
gtttactctttgattttcatctaac

SEQ ID NO: 77924 - DNA, 25 bp, Artificial
  probe
  misc_feature (1)..(25): SEQ ID NO: 5350; WAN024BDL_x_at; Start 48; Stop 72
aaaaccatgttttgagctgacttcg

SEQ ID NO: 77925 - DNA, 25 bp, Artificial
  probe
  misc_feature (1)..(25): SEQ ID NO: 5350; WAN024BDL_x_at; Start 120; Stop 144
tagtttactctttgattttcatcta

SEQ ID NO: 77926 - DNA, 25 bp, Artificial
  probe
  misc_feature (1)..(25): SEQ ID NO: 5350; WAN024BDL_x_at; Start 126; Stop 150
actctttgattttcatctaactaat

SEQ ID NO: 77927 - DNA, 25 bp, Artificial
  probe
  misc_feature (1)..(25): SEQ ID NO: 5350; WAN024BDL_x_at; Start 112; Stop 136
cctacggctagtttactctttgatt

SEQ ID NO: 77928 - DNA, 25 bp, Artificial
  probe
  misc_feature (1)..(25): SEQ ID NO: 5350; WAN024BDL_x_at; Start 51; Stop 75
accatgttttgagctgacttcgtca

SEQ ID NO: 77929 - DNA, 25 bp, Artificial
  probe
  misc_feature (1)..(25): SEQ ID NO: 5350; WAN024BDL_x_at; Start 54; Stop 78
atgttttgagctgacttcgtcagtt

SEQ ID NO: 77930 - DNA, 25 bp, Artificial
  probe
  misc_feature (1)..(25): SEQ ID NO: 5350; WAN024BDL_x_at; Start 52; Stop 76
ccatgttttgagctgacttcgtcag

SEQ ID NO: 77931 - DNA, 25 bp, Artificial
  probe
  misc_feature (1)..(25): SEQ ID NO: 5350; WAN024BDL_x_at; Start 113; Stop 137
ctacggctagtttactctttgattt

SEQ ID NO: 77932 - DNA, 25 bp, Artificial
  probe
  misc_feature (1)..(25): SEQ ID NO: 5350; WAN024BDL_x_at; Start 53; Stop 77
catgttttgagctgacttcgtcagt

SEQ ID NO: 77933 - DNA, 25 bp, Artificial
  probe
  misc_feature (1)..(25): SEQ ID NO: 5350; WAN024BDL_x_at; Start 78; Stop 102
tttatctgcaacctcaaagctgtac

SEQ ID NO: 77934 - DNA, 25 bp, Artificial
  probe
  misc_feature (1)..(25): SEQ ID NO: 5350; WAN024BDL_x_at; Start 50; Stop 74
aaccatgttttgagctgacttcgtc

SEQ ID NO: 77935 - DNA, 25 bp, Artificial
  probe
  misc_feature (1)..(25): SEQ ID NO: 5350; WAN024BDL_x_at; Start 79; Stop 103
ttatctgcaacctcaaagctgtact

SEQ ID NO: 77936 - DNA, 25 bp, Artificial
  probe
  misc_feature (1)..(25): SEQ ID NO: 5350; WAN024BDL_x_at; Start 124; Stop 148
ttactctttgattttcatctaacta

SEQ ID NO: 77937 - DNA, 25 bp, Artificial
  probe
  misc_feature (1)..(25): SEQ ID NO: 5350; WAN024BDL_x_at; Start 109; Stop 133
caacctacggctagtttactctttg

SEQ ID NO: 77938 - DNA, 25 bp, Artificial
  probe
  misc_feature (1)..(25): SEQ ID NO: 5350; WAN024BDL_x_at; Start 119; Stop 143
ctagtttactctttgattttcatct

SEQ ID NO: 77939 - DNA, 25 bp, Artificial
  probe
  misc_feature (1)..(25): SEQ ID NO: 5350; WAN024BDL_x_at; Start 94; Stop 118
aagctgtactttgagcaacctacgg

SEQ ID NO: 77940 - DNA, 25 bp, Artificial
  probe
  misc_feature (1)..(25): SEQ ID NO: 5350; WAN024BDL_x_at; Start 77; Stop 101
ttttatctgcaacctcaaagctgta

SEQ ID NO: 77941 - DNA, 25 bp, Artificial
  probe
  misc_feature (1)..(25): SEQ ID NO: 5350; WAN024BDL_x_at; Start 116; Stop 140
cggctagtttactctttgattttca

SEQ ID NO: 77942 - DNA, 25 bp, Artificial
  probe
  misc_feature (1)..(25): SEQ ID NO: 5350; WAN024BDL_x_at; Start 117; Stop 141
ggctagtttactctttgattttcat

SEQ ID NO: 77943 - DNA, 25 bp, Artificial
  probe
  misc_feature (1)..(25): SEQ ID NO: 5350; WAN024BDL_x_at; Start 5; Stop 29
cgtacgtatggttactgacttcgtc

SEQ ID NO: 77944 - DNA, 25 bp, Artificial
  probe
  misc_feature (1)..(25): SEQ ID NO: 5350; WAN024BDL_x_at; Start 46; Stop 70
tcaaaaccatgttttgagctgactt

SEQ ID NO: 77945 - DNA, 25 bp, Artificial
  probe
  misc_feature (1)..(25): SEQ ID NO: 5350; WAN024BDL_x_at; Start 118; Stop 142
gctagtttactctttgattttcatc

SEQ ID NO: 77946 - DNA, 25 bp, Artificial
  probe
  misc_feature (1)..(25): SEQ ID NO: 5350; WAN024BDL_x_at; Start 2; Stop 26
tgccgtacgtatggttactgacttc

SEQ ID NO: 77947 - DNA, 25 bp, Artificial
  probe
  misc_feature (1)..(25): SEQ ID NO: 5350; WAN024BDL_x_at; Start 47; Stop 71
caaaaccatgttttgagctgacttc

SEQ ID NO: 77948 - DNA, 25 bp, Artificial
  probe
  misc_feature (1)..(25): SEQ ID NO: 5350; WAN024BDL_x_at; Start 43; Stop 67
acctcaaaaccatgttttgagctga

SEQ ID NO: 77949 - DNA, 25 bp, Artificial
  probe
  misc_feature (1)..(25): SEQ ID NO: 5350; WAN024BDL_x_at; Start 49; Stop 73
aaaccatgttttgagctgacttcgt

SEQ ID NO: 77950 - DNA, 25 bp, Artificial
  probe
  misc_feature (1)..(25): SEQ ID NO: 2026; WAN024BDM_at; Start 15; Stop 39
ggaaaaatcttctaatactcttcga

SEQ ID NO: 77951 - DNA, 25 bp, Artificial
  probe
  misc_feature (1)..(25): SEQ ID NO: 2026; WAN024BDM_at; Start 131; Stop 155
aggttgtggatagcttcctagtttg

SEQ ID NO: 77952 - DNA, 25 bp, Artificial
  probe
  misc_feature (1)..(25): SEQ ID NO: 2026; WAN024BDM_at; Start 129; Stop 153
tgaggttgtggatagcttcctagtt

SEQ ID NO: 77953 - DNA, 25 bp, Artificial
  probe
  misc_feature (1)..(25): SEQ ID NO: 2026; WAN024BDM_at; Start 3; Stop 27
gccttttatgatggaaaaatcttct

SEQ ID NO: 77954 - DNA, 25 bp, Artificial
  probe
  misc_feature (1)..(25): SEQ ID NO: 2026; WAN024BDM_at; Start 4; Stop 28
ccttttatgatggaaaaatcttcta

SEQ ID NO: 77955 - DNA, 25 bp, Artificial
  probe
  misc_feature (1)..(25): SEQ ID NO: 2026; WAN024BDM_at; Start 14; Stop 38
tggaaaaatcttctaatactcttcg

SEQ ID NO: 77956 - DNA, 25 bp, Artificial
  probe
  misc_feature (1)..(25): SEQ ID NO: 2026; WAN024BDM_at; Start 8; Stop 32
ttatgatggaaaaatcttctaatac

SEQ ID NO: 77957 - DNA, 25 bp, Artificial
  probe
  misc_feature (1)..(25): SEQ ID NO: 2026; WAN024BDM_at; Start 130; Stop 154
gaggttgtggatagcttcctagttt

SEQ ID NO: 77958 - DNA, 25 bp, Artificial
  probe
  misc_feature (1)..(25): SEQ ID NO: 2026; WAN024BDM_at; Start 10; Stop 34
atgatggaaaaatcttctaatactc

SEQ ID NO: 77959 - DNA, 25 bp, Artificial
  probe
  misc_feature (1)..(25): SEQ ID NO: 2026; WAN024BDM_at; Start 9; Stop 33
tatgatggaaaaatcttctaatact

SEQ ID NO: 77960 - DNA, 25 bp, Artificial
  probe
  misc_feature (1)..(25): SEQ ID NO: 2026; WAN024BDM_at; Start 5; Stop 29
cttttatgatggaaaaatcttctaa

SEQ ID NO: 77961 - DNA, 25 bp, Artificial
  probe
  misc_feature (1)..(25): SEQ ID NO: 2026; WAN024BDM_at; Start 7; Stop 31
tttatgatggaaaaatcttctaata

SEQ ID NO: 77962 - DNA, 25 bp, Artificial
  probe
  misc_feature (1)..(25): SEQ ID NO: 2026; WAN024BDM_at; Start 12; Stop 36
gatggaaaaatcttctaatactctt

SEQ ID NO: 77963 - DNA, 25 bp, Artificial
  probe
  misc_feature (1)..(25): SEQ ID NO: 2026; WAN024BDM_at; Start 2; Stop 26
tgccttttatgatggaaaaatcttc

SEQ ID NO: 77964 - DNA, 25 bp, Artificial
  probe
  misc_feature (1)..(25): SEQ ID NO: 2026; WAN024BDM_at; Start 11; Stop 35
tgatggaaaaatcttctaatactct

SEQ ID NO: 77965 - DNA, 25 bp, Artificial
  probe
  misc_feature (1)..(25): SEQ ID NO: 2026; WAN024BDM_at; Start 13; Stop 37
atggaaaaatcttctaatactcttc

SEQ ID NO: 77966 - DNA, 25 bp, Artificial
  probe
  misc_feature (1)..(25): SEQ ID NO: 2026; WAN024BDM_at; Start 6; Stop 30
ttttatgatggaaaaatcttctaat

SEQ ID NO: 77967 - DNA, 25 bp, Artificial
  probe
  misc_feature (1)..(25): SEQ ID NO: 2026; WAN024BDM_at; Start 1; Stop 25
atgccttttatgatggaaaaatctt

SEQ ID NO: 77968 - DNA, 25 bp, Artificial
  probe
  misc_feature (1)..(25): SEQ ID NO: 5807; WAN024BDN_at; Start 11; Stop 35
gattcaaaagtaaaatcagtctcca

SEQ ID NO: 77969 - DNA, 25 bp, Artificial
  probe
  misc_feature (1)..(25): SEQ ID NO: 5807; WAN024BDN_at; Start 92; Stop 116
taagcttgactctcaatcatggaag

SEQ ID NO: 77970 - DNA, 25 bp, Artificial
  probe
  misc_feature (1)..(25): SEQ ID NO: 5807; WAN024BDN_at; Start 77; Stop 101
tcagggagatagtcataagcttgac

SEQ ID NO: 77971 - DNA, 25 bp, Artificial
  probe
  misc_feature (1)..(25): SEQ ID NO: 5807; WAN024BDN_at; Start 63; Stop 87
ggctagatgccatatcagggagata

SEQ ID NO: 77972 - DNA, 25 bp, Artificial
  probe
  misc_feature (1)..(25): SEQ ID NO: 5807; WAN024BDN_at; Start 98; Stop 122
tgactctcaatcatggaagccaagc

SEQ ID NO: 77973 - DNA, 25 bp, Artificial
  probe
  misc_feature (1)..(25): SEQ ID NO: 5807; WAN024BDN_at; Start 180; Stop 204
cagaaattttctccaaaagcggcgt

SEQ ID NO: 77974 - DNA, 25 bp, Artificial
  probe
  misc_feature (1)..(25): SEQ ID NO: 5807; WAN024BDN_at; Start 254; Stop 278
ctagcctgaaaacggaaaccacgca

SEQ ID NO: 77975 - DNA, 25 bp, Artificial
  probe
  misc_feature (1)..(25): SEQ ID NO: 5807; WAN024BDN_at; Start 151; Stop 175
tttatcaaactcgacgaaggtacgc

SEQ ID NO: 77976 - DNA, 25 bp, Artificial
  probe
  misc_feature (1)..(25): SEQ ID NO: 5807; WAN024BDN_at; Start 195; Stop 219
aaagcggcgtcaaggtcttcatagc

SEQ ID NO: 77977 - DNA, 25 bp, Artificial
  probe
  misc_feature (1)..(25): SEQ ID NO: 5807; WAN024BDN_at; Start 228; Stop 252
tttctggctcaagtgcaaaaccaag

SEQ ID NO: 77978 - DNA, 25 bp, Artificial
  probe
  misc_feature (1)..(25): SEQ ID NO: 5807; WAN024BDN_at; Start 237; Stop 261
caagtgcaaaaccaagactagcctg

SEQ ID NO: 77979 - DNA, 25 bp, Artificial
  probe
  misc_feature (1)..(25): SEQ ID NO: 5807; WAN024BDN_at; Start 233; Stop 257
ggctcaagtgcaaaaccaagactag

SEQ ID NO: 77980 - DNA, 25 bp, Artificial
  probe
  misc_feature (1)..(25): SEQ ID NO: 5807; WAN024BDN_at; Start 260; Stop 284
tgaaaacggaaaccacgcataatcc

SEQ ID NO: 77981 - DNA, 25 bp, Artificial
  probe
  misc_feature (1)..(25): SEQ ID NO: 5807; WAN024BDN_at; Start 2; Stop 26
tgttcagaggattcaaaagtaaaat

SEQ ID NO: 77982 - DNA, 25 bp, Artificial
  probe
  misc_feature (1)..(25): SEQ ID NO: 5807; WAN024BDN_at; Start 72; Stop 96
ccatatcagggagatagtcataagc

SEQ ID NO: 77983 - DNA, 25 bp, Artificial
  probe
  misc_feature (1)..(25): SEQ ID NO: 5807; WAN024BDN_at; Start 200; Stop 224
ggcgtcaaggtcttcatagctttaa

SEQ ID NO: 77984 - DNA, 25 bp, Artificial
  probe
  misc_feature (1)..(25): SEQ ID NO: 5807; WAN024BDN_at; Start 50; Stop 74
ttgagcttgtcctggctagatgcca

SEQ ID NO: 77985 - DNA, 25 bp, Artificial
  probe
  misc_feature (1)..(25): SEQ ID NO: 5807; WAN024BDN_at; Start 166; Stop 190
gaaggtacgctctacagaaattttc

SEQ ID NO: 77986 - DNA, 25 bp, Artificial
  probe
  misc_feature (1)..(25): SEQ ID NO: 5807; WAN024BDN_at; Start 191; Stop 215
tccaaaagcggcgtcaaggtcttca

SEQ ID NO: 77987 - DNA, 25 bp, Artificial
  probe
  misc_feature (1)..(25): SEQ ID NO: 5807; WAN024BDN_at; Start 156; Stop 180
caaactcgacgaaggtacgctctac

SEQ ID NO: 77988 - DNA, 25 bp, Artificial
  probe
  misc_feature (1)..(25): SEQ ID NO: 5807; WAN024BDN_at; Start 214; Stop 238
catagctttaaatgtttctggctca

SEQ ID NO: 77989 - DNA, 25 bp, Artificial
  probe
  misc_feature (1)..(25): SEQ ID NO: 5807; WAN024BDN_at; Start 39; Stop 63
caaacagtctgttgagcttgtcctg

SEQ ID NO: 77990 - DNA, 25 bp, Artificial
  probe
  misc_feature (1)..(25): SEQ ID NO: 5807; WAN024BDN_at; Start 21; Stop 45
taaaatcagtctccaaatcaaacag

SEQ ID NO: 77991 - DNA, 25 bp, Artificial
  probe
  misc_feature (1)..(25): SEQ ID NO: 5807; WAN024BDN_at; Start 136; Stop 160
tggagccagcaagagtttatcaaac

SEQ ID NO: 77992 - DNA, 25 bp, Artificial
  probe
  misc_feature (1)..(25): SEQ ID NO: 5807; WAN024BDN_at; Start 28; Stop 52
agtctccaaatcaaacagtctgttg

SEQ ID NO: 77993 - DNA, 25 bp, Artificial
  probe
  misc_feature (1)..(25): SEQ ID NO: 5807; WAN024BDN_at; Start 57; Stop 81
tgtcctggctagatgccatatcagg

SEQ ID NO: 77994 - DNA, 25 bp, Artificial
  probe
  misc_feature (1)..(25): SEQ ID NO: 5807; WAN024BDN_at; Start 102; Stop 126
tctcaatcatggaagccaagcccct

SEQ ID NO: 77995 - DNA, 25 bp, Artificial
  probe
  misc_feature (1)..(25): SEQ ID NO: 5807; WAN024BDN_at; Start 243; Stop 267
caaaaccaagactagcctgaaaacg

SEQ ID NO: 77996 - DNA, 25 bp, Artificial
  probe
  misc_feature (1)..(25): SEQ ID NO: 5807; WAN024BDN_at; Start 185; Stop 209
attttctccaaaagcggcgtcaagg

SEQ ID NO: 77997 - DNA, 25 bp, Artificial
  probe
  misc_feature (1)..(25): SEQ ID NO: 5807; WAN024BDN_at; Start 43; Stop 67
cagtctgttgagcttgtcctggcta

SEQ ID NO: 77998 - DNA, 25 bp, Artificial
  probe
  misc_feature (1)..(25): SEQ ID NO: 5807; WAN024BDN_at; Start 221; Stop 245
ttaaatgtttctggctcaagtgcaa

SEQ ID NO: 77999 - DNA, 25 bp, Artificial
  probe
  misc_feature (1)..(25): SEQ ID NO: 5807; WAN024BDN_at; Start 116; Stop 140
gccaagccccttctccaaaatggag

SEQ ID NO: 78000 - DNA, 25 bp, Artificial
  probe
  misc_feature (1)..(25): SEQ ID NO: 5807; WAN024BDN_at; Start 127; Stop 151
tctccaaaatggagccagcaagagt

SEQ ID NO: 78001 - DNA, 25 bp, Artificial
  probe
  misc_feature (1)..(25): SEQ ID NO: 5807; WAN024BDN_at; Start 161; Stop 185
tcgacgaaggtacgctctacagaaa

SEQ ID NO: 78002 - DNA, 25 bp, Artificial
  probe
  misc_feature (1)..(25): SEQ ID NO: 3490; WAN024BDP_at; Start 184; Stop 208
gagtacaaagagcttggcaacaggc

SEQ ID NO: 78003 - DNA, 25 bp, Artificial
  probe
  misc_feature (1)..(25): SEQ ID NO: 3490; WAN024BDP_at; Start 178; Stop 202
ttcattgagtacaaagagcttggca

SEQ ID NO: 78004 - DNA, 25 bp, Artificial
  probe
  misc_feature (1)..(25): SEQ ID NO: 3490; WAN024BDP_at; Start 33; Stop 57
gccttgccgtatatttgagctgact

SEQ ID NO: 78005 - DNA, 25 bp, Artificial
  probe
  misc_feature (1)..(25): SEQ ID NO: 3490; WAN024BDP_at; Start 193; Stop 217
gagcttggcaacaggctctttttgt

SEQ ID NO: 78006 - DNA, 25 bp, Artificial
  probe
  misc_feature (1)..(25): SEQ ID NO: 3490; WAN024BDP_at; Start 195; Stop 219
gcttggcaacaggctctttttgtat

SEQ ID NO: 78007 - DNA, 25 bp, Artificial
  probe
  misc_feature (1)..(25): SEQ ID NO: 3490; WAN024BDP_at; Start 191; Stop 215
aagagcttggcaacaggctcttttt

SEQ ID NO: 78008 - DNA, 25 bp, Artificial
  probe
  misc_feature (1)..(25): SEQ ID NO: 3490; WAN024BDP_at; Start 181; Stop 205
attgagtacaaagagcttggcaaca

SEQ ID NO: 78009 - DNA, 25 bp, Artificial
  probe
  misc_feature (1)..(25): SEQ ID NO: 3490; WAN024BDP_at; Start 187; Stop 211
tacaaagagcttggcaacaggctct

SEQ ID NO: 78010 - DNA, 25 bp, Artificial
  probe
  misc_feature (1)..(25): SEQ ID NO: 3490; WAN024BDP_at; Start 179; Stop 203
tcattgagtacaaagagcttggcaa

SEQ ID NO: 78011 - DNA, 25 bp, Artificial
  probe
  misc_feature (1)..(25): SEQ ID NO: 3490; WAN024BDP_at; Start 204; Stop 228
caggctctttttgtattgcgtttat

SEQ ID NO: 78012 - DNA, 25 bp, Artificial
  probe
  misc_feature (1)..(25): SEQ ID NO: 3490; WAN024BDP_at; Start 196; Stop 220
cttggcaacaggctctttttgtatt

SEQ ID NO: 78013 - DNA, 25 bp, Artificial
  probe
  misc_feature (1)..(25): SEQ ID NO: 3490; WAN024BDP_at; Start 186; Stop 210
gtacaaagagcttggcaacaggctc

SEQ ID NO: 78014 - DNA, 25 bp, Artificial
  probe
  misc_feature (1)..(25): SEQ ID NO: 3490; WAN024BDP_at; Start 185; Stop 209
agtacaaagagcttggcaacaggct

SEQ ID NO: 78015 - DNA, 25 bp, Artificial
  probe
  misc_feature (1)..(25): SEQ ID NO: 3490; WAN024BDP_at; Start 197; Stop 221
ttggcaacaggctctttttgtattg

SEQ ID NO: 78016 - DNA, 25 bp, Artificial
  probe
  misc_feature (1)..(25): SEQ ID NO: 3490; WAN024BDP_at; Start 192; Stop 216
agagcttggcaacaggctctttttg

SEQ ID NO: 78017 - DNA, 25 bp, Artificial
  probe
  misc_feature (1)..(25): SEQ ID NO: 3490; WAN024BDP_at; Start 183; Stop 207
tgagtacaaagagcttggcaacagg

SEQ ID NO: 78018 - DNA, 25 bp, Artificial
  probe
  misc_feature (1)..(25): SEQ ID NO: 3490; WAN024BDP_at; Start 200; Stop 224
gcaacaggctctttttgtattgcgt

SEQ ID NO: 78019 - DNA, 25 bp, Artificial
  probe
  misc_feature (1)..(25): SEQ ID NO: 3490; WAN024BDP_at; Start 180; Stop 204
cattgagtacaaagagcttggcaac

SEQ ID NO: 78020 - DNA, 25 bp, Artificial
  probe
  misc_feature (1)..(25): SEQ ID NO: 3490; WAN024BDP_at; Start 194; Stop 218
agcttggcaacaggctctttttgta

SEQ ID NO: 78021 - DNA, 25 bp, Artificial
  probe
  misc_feature (1)..(25): SEQ ID NO: 3490; WAN024BDP_at; Start 176; Stop 200
ttttcattgagtacaaagagcttgg

SEQ ID NO: 78022 - DNA, 25 bp, Artificial
  probe
  misc_feature (1)..(25): SEQ ID NO: 3490; WAN024BDP_at; Start 177; Stop 201
tttcattgagtacaaagagcttggc

SEQ ID NO: 78023 - DNA, 25 bp, Artificial
  probe
  misc_feature (1)..(25): SEQ ID NO: 3490; WAN024BDP_at; Start 202; Stop 226
aacaggctctttttgtattgcgttt

SEQ ID NO: 78024 - DNA, 25 bp, Artificial
  probe
  misc_feature (1)..(25): SEQ ID NO: 3490; WAN024BDP_at; Start 190; Stop 214
aaagagcttggcaacaggctctttt

SEQ ID NO: 78025 - DNA, 25 bp, Artificial
  probe
  misc_feature (1)..(25): SEQ ID NO: 3490; WAN024BDP_at; Start 198; Stop 222
tggcaacaggctctttttgtattgc

SEQ ID NO: 78026 - DNA, 25 bp, Artificial
  probe
  misc_feature (1)..(25): SEQ ID NO: 3490; WAN024BDP_at; Start 36; Stop 60
ttgccgtatatttgagctgacttcg

SEQ ID NO: 78027 - DNA, 25 bp, Artificial
  probe
  misc_feature (1)..(25): SEQ ID NO: 3490; WAN024BDP_at; Start 199; Stop 223
ggcaacaggctctttttgtattgcg

SEQ ID NO: 78028 - DNA, 25 bp, Artificial
  probe
  misc_feature (1)..(25): SEQ ID NO: 3490; WAN024BDP_at; Start 203; Stop 227
acaggctctttttgtattgcgttta

SEQ ID NO: 78029 - DNA, 25 bp, Artificial
  probe
  misc_feature (1)..(25): SEQ ID NO: 3490; WAN024BDP_at; Start 34; Stop 58
ccttgccgtatatttgagctgactt

SEQ ID NO: 78030 - DNA, 25 bp, Artificial
  probe
  misc_feature (1)..(25): SEQ ID NO: 3490; WAN024BDP_at; Start 189; Stop 213
caaagagcttggcaacaggctcttt

SEQ ID NO: 78031 - DNA, 25 bp, Artificial
  probe
  misc_feature (1)..(25): SEQ ID NO: 3490; WAN024BDP_at; Start 182; Stop 206
ttgagtacaaagagcttggcaacag

SEQ ID NO: 78032 - DNA, 25 bp, Artificial
  probe
  misc_feature (1)..(25): SEQ ID NO: 3490; WAN024BDP_at; Start 32; Stop 56
cgccttgccgtatatttgagctgac

SEQ ID NO: 78033 - DNA, 25 bp, Artificial
  probe
  misc_feature (1)..(25): SEQ ID NO: 3490; WAN024BDP_at; Start 188; Stop 212
acaaagagcttggcaacaggctctt

SEQ ID NO: 78034 - DNA, 25 bp, Artificial
  probe
  misc_feature (1)..(25): SEQ ID NO: 3490; WAN024BDP_at; Start 201; Stop 225
caacaggctctttttgtattgcgtt

SEQ ID NO: 78035 - DNA, 25 bp, Artificial
  probe
  misc_feature (1)..(25): SEQ ID NO: 3490; WAN024BDP_at; Start 175; Stop 199
attttcattgagtacaaagagcttg

SEQ ID NO: 78036 - DNA, 25 bp, Artificial
  probe
  misc_feature (1)..(25): SEQ ID NO: 751; WAN024BDQ_x_at; Start 93; Stop 117
acatggttttgaggttgtagatgaa

SEQ ID NO: 78037 - DNA, 25 bp, Artificial
  probe
  misc_feature (1)..(25): SEQ ID NO: 751; WAN024BDQ_x_at; Start 106; Stop 130
gttgtagatgaaactgacgaagtca

SEQ ID NO: 78038 - DNA, 25 bp, Artificial
  probe
  misc_feature (1)..(25): SEQ ID NO: 751; WAN024BDQ_x_at; Start 133; Stop 157
aaccatacctacggcaaggcgacgt

SEQ ID NO: 78039 - DNA, 25 bp, Artificial
  probe
  misc_feature (1)..(25): SEQ ID NO: 751; WAN024BDQ_x_at; Start 30; Stop 54
agctgcaggctgctcaaaacactgt

SEQ ID NO: 78040 - DNA, 25 bp, Artificial
  probe
  misc_feature (1)..(25): SEQ ID NO: 751; WAN024BDQ_x_at; Start 98; Stop 122
gttttgaggttgtagatgaaactga

SEQ ID NO: 78041 - DNA, 25 bp, Artificial
  probe
  misc_feature (1)..(25): SEQ ID NO: 751; WAN024BDQ_x_at; Start 96; Stop 120
tggttttgaggttgtagatgaaact

SEQ ID NO: 78042 - DNA, 25 bp, Artificial
  probe
  misc_feature (1)..(25): SEQ ID NO: 751; WAN024BDQ_x_at; Start 74; Stop 98
ctgacgaagtcagctcaaaacatgg

SEQ ID NO: 78043 - DNA, 25 bp, Artificial
  probe
  misc_feature (1)..(25): SEQ ID NO: 751; WAN024BDQ_x_at; Start 32; Stop 56
ctgcaggctgctcaaaacactgttt

SEQ ID NO: 78044 - DNA, 25 bp, Artificial
  probe
  misc_feature (1)..(25): SEQ ID NO: 751; WAN024BDQ_x_at; Start 25; Stop 49
aaactagctgcaggctgctcaaaac

SEQ ID NO: 78045 - DNA, 25 bp, Artificial
  probe
  misc_feature (1)..(25): SEQ ID NO: 751; WAN024BDQ_x_at; Start 89; Stop 113
caaaacatggttttgaggttgtaga

SEQ ID NO: 78046 - DNA, 25 bp, Artificial
  probe
  misc_feature (1)..(25): SEQ ID NO: 751; WAN024BDQ_x_at; Start 134; Stop 158
accatacctacggcaaggcgacgtt

SEQ ID NO: 78047 - DNA, 25 bp, Artificial
  probe
  misc_feature (1)..(25): SEQ ID NO: 751; WAN024BDQ_x_at; Start 99; Stop 123
ttttgaggttgtagatgaaactgac

SEQ ID NO: 78048 - DNA, 25 bp, Artificial
  probe
  misc_feature (1)..(25): SEQ ID NO: 751; WAN024BDQ_x_at; Start 107; Stop 131
ttgtagatgaaactgacgaagtcag

SEQ ID NO: 78049 - DNA, 25 bp, Artificial
  probe
  misc_feature (1)..(25): SEQ ID NO: 751; WAN024BDQ_x_at; Start 156; Stop 180
gttgacgcggattgaagagattttc

SEQ ID NO: 78050 - DNA, 25 bp, Artificial
  probe
  misc_feature (1)..(25): SEQ ID NO: 751; WAN024BDQ_x_at; Start 95; Stop 119
atggttttgaggttgtagatgaaac

SEQ ID NO: 78051 - DNA, 25 bp, Artificial
  probe
  misc_feature (1)..(25): SEQ ID NO: 751; WAN024BDQ_x_at; Start 132; Stop 156
taaccatacctacggcaaggcgacg

SEQ ID NO: 78052 - DNA, 25 bp, Artificial
  probe
  misc_feature (1)..(25): SEQ ID NO: 751; WAN024BDQ_x_at; Start 154; Stop 178
acgttgacgcggattgaagagattt

SEQ ID NO: 78053 - DNA, 25 bp, Artificial
  probe
  misc_feature (1)..(25): SEQ ID NO: 751; WAN024BDQ_x_at; Start 90; Stop 114
aaaacatggttttgaggttgtagat

SEQ ID NO: 78054 - DNA, 25 bp, Artificial
  probe
  misc_feature (1)..(25): SEQ ID NO: 751; WAN024BDQ_x_at; Start 137; Stop 161
atacctacggcaaggcgacgttgac

SEQ ID NO: 78055 - DNA, 25 bp, Artificial
  probe
  misc_feature (1)..(25): SEQ ID NO: 751; WAN024BDQ_x_at; Start 138; Stop 162
tacctacggcaaggcgacgttgacg

SEQ ID NO: 78056 - DNA, 25 bp, Artificial
  probe
  misc_feature (1)..(25): SEQ ID NO: 751; WAN024BDQ_x_at; Start 9; Stop 33
caaagagcaaactaggaaactagct

SEQ ID NO: 78057 - DNA, 25 bp, Artificial
  probe
  misc_feature (1)..(25): SEQ ID NO: 751; WAN024BDQ_x_at; Start 27; Stop 51
actagctgcaggctgctcaaaacac

SEQ ID NO: 78058 - DNA, 25 bp, Artificial
  probe
  misc_feature (1)..(25): SEQ ID NO: 751; WAN024BDQ_x_at; Start 2; Stop 26
tgaaaatcaaagagcaaactaggaa

SEQ ID NO: 78059 - DNA, 25 bp, Artificial
  probe
  misc_feature (1)..(25): SEQ ID NO: 751; WAN024BDQ_x_at; Start 97; Stop 121
ggttttgaggttgtagatgaaactg

SEQ ID NO: 78060 - DNA, 25 bp, Artificial
  probe
  misc_feature (1)..(25): SEQ ID NO: 751; WAN024BDQ_x_at; Start 94; Stop 118
catggttttgaggttgtagatgaaa

SEQ ID NO: 78061 - DNA, 25 bp, Artificial
  probe
  misc_feature (1)..(25): SEQ ID NO: 751; WAN024BDQ_x_at; Start 92; Stop 116
aacatggttttgaggttgtagatga

SEQ ID NO: 78062 - DNA, 25 bp, Artificial
  probe
  misc_feature (1)..(25): SEQ ID NO: 751; WAN024BDQ_x_at; Start 31; Stop 55
gctgcaggctgctcaaaacactgtt

SEQ ID NO: 78063 - DNA, 25 bp, Artificial
  probe
  misc_feature (1)..(25): SEQ ID NO: 751; WAN024BDQ_x_at; Start 153; Stop 177
gacgttgacgcggattgaagagatt

SEQ ID NO: 78064 - DNA, 25 bp, Artificial
  probe
  misc_feature (1)..(25): SEQ ID NO: 751; WAN024BDQ_x_at; Start 135; Stop 159
ccatacctacggcaaggcgacgttg

SEQ ID NO: 78065 - DNA, 25 bp, Artificial
  probe
  misc_feature (1)..(25): SEQ ID NO: 751; WAN024BDQ_x_at; Start 157; Stop 181
ttgacgcggattgaagagattttcg

SEQ ID NO: 78066 - DNA, 25 bp, Artificial
  probe
  misc_feature (1)..(25): SEQ ID NO: 751; WAN024BDQ_x_at; Start 136; Stop 160
catacctacggcaaggcgacgttga

SEQ ID NO: 78067 - DNA, 25 bp, Artificial
  probe
  misc_feature (1)..(25): SEQ ID NO: 751; WAN024BDQ_x_at; Start 1; Stop 25
atgaaaatcaaagagcaaactagga

SEQ ID NO: 78068 - DNA, 25 bp, Artificial
  probe
  misc_feature (1)..(25): SEQ ID NO: 751; WAN024BDQ_x_at; Start 24; Stop 48
gaaactagctgcaggctgctcaaaa

SEQ ID NO: 78069 - DNA, 25 bp, Artificial
  probe
  misc_feature (1)..(25): SEQ ID NO: 751; WAN024BDQ_x_at; Start 91; Stop 115
aaacatggttttgaggttgtagatg

SEQ ID NO: 78070 - DNA, 25 bp, Artificial
  probe
  misc_feature (1)..(25): SEQ ID NO: 1876; WAN024BDR_at; Start 153; Stop 177
gactacactagcagatgcaaaagca

SEQ ID NO: 78071 - DNA, 25 bp, Artificial
  probe
  misc_feature (1)..(25): SEQ ID NO: 1876; WAN024BDR_at; Start 50; Stop 74
caccgatttggtacattttgataac

SEQ ID NO: 78072 - DNA, 25 bp, Artificial
  probe
  misc_feature (1)..(25): SEQ ID NO: 1876; WAN024BDR_at; Start 9; Stop 33
gttggcatttgctaacaattcatcc

SEQ ID NO: 78073 - DNA, 25 bp, Artificial
  probe
  misc_feature (1)..(25): SEQ ID NO: 1876; WAN024BDR_at; Start 135; Stop 159
aagacctgcagccagagcgactaca

SEQ ID NO: 78074 - DNA, 25 bp, Artificial
  probe
  misc_feature (1)..(25): SEQ ID NO: 1876; WAN024BDR_at; Start 118; Stop 142
aaatttccacaagcagcaagacctg

SEQ ID NO: 78075 - DNA, 25 bp, Artificial
  probe
  misc_feature (1)..(25): SEQ ID NO: 1876; WAN024BDR_at; Start 149; Stop 173
gagcgactacactagcagatgcaaa

SEQ ID NO: 78076 - DNA, 25 bp, Artificial
  probe
  misc_feature (1)..(25): SEQ ID NO: 1876; WAN024BDR_at; Start 132; Stop 156
agcaagacctgcagccagagcgact

SEQ ID NO: 78077 - DNA, 25 bp, Artificial
  probe
  misc_feature (1)..(25): SEQ ID NO: 1876; WAN024BDR_at; Start 145; Stop 169
gccagagcgactacactagcagatg

SEQ ID NO: 78078 - DNA, 25 bp, Artificial
  probe
  misc_feature (1)..(25): SEQ ID NO: 1876; WAN024BDR_at; Start 121; Stop 145
tttccacaagcagcaagacctgcag

SEQ ID NO: 78079 - DNA, 25 bp, Artificial
  probe
  misc_feature (1)..(25): SEQ ID NO: 1876; WAN024BDR_at; Start 32; Stop 56
ccaagttgtctggtttgtcaccgat

SEQ ID NO: 78080 - DNA, 25 bp, Artificial
  probe
  misc_feature (1)..(25): SEQ ID NO: 1876; WAN024BDR_at; Start 175; Stop 199
gcatattttttccagtttttcatga

SEQ ID NO: 78081 - DNA, 25 bp, Artificial
  probe
  misc_feature (1)..(25): SEQ ID NO: 1876; WAN024BDR_at; Start 185; Stop 209
tccagtttttcatgataaaaactcc

SEQ ID NO: 78082 - DNA, 25 bp, Artificial
  probe
  misc_feature (1)..(25): SEQ ID NO: 1876; WAN024BDR_at; Start 53; Stop 77
cgatttggtacattttgataacagg

SEQ ID NO: 78083 - DNA, 25 bp, Artificial
  probe
  misc_feature (1)..(25): SEQ ID NO: 1876; WAN024BDR_at; Start 82; Stop 106
tcacctgaatcagcagcttttttgc

SEQ ID NO: 78084 - DNA, 25 bp, Artificial
  probe
  misc_feature (1)..(25): SEQ ID NO: 1876; WAN024BDR_at; Start 158; Stop 182
cactagcagatgcaaaagcatattt

SEQ ID NO: 78085 - DNA, 25 bp, Artificial
  probe
  misc_feature (1)..(25): SEQ ID NO: 1876; WAN024BDR_at; Start 114; Stop 138
tgtcaaatttccacaagcagcaaga

SEQ ID NO: 78086 - DNA, 25 bp, Artificial
  probe
  misc_feature (1)..(25): SEQ ID NO: 1876; WAN024BDR_at; Start 141; Stop 165
tgcagccagagcgactacactagca

SEQ ID NO: 78087 - DNA, 25 bp, Artificial
  probe
  misc_feature (1)..(25): SEQ ID NO: 1876; WAN024BDR_at; Start 76; Stop 100
ggtttgtcacctgaatcagcagctt

SEQ ID NO: 78088 - DNA, 25 bp, Artificial
  probe
  misc_feature (1)..(25): SEQ ID NO: 1876; WAN024BDR_at; Start 222; Stop 246
taaacttataaacaatgtaatgatc

SEQ ID NO: 78089 - DNA, 25 bp, Artificial
  probe
  misc_feature (1)..(25): SEQ ID NO: 1876; WAN024BDR_at; Start 128; Stop 152
aagcagcaagacctgcagccagagc

SEQ ID NO: 78090 - DNA, 25 bp, Artificial
  probe
  misc_feature (1)..(25): SEQ ID NO: 1876; WAN024BDR_at; Start 21; Stop 45
taacaattcatccaagttgtctggt

SEQ ID NO: 78091 - DNA, 25 bp, Artificial
  probe
  misc_feature (1)..(25): SEQ ID NO: 1876; WAN024BDR_at; Start 12; Stop 36
ggcatttgctaacaattcatccaag

SEQ ID NO: 78092 - DNA, 25 bp, Artificial
  probe
  misc_feature (1)..(25): SEQ ID NO: 1876; WAN024BDR_at; Start 2; Stop 26
tgattttgttggcatttgctaacaa

SEQ ID NO: 78093 - DNA, 25 bp, Artificial
  probe
  misc_feature (1)..(25): SEQ ID NO: 1876; WAN024BDR_at; Start 94; Stop 118
gcagcttttttgctgttacctgtca

SEQ ID NO: 78094 - DNA, 25 bp, Artificial
  probe
  misc_feature (1)..(25): SEQ ID NO: 1876; WAN024BDR_at; Start 29; Stop 53
catccaagttgtctggtttgtcacc

SEQ ID NO: 78095 - DNA, 25 bp, Artificial
  probe
  misc_feature (1)..(25): SEQ ID NO: 1876; WAN024BDR_at; Start 147; Stop 171
cagagcgactacactagcagatgca

SEQ ID NO: 78096 - DNA, 25 bp, Artificial
  probe
  misc_feature (1)..(25): SEQ ID NO: 1876; WAN024BDR_at; Start 232; Stop 256
aacaatgtaatgatcttatactcaa

SEQ ID NO: 78097 - DNA, 25 bp, Artificial
  probe
  misc_feature (1)..(25): SEQ ID NO: 1876; WAN024BDR_at; Start 71; Stop 95
taacaggtttgtcacctgaatcagc

SEQ ID NO: 78098 - DNA, 25 bp, Artificial
  probe
  misc_feature (1)..(25): SEQ ID NO: 1876; WAN024BDR_at; Start 74; Stop 98
caggtttgtcacctgaatcagcagc

SEQ ID NO: 78099 - DNA, 25 bp, Artificial
  probe
  misc_feature (1)..(25): SEQ ID NO: 1876; WAN024BDR_at; Start 143; Stop 167
cagccagagcgactacactagcaga

SEQ ID NO: 78100 - DNA, 25 bp, Artificial
  probe
  misc_feature (1)..(25): SEQ ID NO: 1876; WAN024BDR_at; Start 62; Stop 86
acattttgataacaggtttgtcacc

SEQ ID NO: 78101 - DNA, 25 bp, Artificial
  probe
  misc_feature (1)..(25): SEQ ID NO: 1876; WAN024BDR_at; Start 40; Stop 64
tctggtttgtcaccgatttggtaca

SEQ ID NO: 78102 - DNA, 25 bp, Artificial
  probe
  misc_feature (1)..(25): SEQ ID NO: 1876; WAN024BDR_at; Start 110; Stop 134
tacctgtcaaatttccacaagcagc

SEQ ID NO: 78103 - DNA, 25 bp, Artificial
  probe
  misc_feature (1)..(25): SEQ ID NO: 1876; WAN024BDR_at; Start 105; Stop 129
gctgttacctgtcaaatttccacaa

SEQ ID NO: 78104 - DNA, 25 bp, Artificial
  probe
  misc_feature (1)..(25): SEQ ID NO: 750; WAN024BDS_at; Start 180; Stop 204
cgaagagtataaaggtgtaccgaga

SEQ ID NO: 78105 - DNA, 25 bp, Artificial
  probe
  misc_feature (1)..(25): SEQ ID NO: 750; WAN024BDS_at; Start 178; Stop 202
ttcgaagagtataaaggtgtaccga

SEQ ID NO: 78106 - DNA, 25 bp, Artificial
  probe
  misc_feature (1)..(25): SEQ ID NO: 750; WAN024BDS_at; Start 179; Stop 203
tcgaagagtataaaggtgtaccgag

SEQ ID NO: 78107 - DNA, 25 bp, Artificial
  probe
  misc_feature (1)..(25): SEQ ID NO: 3450; WAN024BDT_at; Start 17; Stop 41
gggcagttcattcaacacctgatac

SEQ ID NO: 78108 - DNA, 25 bp, Artificial
  probe
  misc_feature (1)..(25): SEQ ID NO: 3450; WAN024BDT_at; Start 13; Stop 37
tggggggcagttcattcaacacctg

SEQ ID NO: 78109 - DNA, 25 bp, Artificial
  probe
  misc_feature (1)..(25): SEQ ID NO: 3450; WAN024BDT_at; Start 16; Stop 40
ggggcagttcattcaacacctgata

SEQ ID NO: 78110 - DNA, 25 bp, Artificial
  probe
  misc_feature (1)..(25): SEQ ID NO: 3450; WAN024BDT_at; Start 14; Stop 38
ggggggcagttcattcaacacctga

SEQ ID NO: 78111 - DNA, 25 bp, Artificial
  probe
  misc_feature (1)..(25): SEQ ID NO: 3450; WAN024BDT_at; Start 15; Stop 39
gggggcagttcattcaacacctgat

SEQ ID NO: 78112 - DNA, 25 bp, Artificial
  probe
  misc_feature (1)..(25): SEQ ID NO: 5635; WAN024BDU_at; Start 48; Stop 72
tagacattttcattatttgttgccg

SEQ ID NO: 78113 - DNA, 25 bp, Artificial
  probe
  misc_feature (1)..(25): SEQ ID NO: 5635; WAN024BDU_at; Start 11; Stop 35
atcataaaggttggccagaaacttt

SEQ ID NO: 78114 - DNA, 25 bp, Artificial
  probe
  misc_feature (1)..(25): SEQ ID NO: 5635; WAN024BDU_at; Start 4; Stop 28
gttaacaatcataaaggttggccag

SEQ ID NO: 78115 - DNA, 25 bp, Artificial
  probe
  misc_feature (1)..(25): SEQ ID NO: 5635; WAN024BDU_at; Start 5; Stop 29
ttaacaatcataaaggttggccaga

SEQ ID NO: 78116 - DNA, 25 bp, Artificial
  probe
  misc_feature (1)..(25): SEQ ID NO: 5635; WAN024BDU_at; Start 38; Stop 62
ttgaaaaaagtagacattttcatta

SEQ ID NO: 78117 - DNA, 25 bp, Artificial
  probe
  misc_feature (1)..(25): SEQ ID NO: 5635; WAN024BDU_at; Start 50; Stop 74
gacattttcattatttgttgccgct

SEQ ID NO: 78118 - DNA, 25 bp, Artificial
  probe
  misc_feature (1)..(25): SEQ ID NO: 5635; WAN024BDU_at; Start 10; Stop 34
aatcataaaggttggccagaaactt

SEQ ID NO: 78119 - DNA, 25 bp, Artificial
  probe
  misc_feature (1)..(25): SEQ ID NO: 5635; WAN024BDU_at; Start 45; Stop 69
aagtagacattttcattatttgttg

SEQ ID NO: 78120 - DNA, 25 bp, Artificial
  probe
  misc_feature (1)..(25): SEQ ID NO: 5635; WAN024BDU_at; Start 51; Stop 75
acattttcattatttgttgccgctt

SEQ ID NO: 78121 - DNA, 25 bp, Artificial
  probe
  misc_feature (1)..(25): SEQ ID NO: 5635; WAN024BDU_at; Start 2; Stop 26
tggttaacaatcataaaggttggcc

SEQ ID NO: 78122 - DNA, 25 bp, Artificial
  probe
  misc_feature (1)..(25): SEQ ID NO: 5635; WAN024BDU_at; Start 6; Stop 30
taacaatcataaaggttggccagaa

SEQ ID NO: 78123 - DNA, 25 bp, Artificial
  probe
  misc_feature (1)..(25): SEQ ID NO: 5635; WAN024BDU_at; Start 1; Stop 25
ttggttaacaatcataaaggttggc

SEQ ID NO: 78124 - DNA, 25 bp, Artificial
  probe
  misc_feature (1)..(25): SEQ ID NO: 5635; WAN024BDU_at; Start 7; Stop 31
aacaatcataaaggttggccagaaa

SEQ ID NO: 78125 - DNA, 25 bp, Artificial
  probe
  misc_feature (1)..(25): SEQ ID NO: 5635; WAN024BDU_at; Start 46; Stop 70
agtagacattttcattatttgttgc

SEQ ID NO: 78126 - DNA, 25 bp, Artificial
  probe
  misc_feature (1)..(25): SEQ ID NO: 5635; WAN024BDU_at; Start 47; Stop 71
gtagacattttcattatttgttgcc

SEQ ID NO: 78127 - DNA, 25 bp, Artificial
  probe
  misc_feature (1)..(25): SEQ ID NO: 5635; WAN024BDU_at; Start 39; Stop 63
tgaaaaaagtagacattttcattat

SEQ ID NO: 78128 - DNA, 25 bp, Artificial
  probe
  misc_feature (1)..(25): SEQ ID NO: 5635; WAN024BDU_at; Start 8; Stop 32
acaatcataaaggttggccagaaac

SEQ ID NO: 78129 - DNA, 25 bp, Artificial
  probe
  misc_feature (1)..(25): SEQ ID NO: 5635; WAN024BDU_at; Start 3; Stop 27
ggttaacaatcataaaggttggcca

SEQ ID NO: 78130 - DNA, 25 bp, Artificial
  probe
  misc_feature (1)..(25): SEQ ID NO: 5635; WAN024BDU_at; Start 42; Stop 66
aaaaagtagacattttcattatttg

SEQ ID NO: 78131 - DNA, 25 bp, Artificial
  probe
  misc_feature (1)..(25): SEQ ID NO: 5635; WAN024BDU_at; Start 43; Stop 67
aaaagtagacattttcattatttgt

SEQ ID NO: 78132 - DNA, 25 bp, Artificial
  probe
  misc_feature (1)..(25): SEQ ID NO: 5635; WAN024BDU_at; Start 49; Stop 73
agacattttcattatttgttgccgc

SEQ ID NO: 78133 - DNA, 25 bp, Artificial
  probe
  misc_feature (1)..(25): SEQ ID NO: 5635; WAN024BDU_at; Start 44; Stop 68
aaagtagacattttcattatttgtt

SEQ ID NO: 78134 - DNA, 25 bp, Artificial
  probe
  misc_feature (1)..(25): SEQ ID NO: 5635; WAN024BDU_at; Start 9; Stop 33
caatcataaaggttggccagaaact

SEQ ID NO: 78135 - DNA, 25 bp, Artificial
  probe
  misc_feature (1)..(25): SEQ ID NO: 5306; WAN024BDV_at; Start 18; Stop 42
gaatatcggagaatttgaagaagat

SEQ ID NO: 78136 - DNA, 25 bp, Artificial
  probe
  misc_feature (1)..(25): SEQ ID NO: 5306; WAN024BDV_at; Start 78; Stop 102
caaggatcagttttcccatattttc

SEQ ID NO: 78137 - DNA, 25 bp, Artificial
  probe
  misc_feature (1)..(25): SEQ ID NO: 5306; WAN024BDV_at; Start 62; Stop 86
tagacaaaagcagaaacaaggatca

SEQ ID NO: 78138 - DNA, 25 bp, Artificial
  probe
  misc_feature (1)..(25): SEQ ID NO: 5306; WAN024BDV_at; Start 72; Stop 96
cagaaacaaggatcagttttcccat

SEQ ID NO: 78139 - DNA, 25 bp, Artificial
  probe
  misc_feature (1)..(25): SEQ ID NO: 5306; WAN024BDV_at; Start 71; Stop 95
gcagaaacaaggatcagttttccca

SEQ ID NO: 78140 - DNA, 25 bp, Artificial
  probe
  misc_feature (1)..(25): SEQ ID NO: 5306; WAN024BDV_at; Start 6; Stop 30
caaaactttagagaatatcggagaa

SEQ ID NO: 78141 - DNA, 25 bp, Artificial
  probe
  misc_feature (1)..(25): SEQ ID NO: 5306; WAN024BDV_at; Start 23; Stop 47
tcggagaatttgaagaagataatct

SEQ ID NO: 78142 - DNA, 25 bp, Artificial
  probe
  misc_feature (1)..(25): SEQ ID NO: 5306; WAN024BDV_at; Start 4; Stop 28
cacaaaactttagagaatatcggag

SEQ ID NO: 78143 - DNA, 25 bp, Artificial
  probe
  misc_feature (1)..(25): SEQ ID NO: 5306; WAN024BDV_at; Start 49; Stop 73
tattattcttctatagacaaaagca

SEQ ID NO: 78144 - DNA, 25 bp, Artificial
  probe
  misc_feature (1)..(25): SEQ ID NO: 5306; WAN024BDV_at; Start 60; Stop 84
tatagacaaaagcagaaacaaggat

SEQ ID NO: 78145 - DNA, 25 bp, Artificial
  probe
  misc_feature (1)..(25): SEQ ID NO: 5306; WAN024BDV_at; Start 11; Stop 35
ctttagagaatatcggagaatttga

SEQ ID NO: 78146 - DNA, 25 bp, Artificial
  probe
  misc_feature (1)..(25): SEQ ID NO: 5306; WAN024BDV_at; Start 52; Stop 76
tattcttctatagacaaaagcagaa

SEQ ID NO: 78147 - DNA, 25 bp, Artificial
  probe
  misc_feature (1)..(25): SEQ ID NO: 5306; WAN024BDV_at; Start 75; Stop 99
aaacaaggatcagttttcccatatt

SEQ ID NO: 78148 - DNA, 25 bp, Artificial
  probe
  misc_feature (1)..(25): SEQ ID NO: 5306; WAN024BDV_at; Start 55; Stop 79
tcttctatagacaaaagcagaaaca

SEQ ID NO: 78149 - DNA, 25 bp, Artificial
  probe
  misc_feature (1)..(25): SEQ ID NO: 5306; WAN024BDV_at; Start 74; Stop 98
gaaacaaggatcagttttcccatat

SEQ ID NO: 78150 - DNA, 25 bp, Artificial
  probe
  misc_feature (1)..(25): SEQ ID NO: 5306; WAN024BDV_at; Start 84; Stop 108
tcagttttcccatattttcgggctc

SEQ ID NO: 78151 - DNA, 25 bp, Artificial
  probe
  misc_feature (1)..(25): SEQ ID NO: 5306; WAN024BDV_at; Start 2; Stop 26
tgcacaaaactttagagaatatcgg

SEQ ID NO: 78152 - DNA, 25 bp, Artificial
  probe
  misc_feature (1)..(25): SEQ ID NO: 5306; WAN024BDV_at; Start 26; Stop 50
gagaatttgaagaagataatcttta

SEQ ID NO: 78153 - DNA, 25 bp, Artificial
  probe
  misc_feature (1)..(25): SEQ ID NO: 5306; WAN024BDV_at; Start 3; Stop 27
gcacaaaactttagagaatatcgga

SEQ ID NO: 78154 - DNA, 25 bp, Artificial
  probe
  misc_feature (1)..(25): SEQ ID NO: 5306; WAN024BDV_at; Start 42; Stop 66
taatctttattattcttctatagac

SEQ ID NO: 78155 - DNA, 25 bp, Artificial
  probe
  misc_feature (1)..(25): SEQ ID NO: 5306; WAN024BDV_at; Start 64; Stop 88
gacaaaagcagaaacaaggatcagt

SEQ ID NO: 78156 - DNA, 25 bp, Artificial
  probe
  misc_feature (1)..(25): SEQ ID NO: 5306; WAN024BDV_at; Start 58; Stop 82
tctatagacaaaagcagaaacaagg

SEQ ID NO: 78157 - DNA, 25 bp, Artificial
  probe
  misc_feature (1)..(25): SEQ ID NO: 5306; WAN024BDV_at; Start 66; Stop 90
caaaagcagaaacaaggatcagttt

SEQ ID NO: 78158 - DNA, 25 bp, Artificial
  probe
  misc_feature (1)..(25): SEQ ID NO: 5306; WAN024BDV_at; Start 16; Stop 40
gagaatatcggagaatttgaagaag

SEQ ID NO: 78159 - DNA, 25 bp, Artificial
  probe
  misc_feature (1)..(25): SEQ ID NO: 5306; WAN024BDV_at; Start 85; Stop 109
cagttttcccatattttcgggctct

SEQ ID NO: 78160 - DNA, 25 bp, Artificial
  probe
  misc_feature (1)..(25): SEQ ID NO: 5306; WAN024BDV_at; Start 69; Stop 93
aagcagaaacaaggatcagttttcc

SEQ ID NO: 78161 - DNA, 25 bp, Artificial
  probe
  misc_feature (1)..(25): SEQ ID NO: 5306; WAN024BDV_at; Start 14; Stop 38
tagagaatatcggagaatttgaaga

SEQ ID NO: 78162 - DNA, 25 bp, Artificial
  probe
  misc_feature (1)..(25): SEQ ID NO: 5306; WAN024BDV_at; Start 7; Stop 31
aaaactttagagaatatcggagaat

SEQ ID NO: 78163 - DNA, 25 bp, Artificial
  probe
  misc_feature (1)..(25): SEQ ID NO: 5306; WAN024BDV_at; Start 70; Stop 94
agcagaaacaaggatcagttttccc

SEQ ID NO: 78164 - DNA, 25 bp, Artificial
  probe
  misc_feature (1)..(25): SEQ ID NO: 5306; WAN024BDV_at; Start 89; Stop 113
tttcccatattttcgggctctataa

SEQ ID NO: 78165 - DNA, 25 bp, Artificial
  probe
  misc_feature (1)..(25): SEQ ID NO: 5306; WAN024BDV_at; Start 80; Stop 104
aggatcagttttcccatattttcgg

SEQ ID NO: 78166 - DNA, 25 bp, Artificial
  probe
  misc_feature (1)..(25): SEQ ID NO: 5306; WAN024BDV_at; Start 91; Stop 115
tcccatattttcgggctctataata

SEQ ID NO: 78167 - DNA, 25 bp, Artificial
  probe
  misc_feature (1)..(25): SEQ ID NO: 5306; WAN024BDV_at; Start 82; Stop 106
gatcagttttcccatattttcgggc

SEQ ID NO: 78168 - DNA, 25 bp, Artificial
  probe
  misc_feature (1)..(25): SEQ ID NO: 5306; WAN024BDV_at; Start 51; Stop 75
ttattcttctatagacaaaagcaga

SEQ ID NO: 78169 - DNA, 25 bp, Artificial
  probe
  misc_feature (1)..(25): SEQ ID NO: 3886; WAN024BDW_at; Start 1; Stop 25
gtgaagagtcttcaagtgttctttg

SEQ ID NO: 78170 - DNA, 25 bp, Artificial
  probe
  misc_feature (1)..(25): SEQ ID NO: 3886; WAN024BDW_at; Start 71; Stop 95
tcaaggtcgataacgaatggaagac

SEQ ID NO: 78171 - DNA, 25 bp, Artificial
  probe
  misc_feature (1)..(25): SEQ ID NO: 3886; WAN024BDW_at; Start 197; Stop 221
ggctcaagagtttcgtaagaagtaa

SEQ ID NO: 78172 - DNA, 25 bp, Artificial
  probe
  misc_feature (1)..(25): SEQ ID NO: 3886; WAN024BDW_at; Start 190; Stop 214
caagactggctcaagagtttcgtaa

SEQ ID NO: 78173 - DNA, 25 bp, Artificial
  probe
  misc_feature (1)..(25): SEQ ID NO: 3886; WAN024BDW_at; Start 162; Stop 186
cgtctggagctttttctttgatttg

SEQ ID NO: 78174 - DNA, 25 bp, Artificial
  probe
  misc_feature (1)..(25): SEQ ID NO: 3886; WAN024BDW_at; Start 93; Stop 117
gaccgtttgctactgggtagtcaaa

SEQ ID NO: 78175 - DNA, 25 bp, Artificial
  probe
  misc_feature (1)..(25): SEQ ID NO: 3886; WAN024BDW_at; Start 57; Stop 81
tagtagtatcgccttcaaggtcgat

SEQ ID NO: 78176 - DNA, 25 bp, Artificial
  probe
  misc_feature (1)..(25): SEQ ID NO: 3886; WAN024BDW_at; Start 132; Stop 156
tgaaaactttaccaatagcaaatgg

SEQ ID NO: 78177 - DNA, 25 bp, Artificial
  probe
  misc_feature (1)..(25): SEQ ID NO: 3886; WAN024BDW_at; Start 200; Stop 224
tcaagagtttcgtaagaagtaacac

SEQ ID NO: 78178 - DNA, 25 bp, Artificial
  probe
  misc_feature (1)..(25): SEQ ID NO: 3886; WAN024BDW_at; Start 147; Stop 171
tagcaaatggtactacgtctggagc

SEQ ID NO: 78179 - DNA, 25 bp, Artificial
  probe
  misc_feature (1)..(25): SEQ ID NO: 3886; WAN024BDW_at; Start 122; Stop 146
tcagatgggatgaaaactttaccaa

SEQ ID NO: 78180 - DNA, 25 bp, Artificial
  probe
  misc_feature (1)..(25): SEQ ID NO: 3886; WAN024BDW_at; Start 193; Stop 217
gactggctcaagagtttcgtaagaa

SEQ ID NO: 78181 - DNA, 25 bp, Artificial
  probe
  misc_feature (1)..(25): SEQ ID NO: 3886; WAN024BDW_at; Start 17; Stop 41
tgttctttgaaacgaggcacttcgt

SEQ ID NO: 78182 - DNA, 25 bp, Artificial
  probe
  misc_feature (1)..(25): SEQ ID NO: 3886; WAN024BDW_at; Start 154; Stop 178
tggtactacgtctggagctttttct

SEQ ID NO: 78183 - DNA, 25 bp, Artificial
  probe
  misc_feature (1)..(25): SEQ ID NO: 3886; WAN024BDW_at; Start 90; Stop 114
gaagaccgtttgctactgggtagtc

SEQ ID NO: 78184 - DNA, 25 bp, Artificial
  probe
  misc_feature (1)..(25): SEQ ID NO: 3886; WAN024BDW_at; Start 52; Stop 76
aactttagtagtatcgccttcaagg

SEQ ID NO: 78185 - DNA, 25 bp, Artificial
  probe
  misc_feature (1)..(25): SEQ ID NO: 3886; WAN024BDW_at; Start 204; Stop 228
gagtttcgtaagaagtaacacctga

SEQ ID NO: 78186 - DNA, 25 bp, Artificial
  probe
  misc_feature (1)..(25): SEQ ID NO: 3886; WAN024BDW_at; Start 88; Stop 112
tggaagaccgtttgctactgggtag

SEQ ID NO: 78187 - DNA, 25 bp, Artificial
  probe
  misc_feature (1)..(25): SEQ ID NO: 3886; WAN024BDW_at; Start 158; Stop 182
actacgtctggagctttttctttga

SEQ ID NO: 78188 - DNA, 25 bp, Artificial
  probe
  misc_feature (1)..(25): SEQ ID NO: 3886; WAN024BDW_at; Start 128; Stop 152
gggatgaaaactttaccaatagcaa

SEQ ID NO: 78189 - DNA, 25 bp, Artificial
  probe
  misc_feature (1)..(25): SEQ ID NO: 3886; WAN024BDW_at; Start 78; Stop 102
cgataacgaatggaagaccgtttgc

SEQ ID NO: 78190 - DNA, 25 bp, Artificial
  probe
  misc_feature (1)..(25): SEQ ID NO: 3886; WAN024BDW_at; Start 144; Stop 168
caatagcaaatggtactacgtctgg

SEQ ID NO: 78191 - DNA, 25 bp, Artificial
  probe
  misc_feature (1)..(25): SEQ ID NO: 3886; WAN024BDW_at; Start 185; Stop 209
tgtttcaagactggctcaagagttt

SEQ ID NO: 78192 - DNA, 25 bp, Artificial
  probe
  misc_feature (1)..(25): SEQ ID NO: 3886; WAN024BDW_at; Start 150; Stop 174
caaatggtactacgtctggagcttt

SEQ ID NO: 78193 - DNA, 25 bp, Artificial
  probe
  misc_feature (1)..(25): SEQ ID NO: 3886; WAN024BDW_at; Start 12; Stop 36
tcaagtgttctttgaaacgaggcac

SEQ ID NO: 78194 - DNA, 25 bp, Artificial
  probe
  misc_feature (1)..(25): SEQ ID NO: 3886; WAN024BDW_at; Start 81; Stop 105
taacgaatggaagaccgtttgctac

SEQ ID NO: 78195 - DNA, 25 bp, Artificial
  probe
  misc_feature (1)..(25): SEQ ID NO: 3886; WAN024BDW_at; Start 20; Stop 44
tctttgaaacgaggcacttcgtaac

SEQ ID NO: 78196 - DNA, 25 bp, Artificial
  probe
  misc_feature (1)..(25): SEQ ID NO: 3886; WAN024BDW_at; Start 65; Stop 89
tcgccttcaaggtcgataacgaatg

SEQ ID NO: 78197 - DNA, 25 bp, Artificial
  probe
  misc_feature (1)..(25): SEQ ID NO: 3886; WAN024BDW_at; Start 181; Stop 205
gatttgtttcaagactggctcaaga

SEQ ID NO: 78198 - DNA, 25 bp, Artificial
  probe
  misc_feature (1)..(25): SEQ ID NO: 3886; WAN024BDW_at; Start 177; Stop 201
ctttgatttgtttcaagactggctc

SEQ ID NO: 78199 - DNA, 25 bp, Artificial
  probe
  misc_feature (1)..(25): SEQ ID NO: 3886; WAN024BDW_at; Start 120; Stop 144
tatcagatgggatgaaaactttacc

SEQ ID NO: 78200 - DNA, 25 bp, Artificial
  probe
  misc_feature (1)..(25): SEQ ID NO: 3886; WAN024BDW_at; Start 67; Stop 91
gccttcaaggtcgataacgaatgga

SEQ ID NO: 78201 - DNA, 25 bp, Artificial
  probe
  misc_feature (1)..(25): SEQ ID NO: 3886; WAN024BDW_at; Start 85; Stop 109
gaatggaagaccgtttgctactggg

SEQ ID NO: 78202 - DNA, 25 bp, Artificial
  probe
  misc_feature (1)..(25): SEQ ID NO: 3886; WAN024BDW_at; Start 49; Stop 73
tacaactttagtagtatcgccttca

SEQ ID NO: 78203 - DNA, 25 bp, Artificial
  probe
  misc_feature (1)..(25): SEQ ID NO: 5764; WAN024BDX_at; Start 139; Stop 163
caattccttcataacgttaagtacg

SEQ ID NO: 78204 - DNA, 25 bp, Artificial
  probe
  misc_feature (1)..(25): SEQ ID NO: 5764; WAN024BDX_at; Start 2; Stop 26
tgtgggttatcaaagatttggtcag

SEQ ID NO: 78205 - DNA, 25 bp, Artificial
  probe
  misc_feature (1)..(25): SEQ ID NO: 5764; WAN024BDX_at; Start 66; Stop 90
taacgcggttggcaacctgacgagc

SEQ ID NO: 78206 - DNA, 25 bp, Artificial
  probe
  misc_feature (1)..(25): SEQ ID NO: 5764; WAN024BDX_at; Start 42; Stop 66
ggaactcgccatctgcagtaaagat

SEQ ID NO: 78207 - DNA, 25 bp, Artificial
  probe
  misc_feature (1)..(25): SEQ ID NO: 5764; WAN024BDX_at; Start 203; Stop 227
tcgaagagcatgatgtctggattca

SEQ ID NO: 78208 - DNA, 25 bp, Artificial
  probe
  misc_feature (1)..(25): SEQ ID NO: 5764; WAN024BDX_at; Start 154; Stop 178
gttaagtacgtctccaaccatctca

SEQ ID NO: 78209 - DNA, 25 bp, Artificial
  probe
  misc_feature (1)..(25): SEQ ID NO: 5764; WAN024BDX_at; Start 57; Stop 81
cagtaaagataacgcggttggcaac

SEQ ID NO: 78210 - DNA, 25 bp, Artificial
  probe
  misc_feature (1)..(25): SEQ ID NO: 5764; WAN024BDX_at; Start 35; Stop 59
tcttcaaggaactcgccatctgcag

SEQ ID NO: 78211 - DNA, 25 bp, Artificial
  probe
  misc_feature (1)..(25): SEQ ID NO: 5764; WAN024BDX_at; Start 39; Stop 63
caaggaactcgccatctgcagtaaa

SEQ ID NO: 78212 - DNA, 25 bp, Artificial
  probe
  misc_feature (1)..(25): SEQ ID NO: 5764; WAN024BDX_at; Start 197; Stop 221
ggttcatcgaagagcatgatgtctg

SEQ ID NO: 78213 - DNA, 25 bp, Artificial
  probe
  misc_feature (1)..(25): SEQ ID NO: 5764; WAN024BDX_at; Start 20; Stop 44
tggtcaggtgttccgtcttcaagga

SEQ ID NO: 78214 - DNA, 25 bp, Artificial
  probe
  misc_feature (1)..(25): SEQ ID NO: 5764; WAN024BDX_at; Start 79; Stop 103
aacctgacgagcaaatcccatctca

SEQ ID NO: 78215 - DNA, 25 bp, Artificial
  probe
  misc_feature (1)..(25): SEQ ID NO: 5764; WAN024BDX_at; Start 171; Stop 195
ccatctcagggtcaagggcagaagt

SEQ ID NO: 78216 - DNA, 25 bp, Artificial
  probe
  misc_feature (1)..(25): SEQ ID NO: 5764; WAN024BDX_at; Start 173; Stop 197
atctcagggtcaagggcagaagttg

SEQ ID NO: 78217 - DNA, 25 bp, Artificial
  probe
  misc_feature (1)..(25): SEQ ID NO: 5764; WAN024BDX_at; Start 70; Stop 94
gcggttggcaacctgacgagcaaat

SEQ ID NO: 78218 - DNA, 25 bp, Artificial
  probe
  misc_feature (1)..(25): SEQ ID NO: 5764; WAN024BDX_at; Start 16; Stop 40
gatttggtcaggtgttccgtcttca

SEQ ID NO: 78219 - DNA, 25 bp, Artificial
  probe
  misc_feature (1)..(25): SEQ ID NO: 5764; WAN024BDX_at; Start 12; Stop 36
caaagatttggtcaggtgttccgtc

SEQ ID NO: 78220 - DNA, 25 bp, Artificial
  probe
  misc_feature (1)..(25): SEQ ID NO: 5764; WAN024BDX_at; Start 114; Stop 138
taatcatggtcatgccttgctcagc

SEQ ID NO: 78221 - DNA, 25 bp, Artificial
  probe
  misc_feature (1)..(25): SEQ ID NO: 5764; WAN024BDX_at; Start 49; Stop 73
gccatctgcagtaaagataacgcgg

SEQ ID NO: 78222 - DNA, 25 bp, Artificial
  probe
  misc_feature (1)..(25): SEQ ID NO: 5764; WAN024BDX_at; Start 61; Stop 85
aaagataacgcggttggcaacctga

SEQ ID NO: 78223 - DNA, 25 bp, Artificial
  probe
  misc_feature (1)..(25): SEQ ID NO: 5764; WAN024BDX_at; Start 117; Stop 141
tcatggtcatgccttgctcagccaa

SEQ ID NO: 78224 - DNA, 25 bp, Artificial
  probe
  misc_feature (1)..(25): SEQ ID NO: 5764; WAN024BDX_at; Start 120; Stop 144
tggtcatgccttgctcagccaattc

SEQ ID NO: 78225 - DNA, 25 bp, Artificial
  probe
  misc_feature (1)..(25): SEQ ID NO: 5764; WAN024BDX_at; Start 75; Stop 99
tggcaacctgacgagcaaatcccat

SEQ ID NO: 78226 - DNA, 25 bp, Artificial
  probe
  misc_feature (1)..(25): SEQ ID NO: 5764; WAN024BDX_at; Start 9; Stop 33
tatcaaagatttggtcaggtgttcc

SEQ ID NO: 78227 - DNA, 25 bp, Artificial
  probe
  misc_feature (1)..(25): SEQ ID NO: 5764; WAN024BDX_at; Start 210; Stop 234
gcatgatgtctggattcattgctag

SEQ ID NO: 78228 - DNA, 25 bp, Artificial
  probe
  misc_feature (1)..(25): SEQ ID NO: 5764; WAN024BDX_at; Start 135; Stop 159
cagccaattccttcataacgttaag

SEQ ID NO: 78229 - DNA, 25 bp, Artificial
  probe
  misc_feature (1)..(25): SEQ ID NO: 5764; WAN024BDX_at; Start 169; Stop 193
aaccatctcagggtcaagggcagaa

SEQ ID NO: 78230 - DNA, 25 bp, Artificial
  probe
  misc_feature (1)..(25): SEQ ID NO: 5764; WAN024BDX_at; Start 191; Stop 215
gaagttggttcatcgaagagcatga

SEQ ID NO: 78231 - DNA, 25 bp, Artificial
  probe
  misc_feature (1)..(25): SEQ ID NO: 5764; WAN024BDX_at; Start 131; Stop 155
tgctcagccaattccttcataacgt

SEQ ID NO: 78232 - DNA, 25 bp, Artificial
  probe
  misc_feature (1)..(25): SEQ ID NO: 5764; WAN024BDX_at; Start 28; Stop 52
tgttccgtcttcaaggaactcgcca

SEQ ID NO: 78233 - DNA, 25 bp, Artificial
  probe
  misc_feature (1)..(25): SEQ ID NO: 5764; WAN024BDX_at; Start 166; Stop 190
tccaaccatctcagggtcaagggca

SEQ ID NO: 78234 - DNA, 25 bp, Artificial
  probe
  misc_feature (1)..(25): SEQ ID NO: 5764; WAN024BDX_at; Start 109; Stop 133
tacgataatcatggtcatgccttgc

SEQ ID NO: 78235 - DNA, 25 bp, Artificial
  probe
  misc_feature (1)..(25): SEQ ID NO: 5764; WAN024BDX_at; Start 54; Stop 78
ctgcagtaaagataacgcggttggc

SEQ ID NO: 78236 - DNA, 25 bp, Artificial
  probe
  misc_feature (1)..(25): SEQ ID NO: 5764; WAN024BDX_at; Start 147; Stop 171
tcataacgttaagtacgtctccaac

SEQ ID NO: 78237 - DNA, 25 bp, Artificial
  probe
  misc_feature (1)..(25): SEQ ID NO: 2001; WAN024BDY_at; Start 153; Stop 177
gcacagctcgtttgacttgcttcat

SEQ ID NO: 78238 - DNA, 25 bp, Artificial
  probe
  misc_feature (1)..(25): SEQ ID NO: 2001; WAN024BDY_at; Start 81; Stop 105
cgtcagtcacaactggatacttagg

SEQ ID NO: 78239 - DNA, 25 bp, Artificial
  probe
  misc_feature (1)..(25): SEQ ID NO: 2001; WAN024BDY_at; Start 35; Stop 59
tcttcgctacgaccaatcgattcca

SEQ ID NO: 78240 - DNA, 25 bp, Artificial
  probe
  misc_feature (1)..(25): SEQ ID NO: 2001; WAN024BDY_at; Start 45; Stop 69
gaccaatcgattccaagacatctac

SEQ ID NO: 78241 - DNA, 25 bp, Artificial
  probe
  misc_feature (1)..(25): SEQ ID NO: 2001; WAN024BDY_at; Start 147; Stop 171
gctcttgcacagctcgtttgacttg

SEQ ID NO: 78242 - DNA, 25 bp, Artificial
  probe
  misc_feature (1)..(25): SEQ ID NO: 2001; WAN024BDY_at; Start 108; Stop 132
tttcatctcccatttgcacaacgat

SEQ ID NO: 78243 - DNA, 25 bp, Artificial
  probe
  misc_feature (1)..(25): SEQ ID NO: 2001; WAN024BDY_at; Start 183; Stop 207
aaatcccttggctacgaagtttgag

SEQ ID NO: 78244 - DNA, 25 bp, Artificial
  probe
  misc_feature (1)..(25): SEQ ID NO: 2001; WAN024BDY_at; Start 16; Stop 40
gaggttatcaagcaaccactcttcg

SEQ ID NO: 78245 - DNA, 25 bp, Artificial
  probe
  misc_feature (1)..(25): SEQ ID NO: 2001; WAN024BDY_at; Start 211; Stop 235
tacatccgatgcagacaaaccaact

SEQ ID NO: 78246 - DNA, 25 bp, Artificial
  probe
  misc_feature (1)..(25): SEQ ID NO: 2001; WAN024BDY_at; Start 42; Stop 66
tacgaccaatcgattccaagacatc

SEQ ID NO: 78247 - DNA, 25 bp, Artificial
  probe
  misc_feature (1)..(25): SEQ ID NO: 2001; WAN024BDY_at; Start 38; Stop 62
tcgctacgaccaatcgattccaaga

SEQ ID NO: 78248 - DNA, 25 bp, Artificial
  probe
  misc_feature (1)..(25): SEQ ID NO: 2001; WAN024BDY_at; Start 161; Stop 185
cgtttgacttgcttcatctggaaaa

SEQ ID NO: 78249 - DNA, 25 bp, Artificial
  probe
  misc_feature (1)..(25): SEQ ID NO: 2001; WAN024BDY_at; Start 12; Stop 36
tactgaggttatcaagcaaccactc

SEQ ID NO: 78250 - DNA, 25 bp, Artificial
  probe
  misc_feature (1)..(25): SEQ ID NO: 2001; WAN024BDY_at; Start 103; Stop 127
aggattttcatctcccatttgcaca

SEQ ID NO: 78251 - DNA, 25 bp, Artificial
  probe
  misc_feature (1)..(25): SEQ ID NO: 2001; WAN024BDY_at; Start 67; Stop 91
tacttgaatcacaccgtcagtcaca

SEQ ID NO: 78252 - DNA, 25 bp, Artificial
  probe
  misc_feature (1)..(25): SEQ ID NO: 2001; WAN024BDY_at; Start 166; Stop 190
gacttgcttcatctggaaaatccct

SEQ ID NO: 78253 - DNA, 25 bp, Artificial
  probe
  misc_feature (1)..(25): SEQ ID NO: 2001; WAN024BDY_at; Start 177; Stop 201
tctggaaaatcccttggctacgaag

SEQ ID NO: 78254 - DNA, 25 bp, Artificial
  probe
  misc_feature (1)..(25): SEQ ID NO: 2001; WAN024BDY_at; Start 75; Stop 99
tcacaccgtcagtcacaactggata

SEQ ID NO: 78255 - DNA, 25 bp, Artificial
  probe
  misc_feature (1)..(25): SEQ ID NO: 2001; WAN024BDY_at; Start 138; Stop 162
gcccattttgctcttgcacagctcg

SEQ ID NO: 78256 - DNA, 25 bp, Artificial
  probe
  misc_feature (1)..(25): SEQ ID NO: 2001; WAN024BDY_at; Start 95; Stop 119
ggatacttaggattttcatctccca

SEQ ID NO: 78257 - DNA, 25 bp, Artificial
  probe
  misc_feature (1)..(25): SEQ ID NO: 2001; WAN024BDY_at; Start 158; Stop 182
gctcgtttgacttgcttcatctgga

SEQ ID NO: 78258 - DNA, 25 bp, Artificial
  probe
  misc_feature (1)..(25): SEQ ID NO: 2001; WAN024BDY_at; Start 84; Stop 108
cagtcacaactggatacttaggatt

SEQ ID NO: 78259 - DNA, 25 bp, Artificial
  probe
  misc_feature (1)..(25): SEQ ID NO: 2001; WAN024BDY_at; Start 185; Stop 209
atcccttggctacgaagtttgaggg

SEQ ID NO: 78260 - DNA, 25 bp, Artificial
  probe
  misc_feature (1)..(25): SEQ ID NO: 2001; WAN024BDY_at; Start 134; Stop 158
agttgcccattttgctcttgcacag

SEQ ID NO: 78261 - DNA, 25 bp, Artificial
  probe
  misc_feature (1)..(25): SEQ ID NO: 2001; WAN024BDY_at; Start 72; Stop 96
gaatcacaccgtcagtcacaactgg

SEQ ID NO: 78262 - DNA, 25 bp, Artificial
  probe
  misc_feature (1)..(25): SEQ ID NO: 2001; WAN024BDY_at; Start 174; Stop 198
tcatctggaaaatcccttggctacg

SEQ ID NO: 78263 - DNA, 25 bp, Artificial
  probe
  misc_feature (1)..(25): SEQ ID NO: 2001; WAN024BDY_at; Start 59; Stop 83
aagacatctacttgaatcacaccgt

SEQ ID NO: 78264 - DNA, 25 bp, Artificial
  probe
  misc_feature (1)..(25): SEQ ID NO: 2001; WAN024BDY_at; Start 21; Stop 45
tatcaagcaaccactcttcgctacg

SEQ ID NO: 78265 - DNA, 25 bp, Artificial
  probe
  misc_feature (1)..(25): SEQ ID NO: 2001; WAN024BDY_at; Start 3; Stop 27
gcccttgtttactgaggttatcaag

SEQ ID NO: 78266 - DNA, 25 bp, Artificial
  probe
  misc_feature (1)..(25): SEQ ID NO: 2001; WAN024BDY_at; Start 8; Stop 32
tgtttactgaggttatcaagcaacc

SEQ ID NO: 78267 - DNA, 25 bp, Artificial
  probe
  misc_feature (1)..(25): SEQ ID NO: 2001; WAN024BDY_at; Start 213; Stop 237
catccgatgcagacaaaccaactga

SEQ ID NO: 78268 - DNA, 25 bp, Artificial
  probe
  misc_feature (1)..(25): SEQ ID NO: 2001; WAN024BDY_at; Start 170; Stop 194
tgcttcatctggaaaatcccttggc

SEQ ID NO: 78269 - DNA, 25 bp, Artificial
  probe
  misc_feature (1)..(25): SEQ ID NO: 2001; WAN024BDY_at; Start 88; Stop 112
cacaactggatacttaggattttca

SEQ ID NO: 78270 - DNA, 25 bp, Artificial
  probe
  misc_feature (1)..(25): SEQ ID NO: 2001; WAN024BDY_at; Start 144; Stop 168
tttgctcttgcacagctcgtttgac

SEQ ID NO: 78271 - DNA, 25 bp, Artificial
  probe
  misc_feature (1)..(25): SEQ ID NO: 2004; WAN024BDZ_at; Start 29; Stop 53
tggtgaggatgatggcaatccagca

SEQ ID NO: 78272 - DNA, 25 bp, Artificial
  probe
  misc_feature (1)..(25): SEQ ID NO: 2004; WAN024BDZ_at; Start 129; Stop 153
catggccatgacaataaggaattta

SEQ ID NO: 78273 - DNA, 25 bp, Artificial
  probe
  misc_feature (1)..(25): SEQ ID NO: 2004; WAN024BDZ_at; Start 177; Stop 201
gaaactactggacacacctagagag

SEQ ID NO: 78274 - DNA, 25 bp, Artificial
  probe
  misc_feature (1)..(25): SEQ ID NO: 2004; WAN024BDZ_at; Start 5; Stop 29
cgataagggtctgcataccaagagt

SEQ ID NO: 78275 - DNA, 25 bp, Artificial
  probe
  misc_feature (1)..(25): SEQ ID NO: 2004; WAN024BDZ_at; Start 189; Stop 213
cacacctagagaggtgagtagtgta

SEQ ID NO: 78276 - DNA, 25 bp, Artificial
  probe
  misc_feature (1)..(25): SEQ ID NO: 2004; WAN024BDZ_at; Start 69; Stop 93
aatggattttccactggatttgacc

SEQ ID NO: 78277 - DNA, 25 bp, Artificial
  probe
  misc_feature (1)..(25): SEQ ID NO: 2004; WAN024BDZ_at; Start 43; Stop 67
gcaatccagcagatggctccaagaa

SEQ ID NO: 78278 - DNA, 25 bp, Artificial
  probe
  misc_feature (1)..(25): SEQ ID NO: 2004; WAN024BDZ_at; Start 36; Stop 60
gatgatggcaatccagcagatggct

SEQ ID NO: 78279 - DNA, 25 bp, Artificial
  probe
  misc_feature (1)..(25): SEQ ID NO: 2004; WAN024BDZ_at; Start 62; Stop 86
caagaagaatggattttccactgga

SEQ ID NO: 78280 - DNA, 25 bp, Artificial
  probe
  misc_feature (1)..(25): SEQ ID NO: 2004; WAN024BDZ_at; Start 116; Stop 140
gaccgatagcactcatggccatgac

SEQ ID NO: 78281 - DNA, 25 bp, Artificial
  probe
  misc_feature (1)..(25): SEQ ID NO: 2004; WAN024BDZ_at; Start 2; Stop 26
tgccgataagggtctgcataccaag

SEQ ID NO: 78282 - DNA, 25 bp, Artificial
  probe
  misc_feature (1)..(25): SEQ ID NO: 2004; WAN024BDZ_at; Start 135; Stop 159
catgacaataaggaatttagagagt

SEQ ID NO: 78283 - DNA, 25 bp, Artificial
  probe
  misc_feature (1)..(25): SEQ ID NO: 2004; WAN024BDZ_at; Start 18; Stop 42
cataccaagagtggtgaggatgatg

SEQ ID NO: 78284 - DNA, 25 bp, Artificial
  probe
  misc_feature (1)..(25): SEQ ID NO: 2004; WAN024BDZ_at; Start 39; Stop 63
gatggcaatccagcagatggctcca

SEQ ID NO: 78285 - DNA, 25 bp, Artificial
  probe
  misc_feature (1)..(25): SEQ ID NO: 2004; WAN024BDZ_at; Start 93; Stop 117
catagcgaccagattggttttgaga

SEQ ID NO: 78286 - DNA, 25 bp, Artificial
  probe
  misc_feature (1)..(25): SEQ ID NO: 2004; WAN024BDZ_at; Start 8; Stop 32
taagggtctgcataccaagagtggt

SEQ ID NO: 78287 - DNA, 25 bp, Artificial
  probe
  misc_feature (1)..(25): SEQ ID NO: 2004; WAN024BDZ_at; Start 90; Stop 114
gaccatagcgaccagattggttttg

SEQ ID NO: 78288 - DNA, 25 bp, Artificial
  probe
  misc_feature (1)..(25): SEQ ID NO: 2004; WAN024BDZ_at; Start 14; Stop 38
tctgcataccaagagtggtgaggat

SEQ ID NO: 78289 - DNA, 25 bp, Artificial
  probe
  misc_feature (1)..(25): SEQ ID NO: 2004; WAN024BDZ_at; Start 182; Stop 206
tactggacacacctagagaggtgag

SEQ ID NO: 78290 - DNA, 25 bp, Artificial
  probe
  misc_feature (1)..(25): SEQ ID NO: 2004; WAN024BDZ_at; Start 79; Stop 103
ccactggatttgaccatagcgacca

SEQ ID NO: 78291 - DNA, 25 bp, Artificial
  probe
  misc_feature (1)..(25): SEQ ID NO: 2004; WAN024BDZ_at; Start 109; Stop 133
gttttgagaccgatagcactcatgg

SEQ ID NO: 78292 - DNA, 25 bp, Artificial
  probe
  misc_feature (1)..(25): SEQ ID NO: 2004; WAN024BDZ_at; Start 203; Stop 227
tgagtagtgtagtgaggagagaggc

SEQ ID NO: 78293 - DNA, 25 bp, Artificial
  probe
  misc_feature (1)..(25): SEQ ID NO: 2004; WAN024BDZ_at; Start 173; Stop 197
taaagaaactactggacacacctag

SEQ ID NO: 78294 - DNA, 25 bp, Artificial
  probe
  misc_feature (1)..(25): SEQ ID NO: 2004; WAN024BDZ_at; Start 51; Stop 75
gcagatggctccaagaagaatggat

SEQ ID NO: 78295 - DNA, 25 bp, Artificial
  probe
  misc_feature (1)..(25): SEQ ID NO: 2004; WAN024BDZ_at; Start 114; Stop 138
gagaccgatagcactcatggccatg

SEQ ID NO: 78296 - DNA, 25 bp, Artificial
  probe
  misc_feature (1)..(25): SEQ ID NO: 2004; WAN024BDZ_at; Start 75; Stop 99
ttttccactggatttgaccatagcg

SEQ ID NO: 78297 - DNA, 25 bp, Artificial
  probe
  misc_feature (1)..(25): SEQ ID NO: 2004; WAN024BDZ_at; Start 85; Stop 109
gatttgaccatagcgaccagattgg

SEQ ID NO: 78298 - DNA, 25 bp, Artificial
  probe
  misc_feature (1)..(25): SEQ ID NO: 2004; WAN024BDZ_at; Start 179; Stop 203
aactactggacacacctagagaggt

SEQ ID NO: 78299 - DNA, 25 bp, Artificial
  probe
  misc_feature (1)..(25): SEQ ID NO: 2004; WAN024BDZ_at; Start 57; Stop 81
ggctccaagaagaatggattttcca

SEQ ID NO: 78300 - DNA, 25 bp, Artificial
  probe
  misc_feature (1)..(25): SEQ ID NO: 2004; WAN024BDZ_at; Start 48; Stop 72
ccagcagatggctccaagaagaatg

SEQ ID NO: 78301 - DNA, 25 bp, Artificial
  probe
  misc_feature (1)..(25): SEQ ID NO: 2004; WAN024BDZ_at; Start 216; Stop 240
gaggagagaggcaaggataaagtaa

SEQ ID NO: 78302 - DNA, 25 bp, Artificial
  probe
  misc_feature (1)..(25): SEQ ID NO: 2004; WAN024BDZ_at; Start 124; Stop 148
gcactcatggccatgacaataagga

SEQ ID NO: 78303 - DNA, 25 bp, Artificial
  probe
  misc_feature (1)..(25): SEQ ID NO: 2004; WAN024BDZ_at; Start 104; Stop 128
gattggttttgagaccgatagcact

SEQ ID NO: 78304 - DNA, 25 bp, Artificial
  probe
  misc_feature (1)..(25): SEQ ID NO: 2004; WAN024BDZ_at; Start 191; Stop 215
cacctagagaggtgagtagtgtagt

SEQ ID NO: 78305 - DNA, 25 bp, Artificial
  probe
  misc_feature (1)..(25): SEQ ID NO: 4947; WAN024BE2_at; Start 108; Stop 132
tttacatcatagctaccaacaggcg

SEQ ID NO: 78306 - DNA, 25 bp, Artificial
  probe
  misc_feature (1)..(25): SEQ ID NO: 4947; WAN024BE2_at; Start 124; Stop 148
caacaggcgtttcaatggttgctgt

SEQ ID NO: 78307 - DNA, 25 bp, Artificial
  probe
  misc_feature (1)..(25): SEQ ID NO: 4947; WAN024BE2_at; Start 38; Stop 62
gagtgagtgaagcacatcgcctccc

SEQ ID NO: 78308 - DNA, 25 bp, Artificial
  probe
  misc_feature (1)..(25): SEQ ID NO: 4947; WAN024BE2_at; Start 106; Stop 130
tttttacatcatagctaccaacagg

SEQ ID NO: 78309 - DNA, 25 bp, Artificial
  probe
  misc_feature (1)..(25): SEQ ID NO: 4947; WAN024BE2_at; Start 26; Stop 50
aaatggaaaaaggagtgagtgaagc

SEQ ID NO: 78310 - DNA, 25 bp, Artificial
  probe
  misc_feature (1)..(25): SEQ ID NO: 4947; WAN024BE2_at; Start 166; Stop 190
caatcaaggcctgcccaattgggct

SEQ ID NO: 78311 - DNA, 25 bp, Artificial
  probe
  misc_feature (1)..(25): SEQ ID NO: 4947; WAN024BE2_at; Start 101; Stop 125
caagatttttacatcatagctacca

SEQ ID NO: 78312 - DNA, 25 bp, Artificial
  probe
  misc_feature (1)..(25): SEQ ID NO: 4947; WAN024BE2_at; Start 121; Stop 145
taccaacaggcgtttcaatggttgc

SEQ ID NO: 78313 - DNA, 25 bp, Artificial
  probe
  misc_feature (1)..(25): SEQ ID NO: 4947; WAN024BE2_at; Start 52; Stop 76
catcgcctccccactcctttttctg

SEQ ID NO: 78314 - DNA, 25 bp, Artificial
  probe
  misc_feature (1)..(25): SEQ ID NO: 4947; WAN024BE2_at; Start 114; Stop 138
tcatagctaccaacaggcgtttcaa

SEQ ID NO: 78315 - DNA, 25 bp, Artificial
  probe
  misc_feature (1)..(25): SEQ ID NO: 4947; WAN024BE2_at; Start 63; Stop 87
cactcctttttctgtttttaggctg

SEQ ID NO: 78316 - DNA, 25 bp, Artificial
  probe
  misc_feature (1)..(25): SEQ ID NO: 4947; WAN024BE2_at; Start 34; Stop 58
aaaggagtgagtgaagcacatcgcc

SEQ ID NO: 78317 - DNA, 25 bp, Artificial
  probe
  misc_feature (1)..(25): SEQ ID NO: 4947; WAN024BE2_at; Start 155; Stop 179
tgttttcttgccaatcaaggcctgc

SEQ ID NO: 78318 - DNA, 25 bp, Artificial
  probe
  misc_feature (1)..(25): SEQ ID NO: 4947; WAN024BE2_at; Start 112; Stop 136
catcatagctaccaacaggcgtttc

SEQ ID NO: 78319 - DNA, 25 bp, Artificial
  probe
  misc_feature (1)..(25): SEQ ID NO: 4947; WAN024BE2_at; Start 160; Stop 184
tcttgccaatcaaggcctgcccaat

SEQ ID NO: 78320 - DNA, 25 bp, Artificial
  probe
  misc_feature (1)..(25): SEQ ID NO: 4947; WAN024BE2_at; Start 164; Stop 188
gccaatcaaggcctgcccaattggg

SEQ ID NO: 78321 - DNA, 25 bp, Artificial
  probe
  misc_feature (1)..(25): SEQ ID NO: 4947; WAN024BE2_at; Start 171; Stop 195
aaggcctgcccaattgggctttcat

SEQ ID NO: 78322 - DNA, 25 bp, Artificial
  probe
  misc_feature (1)..(25): SEQ ID NO: 4947; WAN024BE2_at; Start 178; Stop 202
gcccaattgggctttcatttgaaac

SEQ ID NO: 78323 - DNA, 25 bp, Artificial
  probe
  misc_feature (1)..(25): SEQ ID NO: 4947; WAN024BE2_at; Start 40; Stop 64
gtgagtgaagcacatcgcctcccca

SEQ ID NO: 78324 - DNA, 25 bp, Artificial
  probe
  misc_feature (1)..(25): SEQ ID NO: 4947; WAN024BE2_at; Start 36; Stop 60
aggagtgagtgaagcacatcgcctc

SEQ ID NO: 78325 - DNA, 25 bp, Artificial
  probe
  misc_feature (1)..(25): SEQ ID NO: 4947; WAN024BE2_at; Start 117; Stop 141
tagctaccaacaggcgtttcaatgg

SEQ ID NO: 78326 - DNA, 25 bp, Artificial
  probe
  misc_feature (1)..(25): SEQ ID NO: 4947; WAN024BE2_at; Start 23; Stop 47
gcaaaatggaaaaaggagtgagtga

SEQ ID NO: 78327 - DNA, 25 bp, Artificial
  probe
  misc_feature (1)..(25): SEQ ID NO: 4947; WAN024BE2_at; Start 29; Stop 53
tggaaaaaggagtgagtgaagcaca

SEQ ID NO: 78328 - DNA, 25 bp, Artificial
  probe
  misc_feature (1)..(25): SEQ ID NO: 4947; WAN024BE2_at; Start 181; Stop 205
caattgggctttcatttgaaacctt

SEQ ID NO: 78329 - DNA, 25 bp, Artificial
  probe
  misc_feature (1)..(25): SEQ ID NO: 4947; WAN024BE2_at; Start 157; Stop 181
ttttcttgccaatcaaggcctgccc

SEQ ID NO: 78330 - DNA, 25 bp, Artificial
  probe
  misc_feature (1)..(25): SEQ ID NO: 4947; WAN024BE2_at; Start 123; Stop 147
ccaacaggcgtttcaatggttgctg

SEQ ID NO: 78331 - DNA, 25 bp, Artificial
  probe
  misc_feature (1)..(25): SEQ ID NO: 4947; WAN024BE2_at; Start 21; Stop 45
tagcaaaatggaaaaaggagtgagt

SEQ ID NO: 78332 - DNA, 25 bp, Artificial
  probe
  misc_feature (1)..(25): SEQ ID NO: 4947; WAN024BE2_at; Start 104; Stop 128
gatttttacatcatagctaccaaca

SEQ ID NO: 78333 - DNA, 25 bp, Artificial
  probe
  misc_feature (1)..(25): SEQ ID NO: 4947; WAN024BE2_at; Start 158; Stop 182
tttcttgccaatcaaggcctgccca

SEQ ID NO: 78334 - DNA, 25 bp, Artificial
  probe
  misc_feature (1)..(25): SEQ ID NO: 4947; WAN024BE2_at; Start 92; Stop 116
ttcaaccttcaagatttttacatca

SEQ ID NO: 78335 - DNA, 25 bp, Artificial
  probe
  misc_feature (1)..(25): SEQ ID NO: 4947; WAN024BE2_at; Start 110; Stop 134
tacatcatagctaccaacaggcgtt

SEQ ID NO: 78336 - DNA, 25 bp, Artificial
  probe
  misc_feature (1)..(25): SEQ ID NO: 4947; WAN024BE2_at; Start 173; Stop 197
ggcctgcccaattgggctttcattt

SEQ ID NO: 78337 - DNA, 25 bp, Artificial
  probe
  misc_feature (1)..(25): SEQ ID NO: 4947; WAN024BE2_at; Start 169; Stop 193
tcaaggcctgcccaattgggctttc

SEQ ID NO: 78338 - DNA, 25 bp, Artificial
  probe
  misc_feature (1)..(25): SEQ ID NO: 4947; WAN024BE2_at; Start 31; Stop 55
gaaaaaggagtgagtgaagcacatc

SEQ ID NO: 78339 - DNA, 25 bp, Artificial
  probe
  misc_feature (1)..(25): SEQ ID NO: 4140; WAN024BE3_at; Start 81; Stop 105
ttacctcatcaaatttgtaaatatc

SEQ ID NO: 78340 - DNA, 25 bp, Artificial
  probe
  misc_feature (1)..(25): SEQ ID NO: 4140; WAN024BE3_at; Start 87; Stop 111
catcaaatttgtaaatatcatgagc

SEQ ID NO: 78341 - DNA, 25 bp, Artificial
  probe
  misc_feature (1)..(25): SEQ ID NO: 4140; WAN024BE3_at; Start 90; Stop 114
caaatttgtaaatatcatgagcctt

SEQ ID NO: 78342 - DNA, 25 bp, Artificial
  probe
  misc_feature (1)..(25): SEQ ID NO: 4140; WAN024BE3_at; Start 84; Stop 108
cctcatcaaatttgtaaatatcatg

SEQ ID NO: 78343 - DNA, 25 bp, Artificial
  probe
  misc_feature (1)..(25): SEQ ID NO: 4140; WAN024BE3_at; Start 91; Stop 115
aaatttgtaaatatcatgagccttc

SEQ ID NO: 78344 - DNA, 25 bp, Artificial
  probe
  misc_feature (1)..(25): SEQ ID NO: 4140; WAN024BE3_at; Start 85; Stop 109
ctcatcaaatttgtaaatatcatga

SEQ ID NO: 78345 - DNA, 25 bp, Artificial
  probe
  misc_feature (1)..(25): SEQ ID NO: 4140; WAN024BE3_at; Start 82; Stop 106
tacctcatcaaatttgtaaatatca

SEQ ID NO: 78346 - DNA, 25 bp, Artificial
  probe
  misc_feature (1)..(25): SEQ ID NO: 4140; WAN024BE3_at; Start 86; Stop 110
tcatcaaatttgtaaatatcatgag

SEQ ID NO: 78347 - DNA, 25 bp, Artificial
  probe
  misc_feature (1)..(25): SEQ ID NO: 4140; WAN024BE3_at; Start 92; Stop 116
aatttgtaaatatcatgagccttct

SEQ ID NO: 78348 - DNA, 25 bp, Artificial
  probe
  misc_feature (1)..(25): SEQ ID NO: 4140; WAN024BE3_at; Start 88; Stop 112
atcaaatttgtaaatatcatgagcc

SEQ ID NO: 78349 - DNA, 25 bp, Artificial
  probe
  misc_feature (1)..(25): SEQ ID NO: 4140; WAN024BE3_at; Start 93; Stop 117
atttgtaaatatcatgagccttctc

SEQ ID NO: 78350 - DNA, 25 bp, Artificial
  probe
  misc_feature (1)..(25): SEQ ID NO: 4140; WAN024BE3_at; Start 89; Stop 113
tcaaatttgtaaatatcatgagcct

SEQ ID NO: 78351 - DNA, 25 bp, Artificial
  probe
  misc_feature (1)..(25): SEQ ID NO: 4140; WAN024BE3_at; Start 83; Stop 107
acctcatcaaatttgtaaatatcat

SEQ ID NO: 78352 - DNA, 25 bp, Artificial
  probe
  misc_feature (1)..(25): SEQ ID NO: 5436; WAN024BE4_at; Start 81; Stop 105
gcaaactagaaagctggtcgctggt

SEQ ID NO: 78353 - DNA, 25 bp, Artificial
  probe
  misc_feature (1)..(25): SEQ ID NO: 5436; WAN024BE4_at; Start 266; Stop 290
cgaacattcttatcctaaaaaatgc

SEQ ID NO: 78354 - DNA, 25 bp, Artificial
  probe
  misc_feature (1)..(25): SEQ ID NO: 5436; WAN024BE4_at; Start 129; Stop 153
tgtcaatagaactgacaaaccctgt

SEQ ID NO: 78355 - DNA, 25 bp, Artificial
  probe
  misc_feature (1)..(25): SEQ ID NO: 5436; WAN024BE4_at; Start 142; Stop 166
gacaaaccctgtaatatacctgcat

SEQ ID NO: 78356 - DNA, 25 bp, Artificial
  probe
  misc_feature (1)..(25): SEQ ID NO: 5436; WAN024BE4_at; Start 91; Stop 115
aagctggtcgctggtggttcaaaac

SEQ ID NO: 78357 - DNA, 25 bp, Artificial
  probe
  misc_feature (1)..(25): SEQ ID NO: 5436; WAN024BE4_at; Start 95; Stop 119
tggtcgctggtggttcaaaacactg

SEQ ID NO: 78358 - DNA, 25 bp, Artificial
  probe
  misc_feature (1)..(25): SEQ ID NO: 5436; WAN024BE4_at; Start 180; Stop 204
aaggcgatactaccctagtttgaag

SEQ ID NO: 78359 - DNA, 25 bp, Artificial
  probe
  misc_feature (1)..(25): SEQ ID NO: 5436; WAN024BE4_at; Start 161; Stop 185
ctgcatatatacatacgacaaggcg

SEQ ID NO: 78360 - DNA, 25 bp, Artificial
  probe
  misc_feature (1)..(25): SEQ ID NO: 5436; WAN024BE4_at; Start 158; Stop 182
tacctgcatatatacatacgacaag

SEQ ID NO: 78361 - DNA, 25 bp, Artificial
  probe
  misc_feature (1)..(25): SEQ ID NO: 5436; WAN024BE4_at; Start 34; Stop 58
aatttcatttctatttcctattcca

SEQ ID NO: 78362 - DNA, 25 bp, Artificial
  probe
  misc_feature (1)..(25): SEQ ID NO: 5436; WAN024BE4_at; Start 135; Stop 159
tagaactgacaaaccctgtaatata

SEQ ID NO: 78363 - DNA, 25 bp, Artificial
  probe
  misc_feature (1)..(25): SEQ ID NO: 5436; WAN024BE4_at; Start 177; Stop 201
gacaaggcgatactaccctagtttg

SEQ ID NO: 78364 - DNA, 25 bp, Artificial
  probe
  misc_feature (1)..(25): SEQ ID NO: 5436; WAN024BE4_at; Start 1; Stop 25
ttggaaatgacaaccatccgatcac

SEQ ID NO: 78365 - DNA, 25 bp, Artificial
  probe
  misc_feature (1)..(25): SEQ ID NO: 5436; WAN024BE4_at; Start 229; Stop 253
tgtcttttacttattataccatatt

SEQ ID NO: 78366 - DNA, 25 bp, Artificial
  probe
  misc_feature (1)..(25): SEQ ID NO: 5436; WAN024BE4_at; Start 93; Stop 117
gctggtcgctggtggttcaaaacac

SEQ ID NO: 78367 - DNA, 25 bp, Artificial
  probe
  misc_feature (1)..(25): SEQ ID NO: 5436; WAN024BE4_at; Start 139; Stop 163
actgacaaaccctgtaatatacctg

SEQ ID NO: 78368 - DNA, 25 bp, Artificial
  probe
  misc_feature (1)..(25): SEQ ID NO: 5436; WAN024BE4_at; Start 115; Stop 139
cactgttttgagattgtcaatagaa

SEQ ID NO: 78369 - DNA, 25 bp, Artificial
  probe
  misc_feature (1)..(25): SEQ ID NO: 5436; WAN024BE4_at; Start 208; Stop 232
ttttcgaagagtattcatttttgtc

SEQ ID NO: 78370 - DNA, 25 bp, Artificial
  probe
  misc_feature (1)..(25): SEQ ID NO: 5436; WAN024BE4_at; Start 174; Stop 198
tacgacaaggcgatactaccctagt

SEQ ID NO: 78371 - DNA, 25 bp, Artificial
  probe
  misc_feature (1)..(25): SEQ ID NO: 5436; WAN024BE4_at; Start 97; Stop 121
gtcgctggtggttcaaaacactgtt

SEQ ID NO: 78372 - DNA, 25 bp, Artificial
  probe
  misc_feature (1)..(25): SEQ ID NO: 5436; WAN024BE4_at; Start 9; Stop 33
gacaaccatccgatcacttcttctt

SEQ ID NO: 78373 - DNA, 25 bp, Artificial
  probe
  misc_feature (1)..(25): SEQ ID NO: 5436; WAN024BE4_at; Start 15; Stop 39
catccgatcacttcttcttaatttc

SEQ ID NO: 78374 - DNA, 25 bp, Artificial
  probe
  misc_feature (1)..(25): SEQ ID NO: 5436; WAN024BE4_at; Start 132; Stop 156
caatagaactgacaaaccctgtaat

SEQ ID NO: 78375 - DNA, 25 bp, Artificial
  probe
  misc_feature (1)..(25): SEQ ID NO: 5436; WAN024BE4_at; Start 45; Stop 69
tatttcctattccatttttattcaa

SEQ ID NO: 78376 - DNA, 25 bp, Artificial
  probe
  misc_feature (1)..(25): SEQ ID NO: 5436; WAN024BE4_at; Start 83; Stop 107
aaactagaaagctggtcgctggtgg

SEQ ID NO: 78377 - DNA, 25 bp, Artificial
  probe
  misc_feature (1)..(25): SEQ ID NO: 5436; WAN024BE4_at; Start 144; Stop 168
caaaccctgtaatatacctgcatat

SEQ ID NO: 78378 - DNA, 25 bp, Artificial
  probe
  misc_feature (1)..(25): SEQ ID NO: 5436; WAN024BE4_at; Start 121; Stop 145
tttgagattgtcaatagaactgaca

SEQ ID NO: 78379 - DNA, 25 bp, Artificial
  probe
  misc_feature (1)..(25): SEQ ID NO: 5436; WAN024BE4_at; Start 4; Stop 28
gaaatgacaaccatccgatcacttc

SEQ ID NO: 78380 - DNA, 25 bp, Artificial
  probe
  misc_feature (1)..(25): SEQ ID NO: 5436; WAN024BE4_at; Start 99; Stop 123
cgctggtggttcaaaacactgtttt

SEQ ID NO: 78381 - DNA, 25 bp, Artificial
  probe
  misc_feature (1)..(25): SEQ ID NO: 5436; WAN024BE4_at; Start 86; Stop 110
ctagaaagctggtcgctggtggttc

SEQ ID NO: 78382 - DNA, 25 bp, Artificial
  probe
  misc_feature (1)..(25): SEQ ID NO: 5436; WAN024BE4_at; Start 90; Stop 114
aaagctggtcgctggtggttcaaaa

SEQ ID NO: 78383 - DNA, 25 bp, Artificial
  probe
  misc_feature (1)..(25): SEQ ID NO: 5436; WAN024BE4_at; Start 20; Stop 44
gatcacttcttcttaatttcatttc

SEQ ID NO: 78384 - DNA, 25 bp, Artificial
  probe
  misc_feature (1)..(25): SEQ ID NO: 5436; WAN024BE4_at; Start 183; Stop 207
gcgatactaccctagtttgaagaga

SEQ ID NO: 78385 - DNA, 25 bp, Artificial
  probe
  misc_feature (1)..(25): SEQ ID NO: 5436; WAN024BE4_at; Start 2; Stop 26
tggaaatgacaaccatccgatcact

SEQ ID NO: 78386 - DNA, 25 bp, Artificial
  probe
  misc_feature (1)..(25): SEQ ID NO: 4276; WAN024BE5_at; Start 154; Stop 178
caacgggactggattgattttttgt

SEQ ID NO: 78387 - DNA, 25 bp, Artificial
  probe
  misc_feature (1)..(25): SEQ ID NO: 4276; WAN024BE5_at; Start 56; Stop 80
gacggagtactttttcttcaatagc

SEQ ID NO: 78388 - DNA, 25 bp, Artificial
  probe
  misc_feature (1)..(25): SEQ ID NO: 4276; WAN024BE5_at; Start 178; Stop 202
tcaacagagtcgagtgtgacgagct

SEQ ID NO: 78389 - DNA, 25 bp, Artificial
  probe
  misc_feature (1)..(25): SEQ ID NO: 4276; WAN024BE5_at; Start 4; Stop 28
tggcaaacgccacagtattcaactt

SEQ ID NO: 78390 - DNA, 25 bp, Artificial
  probe
  misc_feature (1)..(25): SEQ ID NO: 4276; WAN024BE5_at; Start 184; Stop 208
gagtcgagtgtgacgagctctcttg

SEQ ID NO: 78391 - DNA, 25 bp, Artificial
  probe
  misc_feature (1)..(25): SEQ ID NO: 4276; WAN024BE5_at; Start 86; Stop 110
cagtgctttctggatttacaacaac

SEQ ID NO: 78392 - DNA, 25 bp, Artificial
  probe
  misc_feature (1)..(25): SEQ ID NO: 4276; WAN024BE5_at; Start 90; Stop 114
gctttctggatttacaacaacagct

SEQ ID NO: 78393 - DNA, 25 bp, Artificial
  probe
  misc_feature (1)..(25): SEQ ID NO: 4276; WAN024BE5_at; Start 144; Stop 168
agaacagggacaacgggactggatt

SEQ ID NO: 78394 - DNA, 25 bp, Artificial
  probe
  misc_feature (1)..(25): SEQ ID NO: 4276; WAN024BE5_at; Start 135; Stop 159
tattgaccgagaacagggacaacgg

SEQ ID NO: 78395 - DNA, 25 bp, Artificial
  probe
  misc_feature (1)..(25): SEQ ID NO: 4276; WAN024BE5_at; Start 268; Stop 292
gtagaacaatcgattaactggttga

SEQ ID NO: 78396 - DNA, 25 bp, Artificial
  probe
  misc_feature (1)..(25): SEQ ID NO: 4276; WAN024BE5_at; Start 110; Stop 134
cagctttcatagctatcctccttga

SEQ ID NO: 78397 - DNA, 25 bp, Artificial
  probe
  misc_feature (1)..(25): SEQ ID NO: 4276; WAN024BE5_at; Start 97; Stop 121
ggatttacaacaacagctttcatag

SEQ ID NO: 78398 - DNA, 25 bp, Artificial
  probe
  misc_feature (1)..(25): SEQ ID NO: 4276; WAN024BE5_at; Start 148; Stop 172
cagggacaacgggactggattgatt

SEQ ID NO: 78399 - DNA, 25 bp, Artificial
  probe
  misc_feature (1)..(25): SEQ ID NO: 4276; WAN024BE5_at; Start 138; Stop 162
tgaccgagaacagggacaacgggac

SEQ ID NO: 78400 - DNA, 25 bp, Artificial
  probe
  misc_feature (1)..(25): SEQ ID NO: 4276; WAN024BE5_at; Start 219; Stop 243
tgaagtatatcacaaaagaaagcct

SEQ ID NO: 78401 - DNA, 25 bp, Artificial
  probe
  misc_feature (1)..(25): SEQ ID NO: 4276; WAN024BE5_at; Start 227; Stop 251
atcacaaaagaaagccttttccaag

SEQ ID NO: 78402 - DNA, 25 bp, Artificial
  probe
  misc_feature (1)..(25): SEQ ID NO: 4276; WAN024BE5_at; Start 188; Stop 212
cgagtgtgacgagctctcttgtatt

SEQ ID NO: 78403 - DNA, 25 bp, Artificial
  probe
  misc_feature (1)..(25): SEQ ID NO: 4276; WAN024BE5_at; Start 42; Stop 66
cccagtttcaagtggacggagtact

SEQ ID NO: 78404 - DNA, 25 bp, Artificial
  probe
  misc_feature (1)..(25): SEQ ID NO: 4276; WAN024BE5_at; Start 68; Stop 92
tttcttcaatagcaacaccagtgct

SEQ ID NO: 78405 - DNA, 25 bp, Artificial
  probe
  misc_feature (1)..(25): SEQ ID NO: 4276; WAN024BE5_at; Start 198; Stop 222
gagctctcttgtatttatatgtgaa

SEQ ID NO: 78406 - DNA, 25 bp, Artificial
  probe
  misc_feature (1)..(25): SEQ ID NO: 4276; WAN024BE5_at; Start 74; Stop 98
caatagcaacaccagtgctttctgg

SEQ ID NO: 78407 - DNA, 25 bp, Artificial
  probe
  misc_feature (1)..(25): SEQ ID NO: 4276; WAN024BE5_at; Start 22; Stop 46
tcaacttctacaagtgcttccccag

SEQ ID NO: 78408 - DNA, 25 bp, Artificial
  probe
  misc_feature (1)..(25): SEQ ID NO: 4276; WAN024BE5_at; Start 169; Stop 193
gattttttgtcaacagagtcgagtg

SEQ ID NO: 78409 - DNA, 25 bp, Artificial
  probe
  misc_feature (1)..(25): SEQ ID NO: 4276; WAN024BE5_at; Start 60; Stop 84
gagtactttttcttcaatagcaaca

SEQ ID NO: 78410 - DNA, 25 bp, Artificial
  probe
  misc_feature (1)..(25): SEQ ID NO: 4276; WAN024BE5_at; Start 255; Stop 279
ttggagacaaaaagtagaacaatcg

SEQ ID NO: 78411 - DNA, 25 bp, Artificial
  probe
  misc_feature (1)..(25): SEQ ID NO: 4276; WAN024BE5_at; Start 37; Stop 61
gcttccccagtttcaagtggacgga

SEQ ID NO: 78412 - DNA, 25 bp, Artificial
  probe
  misc_feature (1)..(25): SEQ ID NO: 4276; WAN024BE5_at; Start 12; Stop 36
gccacagtattcaacttctacaagt

SEQ ID NO: 78413 - DNA, 25 bp, Artificial
  probe
  misc_feature (1)..(25): SEQ ID NO: 4276; WAN024BE5_at; Start 79; Stop 103
gcaacaccagtgctttctggattta

SEQ ID NO: 78414 - DNA, 25 bp, Artificial
  probe
  misc_feature (1)..(25): SEQ ID NO: 4276; WAN024BE5_at; Start 121; Stop 145
gctatcctccttgatattgaccgag

SEQ ID NO: 78415 - DNA, 25 bp, Artificial
  probe
  misc_feature (1)..(25): SEQ ID NO: 4276; WAN024BE5_at; Start 274; Stop 298
caatcgattaactggttgatgagac

SEQ ID NO: 78416 - DNA, 25 bp, Artificial
  probe
  misc_feature (1)..(25): SEQ ID NO: 4276; WAN024BE5_at; Start 132; Stop 156
tgatattgaccgagaacagggacaa

SEQ ID NO: 78417 - DNA, 25 bp, Artificial
  probe
  misc_feature (1)..(25): SEQ ID NO: 4276; WAN024BE5_at; Start 32; Stop 56
caagtgcttccccagtttcaagtgg

SEQ ID NO: 78418 - DNA, 25 bp, Artificial
  probe
  misc_feature (1)..(25): SEQ ID NO: 4276; WAN024BE5_at; Start 128; Stop 152
tccttgatattgaccgagaacaggg

SEQ ID NO: 78419 - DNA, 25 bp, Artificial
  probe
  misc_feature (1)..(25): SEQ ID NO: 4276; WAN024BE5_at; Start 194; Stop 218
tgacgagctctcttgtatttatatg

SEQ ID NO: 78420 - DNA, 25 bp, Artificial
  probe
  misc_feature (1)..(25): SEQ ID NO: 1700; WAN024BE6_at; Start 266; Stop 290
gctttaatccaggttgccaaaatca

SEQ ID NO: 78421 - DNA, 25 bp, Artificial
  probe
  misc_feature (1)..(25): SEQ ID NO: 1700; WAN024BE6_at; Start 184; Stop 208
cctattttatgtggtgtttgtctaa

SEQ ID NO: 78422 - DNA, 25 bp, Artificial
  probe
  misc_feature (1)..(25): SEQ ID NO: 1700; WAN024BE6_at; Start 15; Stop 39
gggtttcttagtggataagcaaaca

SEQ ID NO: 78423 - DNA, 25 bp, Artificial
  probe
  misc_feature (1)..(25): SEQ ID NO: 1700; WAN024BE6_at; Start 164; Stop 188
tatctttgatacaggataagcctat

SEQ ID NO: 78424 - DNA, 25 bp, Artificial
  probe
  misc_feature (1)..(25): SEQ ID NO: 1700; WAN024BE6_at; Start 271; Stop 295
aatccaggttgccaaaatcataagg

SEQ ID NO: 78425 - DNA, 25 bp, Artificial
  probe
  misc_feature (1)..(25): SEQ ID NO: 1700; WAN024BE6_at; Start 2; Stop 26
tgatagaggcacagggtttcttagt

SEQ ID NO: 78426 - DNA, 25 bp, Artificial
  probe
  misc_feature (1)..(25): SEQ ID NO: 1700; WAN024BE6_at; Start 108; Stop 132
tgcttgttatcggtgtcatgattca

SEQ ID NO: 78427 - DNA, 25 bp, Artificial
  probe
  misc_feature (1)..(25): SEQ ID NO: 1700; WAN024BE6_at; Start 11; Stop 35
cacagggtttcttagtggataagca

SEQ ID NO: 78428 - DNA, 25 bp, Artificial
  probe
  misc_feature (1)..(25): SEQ ID NO: 1700; WAN024BE6_at; Start 226; Stop 250
caatataaagaaagcttaagttgcc

SEQ ID NO: 78429 - DNA, 25 bp, Artificial
  probe
  misc_feature (1)..(25): SEQ ID NO: 1700; WAN024BE6_at; Start 274; Stop 298
ccaggttgccaaaatcataaggaac

SEQ ID NO: 78430 - DNA, 25 bp, Artificial
  probe
  misc_feature (1)..(25): SEQ ID NO: 1700; WAN024BE6_at; Start 45; Stop 69
cattcattaccatagcaagctggat

SEQ ID NO: 78431 - DNA, 25 bp, Artificial
  probe
  misc_feature (1)..(25): SEQ ID NO: 1700; WAN024BE6_at; Start 38; Stop 62
caagatgcattcattaccatagcaa

SEQ ID NO: 78432 - DNA, 25 bp, Artificial
  probe
  misc_feature (1)..(25): SEQ ID NO: 1700; WAN024BE6_at; Start 54; Stop 78
ccatagcaagctggatattattgct

SEQ ID NO: 78433 - DNA, 25 bp, Artificial
  probe
  misc_feature (1)..(25): SEQ ID NO: 1700; WAN024BE6_at; Start 173; Stop 197
tacaggataagcctattttatgtgg

SEQ ID NO: 78434 - DNA, 25 bp, Artificial
  probe
  misc_feature (1)..(25): SEQ ID NO: 1700; WAN024BE6_at; Start 175; Stop 199
caggataagcctattttatgtggtg

SEQ ID NO: 78435 - DNA, 25 bp, Artificial
  probe
  misc_feature (1)..(25): SEQ ID NO: 1700; WAN024BE6_at; Start 43; Stop 67
tgcattcattaccatagcaagctgg

SEQ ID NO: 78436 - DNA, 25 bp, Artificial
  probe
  misc_feature (1)..(25): SEQ ID NO: 1700; WAN024BE6_at; Start 49; Stop 73
cattaccatagcaagctggatatta

SEQ ID NO: 78437 - DNA, 25 bp, Artificial
  probe
  misc_feature (1)..(25): SEQ ID NO: 1700; WAN024BE6_at; Start 262; Stop 286
tctcgctttaatccaggttgccaaa

SEQ ID NO: 78438 - DNA, 25 bp, Artificial
  probe
  misc_feature (1)..(25): SEQ ID NO: 1700; WAN024BE6_at; Start 21; Stop 45
cttagtggataagcaaacaagatgc

SEQ ID NO: 78439 - DNA, 25 bp, Artificial
  probe
  misc_feature (1)..(25): SEQ ID NO: 1700; WAN024BE6_at; Start 101; Stop 125
agtattatgcttgttatcggtgtca

SEQ ID NO: 78440 - DNA, 25 bp, Artificial
  probe
  misc_feature (1)..(25): SEQ ID NO: 1700; WAN024BE6_at; Start 288; Stop 312
tcataaggaacgctattttaaatag

SEQ ID NO: 78441 - DNA, 25 bp, Artificial
  probe
  misc_feature (1)..(25): SEQ ID NO: 1700; WAN024BE6_at; Start 157; Stop 181
tatcccttatctttgatacaggata

SEQ ID NO: 78442 - DNA, 25 bp, Artificial
  probe
  misc_feature (1)..(25): SEQ ID NO: 1700; WAN024BE6_at; Start 5; Stop 29
tagaggcacagggtttcttagtgga

SEQ ID NO: 78443 - DNA, 25 bp, Artificial
  probe
  misc_feature (1)..(25): SEQ ID NO: 1700; WAN024BE6_at; Start 259; Stop 283
ttttctcgctttaatccaggttgcc

SEQ ID NO: 78444 - DNA, 25 bp, Artificial
  probe
  misc_feature (1)..(25): SEQ ID NO: 1700; WAN024BE6_at; Start 113; Stop 137
gttatcggtgtcatgattcattaga

SEQ ID NO: 78445 - DNA, 25 bp, Artificial
  probe
  misc_feature (1)..(25): SEQ ID NO: 1700; WAN024BE6_at; Start 63; Stop 87
gctggatattattgctttacaatgc

SEQ ID NO: 78446 - DNA, 25 bp, Artificial
  probe
  misc_feature (1)..(25): SEQ ID NO: 1700; WAN024BE6_at; Start 25; Stop 49
gtggataagcaaacaagatgcattc

SEQ ID NO: 78447 - DNA, 25 bp, Artificial
  probe
  misc_feature (1)..(25): SEQ ID NO: 1700; WAN024BE6_at; Start 280; Stop 304
tgccaaaatcataaggaacgctatt

SEQ ID NO: 78448 - DNA, 25 bp, Artificial
  probe
  misc_feature (1)..(25): SEQ ID NO: 1700; WAN024BE6_at; Start 86; Stop 110
gctatgattgtaaaaagtattatgc

SEQ ID NO: 78449 - DNA, 25 bp, Artificial
  probe
  misc_feature (1)..(25): SEQ ID NO: 1700; WAN024BE6_at; Start 277; Stop 301
ggttgccaaaatcataaggaacgct

SEQ ID NO: 78450 - DNA, 25 bp, Artificial
  probe
  misc_feature (1)..(25): SEQ ID NO: 1700; WAN024BE6_at; Start 33; Stop 57
gcaaacaagatgcattcattaccat

SEQ ID NO: 78451 - DNA, 25 bp, Artificial
  probe
  misc_feature (1)..(25): SEQ ID NO: 1700; WAN024BE6_at; Start 72; Stop 96
tattgctttacaatgctatgattgt

SEQ ID NO: 78452 - DNA, 25 bp, Artificial
  probe
  misc_feature (1)..(25): SEQ ID NO: 1700; WAN024BE6_at; Start 216; Stop 240
aacatataagcaatataaagaaagc

SEQ ID NO: 78453 - DNA, 25 bp, Artificial
  probe
  misc_feature (1)..(25): SEQ ID NO: 1700; WAN024BE6_at; Start 189; Stop 213
tttatgtggtgtttgtctaaaacta

SEQ ID NO: 78454 - DNA, 25 bp, Artificial
  probe
  misc_feature (1)..(25): SEQ ID NO: 5079; WAN024BE7_at; Start 309; Stop 333
ggcgatccgctgtttttgtccacca

SEQ ID NO: 78455 - DNA, 25 bp, Artificial
  probe
  misc_feature (1)..(25): SEQ ID NO: 5079; WAN024BE7_at; Start 60; Stop 84
gcttggattgtcaaaaaagttatcg

SEQ ID NO: 78456 - DNA, 25 bp, Artificial
  probe
  misc_feature (1)..(25): SEQ ID NO: 5079; WAN024BE7_at; Start 39; Stop 63
gaattgttgggcacgaggttcgctt

SEQ ID NO: 78457 - DNA, 25 bp, Artificial
  probe
  misc_feature (1)..(25): SEQ ID NO: 5079; WAN024BE7_at; Start 70; Stop 94
tcaaaaaagttatcgacatctgtcg

SEQ ID NO: 78458 - DNA, 25 bp, Artificial
  probe
  misc_feature (1)..(25): SEQ ID NO: 5079; WAN024BE7_at; Start 157; Stop 181
cccatttcgtgggtaacgatgatca

SEQ ID NO: 78459 - DNA, 25 bp, Artificial
  probe
  misc_feature (1)..(25): SEQ ID NO: 5079; WAN024BE7_at; Start 109; Stop 133
tctccgtcggccataaagataatgc

SEQ ID NO: 78460 - DNA, 25 bp, Artificial
  probe
  misc_feature (1)..(25): SEQ ID NO: 5079; WAN024BE7_at; Start 295; Stop 319
agaccacgagcgatggcgatccgct

SEQ ID NO: 78461 - DNA, 25 bp, Artificial
  probe
  misc_feature (1)..(25): SEQ ID NO: 5079; WAN024BE7_at; Start 265; Stop 289
tcaaagaggaggagttccggatgca

SEQ ID NO: 78462 - DNA, 25 bp, Artificial
  probe
  misc_feature (1)..(25): SEQ ID NO: 5079; WAN024BE7_at; Start 182; Stop 206
tgttcatcccatcatgcgccagttt

SEQ ID NO: 78463 - DNA, 25 bp, Artificial
  probe
  misc_feature (1)..(25): SEQ ID NO: 5079; WAN024BE7_at; Start 90; Stop 114
tgtcgtatctactaaaacttctccg

SEQ ID NO: 78464 - DNA, 25 bp, Artificial
  probe
  misc_feature (1)..(25): SEQ ID NO: 5079; WAN024BE7_at; Start 193; Stop 217
tcatgcgccagtttctgcataactg

SEQ ID NO: 78465 - DNA, 25 bp, Artificial
  probe
  misc_feature (1)..(25): SEQ ID NO: 5079; WAN024BE7_at; Start 327; Stop 351
tccaccagatagcatggcgggatag

SEQ ID NO: 78466 - DNA, 25 bp, Artificial
  probe
  misc_feature (1)..(25): SEQ ID NO: 5079; WAN024BE7_at; Start 273; Stop 297
gaggagttccggatgcatagcaaga

SEQ ID NO: 78467 - DNA, 25 bp, Artificial
  probe
  misc_feature (1)..(25): SEQ ID NO: 5079; WAN024BE7_at; Start 141; Stop 165
aacctctcgagcaaagcccatttcg

SEQ ID NO: 78468 - DNA, 25 bp, Artificial
  probe
  misc_feature (1)..(25): SEQ ID NO: 5079; WAN024BE7_at; Start 236; Stop 260
tctcaggatcaagagcagatgttgg

SEQ ID NO: 78469 - DNA, 25 bp, Artificial
  probe
  misc_feature (1)..(25): SEQ ID NO: 5079; WAN024BE7_at; Start 118; Stop 142
gccataaagataatgcggtccgcaa

SEQ ID NO: 78470 - DNA, 25 bp, Artificial
  probe
  misc_feature (1)..(25): SEQ ID NO: 5079; WAN024BE7_at; Start 151; Stop 175
gcaaagcccatttcgtgggtaacga

SEQ ID NO: 78471 - DNA, 25 bp, Artificial
  probe
  misc_feature (1)..(25): SEQ ID NO: 5079; WAN024BE7_at; Start 3; Stop 27
gactttgtcactttcgtggttgata

SEQ ID NO: 78472 - DNA, 25 bp, Artificial
  probe
  misc_feature (1)..(25): SEQ ID NO: 5079; WAN024BE7_at; Start 82; Stop 106
tcgacatctgtcgtatctactaaaa

SEQ ID NO: 78473 - DNA, 25 bp, Artificial
  probe
  misc_feature (1)..(25): SEQ ID NO: 5079; WAN024BE7_at; Start 176; Stop 200
tgatcatgttcatcccatcatgcgc

SEQ ID NO: 78474 - DNA, 25 bp, Artificial
  probe
  misc_feature (1)..(25): SEQ ID NO: 5079; WAN024BE7_at; Start 99; Stop 123
tactaaaacttctccgtcggccata

SEQ ID NO: 78475 - DNA, 25 bp, Artificial
  probe
  misc_feature (1)..(25): SEQ ID NO: 5079; WAN024BE7_at; Start 290; Stop 314
tagcaagaccacgagcgatggcgat

SEQ ID NO: 78476 - DNA, 25 bp, Artificial
  probe
  misc_feature (1)..(25): SEQ ID NO: 5079; WAN024BE7_at; Start 245; Stop 269
caagagcagatgttggttcatcaaa

SEQ ID NO: 78477 - DNA, 25 bp, Artificial
  probe
  misc_feature (1)..(25): SEQ ID NO: 5079; WAN024BE7_at; Start 219; Stop 243
tagaacatctccgatagtctcagga

SEQ ID NO: 78478 - DNA, 25 bp, Artificial
  probe
  misc_feature (1)..(25): SEQ ID NO: 5079; WAN024BE7_at; Start 50; Stop 74
cacgaggttcgcttggattgtcaaa

SEQ ID NO: 78479 - DNA, 25 bp, Artificial
  probe
  misc_feature (1)..(25): SEQ ID NO: 5079; WAN024BE7_at; Start 17; Stop 41
cgtggttgataattttgctgaggaa

SEQ ID NO: 78480 - DNA, 25 bp, Artificial
  probe
  misc_feature (1)..(25): SEQ ID NO: 5079; WAN024BE7_at; Start 163; Stop 187
tcgtgggtaacgatgatcatgttca

SEQ ID NO: 78481 - DNA, 25 bp, Artificial
  probe
  misc_feature (1)..(25): SEQ ID NO: 5079; WAN024BE7_at; Start 258; Stop 282
tggttcatcaaagaggaggagttcc

SEQ ID NO: 78482 - DNA, 25 bp, Artificial
  probe
  misc_feature (1)..(25): SEQ ID NO: 5079; WAN024BE7_at; Start 208; Stop 232
tgcataactgctagaacatctccga

SEQ ID NO: 78483 - DNA, 25 bp, Artificial
  probe
  misc_feature (1)..(25): SEQ ID NO: 5079; WAN024BE7_at; Start 322; Stop 346
ttttgtccaccagatagcatggcgg

SEQ ID NO: 78484 - DNA, 25 bp, Artificial
  probe
  misc_feature (1)..(25): SEQ ID NO: 5079; WAN024BE7_at; Start 29; Stop 53
ttttgctgaggaattgttgggcacg

SEQ ID NO: 78485 - DNA, 25 bp, Artificial
  probe
  misc_feature (1)..(25): SEQ ID NO: 5079; WAN024BE7_at; Start 128; Stop 152
taatgcggtccgcaacctctcgagc

SEQ ID NO: 78486 - DNA, 25 bp, Artificial
  probe
  misc_feature (1)..(25): SEQ ID NO: 5079; WAN024BE7_at; Start 283; Stop 307
ggatgcatagcaagaccacgagcga

SEQ ID NO: 78487 - DNA, 25 bp, Artificial
  probe
  misc_feature (1)..(25): SEQ ID NO: 5079; WAN024BE7_at; Start 229; Stop 253
ccgatagtctcaggatcaagagcag

SEQ ID NO: 78488 - DNA, 25 bp, Artificial
  probe
  misc_feature (1)..(25): SEQ ID NO: 1573; WAN024BE8_at; Start 283; Stop 307
ggctggatcaagtccgtcaggaact

SEQ ID NO: 78489 - DNA, 25 bp, Artificial
  probe
  misc_feature (1)..(25): SEQ ID NO: 1573; WAN024BE8_at; Start 161; Stop 185
tgaacagcgaggttaccaagtccac

SEQ ID NO: 78490 - DNA, 25 bp, Artificial
  probe
  misc_feature (1)..(25): SEQ ID NO: 1573; WAN024BE8_at; Start 1; Stop 25
atgagctcctccatcagttttttct

SEQ ID NO: 78491 - DNA, 25 bp, Artificial
  probe
  misc_feature (1)..(25): SEQ ID NO: 1573; WAN024BE8_at; Start 331; Stop 355
gatacattgttcagccataccaccg

SEQ ID NO: 78492 - DNA, 25 bp, Artificial
  probe
  misc_feature (1)..(25): SEQ ID NO: 1573; WAN024BE8_at; Start 275; Stop 299
gaagcttgggctggatcaagtccgt

SEQ ID NO: 78493 - DNA, 25 bp, Artificial
  probe
  misc_feature (1)..(25): SEQ ID NO: 1573; WAN024BE8_at; Start 119; Stop 143
tcgactgcgataacatgagcattga

SEQ ID NO: 78494 - DNA, 25 bp, Artificial
  probe
  misc_feature (1)..(25): SEQ ID NO: 1573; WAN024BE8_at; Start 256; Stop 280
tccagcacatgtgatagaagaagct

SEQ ID NO: 78495 - DNA, 25 bp, Artificial
  probe
  misc_feature (1)..(25): SEQ ID NO: 1573; WAN024BE8_at; Start 206; Stop 230
cattggcctggttcaacttttgctt

SEQ ID NO: 78496 - DNA, 25 bp, Artificial
  probe
  misc_feature (1)..(25): SEQ ID NO: 1573; WAN024BE8_at; Start 215; Stop 239
ggttcaacttttgcttctttgatag

SEQ ID NO: 78497 - DNA, 25 bp, Artificial
  probe
  misc_feature (1)..(25): SEQ ID NO: 1573; WAN024BE8_at; Start 15; Stop 39
cagttttttctttaatgagtccagc

SEQ ID NO: 78498 - DNA, 25 bp, Artificial
  probe
  misc_feature (1)..(25): SEQ ID NO: 1573; WAN024BE8_at; Start 74; Stop 98
tcagcgcctacttcttttgcaaggg

SEQ ID NO: 78499 - DNA, 25 bp, Artificial
  probe
  misc_feature (1)..(25): SEQ ID NO: 1573; WAN024BE8_at; Start 79; Stop 103
gcctacttcttttgcaagggcaagt

SEQ ID NO: 78500 - DNA, 25 bp, Artificial
  probe
  misc_feature (1)..(25): SEQ ID NO: 1573; WAN024BE8_at; Start 55; Stop 79
gaggccgttaatcacaatgtcagcg

SEQ ID NO: 78501 - DNA, 25 bp, Artificial
  probe
  misc_feature (1)..(25): SEQ ID NO: 1573; WAN024BE8_at; Start 42; Stop 66
catcttcaacttcgaggccgttaat

SEQ ID NO: 78502 - DNA, 25 bp, Artificial
  probe
  misc_feature (1)..(25): SEQ ID NO: 1573; WAN024BE8_at; Start 132; Stop 156
catgagcattgaatacttttttagc

SEQ ID NO: 78503 - DNA, 25 bp, Artificial
  probe
  misc_feature (1)..(25): SEQ ID NO: 1573; WAN024BE8_at; Start 178; Stop 202
aagtccaccagcaccgtaaagaaca

SEQ ID NO: 78504 - DNA, 25 bp, Artificial
  probe
  misc_feature (1)..(25): SEQ ID NO: 1573; WAN024BE8_at; Start 321; Stop 345
cagcagttacgatacattgttcagc

SEQ ID NO: 78505 - DNA, 25 bp, Artificial
  probe
  misc_feature (1)..(25): SEQ ID NO: 1573; WAN024BE8_at; Start 63; Stop 87
taatcacaatgtcagcgcctacttc

SEQ ID NO: 78506 - DNA, 25 bp, Artificial
  probe
  misc_feature (1)..(25): SEQ ID NO: 1573; WAN024BE8_at; Start 38; Stop 62
gctacatcttcaacttcgaggccgt

SEQ ID NO: 78507 - DNA, 25 bp, Artificial
  probe
  misc_feature (1)..(25): SEQ ID NO: 1573; WAN024BE8_at; Start 153; Stop 177
tagcgtattgaacagcgaggttacc

SEQ ID NO: 78508 - DNA, 25 bp, Artificial
  probe
  misc_feature (1)..(25): SEQ ID NO: 1573; WAN024BE8_at; Start 106; Stop 130
gtcattgttgatatcgactgcgata

SEQ ID NO: 78509 - DNA, 25 bp, Artificial
  probe
  misc_feature (1)..(25): SEQ ID NO: 1573; WAN024BE8_at; Start 291; Stop 315
caagtccgtcaggaactttgacagc

SEQ ID NO: 78510 - DNA, 25 bp, Artificial
  probe
  misc_feature (1)..(25): SEQ ID NO: 1573; WAN024BE8_at; Start 235; Stop 259
gatagctttataggttgttactcca

SEQ ID NO: 78511 - DNA, 25 bp, Artificial
  probe
  misc_feature (1)..(25): SEQ ID NO: 1573; WAN024BE8_at; Start 198; Stop 222
gaacaacccattggcctggttcaac

SEQ ID NO: 78512 - DNA, 25 bp, Artificial
  probe
  misc_feature (1)..(25): SEQ ID NO: 1573; WAN024BE8_at; Start 27; Stop 51
taatgagtccagctacatcttcaac

SEQ ID NO: 78513 - DNA, 25 bp, Artificial
  probe
  misc_feature (1)..(25): SEQ ID NO: 1573; WAN024BE8_at; Start 91; Stop 115
tgcaagggcaagtttgtcattgttg

SEQ ID NO: 78514 - DNA, 25 bp, Artificial
  probe
  misc_feature (1)..(25): SEQ ID NO: 1573; WAN024BE8_at; Start 192; Stop 216
cgtaaagaacaacccattggcctgg

SEQ ID NO: 78515 - DNA, 25 bp, Artificial
  probe
  misc_feature (1)..(25): SEQ ID NO: 1573; WAN024BE8_at; Start 310; Stop 334
gacagcatagtcagcagttacgata

SEQ ID NO: 78516 - DNA, 25 bp, Artificial
  probe
  misc_feature (1)..(25): SEQ ID NO: 1573; WAN024BE8_at; Start 170; Stop 194
aggttaccaagtccaccagcaccgt

SEQ ID NO: 78517 - DNA, 25 bp, Artificial
  probe
  misc_feature (1)..(25): SEQ ID NO: 1573; WAN024BE8_at; Start 245; Stop 269
taggttgttactccagcacatgtga

SEQ ID NO: 78518 - DNA, 25 bp, Artificial
  probe
  misc_feature (1)..(25): SEQ ID NO: 1573; WAN024BE8_at; Start 261; Stop 285
cacatgtgatagaagaagcttgggc

SEQ ID NO: 78519 - DNA, 25 bp, Artificial
  probe
  misc_feature (1)..(25): SEQ ID NO: 1573; WAN024BE8_at; Start 338; Stop 362
tgttcagccataccaccgtctactg

SEQ ID NO: 78520 - DNA, 25 bp, Artificial
  probe
  misc_feature (1)..(25): SEQ ID NO: 1573; WAN024BE8_at; Start 300; Stop 324
caggaactttgacagcatagtcagc

SEQ ID NO: 78521 - DNA, 25 bp, Artificial
  probe
  misc_feature (1)..(25): SEQ ID NO: 1573; WAN024BE8_at; Start 145; Stop 169
tacttttttagcgtattgaacagcg

SEQ ID NO: 78522 - DNA, 25 bp, Artificial
  probe
  misc_feature (1)..(25): SEQ ID NO: 754; WAN024BE9_x_at; Start 6; Stop 30
aatcaaagagcaaactaggaagcta

SEQ ID NO: 78523 - DNA, 25 bp, Artificial
  probe
  misc_feature (1)..(25): SEQ ID NO: 754; WAN024BE9_x_at; Start 98; Stop 122
acggcaaggcgacgttgacgcggtt

SEQ ID NO: 78524 - DNA, 25 bp, Artificial
  probe
  misc_feature (1)..(25): SEQ ID NO: 754; WAN024BE9_x_at; Start 52; Stop 76
tgctttgaggttgtagatagaactg

SEQ ID NO: 78525 - DNA, 25 bp, Artificial
  probe
  misc_feature (1)..(25): SEQ ID NO: 754; WAN024BE9_x_at; Start 33; Stop 57
cgtaggttgctcaaagcactgcttt

SEQ ID NO: 78526 - DNA, 25 bp, Artificial
  probe
  misc_feature (1)..(25): SEQ ID NO: 754; WAN024BE9_x_at; Start 105; Stop 129
ggcgacgttgacgcggtttgaagag

SEQ ID NO: 78527 - DNA, 25 bp, Artificial
  probe
  misc_feature (1)..(25): SEQ ID NO: 754; WAN024BE9_x_at; Start 61; Stop 85
gttgtagatagaactgacgaagtca

SEQ ID NO: 78528 - DNA, 25 bp, Artificial
  probe
  misc_feature (1)..(25): SEQ ID NO: 754; WAN024BE9_x_at; Start 48; Stop 72
gcactgctttgaggttgtagataga

SEQ ID NO: 78529 - DNA, 25 bp, Artificial
  probe
  misc_feature (1)..(25): SEQ ID NO: 754; WAN024BE9_x_at; Start 15; Stop 39
gcaaactaggaagctagccgtaggt

SEQ ID NO: 78530 - DNA, 25 bp, Artificial
  probe
  misc_feature (1)..(25): SEQ ID NO: 754; WAN024BE9_x_at; Start 132; Stop 156
tttcgaagagtatcaactaactaat

SEQ ID NO: 78531 - DNA, 25 bp, Artificial
  probe
  misc_feature (1)..(25): SEQ ID NO: 754; WAN024BE9_x_at; Start 86; Stop 110
gtagccatacctacggcaaggcgac

SEQ ID NO: 78532 - DNA, 25 bp, Artificial
  probe
  misc_feature (1)..(25): SEQ ID NO: 754; WAN024BE9_x_at; Start 4; Stop 28
aaaatcaaagagcaaactaggaagc

SEQ ID NO: 78533 - DNA, 25 bp, Artificial
  probe
  misc_feature (1)..(25): SEQ ID NO: 754; WAN024BE9_x_at; Start 103; Stop 127
aaggcgacgttgacgcggtttgaag

SEQ ID NO: 78534 - DNA, 25 bp, Artificial
  probe
  misc_feature (1)..(25): SEQ ID NO: 754; WAN024BE9_x_at; Start 30; Stop 54
agccgtaggttgctcaaagcactgc

SEQ ID NO: 78535 - DNA, 25 bp, Artificial
  probe
  misc_feature (1)..(25): SEQ ID NO: 754; WAN024BE9_x_at; Start 31; Stop 55
gccgtaggttgctcaaagcactgct

SEQ ID NO: 78536 - DNA, 25 bp, Artificial
  probe
  misc_feature (1)..(25): SEQ ID NO: 754; WAN024BE9_x_at; Start 51; Stop 75
ctgctttgaggttgtagatagaact

SEQ ID NO: 78537 - DNA, 25 bp, Artificial
  probe
  misc_feature (1)..(25): SEQ ID NO: 754; WAN024BE9_x_at; Start 5; Stop 29
aaatcaaagagcaaactaggaagct

SEQ ID NO: 78538 - DNA, 25 bp, Artificial
  probe
  misc_feature (1)..(25): SEQ ID NO: 754; WAN024BE9_x_at; Start 104; Stop 128
aggcgacgttgacgcggtttgaaga

SEQ ID NO: 78539 - DNA, 25 bp, Artificial
  probe
  misc_feature (1)..(25): SEQ ID NO: 754; WAN024BE9_x_at; Start 100; Stop 124
ggcaaggcgacgttgacgcggtttg

SEQ ID NO: 78540 - DNA, 25 bp, Artificial
  probe
  misc_feature (1)..(25): SEQ ID NO: 754; WAN024BE9_x_at; Start 109; Stop 133
acgttgacgcggtttgaagagattt

SEQ ID NO: 78541 - DNA, 25 bp, Artificial
  probe
  misc_feature (1)..(25): SEQ ID NO: 754; WAN024BE9_x_at; Start 34; Stop 58
gtaggttgctcaaagcactgctttg

SEQ ID NO: 78542 - DNA, 25 bp, Artificial
  probe
  misc_feature (1)..(25): SEQ ID NO: 754; WAN024BE9_x_at; Start 47; Stop 71
agcactgctttgaggttgtagatag

SEQ ID NO: 78543 - DNA, 25 bp, Artificial
  probe
  misc_feature (1)..(25): SEQ ID NO: 754; WAN024BE9_x_at; Start 35; Stop 59
taggttgctcaaagcactgctttga

SEQ ID NO: 78544 - DNA, 25 bp, Artificial
  probe
  misc_feature (1)..(25): SEQ ID NO: 754; WAN024BE9_x_at; Start 2; Stop 26
tgaaaatcaaagagcaaactaggaa

SEQ ID NO: 78545 - DNA, 25 bp, Artificial
  probe
  misc_feature (1)..(25): SEQ ID NO: 754; WAN024BE9_x_at; Start 50; Stop 74
actgctttgaggttgtagatagaac

SEQ ID NO: 78546 - DNA, 25 bp, Artificial
  probe
  misc_feature (1)..(25): SEQ ID NO: 754; WAN024BE9_x_at; Start 106; Stop 130
gcgacgttgacgcggtttgaagaga

SEQ ID NO: 78547 - DNA, 25 bp, Artificial
  probe
  misc_feature (1)..(25): SEQ ID NO: 754; WAN024BE9_x_at; Start 108; Stop 132
gacgttgacgcggtttgaagagatt

SEQ ID NO: 78548 - DNA, 25 bp, Artificial
  probe
  misc_feature (1)..(25): SEQ ID NO: 754; WAN024BE9_x_at; Start 99; Stop 123
cggcaaggcgacgttgacgcggttt

SEQ ID NO: 78549 - DNA, 25 bp, Artificial
  probe
  misc_feature (1)..(25): SEQ ID NO: 754; WAN024BE9_x_at; Start 102; Stop 126
caaggcgacgttgacgcggtttgaa

SEQ ID NO: 78550 - DNA, 25 bp, Artificial
  probe
  misc_feature (1)..(25): SEQ ID NO: 754; WAN024BE9_x_at; Start 7; Stop 31
atcaaagagcaaactaggaagctag

SEQ ID NO: 78551 - DNA, 25 bp, Artificial
  probe
  misc_feature (1)..(25): SEQ ID NO: 754; WAN024BE9_x_at; Start 107; Stop 131
cgacgttgacgcggtttgaagagat

SEQ ID NO: 78552 - DNA, 25 bp, Artificial
  probe
  misc_feature (1)..(25): SEQ ID NO: 754; WAN024BE9_x_at; Start 1; Stop 25
atgaaaatcaaagagcaaactagga

SEQ ID NO: 78553 - DNA, 25 bp, Artificial
  probe
  misc_feature (1)..(25): SEQ ID NO: 754; WAN024BE9_x_at; Start 32; Stop 56
ccgtaggttgctcaaagcactgctt

SEQ ID NO: 78554 - DNA, 25 bp, Artificial
  probe
  misc_feature (1)..(25): SEQ ID NO: 754; WAN024BE9_x_at; Start 3; Stop 27
gaaaatcaaagagcaaactaggaag

SEQ ID NO: 78555 - DNA, 25 bp, Artificial
  probe
  misc_feature (1)..(25): SEQ ID NO: 754; WAN024BE9_x_at; Start 87; Stop 111
tagccatacctacggcaaggcgacg

SEQ ID NO: 78556 - DNA, 25 bp, Artificial
  probe
  misc_feature (1)..(25): SEQ ID NO: 4328; WAN024BEA_at; Start 45; Stop 69
gtgttttgagcagtctgtgcctagc

SEQ ID NO: 78557 - DNA, 25 bp, Artificial
  probe
  misc_feature (1)..(25): SEQ ID NO: 4328; WAN024BEA_at; Start 51; Stop 75
tgagcagtctgtgcctagctttcta

SEQ ID NO: 78558 - DNA, 25 bp, Artificial
  probe
  misc_feature (1)..(25): SEQ ID NO: 4328; WAN024BEA_at; Start 50; Stop 74
ttgagcagtctgtgcctagctttct

SEQ ID NO: 78559 - DNA, 25 bp, Artificial
  probe
  misc_feature (1)..(25): SEQ ID NO: 4328; WAN024BEA_at; Start 44; Stop 68
ggtgttttgagcagtctgtgcctag

SEQ ID NO: 78560 - DNA, 25 bp, Artificial
  probe
  misc_feature (1)..(25): SEQ ID NO: 4328; WAN024BEA_at; Start 52; Stop 76
gagcagtctgtgcctagctttctag

SEQ ID NO: 78561 - DNA, 25 bp, Artificial
  probe
  misc_feature (1)..(25): SEQ ID NO: 4328; WAN024BEA_at; Start 43; Stop 67
cggtgttttgagcagtctgtgccta

SEQ ID NO: 78562 - DNA, 25 bp, Artificial
  probe
  misc_feature (1)..(25): SEQ ID NO: 4328; WAN024BEA_at; Start 47; Stop 71
gttttgagcagtctgtgcctagctt

SEQ ID NO: 78563 - DNA, 25 bp, Artificial
  probe
  misc_feature (1)..(25): SEQ ID NO: 4328; WAN024BEA_at; Start 53; Stop 77
agcagtctgtgcctagctttctagt

SEQ ID NO: 78564 - DNA, 25 bp, Artificial
  probe
  misc_feature (1)..(25): SEQ ID NO: 4328; WAN024BEA_at; Start 49; Stop 73
tttgagcagtctgtgcctagctttc

SEQ ID NO: 78565 - DNA, 25 bp, Artificial
  probe
  misc_feature (1)..(25): SEQ ID NO: 4328; WAN024BEA_at; Start 48; Stop 72
ttttgagcagtctgtgcctagcttt

SEQ ID NO: 78566 - DNA, 25 bp, Artificial
  probe
  misc_feature (1)..(25): SEQ ID NO: 4328; WAN024BEA_at; Start 46; Stop 70
tgttttgagcagtctgtgcctagct

SEQ ID NO: 78567 - DNA, 25 bp, Artificial
  probe
  misc_feature (1)..(25): SEQ ID NO: 5379; WAN024BEB_at; Start 81; Stop 105
ttcgccttgctgtactcaagtgctg

SEQ ID NO: 78568 - DNA, 25 bp, Artificial
  probe
  misc_feature (1)..(25): SEQ ID NO: 5379; WAN024BEB_at; Start 89; Stop 113
gctgtactcaagtgctgtctgtggc

SEQ ID NO: 78569 - DNA, 25 bp, Artificial
  probe
  misc_feature (1)..(25): SEQ ID NO: 5379; WAN024BEB_at; Start 141; Stop 165
cattgagtattactcttatggtagt

SEQ ID NO: 78570 - DNA, 25 bp, Artificial
  probe
  misc_feature (1)..(25): SEQ ID NO: 5379; WAN024BEB_at; Start 87; Stop 111
ttgctgtactcaagtgctgtctgtg

SEQ ID NO: 78571 - DNA, 25 bp, Artificial
  probe
  misc_feature (1)..(25): SEQ ID NO: 5379; WAN024BEB_at; Start 98; Stop 122
aagtgctgtctgtggctagcttctt

SEQ ID NO: 78572 - DNA, 25 bp, Artificial
  probe
  misc_feature (1)..(25): SEQ ID NO: 5379; WAN024BEB_at; Start 79; Stop 103
gcttcgccttgctgtactcaagtgc

SEQ ID NO: 78573 - DNA, 25 bp, Artificial
  probe
  misc_feature (1)..(25): SEQ ID NO: 5379; WAN024BEB_at; Start 88; Stop 112
tgctgtactcaagtgctgtctgtgg

SEQ ID NO: 78574 - DNA, 25 bp, Artificial
  probe
  misc_feature (1)..(25): SEQ ID NO: 5379; WAN024BEB_at; Start 157; Stop 181
tatggtagttatttatggcataata

SEQ ID NO: 78575 - DNA, 25 bp, Artificial
  probe
  misc_feature (1)..(25): SEQ ID NO: 5379; WAN024BEB_at; Start 94; Stop 118
actcaagtgctgtctgtggctagct

SEQ ID NO: 78576 - DNA, 25 bp, Artificial
  probe
  misc_feature (1)..(25): SEQ ID NO: 5379; WAN024BEB_at; Start 85; Stop 109
ccttgctgtactcaagtgctgtctg

SEQ ID NO: 78577 - DNA, 25 bp, Artificial
  probe
  misc_feature (1)..(25): SEQ ID NO: 5379; WAN024BEB_at; Start 101; Stop 125
tgctgtctgtggctagcttcttagt

SEQ ID NO: 78578 - DNA, 25 bp, Artificial
  probe
  misc_feature (1)..(25): SEQ ID NO: 5379; WAN024BEB_at; Start 153; Stop 177
ctcttatggtagttatttatggcat

SEQ ID NO: 78579 - DNA, 25 bp, Artificial
  probe
  misc_feature (1)..(25): SEQ ID NO: 5379; WAN024BEB_at; Start 173; Stop 197
ggcataataatattgatttgggagt

SEQ ID NO: 78580 - DNA, 25 bp, Artificial
  probe
  misc_feature (1)..(25): SEQ ID NO: 5379; WAN024BEB_at; Start 198; Stop 222
tatagcgaaaattttaggttctata

SEQ ID NO: 78581 - DNA, 25 bp, Artificial
  probe
  misc_feature (1)..(25): SEQ ID NO: 5379; WAN024BEB_at; Start 82; Stop 106
tcgccttgctgtactcaagtgctgt

SEQ ID NO: 78582 - DNA, 25 bp, Artificial
  probe
  misc_feature (1)..(25): SEQ ID NO: 5379; WAN024BEB_at; Start 91; Stop 115
tgtactcaagtgctgtctgtggcta

SEQ ID NO: 78583 - DNA, 25 bp, Artificial
  probe
  misc_feature (1)..(25): SEQ ID NO: 5379; WAN024BEB_at; Start 97; Stop 121
caagtgctgtctgtggctagcttct

SEQ ID NO: 78584 - DNA, 25 bp, Artificial
  probe
  misc_feature (1)..(25): SEQ ID NO: 5379; WAN024BEB_at; Start 180; Stop 204
taatattgatttgggagttatagcg

SEQ ID NO: 78585 - DNA, 25 bp, Artificial
  probe
  misc_feature (1)..(25): SEQ ID NO: 5379; WAN024BEB_at; Start 99; Stop 123
agtgctgtctgtggctagcttctta

SEQ ID NO: 78586 - DNA, 25 bp, Artificial
  probe
  misc_feature (1)..(25): SEQ ID NO: 5379; WAN024BEB_at; Start 61; Stop 85
caaattcaaaccaagtcagcttcgc

SEQ ID NO: 78587 - DNA, 25 bp, Artificial
  probe
  misc_feature (1)..(25): SEQ ID NO: 5379; WAN024BEB_at; Start 96; Stop 120
tcaagtgctgtctgtggctagcttc

SEQ ID NO: 78588 - DNA, 25 bp, Artificial
  probe
  misc_feature (1)..(25): SEQ ID NO: 5379; WAN024BEB_at; Start 90; Stop 114
ctgtactcaagtgctgtctgtggct

SEQ ID NO: 78589 - DNA, 25 bp, Artificial
  probe
  misc_feature (1)..(25): SEQ ID NO: 5379; WAN024BEB_at; Start 84; Stop 108
gccttgctgtactcaagtgctgtct

SEQ ID NO: 78590 - DNA, 25 bp, Artificial
  probe
  misc_feature (1)..(25): SEQ ID NO: 5379; WAN024BEB_at; Start 78; Stop 102
agcttcgccttgctgtactcaagtg

SEQ ID NO: 78591 - DNA, 25 bp, Artificial
  probe
  misc_feature (1)..(25): SEQ ID NO: 5379; WAN024BEB_at; Start 186; Stop 210
tgatttgggagttatagcgaaaatt

SEQ ID NO: 78592 - DNA, 25 bp, Artificial
  probe
  misc_feature (1)..(25): SEQ ID NO: 5379; WAN024BEB_at; Start 183; Stop 207
tattgatttgggagttatagcgaaa

SEQ ID NO: 78593 - DNA, 25 bp, Artificial
  probe
  misc_feature (1)..(25): SEQ ID NO: 5379; WAN024BEB_at; Start 92; Stop 116
gtactcaagtgctgtctgtggctag

SEQ ID NO: 78594 - DNA, 25 bp, Artificial
  probe
  misc_feature (1)..(25): SEQ ID NO: 5379; WAN024BEB_at; Start 80; Stop 104
cttcgccttgctgtactcaagtgct

SEQ ID NO: 78595 - DNA, 25 bp, Artificial
  probe
  misc_feature (1)..(25): SEQ ID NO: 5379; WAN024BEB_at; Start 83; Stop 107
cgccttgctgtactcaagtgctgtc

SEQ ID NO: 78596 - DNA, 25 bp, Artificial
  probe
  misc_feature (1)..(25): SEQ ID NO: 5379; WAN024BEB_at; Start 17; Stop 41
gccatatcgaaattgaattatttaa

SEQ ID NO: 78597 - DNA, 25 bp, Artificial
  probe
  misc_feature (1)..(25): SEQ ID NO: 5379; WAN024BEB_at; Start 95; Stop 119
ctcaagtgctgtctgtggctagctt

SEQ ID NO: 78598 - DNA, 25 bp, Artificial
  probe
  misc_feature (1)..(25): SEQ ID NO: 5379; WAN024BEB_at; Start 170; Stop 194
tatggcataataatattgatttggg

SEQ ID NO: 78599 - DNA, 25 bp, Artificial
  probe
  misc_feature (1)..(25): SEQ ID NO: 5379; WAN024BEB_at; Start 151; Stop 175
tactcttatggtagttatttatggc

SEQ ID NO: 78600 - DNA, 25 bp, Artificial
  probe
  misc_feature (1)..(25): SEQ ID NO: 5379; WAN024BEB_at; Start 93; Stop 117
tactcaagtgctgtctgtggctagc

SEQ ID NO: 78601 - DNA, 25 bp, Artificial
  probe
  misc_feature (1)..(25): SEQ ID NO: 5701; WAN024BEC_at; Start 84; Stop 108
tgtacatgaactacaccccaaaagt

SEQ ID NO: 78602 - DNA, 25 bp, Artificial
  probe
  misc_feature (1)..(25): SEQ ID NO: 5701; WAN024BEC_at; Start 7; Stop 31
cagattttgtgtcaaaacattactt

SEQ ID NO: 78603 - DNA, 25 bp, Artificial
  probe
  misc_feature (1)..(25): SEQ ID NO: 5701; WAN024BEC_at; Start 75; Stop 99
catatcaggtgtacatgaactacac

SEQ ID NO: 78604 - DNA, 25 bp, Artificial
  probe
  misc_feature (1)..(25): SEQ ID NO: 5701; WAN024BEC_at; Start 6; Stop 30
acagattttgtgtcaaaacattact

SEQ ID NO: 78605 - DNA, 25 bp, Artificial
  probe
  misc_feature (1)..(25): SEQ ID NO: 5701; WAN024BEC_at; Start 10; Stop 34
attttgtgtcaaaacattacttttg

SEQ ID NO: 78606 - DNA, 25 bp, Artificial
  probe
  misc_feature (1)..(25): SEQ ID NO: 5701; WAN024BEC_at; Start 74; Stop 98
tcatatcaggtgtacatgaactaca

SEQ ID NO: 78607 - DNA, 25 bp, Artificial
  probe
  misc_feature (1)..(25): SEQ ID NO: 5701; WAN024BEC_at; Start 82; Stop 106
ggtgtacatgaactacaccccaaaa

SEQ ID NO: 78608 - DNA, 25 bp, Artificial
  probe
  misc_feature (1)..(25): SEQ ID NO: 5701; WAN024BEC_at; Start 83; Stop 107
gtgtacatgaactacaccccaaaag

SEQ ID NO: 78609 - DNA, 25 bp, Artificial
  probe
  misc_feature (1)..(25): SEQ ID NO: 5701; WAN024BEC_at; Start 77; Stop 101
tatcaggtgtacatgaactacaccc

SEQ ID NO: 78610 - DNA, 25 bp, Artificial
  probe
  misc_feature (1)..(25): SEQ ID NO: 5701; WAN024BEC_at; Start 80; Stop 104
caggtgtacatgaactacaccccaa

SEQ ID NO: 78611 - DNA, 25 bp, Artificial
  probe
  misc_feature (1)..(25): SEQ ID NO: 5701; WAN024BEC_at; Start 79; Stop 103
tcaggtgtacatgaactacacccca

SEQ ID NO: 78612 - DNA, 25 bp, Artificial
  probe
  misc_feature (1)..(25): SEQ ID NO: 5701; WAN024BEC_at; Start 3; Stop 27
gtcacagattttgtgtcaaaacatt

SEQ ID NO: 78613 - DNA, 25 bp, Artificial
  probe
  misc_feature (1)..(25): SEQ ID NO: 5701; WAN024BEC_at; Start 76; Stop 100
atatcaggtgtacatgaactacacc

SEQ ID NO: 78614 - DNA, 25 bp, Artificial
  probe
  misc_feature (1)..(25): SEQ ID NO: 5701; WAN024BEC_at; Start 8; Stop 32
agattttgtgtcaaaacattacttt

SEQ ID NO: 78615 - DNA, 25 bp, Artificial
  probe
  misc_feature (1)..(25): SEQ ID NO: 5701; WAN024BEC_at; Start 81; Stop 105
aggtgtacatgaactacaccccaaa

SEQ ID NO: 78616 - DNA, 25 bp, Artificial
  probe
  misc_feature (1)..(25): SEQ ID NO: 5701; WAN024BEC_at; Start 5; Stop 29
cacagattttgtgtcaaaacattac

SEQ ID NO: 78617 - DNA, 25 bp, Artificial
  probe
  misc_feature (1)..(25): SEQ ID NO: 5701; WAN024BEC_at; Start 1; Stop 25
ttgtcacagattttgtgtcaaaaca

SEQ ID NO: 78618 - DNA, 25 bp, Artificial
  probe
  misc_feature (1)..(25): SEQ ID NO: 5701; WAN024BEC_at; Start 4; Stop 28
tcacagattttgtgtcaaaacatta

SEQ ID NO: 78619 - DNA, 25 bp, Artificial
  probe
  misc_feature (1)..(25): SEQ ID NO: 5701; WAN024BEC_at; Start 11; Stop 35
ttttgtgtcaaaacattacttttga

SEQ ID NO: 78620 - DNA, 25 bp, Artificial
  probe
  misc_feature (1)..(25): SEQ ID NO: 5701; WAN024BEC_at; Start 73; Stop 97
atcatatcaggtgtacatgaactac

SEQ ID NO: 78621 - DNA, 25 bp, Artificial
  probe
  misc_feature (1)..(25): SEQ ID NO: 5701; WAN024BEC_at; Start 2; Stop 26
tgtcacagattttgtgtcaaaacat

SEQ ID NO: 78622 - DNA, 25 bp, Artificial
  probe
  misc_feature (1)..(25): SEQ ID NO: 5701; WAN024BEC_at; Start 78; Stop 102
atcaggtgtacatgaactacacccc

SEQ ID NO: 78623 - DNA, 25 bp, Artificial
  probe
  misc_feature (1)..(25): SEQ ID NO: 3347; WAN024BED_s_at; Start 87; Stop 111
tgagtatcaaaaagcaagccatttt

SEQ ID NO: 78624 - DNA, 25 bp, Artificial
  probe
  misc_feature (1)..(25): SEQ ID NO: 3347; WAN024BED_s_at; Start 85; Stop 109
attgagtatcaaaaagcaagccatt

SEQ ID NO: 78625 - DNA, 25 bp, Artificial
  probe
  misc_feature (1)..(25): SEQ ID NO: 3347; WAN024BED_s_at; Start 84; Stop 108
cattgagtatcaaaaagcaagccat

SEQ ID NO: 78626 - DNA, 25 bp, Artificial
  probe
  misc_feature (1)..(25): SEQ ID NO: 3347; WAN024BED_s_at; Start 86; Stop 110
ttgagtatcaaaaagcaagccattt

SEQ ID NO: 78627 - DNA, 25 bp, Artificial
  probe
  misc_feature (1)..(25): SEQ ID NO: 5687; WAN024BEE_s_at; Start 6; Stop 30
tgggtataaaaatctcatactcttc

SEQ ID NO: 78628 - DNA, 25 bp, Artificial
  probe
  misc_feature (1)..(25): SEQ ID NO: 5687; WAN024BEE_s_at; Start 1; Stop 25
ttgtatgggtataaaaatctcatac

SEQ ID NO: 78629 - DNA, 25 bp, Artificial
  probe
  misc_feature (1)..(25): SEQ ID NO: 5687; WAN024BEE_s_at; Start 3; Stop 27
gtatgggtataaaaatctcatactc

SEQ ID NO: 78630 - DNA, 25 bp, Artificial
  probe
  misc_feature (1)..(25): SEQ ID NO: 5687; WAN024BEE_s_at; Start 2; Stop 26
tgtatgggtataaaaatctcatact

SEQ ID NO: 78631 - DNA, 25 bp, Artificial
  probe
  misc_feature (1)..(25): SEQ ID NO: 5687; WAN024BEE_s_at; Start 4; Stop 28
tatgggtataaaaatctcatactct

SEQ ID NO: 78632 - DNA, 25 bp, Artificial
  probe
  misc_feature (1)..(25): SEQ ID NO: 5687; WAN024BEE_s_at; Start 5; Stop 29
atgggtataaaaatctcatactctt

SEQ ID NO: 78633 - DNA, 25 bp, Artificial
  probe
  misc_feature (1)..(25): SEQ ID NO: 706; WAN024BEF_at; Start 65; Stop 89
taaataatgtgttccatcagggctc

SEQ ID NO: 78634 - DNA, 25 bp, Artificial
  probe
  misc_feature (1)..(25): SEQ ID NO: 706; WAN024BEF_at; Start 31; Stop 55
caaggtaaggattgccaagtcctct

SEQ ID NO: 78635 - DNA, 25 bp, Artificial
  probe
  misc_feature (1)..(25): SEQ ID NO: 706; WAN024BEF_at; Start 72; Stop 96
tgtgttccatcagggctccttttta

SEQ ID NO: 78636 - DNA, 25 bp, Artificial
  probe
  misc_feature (1)..(25): SEQ ID NO: 706; WAN024BEF_at; Start 36; Stop 60
taaggattgccaagtcctcttcaag

SEQ ID NO: 78637 - DNA, 25 bp, Artificial
  probe
  misc_feature (1)..(25): SEQ ID NO: 706; WAN024BEF_at; Start 70; Stop 94
aatgtgttccatcagggctcctttt

SEQ ID NO: 78638 - DNA, 25 bp, Artificial
  probe
  misc_feature (1)..(25): SEQ ID NO: 706; WAN024BEF_at; Start 28; Stop 52
gttcaaggtaaggattgccaagtcc

SEQ ID NO: 78639 - DNA, 25 bp, Artificial
  probe
  misc_feature (1)..(25): SEQ ID NO: 706; WAN024BEF_at; Start 24; Stop 48
gacggttcaaggtaaggattgccaa

SEQ ID NO: 78640 - DNA, 25 bp, Artificial
  probe
  misc_feature (1)..(25): SEQ ID NO: 706; WAN024BEF_at; Start 34; Stop 58
ggtaaggattgccaagtcctcttca

SEQ ID NO: 78641 - DNA, 25 bp, Artificial
  probe
  misc_feature (1)..(25): SEQ ID NO: 706; WAN024BEF_at; Start 6; Stop 30
aaccatttgcgacctcaggacggtt

SEQ ID NO: 78642 - DNA, 25 bp, Artificial
  probe
  misc_feature (1)..(25): SEQ ID NO: 706; WAN024BEF_at; Start 29; Stop 53
ttcaaggtaaggattgccaagtcct

SEQ ID NO: 78643 - DNA, 25 bp, Artificial
  probe
  misc_feature (1)..(25): SEQ ID NO: 706; WAN024BEF_at; Start 12; Stop 36
ttgcgacctcaggacggttcaaggt

SEQ ID NO: 78644 - DNA, 25 bp, Artificial
  probe
  misc_feature (1)..(25): SEQ ID NO: 706; WAN024BEF_at; Start 19; Stop 43
ctcaggacggttcaaggtaaggatt

SEQ ID NO: 78645 - DNA, 25 bp, Artificial
  probe
  misc_feature (1)..(25): SEQ ID NO: 706; WAN024BEF_at; Start 23; Stop 47
ggacggttcaaggtaaggattgcca

SEQ ID NO: 78646 - DNA, 25 bp, Artificial
  probe
  misc_feature (1)..(25): SEQ ID NO: 706; WAN024BEF_at; Start 1; Stop 25
atgaaaaccatttgcgacctcagga

SEQ ID NO: 78647 - DNA, 25 bp, Artificial
  probe
  misc_feature (1)..(25): SEQ ID NO: 706; WAN024BEF_at; Start 2; Stop 26
tgaaaaccatttgcgacctcaggac

SEQ ID NO: 78648 - DNA, 25 bp, Artificial
  probe
  misc_feature (1)..(25): SEQ ID NO: 706; WAN024BEF_at; Start 27; Stop 51
ggttcaaggtaaggattgccaagtc

SEQ ID NO: 78649 - DNA, 25 bp, Artificial
  probe
  misc_feature (1)..(25): SEQ ID NO: 706; WAN024BEF_at; Start 69; Stop 93
taatgtgttccatcagggctccttt

SEQ ID NO: 78650 - DNA, 25 bp, Artificial
  probe
  misc_feature (1)..(25): SEQ ID NO: 706; WAN024BEF_at; Start 21; Stop 45
caggacggttcaaggtaaggattgc

SEQ ID NO: 78651 - DNA, 25 bp, Artificial
  probe
  misc_feature (1)..(25): SEQ ID NO: 706; WAN024BEF_at; Start 11; Stop 35
tttgcgacctcaggacggttcaagg

SEQ ID NO: 78652 - DNA, 25 bp, Artificial
  probe
  misc_feature (1)..(25): SEQ ID NO: 706; WAN024BEF_at; Start 26; Stop 50
cggttcaaggtaaggattgccaagt

SEQ ID NO: 78653 - DNA, 25 bp, Artificial
  probe
  misc_feature (1)..(25): SEQ ID NO: 706; WAN024BEF_at; Start 66; Stop 90
aaataatgtgttccatcagggctcc

SEQ ID NO: 78654 - DNA, 25 bp, Artificial
  probe
  misc_feature (1)..(25): SEQ ID NO: 706; WAN024BEF_at; Start 10; Stop 34
atttgcgacctcaggacggttcaag

SEQ ID NO: 78655 - DNA, 25 bp, Artificial
  probe
  misc_feature (1)..(25): SEQ ID NO: 706; WAN024BEF_at; Start 25; Stop 49
acggttcaaggtaaggattgccaag

SEQ ID NO: 78656 - DNA, 25 bp, Artificial
  probe
  misc_feature (1)..(25): SEQ ID NO: 706; WAN024BEF_at; Start 7; Stop 31
accatttgcgacctcaggacggttc

SEQ ID NO: 78657 - DNA, 25 bp, Artificial
  probe
  misc_feature (1)..(25): SEQ ID NO: 706; WAN024BEF_at; Start 18; Stop 42
cctcaggacggttcaaggtaaggat

SEQ ID NO: 78658 - DNA, 25 bp, Artificial
  probe
  misc_feature (1)..(25): SEQ ID NO: 706; WAN024BEF_at; Start 67; Stop 91
aataatgtgttccatcagggctcct

SEQ ID NO: 78659 - DNA, 25 bp, Artificial
  probe
  misc_feature (1)..(25): SEQ ID NO: 706; WAN024BEF_at; Start 30; Stop 54
tcaaggtaaggattgccaagtcctc

SEQ ID NO: 78660 - DNA, 25 bp, Artificial
  probe
  misc_feature (1)..(25): SEQ ID NO: 706; WAN024BEF_at; Start 4; Stop 28
aaaaccatttgcgacctcaggacgg

SEQ ID NO: 78661 - DNA, 25 bp, Artificial
  probe
  misc_feature (1)..(25): SEQ ID NO: 706; WAN024BEF_at; Start 5; Stop 29
aaaccatttgcgacctcaggacggt

SEQ ID NO: 78662 - DNA, 25 bp, Artificial
  probe
  misc_feature (1)..(25): SEQ ID NO: 706; WAN024BEF_at; Start 14; Stop 38
gcgacctcaggacggttcaaggtaa

SEQ ID NO: 78663 - DNA, 25 bp, Artificial
  probe
  misc_feature (1)..(25): SEQ ID NO: 706; WAN024BEF_at; Start 8; Stop 32
ccatttgcgacctcaggacggttca

SEQ ID NO: 78664 - DNA, 25 bp, Artificial
  probe
  misc_feature (1)..(25): SEQ ID NO: 706; WAN024BEF_at; Start 9; Stop 33
catttgcgacctcaggacggttcaa

SEQ ID NO: 78665 - DNA, 25 bp, Artificial
  probe
  misc_feature (1)..(25): SEQ ID NO: 706; WAN024BEF_at; Start 63; Stop 87
gataaataatgtgttccatcagggc

SEQ ID NO: 78666 - DNA, 25 bp, Artificial
  probe
  misc_feature (1)..(25): SEQ ID NO: 706; WAN024BEF_at; Start 13; Stop 37
tgcgacctcaggacggttcaaggta

SEQ ID NO: 78667 - DNA, 25 bp, Artificial
  probe
  misc_feature (1)..(25): SEQ ID NO: 4719; WAN024BEG_x_at; Start 53; Stop 77
acctgcggctagcttcctagtttgc

SEQ ID NO: 78668 - DNA, 25 bp, Artificial
  probe
  misc_feature (1)..(25): SEQ ID NO: 4719; WAN024BEG_x_at; Start 55; Stop 79
ctgcggctagcttcctagtttgctc

SEQ ID NO: 78669 - DNA, 25 bp, Artificial
  probe
  misc_feature (1)..(25): SEQ ID NO: 4719; WAN024BEG_x_at; Start 18; Stop 42
gtttcatctacaacctcaaagcagg

SEQ ID NO: 78670 - DNA, 25 bp, Artificial
  probe
  misc_feature (1)..(25): SEQ ID NO: 4719; WAN024BEG_x_at; Start 43; Stop 67
gctttgagcaacctgcggctagctt

SEQ ID NO: 78671 - DNA, 25 bp, Artificial
  probe
  misc_feature (1)..(25): SEQ ID NO: 4719; WAN024BEG_x_at; Start 54; Stop 78
cctgcggctagcttcctagtttgct

SEQ ID NO: 78672 - DNA, 25 bp, Artificial
  probe
  misc_feature (1)..(25): SEQ ID NO: 4719; WAN024BEG_x_at; Start 38; Stop 62
gcagggctttgagcaacctgcggct

SEQ ID NO: 78673 - DNA, 25 bp, Artificial
  probe
  misc_feature (1)..(25): SEQ ID NO: 4719; WAN024BEG_x_at; Start 52; Stop 76
aacctgcggctagcttcctagtttg

SEQ ID NO: 78674 - DNA, 25 bp, Artificial
  probe
  misc_feature (1)..(25): SEQ ID NO: 4719; WAN024BEG_x_at; Start 50; Stop 74
gcaacctgcggctagcttcctagtt

SEQ ID NO: 78675 - DNA, 25 bp, Artificial
  probe
  misc_feature (1)..(25): SEQ ID NO: 4719; WAN024BEG_x_at; Start 49; Stop 73
agcaacctgcggctagcttcctagt

SEQ ID NO: 78676 - DNA, 25 bp, Artificial
  probe
  misc_feature (1)..(25): SEQ ID NO: 4719; WAN024BEG_x_at; Start 34; Stop 58
caaagcagggctttgagcaacctgc

SEQ ID NO: 78677 - DNA, 25 bp, Artificial
  probe
  misc_feature (1)..(25): SEQ ID NO: 4719; WAN024BEG_x_at; Start 39; Stop 63
cagggctttgagcaacctgcggcta

SEQ ID NO: 78678 - DNA, 25 bp, Artificial
  probe
  misc_feature (1)..(25): SEQ ID NO: 4719; WAN024BEG_x_at; Start 47; Stop 71
tgagcaacctgcggctagcttccta

SEQ ID NO: 78679 - DNA, 25 bp, Artificial
  probe
  misc_feature (1)..(25): SEQ ID NO: 4719; WAN024BEG_x_at; Start 57; Stop 81
gcggctagcttcctagtttgctctt

SEQ ID NO: 78680 - DNA, 25 bp, Artificial
  probe
  misc_feature (1)..(25): SEQ ID NO: 4719; WAN024BEG_x_at; Start 48; Stop 72
gagcaacctgcggctagcttcctag

SEQ ID NO: 78681 - DNA, 25 bp, Artificial
  probe
  misc_feature (1)..(25): SEQ ID NO: 4719; WAN024BEG_x_at; Start 51; Stop 75
caacctgcggctagcttcctagttt

SEQ ID NO: 78682 - DNA, 25 bp, Artificial
  probe
  misc_feature (1)..(25): SEQ ID NO: 4719; WAN024BEG_x_at; Start 42; Stop 66
ggctttgagcaacctgcggctagct

SEQ ID NO: 78683 - DNA, 25 bp, Artificial
  probe
  misc_feature (1)..(25): SEQ ID NO: 4719; WAN024BEG_x_at; Start 46; Stop 70
ttgagcaacctgcggctagcttcct

SEQ ID NO: 78684 - DNA, 25 bp, Artificial
  probe
  misc_feature (1)..(25): SEQ ID NO: 4719; WAN024BEG_x_at; Start 40; Stop 64
agggctttgagcaacctgcggctag

SEQ ID NO: 78685 - DNA, 25 bp, Artificial
  probe
  misc_feature (1)..(25): SEQ ID NO: 4719; WAN024BEG_x_at; Start 45; Stop 69
tttgagcaacctgcggctagcttcc

SEQ ID NO: 78686 - DNA, 25 bp, Artificial
  probe
  misc_feature (1)..(25): SEQ ID NO: 4719; WAN024BEG_x_at; Start 58; Stop 82
cggctagcttcctagtttgctcttt

SEQ ID NO: 78687 - DNA, 25 bp, Artificial
  probe
  misc_feature (1)..(25): SEQ ID NO: 4719; WAN024BEG_x_at; Start 36; Stop 60
aagcagggctttgagcaacctgcgg

SEQ ID NO: 78688 - DNA, 25 bp, Artificial
  probe
  misc_feature (1)..(25): SEQ ID NO: 4719; WAN024BEG_x_at; Start 56; Stop 80
tgcggctagcttcctagtttgctct

SEQ ID NO: 78689 - DNA, 25 bp, Artificial
  probe
  misc_feature (1)..(25): SEQ ID NO: 4719; WAN024BEG_x_at; Start 37; Stop 61
agcagggctttgagcaacctgcggc

SEQ ID NO: 78690 - DNA, 25 bp, Artificial
  probe
  misc_feature (1)..(25): SEQ ID NO: 4719; WAN024BEG_x_at; Start 35; Stop 59
aaagcagggctttgagcaacctgcg

SEQ ID NO: 78691 - DNA, 25 bp, Artificial
  probe
  misc_feature (1)..(25): SEQ ID NO: 4719; WAN024BEG_x_at; Start 41; Stop 65
gggctttgagcaacctgcggctagc

SEQ ID NO: 78692 - DNA, 25 bp, Artificial
  probe
  misc_feature (1)..(25): SEQ ID NO: 4719; WAN024BEG_x_at; Start 44; Stop 68
ctttgagcaacctgcggctagcttc

SEQ ID NO: 78693 - DNA, 25 bp, Artificial
  probe
  misc_feature (1)..(25): SEQ ID NO: 4719; WAN024BEG_x_at; Start 33; Stop 57
tcaaagcagggctttgagcaacctg

SEQ ID NO: 78694 - DNA, 25 bp, Artificial
  probe
  misc_feature (1)..(25): SEQ ID NO: 801; WAN024BEH_at; Start 49; Stop 73
gaagagcttattcaagaccaaaagt

SEQ ID NO: 78695 - DNA, 25 bp, Artificial
  probe
  misc_feature (1)..(25): SEQ ID NO: 801; WAN024BEH_at; Start 128; Stop 152
ctagctgtgcgtcttcatttgcgaa

SEQ ID NO: 78696 - DNA, 25 bp, Artificial
  probe
  misc_feature (1)..(25): SEQ ID NO: 801; WAN024BEH_at; Start 246; Stop 270
taaggctgatgggtattctttagca

SEQ ID NO: 78697 - DNA, 25 bp, Artificial
  probe
  misc_feature (1)..(25): SEQ ID NO: 801; WAN024BEH_at; Start 17; Stop 41
cgattgtttctagaacgaaacaaca

SEQ ID NO: 78698 - DNA, 25 bp, Artificial
  probe
  misc_feature (1)..(25): SEQ ID NO: 801; WAN024BEH_at; Start 94; Stop 118
tcgcccgatttggttggaaggtatg

SEQ ID NO: 78699 - DNA, 25 bp, Artificial
  probe
  misc_feature (1)..(25): SEQ ID NO: 801; WAN024BEH_at; Start 329; Stop 353
cctctaataccataactagtgatgt

SEQ ID NO: 78700 - DNA, 25 bp, Artificial
  probe
  misc_feature (1)..(25): SEQ ID NO: 801; WAN024BEH_at; Start 32; Stop 56
cgaaacaacatacatttgaagagct

SEQ ID NO: 78701 - DNA, 25 bp, Artificial
  probe
  misc_feature (1)..(25): SEQ ID NO: 801; WAN024BEH_at; Start 521; Stop 545
tagtcaaggttcttgcaggagcgct

SEQ ID NO: 78702 - DNA, 25 bp, Artificial
  probe
  misc_feature (1)..(25): SEQ ID NO: 801; WAN024BEH_at; Start 115; Stop 139
tatggttttactgctagctgtgcgt

SEQ ID NO: 78703 - DNA, 25 bp, Artificial
  probe
  misc_feature (1)..(25): SEQ ID NO: 801; WAN024BEH_at; Start 64; Stop 88
gaccaaaagttagaaagattggcta

SEQ ID NO: 78704 - DNA, 25 bp, Artificial
  probe
  misc_feature (1)..(25): SEQ ID NO: 801; WAN024BEH_at; Start 83; Stop 107
tggctaagttgtcgcccgatttggt

SEQ ID NO: 78705 - DNA, 25 bp, Artificial
  probe
  misc_feature (1)..(25): SEQ ID NO: 801; WAN024BEH_at; Start 268; Stop 292
gcagatgcgctttttagtgataaaa

SEQ ID NO: 78706 - DNA, 25 bp, Artificial
  probe
  misc_feature (1)..(25): SEQ ID NO: 801; WAN024BEH_at; Start 486; Stop 510
gggattatcgtttagtaccatgcat

SEQ ID NO: 78707 - DNA, 25 bp, Artificial
  probe
  misc_feature (1)..(25): SEQ ID NO: 801; WAN024BEH_at; Start 262; Stop 286
tctttagcagatgcgctttttagtg

SEQ ID NO: 78708 - DNA, 25 bp, Artificial
  probe
  misc_feature (1)..(25): SEQ ID NO: 801; WAN024BEH_at; Start 341; Stop 365
taactagtgatgtgataaaagatgt

SEQ ID NO: 78709 - DNA, 25 bp, Artificial
  probe
  misc_feature (1)..(25): SEQ ID NO: 801; WAN024BEH_at; Start 108; Stop 132
tggaaggtatggttttactgctagc

SEQ ID NO: 78710 - DNA, 25 bp, Artificial
  probe
  misc_feature (1)..(25): SEQ ID NO: 801; WAN024BEH_at; Start 439; Stop 463
gaaatgccaaaagattcagatttat

SEQ ID NO: 78711 - DNA, 25 bp, Artificial
  probe
  misc_feature (1)..(25): SEQ ID NO: 801; WAN024BEH_at; Start 143; Stop 167
catttgcgaacttgattaaagaagc

SEQ ID NO: 78712 - DNA, 25 bp, Artificial
  probe
  misc_feature (1)..(25): SEQ ID NO: 801; WAN024BEH_at; Start 385; Stop 409
tatatggttttaactcgagaagcga

SEQ ID NO: 78713 - DNA, 25 bp, Artificial
  probe
  misc_feature (1)..(25): SEQ ID NO: 801; WAN024BEH_at; Start 506; Stop 530
tgcattatgcatttttagtcaaggt

SEQ ID NO: 78714 - DNA, 25 bp, Artificial
  probe
  misc_feature (1)..(25): SEQ ID NO: 801; WAN024BEH_at; Start 229; Stop 253
gcttgcagttgttatcataaggctg

SEQ ID NO: 78715 - DNA, 25 bp, Artificial
  probe
  misc_feature (1)..(25): SEQ ID NO: 801; WAN024BEH_at; Start 471; Stop 495
tattagagaagttctgggattatcg

SEQ ID NO: 78716 - DNA, 25 bp, Artificial
  probe
  misc_feature (1)..(25): SEQ ID NO: 801; WAN024BEH_at; Start 403; Stop 427
gaagcgacacctgaatacatttatg

SEQ ID NO: 78717 - DNA, 25 bp, Artificial
  probe
  misc_feature (1)..(25): SEQ ID NO: 801; WAN024BEH_at; Start 535; Stop 559
gcaggagcgcttgctagaaaatata

SEQ ID NO: 78718 - DNA, 25 bp, Artificial
  probe
  misc_feature (1)..(25): SEQ ID NO: 801; WAN024BEH_at; Start 150; Stop 174
gaacttgattaaagaagcgtatggg

SEQ ID NO: 78719 - DNA, 25 bp, Artificial
  probe
  misc_feature (1)..(25): SEQ ID NO: 801; WAN024BEH_at; Start 185; Stop 209
taaacgtagtttatgcgagtcggat

SEQ ID NO: 78720 - DNA, 25 bp, Artificial
  probe
  misc_feature (1)..(25): SEQ ID NO: 801; WAN024BEH_at; Start 316; Stop 340
taccacaagaatacctctaatacca

SEQ ID NO: 78721 - DNA, 25 bp, Artificial
  probe
  misc_feature (1)..(25): SEQ ID NO: 801; WAN024BEH_at; Start 392; Stop 416
ttttaactcgagaagcgacacctga

SEQ ID NO: 78722 - DNA, 25 bp, Artificial
  probe
  misc_feature (1)..(25): SEQ ID NO: 801; WAN024BEH_at; Start 213; Stop 237
ggctctctggaatattgcttgcagt

SEQ ID NO: 78723 - DNA, 25 bp, Artificial
  probe
  misc_feature (1)..(25): SEQ ID NO: 801; WAN024BEH_at; Start 491; Stop 515
tatcgtttagtaccatgcattatgc

SEQ ID NO: 78724 - DNA, 25 bp, Artificial
  probe
  misc_feature (1)..(25): SEQ ID NO: 801; WAN024BEH_at; Start 77; Stop 101
aaagattggctaagttgtcgcccga

SEQ ID NO: 78725 - DNA, 25 bp, Artificial
  probe
  misc_feature (1)..(25): SEQ ID NO: 801; WAN024BEH_at; Start 200; Stop 224
cgagtcggatgttggctctctggaa

SEQ ID NO: 78726 - DNA, 25 bp, Artificial
  probe
  misc_feature (1)..(25): SEQ ID NO: 801; WAN024BEH_at; Start 300; Stop 324
tctagattcttactattaccacaag

SEQ ID NO: 78727 - DNA, 25 bp, Artificial
  probe
  misc_feature (1)..(25): SEQ ID NO: 801; WAN024BEH_at; Start 424; Stop 448
tatgttgtacaaactgaaatgccaa

SEQ ID NO: 78728 - DNA, 25 bp, Artificial
  probe
  misc_feature (1)..(25): SEQ ID NO: 2073; WAN024BEI_at; Start 393; Stop 417
gggtggcctgctaccaaatccagaa

SEQ ID NO: 78729 - DNA, 25 bp, Artificial
  probe
  misc_feature (1)..(25): SEQ ID NO: 2073; WAN024BEI_at; Start 293; Stop 317
aattggcccatacagacaaggtaaa

SEQ ID NO: 78730 - DNA, 25 bp, Artificial
  probe
  misc_feature (1)..(25): SEQ ID NO: 2073; WAN024BEI_at; Start 385; Stop 409
acggctctgggtggcctgctaccaa

SEQ ID NO: 78731 - DNA, 25 bp, Artificial
  probe
  misc_feature (1)..(25): SEQ ID NO: 2073; WAN024BEI_at; Start 296; Stop 320
tggcccatacagacaaggtaaatcc

SEQ ID NO: 78732 - DNA, 25 bp, Artificial
  probe
  misc_feature (1)..(25): SEQ ID NO: 2073; WAN024BEI_at; Start 70; Stop 94
ccttgccgtagtacggttactgact

SEQ ID NO: 78733 - DNA, 25 bp, Artificial
  probe
  misc_feature (1)..(25): SEQ ID NO: 2073; WAN024BEI_at; Start 390; Stop 414
tctgggtggcctgctaccaaatcca

SEQ ID NO: 78734 - DNA, 25 bp, Artificial
  probe
  misc_feature (1)..(25): SEQ ID NO: 2073; WAN024BEI_at; Start 315; Stop 339
aaatcctatgtggatgcacggaaac

SEQ ID NO: 78735 - DNA, 25 bp, Artificial
  probe
  misc_feature (1)..(25): SEQ ID NO: 2073; WAN024BEI_at; Start 396; Stop 420
tggcctgctaccaaatccagaaatc

SEQ ID NO: 78736 - DNA, 25 bp, Artificial
  probe
  misc_feature (1)..(25): SEQ ID NO: 2073; WAN024BEI_at; Start 371; Stop 395
ggacagtagtcggaacggctctggg

SEQ ID NO: 78737 - DNA, 25 bp, Artificial
  probe
  misc_feature (1)..(25): SEQ ID NO: 2073; WAN024BEI_at; Start 12; Stop 36
ggattcttttcagtctacttatact

SEQ ID NO: 78738 - DNA, 25 bp, Artificial
  probe
  misc_feature (1)..(25): SEQ ID NO: 2073; WAN024BEI_at; Start 67; Stop 91
tcaccttgccgtagtacggttactg

SEQ ID NO: 78739 - DNA, 25 bp, Artificial
  probe
  misc_feature (1)..(25): SEQ ID NO: 2073; WAN024BEI_at; Start 542; Stop 566
tcggaacagttctctttggagtggt

SEQ ID NO: 78740 - DNA, 25 bp, Artificial
  probe
  misc_feature (1)..(25): SEQ ID NO: 2073; WAN024BEI_at; Start 312; Stop 336
ggtaaatcctatgtggatgcacgga

SEQ ID NO: 78741 - DNA, 25 bp, Artificial
  probe
  misc_feature (1)..(25): SEQ ID NO: 2073; WAN024BEI_at; Start 303; Stop 327
tacagacaaggtaaatcctatgtgg

SEQ ID NO: 78742 - DNA, 25 bp, Artificial
  probe
  misc_feature (1)..(25): SEQ ID NO: 2073; WAN024BEI_at; Start 314; Stop 338
taaatcctatgtggatgcacggaaa

SEQ ID NO: 78743 - DNA, 25 bp, Artificial
  probe
  misc_feature (1)..(25): SEQ ID NO: 2073; WAN024BEI_at; Start 295; Stop 319
ttggcccatacagacaaggtaaatc

SEQ ID NO: 78744 - DNA, 25 bp, Artificial
  probe
  misc_feature (1)..(25): SEQ ID NO: 2073; WAN024BEI_at; Start 305; Stop 329
cagacaaggtaaatcctatgtggat

SEQ ID NO: 78745 - DNA, 25 bp, Artificial
  probe
  misc_feature (1)..(25): SEQ ID NO: 2073; WAN024BEI_at; Start 18; Stop 42
ttttcagtctacttatactcttcga

SEQ ID NO: 78746 - DNA, 25 bp, Artificial
  probe
  misc_feature (1)..(25): SEQ ID NO: 2073; WAN024BEI_at; Start 383; Stop 407
gaacggctctgggtggcctgctacc

SEQ ID NO: 78747 - DNA, 25 bp, Artificial
  probe
  misc_feature (1)..(25): SEQ ID NO: 2073; WAN024BEI_at; Start 388; Stop 412
gctctgggtggcctgctaccaaatc

SEQ ID NO: 78748 - DNA, 25 bp, Artificial
  probe
  misc_feature (1)..(25): SEQ ID NO: 2073; WAN024BEI_at; Start 546; Stop 570
aacagttctctttggagtggtcttg

SEQ ID NO: 78749 - DNA, 25 bp, Artificial
  probe
  misc_feature (1)..(25): SEQ ID NO: 2073; WAN024BEI_at; Start 292; Stop 316
gaattggcccatacagacaaggtaa

SEQ ID NO: 78750 - DNA, 25 bp, Artificial
  probe
  misc_feature (1)..(25): SEQ ID NO: 2073; WAN024BEI_at; Start 309; Stop 333
caaggtaaatcctatgtggatgcac

SEQ ID NO: 78751 - DNA, 25 bp, Artificial
  probe
  misc_feature (1)..(25): SEQ ID NO: 2073; WAN024BEI_at; Start 394; Stop 418
ggtggcctgctaccaaatccagaaa

SEQ ID NO: 78752 - DNA, 25 bp, Artificial
  probe
  misc_feature (1)..(25): SEQ ID NO: 2073; WAN024BEI_at; Start 5; Stop 29
tatggctggattcttttcagtctac

SEQ ID NO: 78753 - DNA, 25 bp, Artificial
  probe
  misc_feature (1)..(25): SEQ ID NO: 2073; WAN024BEI_at; Start 298; Stop 322
gcccatacagacaaggtaaatccta

SEQ ID NO: 78754 - DNA, 25 bp, Artificial
  probe
  misc_feature (1)..(25): SEQ ID NO: 2073; WAN024BEI_at; Start 544; Stop 568
ggaacagttctctttggagtggtct

SEQ ID NO: 78755 - DNA, 25 bp, Artificial
  probe
  misc_feature (1)..(25): SEQ ID NO: 2073; WAN024BEI_at; Start 392; Stop 416
tgggtggcctgctaccaaatccaga

SEQ ID NO: 78756 - DNA, 25 bp, Artificial
  probe
  misc_feature (1)..(25): SEQ ID NO: 2073; WAN024BEI_at; Start 289; Stop 313
ggtgaattggcccatacagacaagg

SEQ ID NO: 78757 - DNA, 25 bp, Artificial
  probe
  misc_feature (1)..(25): SEQ ID NO: 2073; WAN024BEI_at; Start 291; Stop 315
tgaattggcccatacagacaaggta

SEQ ID NO: 78758 - DNA, 25 bp, Artificial
  probe
  misc_feature (1)..(25): SEQ ID NO: 2073; WAN024BEI_at; Start 8; Stop 32
ggctggattcttttcagtctactta

SEQ ID NO: 78759 - DNA, 25 bp, Artificial
  probe
  misc_feature (1)..(25): SEQ ID NO: 2073; WAN024BEI_at; Start 300; Stop 324
ccatacagacaaggtaaatcctatg

SEQ ID NO: 78760 - DNA, 25 bp, Artificial
  probe
  misc_feature (1)..(25): SEQ ID NO: 2073; WAN024BEI_at; Start 2; Stop 26
tgctatggctggattcttttcagtc

SEQ ID NO: 78761 - DNA, 25 bp, Artificial
  probe
  misc_feature (1)..(25): SEQ ID NO: 2073; WAN024BEI_at; Start 285; Stop 309
gatgggtgaattggcccatacagac

SEQ ID NO: 78762 - DNA, 25 bp, Artificial
  probe
  misc_feature (1)..(25): SEQ ID NO: 1176; WAN024BEJ_at; Start 131; Stop 155
atcctaagctctcttctgaagtagg

SEQ ID NO: 78763 - DNA, 25 bp, Artificial
  probe
  misc_feature (1)..(25): SEQ ID NO: 1176; WAN024BEJ_at; Start 132; Stop 156
tcctaagctctcttctgaagtaggt

SEQ ID NO: 78764 - DNA, 25 bp, Artificial
  probe
  misc_feature (1)..(25): SEQ ID NO: 1176; WAN024BEJ_at; Start 135; Stop 159
taagctctcttctgaagtaggtaca

SEQ ID NO: 78765 - DNA, 25 bp, Artificial
  probe
  misc_feature (1)..(25): SEQ ID NO: 1176; WAN024BEJ_at; Start 136; Stop 160
aagctctcttctgaagtaggtacat

SEQ ID NO: 78766 - DNA, 25 bp, Artificial
  probe
  misc_feature (1)..(25): SEQ ID NO: 1176; WAN024BEJ_at; Start 124; Stop 148
ggaatcaatcctaagctctcttctg

SEQ ID NO: 78767 - DNA, 25 bp, Artificial
  probe
  misc_feature (1)..(25): SEQ ID NO: 1176; WAN024BEJ_at; Start 125; Stop 149
gaatcaatcctaagctctcttctga

SEQ ID NO: 78768 - DNA, 25 bp, Artificial
  probe
  misc_feature (1)..(25): SEQ ID NO: 1176; WAN024BEJ_at; Start 128; Stop 152
tcaatcctaagctctcttctgaagt

SEQ ID NO: 78769 - DNA, 25 bp, Artificial
  probe
  misc_feature (1)..(25): SEQ ID NO: 1176; WAN024BEJ_at; Start 123; Stop 147
aggaatcaatcctaagctctcttct

SEQ ID NO: 78770 - DNA, 25 bp, Artificial
  probe
  misc_feature (1)..(25): SEQ ID NO: 1176; WAN024BEJ_at; Start 122; Stop 146
taggaatcaatcctaagctctcttc

SEQ ID NO: 78771 - DNA, 25 bp, Artificial
  probe
  misc_feature (1)..(25): SEQ ID NO: 1176; WAN024BEJ_at; Start 126; Stop 150
aatcaatcctaagctctcttctgaa

SEQ ID NO: 78772 - DNA, 25 bp, Artificial
  probe
  misc_feature (1)..(25): SEQ ID NO: 1176; WAN024BEJ_at; Start 134; Stop 158
ctaagctctcttctgaagtaggtac

SEQ ID NO: 78773 - DNA, 25 bp, Artificial
  probe
  misc_feature (1)..(25): SEQ ID NO: 1176; WAN024BEJ_at; Start 129; Stop 153
caatcctaagctctcttctgaagta

SEQ ID NO: 78774 - DNA, 25 bp, Artificial
  probe
  misc_feature (1)..(25): SEQ ID NO: 1176; WAN024BEJ_at; Start 127; Stop 151
atcaatcctaagctctcttctgaag

SEQ ID NO: 78775 - DNA, 25 bp, Artificial
  probe
  misc_feature (1)..(25): SEQ ID NO: 1176; WAN024BEJ_at; Start 138; Stop 162
gctctcttctgaagtaggtacatga

SEQ ID NO: 78776 - DNA, 25 bp, Artificial
  probe
  misc_feature (1)..(25): SEQ ID NO: 1176; WAN024BEJ_at; Start 119; Stop 143
acttaggaatcaatcctaagctctc

SEQ ID NO: 78777 - DNA, 25 bp, Artificial
  probe
  misc_feature (1)..(25): SEQ ID NO: 1176; WAN024BEJ_at; Start 133; Stop 157
cctaagctctcttctgaagtaggta

SEQ ID NO: 78778 - DNA, 25 bp, Artificial
  probe
  misc_feature (1)..(25): SEQ ID NO: 1176; WAN024BEJ_at; Start 130; Stop 154
aatcctaagctctcttctgaagtag

SEQ ID NO: 78779 - DNA, 25 bp, Artificial
  probe
  misc_feature (1)..(25): SEQ ID NO: 1176; WAN024BEJ_at; Start 121; Stop 145
ttaggaatcaatcctaagctctctt

SEQ ID NO: 78780 - DNA, 25 bp, Artificial
  probe
  misc_feature (1)..(25): SEQ ID NO: 1176; WAN024BEJ_at; Start 137; Stop 161
agctctcttctgaagtaggtacatg

SEQ ID NO: 78781 - DNA, 25 bp, Artificial
  probe
  misc_feature (1)..(25): SEQ ID NO: 1176; WAN024BEJ_at; Start 120; Stop 144
cttaggaatcaatcctaagctctct

SEQ ID NO: 78782 - DNA, 25 bp, Artificial
  probe
  misc_feature (1)..(25): SEQ ID NO: 4145; WAN024BEK_at; Start 3; Stop 27
ggatgaagctggcgaaatattatta

SEQ ID NO: 78783 - DNA, 25 bp, Artificial
  probe
  misc_feature (1)..(25): SEQ ID NO: 4145; WAN024BEK_at; Start 26; Stop 50
taatactattcaaaaatcaaagtgc

SEQ ID NO: 78784 - DNA, 25 bp, Artificial
  probe
  misc_feature (1)..(25): SEQ ID NO: 4145; WAN024BEK_at; Start 28; Stop 52
atactattcaaaaatcaaagtgcaa

SEQ ID NO: 78785 - DNA, 25 bp, Artificial
  probe
  misc_feature (1)..(25): SEQ ID NO: 4145; WAN024BEK_at; Start 2; Stop 26
tggatgaagctggcgaaatattatt

SEQ ID NO: 78786 - DNA, 25 bp, Artificial
  probe
  misc_feature (1)..(25): SEQ ID NO: 4145; WAN024BEK_at; Start 6; Stop 30
tgaagctggcgaaatattattaata

SEQ ID NO: 78787 - DNA, 25 bp, Artificial
  probe
  misc_feature (1)..(25): SEQ ID NO: 4145; WAN024BEK_at; Start 5; Stop 29
atgaagctggcgaaatattattaat

SEQ ID NO: 78788 - DNA, 25 bp, Artificial
  probe
  misc_feature (1)..(25): SEQ ID NO: 4145; WAN024BEK_at; Start 142; Stop 166
aaagctttaaatcaagcagttctaa

SEQ ID NO: 78789 - DNA, 25 bp, Artificial
  probe
  misc_feature (1)..(25): SEQ ID NO: 4145; WAN024BEK_at; Start 8; Stop 32
aagctggcgaaatattattaatact

SEQ ID NO: 78790 - DNA, 25 bp, Artificial
  probe
  misc_feature (1)..(25): SEQ ID NO: 4145; WAN024BEK_at; Start 147; Stop 171
tttaaatcaagcagttctaactaat

SEQ ID NO: 78791 - DNA, 25 bp, Artificial
  probe
  misc_feature (1)..(25): SEQ ID NO: 4145; WAN024BEK_at; Start 23; Stop 47
tattaatactattcaaaaatcaaag

SEQ ID NO: 78792 - DNA, 25 bp, Artificial
  probe
  misc_feature (1)..(25): SEQ ID NO: 4145; WAN024BEK_at; Start 25; Stop 49
ttaatactattcaaaaatcaaagtg

SEQ ID NO: 78793 - DNA, 25 bp, Artificial
  probe
  misc_feature (1)..(25): SEQ ID NO: 4145; WAN024BEK_at; Start 7; Stop 31
gaagctggcgaaatattattaatac

SEQ ID NO: 78794 - DNA, 25 bp, Artificial
  probe
  misc_feature (1)..(25): SEQ ID NO: 4145; WAN024BEK_at; Start 4; Stop 28
gatgaagctggcgaaatattattaa

SEQ ID NO: 78795 - DNA, 25 bp, Artificial
  probe
  misc_feature (1)..(25): SEQ ID NO: 4145; WAN024BEK_at; Start 146; Stop 170
ctttaaatcaagcagttctaactaa

SEQ ID NO: 78796 - DNA, 25 bp, Artificial
  probe
  misc_feature (1)..(25): SEQ ID NO: 4145; WAN024BEK_at; Start 24; Stop 48
attaatactattcaaaaatcaaagt

SEQ ID NO: 78797 - DNA, 25 bp, Artificial
  probe
  misc_feature (1)..(25): SEQ ID NO: 4145; WAN024BEK_at; Start 27; Stop 51
aatactattcaaaaatcaaagtgca

SEQ ID NO: 78798 - DNA, 25 bp, Artificial
  probe
  misc_feature (1)..(25): SEQ ID NO: 4145; WAN024BEK_at; Start 144; Stop 168
agctttaaatcaagcagttctaact

SEQ ID NO: 78799 - DNA, 25 bp, Artificial
  probe
  misc_feature (1)..(25): SEQ ID NO: 4145; WAN024BEK_at; Start 145; Stop 169
gctttaaatcaagcagttctaacta

SEQ ID NO: 78800 - DNA, 25 bp, Artificial
  probe
  misc_feature (1)..(25): SEQ ID NO: 4145; WAN024BEK_at; Start 143; Stop 167
aagctttaaatcaagcagttctaac

SEQ ID NO: 78801 - DNA, 25 bp, Artificial
  probe
  misc_feature (1)..(25): SEQ ID NO: 4145; WAN024BEK_at; Start 1; Stop 25
gtggatgaagctggcgaaatattat

SEQ ID NO: 78802 - DNA, 25 bp, Artificial
  probe
  misc_feature (1)..(25): SEQ ID NO: 4073; WAN024BEL_at; Start 220; Stop 244
ttctgctgcttcctcatttgtcctg

SEQ ID NO: 78803 - DNA, 25 bp, Artificial
  probe
  misc_feature (1)..(25): SEQ ID NO: 4073; WAN024BEL_at; Start 202; Stop 226
gaggctttttacttgcttttctgct

SEQ ID NO: 78804 - DNA, 25 bp, Artificial
  probe
  misc_feature (1)..(25): SEQ ID NO: 4073; WAN024BEL_at; Start 211; Stop 235
tacttgcttttctgctgcttcctca

SEQ ID NO: 78805 - DNA, 25 bp, Artificial
  probe
  misc_feature (1)..(25): SEQ ID NO: 4073; WAN024BEL_at; Start 209; Stop 233
tttacttgcttttctgctgcttcct

SEQ ID NO: 78806 - DNA, 25 bp, Artificial
  probe
  misc_feature (1)..(25): SEQ ID NO: 4073; WAN024BEL_at; Start 208; Stop 232
ttttacttgcttttctgctgcttcc

SEQ ID NO: 78807 - DNA, 25 bp, Artificial
  probe
  misc_feature (1)..(25): SEQ ID NO: 4073; WAN024BEL_at; Start 213; Stop 237
cttgcttttctgctgcttcctcatt

SEQ ID NO: 78808 - DNA, 25 bp, Artificial
  probe
  misc_feature (1)..(25): SEQ ID NO: 4073; WAN024BEL_at; Start 168; Stop 192
cattgagtataagaagtccttttcc

SEQ ID NO: 78809 - DNA, 25 bp, Artificial
  probe
  misc_feature (1)..(25): SEQ ID NO: 4073; WAN024BEL_at; Start 204; Stop 228
ggctttttacttgcttttctgctgc

SEQ ID NO: 78810 - DNA, 25 bp, Artificial
  probe
  misc_feature (1)..(25): SEQ ID NO: 4073; WAN024BEL_at; Start 200; Stop 224
aagaggctttttacttgcttttctg

SEQ ID NO: 78811 - DNA, 25 bp, Artificial
  probe
  misc_feature (1)..(25): SEQ ID NO: 4073; WAN024BEL_at; Start 203; Stop 227
aggctttttacttgcttttctgctg

SEQ ID NO: 78812 - DNA, 25 bp, Artificial
  probe
  misc_feature (1)..(25): SEQ ID NO: 4073; WAN024BEL_at; Start 231; Stop 255
cctcatttgtcctgaagcctttttt

SEQ ID NO: 78813 - DNA, 25 bp, Artificial
  probe
  misc_feature (1)..(25): SEQ ID NO: 4073; WAN024BEL_at; Start 201; Stop 225
agaggctttttacttgcttttctgc

SEQ ID NO: 78814 - DNA, 25 bp, Artificial
  probe
  misc_feature (1)..(25): SEQ ID NO: 4073; WAN024BEL_at; Start 223; Stop 247
tgctgcttcctcatttgtcctgaag

SEQ ID NO: 78815 - DNA, 25 bp, Artificial
  probe
  misc_feature (1)..(25): SEQ ID NO: 4073; WAN024BEL_at; Start 171; Stop 195
tgagtataagaagtccttttcctta

SEQ ID NO: 78816 - DNA, 25 bp, Artificial
  probe
  misc_feature (1)..(25): SEQ ID NO: 4073; WAN024BEL_at; Start 230; Stop 254
tcctcatttgtcctgaagccttttt

SEQ ID NO: 78817 - DNA, 25 bp, Artificial
  probe
  misc_feature (1)..(25): SEQ ID NO: 4073; WAN024BEL_at; Start 234; Stop 258
catttgtcctgaagccttttttgtg

SEQ ID NO: 78818 - DNA, 25 bp, Artificial
  probe
  misc_feature (1)..(25): SEQ ID NO: 4073; WAN024BEL_at; Start 232; Stop 256
ctcatttgtcctgaagccttttttg

SEQ ID NO: 78819 - DNA, 25 bp, Artificial
  probe
  misc_feature (1)..(25): SEQ ID NO: 4073; WAN024BEL_at; Start 222; Stop 246
ctgctgcttcctcatttgtcctgaa

SEQ ID NO: 78820 - DNA, 25 bp, Artificial
  probe
  misc_feature (1)..(25): SEQ ID NO: 4073; WAN024BEL_at; Start 205; Stop 229
gctttttacttgcttttctgctgct

SEQ ID NO: 78821 - DNA, 25 bp, Artificial
  probe
  misc_feature (1)..(25): SEQ ID NO: 4073; WAN024BEL_at; Start 212; Stop 236
acttgcttttctgctgcttcctcat

SEQ ID NO: 78822 - DNA, 25 bp, Artificial
  probe
  misc_feature (1)..(25): SEQ ID NO: 4073; WAN024BEL_at; Start 226; Stop 250
tgcttcctcatttgtcctgaagcct

SEQ ID NO: 78823 - DNA, 25 bp, Artificial
  probe
  misc_feature (1)..(25): SEQ ID NO: 4073; WAN024BEL_at; Start 169; Stop 193
attgagtataagaagtccttttcct

SEQ ID NO: 78824 - DNA, 25 bp, Artificial
  probe
  misc_feature (1)..(25): SEQ ID NO: 4073; WAN024BEL_at; Start 229; Stop 253
ttcctcatttgtcctgaagcctttt

SEQ ID NO: 78825 - DNA, 25 bp, Artificial
  probe
  misc_feature (1)..(25): SEQ ID NO: 4073; WAN024BEL_at; Start 227; Stop 251
gcttcctcatttgtcctgaagcctt

SEQ ID NO: 78826 - DNA, 25 bp, Artificial
  probe
  misc_feature (1)..(25): SEQ ID NO: 4073; WAN024BEL_at; Start 235; Stop 259
atttgtcctgaagccttttttgtgt

SEQ ID NO: 78827 - DNA, 25 bp, Artificial
  probe
  misc_feature (1)..(25): SEQ ID NO: 4073; WAN024BEL_at; Start 216; Stop 240
gcttttctgctgcttcctcatttgt

SEQ ID NO: 78828 - DNA, 25 bp, Artificial
  probe
  misc_feature (1)..(25): SEQ ID NO: 4073; WAN024BEL_at; Start 221; Stop 245
tctgctgcttcctcatttgtcctga

SEQ ID NO: 78829 - DNA, 25 bp, Artificial
  probe
  misc_feature (1)..(25): SEQ ID NO: 4073; WAN024BEL_at; Start 215; Stop 239
tgcttttctgctgcttcctcatttg

SEQ ID NO: 78830 - DNA, 25 bp, Artificial
  probe
  misc_feature (1)..(25): SEQ ID NO: 4073; WAN024BEL_at; Start 238; Stop 262
tgtcctgaagccttttttgtgttaa

SEQ ID NO: 78831 - DNA, 25 bp, Artificial
  probe
  misc_feature (1)..(25): SEQ ID NO: 4073; WAN024BEL_at; Start 224; Stop 248
gctgcttcctcatttgtcctgaagc

SEQ ID NO: 78832 - DNA, 25 bp, Artificial
  probe
  misc_feature (1)..(25): SEQ ID NO: 4073; WAN024BEL_at; Start 218; Stop 242
ttttctgctgcttcctcatttgtcc

SEQ ID NO: 78833 - DNA, 25 bp, Artificial
  probe
  misc_feature (1)..(25): SEQ ID NO: 4073; WAN024BEL_at; Start 228; Stop 252
cttcctcatttgtcctgaagccttt

SEQ ID NO: 78834 - DNA, 25 bp, Artificial
  probe
  misc_feature (1)..(25): SEQ ID NO: 4073; WAN024BEL_at; Start 219; Stop 243
tttctgctgcttcctcatttgtcct

SEQ ID NO: 78835 - DNA, 25 bp, Artificial
  probe
  misc_feature (1)..(25): SEQ ID NO: 4073; WAN024BEL_at; Start 233; Stop 257
tcatttgtcctgaagccttttttgt

SEQ ID NO: 78836 - DNA, 25 bp, Artificial
  probe
  misc_feature (1)..(25): SEQ ID NO: 1114; WAN024BEM_at; Start 67; Stop 91
tcttttcacagtctcatcaaccagt

SEQ ID NO: 78837 - DNA, 25 bp, Artificial
  probe
  misc_feature (1)..(25): SEQ ID NO: 1114; WAN024BEM_at; Start 93; Stop 117
aatcgattgttctactttttgtctc

SEQ ID NO: 78838 - DNA, 25 bp, Artificial
  probe
  misc_feature (1)..(25): SEQ ID NO: 1114; WAN024BEM_at; Start 97; Stop 121
gattgttctactttttgtctccaaa

SEQ ID NO: 78839 - DNA, 25 bp, Artificial
  probe
  misc_feature (1)..(25): SEQ ID NO: 1114; WAN024BEM_at; Start 78; Stop 102
tctcatcaaccagttaatcgattgt

SEQ ID NO: 78840 - DNA, 25 bp, Artificial
  probe
  misc_feature (1)..(25): SEQ ID NO: 1114; WAN024BEM_at; Start 74; Stop 98
acagtctcatcaaccagttaatcga

SEQ ID NO: 78841 - DNA, 25 bp, Artificial
  probe
  misc_feature (1)..(25): SEQ ID NO: 1114; WAN024BEM_at; Start 96; Stop 120
cgattgttctactttttgtctccaa

SEQ ID NO: 78842 - DNA, 25 bp, Artificial
  probe
  misc_feature (1)..(25): SEQ ID NO: 1114; WAN024BEM_at; Start 55; Stop 79
tggtctttgtgctcttttcacagtc

SEQ ID NO: 78843 - DNA, 25 bp, Artificial
  probe
  misc_feature (1)..(25): SEQ ID NO: 1114; WAN024BEM_at; Start 75; Stop 99
cagtctcatcaaccagttaatcgat

SEQ ID NO: 78844 - DNA, 25 bp, Artificial
  probe
  misc_feature (1)..(25): SEQ ID NO: 1114; WAN024BEM_at; Start 53; Stop 77
gctggtctttgtgctcttttcacag

SEQ ID NO: 78845 - DNA, 25 bp, Artificial
  probe
  misc_feature (1)..(25): SEQ ID NO: 1114; WAN024BEM_at; Start 52; Stop 76
agctggtctttgtgctcttttcaca

SEQ ID NO: 78846 - DNA, 25 bp, Artificial
  probe
  misc_feature (1)..(25): SEQ ID NO: 1114; WAN024BEM_at; Start 72; Stop 96
tcacagtctcatcaaccagttaatc

SEQ ID NO: 78847 - DNA, 25 bp, Artificial
  probe
  misc_feature (1)..(25): SEQ ID NO: 1114; WAN024BEM_at; Start 77; Stop 101
gtctcatcaaccagttaatcgattg

SEQ ID NO: 78848 - DNA, 25 bp, Artificial
  probe
  misc_feature (1)..(25): SEQ ID NO: 1114; WAN024BEM_at; Start 73; Stop 97
cacagtctcatcaaccagttaatcg

SEQ ID NO: 78849 - DNA, 25 bp, Artificial
  probe
  misc_feature (1)..(25): SEQ ID NO: 1114; WAN024BEM_at; Start 71; Stop 95
ttcacagtctcatcaaccagttaat

SEQ ID NO: 78850 - DNA, 25 bp, Artificial
  probe
  misc_feature (1)..(25): SEQ ID NO: 1114; WAN024BEM_at; Start 69; Stop 93
ttttcacagtctcatcaaccagtta

SEQ ID NO: 78851 - DNA, 25 bp, Artificial
  probe
  misc_feature (1)..(25): SEQ ID NO: 1114; WAN024BEM_at; Start 80; Stop 104
tcatcaaccagttaatcgattgttc

SEQ ID NO: 78852 - DNA, 25 bp, Artificial
  probe
  misc_feature (1)..(25): SEQ ID NO: 1114; WAN024BEM_at; Start 29; Stop 53
tcgaagagtatgaccagcttgcaag

SEQ ID NO: 78853 - DNA, 25 bp, Artificial
  probe
  misc_feature (1)..(25): SEQ ID NO: 1114; WAN024BEM_at; Start 51; Stop 75
aagctggtctttgtgctcttttcac

SEQ ID NO: 78854 - DNA, 25 bp, Artificial
  probe
  misc_feature (1)..(25): SEQ ID NO: 1114; WAN024BEM_at; Start 70; Stop 94
tttcacagtctcatcaaccagttaa

SEQ ID NO: 78855 - DNA, 25 bp, Artificial
  probe
  misc_feature (1)..(25): SEQ ID NO: 1114; WAN024BEM_at; Start 87; Stop 111
ccagttaatcgattgttctactttt

SEQ ID NO: 78856 - DNA, 25 bp, Artificial
  probe
  misc_feature (1)..(25): SEQ ID NO: 1114; WAN024BEM_at; Start 84; Stop 108
caaccagttaatcgattgttctact

SEQ ID NO: 78857 - DNA, 25 bp, Artificial
  probe
  misc_feature (1)..(25): SEQ ID NO: 1114; WAN024BEM_at; Start 83; Stop 107
tcaaccagttaatcgattgttctac

SEQ ID NO: 78858 - DNA, 25 bp, Artificial
  probe
  misc_feature (1)..(25): SEQ ID NO: 1114; WAN024BEM_at; Start 64; Stop 88
tgctcttttcacagtctcatcaacc

SEQ ID NO: 78859 - DNA, 25 bp, Artificial
  probe
  misc_feature (1)..(25): SEQ ID NO: 1114; WAN024BEM_at; Start 46; Stop 70
cttgcaagctggtctttgtgctctt

SEQ ID NO: 78860 - DNA, 25 bp, Artificial
  probe
  misc_feature (1)..(25): SEQ ID NO: 1114; WAN024BEM_at; Start 28; Stop 52
ttcgaagagtatgaccagcttgcaa

SEQ ID NO: 78861 - DNA, 25 bp, Artificial
  probe
  misc_feature (1)..(25): SEQ ID NO: 1114; WAN024BEM_at; Start 45; Stop 69
gcttgcaagctggtctttgtgctct

SEQ ID NO: 78862 - DNA, 25 bp, Artificial
  probe
  misc_feature (1)..(25): SEQ ID NO: 1114; WAN024BEM_at; Start 62; Stop 86
tgtgctcttttcacagtctcatcaa

SEQ ID NO: 78863 - DNA, 25 bp, Artificial
  probe
  misc_feature (1)..(25): SEQ ID NO: 1114; WAN024BEM_at; Start 81; Stop 105
catcaaccagttaatcgattgttct

SEQ ID NO: 78864 - DNA, 25 bp, Artificial
  probe
  misc_feature (1)..(25): SEQ ID NO: 1114; WAN024BEM_at; Start 48; Stop 72
tgcaagctggtctttgtgctctttt

SEQ ID NO: 78865 - DNA, 25 bp, Artificial
  probe
  misc_feature (1)..(25): SEQ ID NO: 1114; WAN024BEM_at; Start 50; Stop 74
caagctggtctttgtgctcttttca

SEQ ID NO: 78866 - DNA, 25 bp, Artificial
  probe
  misc_feature (1)..(25): SEQ ID NO: 1114; WAN024BEM_at; Start 60; Stop 84
tttgtgctcttttcacagtctcatc

SEQ ID NO: 78867 - DNA, 25 bp, Artificial
  probe
  misc_feature (1)..(25): SEQ ID NO: 1114; WAN024BEM_at; Start 30; Stop 54
cgaagagtatgaccagcttgcaagc

SEQ ID NO: 78868 - DNA, 25 bp, Artificial
  probe
  misc_feature (1)..(25): SEQ ID NO: 1114; WAN024BEM_at; Start 56; Stop 80
ggtctttgtgctcttttcacagtct

SEQ ID NO: 78869 - DNA, 25 bp, Artificial
  probe
  misc_feature (1)..(25): SEQ ID NO: 1114; WAN024BEM_at; Start 58; Stop 82
tctttgtgctcttttcacagtctca

SEQ ID NO: 78870 - DNA, 25 bp, Artificial
  probe
  misc_feature (1)..(25): SEQ ID NO: 5215; WAN024BEN_at; Start 8; Stop 32
cctgcttggatcaattcaataacag

SEQ ID NO: 78871 - DNA, 25 bp, Artificial
  probe
  misc_feature (1)..(25): SEQ ID NO: 5215; WAN024BEN_at; Start 136; Stop 160
gggaatgtcatttgccatcctaaac

SEQ ID NO: 78872 - DNA, 25 bp, Artificial
  probe
  misc_feature (1)..(25): SEQ ID NO: 5215; WAN024BEN_at; Start 2; Stop 26
tgatgacctgcttggatcaattcaa

SEQ ID NO: 78873 - DNA, 25 bp, Artificial
  probe
  misc_feature (1)..(25): SEQ ID NO: 5215; WAN024BEN_at; Start 91; Stop 115
tcctcgattctcagattattttttc

SEQ ID NO: 78874 - DNA, 25 bp, Artificial
  probe
  misc_feature (1)..(25): SEQ ID NO: 5215; WAN024BEN_at; Start 19; Stop 43
caattcaataacagtgtgggttcca

SEQ ID NO: 78875 - DNA, 25 bp, Artificial
  probe
  misc_feature (1)..(25): SEQ ID NO: 5215; WAN024BEN_at; Start 20; Stop 44
aattcaataacagtgtgggttccaa

SEQ ID NO: 78876 - DNA, 25 bp, Artificial
  probe
  misc_feature (1)..(25): SEQ ID NO: 5215; WAN024BEN_at; Start 51; Stop 75
cggcaccaccagttaccaaaatctt

SEQ ID NO: 78877 - DNA, 25 bp, Artificial
  probe
  misc_feature (1)..(25): SEQ ID NO: 5215; WAN024BEN_at; Start 122; Stop 146
taccatttttgacagggaatgtcat

SEQ ID NO: 78878 - DNA, 25 bp, Artificial
  probe
  misc_feature (1)..(25): SEQ ID NO: 5215; WAN024BEN_at; Start 146; Stop 170
tttgccatcctaaactacctgataa

SEQ ID NO: 78879 - DNA, 25 bp, Artificial
  probe
  misc_feature (1)..(25): SEQ ID NO: 5215; WAN024BEN_at; Start 59; Stop 83
ccagttaccaaaatcttttcttgca

SEQ ID NO: 78880 - DNA, 25 bp, Artificial
  probe
  misc_feature (1)..(25): SEQ ID NO: 5215; WAN024BEN_at; Start 24; Stop 48
caataacagtgtgggttccaataaa

SEQ ID NO: 78881 - DNA, 25 bp, Artificial
  probe
  misc_feature (1)..(25): SEQ ID NO: 5215; WAN024BEN_at; Start 84; Stop 108
tcttttttcctcgattctcagatta

SEQ ID NO: 78882 - DNA, 25 bp, Artificial
  probe
  misc_feature (1)..(25): SEQ ID NO: 5215; WAN024BEN_at; Start 142; Stop 166
gtcatttgccatcctaaactacctg

SEQ ID NO: 78883 - DNA, 25 bp, Artificial
  probe
  misc_feature (1)..(25): SEQ ID NO: 5215; WAN024BEN_at; Start 144; Stop 168
catttgccatcctaaactacctgat

SEQ ID NO: 78884 - DNA, 25 bp, Artificial
  probe
  misc_feature (1)..(25): SEQ ID NO: 5215; WAN024BEN_at; Start 15; Stop 39
ggatcaattcaataacagtgtgggt

SEQ ID NO: 78885 - DNA, 25 bp, Artificial
  probe
  misc_feature (1)..(25): SEQ ID NO: 5215; WAN024BEN_at; Start 3; Stop 27
gatgacctgcttggatcaattcaat

SEQ ID NO: 78886 - DNA, 25 bp, Artificial
  probe
  misc_feature (1)..(25): SEQ ID NO: 5215; WAN024BEN_at; Start 22; Stop 46
ttcaataacagtgtgggttccaata

SEQ ID NO: 78887 - DNA, 25 bp, Artificial
  probe
  misc_feature (1)..(25): SEQ ID NO: 5215; WAN024BEN_at; Start 10; Stop 34
tgcttggatcaattcaataacagtg

SEQ ID NO: 78888 - DNA, 25 bp, Artificial
  probe
  misc_feature (1)..(25): SEQ ID NO: 5215; WAN024BEN_at; Start 175; Stop 199
tcagtaaaatgcttatactcttcga

SEQ ID NO: 78889 - DNA, 25 bp, Artificial
  probe
  misc_feature (1)..(25): SEQ ID NO: 5215; WAN024BEN_at; Start 163; Stop 187
cctgataaaatttcagtaaaatgct

SEQ ID NO: 78890 - DNA, 25 bp, Artificial
  probe
  misc_feature (1)..(25): SEQ ID NO: 5215; WAN024BEN_at; Start 224; Stop 248
gtcgccttgccatgggtatggttac

SEQ ID NO: 78891 - DNA, 25 bp, Artificial
  probe
  misc_feature (1)..(25): SEQ ID NO: 5215; WAN024BEN_at; Start 6; Stop 30
gacctgcttggatcaattcaataac

SEQ ID NO: 78892 - DNA, 25 bp, Artificial
  probe
  misc_feature (1)..(25): SEQ ID NO: 5215; WAN024BEN_at; Start 149; Stop 173
gccatcctaaactacctgataaaat

SEQ ID NO: 78893 - DNA, 25 bp, Artificial
  probe
  misc_feature (1)..(25): SEQ ID NO: 5215; WAN024BEN_at; Start 127; Stop 151
tttttgacagggaatgtcatttgcc

SEQ ID NO: 78894 - DNA, 25 bp, Artificial
  probe
  misc_feature (1)..(25): SEQ ID NO: 5215; WAN024BEN_at; Start 220; Stop 244
caacgtcgccttgccatgggtatgg

SEQ ID NO: 78895 - DNA, 25 bp, Artificial
  probe
  misc_feature (1)..(25): SEQ ID NO: 5215; WAN024BEN_at; Start 137; Stop 161
ggaatgtcatttgccatcctaaact

SEQ ID NO: 78896 - DNA, 25 bp, Artificial
  probe
  misc_feature (1)..(25): SEQ ID NO: 5215; WAN024BEN_at; Start 154; Stop 178
cctaaactacctgataaaatttcag

SEQ ID NO: 78897 - DNA, 25 bp, Artificial
  probe
  misc_feature (1)..(25): SEQ ID NO: 5215; WAN024BEN_at; Start 81; Stop 105
gcatcttttttcctcgattctcaga

SEQ ID NO: 78898 - DNA, 25 bp, Artificial
  probe
  misc_feature (1)..(25): SEQ ID NO: 5215; WAN024BEN_at; Start 134; Stop 158
cagggaatgtcatttgccatcctaa

SEQ ID NO: 78899 - DNA, 25 bp, Artificial
  probe
  misc_feature (1)..(25): SEQ ID NO: 5215; WAN024BEN_at; Start 72; Stop 96
tcttttcttgcatcttttttcctcg

SEQ ID NO: 78900 - DNA, 25 bp, Artificial
  probe
  misc_feature (1)..(25): SEQ ID NO: 5215; WAN024BEN_at; Start 18; Stop 42
tcaattcaataacagtgtgggttcc

SEQ ID NO: 78901 - DNA, 25 bp, Artificial
  probe
  misc_feature (1)..(25): SEQ ID NO: 5215; WAN024BEN_at; Start 14; Stop 38
tggatcaattcaataacagtgtggg

SEQ ID NO: 78902 - DNA, 25 bp, Artificial
  probe
  misc_feature (1)..(25): SEQ ID NO: 5215; WAN024BEN_at; Start 132; Stop 156
gacagggaatgtcatttgccatcct

SEQ ID NO: 78903 - DNA, 25 bp, Artificial
  probe
  misc_feature (1)..(25): SEQ ID NO: 5215; WAN024BEN_at; Start 120; Stop 144
tttaccatttttgacagggaatgtc

SEQ ID NO: 78904 - DNA, 25 bp, Artificial
  probe
  misc_feature (1)..(25): SEQ ID NO: 749; WAN024BEO_x_at; Start 76; Stop 100
gacgaagtcagctcaaaacactgtt

SEQ ID NO: 78905 - DNA, 25 bp, Artificial
  probe
  misc_feature (1)..(25): SEQ ID NO: 749; WAN024BEO_x_at; Start 52; Stop 76
tgctttgaggttgtagatagaactg

SEQ ID NO: 78906 - DNA, 25 bp, Artificial
  probe
  misc_feature (1)..(25): SEQ ID NO: 749; WAN024BEO_x_at; Start 106; Stop 130
gttgtggatgaagctgacgtggttc

SEQ ID NO: 78907 - DNA, 25 bp, Artificial
  probe
  misc_feature (1)..(25): SEQ ID NO: 749; WAN024BEO_x_at; Start 48; Stop 72
gcactgctttgaggttgtagataga

SEQ ID NO: 78908 - DNA, 25 bp, Artificial
  probe
  misc_feature (1)..(25): SEQ ID NO: 749; WAN024BEO_x_at; Start 114; Stop 138
tgaagctgacgtggttctaactaat

SEQ ID NO: 78909 - DNA, 25 bp, Artificial
  probe
  misc_feature (1)..(25): SEQ ID NO: 749; WAN024BEO_x_at; Start 104; Stop 128
aggttgtggatgaagctgacgtggt

SEQ ID NO: 78910 - DNA, 25 bp, Artificial
  probe
  misc_feature (1)..(25): SEQ ID NO: 749; WAN024BEO_x_at; Start 109; Stop 133
gtggatgaagctgacgtggttctaa

SEQ ID NO: 78911 - DNA, 25 bp, Artificial
  probe
  misc_feature (1)..(25): SEQ ID NO: 749; WAN024BEO_x_at; Start 1; Stop 25
atgaaaatcaaagaccaaactagga

SEQ ID NO: 78912 - DNA, 25 bp, Artificial
  probe
  misc_feature (1)..(25): SEQ ID NO: 749; WAN024BEO_x_at; Start 103; Stop 127
gaggttgtggatgaagctgacgtgg

SEQ ID NO: 78913 - DNA, 25 bp, Artificial
  probe
  misc_feature (1)..(25): SEQ ID NO: 749; WAN024BEO_x_at; Start 72; Stop 96
aactgacgaagtcagctcaaaacac

SEQ ID NO: 78914 - DNA, 25 bp, Artificial
  probe
  misc_feature (1)..(25): SEQ ID NO: 749; WAN024BEO_x_at; Start 31; Stop 55
gccgcaggctgctcaaagcactgct

SEQ ID NO: 78915 - DNA, 25 bp, Artificial
  probe
  misc_feature (1)..(25): SEQ ID NO: 749; WAN024BEO_x_at; Start 15; Stop 39
ccaaactaggaagctagccgcaggc

SEQ ID NO: 78916 - DNA, 25 bp, Artificial
  probe
  misc_feature (1)..(25): SEQ ID NO: 749; WAN024BEO_x_at; Start 51; Stop 75
ctgctttgaggttgtagatagaact

SEQ ID NO: 78917 - DNA, 25 bp, Artificial
  probe
  misc_feature (1)..(25): SEQ ID NO: 749; WAN024BEO_x_at; Start 113; Stop 137
atgaagctgacgtggttctaactaa

SEQ ID NO: 78918 - DNA, 25 bp, Artificial
  probe
  misc_feature (1)..(25): SEQ ID NO: 749; WAN024BEO_x_at; Start 105; Stop 129
ggttgtggatgaagctgacgtggtt

SEQ ID NO: 78919 - DNA, 25 bp, Artificial
  probe
  misc_feature (1)..(25): SEQ ID NO: 749; WAN024BEO_x_at; Start 107; Stop 131
ttgtggatgaagctgacgtggttct

SEQ ID NO: 78920 - DNA, 25 bp, Artificial
  probe
  misc_feature (1)..(25): SEQ ID NO: 749; WAN024BEO_x_at; Start 33; Stop 57
cgcaggctgctcaaagcactgcttt

SEQ ID NO: 78921 - DNA, 25 bp, Artificial
  probe
  misc_feature (1)..(25): SEQ ID NO: 749; WAN024BEO_x_at; Start 112; Stop 136
gatgaagctgacgtggttctaacta

SEQ ID NO: 78922 - DNA, 25 bp, Artificial
  probe
  misc_feature (1)..(25): SEQ ID NO: 749; WAN024BEO_x_at; Start 32; Stop 56
ccgcaggctgctcaaagcactgctt

SEQ ID NO: 78923 - DNA, 25 bp, Artificial
  probe
  misc_feature (1)..(25): SEQ ID NO: 749; WAN024BEO_x_at; Start 73; Stop 97
actgacgaagtcagctcaaaacact

SEQ ID NO: 78924 - DNA, 25 bp, Artificial
  probe
  misc_feature (1)..(25): SEQ ID NO: 749; WAN024BEO_x_at; Start 75; Stop 99
tgacgaagtcagctcaaaacactgt

SEQ ID NO: 78925 - DNA, 25 bp, Artificial
  probe
  misc_feature (1)..(25): SEQ ID NO: 749; WAN024BEO_x_at; Start 108; Stop 132
tgtggatgaagctgacgtggttcta

SEQ ID NO: 78926 - DNA, 25 bp, Artificial
  probe
  misc_feature (1)..(25): SEQ ID NO: 749; WAN024BEO_x_at; Start 30; Stop 54
agccgcaggctgctcaaagcactgc

SEQ ID NO: 78927 - DNA, 25 bp, Artificial
  probe
  misc_feature (1)..(25): SEQ ID NO: 749; WAN024BEO_x_at; Start 55; Stop 79
tttgaggttgtagatagaactgacg

SEQ ID NO: 78928 - DNA, 25 bp, Artificial
  probe
  misc_feature (1)..(25): SEQ ID NO: 749; WAN024BEO_x_at; Start 47; Stop 71
agcactgctttgaggttgtagatag

SEQ ID NO: 78929 - DNA, 25 bp, Artificial
  probe
  misc_feature (1)..(25): SEQ ID NO: 749; WAN024BEO_x_at; Start 110; Stop 134
tggatgaagctgacgtggttctaac

SEQ ID NO: 78930 - DNA, 25 bp, Artificial
  probe
  misc_feature (1)..(25): SEQ ID NO: 749; WAN024BEO_x_at; Start 2; Stop 26
tgaaaatcaaagaccaaactaggaa

SEQ ID NO: 78931 - DNA, 25 bp, Artificial
  probe
  misc_feature (1)..(25): SEQ ID NO: 749; WAN024BEO_x_at; Start 50; Stop 74
actgctttgaggttgtagatagaac

SEQ ID NO: 78932 - DNA, 25 bp, Artificial
  probe
  misc_feature (1)..(25): SEQ ID NO: 749; WAN024BEO_x_at; Start 78; Stop 102
cgaagtcagctcaaaacactgtttt

SEQ ID NO: 78933 - DNA, 25 bp, Artificial
  probe
  misc_feature (1)..(25): SEQ ID NO: 749; WAN024BEO_x_at; Start 111; Stop 135
ggatgaagctgacgtggttctaact

SEQ ID NO: 78934 - DNA, 25 bp, Artificial
  probe
  misc_feature (1)..(25): SEQ ID NO: 749; WAN024BEO_x_at; Start 56; Stop 80
ttgaggttgtagatagaactgacga

SEQ ID NO: 78935 - DNA, 25 bp, Artificial
  probe
  misc_feature (1)..(25): SEQ ID NO: 749; WAN024BEO_x_at; Start 54; Stop 78
ctttgaggttgtagatagaactgac

SEQ ID NO: 78936 - DNA, 25 bp, Artificial
  probe
  misc_feature (1)..(25): SEQ ID NO: 749; WAN024BEO_x_at; Start 53; Stop 77
gctttgaggttgtagatagaactga

SEQ ID NO: 78937 - DNA, 25 bp, Artificial
  probe
  misc_feature (1)..(25): SEQ ID NO: 749; WAN024BEO_x_at; Start 57; Stop 81
tgaggttgtagatagaactgacgaa

SEQ ID NO: 78938 - DNA, 25 bp, Artificial
  probe
  misc_feature (1)..(25): SEQ ID NO: 1759; WAN024BEQ_at; Start 1; Stop 25
atgatgggctctttttttgtccagg

SEQ ID NO: 78939 - DNA, 25 bp, Artificial
  probe
  misc_feature (1)..(25): SEQ ID NO: 1759; WAN024BEQ_at; Start 47; Stop 71
ttcataatggattgatactcttcga

SEQ ID NO: 78940 - DNA, 25 bp, Artificial
  probe
  misc_feature (1)..(25): SEQ ID NO: 1759; WAN024BEQ_at; Start 202; Stop 226
attgagtatgaaataagatatgcac

SEQ ID NO: 78941 - DNA, 25 bp, Artificial
  probe
  misc_feature (1)..(25): SEQ ID NO: 1759; WAN024BEQ_at; Start 48; Stop 72
tcataatggattgatactcttcgaa

SEQ ID NO: 78942 - DNA, 25 bp, Artificial
  probe
  misc_feature (1)..(25): SEQ ID NO: 1759; WAN024BEQ_at; Start 40; Stop 64
caaaactttcataatggattgatac

SEQ ID NO: 78943 - DNA, 25 bp, Artificial
  probe
  misc_feature (1)..(25): SEQ ID NO: 1759; WAN024BEQ_at; Start 38; Stop 62
ggcaaaactttcataatggattgat

SEQ ID NO: 78944 - DNA, 25 bp, Artificial
  probe
  misc_feature (1)..(25): SEQ ID NO: 1759; WAN024BEQ_at; Start 204; Stop 228
tgagtatgaaataagatatgcacaa

SEQ ID NO: 78945 - DNA, 25 bp, Artificial
  probe
  misc_feature (1)..(25): SEQ ID NO: 1759; WAN024BEQ_at; Start 43; Stop 67
aactttcataatggattgatactct

SEQ ID NO: 78946 - DNA, 25 bp, Artificial
  probe
  misc_feature (1)..(25): SEQ ID NO: 1759; WAN024BEQ_at; Start 206; Stop 230
agtatgaaataagatatgcacaaat

SEQ ID NO: 78947 - DNA, 25 bp, Artificial
  probe
  misc_feature (1)..(25): SEQ ID NO: 1759; WAN024BEQ_at; Start 36; Stop 60
ggggcaaaactttcataatggattg

SEQ ID NO: 78948 - DNA, 25 bp, Artificial
  probe
  misc_feature (1)..(25): SEQ ID NO: 1759; WAN024BEQ_at; Start 37; Stop 61
gggcaaaactttcataatggattga

SEQ ID NO: 78949 - DNA, 25 bp, Artificial
  probe
  misc_feature (1)..(25): SEQ ID NO: 1759; WAN024BEQ_at; Start 205; Stop 229
gagtatgaaataagatatgcacaaa

SEQ ID NO: 78950 - DNA, 25 bp, Artificial
  probe
  misc_feature (1)..(25): SEQ ID NO: 1759; WAN024BEQ_at; Start 41; Stop 65
aaaactttcataatggattgatact

SEQ ID NO: 78951 - DNA, 25 bp, Artificial
  probe
  misc_feature (1)..(25): SEQ ID NO: 1759; WAN024BEQ_at; Start 213; Stop 237
aataagatatgcacaaattgatcta

SEQ ID NO: 78952 - DNA, 25 bp, Artificial
  probe
  misc_feature (1)..(25): SEQ ID NO: 1759; WAN024BEQ_at; Start 203; Stop 227
ttgagtatgaaataagatatgcaca

SEQ ID NO: 78953 - DNA, 25 bp, Artificial
  probe
  misc_feature (1)..(25): SEQ ID NO: 1759; WAN024BEQ_at; Start 34; Stop 58
agggggcaaaactttcataatggat

SEQ ID NO: 78954 - DNA, 25 bp, Artificial
  probe
  misc_feature (1)..(25): SEQ ID NO: 1759; WAN024BEQ_at; Start 39; Stop 63
gcaaaactttcataatggattgata

SEQ ID NO: 78955 - DNA, 25 bp, Artificial
  probe
  misc_feature (1)..(25): SEQ ID NO: 1759; WAN024BEQ_at; Start 44; Stop 68
actttcataatggattgatactctt

SEQ ID NO: 78956 - DNA, 25 bp, Artificial
  probe
  misc_feature (1)..(25): SEQ ID NO: 1759; WAN024BEQ_at; Start 42; Stop 66
aaactttcataatggattgatactc

SEQ ID NO: 78957 - DNA, 25 bp, Artificial
  probe
  misc_feature (1)..(25): SEQ ID NO: 1759; WAN024BEQ_at; Start 45; Stop 69
ctttcataatggattgatactcttc

SEQ ID NO: 78958 - DNA, 25 bp, Artificial
  probe
  misc_feature (1)..(25): SEQ ID NO: 1759; WAN024BEQ_at; Start 201; Stop 225
cattgagtatgaaataagatatgca

SEQ ID NO: 78959 - DNA, 25 bp, Artificial
  probe
  misc_feature (1)..(25): SEQ ID NO: 1759; WAN024BEQ_at; Start 46; Stop 70
tttcataatggattgatactcttcg

SEQ ID NO: 78960 - DNA, 25 bp, Artificial
  probe
  misc_feature (1)..(25): SEQ ID NO: 1759; WAN024BEQ_at; Start 2; Stop 26
tgatgggctctttttttgtccaggg

SEQ ID NO: 78961 - DNA, 25 bp, Artificial
  probe
  misc_feature (1)..(25): SEQ ID NO: 5851; WAN024BER_x_at; Start 14; Stop 38
aatactcaatgaaaatcaaagaaca

SEQ ID NO: 78962 - DNA, 25 bp, Artificial
  probe
  misc_feature (1)..(25): SEQ ID NO: 5851; WAN024BER_x_at; Start 69; Stop 93
acagtgttttgaggttgtggataga

SEQ ID NO: 78963 - DNA, 25 bp, Artificial
  probe
  misc_feature (1)..(25): SEQ ID NO: 5851; WAN024BER_x_at; Start 16; Stop 40
tactcaatgaaaatcaaagaacaaa

SEQ ID NO: 78964 - DNA, 25 bp, Artificial
  probe
  misc_feature (1)..(25): SEQ ID NO: 5851; WAN024BER_x_at; Start 20; Stop 44
caatgaaaatcaaagaacaaactag

SEQ ID NO: 78965 - DNA, 25 bp, Artificial
  probe
  misc_feature (1)..(25): SEQ ID NO: 5851; WAN024BER_x_at; Start 46; Stop 70
aagctagccgtaggctgcttaaaac

SEQ ID NO: 78966 - DNA, 25 bp, Artificial
  probe
  misc_feature (1)..(25): SEQ ID NO: 5851; WAN024BER_x_at; Start 70; Stop 94
cagtgttttgaggttgtggatagaa

SEQ ID NO: 78967 - DNA, 25 bp, Artificial
  probe
  misc_feature (1)..(25): SEQ ID NO: 5851; WAN024BER_x_at; Start 56; Stop 80
taggctgcttaaaacagtgttttga

SEQ ID NO: 78968 - DNA, 25 bp, Artificial
  probe
  misc_feature (1)..(25): SEQ ID NO: 5851; WAN024BER_x_at; Start 22; Stop 46
atgaaaatcaaagaacaaactagga

SEQ ID NO: 78969 - DNA, 25 bp, Artificial
  probe
  misc_feature (1)..(25): SEQ ID NO: 5851; WAN024BER_x_at; Start 53; Stop 77
ccgtaggctgcttaaaacagtgttt

SEQ ID NO: 78970 - DNA, 25 bp, Artificial
  probe
  misc_feature (1)..(25): SEQ ID NO: 5851; WAN024BER_x_at; Start 21; Stop 45
aatgaaaatcaaagaacaaactagg

SEQ ID NO: 78971 - DNA, 25 bp, Artificial
  probe
  misc_feature (1)..(25): SEQ ID NO: 5851; WAN024BER_x_at; Start 50; Stop 74
tagccgtaggctgcttaaaacagtg

SEQ ID NO: 78972 - DNA, 25 bp, Artificial
  probe
  misc_feature (1)..(25): SEQ ID NO: 5851; WAN024BER_x_at; Start 19; Stop 43
tcaatgaaaatcaaagaacaaacta

SEQ ID NO: 78973 - DNA, 25 bp, Artificial
  probe
  misc_feature (1)..(25): SEQ ID NO: 5851; WAN024BER_x_at; Start 26; Stop 50
aaatcaaagaacaaactaggaagct

SEQ ID NO: 78974 - DNA, 25 bp, Artificial
  probe
  misc_feature (1)..(25): SEQ ID NO: 5851; WAN024BER_x_at; Start 15; Stop 39
atactcaatgaaaatcaaagaacaa

SEQ ID NO: 78975 - DNA, 25 bp, Artificial
  probe
  misc_feature (1)..(25): SEQ ID NO: 5851; WAN024BER_x_at; Start 52; Stop 76
gccgtaggctgcttaaaacagtgtt

SEQ ID NO: 78976 - DNA, 25 bp, Artificial
  probe
  misc_feature (1)..(25): SEQ ID NO: 5851; WAN024BER_x_at; Start 75; Stop 99
ttttgaggttgtggatagaactgac

SEQ ID NO: 78977 - DNA, 25 bp, Artificial
  probe
  misc_feature (1)..(25): SEQ ID NO: 5851; WAN024BER_x_at; Start 125; Stop 149
aggttgcagatggaagcctaactaa

SEQ ID NO: 78978 - DNA, 25 bp, Artificial
  probe
  misc_feature (1)..(25): SEQ ID NO: 5851; WAN024BER_x_at; Start 30; Stop 54
caaagaacaaactaggaagctagcc

SEQ ID NO: 78979 - DNA, 25 bp, Artificial
  probe
  misc_feature (1)..(25): SEQ ID NO: 5851; WAN024BER_x_at; Start 49; Stop 73
ctagccgtaggctgcttaaaacagt

SEQ ID NO: 78980 - DNA, 25 bp, Artificial
  probe
  misc_feature (1)..(25): SEQ ID NO: 5851; WAN024BER_x_at; Start 11; Stop 35
acaaatactcaatgaaaatcaaaga

SEQ ID NO: 78981 - DNA, 25 bp, Artificial
  probe
  misc_feature (1)..(25): SEQ ID NO: 5851; WAN024BER_x_at; Start 54; Stop 78
cgtaggctgcttaaaacagtgtttt

SEQ ID NO: 78982 - DNA, 25 bp, Artificial
  probe
  misc_feature (1)..(25): SEQ ID NO: 5851; WAN024BER_x_at; Start 55; Stop 79
gtaggctgcttaaaacagtgttttg

SEQ ID NO: 78983 - DNA, 25 bp, Artificial
  probe
  misc_feature (1)..(25): SEQ ID NO: 5851; WAN024BER_x_at; Start 17; Stop 41
actcaatgaaaatcaaagaacaaac

SEQ ID NO: 78984 - DNA, 25 bp, Artificial
  probe
  misc_feature (1)..(25): SEQ ID NO: 5851; WAN024BER_x_at; Start 23; Stop 47
tgaaaatcaaagaacaaactaggaa

SEQ ID NO: 78985 - DNA, 25 bp, Artificial
  probe
  misc_feature (1)..(25): SEQ ID NO: 5851; WAN024BER_x_at; Start 12; Stop 36
caaatactcaatgaaaatcaaagaa

SEQ ID NO: 78986 - DNA, 25 bp, Artificial
  probe
  misc_feature (1)..(25): SEQ ID NO: 5851; WAN024BER_x_at; Start 48; Stop 72
gctagccgtaggctgcttaaaacag

SEQ ID NO: 78987 - DNA, 25 bp, Artificial
  probe
  misc_feature (1)..(25): SEQ ID NO: 5851; WAN024BER_x_at; Start 101; Stop 125
aagtcagctcaaaatactgttttga

SEQ ID NO: 78988 - DNA, 25 bp, Artificial
  probe
  misc_feature (1)..(25): SEQ ID NO: 5851; WAN024BER_x_at; Start 13; Stop 37
aaatactcaatgaaaatcaaagaac

SEQ ID NO: 78989 - DNA, 25 bp, Artificial
  probe
  misc_feature (1)..(25): SEQ ID NO: 5851; WAN024BER_x_at; Start 18; Stop 42
ctcaatgaaaatcaaagaacaaact

SEQ ID NO: 78990 - DNA, 25 bp, Artificial
  probe
  misc_feature (1)..(25): SEQ ID NO: 5851; WAN024BER_x_at; Start 126; Stop 150
ggttgcagatggaagcctaactaat

SEQ ID NO: 78991 - DNA, 25 bp, Artificial
  probe
  misc_feature (1)..(25): SEQ ID NO: 5851; WAN024BER_x_at; Start 27; Stop 51
aatcaaagaacaaactaggaagcta

SEQ ID NO: 78992 - DNA, 25 bp, Artificial
  probe
  misc_feature (1)..(25): SEQ ID NO: 5851; WAN024BER_x_at; Start 51; Stop 75
agccgtaggctgcttaaaacagtgt

SEQ ID NO: 78993 - DNA, 25 bp, Artificial
  probe
  misc_feature (1)..(25): SEQ ID NO: 5851; WAN024BER_x_at; Start 100; Stop 124
gaagtcagctcaaaatactgttttg

SEQ ID NO: 78994 - DNA, 25 bp, Artificial
  probe
  misc_feature (1)..(25): SEQ ID NO: 5851; WAN024BER_x_at; Start 45; Stop 69
gaagctagccgtaggctgcttaaaa

SEQ ID NO: 78995 - DNA, 25 bp, Artificial
  probe
  misc_feature (1)..(25): SEQ ID NO: 753; WAN024BES_x_at; Start 165; Stop 189
gtttgaatttgattttcatctaact

SEQ ID NO: 78996 - DNA, 25 bp, Artificial
  probe
  misc_feature (1)..(25): SEQ ID NO: 753; WAN024BES_x_at; Start 93; Stop 117
acatggttttgaggttgtagatgaa

SEQ ID NO: 78997 - DNA, 25 bp, Artificial
  probe
  misc_feature (1)..(25): SEQ ID NO: 753; WAN024BES_x_at; Start 48; Stop 72
gcactgctttgaggttgtagataga

SEQ ID NO: 78998 - DNA, 25 bp, Artificial
  probe
  misc_feature (1)..(25): SEQ ID NO: 753; WAN024BES_x_at; Start 163; Stop 187
tggtttgaatttgattttcatctaa

SEQ ID NO: 78999 - DNA, 25 bp, Artificial
  probe
  misc_feature (1)..(25): SEQ ID NO: 753; WAN024BES_x_at; Start 142; Stop 166
tacggtaaggcgatgctgacgtggt

SEQ ID NO: 79000 - DNA, 25 bp, Artificial
  probe
  misc_feature (1)..(25): SEQ ID NO: 753; WAN024BES_x_at; Start 98; Stop 122
gttttgaggttgtagatgaaactga

SEQ ID NO: 79001 - DNA, 25 bp, Artificial
  probe
  misc_feature (1)..(25): SEQ ID NO: 753; WAN024BES_x_at; Start 164; Stop 188
ggtttgaatttgattttcatctaac

SEQ ID NO: 79002 - DNA, 25 bp, Artificial
  probe
  misc_feature (1)..(25): SEQ ID NO: 753; WAN024BES_x_at; Start 96; Stop 120
tggttttgaggttgtagatgaaact

SEQ ID NO: 79003 - DNA, 25 bp, Artificial
  probe
  misc_feature (1)..(25): SEQ ID NO: 753; WAN024BES_x_at; Start 74; Stop 98
ctgacgaagtcagctcaaaacatgg

SEQ ID NO: 79004 - DNA, 25 bp, Artificial
  probe
  misc_feature (1)..(25): SEQ ID NO: 753; WAN024BES_x_at; Start 137; Stop 161
atacctacggtaaggcgatgctgac

SEQ ID NO: 79005 - DNA, 25 bp, Artificial
  probe
  misc_feature (1)..(25): SEQ ID NO: 753; WAN024BES_x_at; Start 141; Stop 165
ctacggtaaggcgatgctgacgtgg

SEQ ID NO: 79006 - DNA, 25 bp, Artificial
  probe
  misc_feature (1)..(25): SEQ ID NO: 753; WAN024BES_x_at; Start 158; Stop 182
tgacgtggtttgaatttgattttca

SEQ ID NO: 79007 - DNA, 25 bp, Artificial
  probe
  misc_feature (1)..(25): SEQ ID NO: 753; WAN024BES_x_at; Start 161; Stop 185
cgtggtttgaatttgattttcatct

SEQ ID NO: 79008 - DNA, 25 bp, Artificial
  probe
  misc_feature (1)..(25): SEQ ID NO: 753; WAN024BES_x_at; Start 138; Stop 162
tacctacggtaaggcgatgctgacg

SEQ ID NO: 79009 - DNA, 25 bp, Artificial
  probe
  misc_feature (1)..(25): SEQ ID NO: 753; WAN024BES_x_at; Start 160; Stop 184
acgtggtttgaatttgattttcatc

SEQ ID NO: 79010 - DNA, 25 bp, Artificial
  probe
  misc_feature (1)..(25): SEQ ID NO: 753; WAN024BES_x_at; Start 89; Stop 113
caaaacatggttttgaggttgtaga

SEQ ID NO: 79011 - DNA, 25 bp, Artificial
  probe
  misc_feature (1)..(25): SEQ ID NO: 753; WAN024BES_x_at; Start 159; Stop 183
gacgtggtttgaatttgattttcat

SEQ ID NO: 79012 - DNA, 25 bp, Artificial
  probe
  misc_feature (1)..(25): SEQ ID NO: 753; WAN024BES_x_at; Start 134; Stop 158
accatacctacggtaaggcgatgct

SEQ ID NO: 79013 - DNA, 25 bp, Artificial
  probe
  misc_feature (1)..(25): SEQ ID NO: 753; WAN024BES_x_at; Start 168; Stop 192
tgaatttgattttcatctaactaat

SEQ ID NO: 79014 - DNA, 25 bp, Artificial
  probe
  misc_feature (1)..(25): SEQ ID NO: 753; WAN024BES_x_at; Start 99; Stop 123
ttttgaggttgtagatgaaactgac

SEQ ID NO: 79015 - DNA, 25 bp, Artificial
  probe
  misc_feature (1)..(25): SEQ ID NO: 753; WAN024BES_x_at; Start 107; Stop 131
ttgtagatgaaactgacgaagtcag

SEQ ID NO: 79016 - DNA, 25 bp, Artificial
  probe
  misc_feature (1)..(25): SEQ ID NO: 753; WAN024BES_x_at; Start 95; Stop 119
atggttttgaggttgtagatgaaac

SEQ ID NO: 79017 - DNA, 25 bp, Artificial
  probe
  misc_feature (1)..(25): SEQ ID NO: 753; WAN024BES_x_at; Start 139; Stop 163
acctacggtaaggcgatgctgacgt

SEQ ID NO: 79018 - DNA, 25 bp, Artificial
  probe
  misc_feature (1)..(25): SEQ ID NO: 753; WAN024BES_x_at; Start 162; Stop 186
gtggtttgaatttgattttcatcta

SEQ ID NO: 79019 - DNA, 25 bp, Artificial
  probe
  misc_feature (1)..(25): SEQ ID NO: 753; WAN024BES_x_at; Start 90; Stop 114
aaaacatggttttgaggttgtagat

SEQ ID NO: 79020 - DNA, 25 bp, Artificial
  probe
  misc_feature (1)..(25): SEQ ID NO: 753; WAN024BES_x_at; Start 47; Stop 71
agcactgctttgaggttgtagatag

SEQ ID NO: 79021 - DNA, 25 bp, Artificial
  probe
  misc_feature (1)..(25): SEQ ID NO: 753; WAN024BES_x_at; Start 136; Stop 160
catacctacggtaaggcgatgctga

SEQ ID NO: 79022 - DNA, 25 bp, Artificial
  probe
  misc_feature (1)..(25): SEQ ID NO: 753; WAN024BES_x_at; Start 97; Stop 121
ggttttgaggttgtagatgaaactg

SEQ ID NO: 79023 - DNA, 25 bp, Artificial
  probe
  misc_feature (1)..(25): SEQ ID NO: 753; WAN024BES_x_at; Start 94; Stop 118
catggttttgaggttgtagatgaaa

SEQ ID NO: 79024 - DNA, 25 bp, Artificial
  probe
  misc_feature (1)..(25): SEQ ID NO: 753; WAN024BES_x_at; Start 92; Stop 116
aacatggttttgaggttgtagatga

SEQ ID NO: 79025 - DNA, 25 bp, Artificial
  probe
  misc_feature (1)..(25): SEQ ID NO: 753; WAN024BES_x_at; Start 135; Stop 159
ccatacctacggtaaggcgatgctg

SEQ ID NO: 79026 - DNA, 25 bp, Artificial
  probe
  misc_feature (1)..(25): SEQ ID NO: 753; WAN024BES_x_at; Start 91; Stop 115
aaacatggttttgaggttgtagatg

SEQ ID NO: 79027 - DNA, 25 bp, Artificial
  probe
  misc_feature (1)..(25): SEQ ID NO: 753; WAN024BES_x_at; Start 167; Stop 191
ttgaatttgattttcatctaactaa

SEQ ID NO: 79028 - DNA, 25 bp, Artificial
  probe
  misc_feature (1)..(25): SEQ ID NO: 753; WAN024BES_x_at; Start 157; Stop 181
ctgacgtggtttgaatttgattttc

SEQ ID NO: 79029 - DNA, 25 bp, Artificial
  probe
  misc_feature (1)..(25): SEQ ID NO: 3346; WAN024BET_x_at; Start 4; Stop 28
acttcgtcagtcttatctacaacct

SEQ ID NO: 79030 - DNA, 25 bp, Artificial
  probe
  misc_feature (1)..(25): SEQ ID NO: 3346; WAN024BET_x_at; Start 5; Stop 29
cttcgtcagtcttatctacaacctc

SEQ ID NO: 79031 - DNA, 25 bp, Artificial
  probe
  misc_feature (1)..(25): SEQ ID NO: 3346; WAN024BET_x_at; Start 26; Stop 50
cctcaaaacagtgttttgagcagct

SEQ ID NO: 79032 - DNA, 25 bp, Artificial
  probe
  misc_feature (1)..(25): SEQ ID NO: 3346; WAN024BET_x_at; Start 7; Stop 31
tcgtcagtcttatctacaacctcaa

SEQ ID NO: 79033 - DNA, 25 bp, Artificial
  probe
  misc_feature (1)..(25): SEQ ID NO: 3346; WAN024BET_x_at; Start 24; Stop 48
aacctcaaaacagtgttttgagcag

SEQ ID NO: 79034 - DNA, 25 bp, Artificial
  probe
  misc_feature (1)..(25): SEQ ID NO: 3346; WAN024BET_x_at; Start 13; Stop 37
gtcttatctacaacctcaaaacagt

SEQ ID NO: 79035 - DNA, 25 bp, Artificial
  probe
  misc_feature (1)..(25): SEQ ID NO: 3346; WAN024BET_x_at; Start 2; Stop 26
tgacttcgtcagtcttatctacaac

SEQ ID NO: 79036 - DNA, 25 bp, Artificial
  probe
  misc_feature (1)..(25): SEQ ID NO: 3346; WAN024BET_x_at; Start 8; Stop 32
cgtcagtcttatctacaacctcaaa

SEQ ID NO: 79037 - DNA, 25 bp, Artificial
  probe
  misc_feature (1)..(25): SEQ ID NO: 3346; WAN024BET_x_at; Start 17; Stop 41
tatctacaacctcaaaacagtgttt

SEQ ID NO: 79038 - DNA, 25 bp, Artificial
  probe
  misc_feature (1)..(25): SEQ ID NO: 3346; WAN024BET_x_at; Start 22; Stop 46
acaacctcaaaacagtgttttgagc

SEQ ID NO: 79039 - DNA, 25 bp, Artificial
  probe
  misc_feature (1)..(25): SEQ ID NO: 3346; WAN024BET_x_at; Start 12; Stop 36
agtcttatctacaacctcaaaacag

SEQ ID NO: 79040 - DNA, 25 bp, Artificial
  probe
  misc_feature (1)..(25): SEQ ID NO: 3346; WAN024BET_x_at; Start 15; Stop 39
cttatctacaacctcaaaacagtgt

SEQ ID NO: 79041 - DNA, 25 bp, Artificial
  probe
  misc_feature (1)..(25): SEQ ID NO: 3346; WAN024BET_x_at; Start 19; Stop 43
tctacaacctcaaaacagtgttttg

SEQ ID NO: 79042 - DNA, 25 bp, Artificial
  probe
  misc_feature (1)..(25): SEQ ID NO: 3346; WAN024BET_x_at; Start 6; Stop 30
ttcgtcagtcttatctacaacctca

SEQ ID NO: 79043 - DNA, 25 bp, Artificial
  probe
  misc_feature (1)..(25): SEQ ID NO: 3346; WAN024BET_x_at; Start 1; Stop 25
ctgacttcgtcagtcttatctacaa

SEQ ID NO: 79044 - DNA, 25 bp, Artificial
  probe
  misc_feature (1)..(25): SEQ ID NO: 3346; WAN024BET_x_at; Start 10; Stop 34
tcagtcttatctacaacctcaaaac

SEQ ID NO: 79045 - DNA, 25 bp, Artificial
  probe
  misc_feature (1)..(25): SEQ ID NO: 3346; WAN024BET_x_at; Start 27; Stop 51
ctcaaaacagtgttttgagcagctt

SEQ ID NO: 79046 - DNA, 25 bp, Artificial
  probe
  misc_feature (1)..(25): SEQ ID NO: 3346; WAN024BET_x_at; Start 18; Stop 42
atctacaacctcaaaacagtgtttt

SEQ ID NO: 79047 - DNA, 25 bp, Artificial
  probe
  misc_feature (1)..(25): SEQ ID NO: 3346; WAN024BET_x_at; Start 23; Stop 47
caacctcaaaacagtgttttgagca

SEQ ID NO: 79048 - DNA, 25 bp, Artificial
  probe
  misc_feature (1)..(25): SEQ ID NO: 3346; WAN024BET_x_at; Start 16; Stop 40
ttatctacaacctcaaaacagtgtt

SEQ ID NO: 79049 - DNA, 25 bp, Artificial
  probe
  misc_feature (1)..(25): SEQ ID NO: 3346; WAN024BET_x_at; Start 30; Stop 54
aaaacagtgttttgagcagcttgcg

SEQ ID NO: 79050 - DNA, 25 bp, Artificial
  probe
  misc_feature (1)..(25): SEQ ID NO: 3346; WAN024BET_x_at; Start 21; Stop 45
tacaacctcaaaacagtgttttgag

SEQ ID NO: 79051 - DNA, 25 bp, Artificial
  probe
  misc_feature (1)..(25): SEQ ID NO: 3346; WAN024BET_x_at; Start 28; Stop 52
tcaaaacagtgttttgagcagcttg

SEQ ID NO: 79052 - DNA, 25 bp, Artificial
  probe
  misc_feature (1)..(25): SEQ ID NO: 3346; WAN024BET_x_at; Start 20; Stop 44
ctacaacctcaaaacagtgttttga

SEQ ID NO: 79053 - DNA, 25 bp, Artificial
  probe
  misc_feature (1)..(25): SEQ ID NO: 3346; WAN024BET_x_at; Start 25; Stop 49
acctcaaaacagtgttttgagcagc

SEQ ID NO: 79054 - DNA, 25 bp, Artificial
  probe
  misc_feature (1)..(25): SEQ ID NO: 3346; WAN024BET_x_at; Start 29; Stop 53
caaaacagtgttttgagcagcttgc

SEQ ID NO: 79055 - DNA, 25 bp, Artificial
  probe
  misc_feature (1)..(25): SEQ ID NO: 3346; WAN024BET_x_at; Start 14; Stop 38
tcttatctacaacctcaaaacagtg

SEQ ID NO: 79056 - DNA, 25 bp, Artificial
  probe
  misc_feature (1)..(25): SEQ ID NO: 3346; WAN024BET_x_at; Start 9; Stop 33
gtcagtcttatctacaacctcaaaa

SEQ ID NO: 79057 - DNA, 25 bp, Artificial
  probe
  misc_feature (1)..(25): SEQ ID NO: 3346; WAN024BET_x_at; Start 3; Stop 27
gacttcgtcagtcttatctacaacc

SEQ ID NO: 79058 - DNA, 25 bp, Artificial
  probe
  misc_feature (1)..(25): SEQ ID NO: 4018; WAN024BEU_s_at; Start 25; Stop 49
ttttttctttgtcatactcttcgaa

SEQ ID NO: 79059 - DNA, 25 bp, Artificial
  probe
  misc_feature (1)..(25): SEQ ID NO: 4018; WAN024BEU_s_at; Start 151; Stop 175
caatttgaatggaaaatggaaagtt

SEQ ID NO: 79060 - DNA, 25 bp, Artificial
  probe
  misc_feature (1)..(25): SEQ ID NO: 4018; WAN024BEU_s_at; Start 16; Stop 40
tctcgttcgttttttctttgtcata

SEQ ID NO: 79061 - DNA, 25 bp, Artificial
  probe
  misc_feature (1)..(25): SEQ ID NO: 4018; WAN024BEU_s_at; Start 142; Stop 166
attgagtatcaatttgaatggaaaa

SEQ ID NO: 79062 - DNA, 25 bp, Artificial
  probe
  misc_feature (1)..(25): SEQ ID NO: 4018; WAN024BEU_s_at; Start 150; Stop 174
tcaatttgaatggaaaatggaaagt

SEQ ID NO: 79063 - DNA, 25 bp, Artificial
  probe
  misc_feature (1)..(25): SEQ ID NO: 4018; WAN024BEU_s_at; Start 22; Stop 46
tcgttttttctttgtcatactcttc

SEQ ID NO: 79064 - DNA, 25 bp, Artificial
  probe
  misc_feature (1)..(25): SEQ ID NO: 4018; WAN024BEU_s_at; Start 140; Stop 164
tcattgagtatcaatttgaatggaa

SEQ ID NO: 79065 - DNA, 25 bp, Artificial
  probe
  misc_feature (1)..(25): SEQ ID NO: 4018; WAN024BEU_s_at; Start 149; Stop 173
atcaatttgaatggaaaatggaaag

SEQ ID NO: 79066 - DNA, 25 bp, Artificial
  probe
  misc_feature (1)..(25): SEQ ID NO: 4018; WAN024BEU_s_at; Start 144; Stop 168
tgagtatcaatttgaatggaaaatg

SEQ ID NO: 79067 - DNA, 25 bp, Artificial
  probe
  misc_feature (1)..(25): SEQ ID NO: 4018; WAN024BEU_s_at; Start 148; Stop 172
tatcaatttgaatggaaaatggaaa

SEQ ID NO: 79068 - DNA, 25 bp, Artificial
  probe
  misc_feature (1)..(25): SEQ ID NO: 4018; WAN024BEU_s_at; Start 147; Stop 171
gtatcaatttgaatggaaaatggaa

SEQ ID NO: 79069 - DNA, 25 bp, Artificial
  probe
  misc_feature (1)..(25): SEQ ID NO: 4018; WAN024BEU_s_at; Start 145; Stop 169
gagtatcaatttgaatggaaaatgg

SEQ ID NO: 79070 - DNA, 25 bp, Artificial
  probe
  misc_feature (1)..(25): SEQ ID NO: 4018; WAN024BEU_s_at; Start 146; Stop 170
agtatcaatttgaatggaaaatgga

SEQ ID NO: 79071 - DNA, 25 bp, Artificial
  probe
  misc_feature (1)..(25): SEQ ID NO: 4018; WAN024BEU_s_at; Start 139; Stop 163
ttcattgagtatcaatttgaatgga

SEQ ID NO: 79072 - DNA, 25 bp, Artificial
  probe
  misc_feature (1)..(25): SEQ ID NO: 4018; WAN024BEU_s_at; Start 24; Stop 48
gttttttctttgtcatactcttcga

SEQ ID NO: 79073 - DNA, 25 bp, Artificial
  probe
  misc_feature (1)..(25): SEQ ID NO: 4018; WAN024BEU_s_at; Start 141; Stop 165
cattgagtatcaatttgaatggaaa

SEQ ID NO: 79074 - DNA, 25 bp, Artificial
  probe
  misc_feature (1)..(25): SEQ ID NO: 4018; WAN024BEU_s_at; Start 153; Stop 177
atttgaatggaaaatggaaagttat

SEQ ID NO: 79075 - DNA, 25 bp, Artificial
  probe
  misc_feature (1)..(25): SEQ ID NO: 4018; WAN024BEU_s_at; Start 143; Stop 167
ttgagtatcaatttgaatggaaaat

SEQ ID NO: 79076 - DNA, 25 bp, Artificial
  probe
  misc_feature (1)..(25): SEQ ID NO: 4018; WAN024BEU_s_at; Start 23; Stop 47
cgttttttctttgtcatactcttcg

SEQ ID NO: 79077 - DNA, 25 bp, Artificial
  probe
  misc_feature (1)..(25): SEQ ID NO: 4881; WAN024BEV_at; Start 12; Stop 36
ttcaaaccacagtcgcttcaccttg

SEQ ID NO: 79078 - DNA, 25 bp, Artificial
  probe
  misc_feature (1)..(25): SEQ ID NO: 4881; WAN024BEV_at; Start 80; Stop 104
tgggcaatctgctactagcttgcct

SEQ ID NO: 79079 - DNA, 25 bp, Artificial
  probe
  misc_feature (1)..(25): SEQ ID NO: 4881; WAN024BEV_at; Start 85; Stop 109
aatctgctactagcttgcctaacta

SEQ ID NO: 79080 - DNA, 25 bp, Artificial
  probe
  misc_feature (1)..(25): SEQ ID NO: 4881; WAN024BEV_at; Start 64; Stop 88
cctcaaagcggtgttttgggcaatc

SEQ ID NO: 79081 - DNA, 25 bp, Artificial
  probe
  misc_feature (1)..(25): SEQ ID NO: 4881; WAN024BEV_at; Start 73; Stop 97
ggtgttttgggcaatctgctactag

SEQ ID NO: 79082 - DNA, 25 bp, Artificial
  probe
  misc_feature (1)..(25): SEQ ID NO: 4881; WAN024BEV_at; Start 15; Stop 39
aaaccacagtcgcttcaccttggat

SEQ ID NO: 79083 - DNA, 25 bp, Artificial
  probe
  misc_feature (1)..(25): SEQ ID NO: 4881; WAN024BEV_at; Start 17; Stop 41
accacagtcgcttcaccttggatta

SEQ ID NO: 79084 - DNA, 25 bp, Artificial
  probe
  misc_feature (1)..(25): SEQ ID NO: 4881; WAN024BEV_at; Start 32; Stop 56
ccttggattatataggtcagtctta

SEQ ID NO: 79085 - DNA, 25 bp, Artificial
  probe
  misc_feature (1)..(25): SEQ ID NO: 4881; WAN024BEV_at; Start 81; Stop 105
gggcaatctgctactagcttgccta

SEQ ID NO: 79086 - DNA, 25 bp, Artificial
  probe
  misc_feature (1)..(25): SEQ ID NO: 4881; WAN024BEV_at; Start 84; Stop 108
caatctgctactagcttgcctaact

SEQ ID NO: 79087 - DNA, 25 bp, Artificial
  probe
  misc_feature (1)..(25): SEQ ID NO: 4881; WAN024BEV_at; Start 18; Stop 42
ccacagtcgcttcaccttggattat

SEQ ID NO: 79088 - DNA, 25 bp, Artificial
  probe
  misc_feature (1)..(25): SEQ ID NO: 4881; WAN024BEV_at; Start 37; Stop 61
gattatataggtcagtcttatctac

SEQ ID NO: 79089 - DNA, 25 bp, Artificial
  probe
  misc_feature (1)..(25): SEQ ID NO: 4881; WAN024BEV_at; Start 35; Stop 59
tggattatataggtcagtcttatct

SEQ ID NO: 79090 - DNA, 25 bp, Artificial
  probe
  misc_feature (1)..(25): SEQ ID NO: 4881; WAN024BEV_at; Start 74; Stop 98
gtgttttgggcaatctgctactagc

SEQ ID NO: 79091 - DNA, 25 bp, Artificial
  probe
  misc_feature (1)..(25): SEQ ID NO: 4881; WAN024BEV_at; Start 65; Stop 89
ctcaaagcggtgttttgggcaatct

SEQ ID NO: 79092 - DNA, 25 bp, Artificial
  probe
  misc_feature (1)..(25): SEQ ID NO: 4881; WAN024BEV_at; Start 86; Stop 110
atctgctactagcttgcctaactaa

SEQ ID NO: 79093 - DNA, 25 bp, Artificial
  probe
  misc_feature (1)..(25): SEQ ID NO: 4881; WAN024BEV_at; Start 87; Stop 111
tctgctactagcttgcctaactaat

SEQ ID NO: 79094 - DNA, 25 bp, Artificial
  probe
  misc_feature (1)..(25): SEQ ID NO: 4881; WAN024BEV_at; Start 76; Stop 100
gttttgggcaatctgctactagctt

SEQ ID NO: 79095 - DNA, 25 bp, Artificial
  probe
  misc_feature (1)..(25): SEQ ID NO: 4881; WAN024BEV_at; Start 78; Stop 102
tttgggcaatctgctactagcttgc

SEQ ID NO: 79096 - DNA, 25 bp, Artificial
  probe
  misc_feature (1)..(25): SEQ ID NO: 4881; WAN024BEV_at; Start 68; Stop 92
aaagcggtgttttgggcaatctgct

SEQ ID NO: 79097 - DNA, 25 bp, Artificial
  probe
  misc_feature (1)..(25): SEQ ID NO: 4881; WAN024BEV_at; Start 7; Stop 31
atctcttcaaaccacagtcgcttca

SEQ ID NO: 79098 - DNA, 25 bp, Artificial
  probe
  misc_feature (1)..(25): SEQ ID NO: 4881; WAN024BEV_at; Start 79; Stop 103
ttgggcaatctgctactagcttgcc

SEQ ID NO: 79099 - DNA, 25 bp, Artificial
  probe
  misc_feature (1)..(25): SEQ ID NO: 4881; WAN024BEV_at; Start 19; Stop 43
cacagtcgcttcaccttggattata

SEQ ID NO: 79100 - DNA, 25 bp, Artificial
  probe
  misc_feature (1)..(25): SEQ ID NO: 4881; WAN024BEV_at; Start 33; Stop 57
cttggattatataggtcagtcttat

SEQ ID NO: 79101 - DNA, 25 bp, Artificial
  probe
  misc_feature (1)..(25): SEQ ID NO: 4881; WAN024BEV_at; Start 34; Stop 58
ttggattatataggtcagtcttatc

SEQ ID NO: 79102 - DNA, 25 bp, Artificial
  probe
  misc_feature (1)..(25): SEQ ID NO: 4881; WAN024BEV_at; Start 82; Stop 106
ggcaatctgctactagcttgcctaa

SEQ ID NO: 79103 - DNA, 25 bp, Artificial
  probe
  misc_feature (1)..(25): SEQ ID NO: 4881; WAN024BEV_at; Start 36; Stop 60
ggattatataggtcagtcttatcta

SEQ ID NO: 79104 - DNA, 25 bp, Artificial
  probe
  misc_feature (1)..(25): SEQ ID NO: 4881; WAN024BEV_at; Start 69; Stop 93
aagcggtgttttgggcaatctgcta

SEQ ID NO: 79105 - DNA, 25 bp, Artificial
  probe
  misc_feature (1)..(25): SEQ ID NO: 4881; WAN024BEV_at; Start 63; Stop 87
acctcaaagcggtgttttgggcaat

SEQ ID NO: 79106 - DNA, 25 bp, Artificial
  probe
  misc_feature (1)..(25): SEQ ID NO: 4881; WAN024BEV_at; Start 83; Stop 107
gcaatctgctactagcttgcctaac

SEQ ID NO: 79107 - DNA, 25 bp, Artificial
  probe
  misc_feature (1)..(25): SEQ ID NO: 4881; WAN024BEV_at; Start 77; Stop 101
ttttgggcaatctgctactagcttg

SEQ ID NO: 79108 - DNA, 25 bp, Artificial
  probe
  misc_feature (1)..(25): SEQ ID NO: 4881; WAN024BEV_at; Start 75; Stop 99
tgttttgggcaatctgctactagct

SEQ ID NO: 79109 - DNA, 25 bp, Artificial
  probe
  misc_feature (1)..(25): SEQ ID NO: 4881; WAN024BEV_at; Start 16; Stop 40
aaccacagtcgcttcaccttggatt

SEQ ID NO: 79110 - DNA, 25 bp, Artificial
  probe
  misc_feature (1)..(25): SEQ ID NO: 4881; WAN024BEV_at; Start 13; Stop 37
tcaaaccacagtcgcttcaccttgg

SEQ ID NO: 79111 - DNA, 25 bp, Artificial
  probe
  misc_feature (1)..(25): SEQ ID NO: 4946; WAN024BEW_at; Start 123; Stop 147
tgcagctcttcatttagaaggtgcc

SEQ ID NO: 79112 - DNA, 25 bp, Artificial
  probe
  misc_feature (1)..(25): SEQ ID NO: 4946; WAN024BEW_at; Start 150; Stop 174
caacctaccgcttagtcaattggct

SEQ ID NO: 79113 - DNA, 25 bp, Artificial
  probe
  misc_feature (1)..(25): SEQ ID NO: 4946; WAN024BEW_at; Start 131; Stop 155
ttcatttagaaggtgcccacaacct

SEQ ID NO: 79114 - DNA, 25 bp, Artificial
  probe
  misc_feature (1)..(25): SEQ ID NO: 4946; WAN024BEW_at; Start 26; Stop 50
gaagaaaaagaatgaaagaaatagc

SEQ ID NO: 79115 - DNA, 25 bp, Artificial
  probe
  misc_feature (1)..(25): SEQ ID NO: 4946; WAN024BEW_at; Start 138; Stop 162
agaaggtgcccacaacctaccgctt

SEQ ID NO: 79116 - DNA, 25 bp, Artificial
  probe
  misc_feature (1)..(25): SEQ ID NO: 4946; WAN024BEW_at; Start 47; Stop 71
tagcctttgacgcattttaccagct

SEQ ID NO: 79117 - DNA, 25 bp, Artificial
  probe
  misc_feature (1)..(25): SEQ ID NO: 4946; WAN024BEW_at; Start 39; Stop 63
gaaagaaatagcctttgacgcattt

SEQ ID NO: 79118 - DNA, 25 bp, Artificial
  probe
  misc_feature (1)..(25): SEQ ID NO: 4946; WAN024BEW_at; Start 155; Stop 179
taccgcttagtcaattggctgatag

SEQ ID NO: 79119 - DNA, 25 bp, Artificial
  probe
  misc_feature (1)..(25): SEQ ID NO: 4946; WAN024BEW_at; Start 140; Stop 164
aaggtgcccacaacctaccgcttag

SEQ ID NO: 79120 - DNA, 25 bp, Artificial
  probe
  misc_feature (1)..(25): SEQ ID NO: 4946; WAN024BEW_at; Start 110; Stop 134
aagtggatgagtttgcagctcttca

SEQ ID NO: 79121 - DNA, 25 bp, Artificial
  probe
  misc_feature (1)..(25): SEQ ID NO: 4946; WAN024BEW_at; Start 112; Stop 136
gtggatgagtttgcagctcttcatt

SEQ ID NO: 79122 - DNA, 25 bp, Artificial
  probe
  misc_feature (1)..(25): SEQ ID NO: 4946; WAN024BEW_at; Start 162; Stop 186
tagtcaattggctgatagttatgat

SEQ ID NO: 79123 - DNA, 25 bp, Artificial
  probe
  misc_feature (1)..(25): SEQ ID NO: 4946; WAN024BEW_at; Start 151; Stop 175
aacctaccgcttagtcaattggctg

SEQ ID NO: 79124 - DNA, 25 bp, Artificial
  probe
  misc_feature (1)..(25): SEQ ID NO: 4946; WAN024BEW_at; Start 148; Stop 172
cacaacctaccgcttagtcaattgg

SEQ ID NO: 79125 - DNA, 25 bp, Artificial
  probe
  misc_feature (1)..(25): SEQ ID NO: 4946; WAN024BEW_at; Start 13; Stop 37
tcgaagagtattagaagaaaaagaa

SEQ ID NO: 79126 - DNA, 25 bp, Artificial
  probe
  misc_feature (1)..(25): SEQ ID NO: 4946; WAN024BEW_at; Start 51; Stop 75
ctttgacgcattttaccagctttac

SEQ ID NO: 79127 - DNA, 25 bp, Artificial
  probe
  misc_feature (1)..(25): SEQ ID NO: 4946; WAN024BEW_at; Start 115; Stop 139
gatgagtttgcagctcttcatttag

SEQ ID NO: 79128 - DNA, 25 bp, Artificial
  probe
  misc_feature (1)..(25): SEQ ID NO: 4946; WAN024BEW_at; Start 125; Stop 149
cagctcttcatttagaaggtgccca

SEQ ID NO: 79129 - DNA, 25 bp, Artificial
  probe
  misc_feature (1)..(25): SEQ ID NO: 4946; WAN024BEW_at; Start 141; Stop 165
aggtgcccacaacctaccgcttagt

SEQ ID NO: 79130 - DNA, 25 bp, Artificial
  probe
  misc_feature (1)..(25): SEQ ID NO: 4946; WAN024BEW_at; Start 129; Stop 153
tcttcatttagaaggtgcccacaac

SEQ ID NO: 79131 - DNA, 25 bp, Artificial
  probe
  misc_feature (1)..(25): SEQ ID NO: 4946; WAN024BEW_at; Start 153; Stop 177
cctaccgcttagtcaattggctgat

SEQ ID NO: 79132 - DNA, 25 bp, Artificial
  probe
  misc_feature (1)..(25): SEQ ID NO: 4946; WAN024BEW_at; Start 118; Stop 142
gagtttgcagctcttcatttagaag

SEQ ID NO: 79133 - DNA, 25 bp, Artificial
  probe
  misc_feature (1)..(25): SEQ ID NO: 4946; WAN024BEW_at; Start 49; Stop 73
gcctttgacgcattttaccagcttt

SEQ ID NO: 79134 - DNA, 25 bp, Artificial
  probe
  misc_feature (1)..(25): SEQ ID NO: 4946; WAN024BEW_at; Start 133; Stop 157
catttagaaggtgcccacaacctac

SEQ ID NO: 79135 - DNA, 25 bp, Artificial
  probe
  misc_feature (1)..(25): SEQ ID NO: 4946; WAN024BEW_at; Start 95; Stop 119
tagtggatgtgagagaagtggatga

SEQ ID NO: 79136 - DNA, 25 bp, Artificial
  probe
  misc_feature (1)..(25): SEQ ID NO: 4946; WAN024BEW_at; Start 165; Stop 189
tcaattggctgatagttatgattaa

SEQ ID NO: 79137 - DNA, 25 bp, Artificial
  probe
  misc_feature (1)..(25): SEQ ID NO: 4946; WAN024BEW_at; Start 159; Stop 183
gcttagtcaattggctgatagttat

SEQ ID NO: 79138 - DNA, 25 bp, Artificial
  probe
  misc_feature (1)..(25): SEQ ID NO: 4946; WAN024BEW_at; Start 35; Stop 59
gaatgaaagaaatagcctttgacgc

SEQ ID NO: 79139 - DNA, 25 bp, Artificial
  probe
  misc_feature (1)..(25): SEQ ID NO: 4946; WAN024BEW_at; Start 127; Stop 151
gctcttcatttagaaggtgcccaca

SEQ ID NO: 79140 - DNA, 25 bp, Artificial
  probe
  misc_feature (1)..(25): SEQ ID NO: 4946; WAN024BEW_at; Start 157; Stop 181
ccgcttagtcaattggctgatagtt

SEQ ID NO: 79141 - DNA, 25 bp, Artificial
  probe
  misc_feature (1)..(25): SEQ ID NO: 4946; WAN024BEW_at; Start 136; Stop 160
ttagaaggtgcccacaacctaccgc

SEQ ID NO: 79142 - DNA, 25 bp, Artificial
  probe
  misc_feature (1)..(25): SEQ ID NO: 4946; WAN024BEW_at; Start 106; Stop 130
agagaagtggatgagtttgcagctc

SEQ ID NO: 79143 - DNA, 25 bp, Artificial
  probe
  misc_feature (1)..(25): SEQ ID NO: 4946; WAN024BEW_at; Start 43; Stop 67
gaaatagcctttgacgcattttacc

SEQ ID NO: 79144 - DNA, 25 bp, Artificial
  probe
  misc_feature (1)..(25): SEQ ID NO: 4946; WAN024BEW_at; Start 45; Stop 69
aatagcctttgacgcattttaccag

SEQ ID NO: 79145 - DNA, 25 bp, Artificial
  probe
  misc_feature (1)..(25): SEQ ID NO: 2656; WAN024BEX_s_at; Start 22; Stop 46
ttagcagttattttctctggcttgg

SEQ ID NO: 79146 - DNA, 25 bp, Artificial
  probe
  misc_feature (1)..(25): SEQ ID NO: 2656; WAN024BEX_s_at; Start 26; Stop 50
cagttattttctctggcttggtgac

SEQ ID NO: 79147 - DNA, 25 bp, Artificial
  probe
  misc_feature (1)..(25): SEQ ID NO: 2656; WAN024BEX_s_at; Start 23; Stop 47
tagcagttattttctctggcttggt

SEQ ID NO: 79148 - DNA, 25 bp, Artificial
  probe
  misc_feature (1)..(25): SEQ ID NO: 2656; WAN024BEX_s_at; Start 24; Stop 48
agcagttattttctctggcttggtg

SEQ ID NO: 79149 - DNA, 25 bp, Artificial
  probe
  misc_feature (1)..(25): SEQ ID NO: 2656; WAN024BEX_s_at; Start 21; Stop 45
attagcagttattttctctggcttg

SEQ ID NO: 79150 - DNA, 25 bp, Artificial
  probe
  misc_feature (1)..(25): SEQ ID NO: 2656; WAN024BEX_s_at; Start 25; Stop 49
gcagttattttctctggcttggtga

SEQ ID NO: 79151 - DNA, 25 bp, Artificial
  probe
  misc_feature (1)..(25): SEQ ID NO: 2656; WAN024BEX_s_at; Start 20; Stop 44
tattagcagttattttctctggctt

SEQ ID NO: 79152 - DNA, 25 bp, Artificial
  probe
  misc_feature (1)..(25): SEQ ID NO: 4978; WAN024BEY_at; Start 123; Stop 147
caagtcgggtttatccattcatcta

SEQ ID NO: 79153 - DNA, 25 bp, Artificial
  probe
  misc_feature (1)..(25): SEQ ID NO: 4978; WAN024BEY_at; Start 120; Stop 144
tatcaagtcgggtttatccattcat

SEQ ID NO: 79154 - DNA, 25 bp, Artificial
  probe
  misc_feature (1)..(25): SEQ ID NO: 4978; WAN024BEY_at; Start 129; Stop 153
gggtttatccattcatctaactaat

SEQ ID NO: 79155 - DNA, 25 bp, Artificial
  probe
  misc_feature (1)..(25): SEQ ID NO: 4978; WAN024BEY_at; Start 122; Stop 146
tcaagtcgggtttatccattcatct

SEQ ID NO: 79156 - DNA, 25 bp, Artificial
  probe
  misc_feature (1)..(25): SEQ ID NO: 4978; WAN024BEY_at; Start 128; Stop 152
cgggtttatccattcatctaactaa

SEQ ID NO: 79157 - DNA, 25 bp, Artificial
  probe
  misc_feature (1)..(25): SEQ ID NO: 4978; WAN024BEY_at; Start 126; Stop 150
gtcgggtttatccattcatctaact

SEQ ID NO: 79158 - DNA, 25 bp, Artificial
  probe
  misc_feature (1)..(25): SEQ ID NO: 4978; WAN024BEY_at; Start 127; Stop 151
tcgggtttatccattcatctaacta

SEQ ID NO: 79159 - DNA, 25 bp, Artificial
  probe
  misc_feature (1)..(25): SEQ ID NO: 4978; WAN024BEY_at; Start 125; Stop 149
agtcgggtttatccattcatctaac

SEQ ID NO: 79160 - DNA, 25 bp, Artificial
  probe
  misc_feature (1)..(25): SEQ ID NO: 4978; WAN024BEY_at; Start 121; Stop 145
atcaagtcgggtttatccattcatc

SEQ ID NO: 79161 - DNA, 25 bp, Artificial
  probe
  misc_feature (1)..(25): SEQ ID NO: 4978; WAN024BEY_at; Start 119; Stop 143
ttatcaagtcgggtttatccattca

SEQ ID NO: 79162 - DNA, 25 bp, Artificial
  probe
  misc_feature (1)..(25): SEQ ID NO: 4978; WAN024BEY_at; Start 124; Stop 148
aagtcgggtttatccattcatctaa

SEQ ID NO: 79163 - DNA, 25 bp, Artificial
  probe
  misc_feature (1)..(25): SEQ ID NO: 5051; WAN024BEZ_at; Start 25; Stop 49
gaagagtataaaaatcctcaagata

SEQ ID NO: 79164 - DNA, 25 bp, Artificial
  probe
  misc_feature (1)..(25): SEQ ID NO: 5051; WAN024BEZ_at; Start 24; Stop 48
tgaagagtataaaaatcctcaagat

SEQ ID NO: 79165 - DNA, 25 bp, Artificial
  probe
  misc_feature (1)..(25): SEQ ID NO: 5051; WAN024BEZ_at; Start 94; Stop 118
aactgctatttctatctttgctctc

SEQ ID NO: 79166 - DNA, 25 bp, Artificial
  probe
  misc_feature (1)..(25): SEQ ID NO: 5051; WAN024BEZ_at; Start 23; Stop 47
ttgaagagtataaaaatcctcaaga

SEQ ID NO: 79167 - DNA, 25 bp, Artificial
  probe
  misc_feature (1)..(25): SEQ ID NO: 5051; WAN024BEZ_at; Start 43; Stop 67
caagatactttcttctatcctttag

SEQ ID NO: 79168 - DNA, 25 bp, Artificial
  probe
  misc_feature (1)..(25): SEQ ID NO: 5051; WAN024BEZ_at; Start 90; Stop 114
aaaaaactgctatttctatctttgc

SEQ ID NO: 79169 - DNA, 25 bp, Artificial
  probe
  misc_feature (1)..(25): SEQ ID NO: 5051; WAN024BEZ_at; Start 35; Stop 59
aaaatcctcaagatactttcttcta

SEQ ID NO: 79170 - DNA, 25 bp, Artificial
  probe
  misc_feature (1)..(25): SEQ ID NO: 5051; WAN024BEZ_at; Start 31; Stop 55
tataaaaatcctcaagatactttct

SEQ ID NO: 79171 - DNA, 25 bp, Artificial
  probe
  misc_feature (1)..(25): SEQ ID NO: 5051; WAN024BEZ_at; Start 66; Stop 90
agtttataaggagaatacctatgaa

SEQ ID NO: 79172 - DNA, 25 bp, Artificial
  probe
  misc_feature (1)..(25): SEQ ID NO: 5051; WAN024BEZ_at; Start 65; Stop 89
tagtttataaggagaatacctatga

SEQ ID NO: 79173 - DNA, 25 bp, Artificial
  probe
  misc_feature (1)..(25): SEQ ID NO: 5051; WAN024BEZ_at; Start 76; Stop 100
gagaatacctatgaaaaaaactgct

SEQ ID NO: 79174 - DNA, 25 bp, Artificial
  probe
  misc_feature (1)..(25): SEQ ID NO: 5051; WAN024BEZ_at; Start 75; Stop 99
ggagaatacctatgaaaaaaactgc

SEQ ID NO: 79175 - DNA, 25 bp, Artificial
  probe
  misc_feature (1)..(25): SEQ ID NO: 5051; WAN024BEZ_at; Start 70; Stop 94
tataaggagaatacctatgaaaaaa

SEQ ID NO: 79176 - DNA, 25 bp, Artificial
  probe
  misc_feature (1)..(25): SEQ ID NO: 5051; WAN024BEZ_at; Start 45; Stop 69
agatactttcttctatcctttagtt

SEQ ID NO: 79177 - DNA, 25 bp, Artificial
  probe
  misc_feature (1)..(25): SEQ ID NO: 5051; WAN024BEZ_at; Start 98; Stop 122
gctatttctatctttgctctcctaa

SEQ ID NO: 79178 - DNA, 25 bp, Artificial
  probe
  misc_feature (1)..(25): SEQ ID NO: 5051; WAN024BEZ_at; Start 64; Stop 88
ttagtttataaggagaatacctatg

SEQ ID NO: 79179 - DNA, 25 bp, Artificial
  probe
  misc_feature (1)..(25): SEQ ID NO: 5051; WAN024BEZ_at; Start 44; Stop 68
aagatactttcttctatcctttagt

SEQ ID NO: 79180 - DNA, 25 bp, Artificial
  probe
  misc_feature (1)..(25): SEQ ID NO: 5051; WAN024BEZ_at; Start 78; Stop 102
gaatacctatgaaaaaaactgctat

SEQ ID NO: 79181 - DNA, 25 bp, Artificial
  probe
  misc_feature (1)..(25): SEQ ID NO: 5051; WAN024BEZ_at; Start 57; Stop 81
ctatcctttagtttataaggagaat

SEQ ID NO: 79182 - DNA, 25 bp, Artificial
  probe
  misc_feature (1)..(25): SEQ ID NO: 5051; WAN024BEZ_at; Start 56; Stop 80
tctatcctttagtttataaggagaa

SEQ ID NO: 79183 - DNA, 25 bp, Artificial
  probe
  misc_feature (1)..(25): SEQ ID NO: 5051; WAN024BEZ_at; Start 67; Stop 91
gtttataaggagaatacctatgaaa

SEQ ID NO: 79184 - DNA, 25 bp, Artificial
  probe
  misc_feature (1)..(25): SEQ ID NO: 5051; WAN024BEZ_at; Start 54; Stop 78
cttctatcctttagtttataaggag

SEQ ID NO: 79185 - DNA, 25 bp, Artificial
  probe
  misc_feature (1)..(25): SEQ ID NO: 5051; WAN024BEZ_at; Start 33; Stop 57
taaaaatcctcaagatactttcttc

SEQ ID NO: 79186 - DNA, 25 bp, Artificial
  probe
  misc_feature (1)..(25): SEQ ID NO: 5051; WAN024BEZ_at; Start 20; Stop 44
tttttgaagagtataaaaatcctca

SEQ ID NO: 79187 - DNA, 25 bp, Artificial
  probe
  misc_feature (1)..(25): SEQ ID NO: 5051; WAN024BEZ_at; Start 26; Stop 50
aagagtataaaaatcctcaagatac

SEQ ID NO: 79188 - DNA, 25 bp, Artificial
  probe
  misc_feature (1)..(25): SEQ ID NO: 5051; WAN024BEZ_at; Start 97; Stop 121
tgctatttctatctttgctctccta

SEQ ID NO: 79189 - DNA, 25 bp, Artificial
  probe
  misc_feature (1)..(25): SEQ ID NO: 5051; WAN024BEZ_at; Start 39; Stop 63
tcctcaagatactttcttctatcct

SEQ ID NO: 79190 - DNA, 25 bp, Artificial
  probe
  misc_feature (1)..(25): SEQ ID NO: 5051; WAN024BEZ_at; Start 22; Stop 46
tttgaagagtataaaaatcctcaag

SEQ ID NO: 79191 - DNA, 25 bp, Artificial
  probe
  misc_feature (1)..(25): SEQ ID NO: 5051; WAN024BEZ_at; Start 95; Stop 119
actgctatttctatctttgctctcc

SEQ ID NO: 79192 - DNA, 25 bp, Artificial
  probe
  misc_feature (1)..(25): SEQ ID NO: 5051; WAN024BEZ_at; Start 30; Stop 54
gtataaaaatcctcaagatactttc

SEQ ID NO: 79193 - DNA, 25 bp, Artificial
  probe
  misc_feature (1)..(25): SEQ ID NO: 5051; WAN024BEZ_at; Start 93; Stop 117
aaactgctatttctatctttgctct

SEQ ID NO: 79194 - DNA, 25 bp, Artificial
  probe
  misc_feature (1)..(25): SEQ ID NO: 5051; WAN024BEZ_at; Start 28; Stop 52
gagtataaaaatcctcaagatactt

SEQ ID NO: 79195 - DNA, 25 bp, Artificial
  probe
  misc_feature (1)..(25): SEQ ID NO: 5051; WAN024BEZ_at; Start 92; Stop 116
aaaactgctatttctatctttgctc

SEQ ID NO: 79196 - DNA, 25 bp, Artificial
  probe
  misc_feature (1)..(25): SEQ ID NO: 5051; WAN024BEZ_at; Start 37; Stop 61
aatcctcaagatactttcttctatc

SEQ ID NO: 79197 - DNA, 25 bp, Artificial
  probe
  misc_feature (1)..(25): SEQ ID NO: 752; WAN024BF2_x_at; Start 6; Stop 30
aatcaaagagcaaactaggaagcta

SEQ ID NO: 79198 - DNA, 25 bp, Artificial
  probe
  misc_feature (1)..(25): SEQ ID NO: 752; WAN024BF2_x_at; Start 32; Stop 56
ccgcaggctgctcaaaacactgttt

SEQ ID NO: 79199 - DNA, 25 bp, Artificial
  probe
  misc_feature (1)..(25): SEQ ID NO: 752; WAN024BF2_x_at; Start 35; Stop 59
caggctgctcaaaacactgttttga

SEQ ID NO: 79200 - DNA, 25 bp, Artificial
  probe
  misc_feature (1)..(25): SEQ ID NO: 752; WAN024BF2_x_at; Start 87; Stop 111
taaccatacatacggcaaggcaaag

SEQ ID NO: 79201 - DNA, 25 bp, Artificial
  probe
  misc_feature (1)..(25): SEQ ID NO: 752; WAN024BF2_x_at; Start 15; Stop 39
gcaaactaggaagctagccgcaggc

SEQ ID NO: 79202 - DNA, 25 bp, Artificial
  probe
  misc_feature (1)..(25): SEQ ID NO: 752; WAN024BF2_x_at; Start 41; Stop 65
gctcaaaacactgttttgaggttgt

SEQ ID NO: 79203 - DNA, 25 bp, Artificial
  probe
  misc_feature (1)..(25): SEQ ID NO: 752; WAN024BF2_x_at; Start 69; Stop 93
tgaaactgacgaagtcagtaaccat

SEQ ID NO: 79204 - DNA, 25 bp, Artificial
  probe
  misc_feature (1)..(25): SEQ ID NO: 752; WAN024BF2_x_at; Start 70; Stop 94
gaaactgacgaagtcagtaaccata

SEQ ID NO: 79205 - DNA, 25 bp, Artificial
  probe
  misc_feature (1)..(25): SEQ ID NO: 752; WAN024BF2_x_at; Start 71; Stop 95
aaactgacgaagtcagtaaccatac

SEQ ID NO: 79206 - DNA, 25 bp, Artificial
  probe
  misc_feature (1)..(25): SEQ ID NO: 752; WAN024BF2_x_at; Start 4; Stop 28
aaaatcaaagagcaaactaggaagc

SEQ ID NO: 79207 - DNA, 25 bp, Artificial
  probe
  misc_feature (1)..(25): SEQ ID NO: 752; WAN024BF2_x_at; Start 38; Stop 62
gctgctcaaaacactgttttgaggt

SEQ ID NO: 79208 - DNA, 25 bp, Artificial
  probe
  misc_feature (1)..(25): SEQ ID NO: 752; WAN024BF2_x_at; Start 8; Stop 32
tcaaagagcaaactaggaagctagc

SEQ ID NO: 79209 - DNA, 25 bp, Artificial
  probe
  misc_feature (1)..(25): SEQ ID NO: 752; WAN024BF2_x_at; Start 31; Stop 55
gccgcaggctgctcaaaacactgtt

SEQ ID NO: 79210 - DNA, 25 bp, Artificial
  probe
  misc_feature (1)..(25): SEQ ID NO: 752; WAN024BF2_x_at; Start 89; Stop 113
accatacatacggcaaggcaaagct

SEQ ID NO: 79211 - DNA, 25 bp, Artificial
  probe
  misc_feature (1)..(25): SEQ ID NO: 752; WAN024BF2_x_at; Start 86; Stop 110
gtaaccatacatacggcaaggcaaa

SEQ ID NO: 79212 - DNA, 25 bp, Artificial
  probe
  misc_feature (1)..(25): SEQ ID NO: 752; WAN024BF2_x_at; Start 90; Stop 114
ccatacatacggcaaggcaaagctg

SEQ ID NO: 79213 - DNA, 25 bp, Artificial
  probe
  misc_feature (1)..(25): SEQ ID NO: 752; WAN024BF2_x_at; Start 88; Stop 112
aaccatacatacggcaaggcaaagc

SEQ ID NO: 79214 - DNA, 25 bp, Artificial
  probe
  misc_feature (1)..(25): SEQ ID NO: 752; WAN024BF2_x_at; Start 40; Stop 64
tgctcaaaacactgttttgaggttg

SEQ ID NO: 79215 - DNA, 25 bp, Artificial
  probe
  misc_feature (1)..(25): SEQ ID NO: 752; WAN024BF2_x_at; Start 68; Stop 92
atgaaactgacgaagtcagtaacca

SEQ ID NO: 79216 - DNA, 25 bp, Artificial
  probe
  misc_feature (1)..(25): SEQ ID NO: 752; WAN024BF2_x_at; Start 30; Stop 54
agccgcaggctgctcaaaacactgt

SEQ ID NO: 79217 - DNA, 25 bp, Artificial
  probe
  misc_feature (1)..(25): SEQ ID NO: 752; WAN024BF2_x_at; Start 34; Stop 58
gcaggctgctcaaaacactgttttg

SEQ ID NO: 79218 - DNA, 25 bp, Artificial
  probe
  misc_feature (1)..(25): SEQ ID NO: 752; WAN024BF2_x_at; Start 5; Stop 29
aaatcaaagagcaaactaggaagct

SEQ ID NO: 79219 - DNA, 25 bp, Artificial
  probe
  misc_feature (1)..(25): SEQ ID NO: 752; WAN024BF2_x_at; Start 2; Stop 26
tgaaaatcaaagagcaaactaggaa

SEQ ID NO: 79220 - DNA, 25 bp, Artificial
  probe
  misc_feature (1)..(25): SEQ ID NO: 752; WAN024BF2_x_at; Start 39; Stop 63
ctgctcaaaacactgttttgaggtt

SEQ ID NO: 79221 - DNA, 25 bp, Artificial
  probe
  misc_feature (1)..(25): SEQ ID NO: 752; WAN024BF2_x_at; Start 33; Stop 57
cgcaggctgctcaaaacactgtttt

SEQ ID NO: 79222 - DNA, 25 bp, Artificial
  probe
  misc_feature (1)..(25): SEQ ID NO: 752; WAN024BF2_x_at; Start 36; Stop 60
aggctgctcaaaacactgttttgag

SEQ ID NO: 79223 - DNA, 25 bp, Artificial
  probe
  misc_feature (1)..(25): SEQ ID NO: 752; WAN024BF2_x_at; Start 7; Stop 31
atcaaagagcaaactaggaagctag

SEQ ID NO: 79224 - DNA, 25 bp, Artificial
  probe
  misc_feature (1)..(25): SEQ ID NO: 752; WAN024BF2_x_at; Start 1; Stop 25
atgaaaatcaaagagcaaactagga

SEQ ID NO: 79225 - DNA, 25 bp, Artificial
  probe
  misc_feature (1)..(25): SEQ ID NO: 752; WAN024BF2_x_at; Start 37; Stop 61
ggctgctcaaaacactgttttgagg

SEQ ID NO: 79226 - DNA, 25 bp, Artificial
  probe
  misc_feature (1)..(25): SEQ ID NO: 752; WAN024BF2_x_at; Start 3; Stop 27
gaaaatcaaagagcaaactaggaag

SEQ ID NO: 79227 - DNA, 25 bp, Artificial
  probe
  misc_feature (1)..(25): SEQ ID NO: 752; WAN024BF2_x_at; Start 91; Stop 115
catacatacggcaaggcaaagctga

SEQ ID NO: 79228 - DNA, 25 bp, Artificial
  probe
  misc_feature (1)..(25): SEQ ID NO: 3341; WAN024BF3_at; Start 64; Stop 88
gaagagtataagacagaaaaatcaa

SEQ ID NO: 79229 - DNA, 25 bp, Artificial
  probe
  misc_feature (1)..(25): SEQ ID NO: 3341; WAN024BF3_at; Start 117; Stop 141
ggctttgattttttacagtctgcaa

SEQ ID NO: 79230 - DNA, 25 bp, Artificial
  probe
  misc_feature (1)..(25): SEQ ID NO: 3341; WAN024BF3_at; Start 72; Stop 96
taagacagaaaaatcaaagtttgat

SEQ ID NO: 79231 - DNA, 25 bp, Artificial
  probe
  misc_feature (1)..(25): SEQ ID NO: 3341; WAN024BF3_at; Start 100; Stop 124
tatttggatagcagtcaggctttga

SEQ ID NO: 79232 - DNA, 25 bp, Artificial
  probe
  misc_feature (1)..(25): SEQ ID NO: 3341; WAN024BF3_at; Start 98; Stop 122
gctatttggatagcagtcaggcttt

SEQ ID NO: 79233 - DNA, 25 bp, Artificial
  probe
  misc_feature (1)..(25): SEQ ID NO: 3341; WAN024BF3_at; Start 113; Stop 137
gtcaggctttgattttttacagtct

SEQ ID NO: 79234 - DNA, 25 bp, Artificial
  probe
  misc_feature (1)..(25): SEQ ID NO: 3341; WAN024BF3_at; Start 83; Stop 107
aatcaaagtttgatagctatttgga

SEQ ID NO: 79235 - DNA, 25 bp, Artificial
  probe
  misc_feature (1)..(25): SEQ ID NO: 3341; WAN024BF3_at; Start 96; Stop 120
tagctatttggatagcagtcaggct

SEQ ID NO: 79236 - DNA, 25 bp, Artificial
  probe
  misc_feature (1)..(25): SEQ ID NO: 3341; WAN024BF3_at; Start 99; Stop 123
ctatttggatagcagtcaggctttg

SEQ ID NO: 79237 - DNA, 25 bp, Artificial
  probe
  misc_feature (1)..(25): SEQ ID NO: 3341; WAN024BF3_at; Start 104; Stop 128
tggatagcagtcaggctttgatttt

SEQ ID NO: 79238 - DNA, 25 bp, Artificial
  probe
  misc_feature (1)..(25): SEQ ID NO: 3341; WAN024BF3_at; Start 91; Stop 115
tttgatagctatttggatagcagtc

SEQ ID NO: 79239 - DNA, 25 bp, Artificial
  probe
  misc_feature (1)..(25): SEQ ID NO: 3341; WAN024BF3_at; Start 115; Stop 139
caggctttgattttttacagtctgc

SEQ ID NO: 79240 - DNA, 25 bp, Artificial
  probe
  misc_feature (1)..(25): SEQ ID NO: 3341; WAN024BF3_at; Start 116; Stop 140
aggctttgattttttacagtctgca

SEQ ID NO: 79241 - DNA, 25 bp, Artificial
  probe
  misc_feature (1)..(25): SEQ ID NO: 3341; WAN024BF3_at; Start 75; Stop 99
gacagaaaaatcaaagtttgatagc

SEQ ID NO: 79242 - DNA, 25 bp, Artificial
  probe
  misc_feature (1)..(25): SEQ ID NO: 3341; WAN024BF3_at; Start 63; Stop 87
cgaagagtataagacagaaaaatca

SEQ ID NO: 79243 - DNA, 25 bp, Artificial
  probe
  misc_feature (1)..(25): SEQ ID NO: 3341; WAN024BF3_at; Start 62; Stop 86
tcgaagagtataagacagaaaaatc

SEQ ID NO: 79244 - DNA, 25 bp, Artificial
  probe
  misc_feature (1)..(25): SEQ ID NO: 3341; WAN024BF3_at; Start 108; Stop 132
tagcagtcaggctttgattttttac

SEQ ID NO: 79245 - DNA, 25 bp, Artificial
  probe
  misc_feature (1)..(25): SEQ ID NO: 3341; WAN024BF3_at; Start 101; Stop 125
atttggatagcagtcaggctttgat

SEQ ID NO: 79246 - DNA, 25 bp, Artificial
  probe
  misc_feature (1)..(25): SEQ ID NO: 3341; WAN024BF3_at; Start 70; Stop 94
tataagacagaaaaatcaaagtttg

SEQ ID NO: 79247 - DNA, 25 bp, Artificial
  probe
  misc_feature (1)..(25): SEQ ID NO: 3341; WAN024BF3_at; Start 86; Stop 110
caaagtttgatagctatttggatag

SEQ ID NO: 79248 - DNA, 25 bp, Artificial
  probe
  misc_feature (1)..(25): SEQ ID NO: 3341; WAN024BF3_at; Start 111; Stop 135
cagtcaggctttgattttttacagt

SEQ ID NO: 79249 - DNA, 25 bp, Artificial
  probe
  misc_feature (1)..(25): SEQ ID NO: 3341; WAN024BF3_at; Start 122; Stop 146
tgattttttacagtctgcaactaac

SEQ ID NO: 79250 - DNA, 25 bp, Artificial
  probe
  misc_feature (1)..(25): SEQ ID NO: 3341; WAN024BF3_at; Start 67; Stop 91
gagtataagacagaaaaatcaaagt

SEQ ID NO: 79251 - DNA, 25 bp, Artificial
  probe
  misc_feature (1)..(25): SEQ ID NO: 3341; WAN024BF3_at; Start 118; Stop 142
gctttgattttttacagtctgcaac

SEQ ID NO: 79252 - DNA, 25 bp, Artificial
  probe
  misc_feature (1)..(25): SEQ ID NO: 3341; WAN024BF3_at; Start 102; Stop 126
tttggatagcagtcaggctttgatt

SEQ ID NO: 79253 - DNA, 25 bp, Artificial
  probe
  misc_feature (1)..(25): SEQ ID NO: 3341; WAN024BF3_at; Start 105; Stop 129
ggatagcagtcaggctttgattttt

SEQ ID NO: 79254 - DNA, 25 bp, Artificial
  probe
  misc_feature (1)..(25): SEQ ID NO: 3341; WAN024BF3_at; Start 94; Stop 118
gatagctatttggatagcagtcagg

SEQ ID NO: 79255 - DNA, 25 bp, Artificial
  probe
  misc_feature (1)..(25): SEQ ID NO: 3341; WAN024BF3_at; Start 123; Stop 147
gattttttacagtctgcaactaact

SEQ ID NO: 79256 - DNA, 25 bp, Artificial
  probe
  misc_feature (1)..(25): SEQ ID NO: 3341; WAN024BF3_at; Start 93; Stop 117
tgatagctatttggatagcagtcag

SEQ ID NO: 79257 - DNA, 25 bp, Artificial
  probe
  misc_feature (1)..(25): SEQ ID NO: 3341; WAN024BF3_at; Start 87; Stop 111
aaagtttgatagctatttggatagc

SEQ ID NO: 79258 - DNA, 25 bp, Artificial
  probe
  misc_feature (1)..(25): SEQ ID NO: 3341; WAN024BF3_at; Start 89; Stop 113
agtttgatagctatttggatagcag

SEQ ID NO: 79259 - DNA, 25 bp, Artificial
  probe
  misc_feature (1)..(25): SEQ ID NO: 3341; WAN024BF3_at; Start 126; Stop 150
tttttacagtctgcaactaactaat

SEQ ID NO: 79260 - DNA, 25 bp, Artificial
  probe
  misc_feature (1)..(25): SEQ ID NO: 3341; WAN024BF3_at; Start 95; Stop 119
atagctatttggatagcagtcaggc

SEQ ID NO: 79261 - DNA, 25 bp, Artificial
  probe
  misc_feature (1)..(25): SEQ ID NO: 3341; WAN024BF3_at; Start 110; Stop 134
gcagtcaggctttgattttttacag

SEQ ID NO: 79262 - DNA, 25 bp, Artificial
  probe
  misc_feature (1)..(25): SEQ ID NO: 755; WAN024BF4_at; Start 233; Stop 257
atagattagttaggcaagtaagcct

SEQ ID NO: 79263 - DNA, 25 bp, Artificial
  probe
  misc_feature (1)..(25): SEQ ID NO: 755; WAN024BF4_at; Start 219; Stop 243
ctttttcgatgtttatagattagtt

SEQ ID NO: 79264 - DNA, 25 bp, Artificial
  probe
  misc_feature (1)..(25): SEQ ID NO: 755; WAN024BF4_at; Start 231; Stop 255
ttatagattagttaggcaagtaagc

SEQ ID NO: 79265 - DNA, 25 bp, Artificial
  probe
  misc_feature (1)..(25): SEQ ID NO: 755; WAN024BF4_at; Start 206; Stop 230
ctgggcaactagtctttttcgatgt

SEQ ID NO: 79266 - DNA, 25 bp, Artificial
  probe
  misc_feature (1)..(25): SEQ ID NO: 755; WAN024BF4_at; Start 228; Stop 252
tgtttatagattagttaggcaagta

SEQ ID NO: 79267 - DNA, 25 bp, Artificial
  probe
  misc_feature (1)..(25): SEQ ID NO: 755; WAN024BF4_at; Start 218; Stop 242
tctttttcgatgtttatagattagt

SEQ ID NO: 79268 - DNA, 25 bp, Artificial
  probe
  misc_feature (1)..(25): SEQ ID NO: 755; WAN024BF4_at; Start 234; Stop 258
tagattagttaggcaagtaagccta

SEQ ID NO: 79269 - DNA, 25 bp, Artificial
  probe
  misc_feature (1)..(25): SEQ ID NO: 755; WAN024BF4_at; Start 182; Stop 206
aagagtataaaatgatggggaaggc

SEQ ID NO: 79270 - DNA, 25 bp, Artificial
  probe
  misc_feature (1)..(25): SEQ ID NO: 755; WAN024BF4_at; Start 210; Stop 234
gcaactagtctttttcgatgtttat

SEQ ID NO: 79271 - DNA, 25 bp, Artificial
  probe
  misc_feature (1)..(25): SEQ ID NO: 755; WAN024BF4_at; Start 230; Stop 254
tttatagattagttaggcaagtaag

SEQ ID NO: 79272 - DNA, 25 bp, Artificial
  probe
  misc_feature (1)..(25): SEQ ID NO: 755; WAN024BF4_at; Start 217; Stop 241
gtctttttcgatgtttatagattag

SEQ ID NO: 79273 - DNA, 25 bp, Artificial
  probe
  misc_feature (1)..(25): SEQ ID NO: 755; WAN024BF4_at; Start 202; Stop 226
aaggctgggcaactagtctttttcg

SEQ ID NO: 79274 - DNA, 25 bp, Artificial
  probe
  misc_feature (1)..(25): SEQ ID NO: 755; WAN024BF4_at; Start 212; Stop 236
aactagtctttttcgatgtttatag

SEQ ID NO: 79275 - DNA, 25 bp, Artificial
  probe
  misc_feature (1)..(25): SEQ ID NO: 755; WAN024BF4_at; Start 213; Stop 237
actagtctttttcgatgtttataga

SEQ ID NO: 79276 - DNA, 25 bp, Artificial
  probe
  misc_feature (1)..(25): SEQ ID NO: 755; WAN024BF4_at; Start 209; Stop 233
ggcaactagtctttttcgatgttta

SEQ ID NO: 79277 - DNA, 25 bp, Artificial
  probe
  misc_feature (1)..(25): SEQ ID NO: 755; WAN024BF4_at; Start 229; Stop 253
gtttatagattagttaggcaagtaa

SEQ ID NO: 79278 - DNA, 25 bp, Artificial
  probe
  misc_feature (1)..(25): SEQ ID NO: 755; WAN024BF4_at; Start 224; Stop 248
tcgatgtttatagattagttaggca

SEQ ID NO: 79279 - DNA, 25 bp, Artificial
  probe
  misc_feature (1)..(25): SEQ ID NO: 755; WAN024BF4_at; Start 222; Stop 246
tttcgatgtttatagattagttagg

SEQ ID NO: 79280 - DNA, 25 bp, Artificial
  probe
  misc_feature (1)..(25): SEQ ID NO: 755; WAN024BF4_at; Start 203; Stop 227
aggctgggcaactagtctttttcga

SEQ ID NO: 79281 - DNA, 25 bp, Artificial
  probe
  misc_feature (1)..(25): SEQ ID NO: 755; WAN024BF4_at; Start 215; Stop 239
tagtctttttcgatgtttatagatt

SEQ ID NO: 79282 - DNA, 25 bp, Artificial
  probe
  misc_feature (1)..(25): SEQ ID NO: 755; WAN024BF4_at; Start 186; Stop 210
gtataaaatgatggggaaggctggg

SEQ ID NO: 79283 - DNA, 25 bp, Artificial
  probe
  misc_feature (1)..(25): SEQ ID NO: 755; WAN024BF4_at; Start 227; Stop 251
atgtttatagattagttaggcaagt

SEQ ID NO: 79284 - DNA, 25 bp, Artificial
  probe
  misc_feature (1)..(25): SEQ ID NO: 755; WAN024BF4_at; Start 205; Stop 229
gctgggcaactagtctttttcgatg

SEQ ID NO: 79285 - DNA, 25 bp, Artificial
  probe
  misc_feature (1)..(25): SEQ ID NO: 755; WAN024BF4_at; Start 211; Stop 235
caactagtctttttcgatgtttata

SEQ ID NO: 79286 - DNA, 25 bp, Artificial
  probe
  misc_feature (1)..(25): SEQ ID NO: 755; WAN024BF4_at; Start 204; Stop 228
ggctgggcaactagtctttttcgat

SEQ ID NO: 79287 - DNA, 25 bp, Artificial
  probe
  misc_feature (1)..(25): SEQ ID NO: 755; WAN024BF4_at; Start 207; Stop 231
tgggcaactagtctttttcgatgtt

SEQ ID NO: 79288 - DNA, 25 bp, Artificial
  probe
  misc_feature (1)..(25): SEQ ID NO: 755; WAN024BF4_at; Start 232; Stop 256
tatagattagttaggcaagtaagcc

SEQ ID NO: 79289 - DNA, 25 bp, Artificial
  probe
  misc_feature (1)..(25): SEQ ID NO: 755; WAN024BF4_at; Start 214; Stop 238
ctagtctttttcgatgtttatagat

SEQ ID NO: 79290 - DNA, 25 bp, Artificial
  probe
  misc_feature (1)..(25): SEQ ID NO: 755; WAN024BF4_at; Start 223; Stop 247
ttcgatgtttatagattagttaggc

SEQ ID NO: 79291 - DNA, 25 bp, Artificial
  probe
  misc_feature (1)..(25): SEQ ID NO: 755; WAN024BF4_at; Start 226; Stop 250
gatgtttatagattagttaggcaag

SEQ ID NO: 79292 - DNA, 25 bp, Artificial
  probe
  misc_feature (1)..(25): SEQ ID NO: 755; WAN024BF4_at; Start 180; Stop 204
cgaagagtataaaatgatggggaag

SEQ ID NO: 79293 - DNA, 25 bp, Artificial
  probe
  misc_feature (1)..(25): SEQ ID NO: 755; WAN024BF4_at; Start 221; Stop 245
ttttcgatgtttatagattagttag

SEQ ID NO: 79294 - DNA, 25 bp, Artificial
  probe
  misc_feature (1)..(25): SEQ ID NO: 755; WAN024BF4_at; Start 225; Stop 249
cgatgtttatagattagttaggcaa

SEQ ID NO: 79295 - DNA, 25 bp, Artificial
  probe
  misc_feature (1)..(25): SEQ ID NO: 755; WAN024BF4_at; Start 201; Stop 225
gaaggctgggcaactagtctttttc

SEQ ID NO: 79296 - DNA, 25 bp, Artificial
  probe
  misc_feature (1)..(25): SEQ ID NO: 3348; WAN024BF5_at; Start 103; Stop 127
gagaaattttctcctgaaaagcata

SEQ ID NO: 79297 - DNA, 25 bp, Artificial
  probe
  misc_feature (1)..(25): SEQ ID NO: 3348; WAN024BF5_at; Start 108; Stop 132
attttctcctgaaaagcatatagag

SEQ ID NO: 79298 - DNA, 25 bp, Artificial
  probe
  misc_feature (1)..(25): SEQ ID NO: 3348; WAN024BF5_at; Start 105; Stop 129
gaaattttctcctgaaaagcatata

SEQ ID NO: 79299 - DNA, 25 bp, Artificial
  probe
  misc_feature (1)..(25): SEQ ID NO: 3348; WAN024BF5_at; Start 102; Stop 126
agagaaattttctcctgaaaagcat

SEQ ID NO: 79300 - DNA, 25 bp, Artificial
  probe
  misc_feature (1)..(25): SEQ ID NO: 3348; WAN024BF5_at; Start 106; Stop 130
aaattttctcctgaaaagcatatag

SEQ ID NO: 79301 - DNA, 25 bp, Artificial
  probe
  misc_feature (1)..(25): SEQ ID NO: 3348; WAN024BF5_at; Start 86; Stop 110
ttgcctataatcaaaaagagaaatt

SEQ ID NO: 79302 - DNA, 25 bp, Artificial
  probe
  misc_feature (1)..(25): SEQ ID NO: 3348; WAN024BF5_at; Start 95; Stop 119
atcaaaaagagaaattttctcctga

SEQ ID NO: 79303 - DNA, 25 bp, Artificial
  probe
  misc_feature (1)..(25): SEQ ID NO: 3348; WAN024BF5_at; Start 96; Stop 120
tcaaaaagagaaattttctcctgaa

SEQ ID NO: 79304 - DNA, 25 bp, Artificial
  probe
  misc_feature (1)..(25): SEQ ID NO: 3348; WAN024BF5_at; Start 101; Stop 125
aagagaaattttctcctgaaaagca

SEQ ID NO: 79305 - DNA, 25 bp, Artificial
  probe
  misc_feature (1)..(25): SEQ ID NO: 3348; WAN024BF5_at; Start 83; Stop 107
tcattgcctataatcaaaaagagaa

SEQ ID NO: 79306 - DNA, 25 bp, Artificial
  probe
  misc_feature (1)..(25): SEQ ID NO: 3348; WAN024BF5_at; Start 104; Stop 128
agaaattttctcctgaaaagcatat

SEQ ID NO: 79307 - DNA, 25 bp, Artificial
  probe
  misc_feature (1)..(25): SEQ ID NO: 3348; WAN024BF5_at; Start 85; Stop 109
attgcctataatcaaaaagagaaat

SEQ ID NO: 79308 - DNA, 25 bp, Artificial
  probe
  misc_feature (1)..(25): SEQ ID NO: 3348; WAN024BF5_at; Start 107; Stop 131
aattttctcctgaaaagcatataga

SEQ ID NO: 79309 - DNA, 25 bp, Artificial
  probe
  misc_feature (1)..(25): SEQ ID NO: 3348; WAN024BF5_at; Start 84; Stop 108
cattgcctataatcaaaaagagaaa

SEQ ID NO: 79310 - DNA, 25 bp, Artificial
  probe
  misc_feature (1)..(25): SEQ ID NO: 799; WAN024BF6_x_at; Start 32; Stop 56
ccgcaggttgctcaaaacactgttt

SEQ ID NO: 79311 - DNA, 25 bp, Artificial
  probe
  misc_feature (1)..(25): SEQ ID NO: 799; WAN024BF6_x_at; Start 93; Stop 117
acatggttttgaggttgtagatgaa

SEQ ID NO: 79312 - DNA, 25 bp, Artificial
  probe
  misc_feature (1)..(25): SEQ ID NO: 799; WAN024BF6_x_at; Start 106; Stop 130
gttgtagatgaaactgacgaagtca

SEQ ID NO: 79313 - DNA, 25 bp, Artificial
  probe
  misc_feature (1)..(25): SEQ ID NO: 799; WAN024BF6_x_at; Start 98; Stop 122
gttttgaggttgtagatgaaactga

SEQ ID NO: 79314 - DNA, 25 bp, Artificial
  probe
  misc_feature (1)..(25): SEQ ID NO: 799; WAN024BF6_x_at; Start 96; Stop 120
tggttttgaggttgtagatgaaact

SEQ ID NO: 79315 - DNA, 25 bp, Artificial
  probe
  misc_feature (1)..(25): SEQ ID NO: 799; WAN024BF6_x_at; Start 74; Stop 98
ctgacgaagtcagctcaaaacatgg

SEQ ID NO: 79316 - DNA, 25 bp, Artificial
  probe
  misc_feature (1)..(25): SEQ ID NO: 799; WAN024BF6_x_at; Start 35; Stop 59
caggttgctcaaaacactgttttga

SEQ ID NO: 79317 - DNA, 25 bp, Artificial
  probe
  misc_feature (1)..(25): SEQ ID NO: 799; WAN024BF6_x_at; Start 30; Stop 54
agccgcaggttgctcaaaacactgt

SEQ ID NO: 79318 - DNA, 25 bp, Artificial
  probe
  misc_feature (1)..(25): SEQ ID NO: 799; WAN024BF6_x_at; Start 89; Stop 113
caaaacatggttttgaggttgtaga

SEQ ID NO: 79319 - DNA, 25 bp, Artificial
  probe
  misc_feature (1)..(25): SEQ ID NO: 799; WAN024BF6_x_at; Start 31; Stop 55
gccgcaggttgctcaaaacactgtt

SEQ ID NO: 79320 - DNA, 25 bp, Artificial
  probe
  misc_feature (1)..(25): SEQ ID NO: 799; WAN024BF6_x_at; Start 99; Stop 123
ttttgaggttgtagatgaaactgac

SEQ ID NO: 79321 - DNA, 25 bp, Artificial
  probe
  misc_feature (1)..(25): SEQ ID NO: 799; WAN024BF6_x_at; Start 107; Stop 131
ttgtagatgaaactgacgaagtcag

SEQ ID NO: 79322 - DNA, 25 bp, Artificial
  probe
  misc_feature (1)..(25): SEQ ID NO: 799; WAN024BF6_x_at; Start 95; Stop 119
atggttttgaggttgtagatgaaac

SEQ ID NO: 79323 - DNA, 25 bp, Artificial
  probe
  misc_feature (1)..(25): SEQ ID NO: 799; WAN024BF6_x_at; Start 90; Stop 114
aaaacatggttttgaggttgtagat

SEQ ID NO: 79324 - DNA, 25 bp, Artificial
  probe
  misc_feature (1)..(25): SEQ ID NO: 799; WAN024BF6_x_at; Start 103; Stop 127
gaggttgtagatgaaactgacgaag

SEQ ID NO: 79325 - DNA, 25 bp, Artificial
  probe
  misc_feature (1)..(25): SEQ ID NO: 799; WAN024BF6_x_at; Start 97; Stop 121
ggttttgaggttgtagatgaaactg

SEQ ID NO: 79326 - DNA, 25 bp, Artificial
  probe
  misc_feature (1)..(25): SEQ ID NO: 799; WAN024BF6_x_at; Start 94; Stop 118
catggttttgaggttgtagatgaaa

SEQ ID NO: 79327 - DNA, 25 bp, Artificial
  probe
  misc_feature (1)..(25): SEQ ID NO: 799; WAN024BF6_x_at; Start 33; Stop 57
cgcaggttgctcaaaacactgtttt

SEQ ID NO: 79328 - DNA, 25 bp, Artificial
  probe
  misc_feature (1)..(25): SEQ ID NO: 799; WAN024BF6_x_at; Start 92; Stop 116
aacatggttttgaggttgtagatga

SEQ ID NO: 79329 - DNA, 25 bp, Artificial
  probe
  misc_feature (1)..(25): SEQ ID NO: 799; WAN024BF6_x_at; Start 101; Stop 125
ttgaggttgtagatgaaactgacga

SEQ ID NO: 79330 - DNA, 25 bp, Artificial
  probe
  misc_feature (1)..(25): SEQ ID NO: 799; WAN024BF6_x_at; Start 34; Stop 58
gcaggttgctcaaaacactgttttg

SEQ ID NO: 79331 - DNA, 25 bp, Artificial
  probe
  misc_feature (1)..(25): SEQ ID NO: 799; WAN024BF6_x_at; Start 24; Stop 48
gaagctagccgcaggttgctcaaaa

SEQ ID NO: 79332 - DNA, 25 bp, Artificial
  probe
  misc_feature (1)..(25): SEQ ID NO: 799; WAN024BF6_x_at; Start 91; Stop 115
aaacatggttttgaggttgtagatg

SEQ ID NO: 79333 - DNA, 25 bp, Artificial
  probe
  misc_feature (1)..(25): SEQ ID NO: 799; WAN024BF6_x_at; Start 102; Stop 126
tgaggttgtagatgaaactgacgaa

SEQ ID NO: 79334 - DNA, 25 bp, Artificial
  probe
  misc_feature (1)..(25): SEQ ID NO: 1366; WAN024BF7_at; Start 74; Stop 98
aacaggcaagcgctgacgacgtccg

SEQ ID NO: 79335 - DNA, 25 bp, Artificial
  probe
  misc_feature (1)..(25): SEQ ID NO: 1366; WAN024BF7_at; Start 250; Stop 274
gcttggcgggcctatgaccgcttcc

SEQ ID NO: 79336 - DNA, 25 bp, Artificial
  probe
  misc_feature (1)..(25): SEQ ID NO: 1366; WAN024BF7_at; Start 288; Stop 312
caagaccaagttaatactcaatgaa

SEQ ID NO: 79337 - DNA, 25 bp, Artificial
  probe
  misc_feature (1)..(25): SEQ ID NO: 1366; WAN024BF7_at; Start 142; Stop 166
gctgaaacagtggataatcgattct

SEQ ID NO: 79338 - DNA, 25 bp, Artificial
  probe
  misc_feature (1)..(25): SEQ ID NO: 1366; WAN024BF7_at; Start 212; Stop 236
gactcagcgctcttgatccagatgc

SEQ ID NO: 79339 - DNA, 25 bp, Artificial
  probe
  misc_feature (1)..(25): SEQ ID NO: 1366; WAN024BF7_at; Start 224; Stop 248
ttgatccagatgctccaactcgcgc

SEQ ID NO: 79340 - DNA, 25 bp, Artificial
  probe
  misc_feature (1)..(25): SEQ ID NO: 1366; WAN024BF7_at; Start 91; Stop 115
gacgtccgctttcaggagcaattaa

SEQ ID NO: 79341 - DNA, 25 bp, Artificial
  probe
  misc_feature (1)..(25): SEQ ID NO: 1366; WAN024BF7_at; Start 24; Stop 48
aagagctcatactttgattactgac

SEQ ID NO: 79342 - DNA, 25 bp, Artificial
  probe
  misc_feature (1)..(25): SEQ ID NO: 1366; WAN024BF7_at; Start 196; Stop 220
tccagtcttctcatgggactcagcg

SEQ ID NO: 79343 - DNA, 25 bp, Artificial
  probe
  misc_feature (1)..(25): SEQ ID NO: 1366; WAN024BF7_at; Start 97; Stop 121
cgctttcaggagcaattaaactcta

SEQ ID NO: 79344 - DNA, 25 bp, Artificial
  probe
  misc_feature (1)..(25): SEQ ID NO: 1366; WAN024BF7_at; Start 273; Stop 297
ccactttgaccaagtcaagaccaag

SEQ ID NO: 79345 - DNA, 25 bp, Artificial
  probe
  misc_feature (1)..(25): SEQ ID NO: 1366; WAN024BF7_at; Start 123; Stop 147
tcttggttttctagccaaggctgaa

SEQ ID NO: 79346 - DNA, 25 bp, Artificial
  probe
  misc_feature (1)..(25): SEQ ID NO: 1366; WAN024BF7_at; Start 61; Stop 85
taccaagcatgcaaacaggcaagcg

SEQ ID NO: 79347 - DNA, 25 bp, Artificial
  probe
  misc_feature (1)..(25): SEQ ID NO: 1366; WAN024BF7_at; Start 87; Stop 111
tgacgacgtccgctttcaggagcaa

SEQ ID NO: 79348 - DNA, 25 bp, Artificial
  probe
  misc_feature (1)..(25): SEQ ID NO: 1366; WAN024BF7_at; Start 209; Stop 233
tgggactcagcgctcttgatccaga

SEQ ID NO: 79349 - DNA, 25 bp, Artificial
  probe
  misc_feature (1)..(25): SEQ ID NO: 1366; WAN024BF7_at; Start 55; Stop 79
aaagcctaccaagcatgcaaacagg

SEQ ID NO: 79350 - DNA, 25 bp, Artificial
  probe
  misc_feature (1)..(25): SEQ ID NO: 1366; WAN024BF7_at; Start 132; Stop 156
tctagccaaggctgaaacagtggat

SEQ ID NO: 79351 - DNA, 25 bp, Artificial
  probe
  misc_feature (1)..(25): SEQ ID NO: 1366; WAN024BF7_at; Start 258; Stop 282
ggcctatgaccgcttccactttgac

SEQ ID NO: 79352 - DNA, 25 bp, Artificial
  probe
  misc_feature (1)..(25): SEQ ID NO: 1366; WAN024BF7_at; Start 2; Stop 26
tgacagatacagaccccatcaaaag

SEQ ID NO: 79353 - DNA, 25 bp, Artificial
  probe
  misc_feature (1)..(25): SEQ ID NO: 1366; WAN024BF7_at; Start 13; Stop 37
gaccccatcaaaagagctcatactt

SEQ ID NO: 79354 - DNA, 25 bp, Artificial
  probe
  misc_feature (1)..(25): SEQ ID NO: 1366; WAN024BF7_at; Start 231; Stop 255
agatgctccaactcgcgccgcttgg

SEQ ID NO: 79355 - DNA, 25 bp, Artificial
  probe
  misc_feature (1)..(25): SEQ ID NO: 1366; WAN024BF7_at; Start 201; Stop 225
tcttctcatgggactcagcgctctt

SEQ ID NO: 79356 - DNA, 25 bp, Artificial
  probe
  misc_feature (1)..(25): SEQ ID NO: 1366; WAN024BF7_at; Start 240; Stop 264
aactcgcgccgcttggcgggcctat

SEQ ID NO: 79357 - DNA, 25 bp, Artificial
  probe
  misc_feature (1)..(25): SEQ ID NO: 1366; WAN024BF7_at; Start 68; Stop 92
catgcaaacaggcaagcgctgacga

SEQ ID NO: 79358 - DNA, 25 bp, Artificial
  probe
  misc_feature (1)..(25): SEQ ID NO: 1366; WAN024BF7_at; Start 9; Stop 33
tacagaccccatcaaaagagctcat

SEQ ID NO: 79359 - DNA, 25 bp, Artificial
  probe
  misc_feature (1)..(25): SEQ ID NO: 1366; WAN024BF7_at; Start 103; Stop 127
caggagcaattaaactctattcttg

SEQ ID NO: 79360 - DNA, 25 bp, Artificial
  probe
  misc_feature (1)..(25): SEQ ID NO: 1366; WAN024BF7_at; Start 217; Stop 241
agcgctcttgatccagatgctccaa

SEQ ID NO: 79361 - DNA, 25 bp, Artificial
  probe
  misc_feature (1)..(25): SEQ ID NO: 1366; WAN024BF7_at; Start 156; Stop 180
taatcgattcttgattgaactagaa

SEQ ID NO: 79362 - DNA, 25 bp, Artificial
  probe
  misc_feature (1)..(25): SEQ ID NO: 1366; WAN024BF7_at; Start 280; Stop 304
gaccaagtcaagaccaagttaatac

SEQ ID NO: 79363 - DNA, 25 bp, Artificial
  probe
  misc_feature (1)..(25): SEQ ID NO: 1366; WAN024BF7_at; Start 49; Stop 73
ttaaacaaagcctaccaagcatgca

SEQ ID NO: 79364 - DNA, 25 bp, Artificial
  probe
  misc_feature (1)..(25): SEQ ID NO: 1366; WAN024BF7_at; Start 137; Stop 161
ccaaggctgaaacagtggataatcg

SEQ ID NO: 79365 - DNA, 25 bp, Artificial
  probe
  misc_feature (1)..(25): SEQ ID NO: 1366; WAN024BF7_at; Start 262; Stop 286
tatgaccgcttccactttgaccaag

SEQ ID NO: 79366 - DNA, 25 bp, Artificial
  probe
  misc_feature (1)..(25): SEQ ID NO: 1366; WAN024BF7_at; Start 115; Stop 139
aactctattcttggttttctagcca

SEQ ID NO: 79367 - DNA, 25 bp, Artificial
  probe
  misc_feature (1)..(25): SEQ ID NO: 1366; WAN024BF7_at; Start 39; Stop 63
gattactgacttaaacaaagcctac

SEQ ID NO: 79368 - DNA, 25 bp, Artificial
  probe
  misc_feature (1)..(25): SEQ ID NO: 5009; WAN024BF8_at; Start 83; Stop 107
caactccgcctcaatctgtcttaga

SEQ ID NO: 79369 - DNA, 25 bp, Artificial
  probe
  misc_feature (1)..(25): SEQ ID NO: 5009; WAN024BF8_at; Start 106; Stop 130
gatcgagatacttttacaattgact

SEQ ID NO: 79370 - DNA, 25 bp, Artificial
  probe
  misc_feature (1)..(25): SEQ ID NO: 5009; WAN024BF8_at; Start 24; Stop 48
tcagtttgtaaaaattggagataaa

SEQ ID NO: 79371 - DNA, 25 bp, Artificial
  probe
  misc_feature (1)..(25): SEQ ID NO: 5009; WAN024BF8_at; Start 72; Stop 96
tatgattcattcaactccgcctcaa

SEQ ID NO: 79372 - DNA, 25 bp, Artificial
  probe
  misc_feature (1)..(25): SEQ ID NO: 5009; WAN024BF8_at; Start 76; Stop 100
attcattcaactccgcctcaatctg

SEQ ID NO: 79373 - DNA, 25 bp, Artificial
  probe
  misc_feature (1)..(25): SEQ ID NO: 5009; WAN024BF8_at; Start 97; Stop 121
tctgtcttagatcgagatactttta

SEQ ID NO: 79374 - DNA, 25 bp, Artificial
  probe
  misc_feature (1)..(25): SEQ ID NO: 5009; WAN024BF8_at; Start 134; Stop 158
cagatgatgaattgctcgataaaga

SEQ ID NO: 79375 - DNA, 25 bp, Artificial
  probe
  misc_feature (1)..(25): SEQ ID NO: 5009; WAN024BF8_at; Start 84; Stop 108
aactccgcctcaatctgtcttagat

SEQ ID NO: 79376 - DNA, 25 bp, Artificial
  probe
  misc_feature (1)..(25): SEQ ID NO: 5009; WAN024BF8_at; Start 69; Stop 93
tcctatgattcattcaactccgcct

SEQ ID NO: 79377 - DNA, 25 bp, Artificial
  probe
  misc_feature (1)..(25): SEQ ID NO: 5009; WAN024BF8_at; Start 43; Stop 67
gataaaaaatatagagtacgcagtg

SEQ ID NO: 79378 - DNA, 25 bp, Artificial
  probe
  misc_feature (1)..(25): SEQ ID NO: 5009; WAN024BF8_at; Start 103; Stop 127
ttagatcgagatacttttacaattg

SEQ ID NO: 79379 - DNA, 25 bp, Artificial
  probe
  misc_feature (1)..(25): SEQ ID NO: 5009; WAN024BF8_at; Start 156; Stop 180
agaagcagtttttactactcatcta

SEQ ID NO: 79380 - DNA, 25 bp, Artificial
  probe
  misc_feature (1)..(25): SEQ ID NO: 5009; WAN024BF8_at; Start 137; Stop 161
atgatgaattgctcgataaagaagc

SEQ ID NO: 79381 - DNA, 25 bp, Artificial
  probe
  misc_feature (1)..(25): SEQ ID NO: 5009; WAN024BF8_at; Start 155; Stop 179
aagaagcagtttttactactcatct

SEQ ID NO: 79382 - DNA, 25 bp, Artificial
  probe
  misc_feature (1)..(25): SEQ ID NO: 5009; WAN024BF8_at; Start 14; Stop 38
tcgaagagtatcagtttgtaaaaat

SEQ ID NO: 79383 - DNA, 25 bp, Artificial
  probe
  misc_feature (1)..(25): SEQ ID NO: 5009; WAN024BF8_at; Start 118; Stop 142
tttacaattgactatacagatgatg

SEQ ID NO: 79384 - DNA, 25 bp, Artificial
  probe
  misc_feature (1)..(25): SEQ ID NO: 5009; WAN024BF8_at; Start 112; Stop 136
gatacttttacaattgactatacag

SEQ ID NO: 79385 - DNA, 25 bp, Artificial
  probe
  misc_feature (1)..(25): SEQ ID NO: 5009; WAN024BF8_at; Start 109; Stop 133
cgagatacttttacaattgactata

SEQ ID NO: 79386 - DNA, 25 bp, Artificial
  probe
  misc_feature (1)..(25): SEQ ID NO: 5009; WAN024BF8_at; Start 87; Stop 111
tccgcctcaatctgtcttagatcga

SEQ ID NO: 79387 - DNA, 25 bp, Artificial
  probe
  misc_feature (1)..(25): SEQ ID NO: 5009; WAN024BF8_at; Start 132; Stop 156
tacagatgatgaattgctcgataaa

SEQ ID NO: 79388 - DNA, 25 bp, Artificial
  probe
  misc_feature (1)..(25): SEQ ID NO: 5009; WAN024BF8_at; Start 136; Stop 160
gatgatgaattgctcgataaagaag

SEQ ID NO: 79389 - DNA, 25 bp, Artificial
  probe
  misc_feature (1)..(25): SEQ ID NO: 5009; WAN024BF8_at; Start 94; Stop 118
caatctgtcttagatcgagatactt

SEQ ID NO: 79390 - DNA, 25 bp, Artificial
  probe
  misc_feature (1)..(25): SEQ ID NO: 5009; WAN024BF8_at; Start 89; Stop 113
cgcctcaatctgtcttagatcgaga

SEQ ID NO: 79391 - DNA, 25 bp, Artificial
  probe
  misc_feature (1)..(25): SEQ ID NO: 5009; WAN024BF8_at; Start 90; Stop 114
gcctcaatctgtcttagatcgagat

SEQ ID NO: 79392 - DNA, 25 bp, Artificial
  probe
  misc_feature (1)..(25): SEQ ID NO: 5009; WAN024BF8_at; Start 92; Stop 116
ctcaatctgtcttagatcgagatac

SEQ ID NO: 79393 - DNA, 25 bp, Artificial
  probe
  misc_feature (1)..(25): SEQ ID NO: 5009; WAN024BF8_at; Start 99; Stop 123
tgtcttagatcgagatacttttaca

SEQ ID NO: 79394 - DNA, 25 bp, Artificial
  probe
  misc_feature (1)..(25): SEQ ID NO: 5009; WAN024BF8_at; Start 39; Stop 63
tggagataaaaaatatagagtacgc

SEQ ID NO: 79395 - DNA, 25 bp, Artificial
  probe
  misc_feature (1)..(25): SEQ ID NO: 5009; WAN024BF8_at; Start 12; Stop 36
tttcgaagagtatcagtttgtaaaa

SEQ ID NO: 79396 - DNA, 25 bp, Artificial
  probe
  misc_feature (1)..(25): SEQ ID NO: 5009; WAN024BF8_at; Start 141; Stop 165
tgaattgctcgataaagaagcagtt

SEQ ID NO: 79397 - DNA, 25 bp, Artificial
  probe
  misc_feature (1)..(25): SEQ ID NO: 5009; WAN024BF8_at; Start 144; Stop 168
attgctcgataaagaagcagttttt

SEQ ID NO: 79398 - DNA, 25 bp, Artificial
  probe
  misc_feature (1)..(25): SEQ ID NO: 5009; WAN024BF8_at; Start 142; Stop 166
gaattgctcgataaagaagcagttt

SEQ ID NO: 79399 - DNA, 25 bp, Artificial
  probe
  misc_feature (1)..(25): SEQ ID NO: 5009; WAN024BF8_at; Start 130; Stop 154
tatacagatgatgaattgctcgata

SEQ ID NO: 79400 - DNA, 25 bp, Artificial
  probe
  misc_feature (1)..(25): SEQ ID NO: 5009; WAN024BF8_at; Start 19; Stop 43
gagtatcagtttgtaaaaattggag

SEQ ID NO: 79401 - DNA, 25 bp, Artificial
  probe
  misc_feature (1)..(25): SEQ ID NO: 5009; WAN024BF8_at; Start 82; Stop 106
tcaactccgcctcaatctgtcttag

SEQ ID NO: 79402 - DNA, 25 bp, Artificial
  probe
  misc_feature (1)..(25): SEQ ID NO: 4324; WAN024BF9_at; Start 86; Stop 110
tcctaagagcaattggaggtattat

SEQ ID NO: 79403 - DNA, 25 bp, Artificial
  probe
  misc_feature (1)..(25): SEQ ID NO: 4324; WAN024BF9_at; Start 37; Stop 61
aatgctacagttagacaaacttatg

SEQ ID NO: 79404 - DNA, 25 bp, Artificial
  probe
  misc_feature (1)..(25): SEQ ID NO: 4324; WAN024BF9_at; Start 50; Stop 74
gacaaacttatgataaaatagcaga

SEQ ID NO: 79405 - DNA, 25 bp, Artificial
  probe
  misc_feature (1)..(25): SEQ ID NO: 4324; WAN024BF9_at; Start 68; Stop 92
tagcagaaagtgaatgtttcctaag

SEQ ID NO: 79406 - DNA, 25 bp, Artificial
  probe
  misc_feature (1)..(25): SEQ ID NO: 4324; WAN024BF9_at; Start 101; Stop 125
gaggtattatgctacacttaaaatt

SEQ ID NO: 79407 - DNA, 25 bp, Artificial
  probe
  misc_feature (1)..(25): SEQ ID NO: 4324; WAN024BF9_at; Start 89; Stop 113
taagagcaattggaggtattatgct

SEQ ID NO: 79408 - DNA, 25 bp, Artificial
  probe
  misc_feature (1)..(25): SEQ ID NO: 4324; WAN024BF9_at; Start 103; Stop 127
ggtattatgctacacttaaaattag

SEQ ID NO: 79409 - DNA, 25 bp, Artificial
  probe
  misc_feature (1)..(25): SEQ ID NO: 4324; WAN024BF9_at; Start 79; Stop 103
gaatgtttcctaagagcaattggag

SEQ ID NO: 79410 - DNA, 25 bp, Artificial
  probe
  misc_feature (1)..(25): SEQ ID NO: 4324; WAN024BF9_at; Start 70; Stop 94
gcagaaagtgaatgtttcctaagag

SEQ ID NO: 79411 - DNA, 25 bp, Artificial
  probe
  misc_feature (1)..(25): SEQ ID NO: 4324; WAN024BF9_at; Start 33; Stop 57
ttcaaatgctacagttagacaaact

SEQ ID NO: 79412 - DNA, 25 bp, Artificial
  probe
  misc_feature (1)..(25): SEQ ID NO: 4324; WAN024BF9_at; Start 100; Stop 124
ggaggtattatgctacacttaaaat

SEQ ID NO: 79413 - DNA, 25 bp, Artificial
  probe
  misc_feature (1)..(25): SEQ ID NO: 4324; WAN024BF9_at; Start 76; Stop 100
agtgaatgtttcctaagagcaattg

SEQ ID NO: 79414 - DNA, 25 bp, Artificial
  probe
  misc_feature (1)..(25): SEQ ID NO: 4324; WAN024BF9_at; Start 56; Stop 80
cttatgataaaatagcagaaagtga

SEQ ID NO: 79415 - DNA, 25 bp, Artificial
  probe
  misc_feature (1)..(25): SEQ ID NO: 4324; WAN024BF9_at; Start 71; Stop 95
cagaaagtgaatgtttcctaagagc

SEQ ID NO: 79416 - DNA, 25 bp, Artificial
  probe
  misc_feature (1)..(25): SEQ ID NO: 4324; WAN024BF9_at; Start 80; Stop 104
aatgtttcctaagagcaattggagg

SEQ ID NO: 79417 - DNA, 25 bp, Artificial
  probe
  misc_feature (1)..(25): SEQ ID NO: 4324; WAN024BF9_at; Start 92; Stop 116
gagcaattggaggtattatgctaca

SEQ ID NO: 79418 - DNA, 25 bp, Artificial
  probe
  misc_feature (1)..(25): SEQ ID NO: 4324; WAN024BF9_at; Start 73; Stop 97
gaaagtgaatgtttcctaagagcaa

SEQ ID NO: 79419 - DNA, 25 bp, Artificial
  probe
  misc_feature (1)..(25): SEQ ID NO: 4324; WAN024BF9_at; Start 99; Stop 123
tggaggtattatgctacacttaaaa

SEQ ID NO: 79420 - DNA, 25 bp, Artificial
  probe
  misc_feature (1)..(25): SEQ ID NO: 4324; WAN024BF9_at; Start 84; Stop 108
tttcctaagagcaattggaggtatt

SEQ ID NO: 79421 - DNA, 25 bp, Artificial
  probe
  misc_feature (1)..(25): SEQ ID NO: 4324; WAN024BF9_at; Start 60; Stop 84
tgataaaatagcagaaagtgaatgt

SEQ ID NO: 79422 - DNA, 25 bp, Artificial
  probe
  misc_feature (1)..(25): SEQ ID NO: 4324; WAN024BF9_at; Start 52; Stop 76
caaacttatgataaaatagcagaaa

SEQ ID NO: 79423 - DNA, 25 bp, Artificial
  probe
  misc_feature (1)..(25): SEQ ID NO: 4324; WAN024BF9_at; Start 82; Stop 106
tgtttcctaagagcaattggaggta

SEQ ID NO: 79424 - DNA, 25 bp, Artificial
  probe
  misc_feature (1)..(25): SEQ ID NO: 4324; WAN024BF9_at; Start 94; Stop 118
gcaattggaggtattatgctacact

SEQ ID NO: 79425 - DNA, 25 bp, Artificial
  probe
  misc_feature (1)..(25): SEQ ID NO: 4324; WAN024BF9_at; Start 35; Stop 59
caaatgctacagttagacaaactta

SEQ ID NO: 79426 - DNA, 25 bp, Artificial
  probe
  misc_feature (1)..(25): SEQ ID NO: 4324; WAN024BF9_at; Start 87; Stop 111
cctaagagcaattggaggtattatg

SEQ ID NO: 79427 - DNA, 25 bp, Artificial
  probe
  misc_feature (1)..(25): SEQ ID NO: 4324; WAN024BF9_at; Start 74; Stop 98
aaagtgaatgtttcctaagagcaat

SEQ ID NO: 79428 - DNA, 25 bp, Artificial
  probe
  misc_feature (1)..(25): SEQ ID NO: 4324; WAN024BF9_at; Start 88; Stop 112
ctaagagcaattggaggtattatgc

SEQ ID NO: 79429 - DNA, 25 bp, Artificial
  probe
  misc_feature (1)..(25): SEQ ID NO: 4324; WAN024BF9_at; Start 65; Stop 89
aaatagcagaaagtgaatgtttcct

SEQ ID NO: 79430 - DNA, 25 bp, Artificial
  probe
  misc_feature (1)..(25): SEQ ID NO: 4324; WAN024BF9_at; Start 83; Stop 107
gtttcctaagagcaattggaggtat

SEQ ID NO: 79431 - DNA, 25 bp, Artificial
  probe
  misc_feature (1)..(25): SEQ ID NO: 4324; WAN024BF9_at; Start 96; Stop 120
aattggaggtattatgctacactta

SEQ ID NO: 79432 - DNA, 25 bp, Artificial
  probe
  misc_feature (1)..(25): SEQ ID NO: 4324; WAN024BF9_at; Start 95; Stop 119
caattggaggtattatgctacactt

SEQ ID NO: 79433 - DNA, 25 bp, Artificial
  probe
  misc_feature (1)..(25): SEQ ID NO: 4324; WAN024BF9_at; Start 72; Stop 96
agaaagtgaatgtttcctaagagca

SEQ ID NO: 79434 - DNA, 25 bp, Artificial
  probe
  misc_feature (1)..(25): SEQ ID NO: 4324; WAN024BF9_at; Start 64; Stop 88
aaaatagcagaaagtgaatgtttcc

SEQ ID NO: 79435 - DNA, 25 bp, Artificial
  probe
  misc_feature (1)..(25): SEQ ID NO: 4324; WAN024BF9_at; Start 77; Stop 101
gtgaatgtttcctaagagcaattgg

SEQ ID NO: 79436 - DNA, 25 bp, Artificial
  probe
  misc_feature (1)..(25): SEQ ID NO: 4075; WAN024BFA_at; Start 30; Stop 54
ggattttcatgatttcaaatttata

SEQ ID NO: 79437 - DNA, 25 bp, Artificial
  probe
  misc_feature (1)..(25): SEQ ID NO: 4075; WAN024BFA_at; Start 27; Stop 51
gacggattttcatgatttcaaattt

SEQ ID NO: 79438 - DNA, 25 bp, Artificial
  probe
  misc_feature (1)..(25): SEQ ID NO: 4075; WAN024BFA_at; Start 25; Stop 49
ttgacggattttcatgatttcaaat

SEQ ID NO: 79439 - DNA, 25 bp, Artificial
  probe
  misc_feature (1)..(25): SEQ ID NO: 4075; WAN024BFA_at; Start 28; Stop 52
acggattttcatgatttcaaattta

SEQ ID NO: 79440 - DNA, 25 bp, Artificial
  probe
  misc_feature (1)..(25): SEQ ID NO: 4075; WAN024BFA_at; Start 29; Stop 53
cggattttcatgatttcaaatttat

SEQ ID NO: 79441 - DNA, 25 bp, Artificial
  probe
  misc_feature (1)..(25): SEQ ID NO: 4075; WAN024BFA_at; Start 23; Stop 47
gtttgacggattttcatgatttcaa

SEQ ID NO: 79442 - DNA, 25 bp, Artificial
  probe
  misc_feature (1)..(25): SEQ ID NO: 4075; WAN024BFA_at; Start 19; Stop 43
acccgtttgacggattttcatgatt

SEQ ID NO: 79443 - DNA, 25 bp, Artificial
  probe
  misc_feature (1)..(25): SEQ ID NO: 4075; WAN024BFA_at; Start 17; Stop 41
ccacccgtttgacggattttcatga

SEQ ID NO: 79444 - DNA, 25 bp, Artificial
  probe
  misc_feature (1)..(25): SEQ ID NO: 4075; WAN024BFA_at; Start 26; Stop 50
tgacggattttcatgatttcaaatt

SEQ ID NO: 79445 - DNA, 25 bp, Artificial
  probe
  misc_feature (1)..(25): SEQ ID NO: 4075; WAN024BFA_at; Start 16; Stop 40
accacccgtttgacggattttcatg

SEQ ID NO: 79446 - DNA, 25 bp, Artificial
  probe
  misc_feature (1)..(25): SEQ ID NO: 4075; WAN024BFA_at; Start 22; Stop 46
cgtttgacggattttcatgatttca

SEQ ID NO: 79447 - DNA, 25 bp, Artificial
  probe
  misc_feature (1)..(25): SEQ ID NO: 4075; WAN024BFA_at; Start 36; Stop 60
tcatgatttcaaatttatattcttc

SEQ ID NO: 79448 - DNA, 25 bp, Artificial
  probe
  misc_feature (1)..(25): SEQ ID NO: 4075; WAN024BFA_at; Start 37; Stop 61
catgatttcaaatttatattcttcg

SEQ ID NO: 79449 - DNA, 25 bp, Artificial
  probe
  misc_feature (1)..(25): SEQ ID NO: 4075; WAN024BFA_at; Start 31; Stop 55
gattttcatgatttcaaatttatat

SEQ ID NO: 79450 - DNA, 25 bp, Artificial
  probe
  misc_feature (1)..(25): SEQ ID NO: 4075; WAN024BFA_at; Start 20; Stop 44
cccgtttgacggattttcatgattt

SEQ ID NO: 79451 - DNA, 25 bp, Artificial
  probe
  misc_feature (1)..(25): SEQ ID NO: 4075; WAN024BFA_at; Start 24; Stop 48
tttgacggattttcatgatttcaaa

SEQ ID NO: 79452 - DNA, 25 bp, Artificial
  probe
  misc_feature (1)..(25): SEQ ID NO: 4075; WAN024BFA_at; Start 21; Stop 45
ccgtttgacggattttcatgatttc

SEQ ID NO: 79453 - DNA, 25 bp, Artificial
  probe
  misc_feature (1)..(25): SEQ ID NO: 4075; WAN024BFA_at; Start 18; Stop 42
cacccgtttgacggattttcatgat

SEQ ID NO: 79454 - DNA, 25 bp, Artificial
  probe
  misc_feature (1)..(25): SEQ ID NO: 4917; WAN024BFB_at; Start 126; Stop 150
ggcaacctggattaaagcgagaaaa

SEQ ID NO: 79455 - DNA, 25 bp, Artificial
  probe
  misc_feature (1)..(25): SEQ ID NO: 4917; WAN024BFB_at; Start 75; Stop 99
tacttcaaaactagatgatttgcta

SEQ ID NO: 79456 - DNA, 25 bp, Artificial
  probe
  misc_feature (1)..(25): SEQ ID NO: 4917; WAN024BFB_at; Start 120; Stop 144
gattttggcaacctggattaaagcg

SEQ ID NO: 79457 - DNA, 25 bp, Artificial
  probe
  misc_feature (1)..(25): SEQ ID NO: 4917; WAN024BFB_at; Start 112; Stop 136
ttccttatgattttggcaacctgga

SEQ ID NO: 79458 - DNA, 25 bp, Artificial
  probe
  misc_feature (1)..(25): SEQ ID NO: 4917; WAN024BFB_at; Start 125; Stop 149
tggcaacctggattaaagcgagaaa

SEQ ID NO: 79459 - DNA, 25 bp, Artificial
  probe
  misc_feature (1)..(25): SEQ ID NO: 4917; WAN024BFB_at; Start 91; Stop 115
gatttgctatttaaaatagcgttcc

SEQ ID NO: 79460 - DNA, 25 bp, Artificial
  probe
  misc_feature (1)..(25): SEQ ID NO: 4917; WAN024BFB_at; Start 124; Stop 148
ttggcaacctggattaaagcgagaa

SEQ ID NO: 79461 - DNA, 25 bp, Artificial
  probe
  misc_feature (1)..(25): SEQ ID NO: 4917; WAN024BFB_at; Start 123; Stop 147
tttggcaacctggattaaagcgaga

SEQ ID NO: 79462 - DNA, 25 bp, Artificial
  probe
  misc_feature (1)..(25): SEQ ID NO: 4917; WAN024BFB_at; Start 113; Stop 137
tccttatgattttggcaacctggat

SEQ ID NO: 79463 - DNA, 25 bp, Artificial
  probe
  misc_feature (1)..(25): SEQ ID NO: 4917; WAN024BFB_at; Start 122; Stop 146
ttttggcaacctggattaaagcgag

SEQ ID NO: 79464 - DNA, 25 bp, Artificial
  probe
  misc_feature (1)..(25): SEQ ID NO: 4917; WAN024BFB_at; Start 127; Stop 151
gcaacctggattaaagcgagaaaaa

SEQ ID NO: 79465 - DNA, 25 bp, Artificial
  probe
  misc_feature (1)..(25): SEQ ID NO: 4917; WAN024BFB_at; Start 80; Stop 104
caaaactagatgatttgctatttaa

SEQ ID NO: 79466 - DNA, 25 bp, Artificial
  probe
  misc_feature (1)..(25): SEQ ID NO: 4917; WAN024BFB_at; Start 117; Stop 141
tatgattttggcaacctggattaaa

SEQ ID NO: 79467 - DNA, 25 bp, Artificial
  probe
  misc_feature (1)..(25): SEQ ID NO: 4917; WAN024BFB_at; Start 74; Stop 98
ctacttcaaaactagatgatttgct

SEQ ID NO: 79468 - DNA, 25 bp, Artificial
  probe
  misc_feature (1)..(25): SEQ ID NO: 4917; WAN024BFB_at; Start 70; Stop 94
tctcctacttcaaaactagatgatt

SEQ ID NO: 79469 - DNA, 25 bp, Artificial
  probe
  misc_feature (1)..(25): SEQ ID NO: 4917; WAN024BFB_at; Start 73; Stop 97
cctacttcaaaactagatgatttgc

SEQ ID NO: 79470 - DNA, 25 bp, Artificial
  probe
  misc_feature (1)..(25): SEQ ID NO: 4917; WAN024BFB_at; Start 114; Stop 138
ccttatgattttggcaacctggatt

SEQ ID NO: 79471 - DNA, 25 bp, Artificial
  probe
  misc_feature (1)..(25): SEQ ID NO: 4917; WAN024BFB_at; Start 121; Stop 145
attttggcaacctggattaaagcga

SEQ ID NO: 79472 - DNA, 25 bp, Artificial
  probe
  misc_feature (1)..(25): SEQ ID NO: 4917; WAN024BFB_at; Start 104; Stop 128
aaatagcgttccttatgattttggc

SEQ ID NO: 79473 - DNA, 25 bp, Artificial
  probe
  misc_feature (1)..(25): SEQ ID NO: 4917; WAN024BFB_at; Start 108; Stop 132
agcgttccttatgattttggcaacc

SEQ ID NO: 79474 - DNA, 25 bp, Artificial
  probe
  misc_feature (1)..(25): SEQ ID NO: 4917; WAN024BFB_at; Start 119; Stop 143
tgattttggcaacctggattaaagc

SEQ ID NO: 79475 - DNA, 25 bp, Artificial
  probe
  misc_feature (1)..(25): SEQ ID NO: 4917; WAN024BFB_at; Start 111; Stop 135
gttccttatgattttggcaacctgg

SEQ ID NO: 79476 - DNA, 25 bp, Artificial
  probe
  misc_feature (1)..(25): SEQ ID NO: 4917; WAN024BFB_at; Start 77; Stop 101
cttcaaaactagatgatttgctatt

SEQ ID NO: 79477 - DNA, 25 bp, Artificial
  probe
  misc_feature (1)..(25): SEQ ID NO: 4917; WAN024BFB_at; Start 109; Stop 133
gcgttccttatgattttggcaacct

SEQ ID NO: 79478 - DNA, 25 bp, Artificial
  probe
  misc_feature (1)..(25): SEQ ID NO: 4917; WAN024BFB_at; Start 107; Stop 131
tagcgttccttatgattttggcaac

SEQ ID NO: 79479 - DNA, 25 bp, Artificial
  probe
  misc_feature (1)..(25): SEQ ID NO: 4917; WAN024BFB_at; Start 110; Stop 134
cgttccttatgattttggcaacctg

SEQ ID NO: 79480 - DNA, 25 bp, Artificial
  probe
  misc_feature (1)..(25): SEQ ID NO: 4917; WAN024BFB_at; Start 67; Stop 91
ttttctcctacttcaaaactagatg

SEQ ID NO: 79481 - DNA, 25 bp, Artificial
  probe
  misc_feature (1)..(25): SEQ ID NO: 4917; WAN024BFB_at; Start 97; Stop 121
ctatttaaaatagcgttccttatga

SEQ ID NO: 79482 - DNA, 25 bp, Artificial
  probe
  misc_feature (1)..(25): SEQ ID NO: 4917; WAN024BFB_at; Start 106; Stop 130
atagcgttccttatgattttggcaa

SEQ ID NO: 79483 - DNA, 25 bp, Artificial
  probe
  misc_feature (1)..(25): SEQ ID NO: 4917; WAN024BFB_at; Start 63; Stop 87
tgagttttctcctacttcaaaacta

SEQ ID NO: 79484 - DNA, 25 bp, Artificial
  probe
  misc_feature (1)..(25): SEQ ID NO: 4917; WAN024BFB_at; Start 72; Stop 96
tcctacttcaaaactagatgatttg

SEQ ID NO: 79485 - DNA, 25 bp, Artificial
  probe
  misc_feature (1)..(25): SEQ ID NO: 4917; WAN024BFB_at; Start 116; Stop 140
ttatgattttggcaacctggattaa

SEQ ID NO: 79486 - DNA, 25 bp, Artificial
  probe
  misc_feature (1)..(25): SEQ ID NO: 4917; WAN024BFB_at; Start 105; Stop 129
aatagcgttccttatgattttggca

SEQ ID NO: 79487 - DNA, 25 bp, Artificial
  probe
  misc_feature (1)..(25): SEQ ID NO: 4917; WAN024BFB_at; Start 68; Stop 92
tttctcctacttcaaaactagatga

SEQ ID NO: 79488 - DNA, 25 bp, Artificial
  probe
  misc_feature (1)..(25): SEQ ID NO: 3581; WAN024BFC_s_at; Start 148; Stop 172
ttgcttggcgcagggtgtttcgcgt

SEQ ID NO: 79489 - DNA, 25 bp, Artificial
  probe
  misc_feature (1)..(25): SEQ ID NO: 3581; WAN024BFC_s_at; Start 149; Stop 173
tgcttggcgcagggtgtttcgcgtg

SEQ ID NO: 79490 - DNA, 25 bp, Artificial
  probe
  misc_feature (1)..(25): SEQ ID NO: 3581; WAN024BFC_s_at; Start 143; Stop 167
acaccttgcttggcgcagggtgttt

SEQ ID NO: 79491 - DNA, 25 bp, Artificial
  probe
  misc_feature (1)..(25): SEQ ID NO: 3581; WAN024BFC_s_at; Start 144; Stop 168
caccttgcttggcgcagggtgtttc

SEQ ID NO: 79492 - DNA, 25 bp, Artificial
  probe
  misc_feature (1)..(25): SEQ ID NO: 3581; WAN024BFC_s_at; Start 145; Stop 169
accttgcttggcgcagggtgtttcg

SEQ ID NO: 79493 - DNA, 25 bp, Artificial
  probe
  misc_feature (1)..(25): SEQ ID NO: 3581; WAN024BFC_s_at; Start 150; Stop 174
gcttggcgcagggtgtttcgcgtga

SEQ ID NO: 79494 - DNA, 25 bp, Artificial
  probe
  misc_feature (1)..(25): SEQ ID NO: 3581; WAN024BFC_s_at; Start 142; Stop 166
aacaccttgcttggcgcagggtgtt

SEQ ID NO: 79495 - DNA, 25 bp, Artificial
  probe
  misc_feature (1)..(25): SEQ ID NO: 3581; WAN024BFC_s_at; Start 147; Stop 171
cttgcttggcgcagggtgtttcgcg

SEQ ID NO: 79496 - DNA, 25 bp, Artificial
  probe
  misc_feature (1)..(25): SEQ ID NO: 3581; WAN024BFC_s_at; Start 146; Stop 170
ccttgcttggcgcagggtgtttcgc

SEQ ID NO: 79497 - DNA, 25 bp, Artificial
  probe
  misc_feature (1)..(25): SEQ ID NO: 971; WAN024BFD_at; Start 228; Stop 252
taaagatagagtttctcttgaatac

SEQ ID NO: 79498 - DNA, 25 bp, Artificial
  probe
  misc_feature (1)..(25): SEQ ID NO: 971; WAN024BFD_at; Start 227; Stop 251
ctaaagatagagtttctcttgaata

SEQ ID NO: 79499 - DNA, 25 bp, Artificial
  probe
  misc_feature (1)..(25): SEQ ID NO: 971; WAN024BFD_at; Start 226; Stop 250
actaaagatagagtttctcttgaat

SEQ ID NO: 79500 - DNA, 25 bp, Artificial
  probe
  misc_feature (1)..(25): SEQ ID NO: 2518; WAN024BFE_at; Start 409; Stop 433
cccgccatgctatctggtggacaaa

SEQ ID NO: 79501 - DNA, 25 bp, Artificial
  probe
  misc_feature (1)..(25): SEQ ID NO: 2518; WAN024BFE_at; Start 459; Stop 483
tcttgctatgcatccggaactcctc

SEQ ID NO: 79502 - DNA, 25 bp, Artificial
  probe
  misc_feature (1)..(25): SEQ ID NO: 2518; WAN024BFE_at; Start 673; Stop 697
gataacttttttgacaatccaagcg

SEQ ID NO: 79503 - DNA, 25 bp, Artificial
  probe
  misc_feature (1)..(25): SEQ ID NO: 2518; WAN024BFE_at; Start 396; Stop 420
gaaagattcctatcccgccatgcta

SEQ ID NO: 79504 - DNA, 25 bp, Artificial
  probe
  misc_feature (1)..(25): SEQ ID NO: 2518; WAN024BFE_at; Start 26; Stop 50
tcgaaaaatattacggagactacca

SEQ ID NO: 79505 - DNA, 25 bp, Artificial
  probe
  misc_feature (1)..(25): SEQ ID NO: 2518; WAN024BFE_at; Start 623; Stop 647
gcattatctttatggccgacggaga

SEQ ID NO: 79506 - DNA, 25 bp, Artificial
  probe
  misc_feature (1)..(25): SEQ ID NO: 2518; WAN024BFE_at; Start 589; Stop 613
cacgaaatgggctttgctcgagagg

SEQ ID NO: 79507 - DNA, 25 bp, Artificial
  probe
  misc_feature (1)..(25): SEQ ID NO: 2518; WAN024BFE_at; Start 391; Stop 415
gacaagaaagattcctatcccgcca

SEQ ID NO: 79508 - DNA, 25 bp, Artificial
  probe
  misc_feature (1)..(25): SEQ ID NO: 2518; WAN024BFE_at; Start 511; Stop 535
gatcctgagactatcggagatgttc

SEQ ID NO: 79509 - DNA, 25 bp, Artificial
  probe
  misc_feature (1)..(25): SEQ ID NO: 2518; WAN024BFE_at; Start 693; Stop 717
aagcgaacctcgtgcccaacaattc

SEQ ID NO: 79510 - DNA, 25 bp, Artificial
  probe
  misc_feature (1)..(25): SEQ ID NO: 2518; WAN024BFE_at; Start 717; Stop 741
cctcagcaaaattatcaaccacgaa

SEQ ID NO: 79511 - DNA, 25 bp, Artificial
  probe
  misc_feature (1)..(25): SEQ ID NO: 2518; WAN024BFE_at; Start 738; Stop 762
cgaaagtgacaaagtcaaataacta

SEQ ID NO: 79512 - DNA, 25 bp, Artificial
  probe
  misc_feature (1)..(25): SEQ ID NO: 2518; WAN024BFE_at; Start 575; Stop 599
tgatcatcgttacccacgaaatggg

SEQ ID NO: 79513 - DNA, 25 bp, Artificial
  probe
  misc_feature (1)..(25): SEQ ID NO: 2518; WAN024BFE_at; Start 729; Stop 753
tatcaaccacgaaagtgacaaagtc

SEQ ID NO: 79514 - DNA, 25 bp, Artificial
  probe
  misc_feature (1)..(25): SEQ ID NO: 2518; WAN024BFE_at; Start 474; Stop 498
ggaactcctcctctttgatgaacca

SEQ ID NO: 79515 - DNA, 25 bp, Artificial
  probe
  misc_feature (1)..(25): SEQ ID NO: 2518; WAN024BFE_at; Start 446; Stop 470
ccatcgctcgtggtcttgctatgca

SEQ ID NO: 79516 - DNA, 25 bp, Artificial
  probe
  misc_feature (1)..(25): SEQ ID NO: 2518; WAN024BFE_at; Start 220; Stop 244
gatttggtacctcttcgcaaggaag

SEQ ID NO: 79517 - DNA, 25 bp, Artificial
  probe
  misc_feature (1)..(25): SEQ ID NO: 2518; WAN024BFE_at; Start 423; Stop 447
tggtggacaaaaacagcggatcgcc

SEQ ID NO: 79518 - DNA, 25 bp, Artificial
  probe
  misc_feature (1)..(25): SEQ ID NO: 2518; WAN024BFE_at; Start 682; Stop 706
tttgacaatccaagcgaacctcgtg

SEQ ID NO: 79519 - DNA, 25 bp, Artificial
  probe
  misc_feature (1)..(25): SEQ ID NO: 2518; WAN024BFE_at; Start 193; Stop 217
caccaagttgctggtgccagccaga

SEQ ID NO: 79520 - DNA, 25 bp, Artificial
  probe
  misc_feature (1)..(25): SEQ ID NO: 2518; WAN024BFE_at; Start 561; Stop 585
tgatgggatgaacatgatcatcgtt

SEQ ID NO: 79521 - DNA, 25 bp, Artificial
  probe
  misc_feature (1)..(25): SEQ ID NO: 2518; WAN024BFE_at; Start 65; Stop 89
tcaatctccgttttgaaaaaggaca

SEQ ID NO: 79522 - DNA, 25 bp, Artificial
  probe
  misc_feature (1)..(25): SEQ ID NO: 2518; WAN024BFE_at; Start 649; Stop 673
gttttagtagatacgacagatgtcg

SEQ ID NO: 79523 - DNA, 25 bp, Artificial
  probe
  misc_feature (1)..(25): SEQ ID NO: 2518; WAN024BFE_at; Start 524; Stop 548
tcggagatgttctagcagttatgca

SEQ ID NO: 79524 - DNA, 25 bp, Artificial
  probe
  misc_feature (1)..(25): SEQ ID NO: 2518; WAN024BFE_at; Start 233; Stop 257
ttcgcaaggaagtcggcatggtttt

SEQ ID NO: 79525 - DNA, 25 bp, Artificial
  probe
  misc_feature (1)..(25): SEQ ID NO: 2518; WAN024BFE_at; Start 207; Stop 231
tgccagccagaaagatttggtacct

SEQ ID NO: 79526 - DNA, 25 bp, Artificial
  probe
  misc_feature (1)..(25): SEQ ID NO: 2518; WAN024BFE_at; Start 633; Stop 657
tatggccgacggagaagttttagta

SEQ ID NO: 79527 - DNA, 25 bp, Artificial
  probe
  misc_feature (1)..(25): SEQ ID NO: 2518; WAN024BFE_at; Start 615; Stop 639
tgcggaccgcattatctttatggcc

SEQ ID NO: 79528 - DNA, 25 bp, Artificial
  probe
  misc_feature (1)..(25): SEQ ID NO: 2518; WAN024BFE_at; Start 535; Stop 559
ctagcagttatgcagaaactggcgc

SEQ ID NO: 79529 - DNA, 25 bp, Artificial
  probe
  misc_feature (1)..(25): SEQ ID NO: 2518; WAN024BFE_at; Start 601; Stop 625
tttgctcgagaggttgcggaccgca

SEQ ID NO: 79530 - DNA, 25 bp, Artificial
  probe
  misc_feature (1)..(25): SEQ ID NO: 2518; WAN024BFE_at; Start 662; Stop 686
cgacagatgtcgataacttttttga

SEQ ID NO: 79531 - DNA, 25 bp, Artificial
  probe
  misc_feature (1)..(25): SEQ ID NO: 2518; WAN024BFE_at; Start 702; Stop 726
tcgtgcccaacaattcctcagcaaa

SEQ ID NO: 79532 - DNA, 25 bp, Artificial
  probe
  misc_feature (1)..(25): SEQ ID NO: 2518; WAN024BFE_at; Start 497; Stop 521
caacatctgctcttgatcctgagac

SEQ ID NO: 79533 - DNA, 25 bp, Artificial
  probe
  misc_feature (1)..(25): SEQ ID NO: 2518; WAN024BFE_at; Start 431; Stop 455
aaaaacagcggatcgccatcgctcg

SEQ ID NO: 79534 - DNA, 25 bp, Artificial
  probe
  misc_feature (1)..(25): SEQ ID NO: 1612; WAN024BFF_at; Start 254; Stop 278
tgcgtcgtaaacgtcaagatatcgg

SEQ ID NO: 79535 - DNA, 25 bp, Artificial
  probe
  misc_feature (1)..(25): SEQ ID NO: 1612; WAN024BFF_at; Start 401; Stop 425
acttggttggtttggcagatcgtgc

SEQ ID NO: 79536 - DNA, 25 bp, Artificial
  probe
  misc_feature (1)..(25): SEQ ID NO: 1612; WAN024BFF_at; Start 296; Stop 320
ttaacctgatgagccaaaagacagc

SEQ ID NO: 79537 - DNA, 25 bp, Artificial
  probe
  misc_feature (1)..(25): SEQ ID NO: 1612; WAN024BFF_at; Start 25; Stop 49
gatcagatcgatgtgacttttcacc

SEQ ID NO: 79538 - DNA, 25 bp, Artificial
  probe
  misc_feature (1)..(25): SEQ ID NO: 1612; WAN024BFF_at; Start 104; Stop 128
gggatatctacggaatcgttggata

SEQ ID NO: 79539 - DNA, 25 bp, Artificial
  probe
  misc_feature (1)..(25): SEQ ID NO: 1612; WAN024BFF_at; Start 81; Stop 105
tgtgaccattcacatccaagaaggg

SEQ ID NO: 79540 - DNA, 25 bp, Artificial
  probe
  misc_feature (1)..(25): SEQ ID NO: 1612; WAN024BFF_at; Start 216; Stop 240
gatttttgacggcaaggtgaccttg

SEQ ID NO: 79541 - DNA, 25 bp, Artificial
  probe
  misc_feature (1)..(25): SEQ ID NO: 1612; WAN024BFF_at; Start 415; Stop 439
gcagatcgtgctgaaaactaccctt

SEQ ID NO: 79542 - DNA, 25 bp, Artificial
  probe
  misc_feature (1)..(25): SEQ ID NO: 1612; WAN024BFF_at; Start 282; Stop 306
gattttccagcattttaacctgatg

SEQ ID NO: 79543 - DNA, 25 bp, Artificial
  probe
  misc_feature (1)..(25): SEQ ID NO: 1612; WAN024BFF_at; Start 386; Stop 410
tagctaagttgttggacttggttgg

SEQ ID NO: 79544 - DNA, 25 bp, Artificial
  probe
  misc_feature (1)..(25): SEQ ID NO: 1612; WAN024BFF_at; Start 358; Stop 382
ctcagcaaggaagaaaagaaggcta

SEQ ID NO: 79545 - DNA, 25 bp, Artificial
  probe
  misc_feature (1)..(25): SEQ ID NO: 1612; WAN024BFF_at; Start 54; Stop 78
gaagagaaccatcacagcggttaag

SEQ ID NO: 79546 - DNA, 25 bp, Artificial
  probe
  misc_feature (1)..(25): SEQ ID NO: 1612; WAN024BFF_at; Start 308; Stop 332
gccaaaagacagcagaggagaatgt

SEQ ID NO: 79547 - DNA, 25 bp, Artificial
  probe
  misc_feature (1)..(25): SEQ ID NO: 1612; WAN024BFF_at; Start 510; Stop 534
gatttcagacgagtcaacttctgcc

SEQ ID NO: 79548 - DNA, 25 bp, Artificial
  probe
  misc_feature (1)..(25): SEQ ID NO: 1612; WAN024BFF_at; Start 1014; Stop 1038
cattcgtcaagcaggtgtacaacta

SEQ ID NO: 79549 - DNA, 25 bp, Artificial
  probe
  misc_feature (1)..(25): SEQ ID NO: 1612; WAN024BFF_at; Start 173; Stop 197
tgcaaaaaccatctgcagggaaaat

SEQ ID NO: 79550 - DNA, 25 bp, Artificial
  probe
  misc_feature (1)..(25): SEQ ID NO: 1612; WAN024BFF_at; Start 188; Stop 212
cagggaaaattaccattgacgacga

SEQ ID NO: 79551 - DNA, 25 bp, Artificial
  probe
  misc_feature (1)..(25): SEQ ID NO: 1612; WAN024BFF_at; Start 446; Stop 470
tatctggagggcaaaaacagcgtgt

SEQ ID NO: 79552 - DNA, 25 bp, Artificial
  probe
  misc_feature (1)..(25): SEQ ID NO: 1612; WAN024BFF_at; Start 378; Stop 402
ggctaaagtagctaagttgttggac

SEQ ID NO: 79553 - DNA, 25 bp, Artificial
  probe
  misc_feature (1)..(25): SEQ ID NO: 1612; WAN024BFF_at; Start 477; Stop 501
tgcgcgtgccttggccaatgatcca

SEQ ID NO: 79554 - DNA, 25 bp, Artificial
  probe
  misc_feature (1)..(25): SEQ ID NO: 1612; WAN024BFF_at; Start 463; Stop 487
cagcgtgtggcaattgcgcgtgcct

SEQ ID NO: 79555 - DNA, 25 bp, Artificial
  probe
  misc_feature (1)..(25): SEQ ID NO: 1612; WAN024BFF_at; Start 320; Stop 344
cagaggagaatgtagcctttgccct

SEQ ID NO: 79556 - DNA, 25 bp, Artificial
  probe
  misc_feature (1)..(25): SEQ ID NO: 1612; WAN024BFF_at; Start 38; Stop 62
tgacttttcaccaaaagaagagaac

SEQ ID NO: 79557 - DNA, 25 bp, Artificial
  probe
  misc_feature (1)..(25): SEQ ID NO: 1612; WAN024BFF_at; Start 227; Stop 251
gcaaggtgaccttgacggcagagca

SEQ ID NO: 79558 - DNA, 25 bp, Artificial
  probe
  misc_feature (1)..(25): SEQ ID NO: 1612; WAN024BFF_at; Start 245; Stop 269
cagagcagttgcgtcgtaaacgtca

SEQ ID NO: 79559 - DNA, 25 bp, Artificial
  probe
  misc_feature (1)..(25): SEQ ID NO: 1612; WAN024BFF_at; Start 430; Stop 454
aactacccttcacaactatctggag

SEQ ID NO: 79560 - DNA, 25 bp, Artificial
  probe
  misc_feature (1)..(25): SEQ ID NO: 1612; WAN024BFF_at; Start 234; Stop 258
gaccttgacggcagagcagttgcgt

SEQ ID NO: 79561 - DNA, 25 bp, Artificial
  probe
  misc_feature (1)..(25): SEQ ID NO: 1612; WAN024BFF_at; Start 68; Stop 92
cagcggttaaggatgtgaccattca

SEQ ID NO: 79562 - DNA, 25 bp, Artificial
  probe
  misc_feature (1)..(25): SEQ ID NO: 1612; WAN024BFF_at; Start 457; Stop 481
caaaaacagcgtgtggcaattgcgc

SEQ ID NO: 79563 - DNA, 25 bp, Artificial
  probe
  misc_feature (1)..(25): SEQ ID NO: 1612; WAN024BFF_at; Start 116; Stop 140
gaatcgttggatattctggagcagg

SEQ ID NO: 79564 - DNA, 25 bp, Artificial
  probe
  misc_feature (1)..(25): SEQ ID NO: 1612; WAN024BFF_at; Start 515; Stop 539
cagacgagtcaacttctgcccttga

SEQ ID NO: 79565 - DNA, 25 bp, Artificial
  probe
  misc_feature (1)..(25): SEQ ID NO: 1612; WAN024BFF_at; Start 205; Stop 229
gacgacgatgtgatttttgacggca

SEQ ID NO: 79566 - DNA, 25 bp, Artificial
  probe
  misc_feature (1)..(25): SEQ ID NO: 1612; WAN024BFF_at; Start 331; Stop 355
gtagcctttgcccttaaacactctg

SEQ ID NO: 79567 - DNA, 25 bp, Artificial
  probe
  misc_feature (1)..(25): SEQ ID NO: 1612; WAN024BFF_at; Start 10; Stop 34
gatattatcaagttagatcagatcg

SEQ ID NO: 79568 - DNA, 25 bp, Artificial
  probe
  misc_feature (1)..(25): SEQ ID NO: 5578; WAN024BFG_at; Start 94; Stop 118
agatttggtgtggatgtttctggtc

SEQ ID NO: 79569 - DNA, 25 bp, Artificial
  probe
  misc_feature (1)..(25): SEQ ID NO: 5578; WAN024BFG_at; Start 64; Stop 88
caaggacaaagcttcaaacagcttt

SEQ ID NO: 79570 - DNA, 25 bp, Artificial
  probe
  misc_feature (1)..(25): SEQ ID NO: 5578; WAN024BFG_at; Start 60; Stop 84
aaagcaaggacaaagcttcaaacag

SEQ ID NO: 79571 - DNA, 25 bp, Artificial
  probe
  misc_feature (1)..(25): SEQ ID NO: 5578; WAN024BFG_at; Start 61; Stop 85
aagcaaggacaaagcttcaaacagc

SEQ ID NO: 79572 - DNA, 25 bp, Artificial
  probe
  misc_feature (1)..(25): SEQ ID NO: 5578; WAN024BFG_at; Start 101; Stop 125
gtgtggatgtttctggtctaaagtc

SEQ ID NO: 79573 - DNA, 25 bp, Artificial
  probe
  misc_feature (1)..(25): SEQ ID NO: 5578; WAN024BFG_at; Start 103; Stop 127
gtggatgtttctggtctaaagtcat

SEQ ID NO: 79574 - DNA, 25 bp, Artificial
  probe
  misc_feature (1)..(25): SEQ ID NO: 5578; WAN024BFG_at; Start 68; Stop 92
gacaaagcttcaaacagctttcaaa

SEQ ID NO: 79575 - DNA, 25 bp, Artificial
  probe
  misc_feature (1)..(25): SEQ ID NO: 5578; WAN024BFG_at; Start 95; Stop 119
gatttggtgtggatgtttctggtct

SEQ ID NO: 79576 - DNA, 25 bp, Artificial
  probe
  misc_feature (1)..(25): SEQ ID NO: 5578; WAN024BFG_at; Start 47; Stop 71
tctatgaactaagaaagcaaggaca

SEQ ID NO: 79577 - DNA, 25 bp, Artificial
  probe
  misc_feature (1)..(25): SEQ ID NO: 5578; WAN024BFG_at; Start 55; Stop 79
ctaagaaagcaaggacaaagcttca

SEQ ID NO: 79578 - DNA, 25 bp, Artificial
  probe
  misc_feature (1)..(25): SEQ ID NO: 5578; WAN024BFG_at; Start 78; Stop 102
caaacagctttcaaaaagatttggt

SEQ ID NO: 79579 - DNA, 25 bp, Artificial
  probe
  misc_feature (1)..(25): SEQ ID NO: 5578; WAN024BFG_at; Start 49; Stop 73
tatgaactaagaaagcaaggacaaa

SEQ ID NO: 79580 - DNA, 25 bp, Artificial
  probe
  misc_feature (1)..(25): SEQ ID NO: 5578; WAN024BFG_at; Start 52; Stop 76
gaactaagaaagcaaggacaaagct

SEQ ID NO: 79581 - DNA, 25 bp, Artificial
  probe
  misc_feature (1)..(25): SEQ ID NO: 5578; WAN024BFG_at; Start 58; Stop 82
agaaagcaaggacaaagcttcaaac

SEQ ID NO: 79582 - DNA, 25 bp, Artificial
  probe
  misc_feature (1)..(25): SEQ ID NO: 5578; WAN024BFG_at; Start 48; Stop 72
ctatgaactaagaaagcaaggacaa

SEQ ID NO: 79583 - DNA, 25 bp, Artificial
  probe
  misc_feature (1)..(25): SEQ ID NO: 5578; WAN024BFG_at; Start 67; Stop 91
ggacaaagcttcaaacagctttcaa

SEQ ID NO: 79584 - DNA, 25 bp, Artificial
  probe
  misc_feature (1)..(25): SEQ ID NO: 5578; WAN024BFG_at; Start 59; Stop 83
gaaagcaaggacaaagcttcaaaca

SEQ ID NO: 79585 - DNA, 25 bp, Artificial
  probe
  misc_feature (1)..(25): SEQ ID NO: 5578; WAN024BFG_at; Start 100; Stop 124
ggtgtggatgtttctggtctaaagt

SEQ ID NO: 79586 - DNA, 25 bp, Artificial
  probe
  misc_feature (1)..(25): SEQ ID NO: 5578; WAN024BFG_at; Start 102; Stop 126
tgtggatgtttctggtctaaagtca

SEQ ID NO: 79587 - DNA, 25 bp, Artificial
  probe
  misc_feature (1)..(25): SEQ ID NO: 5578; WAN024BFG_at; Start 63; Stop 87
gcaaggacaaagcttcaaacagctt

SEQ ID NO: 79588 - DNA, 25 bp, Artificial
  probe
  misc_feature (1)..(25): SEQ ID NO: 5578; WAN024BFG_at; Start 79; Stop 103
aaacagctttcaaaaagatttggtg

SEQ ID NO: 79589 - DNA, 25 bp, Artificial
  probe
  misc_feature (1)..(25): SEQ ID NO: 5578; WAN024BFG_at; Start 51; Stop 75
tgaactaagaaagcaaggacaaagc

SEQ ID NO: 79590 - DNA, 25 bp, Artificial
  probe
  misc_feature (1)..(25): SEQ ID NO: 5578; WAN024BFG_at; Start 65; Stop 89
aaggacaaagcttcaaacagctttc

SEQ ID NO: 79591 - DNA, 25 bp, Artificial
  probe
  misc_feature (1)..(25): SEQ ID NO: 5578; WAN024BFG_at; Start 82; Stop 106
cagctttcaaaaagatttggtgtgg

SEQ ID NO: 79592 - DNA, 25 bp, Artificial
  probe
  misc_feature (1)..(25): SEQ ID NO: 5578; WAN024BFG_at; Start 62; Stop 86
agcaaggacaaagcttcaaacagct

SEQ ID NO: 79593 - DNA, 25 bp, Artificial
  probe
  misc_feature (1)..(25): SEQ ID NO: 5578; WAN024BFG_at; Start 77; Stop 101
tcaaacagctttcaaaaagatttgg

SEQ ID NO: 79594 - DNA, 25 bp, Artificial
  probe
  misc_feature (1)..(25): SEQ ID NO: 5578; WAN024BFG_at; Start 54; Stop 78
actaagaaagcaaggacaaagcttc

SEQ ID NO: 79595 - DNA, 25 bp, Artificial
  probe
  misc_feature (1)..(25): SEQ ID NO: 5578; WAN024BFG_at; Start 92; Stop 116
aaagatttggtgtggatgtttctgg

SEQ ID NO: 79596 - DNA, 25 bp, Artificial
  probe
  misc_feature (1)..(25): SEQ ID NO: 5578; WAN024BFG_at; Start 97; Stop 121
tttggtgtggatgtttctggtctaa

SEQ ID NO: 79597 - DNA, 25 bp, Artificial
  probe
  misc_feature (1)..(25): SEQ ID NO: 5578; WAN024BFG_at; Start 56; Stop 80
taagaaagcaaggacaaagcttcaa

SEQ ID NO: 79598 - DNA, 25 bp, Artificial
  probe
  misc_feature (1)..(25): SEQ ID NO: 5578; WAN024BFG_at; Start 99; Stop 123
tggtgtggatgtttctggtctaaag

SEQ ID NO: 79599 - DNA, 25 bp, Artificial
  probe
  misc_feature (1)..(25): SEQ ID NO: 5578; WAN024BFG_at; Start 89; Stop 113
caaaaagatttggtgtggatgtttc

SEQ ID NO: 79600 - DNA, 25 bp, Artificial
  probe
  misc_feature (1)..(25): SEQ ID NO: 5578; WAN024BFG_at; Start 74; Stop 98
gcttcaaacagctttcaaaaagatt

SEQ ID NO: 79601 - DNA, 25 bp, Artificial
  probe
  misc_feature (1)..(25): SEQ ID NO: 5578; WAN024BFG_at; Start 83; Stop 107
agctttcaaaaagatttggtgtgga

SEQ ID NO: 79602 - DNA, 25 bp, Artificial
  probe
  misc_feature (1)..(25): SEQ ID NO: 970; WAN024BFH_at; Start 16; Stop 40
agtgatcggatggttgtcatttcca

SEQ ID NO: 79603 - DNA, 25 bp, Artificial
  probe
  misc_feature (1)..(25): SEQ ID NO: 970; WAN024BFH_at; Start 433; Stop 457
gcaaatgcagttgccaatgtcctca

SEQ ID NO: 79604 - DNA, 25 bp, Artificial
  probe
  misc_feature (1)..(25): SEQ ID NO: 970; WAN024BFH_at; Start 541; Stop 565
ggtgaccgtatcgagaaaatgttcc

SEQ ID NO: 79605 - DNA, 25 bp, Artificial
  probe
  misc_feature (1)..(25): SEQ ID NO: 970; WAN024BFH_at; Start 565; Stop 589
ctttcaaaacgtagtcttaaggcag

SEQ ID NO: 79606 - DNA, 25 bp, Artificial
  probe
  misc_feature (1)..(25): SEQ ID NO: 970; WAN024BFH_at; Start 687; Stop 711
tgtagcggtctttgcggacaatgcc

SEQ ID NO: 79607 - DNA, 25 bp, Artificial
  probe
  misc_feature (1)..(25): SEQ ID NO: 970; WAN024BFH_at; Start 495; Stop 519
taccgaaggttcaactgttagcgtc

SEQ ID NO: 79608 - DNA, 25 bp, Artificial
  probe
  misc_feature (1)..(25): SEQ ID NO: 970; WAN024BFH_at; Start 375; Stop 399
ctttatggaccaaaaaattgacgcg

SEQ ID NO: 79609 - DNA, 25 bp, Artificial
  probe
  misc_feature (1)..(25): SEQ ID NO: 970; WAN024BFH_at; Start 141; Stop 165
caaacgcgcctttgaggaaattgaa

SEQ ID NO: 79610 - DNA, 25 bp, Artificial
  probe
  misc_feature (1)..(25): SEQ ID NO: 970; WAN024BFH_at; Start 293; Stop 317
tgccaggtggttatatctatctgtc

SEQ ID NO: 79611 - DNA, 25 bp, Artificial
  probe
  misc_feature (1)..(25): SEQ ID NO: 970; WAN024BFH_at; Start 211; Stop 235
ttcacaccgtctatttcgagtcagg

SEQ ID NO: 79612 - DNA, 25 bp, Artificial
  probe
  misc_feature (1)..(25): SEQ ID NO: 970; WAN024BFH_at; Start 476; Stop 500
tgcgccgtgacctgaaaattaccga

SEQ ID NO: 79613 - DNA, 25 bp, Artificial
  probe
  misc_feature (1)..(25): SEQ ID NO: 970; WAN024BFH_at; Start 355; Stop 379
ggtcgtattattgccaaaagcttta

SEQ ID NO: 79614 - DNA, 25 bp, Artificial
  probe
  misc_feature (1)..(25): SEQ ID NO: 970; WAN024BFH_at; Start 724; Stop 748
gaaaagcagtttgactacaagtcac

SEQ ID NO: 79615 - DNA, 25 bp, Artificial
  probe
  misc_feature (1)..(25): SEQ ID NO: 970; WAN024BFH_at; Start 260; Stop 284
tgcgtaccaagttgtcagaaagtga

SEQ ID NO: 79616 - DNA, 25 bp, Artificial
  probe
  misc_feature (1)..(25): SEQ ID NO: 970; WAN024BFH_at; Start 389; Stop 413
aaattgacgcggttatgaccgtagc

SEQ ID NO: 79617 - DNA, 25 bp, Artificial
  probe
  misc_feature (1)..(25): SEQ ID NO: 970; WAN024BFH_at; Start 327; Stop 351
tagcacaccagccatcttgaaaaat

SEQ ID NO: 79618 - DNA, 25 bp, Artificial
  probe
  misc_feature (1)..(25): SEQ ID NO: 970; WAN024BFH_at; Start 278; Stop 302
aaagtgaccgtatcttgccaggtgg

SEQ ID NO: 79619 - DNA, 25 bp, Artificial
  probe
  misc_feature (1)..(25): SEQ ID NO: 970; WAN024BFH_at; Start 702; Stop 726
ggacaatgcccaagaagaacgtgaa

SEQ ID NO: 79620 - DNA, 25 bp, Artificial
  probe
  misc_feature (1)..(25): SEQ ID NO: 970; WAN024BFH_at; Start 523; Stop 547
tatgtttcaggttcaagtggtgacc

SEQ ID NO: 79621 - DNA, 25 bp, Artificial
  probe
  misc_feature (1)..(25): SEQ ID NO: 970; WAN024BFH_at; Start 84; Stop 108
ttttgctgaaaagtatgagtctgct

SEQ ID NO: 79622 - DNA, 25 bp, Artificial
  probe
  misc_feature (1)..(25): SEQ ID NO: 970; WAN024BFH_at; Start 417; Stop 441
taagggtgtgccacttgcaaatgca

SEQ ID NO: 79623 - DNA, 25 bp, Artificial
  probe
  misc_feature (1)..(25): SEQ ID NO: 970; WAN024BFH_at; Start 243; Stop 267
ggaaatggttgaagacttgcgtacc

SEQ ID NO: 79624 - DNA, 25 bp, Artificial
  probe
  misc_feature (1)..(25): SEQ ID NO: 970; WAN024BFH_at; Start 461; Stop 485
tctcttttgtcattgtgcgccgtga

SEQ ID NO: 79625 - DNA, 25 bp, Artificial
  probe
  misc_feature (1)..(25): SEQ ID NO: 970; WAN024BFH_at; Start 786; Stop 810
catcgatgttgaggttggcaatatc

SEQ ID NO: 79626 - DNA, 25 bp, Artificial
  probe
  misc_feature (1)..(25): SEQ ID NO: 970; WAN024BFH_at; Start 404; Stop 428
tgaccgtagcaactaagggtgtgcc

SEQ ID NO: 79627 - DNA, 25 bp, Artificial
  probe
  misc_feature (1)..(25): SEQ ID NO: 970; WAN024BFH_at; Start 310; Stop 334
tatctgtctgatttgcttagcacac

SEQ ID NO: 79628 - DNA, 25 bp, Artificial
  probe
  misc_feature (1)..(25): SEQ ID NO: 970; WAN024BFH_at; Start 100; Stop 124
gagtctgctaaatcatccatctcag

SEQ ID NO: 79629 - DNA, 25 bp, Artificial
  probe
  misc_feature (1)..(25): SEQ ID NO: 970; WAN024BFH_at; Start 127; Stop 151
gatatcgtcattatcaaacgcgcct

SEQ ID NO: 79630 - DNA, 25 bp, Artificial
  probe
  misc_feature (1)..(25): SEQ ID NO: 970; WAN024BFH_at; Start 226; Stop 250
tcgagtcaggatgctaaggaaatgg

SEQ ID NO: 79631 - DNA, 25 bp, Artificial
  probe
  misc_feature (1)..(25): SEQ ID NO: 970; WAN024BFH_at; Start 163; Stop 187
gaaatcggtcatatccagacagtga

SEQ ID NO: 79632 - DNA, 25 bp, Artificial
  probe
  misc_feature (1)..(25): SEQ ID NO: 970; WAN024BFH_at; Start 648; Stop 672
gattagtctcttgcgcgagttcgac

SEQ ID NO: 79633 - DNA, 25 bp, Artificial
  probe
  misc_feature (1)..(25): SEQ ID NO: 970; WAN024BFH_at; Start 510; Stop 534
tgttagcgtcaactatgtttcaggt

SEQ ID NO: 79634 - DNA, 25 bp, Artificial
  probe
  misc_feature (1)..(25): SEQ ID NO: 970; WAN024BFH_at; Start 192; Stop 216
ggctggcggaggtgtcatcttcaca

SEQ ID NO: 79635 - DNA, 25 bp, Artificial
  probe
  misc_feature (1)..(25): SEQ ID NO: 970; WAN024BFH_at; Start 771; Stop 795
tgtcaagaaccaagccatcgatgtt

SEQ ID NO: 79636 - DNA, 25 bp, Artificial
  probe
  misc_feature (1)..(25): SEQ ID NO: 5083; WAN024BFI_at; Start 25; Stop 49
tatcctatgacccttgaggaaaagg

SEQ ID NO: 79637 - DNA, 25 bp, Artificial
  probe
  misc_feature (1)..(25): SEQ ID NO: 5083; WAN024BFI_at; Start 424; Stop 448
acagcaaccattgaaacgcctgttg

SEQ ID NO: 79638 - DNA, 25 bp, Artificial
  probe
  misc_feature (1)..(25): SEQ ID NO: 5083; WAN024BFI_at; Start 264; Stop 288
cgaagtagcgattggtaaaacagtc

SEQ ID NO: 79639 - DNA, 25 bp, Artificial
  probe
  misc_feature (1)..(25): SEQ ID NO: 5083; WAN024BFI_at; Start 70; Stop 94
gaagaattgaaattggttcgtcgac

SEQ ID NO: 79640 - DNA, 25 bp, Artificial
  probe
  misc_feature (1)..(25): SEQ ID NO: 5083; WAN024BFI_at; Start 239; Stop 263
tcaatagcgacgcagttgcccagga

SEQ ID NO: 79641 - DNA, 25 bp, Artificial
  probe
  misc_feature (1)..(25): SEQ ID NO: 5083; WAN024BFI_at; Start 257; Stop 281
cccaggacgaagtagcgattggtaa

SEQ ID NO: 79642 - DNA, 25 bp, Artificial
  probe
  misc_feature (1)..(25): SEQ ID NO: 5083; WAN024BFI_at; Start 102; Stop 126
ggtagaacgcattaagattgcccgt

SEQ ID NO: 79643 - DNA, 25 bp, Artificial
  probe
  misc_feature (1)..(25): SEQ ID NO: 5083; WAN024BFI_at; Start 169; Stop 193
aaggatgaacaagcctttgtcgaag

SEQ ID NO: 79644 - DNA, 25 bp, Artificial
  probe
  misc_feature (1)..(25): SEQ ID NO: 5083; WAN024BFI_at; Start 452; Stop 476
gctatgatgtaaaaatcttgaaggt

SEQ ID NO: 79645 - DNA, 25 bp, Artificial
  probe
  misc_feature (1)..(25): SEQ ID NO: 5083; WAN024BFI_at; Start 113; Stop 137
ttaagattgcccgttcatacggtga

SEQ ID NO: 79646 - DNA, 25 bp, Artificial
  probe
  misc_feature (1)..(25): SEQ ID NO: 5083; WAN024BFI_at; Start 87; Stop 111
tcgtcgaccagaagtggtagaacgc

SEQ ID NO: 79647 - DNA, 25 bp, Artificial
  probe
  misc_feature (1)..(25): SEQ ID NO: 5083; WAN024BFI_at; Start 379; Stop 403
gaaagcccaattgggcaggccttga

SEQ ID NO: 79648 - DNA, 25 bp, Artificial
  probe
  misc_feature (1)..(25): SEQ ID NO: 5083; WAN024BFI_at; Start 208; Stop 232
ttagaaacaaaaatccgctatgctg

SEQ ID NO: 79649 - DNA, 25 bp, Artificial
  probe
  misc_feature (1)..(25): SEQ ID NO: 5083; WAN024BFI_at; Start 251; Stop 275
cagttgcccaggacgaagtagcgat

SEQ ID NO: 79650 - DNA, 25 bp, Artificial
  probe
  misc_feature (1)..(25): SEQ ID NO: 5083; WAN024BFI_at; Start 200; Stop 224
tctctagcttagaaacaaaaatccg

SEQ ID NO: 79651 - DNA, 25 bp, Artificial
  probe
  misc_feature (1)..(25): SEQ ID NO: 5083; WAN024BFI_at; Start 217; Stop 241
aaaatccgctatgctgaaatcgtca

SEQ ID NO: 79652 - DNA, 25 bp, Artificial
  probe
  misc_feature (1)..(25): SEQ ID NO: 5083; WAN024BFI_at; Start 226; Stop 250
tatgctgaaatcgtcaatagcgacg

SEQ ID NO: 79653 - DNA, 25 bp, Artificial
  probe
  misc_feature (1)..(25): SEQ ID NO: 5083; WAN024BFI_at; Start 436; Stop 460
gaaacgcctgttggtagctatgatg

SEQ ID NO: 79654 - DNA, 25 bp, Artificial
  probe
  misc_feature (1)..(25): SEQ ID NO: 5083; WAN024BFI_at; Start 290; Stop 314
ccatccaagaaattggtgaggacga

SEQ ID NO: 79655 - DNA, 25 bp, Artificial
  probe
  misc_feature (1)..(25): SEQ ID NO: 5083; WAN024BFI_at; Start 431; Stop 455
ccattgaaacgcctgttggtagcta

SEQ ID NO: 79656 - DNA, 25 bp, Artificial
  probe
  misc_feature (1)..(25): SEQ ID NO: 5083; WAN024BFI_at; Start 55; Stop 79
cttgaaaaagaattagaagaattga

SEQ ID NO: 79657 - DNA, 25 bp, Artificial
  probe
  misc_feature (1)..(25): SEQ ID NO: 5083; WAN024BFI_at; Start 269; Stop 293
tagcgattggtaaaacagtcaccat

SEQ ID NO: 79658 - DNA, 25 bp, Artificial
  probe
  misc_feature (1)..(25): SEQ ID NO: 5083; WAN024BFI_at; Start 374; Stop 398
caaatgaaagcccaattgggcaggc

SEQ ID NO: 79659 - DNA, 25 bp, Artificial
  probe
  misc_feature (1)..(25): SEQ ID NO: 5083; WAN024BFI_at; Start 303; Stop 327
tggtgaggacgaagaagaagtttat

SEQ ID NO: 79660 - DNA, 25 bp, Artificial
  probe
  misc_feature (1)..(25): SEQ ID NO: 5083; WAN024BFI_at; Start 326; Stop 350
atattatcgtaggttcagctggtgc

SEQ ID NO: 79661 - DNA, 25 bp, Artificial
  probe
  misc_feature (1)..(25): SEQ ID NO: 5083; WAN024BFI_at; Start 94; Stop 118
ccagaagtggtagaacgcattaaga

SEQ ID NO: 79662 - DNA, 25 bp, Artificial
  probe
  misc_feature (1)..(25): SEQ ID NO: 5083; WAN024BFI_at; Start 277; Stop 301
ggtaaaacagtcaccatccaagaaa

SEQ ID NO: 79663 - DNA, 25 bp, Artificial
  probe
  misc_feature (1)..(25): SEQ ID NO: 5083; WAN024BFI_at; Start 78; Stop 102
gaaattggttcgtcgaccagaagtg

SEQ ID NO: 79664 - DNA, 25 bp, Artificial
  probe
  misc_feature (1)..(25): SEQ ID NO: 5083; WAN024BFI_at; Start 440; Stop 464
cgcctgttggtagctatgatgtaaa

SEQ ID NO: 79665 - DNA, 25 bp, Artificial
  probe
  misc_feature (1)..(25): SEQ ID NO: 5083; WAN024BFI_at; Start 313; Stop 337
gaagaagaagtttatattatcgtag

SEQ ID NO: 79666 - DNA, 25 bp, Artificial
  probe
  misc_feature (1)..(25): SEQ ID NO: 5083; WAN024BFI_at; Start 143; Stop 167
cagaaaacagtgagtacgaagcagc

SEQ ID NO: 79667 - DNA, 25 bp, Artificial
  probe
  misc_feature (1)..(25): SEQ ID NO: 5083; WAN024BFI_at; Start 174; Stop 198
tgaacaagcctttgtcgaaggacaa

SEQ ID NO: 79668 - DNA, 25 bp, Artificial
  probe
  misc_feature (1)..(25): SEQ ID NO: 5083; WAN024BFI_at; Start 393; Stop 417
gcaggccttgattggcaagaaaaca

SEQ ID NO: 79669 - DNA, 25 bp, Artificial
  probe
  misc_feature (1)..(25): SEQ ID NO: 5083; WAN024BFI_at; Start 186; Stop 210
tgtcgaaggacaaatctctagctta

SEQ ID NO: 79670 - DNA, 25 bp, Artificial
  probe
  misc_feature (1)..(25): SEQ ID NO: 1549; WAN024BFJ_at; Start 141; Stop 165
tattgcgacgtcttcttatccagaa

SEQ ID NO: 79671 - DNA, 25 bp, Artificial
  probe
  misc_feature (1)..(25): SEQ ID NO: 1549; WAN024BFJ_at; Start 1168; Stop 1192
gccatccatgcttacctgagggaga

SEQ ID NO: 79672 - DNA, 25 bp, Artificial
  probe
  misc_feature (1)..(25): SEQ ID NO: 1549; WAN024BFJ_at; Start 647; Stop 671
gcttggcttccatgattgagagtca

SEQ ID NO: 79673 - DNA, 25 bp, Artificial
  probe
  misc_feature (1)..(25): SEQ ID NO: 1549; WAN024BFJ_at; Start 586; Stop 610
tctgtagagcgtaccttcgtcgagt

SEQ ID NO: 79674 - DNA, 25 bp, Artificial
  probe
  misc_feature (1)..(25): SEQ ID NO: 1549; WAN024BFJ_at; Start 172; Stop 196
aagcagatttttccgcgaacagccg

SEQ ID NO: 79675 - DNA, 25 bp, Artificial
  probe
  misc_feature (1)..(25): SEQ ID NO: 1549; WAN024BFJ_at; Start 128; Stop 152
tccacgatgtggatattgcgacgtc

SEQ ID NO: 79676 - DNA, 25 bp, Artificial
  probe
  misc_feature (1)..(25): SEQ ID NO: 1549; WAN024BFJ_at; Start 363; Stop 387
cgcctttgccttggatgagacagga

SEQ ID NO: 79677 - DNA, 25 bp, Artificial
  probe
  misc_feature (1)..(25): SEQ ID NO: 1549; WAN024BFJ_at; Start 326; Stop 350
tagaagaagacctcaaacgccgtga

SEQ ID NO: 79678 - DNA, 25 bp, Artificial
  probe
  misc_feature (1)..(25): SEQ ID NO: 1549; WAN024BFJ_at; Start 609; Stop 633
gtttgataaactcttgctggctcca

SEQ ID NO: 79679 - DNA, 25 bp, Artificial
  probe
  misc_feature (1)..(25): SEQ ID NO: 1549; WAN024BFJ_at; Start 157; Stop 181
tatccagaagagaccaagcagattt

SEQ ID NO: 79680 - DNA, 25 bp, Artificial
  probe
  misc_feature (1)..(25): SEQ ID NO: 1549; WAN024BFJ_at; Start 1118; Stop 1142
cagagattgagtttgccattgtcga

SEQ ID NO: 79681 - DNA, 25 bp, Artificial
  probe
  misc_feature (1)..(25): SEQ ID NO: 1549; WAN024BFJ_at; Start 949; Stop 973
caggctgaaaatcttcgtcaagctc

SEQ ID NO: 79682 - DNA, 25 bp, Artificial
  probe
  misc_feature (1)..(25): SEQ ID NO: 1549; WAN024BFJ_at; Start 249; Stop 273
tgaggtaacaacctttcggacagag

SEQ ID NO: 79683 - DNA, 25 bp, Artificial
  probe
  misc_feature (1)..(25): SEQ ID NO: 1549; WAN024BFJ_at; Start 1076; Stop 1100
aatatggctatcagccaggcccaga

SEQ ID NO: 79684 - DNA, 25 bp, Artificial
  probe
  misc_feature (1)..(25): SEQ ID NO: 1549; WAN024BFJ_at; Start 462; Stop 486
gcgtttcaacgaagatgctttacgg

SEQ ID NO: 79685 - DNA, 25 bp, Artificial
  probe
  misc_feature (1)..(25): SEQ ID NO: 1549; WAN024BFJ_at; Start 280; Stop 304
tatgtggactatcgcagacccagtg

SEQ ID NO: 79686 - DNA, 25 bp, Artificial
  probe
  misc_feature (1)..(25): SEQ ID NO: 1549; WAN024BFJ_at; Start 447; Stop 471
tggagtggctagtgagcgtttcaac

SEQ ID NO: 79687 - DNA, 25 bp, Artificial
  probe
  misc_feature (1)..(25): SEQ ID NO: 1549; WAN024BFJ_at; Start 546; Stop 570
taaagctatgaagaccttgacgccg

SEQ ID NO: 79688 - DNA, 25 bp, Artificial
  probe
  misc_feature (1)..(25): SEQ ID NO: 1549; WAN024BFJ_at; Start 717; Stop 741
caacagactgtttgatttggagact

SEQ ID NO: 79689 - DNA, 25 bp, Artificial
  probe
  misc_feature (1)..(25): SEQ ID NO: 1549; WAN024BFJ_at; Start 842; Stop 866
gccagtttgccaagcaagttcagga

SEQ ID NO: 79690 - DNA, 25 bp, Artificial
  probe
  misc_feature (1)..(25): SEQ ID NO: 1549; WAN024BFJ_at; Start 386; Stop 410
gagaaatcgttgacttgttccatgg

SEQ ID NO: 79691 - DNA, 25 bp, Artificial
  probe
  misc_feature (1)..(25): SEQ ID NO: 1549; WAN024BFJ_at; Start 1095; Stop 1119
cccagacttgggagagattttaaca

SEQ ID NO: 79692 - DNA, 25 bp, Artificial
  probe
  misc_feature (1)..(25): SEQ ID NO: 1549; WAN024BFJ_at; Start 753; Stop 777
tgaatcctctgaacaagcctgggcg

SEQ ID NO: 79693 - DNA, 25 bp, Artificial
  probe
  misc_feature (1)..(25): SEQ ID NO: 1549; WAN024BFJ_at; Start 426; Stop 450
aaagcaagtcttgcgagcagttgga

SEQ ID NO: 79694 - DNA, 25 bp, Artificial
  probe
  misc_feature (1)..(25): SEQ ID NO: 1549; WAN024BFJ_at; Start 489; Stop 513
tatgcgtggtttccgttttcaggct

SEQ ID NO: 79695 - DNA, 25 bp, Artificial
  probe
  misc_feature (1)..(25): SEQ ID NO: 1549; WAN024BFJ_at; Start 196; Stop 220
gatatcggaatcgagcatggaaccg

SEQ ID NO: 79696 - DNA, 25 bp, Artificial
  probe
  misc_feature (1)..(25): SEQ ID NO: 1549; WAN024BFJ_at; Start 22; Stop 46
tctgaatttcagaaggctttaccag

SEQ ID NO: 79697 - DNA, 25 bp, Artificial
  probe
  misc_feature (1)..(25): SEQ ID NO: 1549; WAN024BFJ_at; Start 822; Stop 846
gaaatcttggaagacctcacgccag

SEQ ID NO: 79698 - DNA, 25 bp, Artificial
  probe
  misc_feature (1)..(25): SEQ ID NO: 1549; WAN024BFJ_at; Start 702; Stop 726
tagccaggacaagctcaacagactg

SEQ ID NO: 79699 - DNA, 25 bp, Artificial
  probe
  misc_feature (1)..(25): SEQ ID NO: 1549; WAN024BFJ_at; Start 791; Stop 815
ctttggagattgaaaatgcgcagtc

SEQ ID NO: 79700 - DNA, 25 bp, Artificial
  probe
  misc_feature (1)..(25): SEQ ID NO: 1549; WAN024BFJ_at; Start 870; Stop 894
gctgattattttggctctgcgtgaa

SEQ ID NO: 79701 - DNA, 25 bp, Artificial
  probe
  misc_feature (1)..(25): SEQ ID NO: 1549; WAN024BFJ_at; Start 682; Stop 706
tatctccctgatatggcatctagcc

SEQ ID NO: 79702 - DNA, 25 bp, Artificial
  probe
  misc_feature (1)..(25): SEQ ID NO: 1549; WAN024BFJ_at; Start 348; Stop 372
tgatttcacagtcaacgcctttgcc

SEQ ID NO: 79703 - DNA, 25 bp, Artificial
  probe
  misc_feature (1)..(25): SEQ ID NO: 1549; WAN024BFJ_at; Start 1153; Stop 1177
gagaataatcgtgaagccatccatg

SEQ ID NO: 79704 - DNA, 25 bp, Artificial
  probe
  misc_feature (1)..(25): SEQ ID NO: 2383; WAN024BFK_at; Start 232; Stop 256
cacgtccgtgaaaatatcggcatgg

SEQ ID NO: 79705 - DNA, 25 bp, Artificial
  probe
  misc_feature (1)..(25): SEQ ID NO: 2383; WAN024BFK_at; Start 504; Stop 528
ttctgcccttgaccctgagatggtt

SEQ ID NO: 79706 - DNA, 25 bp, Artificial
  probe
  misc_feature (1)..(25): SEQ ID NO: 2383; WAN024BFK_at; Start 391; Stop 415
gcagataaagctaatgccaatccag

SEQ ID NO: 79707 - DNA, 25 bp, Artificial
  probe
  misc_feature (1)..(25): SEQ ID NO: 2383; WAN024BFK_at; Start 641; Stop 665
cagatggcgagttccttgaagacgg

SEQ ID NO: 79708 - DNA, 25 bp, Artificial
  probe
  misc_feature (1)..(25): SEQ ID NO: 2383; WAN024BFK_at; Start 192; Stop 216
gaacggctatgatttaactgaaaaa

SEQ ID NO: 79709 - DNA, 25 bp, Artificial
  probe
  misc_feature (1)..(25): SEQ ID NO: 2383; WAN024BFK_at; Start 72; Stop 96
tacgactaagttctatgaaggagat

SEQ ID NO: 79710 - DNA, 25 bp, Artificial
  probe
  misc_feature (1)..(25): SEQ ID NO: 2383; WAN024BFK_at; Start 661; Stop 685
gacggaacacctgaccaaatctttg

SEQ ID NO: 79711 - DNA, 25 bp, Artificial
  probe
  misc_feature (1)..(25): SEQ ID NO: 2383; WAN024BFK_at; Start 373; Stop 397
cttgaaaaggttggactagcagata

SEQ ID NO: 79712 - DNA, 25 bp, Artificial
  probe
  misc_feature (1)..(25): SEQ ID NO: 2383; WAN024BFK_at; Start 143; Stop 167
tccgtagcctcaatcttttagaaga

SEQ ID NO: 79713 - DNA, 25 bp, Artificial
  probe
  misc_feature (1)..(25): SEQ ID NO: 2383; WAN024BFK_at; Start 218; Stop 242
caaccaatgttgaccacgtccgtga

SEQ ID NO: 79714 - DNA, 25 bp, Artificial
  probe
  misc_feature (1)..(25): SEQ ID NO: 2383; WAN024BFK_at; Start 356; Stop 380
aattgggaatggagttgcttgaaaa

SEQ ID NO: 79715 - DNA, 25 bp, Artificial
  probe
  misc_feature (1)..(25): SEQ ID NO: 2383; WAN024BFK_at; Start 92; Stop 116
gagatgttgtttgtatcatcggtcc

SEQ ID NO: 79716 - DNA, 25 bp, Artificial
  probe
  misc_feature (1)..(25): SEQ ID NO: 2383; WAN024BFK_at; Start 673; Stop 697
gaccaaatctttgataacccacaac

SEQ ID NO: 79717 - DNA, 25 bp, Artificial
  probe
  misc_feature (1)..(25): SEQ ID NO: 2383; WAN024BFK_at; Start 330; Stop 354
gttgatgactaaggaagaagctgag

SEQ ID NO: 79718 - DNA, 25 bp, Artificial
  probe
  misc_feature (1)..(25): SEQ ID NO: 2383; WAN024BFK_at; Start 697; Stop 721
caccctcgtctgaaagagttcttag

SEQ ID NO: 79719 - DNA, 25 bp, Artificial
  probe
  misc_feature (1)..(25): SEQ ID NO: 2383; WAN024BFK_at; Start 478; Stop 502
gacatcatgctcttcgatgaaccaa

SEQ ID NO: 79720 - DNA, 25 bp, Artificial
  probe
  misc_feature (1)..(25): SEQ ID NO: 2383; WAN024BFK_at; Start 34; Stop 58
cacaagcactatggaaaaaatgaag

SEQ ID NO: 79721 - DNA, 25 bp, Artificial
  probe
  misc_feature (1)..(25): SEQ ID NO: 2383; WAN024BFK_at; Start 300; Stop 324
caacatcacctttgctcctattgag

SEQ ID NO: 79722 - DNA, 25 bp, Artificial
  probe
  misc_feature (1)..(25): SEQ ID NO: 2383; WAN024BFK_at; Start 653; Stop 677
tccttgaagacggaacacctgacca

SEQ ID NO: 79723 - DNA, 25 bp, Artificial
  probe
  misc_feature (1)..(25): SEQ ID NO: 2383; WAN024BFK_at; Start 619; Stop 643
gccaaccgcgttatctttactgcag

SEQ ID NO: 79724 - DNA, 25 bp, Artificial
  probe
  misc_feature (1)..(25): SEQ ID NO: 2383; WAN024BFK_at; Start 716; Stop 740
tcttagataaggtcttaaacgtcta

SEQ ID NO: 79725 - DNA, 25 bp, Artificial
  probe
  misc_feature (1)..(25): SEQ ID NO: 2383; WAN024BFK_at; Start 543; Stop 567
cgttatgaaggaattggctgagcaa

SEQ ID NO: 79726 - DNA, 25 bp, Artificial
  probe
  misc_feature (1)..(25): SEQ ID NO: 2383; WAN024BFK_at; Start 270; Stop 294
caacctcttccctcatatgtctgta

SEQ ID NO: 79727 - DNA, 25 bp, Artificial
  probe
  misc_feature (1)..(25): SEQ ID NO: 2383; WAN024BFK_at; Start 315; Stop 339
tcctattgagcacaagttgatgact

SEQ ID NO: 79728 - DNA, 25 bp, Artificial
  probe
  misc_feature (1)..(25): SEQ ID NO: 2383; WAN024BFK_at; Start 108; Stop 132
catcggtccttcaggttctggtaag

SEQ ID NO: 79729 - DNA, 25 bp, Artificial
  probe
  misc_feature (1)..(25): SEQ ID NO: 2383; WAN024BFK_at; Start 126; Stop 150
tggtaagtcaactttcctccgtagc

SEQ ID NO: 79730 - DNA, 25 bp, Artificial
  probe
  misc_feature (1)..(25): SEQ ID NO: 2383; WAN024BFK_at; Start 632; Stop 656
tctttactgcagatggcgagttcct

SEQ ID NO: 79731 - DNA, 25 bp, Artificial
  probe
  misc_feature (1)..(25): SEQ ID NO: 2383; WAN024BFK_at; Start 23; Stop 47
taaatgatttacacaagcactatgg

SEQ ID NO: 79732 - DNA, 25 bp, Artificial
  probe
  misc_feature (1)..(25): SEQ ID NO: 2383; WAN024BFK_at; Start 163; Stop 187
gaagaagtcactagcggtcacatca

SEQ ID NO: 79733 - DNA, 25 bp, Artificial
  probe
  misc_feature (1)..(25): SEQ ID NO: 2383; WAN024BFK_at; Start 413; Stop 437
cagatagcctatcaggtggtcaaaa

SEQ ID NO: 79734 - DNA, 25 bp, Artificial
  probe
  misc_feature (1)..(25): SEQ ID NO: 2383; WAN024BFK_at; Start 285; Stop 309
tatgtctgtattggacaacatcacc

SEQ ID NO: 79735 - DNA, 25 bp, Artificial
  probe
  misc_feature (1)..(25): SEQ ID NO: 2383; WAN024BFK_at; Start 248; Stop 272
tcggcatggtattccaacacttcaa

SEQ ID NO: 79736 - DNA, 25 bp, Artificial
  probe
  misc_feature (1)..(25): SEQ ID NO: 2383; WAN024BFK_at; Start 178; Stop 202
ggtcacatcactgtgaacggctatg

SEQ ID NO: 79737 - DNA, 25 bp, Artificial
  probe
  misc_feature (1)..(25): SEQ ID NO: 2383; WAN024BFK_at; Start 467; Stop 491
caatgaatccagacatcatgctctt

SEQ ID NO: 79738 - DNA, 25 bp, Artificial
  probe
  misc_feature (1)..(25): SEQ ID NO: 899; WAN024BFL_at; Start 489; Stop 513
ccaatgggttgttctttacggtgct

SEQ ID NO: 79739 - DNA, 25 bp, Artificial
  probe
  misc_feature (1)..(25): SEQ ID NO: 899; WAN024BFL_at; Start 473; Stop 497
caaaagttgaaccaggccaatgggt

SEQ ID NO: 79740 - DNA, 25 bp, Artificial
  probe
  misc_feature (1)..(25): SEQ ID NO: 899; WAN024BFL_at; Start 841; Stop 865
caagtcatcggttctcttgtcggaa

SEQ ID NO: 79741 - DNA, 25 bp, Artificial
  probe
  misc_feature (1)..(25): SEQ ID NO: 899; WAN024BFL_at; Start 280; Stop 304
gaatactgtacaactggtcgcgaaa

SEQ ID NO: 79742 - DNA, 25 bp, Artificial
  probe
  misc_feature (1)..(25): SEQ ID NO: 899; WAN024BFL_at; Start 201; Stop 225
gattgctccagatgtgaaaagcctt

SEQ ID NO: 79743 - DNA, 25 bp, Artificial
  probe
  misc_feature (1)..(25): SEQ ID NO: 899; WAN024BFL_at; Start 121; Stop 145
gacctccacgttgctcatggtgact

SEQ ID NO: 79744 - DNA, 25 bp, Artificial
  probe
  misc_feature (1)..(25): SEQ ID NO: 899; WAN024BFL_at; Start 299; Stop 323
gcgaaaccctttgccgtacagtgaa

SEQ ID NO: 79745 - DNA, 25 bp, Artificial
  probe
  misc_feature (1)..(25): SEQ ID NO: 899; WAN024BFL_at; Start 988; Stop 1012
caaggacgtatggtactcgacttca

SEQ ID NO: 79746 - DNA, 25 bp, Artificial
  probe
  misc_feature (1)..(25): SEQ ID NO: 899; WAN024BFL_at; Start 625; Stop 649
gacattgtgattaacggcctcgaag

SEQ ID NO: 79747 - DNA, 25 bp, Artificial
  probe
  misc_feature (1)..(25): SEQ ID NO: 899; WAN024BFL_at; Start 789; Stop 813
tccttctgaaatgatggaactcagc

SEQ ID NO: 79748 - DNA, 25 bp, Artificial
  probe
  misc_feature (1)..(25): SEQ ID NO: 899; WAN024BFL_at; Start 880; Stop 904
gaagaagccttccaatttggtgcag

SEQ ID NO: 79749 - DNA, 25 bp, Artificial
  probe
  misc_feature (1)..(25): SEQ ID NO: 899; WAN024BFL_at; Start 338; Stop 362
cagtagacggtggtatggctgaaca

SEQ ID NO: 79750 - DNA, 25 bp, Artificial
  probe
  misc_feature (1)..(25): SEQ ID NO: 899; WAN024BFL_at; Start 429; Stop 453
tatcacatgtgctggagtaacaacc

SEQ ID NO: 79751 - DNA, 25 bp, Artificial
  probe
  misc_feature (1)..(25): SEQ ID NO: 899; WAN024BFL_at; Start 17; Stop 41
taaatccagaaagcactggtgttgc

SEQ ID NO: 79752 - DNA, 25 bp, Artificial
  probe
  misc_feature (1)..(25): SEQ ID NO: 899; WAN024BFL_at; Start 142; Stop 166
gactttggtcaagtcccaggacgtg

SEQ ID NO: 79753 - DNA, 25 bp, Artificial
  probe
  misc_feature (1)..(25): SEQ ID NO: 899; WAN024BFL_at; Start 357; Stop 381
tgaacaatgtatcgtaactgctgac

SEQ ID NO: 79754 - DNA, 25 bp, Artificial
  probe
  misc_feature (1)..(25): SEQ ID NO: 899; WAN024BFL_at; Start 399; Stop 423
tgacggacttgatccagcccaagct

SEQ ID NO: 79755 - DNA, 25 bp, Artificial
  probe
  misc_feature (1)..(25): SEQ ID NO: 899; WAN024BFL_at; Start 321; Stop 345
gaaaaatgctggctactcagtagac

SEQ ID NO: 79756 - DNA, 25 bp, Artificial
  probe
  misc_feature (1)..(25): SEQ ID NO: 899; WAN024BFL_at; Start 642; Stop 666
cctcgaagttgaagatgtagctgga

SEQ ID NO: 79757 - DNA, 25 bp, Artificial
  probe
  misc_feature (1)..(25): SEQ ID NO: 899; WAN024BFL_at; Start 505; Stop 529
tacggtgctggtggacttggtaacc

SEQ ID NO: 79758 - DNA, 25 bp, Artificial
  probe
  misc_feature (1)..(25): SEQ ID NO: 899; WAN024BFL_at; Start 804; Stop 828
ggaactcagcatcgttaaaacagtc

SEQ ID NO: 79759 - DNA, 25 bp, Artificial
  probe
  misc_feature (1)..(25): SEQ ID NO: 899; WAN024BFL_at; Start 54; Stop 78
agtactccgtccacttgaaactggg

SEQ ID NO: 79760 - DNA, 25 bp, Artificial
  probe
  misc_feature (1)..(25): SEQ ID NO: 899; WAN024BFL_at; Start 684; Stop 708
tgatggaggagctcattcagctgtc

SEQ ID NO: 79761 - DNA, 25 bp, Artificial
  probe
  misc_feature (1)..(25): SEQ ID NO: 899; WAN024BFL_at; Start 721; Stop 745
tctaaagttgccttcaaccaggctg

SEQ ID NO: 79762 - DNA, 25 bp, Artificial
  probe
  misc_feature (1)..(25): SEQ ID NO: 899; WAN024BFL_at; Start 523; Stop 547
ggtaacctcgctgttcaatacgcta

SEQ ID NO: 79763 - DNA, 25 bp, Artificial
  probe
  misc_feature (1)..(25): SEQ ID NO: 899; WAN024BFL_at; Start 39; Stop 63
tgctattgaagaaaaagtactccgt

SEQ ID NO: 79764 - DNA, 25 bp, Artificial
  probe
  misc_feature (1)..(25): SEQ ID NO: 899; WAN024BFL_at; Start 185; Stop 209
tcggtatcgttaaagagattgctcc

SEQ ID NO: 79765 - DNA, 25 bp, Artificial
  probe
  misc_feature (1)..(25): SEQ ID NO: 899; WAN024BFL_at; Start 927; Stop 951
tcaaaaacgtccagtagaagatgct

SEQ ID NO: 79766 - DNA, 25 bp, Artificial
  probe
  misc_feature (1)..(25): SEQ ID NO: 899; WAN024BFL_at; Start 168; Stop 192
tcttgggcacgaaggtatcggtatc

SEQ ID NO: 79767 - DNA, 25 bp, Artificial
  probe
  misc_feature (1)..(25): SEQ ID NO: 899; WAN024BFL_at; Start 603; Stop 627
ccttgcaaaagaagtaggcgctgac

SEQ ID NO: 79768 - DNA, 25 bp, Artificial
  probe
  misc_feature (1)..(25): SEQ ID NO: 899; WAN024BFL_at; Start 266; Stop 290
gatgtggcacttgcgaatactgtac

SEQ ID NO: 79769 - DNA, 25 bp, Artificial
  probe
  misc_feature (1)..(25): SEQ ID NO: 899; WAN024BFL_at; Start 819; Stop 843
taaaacagtcctcgatggaatccaa

SEQ ID NO: 79770 - DNA, 25 bp, Artificial
  probe
  misc_feature (1)..(25): SEQ ID NO: 899; WAN024BFL_at; Start 946; Stop 970
gatgctgttgccattttcgacgaaa

SEQ ID NO: 79771 - DNA, 25 bp, Artificial
  probe
  misc_feature (1)..(25): SEQ ID NO: 899; WAN024BFL_at; Start 770; Stop 794
gcgtcgtcgctgttggtcttccttc

SEQ ID NO: 79772 - DNA, 25 bp, Artificial
  probe
  misc_feature (1)..(25): SEQ ID NO: 5476; WAN024BFM_at; Start 804; Stop 828
tacactactcacctctctaggtgtg

SEQ ID NO: 79773 - DNA, 25 bp, Artificial
  probe
  misc_feature (1)..(25): SEQ ID NO: 5476; WAN024BFM_at; Start 108; Stop 132
cgcgcccgtttttgccattttcata

SEQ ID NO: 79774 - DNA, 25 bp, Artificial
  probe
  misc_feature (1)..(25): SEQ ID NO: 5476; WAN024BFM_at; Start 199; Stop 223
aagaagttgctccaatatgccgttg

SEQ ID NO: 79775 - DNA, 25 bp, Artificial
  probe
  misc_feature (1)..(25): SEQ ID NO: 5476; WAN024BFM_at; Start 246; Stop 270
tatctcgcaggtcttcgcagttggc

SEQ ID NO: 79776 - DNA, 25 bp, Artificial
  probe
  misc_feature (1)..(25): SEQ ID NO: 5476; WAN024BFM_at; Start 771; Stop 795
tatcctttactttatccttgcctct

SEQ ID NO: 79777 - DNA, 25 bp, Artificial
  probe
  misc_feature (1)..(25): SEQ ID NO: 5476; WAN024BFM_at; Start 252; Stop 276
gcaggtcttcgcagttggccaatct

SEQ ID NO: 79778 - DNA, 25 bp, Artificial
  probe
  misc_feature (1)..(25): SEQ ID NO: 5476; WAN024BFM_at; Start 607; Stop 631
gcttgggacagtctttaccaaagca

SEQ ID NO: 79779 - DNA, 25 bp, Artificial
  probe
  misc_feature (1)..(25): SEQ ID NO: 5476; WAN024BFM_at; Start 706; Stop 730
tactggcaaagtcgccaacaagaaa

SEQ ID NO: 79780 - DNA, 25 bp, Artificial
  probe
  misc_feature (1)..(25): SEQ ID NO: 5476; WAN024BFM_at; Start 556; Stop 580
tttgcagggactgcggtcaacgaca

SEQ ID NO: 79781 - DNA, 25 bp, Artificial
  probe
  misc_feature (1)..(25): SEQ ID NO: 5476; WAN024BFM_at; Start 645; Stop 669
tgcaaccattgttaaactcacacgt

SEQ ID NO: 79782 - DNA, 25 bp, Artificial
  probe
  misc_feature (1)..(25): SEQ ID NO: 5476; WAN024BFM_at; Start 121; Stop 145
gccattttcataggcatgctcctac

SEQ ID NO: 79783 - DNA, 25 bp, Artificial
  probe
  misc_feature (1)..(25): SEQ ID NO: 5476; WAN024BFM_at; Start 719; Stop 743
gccaacaagaaaacaagcaaagcct

SEQ ID NO: 79784 - DNA, 25 bp, Artificial
  probe
  misc_feature (1)..(25): SEQ ID NO: 5476; WAN024BFM_at; Start 622; Stop 646
taccaaagcaataccctcgagtctg

SEQ ID NO: 79785 - DNA, 25 bp, Artificial
  probe
  misc_feature (1)..(25): SEQ ID NO: 5476; WAN024BFM_at; Start 654; Stop 678
tgttaaactcacacgtactttggcc

SEQ ID NO: 79786 - DNA, 25 bp, Artificial
  probe
  misc_feature (1)..(25): SEQ ID NO: 5476; WAN024BFM_at; Start 308; Stop 332
tagctctgattattgcctacctctt

SEQ ID NO: 79787 - DNA, 25 bp, Artificial
  probe
  misc_feature (1)..(25): SEQ ID NO: 5476; WAN024BFM_at; Start 570; Stop 594
ggtcaacgacacttcctctgtaacg

SEQ ID NO: 79788 - DNA, 25 bp, Artificial
  probe
  misc_feature (1)..(25): SEQ ID NO: 5476; WAN024BFM_at; Start 293; Stop 317
tgtccactatctcaatagctctgat

SEQ ID NO: 79789 - DNA, 25 bp, Artificial
  probe
  misc_feature (1)..(25): SEQ ID NO: 5476; WAN024BFM_at; Start 286; Stop 310
gtcatcctgtccactatctcaatag

SEQ ID NO: 79790 - DNA, 25 bp, Artificial
  probe
  misc_feature (1)..(25): SEQ ID NO: 5476; WAN024BFM_at; Start 592; Stop 616
acggctgccgccagcgcttgggaca

SEQ ID NO: 79791 - DNA, 25 bp, Artificial
  probe
  misc_feature (1)..(25): SEQ ID NO: 5476; WAN024BFM_at; Start 3; Stop 27
ggaggtttttatgtcatttctatca

SEQ ID NO: 79792 - DNA, 25 bp, Artificial
  probe
  misc_feature (1)..(25): SEQ ID NO: 5476; WAN024BFM_at; Start 575; Stop 599
acgacacttcctctgtaacggctgc

SEQ ID NO: 79793 - DNA, 25 bp, Artificial
  probe
  misc_feature (1)..(25): SEQ ID NO: 5476; WAN024BFM_at; Start 711; Stop 735
gcaaagtcgccaacaagaaaacaag

SEQ ID NO: 79794 - DNA, 25 bp, Artificial
  probe
  misc_feature (1)..(25): SEQ ID NO: 5476; WAN024BFM_at; Start 204; Stop 228
gttgctccaatatgccgttgtcttg

SEQ ID NO: 79795 - DNA, 25 bp, Artificial
  probe
  misc_feature (1)..(25): SEQ ID NO: 5476; WAN024BFM_at; Start 618; Stop 642
tctttaccaaagcaataccctcgag

SEQ ID NO: 79796 - DNA, 25 bp, Artificial
  probe
  misc_feature (1)..(25): SEQ ID NO: 5476; WAN024BFM_at; Start 633; Stop 657
taccctcgagtctgcaaccattgtt

SEQ ID NO: 79797 - DNA, 25 bp, Artificial
  probe
  misc_feature (1)..(25): SEQ ID NO: 5476; WAN024BFM_at; Start 978; Stop 1002
catcctcaccactcttggtatgcag

SEQ ID NO: 79798 - DNA, 25 bp, Artificial
  probe
  misc_feature (1)..(25): SEQ ID NO: 5476; WAN024BFM_at; Start 816; Stop 840
ctctctaggtgtgtccagtagtttc

SEQ ID NO: 79799 - DNA, 25 bp, Artificial
  probe
  misc_feature (1)..(25): SEQ ID NO: 5476; WAN024BFM_at; Start 999; Stop 1023
gcagacccttatcggcattttctaa

SEQ ID NO: 79800 - DNA, 25 bp, Artificial
  probe
  misc_feature (1)..(25): SEQ ID NO: 5476; WAN024BFM_at; Start 990; Stop 1014
tcttggtatgcagacccttatcggc

SEQ ID NO: 79801 - DNA, 25 bp, Artificial
  probe
  misc_feature (1)..(25): SEQ ID NO: 5476; WAN024BFM_at; Start 687; Stop 711
tatcacgctctttctatcctactgg

SEQ ID NO: 79802 - DNA, 25 bp, Artificial
  probe
  misc_feature (1)..(25): SEQ ID NO: 5476; WAN024BFM_at; Start 48; Stop 72
ggcctgccttctcatttccatccta

SEQ ID NO: 79803 - DNA, 25 bp, Artificial
  probe
  misc_feature (1)..(25): SEQ ID NO: 5476; WAN024BFM_at; Start 662; Stop 686
tcacacgtactttggccattatccc

SEQ ID NO: 79804 - DNA, 25 bp, Artificial
  probe
  misc_feature (1)..(25): SEQ ID NO: 5476; WAN024BFM_at; Start 562; Stop 586
gggactgcggtcaacgacacttcct

SEQ ID NO: 79805 - DNA, 25 bp, Artificial
  probe
  misc_feature (1)..(25): SEQ ID NO: 5476; WAN024BFM_at; Start 672; Stop 696
tttggccattatccctatcacgctc

SEQ ID NO: 79806 - DNA, 25 bp, Artificial
  probe
  misc_feature (1)..(25): SEQ ID NO: 4061; WAN024BFN_at; Start 1; Stop 25
gtgcaggcagtcatgccaacggctc

SEQ ID NO: 79807 - DNA, 25 bp, Artificial
  probe
  misc_feature (1)..(25): SEQ ID NO: 4061; WAN024BFN_at; Start 67; Stop 91
gcgccctatgtgacacctgttgaga

SEQ ID NO: 79808 - DNA, 25 bp, Artificial
  probe
  misc_feature (1)..(25): SEQ ID NO: 4061; WAN024BFN_at; Start 143; Stop 167
tggcactgattgtggttcaagctcc

SEQ ID NO: 79809 - DNA, 25 bp, Artificial
  probe
  misc_feature (1)..(25): SEQ ID NO: 4061; WAN024BFN_at; Start 105; Stop 129
tctctttgtttatgctgggagtgcc

SEQ ID NO: 79810 - DNA, 25 bp, Artificial
  probe
  misc_feature (1)..(25): SEQ ID NO: 4061; WAN024BFN_at; Start 90; Stop 114
gatgggcttgatgagtctctttgtt

SEQ ID NO: 79811 - DNA, 25 bp, Artificial
  probe
  misc_feature (1)..(25): SEQ ID NO: 4061; WAN024BFN_at; Start 75; Stop 99
tgtgacacctgttgagatgggcttg

SEQ ID NO: 79812 - DNA, 25 bp, Artificial
  probe
  misc_feature (1)..(25): SEQ ID NO: 4061; WAN024BFN_at; Start 460; Stop 484
gattttgccctggttgggatgttta

SEQ ID NO: 79813 - DNA, 25 bp, Artificial
  probe
  misc_feature (1)..(25): SEQ ID NO: 4061; WAN024BFN_at; Start 130; Stop 154
cagtttgccatgttggcactgattg

SEQ ID NO: 79814 - DNA, 25 bp, Artificial
  probe
  misc_feature (1)..(25): SEQ ID NO: 4061; WAN024BFN_at; Start 107; Stop 131
tctttgtttatgctgggagtgccca

SEQ ID NO: 79815 - DNA, 25 bp, Artificial
  probe
  misc_feature (1)..(25): SEQ ID NO: 4061; WAN024BFN_at; Start 2; Stop 26
tgcaggcagtcatgccaacggctct

SEQ ID NO: 79816 - DNA, 25 bp, Artificial
  probe
  misc_feature (1)..(25): SEQ ID NO: 4061; WAN024BFN_at; Start 650; Stop 674
tggttttagatggtcagctaactaa

SEQ ID NO: 79817 - DNA, 25 bp, Artificial
  probe
  misc_feature (1)..(25): SEQ ID NO: 4061; WAN024BFN_at; Start 120; Stop 144
tgggagtgcccagtttgccatgttg

SEQ ID NO: 79818 - DNA, 25 bp, Artificial
  probe
  misc_feature (1)..(25): SEQ ID NO: 4061; WAN024BFN_at; Start 144; Stop 168
ggcactgattgtggttcaagctcct

SEQ ID NO: 79819 - DNA, 25 bp, Artificial
  probe
  misc_feature (1)..(25): SEQ ID NO: 4061; WAN024BFN_at; Start 62; Stop 86
tcggtgcgccctatgtgacacctgt

SEQ ID NO: 79820 - DNA, 25 bp, Artificial
  probe
  misc_feature (1)..(25): SEQ ID NO: 4061; WAN024BFN_at; Start 115; Stop 139
tatgctgggagtgcccagtttgcca

SEQ ID NO: 79821 - DNA, 25 bp, Artificial
  probe
  misc_feature (1)..(25): SEQ ID NO: 4061; WAN024BFN_at; Start 64; Stop 88
ggtgcgccctatgtgacacctgttg

SEQ ID NO: 79822 - DNA, 25 bp, Artificial
  probe
  misc_feature (1)..(25): SEQ ID NO: 4061; WAN024BFN_at; Start 127; Stop 151
gcccagtttgccatgttggcactga

SEQ ID NO: 79823 - DNA, 25 bp, Artificial
  probe
  misc_feature (1)..(25): SEQ ID NO: 4061; WAN024BFN_at; Start 596; Stop 620
tgtctcagtcactagctgttctgtt

SEQ ID NO: 79824 - DNA, 25 bp, Artificial
  probe
  misc_feature (1)..(25): SEQ ID NO: 4061; WAN024BFN_at; Start 71; Stop 95
cctatgtgacacctgttgagatggg

SEQ ID NO: 79825 - DNA, 25 bp, Artificial
  probe
  misc_feature (1)..(25): SEQ ID NO: 4061; WAN024BFN_at; Start 31; Stop 55
tatgtcagtatcggcctggcctgtg

SEQ ID NO: 79826 - DNA, 25 bp, Artificial
  probe
  misc_feature (1)..(25): SEQ ID NO: 4061; WAN024BFN_at; Start 69; Stop 93
gccctatgtgacacctgttgagatg

SEQ ID NO: 79827 - DNA, 25 bp, Artificial
  probe
  misc_feature (1)..(25): SEQ ID NO: 4061; WAN024BFN_at; Start 123; Stop 147
gagtgcccagtttgccatgttggca

SEQ ID NO: 79828 - DNA, 25 bp, Artificial
  probe
  misc_feature (1)..(25): SEQ ID NO: 4061; WAN024BFN_at; Start 601; Stop 625
cagtcactagctgttctgtttgcga

SEQ ID NO: 79829 - DNA, 25 bp, Artificial
  probe
  misc_feature (1)..(25): SEQ ID NO: 4061; WAN024BFN_at; Start 60; Stop 84
tatcggtgcgccctatgtgacacct

SEQ ID NO: 79830 - DNA, 25 bp, Artificial
  probe
  misc_feature (1)..(25): SEQ ID NO: 4061; WAN024BFN_at; Start 77; Stop 101
tgacacctgttgagatgggcttgat

SEQ ID NO: 79831 - DNA, 25 bp, Artificial
  probe
  misc_feature (1)..(25): SEQ ID NO: 4061; WAN024BFN_at; Start 108; Stop 132
ctttgtttatgctgggagtgcccag

SEQ ID NO: 79832 - DNA, 25 bp, Artificial
  probe
  misc_feature (1)..(25): SEQ ID NO: 4061; WAN024BFN_at; Start 137; Stop 161
ccatgttggcactgattgtggttca

SEQ ID NO: 79833 - DNA, 25 bp, Artificial
  probe
  misc_feature (1)..(25): SEQ ID NO: 4061; WAN024BFN_at; Start 651; Stop 675
ggttttagatggtcagctaactaat

SEQ ID NO: 79834 - DNA, 25 bp, Artificial
  probe
  misc_feature (1)..(25): SEQ ID NO: 4061; WAN024BFN_at; Start 85; Stop 109
gttgagatgggcttgatgagtctct

SEQ ID NO: 79835 - DNA, 25 bp, Artificial
  probe
  misc_feature (1)..(25): SEQ ID NO: 4061; WAN024BFN_at; Start 99; Stop 123
gatgagtctctttgtttatgctggg

SEQ ID NO: 79836 - DNA, 25 bp, Artificial
  probe
  misc_feature (1)..(25): SEQ ID NO: 4061; WAN024BFN_at; Start 73; Stop 97
tatgtgacacctgttgagatgggct

SEQ ID NO: 79837 - DNA, 25 bp, Artificial
  probe
  misc_feature (1)..(25): SEQ ID NO: 4061; WAN024BFN_at; Start 66; Stop 90
tgcgccctatgtgacacctgttgag

SEQ ID NO: 79838 - DNA, 25 bp, Artificial
  probe
  misc_feature (1)..(25): SEQ ID NO: 4061; WAN024BFN_at; Start 80; Stop 104
cacctgttgagatgggcttgatgag

SEQ ID NO: 79839 - DNA, 25 bp, Artificial
  probe
  misc_feature (1)..(25): SEQ ID NO: 4061; WAN024BFN_at; Start 140; Stop 164
tgttggcactgattgtggttcaagc

SEQ ID NO: 79840 - DNA, 25 bp, Artificial
  probe
  misc_feature (1)..(25): SEQ ID NO: 816; WAN024BFO_at; Start 1050; Stop 1074
tggcttactaactcacaatgggatg

SEQ ID NO: 79841 - DNA, 25 bp, Artificial
  probe
  misc_feature (1)..(25): SEQ ID NO: 816; WAN024BFO_at; Start 437; Stop 461
ccttggccgtcggtcagttgttggc

SEQ ID NO: 79842 - DNA, 25 bp, Artificial
  probe
  misc_feature (1)..(25): SEQ ID NO: 816; WAN024BFO_at; Start 204; Stop 228
tgagcgcttacagattagtttgggc

SEQ ID NO: 79843 - DNA, 25 bp, Artificial
  probe
  misc_feature (1)..(25): SEQ ID NO: 816; WAN024BFO_at; Start 246; Stop 270
gagcggtacagctcccttctggtac

SEQ ID NO: 79844 - DNA, 25 bp, Artificial
  probe
  misc_feature (1)..(25): SEQ ID NO: 816; WAN024BFO_at; Start 348; Stop 372
tattatcagtgaacgctaccaagga

SEQ ID NO: 79845 - DNA, 25 bp, Artificial
  probe
  misc_feature (1)..(25): SEQ ID NO: 816; WAN024BFO_at; Start 379; Stop 403
cgaattcagatgttagggctacgcg

SEQ ID NO: 79846 - DNA, 25 bp, Artificial
  probe
  misc_feature (1)..(25): SEQ ID NO: 816; WAN024BFO_at; Start 82; Stop 106
ccagccatgtttgactattatcagg

SEQ ID NO: 79847 - DNA, 25 bp, Artificial
  probe
  misc_feature (1)..(25): SEQ ID NO: 816; WAN024BFO_at; Start 135; Stop 159
ggtgagcttgccttcctttggaatc

SEQ ID NO: 79848 - DNA, 25 bp, Artificial
  probe
  misc_feature (1)..(25): SEQ ID NO: 816; WAN024BFO_at; Start 865; Stop 889
tcatccttgtgggtggtagtagcag

SEQ ID NO: 79849 - DNA, 25 bp, Artificial
  probe
  misc_feature (1)..(25): SEQ ID NO: 816; WAN024BFO_at; Start 117; Stop 141
ggaacaaattgagctcttggtgagc

SEQ ID NO: 79850 - DNA, 25 bp, Artificial
  probe
  misc_feature (1)..(25): SEQ ID NO: 816; WAN024BFO_at; Start 470; Stop 494
ggacagctatctttctagcctatag

SEQ ID NO: 79851 - DNA, 25 bp, Artificial
  probe
  misc_feature (1)..(25): SEQ ID NO: 816; WAN024BFO_at; Start 580; Stop 604
gcaagtcgtttaactcgagaaatga

SEQ ID NO: 79852 - DNA, 25 bp, Artificial
  probe
  misc_feature (1)..(25): SEQ ID NO: 816; WAN024BFO_at; Start 334; Stop 358
gccaaggccatttctattatcagtg

SEQ ID NO: 79853 - DNA, 25 bp, Artificial
  probe
  misc_feature (1)..(25): SEQ ID NO: 816; WAN024BFO_at; Start 6; Stop 30
acaatttttagaacgggccagcatt

SEQ ID NO: 79854 - DNA, 25 bp, Artificial
  probe
  misc_feature (1)..(25): SEQ ID NO: 816; WAN024BFO_at; Start 802; Stop 826
gagaaactgctcctctggtctggta

SEQ ID NO: 79855 - DNA, 25 bp, Artificial
  probe
  misc_feature (1)..(25): SEQ ID NO: 816; WAN024BFO_at; Start 393; Stop 417
agggctacgcgcttctgcagaggtc

SEQ ID NO: 79856 - DNA, 25 bp, Artificial
  probe
  misc_feature (1)..(25): SEQ ID NO: 816; WAN024BFO_at; Start 930; Stop 954
gacggtctttcaacttgtctctgaa

SEQ ID NO: 79857 - DNA, 25 bp, Artificial
  probe
  misc_feature (1)..(25): SEQ ID NO: 816; WAN024BFO_at; Start 421; Stop 445
ggagcttctctcattaccttggccg

SEQ ID NO: 79858 - DNA, 25 bp, Artificial
  probe
  misc_feature (1)..(25): SEQ ID NO: 816; WAN024BFO_at; Start 362; Stop 386
gctaccaaggaaaaaggcgaattca

SEQ ID NO: 79859 - DNA, 25 bp, Artificial
  probe
  misc_feature (1)..(25): SEQ ID NO: 816; WAN024BFO_at; Start 890; Stop 914
gaagtgttctggctggatttgccta

SEQ ID NO: 79860 - DNA, 25 bp, Artificial
  probe
  misc_feature (1)..(25): SEQ ID NO: 816; WAN024BFO_at; Start 740; Stop 764
tcatgcagttgatcgggattgtggc

SEQ ID NO: 79861 - DNA, 25 bp, Artificial
  probe
  misc_feature (1)..(25): SEQ ID NO: 816; WAN024BFO_at; Start 1004; Stop 1028
gctgtagtttcggagcctttacgac

SEQ ID NO: 79862 - DNA, 25 bp, Artificial
  probe
  misc_feature (1)..(25): SEQ ID NO: 816; WAN024BFO_at; Start 952; Stop 976
gaacgaattccagctaaactcctca

SEQ ID NO: 79863 - DNA, 25 bp, Artificial
  probe
  misc_feature (1)..(25): SEQ ID NO: 816; WAN024BFO_at; Start 296; Stop 320
cacggcttctctttggtttgggtct

SEQ ID NO: 79864 - DNA, 25 bp, Artificial
  probe
  misc_feature (1)..(25): SEQ ID NO: 816; WAN024BFO_at; Start 320; Stop 344
ttgggatgatcaatgccaaggccat

SEQ ID NO: 79865 - DNA, 25 bp, Artificial
  probe
  misc_feature (1)..(25): SEQ ID NO: 816; WAN024BFO_at; Start 406; Stop 430
tctgcagaggtcgttggagcttctc

SEQ ID NO: 79866 - DNA, 25 bp, Artificial
  probe
  misc_feature (1)..(25): SEQ ID NO: 816; WAN024BFO_at; Start 233; Stop 257
tgattttatcattgagcggtacagc

SEQ ID NO: 79867 - DNA, 25 bp, Artificial
  probe
  misc_feature (1)..(25): SEQ ID NO: 816; WAN024BFO_at; Start 277; Stop 301
tatccctttgtctttggaacacggc

SEQ ID NO: 79868 - DNA, 25 bp, Artificial
  probe
  misc_feature (1)..(25): SEQ ID NO: 816; WAN024BFO_at; Start 909; Stop 933
tgcctatagtgtagtcttgacgacg

SEQ ID NO: 79869 - DNA, 25 bp, Artificial
  probe
  misc_feature (1)..(25): SEQ ID NO: 816; WAN024BFO_at; Start 630; Stop 654
cgaagcggcagttgtagtttgtacc

SEQ ID NO: 79870 - DNA, 25 bp, Artificial
  probe
  misc_feature (1)..(25): SEQ ID NO: 816; WAN024BFO_at; Start 852; Stop 876
gattgccttgtcttcatccttgtgg

SEQ ID NO: 79871 - DNA, 25 bp, Artificial
  probe
  misc_feature (1)..(25): SEQ ID NO: 816; WAN024BFO_at; Start 262; Stop 286
ttctggtaccaagcctatccctttg

SEQ ID NO: 79872 - DNA, 25 bp, Artificial
  probe
  misc_feature (1)..(25): SEQ ID NO: 816; WAN024BFO_at; Start 1123; Stop 1147
gtcatgtacctacttcagaagagag

SEQ ID NO: 79873 - DNA, 25 bp, Artificial
  probe
  misc_feature (1)..(25): SEQ ID NO: 816; WAN024BFO_at; Start 190; Stop 214
gaaaaaatatttcctgagcgcttac

SEQ ID NO: 79874 - DNA, 25 bp, Artificial
  probe
  misc_feature (1)..(25): SEQ ID NO: 1350; WAN024BFP_at; Start 301; Stop 325
gacggtgtgattcaagtagatgtct

SEQ ID NO: 79875 - DNA, 25 bp, Artificial
  probe
  misc_feature (1)..(25): SEQ ID NO: 1350; WAN024BFP_at; Start 63; Stop 87
caatgttcactttgtgaaacgtttg

SEQ ID NO: 79876 - DNA, 25 bp, Artificial
  probe
  misc_feature (1)..(25): SEQ ID NO: 1350; WAN024BFP_at; Start 266; Stop 290
tgggagatgaaaatcctaagtatcc

SEQ ID NO: 79877 - DNA, 25 bp, Artificial
  probe
  misc_feature (1)..(25): SEQ ID NO: 1350; WAN024BFP_at; Start 130; Stop 154
gacccagaagcctgtcgttcagttg

SEQ ID NO: 79878 - DNA, 25 bp, Artificial
  probe
  misc_feature (1)..(25): SEQ ID NO: 1350; WAN024BFP_at; Start 258; Stop 282
tgtgcaaatgggagatgaaaatcct

SEQ ID NO: 79879 - DNA, 25 bp, Artificial
  probe
  misc_feature (1)..(25): SEQ ID NO: 1350; WAN024BFP_at; Start 30; Stop 54
caaactggtcttgactctcaaatgg

SEQ ID NO: 79880 - DNA, 25 bp, Artificial
  probe
  misc_feature (1)..(25): SEQ ID NO: 1350; WAN024BFP_at; Start 390; Stop 414
tgtagccaatatctttattgctgaa

SEQ ID NO: 79881 - DNA, 25 bp, Artificial
  probe
  misc_feature (1)..(25): SEQ ID NO: 1350; WAN024BFP_at; Start 381; Stop 405
gcatgacaatgtagccaatatcttt

SEQ ID NO: 79882 - DNA, 25 bp, Artificial
  probe
  misc_feature (1)..(25): SEQ ID NO: 1350; WAN024BFP_at; Start 45; Stop 69
tctcaaatggctcaacaacaatgtt

SEQ ID NO: 79883 - DNA, 25 bp, Artificial
  probe
  misc_feature (1)..(25): SEQ ID NO: 1350; WAN024BFP_at; Start 405; Stop 429
tattgctgaatatgacaagggtgct

SEQ ID NO: 79884 - DNA, 25 bp, Artificial
  probe
  misc_feature (1)..(25): SEQ ID NO: 1350; WAN024BFP_at; Start 223; Stop 247
cgagctgtgcaagagcaaaatgggc

SEQ ID NO: 79885 - DNA, 25 bp, Artificial
  probe
  misc_feature (1)..(25): SEQ ID NO: 1350; WAN024BFP_at; Start 413; Stop 437
aatatgacaagggtgctgttacagt

SEQ ID NO: 79886 - DNA, 25 bp, Artificial
  probe
  misc_feature (1)..(25): SEQ ID NO: 1350; WAN024BFP_at; Start 78; Stop 102
gaaacgtttgattgatggtaagcca

SEQ ID NO: 79887 - DNA, 25 bp, Artificial
  probe
  misc_feature (1)..(25): SEQ ID NO: 1350; WAN024BFP_at; Start 349; Stop 373
gagtggttgcttgataacctcagta

SEQ ID NO: 79888 - DNA, 25 bp, Artificial
  probe
  misc_feature (1)..(25): SEQ ID NO: 1350; WAN024BFP_at; Start 136; Stop 160
gaagcctgtcgttcagttggtttgt

SEQ ID NO: 79889 - DNA, 25 bp, Artificial
  probe
  misc_feature (1)..(25): SEQ ID NO: 1350; WAN024BFP_at; Start 214; Stop 238
caagtcaaacgagctgtgcaagagc

SEQ ID NO: 79890 - DNA, 25 bp, Artificial
  probe
  misc_feature (1)..(25): SEQ ID NO: 1350; WAN024BFP_at; Start 145; Stop 169
cgttcagttggtttgtctgcatcgg

SEQ ID NO: 79891 - DNA, 25 bp, Artificial
  probe
  misc_feature (1)..(25): SEQ ID NO: 1350; WAN024BFP_at; Start 36; Stop 60
ggtcttgactctcaaatggctcaac

SEQ ID NO: 79892 - DNA, 25 bp, Artificial
  probe
  misc_feature (1)..(25): SEQ ID NO: 1350; WAN024BFP_at; Start 227; Stop 251
ctgtgcaagagcaaaatgggcaact

SEQ ID NO: 79893 - DNA, 25 bp, Artificial
  probe
  misc_feature (1)..(25): SEQ ID NO: 1350; WAN024BFP_at; Start 86; Stop 110
tgattgatggtaagccaactctcct

SEQ ID NO: 79894 - DNA, 25 bp, Artificial
  probe
  misc_feature (1)..(25): SEQ ID NO: 1350; WAN024BFP_at; Start 108; Stop 132
ccttatcaaaaatgggaatattgac

SEQ ID NO: 79895 - DNA, 25 bp, Artificial
  probe
  misc_feature (1)..(25): SEQ ID NO: 1350; WAN024BFP_at; Start 15; Stop 39
tatcgaaattttaatcaaactggtc

SEQ ID NO: 79896 - DNA, 25 bp, Artificial
  probe
  misc_feature (1)..(25): SEQ ID NO: 1350; WAN024BFP_at; Start 254; Stop 278
tcgttgtgcaaatgggagatgaaaa

SEQ ID NO: 79897 - DNA, 25 bp, Artificial
  probe
  misc_feature (1)..(25): SEQ ID NO: 1350; WAN024BFP_at; Start 91; Stop 115
gatggtaagccaactctccttatca

SEQ ID NO: 79898 - DNA, 25 bp, Artificial
  probe
  misc_feature (1)..(25): SEQ ID NO: 1350; WAN024BFP_at; Start 53; Stop 77
ggctcaacaacaatgttcactttgt

SEQ ID NO: 79899 - DNA, 25 bp, Artificial
  probe
  misc_feature (1)..(25): SEQ ID NO: 1350; WAN024BFP_at; Start 462; Stop 486
tggggtcttgtactcttcgaaaatc

SEQ ID NO: 79900 - DNA, 25 bp, Artificial
  probe
  misc_feature (1)..(25): SEQ ID NO: 1350; WAN024BFP_at; Start 372; Stop 396
taaacaagggcatgacaatgtagcc

SEQ ID NO: 79901 - DNA, 25 bp, Artificial
  probe
  misc_feature (1)..(25): SEQ ID NO: 1350; WAN024BFP_at; Start 150; Stop 174
agttggtttgtctgcatcggatgta

SEQ ID NO: 79902 - DNA, 25 bp, Artificial
  probe
  misc_feature (1)..(25): SEQ ID NO: 1350; WAN024BFP_at; Start 122; Stop 146
ggaatattgacccagaagcctgtcg

SEQ ID NO: 79903 - DNA, 25 bp, Artificial
  probe
  misc_feature (1)..(25): SEQ ID NO: 1350; WAN024BFP_at; Start 363; Stop 387
taacctcagtaaacaagggcatgac

SEQ ID NO: 79904 - DNA, 25 bp, Artificial
  probe
  misc_feature (1)..(25): SEQ ID NO: 1350; WAN024BFP_at; Start 209; Stop 233
tgaagcaagtcaaacgagctgtgca

SEQ ID NO: 79905 - DNA, 25 bp, Artificial
  probe
  misc_feature (1)..(25): SEQ ID NO: 1350; WAN024BFP_at; Start 274; Stop 298
gaaaatcctaagtatccagttgtga

SEQ ID NO: 79906 - DNA, 25 bp, Artificial
  probe
  misc_feature (1)..(25): SEQ ID NO: 1350; WAN024BFP_at; Start 282; Stop 306
taagtatccagttgtgactgacggt

SEQ ID NO: 79907 - DNA, 25 bp, Artificial
  probe
  misc_feature (1)..(25): SEQ ID NO: 1350; WAN024BFP_at; Start 290; Stop 314
cagttgtgactgacggtgtgattca

SEQ ID NO: 79908 - DNA, 25 bp, Artificial
  probe
  misc_feature (1)..(25): SEQ ID NO: 839; WAN024BFQ_at; Start 1279; Stop 1303
aaagagtacgccctggtagacgcag

SEQ ID NO: 79909 - DNA, 25 bp, Artificial
  probe
  misc_feature (1)..(25): SEQ ID NO: 839; WAN024BFQ_at; Start 675; Stop 699
tgatgtcaaacgtcacctgcgcttg

SEQ ID NO: 79910 - DNA, 25 bp, Artificial
  probe
  misc_feature (1)..(25): SEQ ID NO: 839; WAN024BFQ_at; Start 497; Stop 521
caattgatgggaaaccttatcgggt

SEQ ID NO: 79911 - DNA, 25 bp, Artificial
  probe
  misc_feature (1)..(25): SEQ ID NO: 839; WAN024BFQ_at; Start 862; Stop 886
agcttatcagatgttccagaatggg

SEQ ID NO: 79912 - DNA, 25 bp, Artificial
  probe
  misc_feature (1)..(25): SEQ ID NO: 839; WAN024BFQ_at; Start 1058; Stop 1082
cggctaatgcggatgagagtaatct

SEQ ID NO: 79913 - DNA, 25 bp, Artificial
  probe
  misc_feature (1)..(25): SEQ ID NO: 839; WAN024BFQ_at; Start 518; Stop 542
gggtcacaccactagaatatgcaga

SEQ ID NO: 79914 - DNA, 25 bp, Artificial
  probe
  misc_feature (1)..(25): SEQ ID NO: 839; WAN024BFQ_at; Start 1169; Stop 1193
cagaaggtgctgttcaggagaaatc

SEQ ID NO: 79915 - DNA, 25 bp, Artificial
  probe
  misc_feature (1)..(25): SEQ ID NO: 839; WAN024BFQ_at; Start 158; Stop 182
tcaaaacggttcatgtgcgccacgg

SEQ ID NO: 79916 - DNA, 25 bp, Artificial
  probe
  misc_feature (1)..(25): SEQ ID NO: 839; WAN024BFQ_at; Start 472; Stop 496
gcggcagatacctatacccaattga

SEQ ID NO: 79917 - DNA, 25 bp, Artificial
  probe
  misc_feature (1)..(25): SEQ ID NO: 839; WAN024BFQ_at; Start 1122; Stop 1146
taagtatagcttggcttctgcgaca

SEQ ID NO: 79918 - DNA, 25 bp, Artificial
  probe
  misc_feature (1)..(25): SEQ ID NO: 839; WAN024BFQ_at; Start 82; Stop 106
gaatttctcttcttcctctgtgggc

SEQ ID NO: 79919 - DNA, 25 bp, Artificial
  probe
  misc_feature (1)..(25): SEQ ID NO: 839; WAN024BFQ_at; Start 259; Stop 283
ggaattcttctcttggcagctttgg

SEQ ID NO: 79920 - DNA, 25 bp, Artificial
  probe
  misc_feature (1)..(25): SEQ ID NO: 839; WAN024BFQ_at; Start 615; Stop 639
tgcggatttggtggacttgaagaca

SEQ ID NO: 79921 - DNA, 25 bp, Artificial
  probe
  misc_feature (1)..(25): SEQ ID NO: 839; WAN024BFQ_at; Start 66; Stop 90
taacctgaccagctgggaatttctc

SEQ ID NO: 79922 - DNA, 25 bp, Artificial
  probe
  misc_feature (1)..(25): SEQ ID NO: 839; WAN024BFQ_at; Start 1185; Stop 1209
ggagaaatcctacaaagcaaccttc

SEQ ID NO: 79923 - DNA, 25 bp, Artificial
  probe
  misc_feature (1)..(25): SEQ ID NO: 839; WAN024BFQ_at; Start 423; Stop 447
tggagaccgctacttgggttcccta

SEQ ID NO: 79924 - DNA, 25 bp, Artificial
  probe
  misc_feature (1)..(25): SEQ ID NO: 839; WAN024BFQ_at; Start 1042; Stop 1066
tacacaggtgtgacgtcggctaatg

SEQ ID NO: 79925 - DNA, 25 bp, Artificial
  probe
  misc_feature (1)..(25): SEQ ID NO: 839; WAN024BFQ_at; Start 1505; Stop 1529
tatccgatgaccttccttaccttga

SEQ ID NO: 79926 - DNA, 25 bp, Artificial
  probe
  misc_feature (1)..(25): SEQ ID NO: 839; WAN024BFQ_at; Start 1088; Stop 1112
tcatccttgaaaatatgcgaacagg

SEQ ID NO: 79927 - DNA, 25 bp, Artificial
  probe
  misc_feature (1)..(25): SEQ ID NO: 839; WAN024BFQ_at; Start 553; Stop 577
tggtttaacaatcaagccaagggaa

SEQ ID NO: 79928 - DNA, 25 bp, Artificial
  probe
  misc_feature (1)..(25): SEQ ID NO: 839; WAN024BFQ_at; Start 1295; Stop 1319
tagacgcagtcgagtaccaaaatgt

SEQ ID NO: 79929 - DNA, 25 bp, Artificial
  probe
  misc_feature (1)..(25): SEQ ID NO: 839; WAN024BFQ_at; Start 1150; Stop 1174
gaatcagcccgtgaatcagcagaag

SEQ ID NO: 79930 - DNA, 25 bp, Artificial
  probe
  misc_feature (1)..(25): SEQ ID NO: 839; WAN024BFQ_at; Start 765; Stop 789
tgtagcaacggtttaccaaaagcaa

SEQ ID NO: 79931 - DNA, 25 bp, Artificial
  probe
  misc_feature (1)..(25): SEQ ID NO: 839; WAN024BFQ_at; Start 186; Stop 210
ggcggaagctgccttaaatcttgag

SEQ ID NO: 79932 - DNA, 25 bp, Artificial
  probe
  misc_feature (1)..(25): SEQ ID NO: 839; WAN024BFQ_at; Start 720; Stop 744
taaaactccatcttttgaggtggac

SEQ ID NO: 79933 - DNA, 25 bp, Artificial
  probe
  misc_feature (1)..(25): SEQ ID NO: 839; WAN024BFQ_at; Start 1263; Stop 1287
caatgctggcttggtcaaagagtac

SEQ ID NO: 79934 - DNA, 25 bp, Artificial
  probe
  misc_feature (1)..(25): SEQ ID NO: 839; WAN024BFQ_at; Start 640; Stop 664
ccaatcaagtattcagactcggagt

SEQ ID NO: 79935 - DNA, 25 bp, Artificial
  probe
  misc_feature (1)..(25): SEQ ID NO: 839; WAN024BFQ_at; Start 1027; Stop 1051
aatgacatctatctctacacaggtg

SEQ ID NO: 79936 - DNA, 25 bp, Artificial
  probe
  misc_feature (1)..(25): SEQ ID NO: 839; WAN024BFQ_at; Start 827; Stop 851
tcttggatgctacaaatggagaaac

SEQ ID NO: 79937 - DNA, 25 bp, Artificial
  probe
  misc_feature (1)..(25): SEQ ID NO: 839; WAN024BFQ_at; Start 598; Stop 622
gacatggtaactggaaatgcggatt

SEQ ID NO: 79938 - DNA, 25 bp, Artificial
  probe
  misc_feature (1)..(25): SEQ ID NO: 839; WAN024BFQ_at; Start 898; Stop 922
tatccagcagaggaaaccattgagc

SEQ ID NO: 79939 - DNA, 25 bp, Artificial
  probe
  misc_feature (1)..(25): SEQ ID NO: 839; WAN024BFQ_at; Start 18; Stop 42
tgaacttatttttatcgcaacgacc

SEQ ID NO: 79940 - DNA, 25 bp, Artificial
  probe
  misc_feature (1)..(25): SEQ ID NO: 839; WAN024BFQ_at; Start 376; Stop 400
gacaccagtaaggttcctatcctag

SEQ ID NO: 79941 - DNA, 25 bp, Artificial
  probe
  misc_feature (1)..(25): SEQ ID NO: 839; WAN024BFQ_at; Start 748; Stop 772
gagggcaatcctttctatgtagcaa

SEQ ID NO: 79942 - DNA, 25 bp, Artificial
  probe
  misc_feature (1)..(25): SEQ ID NO: 1342; WAN024BFR_at; Start 610; Stop 634
gcccgtgatgtctctcaccgtgtta

SEQ ID NO: 79943 - DNA, 25 bp, Artificial
  probe
  misc_feature (1)..(25): SEQ ID NO: 1342; WAN024BFR_at; Start 506; Stop 530
catcagctctcgatccagaaatggt

SEQ ID NO: 79944 - DNA, 25 bp, Artificial
  probe
  misc_feature (1)..(25): SEQ ID NO: 1342; WAN024BFR_at; Start 209; Stop 233
tcgaaaaaggctatgacctcacgca

SEQ ID NO: 79945 - DNA, 25 bp, Artificial
  probe
  misc_feature (1)..(25): SEQ ID NO: 1342; WAN024BFR_at; Start 559; Stop 583
ctggctcaggaaggcttgaccatga

SEQ ID NO: 79946 - DNA, 25 bp, Artificial
  probe
  misc_feature (1)..(25): SEQ ID NO: 1342; WAN024BFR_at; Start 581; Stop 605
tgattgtcgtaacccatgaaatgga

SEQ ID NO: 79947 - DNA, 25 bp, Artificial
  probe
  misc_feature (1)..(25): SEQ ID NO: 1342; WAN024BFR_at; Start 37; Stop 61
aaatcctatggacaaaacgaagtgc

SEQ ID NO: 79948 - DNA, 25 bp, Artificial
  probe
  misc_feature (1)..(25): SEQ ID NO: 1342; WAN024BFR_at; Start 590; Stop 614
taacccatgaaatggaatttgcccg

SEQ ID NO: 79949 - DNA, 25 bp, Artificial
  probe
  misc_feature (1)..(25): SEQ ID NO: 1342; WAN024BFR_at; Start 169; Stop 193
ccaactgatggacaaatcctttatc

SEQ ID NO: 79950 - DNA, 25 bp, Artificial
  probe
  misc_feature (1)..(25): SEQ ID NO: 1342; WAN024BFR_at; Start 45; Stop 69
tggacaaaacgaagtgctaaaagac

SEQ ID NO: 79951 - DNA, 25 bp, Artificial
  probe
  misc_feature (1)..(25): SEQ ID NO: 1342; WAN024BFR_at; Start 265; Stop 289
tcctttaacctctttgaaaatctca

SEQ ID NO: 79952 - DNA, 25 bp, Artificial
  probe
  misc_feature (1)..(25): SEQ ID NO: 1342; WAN024BFR_at; Start 7; Stop 31
caagcaatccttgaaattaaacacc

SEQ ID NO: 79953 - DNA, 25 bp, Artificial
  probe
  misc_feature (1)..(25): SEQ ID NO: 1342; WAN024BFR_at; Start 292; Stop 316
gttcttgaaaacacaatcgtcgctc

SEQ ID NO: 79954 - DNA, 25 bp, Artificial
  probe
  misc_feature (1)..(25): SEQ ID NO: 1342; WAN024BFR_at; Start 178; Stop 202
ggacaaatcctttatcatggacaaa

SEQ ID NO: 79955 - DNA, 25 bp, Artificial
  probe
  misc_feature (1)..(25): SEQ ID NO: 1342; WAN024BFR_at; Start 366; Stop 390
agaaaacctggaaaaggtcggcatg

SEQ ID NO: 79956 - DNA, 25 bp, Artificial
  probe
  misc_feature (1)..(25): SEQ ID NO: 1342; WAN024BFR_at; Start 598; Stop 622
gaaatggaatttgcccgtgatgtct

SEQ ID NO: 79957 - DNA, 25 bp, Artificial
  probe
  misc_feature (1)..(25): SEQ ID NO: 1342; WAN024BFR_at; Start 378; Stop 402
aaaggtcggcatgggagaacgctac

SEQ ID NO: 79958 - DNA, 25 bp, Artificial
  probe
  misc_feature (1)..(25): SEQ ID NO: 1342; WAN024BFR_at; Start 297; Stop 321
tgaaaacacaatcgtcgctcagaca

SEQ ID NO: 79959 - DNA, 25 bp, Artificial
  probe
  misc_feature (1)..(25): SEQ ID NO: 1342; WAN024BFR_at; Start 215; Stop 239
aaggctatgacctcacgcaataccg

SEQ ID NO: 79960 - DNA, 25 bp, Artificial
  probe
  misc_feature (1)..(25): SEQ ID NO: 1342; WAN024BFR_at; Start 49; Stop 73
caaaacgaagtgctaaaagacattt

SEQ ID NO: 79961 - DNA, 25 bp, Artificial
  probe
  misc_feature (1)..(25): SEQ ID NO: 1342; WAN024BFR_at; Start 498; Stop 522
tgaaccaacatcagctctcgatcca

SEQ ID NO: 79962 - DNA, 25 bp, Artificial
  probe
  misc_feature (1)..(25): SEQ ID NO: 1342; WAN024BFR_at; Start 305; Stop 329
caatcgtcgctcagacaactgtcct

SEQ ID NO: 79963 - DNA, 25 bp, Artificial
  probe
  misc_feature (1)..(25): SEQ ID NO: 1342; WAN024BFR_at; Start 572; Stop 596
gcttgaccatgattgtcgtaaccca

SEQ ID NO: 79964 - DNA, 25 bp, Artificial
  probe
  misc_feature (1)..(25): SEQ ID NO: 1342; WAN024BFR_at; Start 199; Stop 223
caaaacgtcctcgaaaaaggctatg

SEQ ID NO: 79965 - DNA, 25 bp, Artificial
  probe
  misc_feature (1)..(25): SEQ ID NO: 1342; WAN024BFR_at; Start 604; Stop 628
gaatttgcccgtgatgtctctcacc

SEQ ID NO: 79966 - DNA, 25 bp, Artificial
  probe
  misc_feature (1)..(25): SEQ ID NO: 1342; WAN024BFR_at; Start 441; Stop 465
acaacgtgtggccatcgctcgtgcc

SEQ ID NO: 79967 - DNA, 25 bp, Artificial
  probe
  misc_feature (1)..(25): SEQ ID NO: 1342; WAN024BFR_at; Start 143; Stop 167
tacgctccattaacctacttgaaac

SEQ ID NO: 79968 - DNA, 25 bp, Artificial
  probe
  misc_feature (1)..(25): SEQ ID NO: 1342; WAN024BFR_at; Start 222; Stop 246
tgacctcacgcaataccgtgaaaag

SEQ ID NO: 79969 - DNA, 25 bp, Artificial
  probe
  misc_feature (1)..(25): SEQ ID NO: 1342; WAN024BFR_at; Start 187; Stop 211
ctttatcatggacaaaacgtcctcg

SEQ ID NO: 79970 - DNA, 25 bp, Artificial
  probe
  misc_feature (1)..(25): SEQ ID NO: 1342; WAN024BFR_at; Start 24; Stop 48
taaacacctcaaaaaatcctatgga

SEQ ID NO: 79971 - DNA, 25 bp, Artificial
  probe
  misc_feature (1)..(25): SEQ ID NO: 1342; WAN024BFR_at; Start 384; Stop 408
cggcatgggagaacgctactggcaa

SEQ ID NO: 79972 - DNA, 25 bp, Artificial
  probe
  misc_feature (1)..(25): SEQ ID NO: 1342; WAN024BFR_at; Start 620; Stop 644
tctctcaccgtgttatctttatgga

SEQ ID NO: 79973 - DNA, 25 bp, Artificial
  probe
  misc_feature (1)..(25): SEQ ID NO: 1342; WAN024BFR_at; Start 565; Stop 589
caggaaggcttgaccatgattgtcg

SEQ ID NO: 79974 - DNA, 25 bp, Artificial
  probe
  misc_feature (1)..(25): SEQ ID NO: 1342; WAN024BFR_at; Start 625; Stop 649
caccgtgttatctttatggataagg

SEQ ID NO: 79975 - DNA, 25 bp, Artificial
  probe
  misc_feature (1)..(25): SEQ ID NO: 1342; WAN024BFR_at; Start 512; Stop 536
ctctcgatccagaaatggttggaga

SEQ ID NO: 79976 - DNA, 25 bp, Artificial
  probe
  misc_feature (1)..(25): SEQ ID NO: 5854; WAN024BFS_at; Start 406; Stop 430
gcaattcgcaatgctttggcagact

SEQ ID NO: 79977 - DNA, 25 bp, Artificial
  probe
  misc_feature (1)..(25): SEQ ID NO: 5854; WAN024BFS_at; Start 94; Stop 118
gtggcaatctttctacgtaagcgaa

SEQ ID NO: 79978 - DNA, 25 bp, Artificial
  probe
  misc_feature (1)..(25): SEQ ID NO: 5854; WAN024BFS_at; Start 593; Stop 617
taaccttgaattcatcgggtgaccc

SEQ ID NO: 79979 - DNA, 25 bp, Artificial
  probe
  misc_feature (1)..(25): SEQ ID NO: 5854; WAN024BFS_at; Start 792; Stop 816
aacggatattgaagcgcgtttccac

SEQ ID NO: 79980 - DNA, 25 bp, Artificial
  probe
  misc_feature (1)..(25): SEQ ID NO: 5854; WAN024BFS_at; Start 858; Stop 882
tcagttggaattggataatgccgaa

SEQ ID NO: 79981 - DNA, 25 bp, Artificial
  probe
  misc_feature (1)..(25): SEQ ID NO: 5854; WAN024BFS_at; Start 1153; Stop 1177
gaagaaccaacccaagcttattcag

SEQ ID NO: 79982 - DNA, 25 bp, Artificial
  probe
  misc_feature (1)..(25): SEQ ID NO: 5854; WAN024BFS_at; Start 1061; Stop 1085
tacttcctgagacagctgcaagcca

SEQ ID NO: 79983 - DNA, 25 bp, Artificial
  probe
  misc_feature (1)..(25): SEQ ID NO: 5854; WAN024BFS_at; Start 1233; Stop 1257
gcaaatttcagttagtgagcgcctg

SEQ ID NO: 79984 - DNA, 25 bp, Artificial
  probe
  misc_feature (1)..(25): SEQ ID NO: 5854; WAN024BFS_at; Start 672; Stop 696
tcatattgtggatcgtgttccagcc

SEQ ID NO: 79985 - DNA, 25 bp, Artificial
  probe
  misc_feature (1)..(25): SEQ ID NO: 5854; WAN024BFS_at; Start 687; Stop 711
tgttccagccttggttacgacgctt

SEQ ID NO: 79986 - DNA, 25 bp, Artificial
  probe
  misc_feature (1)..(25): SEQ ID NO: 5854; WAN024BFS_at; Start 946; Stop 970
gctgctcagaaagtagtggaaaatc

SEQ ID NO: 79987 - DNA, 25 bp, Artificial
  probe
  misc_feature (1)..(25): SEQ ID NO: 5854; WAN024BFS_at; Start 1566; Stop 1590
taaccgctatcgctcatttgatgaa

SEQ ID NO: 79988 - DNA, 25 bp, Artificial
  probe
  misc_feature (1)..(25): SEQ ID NO: 5854; WAN024BFS_at; Start 1533; Stop 1557
tgcaactttgacagagcaactcttg

SEQ ID NO: 79989 - DNA, 25 bp, Artificial
  probe
  misc_feature (1)..(25): SEQ ID NO: 5854; WAN024BFS_at; Start 329; Stop 353
catttcgttttctcaaggccagtca

SEQ ID NO: 79990 - DNA, 25 bp, Artificial
  probe
  misc_feature (1)..(25): SEQ ID NO: 5854; WAN024BFS_at; Start 878; Stop 902
ccgaatatgagaatggacaggcaca

SEQ ID NO: 79991 - DNA, 25 bp, Artificial
  probe
  misc_feature (1)..(25): SEQ ID NO: 5854; WAN024BFS_at; Start 1461; Stop 1485
tacccgagttcttgaaattgcaacg

SEQ ID NO: 79992 - DNA, 25 bp, Artificial
  probe
  misc_feature (1)..(25): SEQ ID NO: 5854; WAN024BFS_at; Start 1033; Stop 1057
gatattgcacgtttgaacaagacct

SEQ ID NO: 79993 - DNA, 25 bp, Artificial
  probe
  misc_feature (1)..(25): SEQ ID NO: 5854; WAN024BFS_at; Start 1687; Stop 1711
gcagagcctggtgtaaccaatcgct

SEQ ID NO: 79994 - DNA, 25 bp, Artificial
  probe
  misc_feature (1)..(25): SEQ ID NO: 5854; WAN024BFS_at; Start 1671; Stop 1695
tcaagcattggaagtggcagagcct

SEQ ID NO: 79995 - DNA, 25 bp, Artificial
  probe
  misc_feature (1)..(25): SEQ ID NO: 5854; WAN024BFS_at; Start 449; Stop 473
aaaatagtggtcgtgttcttcatgc

SEQ ID NO: 79996 - DNA, 25 bp, Artificial
  probe
  misc_feature (1)..(25): SEQ ID NO: 5854; WAN024BFS_at; Start 517; Stop 541
tcagaacagtatggtcaagccttgg

SEQ ID NO: 79997 - DNA, 25 bp, Artificial
  probe
  misc_feature (1)..(25): SEQ ID NO: 5854; WAN024BFS_at; Start 222; Stop 246
aagtcaagtggctttccgtgaatgg

SEQ ID NO: 79998 - DNA, 25 bp, Artificial
  probe
  misc_feature (1)..(25): SEQ ID NO: 5854; WAN024BFS_at; Start 1103; Stop 1127
cagaattagagagttttgaggcagc

SEQ ID NO: 79999 - DNA, 25 bp, Artificial
  probe
  misc_feature (1)..(25): SEQ ID NO: 5854; WAN024BFS_at; Start 1119; Stop 1143
tgaggcagctattgttgaggtaact

SEQ ID NO: 80000 - DNA, 25 bp, Artificial
  probe
  misc_feature (1)..(25): SEQ ID NO: 5854; WAN024BFS_at; Start 1349; Stop 1373
gcaatctgccaggtattccacaaac

SEQ ID NO: 80001 - DNA, 25 bp, Artificial
  probe
  misc_feature (1)..(25): SEQ ID NO: 5854; WAN024BFS_at; Start 1334; Stop 1358
gatacatggaaaaacgcaatctgcc

SEQ ID NO: 80002 - DNA, 25 bp, Artificial
  probe
  misc_feature (1)..(25): SEQ ID NO: 5854; WAN024BFS_at; Start 422; Stop 446
tggcagacttagagaagcaagaatc

SEQ ID NO: 80003 - DNA, 25 bp, Artificial
  probe
  misc_feature (1)..(25): SEQ ID NO: 5854; WAN024BFS_at; Start 893; Stop 917
gacaggcacaagaggaaatcaatgc

SEQ ID NO: 80004 - DNA, 25 bp, Artificial
  probe
  misc_feature (1)..(25): SEQ ID NO: 5854; WAN024BFS_at; Start 1281; Stop 1305
taatgcacgtcaaaaggccaatgtt

SEQ ID NO: 80005 - DNA, 25 bp, Artificial
  probe
  misc_feature (1)..(25): SEQ ID NO: 5854; WAN024BFS_at; Start 612; Stop 636
tgaccctgtggaagccgcagtgatt

SEQ ID NO: 80006 - DNA, 25 bp, Artificial
  probe
  misc_feature (1)..(25): SEQ ID NO: 5854; WAN024BFS_at; Start 1390; Stop 1414
tttacggcaagcaataataccgagg

SEQ ID NO: 80007 - DNA, 25 bp, Artificial
  probe
  misc_feature (1)..(25): SEQ ID NO: 5854; WAN024BFS_at; Start 237; Stop 261
ccgtgaatggaatcaaaaatgggtc

SEQ ID NO: 80008 - DNA, 25 bp, Artificial
  probe
  misc_feature (1)..(25): SEQ ID NO: 5854; WAN024BFS_at; Start 1078; Stop 1102
gcaagccatgttcgtcgtattcaga

SEQ ID NO: 80009 - DNA, 25 bp, Artificial
  probe
  misc_feature (1)..(25): SEQ ID NO: 5854; WAN024BFS_at; Start 1248; Stop 1272
tgagcgcctgacacaaattgagaaa

SEQ ID NO: 80010 - DNA, 25 bp, Artificial
  probe
  misc_feature (1)..(25): SEQ ID NO: 4860; WAN024BFT_at; Start 45; Stop 69
ttccttttctactgaaattgagtct

SEQ ID NO: 80011 - DNA, 25 bp, Artificial
  probe
  misc_feature (1)..(25): SEQ ID NO: 4860; WAN024BFT_at; Start 47; Stop 71
ccttttctactgaaattgagtcttt

SEQ ID NO: 80012 - DNA, 25 bp, Artificial
  probe
  misc_feature (1)..(25): SEQ ID NO: 4860; WAN024BFT_at; Start 43; Stop 67
acttccttttctactgaaattgagt

SEQ ID NO: 80013 - DNA, 25 bp, Artificial
  probe
  misc_feature (1)..(25): SEQ ID NO: 4860; WAN024BFT_at; Start 41; Stop 65
ttacttccttttctactgaaattga

SEQ ID NO: 80014 - DNA, 25 bp, Artificial
  probe
  misc_feature (1)..(25): SEQ ID NO: 4860; WAN024BFT_at; Start 35; Stop 59
gaagatttacttccttttctactga

SEQ ID NO: 80015 - DNA, 25 bp, Artificial
  probe
  misc_feature (1)..(25): SEQ ID NO: 4860; WAN024BFT_at; Start 46; Stop 70
tccttttctactgaaattgagtctt

SEQ ID NO: 80016 - DNA, 25 bp, Artificial
  probe
  misc_feature (1)..(25): SEQ ID NO: 4860; WAN024BFT_at; Start 42; Stop 66
tacttccttttctactgaaattgag

SEQ ID NO: 80017 - DNA, 25 bp, Artificial
  probe
  misc_feature (1)..(25): SEQ ID NO: 4860; WAN024BFT_at; Start 48; Stop 72
cttttctactgaaattgagtctttt

SEQ ID NO: 80018 - DNA, 25 bp, Artificial
  probe
  misc_feature (1)..(25): SEQ ID NO: 4860; WAN024BFT_at; Start 44; Stop 68
cttccttttctactgaaattgagtc

SEQ ID NO: 80019 - DNA, 25 bp, Artificial
  probe
  misc_feature (1)..(25): SEQ ID NO: 1637; WAN024BFU_at; Start 101; Stop 125
taatcggtgtcaatgggactggcaa

SEQ ID NO: 80020 - DNA, 25 bp, Artificial
  probe
  misc_feature (1)..(25): SEQ ID NO: 1637; WAN024BFU_at; Start 1439; Stop 1463
tcttgcaaggttttgcaggtcccgt

SEQ ID NO: 80021 - DNA, 25 bp, Artificial
  probe
  misc_feature (1)..(25): SEQ ID NO: 1637; WAN024BFU_at; Start 1370; Stop 1394
caaatgttcttcttttagacgagcc

SEQ ID NO: 80022 - DNA, 25 bp, Artificial
  probe
  misc_feature (1)..(25): SEQ ID NO: 1637; WAN024BFU_at; Start 1887; Stop 1911
caaagtgcaaactatgtcggcttca

SEQ ID NO: 80023 - DNA, 25 bp, Artificial
  probe
  misc_feature (1)..(25): SEQ ID NO: 1637; WAN024BFU_at; Start 1774; Stop 1798
ggtaagctggctactctccaaaaag

SEQ ID NO: 80024 - DNA, 25 bp, Artificial
  probe
  misc_feature (1)..(25): SEQ ID NO: 1637; WAN024BFU_at; Start 202; Stop 226
taccagattggttacttgactcagg

SEQ ID NO: 80025 - DNA, 25 bp, Artificial
  probe
  misc_feature (1)..(25): SEQ ID NO: 1637; WAN024BFU_at; Start 1594; Stop 1618
gatatggccaatcaagtgcaaaagg

SEQ ID NO: 80026 - DNA, 25 bp, Artificial
  probe
  misc_feature (1)..(25): SEQ ID NO: 1637; WAN024BFU_at; Start 1637; Stop 1661
tcaaggttcgagaagacaagaaacg

SEQ ID NO: 80027 - DNA, 25 bp, Artificial
  probe
  misc_feature (1)..(25): SEQ ID NO: 1637; WAN024BFU_at; Start 1819; Stop 1843
gcactccttgaaaaatacgaacgct

SEQ ID NO: 80028 - DNA, 25 bp, Artificial
  probe
  misc_feature (1)..(25): SEQ ID NO: 1637; WAN024BFU_at; Start 1755; Stop 1779
ggctaacggctctgactttggtaag

SEQ ID NO: 80029 - DNA, 25 bp, Artificial
  probe
  misc_feature (1)..(25): SEQ ID NO: 1637; WAN024BFU_at; Start 1402; Stop 1426
gacctagatattgcaactttgacag

SEQ ID NO: 80030 - DNA, 25 bp, Artificial
  probe
  misc_feature (1)..(25): SEQ ID NO: 1637; WAN024BFU_at; Start 646; Stop 670
gacgctttgtcaacacggattttcg

SEQ ID NO: 80031 - DNA, 25 bp, Artificial
  probe
  misc_feature (1)..(25): SEQ ID NO: 1637; WAN024BFU_at; Start 482; Stop 506
gaagacgggtacagttggcacaagt

SEQ ID NO: 80032 - DNA, 25 bp, Artificial
  probe
  misc_feature (1)..(25): SEQ ID NO: 1637; WAN024BFU_at; Start 411; Stop 435
caagaccgttcttagcaaattgggc

SEQ ID NO: 80033 - DNA, 25 bp, Artificial
  probe
  misc_feature (1)..(25): SEQ ID NO: 1637; WAN024BFU_at; Start 564; Stop 588
tgcgattattgagtggctgaccctc

SEQ ID NO: 80034 - DNA, 25 bp, Artificial
  probe
  misc_feature (1)..(25): SEQ ID NO: 1637; WAN024BFU_at; Start 349; Stop 373
cgtttggaacgtgtcatggcagaga

SEQ ID NO: 80035 - DNA, 25 bp, Artificial
  probe
  misc_feature (1)..(25): SEQ ID NO: 1637; WAN024BFU_at; Start 1385; Stop 1409
tagacgagccaaccaatgacctaga

SEQ ID NO: 80036 - DNA, 25 bp, Artificial
  probe
  misc_feature (1)..(25): SEQ ID NO: 1637; WAN024BFU_at; Start 116; Stop 140
ggactggcaagaccacccttttgga

SEQ ID NO: 80037 - DNA, 25 bp, Artificial
  probe
  misc_feature (1)..(25): SEQ ID NO: 1637; WAN024BFU_at; Start 326; Stop 350
actatagtgaggacaagcaggcgcg

SEQ ID NO: 80038 - DNA, 25 bp, Artificial
  probe
  misc_feature (1)..(25): SEQ ID NO: 1637; WAN024BFU_at; Start 1667; Stop 1691
cctaccaagaaaagcaggagtgggc

SEQ ID NO: 80039 - DNA, 25 bp, Artificial
  probe
  misc_feature (1)..(25): SEQ ID NO: 1637; WAN024BFU_at; Start 28; Stop 52
agtaaatccgttggtgacaagaccg

SEQ ID NO: 80040 - DNA, 25 bp, Artificial
  probe
  misc_feature (1)..(25): SEQ ID NO: 1637; WAN024BFU_at; Start 282; Stop 306
caaggaaatccagctcattcgtgag

SEQ ID NO: 80041 - DNA, 25 bp, Artificial
  probe
  misc_feature (1)..(25): SEQ ID NO: 1637; WAN024BFU_at; Start 1509; Stop 1533
caagattctcgcttttgaggatggc

SEQ ID NO: 80042 - DNA, 25 bp, Artificial
  probe
  misc_feature (1)..(25): SEQ ID NO: 1637; WAN024BFU_at; Start 1454; Stop 1478
caggtcccgttttaacagtcagtca

SEQ ID NO: 80043 - DNA, 25 bp, Artificial
  probe
  misc_feature (1)..(25): SEQ ID NO: 1637; WAN024BFU_at; Start 1495; Stop 1519
gataaggtagcgaccaagattctcg

SEQ ID NO: 80044 - DNA, 25 bp, Artificial
  probe
  misc_feature (1)..(25): SEQ ID NO: 1637; WAN024BFU_at; Start 1715; Stop 1739
ccttggaaaaacgtatcgctgctat

SEQ ID NO: 80045 - DNA, 25 bp, Artificial
  probe
  misc_feature (1)..(25): SEQ ID NO: 1637; WAN024BFU_at; Start 538; Stop 562
gatgagccgaccaaccatctggata

SEQ ID NO: 80046 - DNA, 25 bp, Artificial
  probe
  misc_feature (1)..(25): SEQ ID NO: 1637; WAN024BFU_at; Start 1932; Stop 1956
cctgtgaccggcttcctaatttgca

SEQ ID NO: 80047 - DNA, 25 bp, Artificial
  probe
  misc_feature (1)..(25): SEQ ID NO: 1637; WAN024BFU_at; Start 372; Stop 396
gatggactctctccaagcttgggaa

SEQ ID NO: 80048 - DNA, 25 bp, Artificial
  probe
  misc_feature (1)..(25): SEQ ID NO: 1637; WAN024BFU_at; Start 1651; Stop 1675
gacaagaaacgcatgacctaccaag

SEQ ID NO: 80049 - DNA, 25 bp, Artificial
  probe
  misc_feature (1)..(25): SEQ ID NO: 1637; WAN024BFU_at; Start 1740; Stop 1764
tgaagaggaaatgcaggctaacggc

SEQ ID NO: 80050 - DNA, 25 bp, Artificial
  probe
  misc_feature (1)..(25): SEQ ID NO: 1637; WAN024BFU_at; Start 927; Stop 951
cagtcggattgggaagaaagtcatc

SEQ ID NO: 80051 - DNA, 25 bp, Artificial
  probe
  misc_feature (1)..(25): SEQ ID NO: 1637; WAN024BFU_at; Start 1476; Stop 1500
tcacgaccgctatttcttggataag

SEQ ID NO: 80052 - DNA, 25 bp, Artificial
  probe
  misc_feature (1)..(25): SEQ ID NO: 1637; WAN024BFU_at; Start 171; Stop 195
ggatgtcagtcctttttcagctaaa

SEQ ID NO: 80053 - DNA, 25 bp, Artificial
  probe
  misc_feature (1)..(25): SEQ ID NO: 4912; WAN024BFV_at; Start 17; Stop 41
gtgagtttggaaataatatccaagc

SEQ ID NO: 80054 - DNA, 25 bp, Artificial
  probe
  misc_feature (1)..(25): SEQ ID NO: 4912; WAN024BFV_at; Start 43; Stop 67
cattttttctcagactgcaagcagt

SEQ ID NO: 80055 - DNA, 25 bp, Artificial
  probe
  misc_feature (1)..(25): SEQ ID NO: 4912; WAN024BFV_at; Start 48; Stop 72
tttctcagactgcaagcagttcatc

SEQ ID NO: 80056 - DNA, 25 bp, Artificial
  probe
  misc_feature (1)..(25): SEQ ID NO: 4912; WAN024BFV_at; Start 42; Stop 66
tcattttttctcagactgcaagcag

SEQ ID NO: 80057 - DNA, 25 bp, Artificial
  probe
  misc_feature (1)..(25): SEQ ID NO: 4912; WAN024BFV_at; Start 38; Stop 62
aagctcattttttctcagactgcaa

SEQ ID NO: 80058 - DNA, 25 bp, Artificial
  probe
  misc_feature (1)..(25): SEQ ID NO: 4912; WAN024BFV_at; Start 39; Stop 63
agctcattttttctcagactgcaag

SEQ ID NO: 80059 - DNA, 25 bp, Artificial
  probe
  misc_feature (1)..(25): SEQ ID NO: 4912; WAN024BFV_at; Start 21; Stop 45
gtttggaaataatatccaagctcat

SEQ ID NO: 80060 - DNA, 25 bp, Artificial
  probe
  misc_feature (1)..(25): SEQ ID NO: 4912; WAN024BFV_at; Start 6; Stop 30
attgactttaagtgagtttggaaat

SEQ ID NO: 80061 - DNA, 25 bp, Artificial
  probe
  misc_feature (1)..(25): SEQ ID NO: 4912; WAN024BFV_at; Start 13; Stop 37
ttaagtgagtttggaaataatatcc

SEQ ID NO: 80062 - DNA, 25 bp, Artificial
  probe
  misc_feature (1)..(25): SEQ ID NO: 4912; WAN024BFV_at; Start 24; Stop 48
tggaaataatatccaagctcatttt

SEQ ID NO: 80063 - DNA, 25 bp, Artificial
  probe
  misc_feature (1)..(25): SEQ ID NO: 4912; WAN024BFV_at; Start 40; Stop 64
gctcattttttctcagactgcaagc

SEQ ID NO: 80064 - DNA, 25 bp, Artificial
  probe
  misc_feature (1)..(25): SEQ ID NO: 4912; WAN024BFV_at; Start 63; Stop 87
gcagttcatcaataagatttatact

SEQ ID NO: 80065 - DNA, 25 bp, Artificial
  probe
  misc_feature (1)..(25): SEQ ID NO: 4912; WAN024BFV_at; Start 8; Stop 32
tgactttaagtgagtttggaaataa

SEQ ID NO: 80066 - DNA, 25 bp, Artificial
  probe
  misc_feature (1)..(25): SEQ ID NO: 4912; WAN024BFV_at; Start 41; Stop 65
ctcattttttctcagactgcaagca

SEQ ID NO: 80067 - DNA, 25 bp, Artificial
  probe
  misc_feature (1)..(25): SEQ ID NO: 4912; WAN024BFV_at; Start 62; Stop 86
agcagttcatcaataagatttatac

SEQ ID NO: 80068 - DNA, 25 bp, Artificial
  probe
  misc_feature (1)..(25): SEQ ID NO: 4912; WAN024BFV_at; Start 35; Stop 59
tccaagctcattttttctcagactg

SEQ ID NO: 80069 - DNA, 25 bp, Artificial
  probe
  misc_feature (1)..(25): SEQ ID NO: 4912; WAN024BFV_at; Start 19; Stop 43
gagtttggaaataatatccaagctc

SEQ ID NO: 80070 - DNA, 25 bp, Artificial
  probe
  misc_feature (1)..(25): SEQ ID NO: 4912; WAN024BFV_at; Start 18; Stop 42
tgagtttggaaataatatccaagct

SEQ ID NO: 80071 - DNA, 25 bp, Artificial
  probe
  misc_feature (1)..(25): SEQ ID NO: 4912; WAN024BFV_at; Start 36; Stop 60
ccaagctcattttttctcagactgc

SEQ ID NO: 80072 - DNA, 25 bp, Artificial
  probe
  misc_feature (1)..(25): SEQ ID NO: 4912; WAN024BFV_at; Start 69; Stop 93
catcaataagatttatactcttcga

SEQ ID NO: 80073 - DNA, 25 bp, Artificial
  probe
  misc_feature (1)..(25): SEQ ID NO: 4912; WAN024BFV_at; Start 49; Stop 73
ttctcagactgcaagcagttcatca

SEQ ID NO: 80074 - DNA, 25 bp, Artificial
  probe
  misc_feature (1)..(25): SEQ ID NO: 4912; WAN024BFV_at; Start 14; Stop 38
taagtgagtttggaaataatatcca

SEQ ID NO: 80075 - DNA, 25 bp, Artificial
  probe
  misc_feature (1)..(25): SEQ ID NO: 4912; WAN024BFV_at; Start 33; Stop 57
tatccaagctcattttttctcagac

SEQ ID NO: 80076 - DNA, 25 bp, Artificial
  probe
  misc_feature (1)..(25): SEQ ID NO: 4912; WAN024BFV_at; Start 44; Stop 68
attttttctcagactgcaagcagtt

SEQ ID NO: 80077 - DNA, 25 bp, Artificial
  probe
  misc_feature (1)..(25): SEQ ID NO: 4912; WAN024BFV_at; Start 25; Stop 49
ggaaataatatccaagctcattttt

SEQ ID NO: 80078 - DNA, 25 bp, Artificial
  probe
  misc_feature (1)..(25): SEQ ID NO: 4912; WAN024BFV_at; Start 64; Stop 88
cagttcatcaataagatttatactc

SEQ ID NO: 80079 - DNA, 25 bp, Artificial
  probe
  misc_feature (1)..(25): SEQ ID NO: 4912; WAN024BFV_at; Start 3; Stop 27
gaaattgactttaagtgagtttgga

SEQ ID NO: 80080 - DNA, 25 bp, Artificial
  probe
  misc_feature (1)..(25): SEQ ID NO: 4912; WAN024BFV_at; Start 46; Stop 70
tttttctcagactgcaagcagttca

SEQ ID NO: 80081 - DNA, 25 bp, Artificial
  probe
  misc_feature (1)..(25): SEQ ID NO: 4912; WAN024BFV_at; Start 45; Stop 69
ttttttctcagactgcaagcagttc

SEQ ID NO: 80082 - DNA, 25 bp, Artificial
  probe
  misc_feature (1)..(25): SEQ ID NO: 4912; WAN024BFV_at; Start 68; Stop 92
tcatcaataagatttatactcttcg

SEQ ID NO: 80083 - DNA, 25 bp, Artificial
  probe
  misc_feature (1)..(25): SEQ ID NO: 4912; WAN024BFV_at; Start 50; Stop 74
tctcagactgcaagcagttcatcaa

SEQ ID NO: 80084 - DNA, 25 bp, Artificial
  probe
  misc_feature (1)..(25): SEQ ID NO: 4912; WAN024BFV_at; Start 31; Stop 55
aatatccaagctcattttttctcag

SEQ ID NO: 80085 - DNA, 25 bp, Artificial
  probe
  misc_feature (1)..(25): SEQ ID NO: 4912; WAN024BFV_at; Start 37; Stop 61
caagctcattttttctcagactgca

SEQ ID NO: 80086 - DNA, 25 bp, Artificial
  probe
  misc_feature (1)..(25): SEQ ID NO: 4912; WAN024BFV_at; Start 47; Stop 71
ttttctcagactgcaagcagttcat

SEQ ID NO: 80087 - DNA, 25 bp, Artificial
  probe
  misc_feature (1)..(25): SEQ ID NO: 670; WAN024BFW_at; Start 220; Stop 244
ttggatatccaataccttggctggg

SEQ ID NO: 80088 - DNA, 25 bp, Artificial
  probe
  misc_feature (1)..(25): SEQ ID NO: 670; WAN024BFW_at; Start 1243; Stop 1267
gctaaagaatctccagcgcttggat

SEQ ID NO: 80089 - DNA, 25 bp, Artificial
  probe
  misc_feature (1)..(25): SEQ ID NO: 670; WAN024BFW_at; Start 715; Stop 739
tacgaagtgcctcgtttcaaagaac

SEQ ID NO: 80090 - DNA, 25 bp, Artificial
  probe
  misc_feature (1)..(25): SEQ ID NO: 670; WAN024BFW_at; Start 442; Stop 466
tacgctgttccagttgcagccaacg

SEQ ID NO: 80091 - DNA, 25 bp, Artificial
  probe
  misc_feature (1)..(25): SEQ ID NO: 670; WAN024BFW_at; Start 1046; Stop 1070
tgaacggtcttgtttacggtccaga

SEQ ID NO: 80092 - DNA, 25 bp, Artificial
  probe
  misc_feature (1)..(25): SEQ ID NO: 670; WAN024BFW_at; Start 1102; Stop 1126
gaaaaccgtgttcgcgttcttgatg

SEQ ID NO: 80093 - DNA, 25 bp, Artificial
  probe
  misc_feature (1)..(25): SEQ ID NO: 670; WAN024BFW_at; Start 854; Stop 878
taggaccagctgactacggtaacag

SEQ ID NO: 80094 - DNA, 25 bp, Artificial
  probe
  misc_feature (1)..(25): SEQ ID NO: 670; WAN024BFW_at; Start 475; Stop 499
tctcaaaactttgccttcaacggaa

SEQ ID NO: 80095 - DNA, 25 bp, Artificial
  probe
  misc_feature (1)..(25): SEQ ID NO: 670; WAN024BFW_at; Start 779; Stop 803
ttccaaaagacgtcgcaacaagcga

SEQ ID NO: 80096 - DNA, 25 bp, Artificial
  probe
  misc_feature (1)..(25): SEQ ID NO: 670; WAN024BFW_at; Start 134; Stop 158
tgtaccaaatcggtgacaaaccaga

SEQ ID NO: 80097 - DNA, 25 bp, Artificial
  probe
  misc_feature (1)..(25): SEQ ID NO: 670; WAN024BFW_at; Start 1393; Stop 1417
aaattgaaatctgaaggtgcctacg

SEQ ID NO: 80098 - DNA, 25 bp, Artificial
  probe
  misc_feature (1)..(25): SEQ ID NO: 670; WAN024BFW_at; Start 382; Stop 406
gacctttacaaagcacttgacccag

SEQ ID NO: 80099 - DNA, 25 bp, Artificial
  probe
  misc_feature (1)..(25): SEQ ID NO: 670; WAN024BFW_at; Start 875; Stop 899
acagcttgctttcacgtgttgccaa

SEQ ID NO: 80100 - DNA, 25 bp, Artificial
  probe
  misc_feature (1)..(25): SEQ ID NO: 670; WAN024BFW_at; Start 496; Stop 520
ggaactctccttgctaaatatggta

SEQ ID NO: 80101 - DNA, 25 bp, Artificial
  probe
  misc_feature (1)..(25): SEQ ID NO: 670; WAN024BFW_at; Start 457; Stop 481
gcagccaacgttgcatcatctcaaa

SEQ ID NO: 80102 - DNA, 25 bp, Artificial
  probe
  misc_feature (1)..(25): SEQ ID NO: 670; WAN024BFW_at; Start 165; Stop 189
ggatgaattgttagcaaatgccaac

SEQ ID NO: 80103 - DNA, 25 bp, Artificial
  probe
  misc_feature (1)..(25): SEQ ID NO: 670; WAN024BFW_at; Start 1060; Stop 1084
tacggtccagaaggcaagaactggg

SEQ ID NO: 80104 - DNA, 25 bp, Artificial
  probe
  misc_feature (1)..(25): SEQ ID NO: 670; WAN024BFW_at; Start 766; Stop 790
gaagctggctacattccaaaagacg

SEQ ID NO: 80105 - DNA, 25 bp, Artificial
  probe
  misc_feature (1)..(25): SEQ ID NO: 670; WAN024BFW_at; Start 642; Stop 666
tgactacccagtagcaaacggtctt

SEQ ID NO: 80106 - DNA, 25 bp, Artificial
  probe
  misc_feature (1)..(25): SEQ ID NO: 670; WAN024BFW_at; Start 823; Stop 847
caagatacttggttcgttcgtgaag

SEQ ID NO: 80107 - DNA, 25 bp, Artificial
  probe
  misc_feature (1)..(25): SEQ ID NO: 670; WAN024BFW_at; Start 1341; Stop 1365
tatcaacactggtactgtagaccca

SEQ ID NO: 80108 - DNA, 25 bp, Artificial
  probe
  misc_feature (1)..(25): SEQ ID NO: 670; WAN024BFW_at; Start 668; Stop 692
cattcgttatcgaccttgaaggcga

SEQ ID NO: 80109 - DNA, 25 bp, Artificial
  probe
  misc_feature (1)..(25): SEQ ID NO: 670; WAN024BFW_at; Start 537; Stop 561
tacttcttacgaaactcttgagcca

SEQ ID NO: 80110 - DNA, 25 bp, Artificial
  probe
  misc_feature (1)..(25): SEQ ID NO: 670; WAN024BFW_at; Start 1008; Stop 1032
ggaaatcttgaacctcttgaatacg

SEQ ID NO: 80111 - DNA, 25 bp, Artificial
  probe
  misc_feature (1)..(25): SEQ ID NO: 670; WAN024BFW_at; Start 327; Stop 351
tgctcaaaaaggtgcttacgctgac

SEQ ID NO: 80112 - DNA, 25 bp, Artificial
  probe
  misc_feature (1)..(25): SEQ ID NO: 670; WAN024BFW_at; Start 98; Stop 122
aagctgctgattcaggtgacaaacc

SEQ ID NO: 80113 - DNA, 25 bp, Artificial
  probe
  misc_feature (1)..(25): SEQ ID NO: 670; WAN024BFW_at; Start 81; Stop 105
gacaggtaacagcaaaaaagctgct

SEQ ID NO: 80114 - DNA, 25 bp, Artificial
  probe
  misc_feature (1)..(25): SEQ ID NO: 670; WAN024BFW_at; Start 1119; Stop 1143
tcttgatggctacaaaggaaacact

SEQ ID NO: 80115 - DNA, 25 bp, Artificial
  probe
  misc_feature (1)..(25): SEQ ID NO: 670; WAN024BFW_at; Start 552; Stop 576
tcttgagccagtcttgaaacaaatc

SEQ ID NO: 80116 - DNA, 25 bp, Artificial
  probe
  misc_feature (1)..(25): SEQ ID NO: 670; WAN024BFW_at; Start 580; Stop 604
gaaaaagctccagacgtagtaccat

SEQ ID NO: 80117 - DNA, 25 bp, Artificial
  probe
  misc_feature (1)..(25): SEQ ID NO: 670; WAN024BFW_at; Start 1135; Stop 1159
ggaaacactcacatgggtggatgga

SEQ ID NO: 80118 - DNA, 25 bp, Artificial
  probe
  misc_feature (1)..(25): SEQ ID NO: 670; WAN024BFW_at; Start 839; Stop 863
ttcgtgaagaaacagtaggaccagc

SEQ ID NO: 80119 - DNA, 25 bp, Artificial
  probe
  misc_feature (1)..(25): SEQ ID NO: 670; WAN024BFW_at; Start 1358; Stop 1382
tagacccagataaagcgattccaga

SEQ ID NO: 80120 - DNA, 25 bp, Artificial
  probe
  misc_feature (1)..(25): SEQ ID NO: 670; WAN024BFW_at; Start 1174; Stop 1198
tggatcctttacatcaacgaaaacg

SEQ ID NO: 80121 - DNA, 25 bp, Artificial
  probe
  misc_feature (1)..(25): SEQ ID NO: 1650; WAN024BFX_at; Start 255; Stop 279
tcttatctaaaggaaaccgatttgc

SEQ ID NO: 80122 - DNA, 25 bp, Artificial
  probe
  misc_feature (1)..(25): SEQ ID NO: 1650; WAN024BFX_at; Start 272; Stop 296
cgatttgcctaagctagagcagtta

SEQ ID NO: 80123 - DNA, 25 bp, Artificial
  probe
  misc_feature (1)..(25): SEQ ID NO: 1650; WAN024BFX_at; Start 97; Stop 121
ctaggtattgcggtgcctgaaagaa

SEQ ID NO: 80124 - DNA, 25 bp, Artificial
  probe
  misc_feature (1)..(25): SEQ ID NO: 1650; WAN024BFX_at; Start 193; Stop 217
gctgggaaaaggatcctagaaaata

SEQ ID NO: 80125 - DNA, 25 bp, Artificial
  probe
  misc_feature (1)..(25): SEQ ID NO: 1650; WAN024BFX_at; Start 91; Stop 115
tcttttctaggtattgcggtgcctg

SEQ ID NO: 80126 - DNA, 25 bp, Artificial
  probe
  misc_feature (1)..(25): SEQ ID NO: 1650; WAN024BFX_at; Start 231; Stop 255
gctaactatttgaaagcaatgcagt

SEQ ID NO: 80127 - DNA, 25 bp, Artificial
  probe
  misc_feature (1)..(25): SEQ ID NO: 1650; WAN024BFX_at; Start 327; Stop 351
gatatcctagatcgagtagtaggga

SEQ ID NO: 80128 - DNA, 25 bp, Artificial
  probe
  misc_feature (1)..(25): SEQ ID NO: 1650; WAN024BFX_at; Start 211; Stop 235
gaaaataccaatatgtggctgctaa

SEQ ID NO: 80129 - DNA, 25 bp, Artificial
  probe
  misc_feature (1)..(25): SEQ ID NO: 1650; WAN024BFX_at; Start 80; Stop 104
gccatcaattttcttttctaggtat

SEQ ID NO: 80130 - DNA, 25 bp, Artificial
  probe
  misc_feature (1)..(25): SEQ ID NO: 1650; WAN024BFX_at; Start 174; Stop 198
tgggattttgcagacacttgctggg

SEQ ID NO: 80131 - DNA, 25 bp, Artificial
  probe
  misc_feature (1)..(25): SEQ ID NO: 1650; WAN024BFX_at; Start 184; Stop 208
cagacacttgctgggaaaaggatcc

SEQ ID NO: 80132 - DNA, 25 bp, Artificial
  probe
  misc_feature (1)..(25): SEQ ID NO: 1650; WAN024BFX_at; Start 2; Stop 26
tgagtttagcagatttacttgagga

SEQ ID NO: 80133 - DNA, 25 bp, Artificial
  probe
  misc_feature (1)..(25): SEQ ID NO: 1650; WAN024BFX_at; Start 204; Stop 228
gatcctagaaaataccaatatgtgg

SEQ ID NO: 80134 - DNA, 25 bp, Artificial
  probe
  misc_feature (1)..(25): SEQ ID NO: 1650; WAN024BFX_at; Start 250; Stop 274
tgcagtcttatctaaaggaaaccga

SEQ ID NO: 80135 - DNA, 25 bp, Artificial
  probe
  misc_feature (1)..(25): SEQ ID NO: 1650; WAN024BFX_at; Start 35; Stop 59
cagcaaaagactctaaaaaagcaag

SEQ ID NO: 80136 - DNA, 25 bp, Artificial
  probe
  misc_feature (1)..(25): SEQ ID NO: 1650; WAN024BFX_at; Start 24; Stop 48
ggagctagaagcagcaaaagactct

SEQ ID NO: 80137 - DNA, 25 bp, Artificial
  probe
  misc_feature (1)..(25): SEQ ID NO: 1650; WAN024BFX_at; Start 27; Stop 51
gctagaagcagcaaaagactctaaa

SEQ ID NO: 80138 - DNA, 25 bp, Artificial
  probe
  misc_feature (1)..(25): SEQ ID NO: 1650; WAN024BFX_at; Start 188; Stop 212
cacttgctgggaaaaggatcctaga

SEQ ID NO: 80139 - DNA, 25 bp, Artificial
  probe
  misc_feature (1)..(25): SEQ ID NO: 1650; WAN024BFX_at; Start 17; Stop 41
tacttgaggagctagaagcagcaaa

SEQ ID NO: 80140 - DNA, 25 bp, Artificial
  probe
  misc_feature (1)..(25): SEQ ID NO: 1650; WAN024BFX_at; Start 320; Stop 344
cacggtagatatcctagatcgagta

SEQ ID NO: 80141 - DNA, 25 bp, Artificial
  probe
  misc_feature (1)..(25): SEQ ID NO: 1650; WAN024BFX_at; Start 349; Stop 373
ggagtttggtgtatgaacaccctga

SEQ ID NO: 80142 - DNA, 25 bp, Artificial
  probe
  misc_feature (1)..(25): SEQ ID NO: 1650; WAN024BFX_at; Start 266; Stop 290
ggaaaccgatttgcctaagctagag

SEQ ID NO: 80143 - DNA, 25 bp, Artificial
  probe
  misc_feature (1)..(25): SEQ ID NO: 1650; WAN024BFX_at; Start 288; Stop 312
gagcagttagtcgtgacaaaatcct

SEQ ID NO: 80144 - DNA, 25 bp, Artificial
  probe
  misc_feature (1)..(25): SEQ ID NO: 1650; WAN024BFX_at; Start 332; Stop 356
cctagatcgagtagtagggagtttg

SEQ ID NO: 80145 - DNA, 25 bp, Artificial
  probe
  misc_feature (1)..(25): SEQ ID NO: 1650; WAN024BFX_at; Start 314; Stop 338
gtgggacacggtagatatcctagat

SEQ ID NO: 80146 - DNA, 25 bp, Artificial
  probe
  misc_feature (1)..(25): SEQ ID NO: 1650; WAN024BFX_at; Start 108; Stop 132
ggtgcctgaaagaaataaactctat

SEQ ID NO: 80147 - DNA, 25 bp, Artificial
  probe
  misc_feature (1)..(25): SEQ ID NO: 1650; WAN024BFX_at; Start 346; Stop 370
tagggagtttggtgtatgaacaccc

SEQ ID NO: 80148 - DNA, 25 bp, Artificial
  probe
  misc_feature (1)..(25): SEQ ID NO: 1650; WAN024BFX_at; Start 281; Stop 305
taagctagagcagttagtcgtgaca

SEQ ID NO: 80149 - DNA, 25 bp, Artificial
  probe
  misc_feature (1)..(25): SEQ ID NO: 1650; WAN024BFX_at; Start 243; Stop 267
aaagcaatgcagtcttatctaaagg

SEQ ID NO: 80150 - DNA, 25 bp, Artificial
  probe
  misc_feature (1)..(25): SEQ ID NO: 1650; WAN024BFX_at; Start 378; Stop 402
gaagaaataatcttaatactcttcg

SEQ ID NO: 80151 - DNA, 25 bp, Artificial
  probe
  misc_feature (1)..(25): SEQ ID NO: 1650; WAN024BFX_at; Start 160; Stop 184
caaagattatcgattgggattttgc

SEQ ID NO: 80152 - DNA, 25 bp, Artificial
  probe
  misc_feature (1)..(25): SEQ ID NO: 1650; WAN024BFX_at; Start 11; Stop 35
cagatttacttgaggagctagaagc

SEQ ID NO: 80153 - DNA, 25 bp, Artificial
  probe
  misc_feature (1)..(25): SEQ ID NO: 1650; WAN024BFX_at; Start 105; Stop 129
tgcggtgcctgaaagaaataaactc

SEQ ID NO: 80154 - DNA, 25 bp, Artificial
  probe
  misc_feature (1)..(25): SEQ ID NO: 1650; WAN024BFX_at; Start 222; Stop 246
tatgtggctgctaactatttgaaag

SEQ ID NO: 80155 - DNA, 25 bp, Artificial
  probe
  misc_feature (1)..(25): SEQ ID NO: 3184; WAN024BFY_x_at; Start 17; Stop 41
gaaaatctcttcaaaccgcgtcagc

SEQ ID NO: 80156 - DNA, 25 bp, Artificial
  probe
  misc_feature (1)..(25): SEQ ID NO: 3184; WAN024BFY_x_at; Start 3; Stop 27
tgtttatactcttcgaaaatctctt

SEQ ID NO: 80157 - DNA, 25 bp, Artificial
  probe
  misc_feature (1)..(25): SEQ ID NO: 3184; WAN024BFY_x_at; Start 5; Stop 29
tttatactcttcgaaaatctcttca

SEQ ID NO: 80158 - DNA, 25 bp, Artificial
  probe
  misc_feature (1)..(25): SEQ ID NO: 3184; WAN024BFY_x_at; Start 9; Stop 33
tactcttcgaaaatctcttcaaacc

SEQ ID NO: 80159 - DNA, 25 bp, Artificial
  probe
  misc_feature (1)..(25): SEQ ID NO: 3184; WAN024BFY_x_at; Start 7; Stop 31
tatactcttcgaaaatctcttcaaa

SEQ ID NO: 80160 - DNA, 25 bp, Artificial
  probe
  misc_feature (1)..(25): SEQ ID NO: 3184; WAN024BFY_x_at; Start 12; Stop 36
tcttcgaaaatctcttcaaaccgcg

SEQ ID NO: 80161 - DNA, 25 bp, Artificial
  probe
  misc_feature (1)..(25): SEQ ID NO: 3184; WAN024BFY_x_at; Start 10; Stop 34
actcttcgaaaatctcttcaaaccg

SEQ ID NO: 80162 - DNA, 25 bp, Artificial
  probe
  misc_feature (1)..(25): SEQ ID NO: 3184; WAN024BFY_x_at; Start 11; Stop 35
ctcttcgaaaatctcttcaaaccgc

SEQ ID NO: 80163 - DNA, 25 bp, Artificial
  probe
  misc_feature (1)..(25): SEQ ID NO: 3184; WAN024BFY_x_at; Start 8; Stop 32
atactcttcgaaaatctcttcaaac

SEQ ID NO: 80164 - DNA, 25 bp, Artificial
  probe
  misc_feature (1)..(25): SEQ ID NO: 3184; WAN024BFY_x_at; Start 6; Stop 30
ttatactcttcgaaaatctcttcaa

SEQ ID NO: 80165 - DNA, 25 bp, Artificial
  probe
  misc_feature (1)..(25): SEQ ID NO: 3184; WAN024BFY_x_at; Start 4; Stop 28
gtttatactcttcgaaaatctcttc

SEQ ID NO: 80166 - DNA, 25 bp, Artificial
  probe
  misc_feature (1)..(25): SEQ ID NO: 3184; WAN024BFY_x_at; Start 15; Stop 39
tcgaaaatctcttcaaaccgcgtca

SEQ ID NO: 80167 - DNA, 25 bp, Artificial
  probe
  misc_feature (1)..(25): SEQ ID NO: 3184; WAN024BFY_x_at; Start 13; Stop 37
cttcgaaaatctcttcaaaccgcgt

SEQ ID NO: 80168 - DNA, 25 bp, Artificial
  probe
  misc_feature (1)..(25): SEQ ID NO: 3184; WAN024BFY_x_at; Start 16; Stop 40
cgaaaatctcttcaaaccgcgtcag

SEQ ID NO: 80169 - DNA, 25 bp, Artificial
  probe
  misc_feature (1)..(25): SEQ ID NO: 3184; WAN024BFY_x_at; Start 14; Stop 38
ttcgaaaatctcttcaaaccgcgtc

SEQ ID NO: 80170 - DNA, 25 bp, Artificial
  probe
  misc_feature (1)..(25): SEQ ID NO: 4248; WAN024BFZ_s_at; Start 283; Stop 307
cctctctcaactagatgtaacttac

SEQ ID NO: 80171 - DNA, 25 bp, Artificial
  probe
  misc_feature (1)..(25): SEQ ID NO: 4248; WAN024BFZ_s_at; Start 277; Stop 301
ttcatacctctctcaactagatgta

SEQ ID NO: 80172 - DNA, 25 bp, Artificial
  probe
  misc_feature (1)..(25): SEQ ID NO: 4248; WAN024BFZ_s_at; Start 294; Stop 318
tagatgtaacttacaaaacccctga

SEQ ID NO: 80173 - DNA, 25 bp, Artificial
  probe
  misc_feature (1)..(25): SEQ ID NO: 4248; WAN024BFZ_s_at; Start 278; Stop 302
tcatacctctctcaactagatgtaa

SEQ ID NO: 80174 - DNA, 25 bp, Artificial
  probe
  misc_feature (1)..(25): SEQ ID NO: 4248; WAN024BFZ_s_at; Start 289; Stop 313
tcaactagatgtaacttacaaaacc

SEQ ID NO: 80175 - DNA, 25 bp, Artificial
  probe
  misc_feature (1)..(25): SEQ ID NO: 4248; WAN024BFZ_s_at; Start 279; Stop 303
catacctctctcaactagatgtaac

SEQ ID NO: 80176 - DNA, 25 bp, Artificial
  probe
  misc_feature (1)..(25): SEQ ID NO: 4248; WAN024BFZ_s_at; Start 287; Stop 311
tctcaactagatgtaacttacaaaa

SEQ ID NO: 80177 - DNA, 25 bp, Artificial
  probe
  misc_feature (1)..(25): SEQ ID NO: 4248; WAN024BFZ_s_at; Start 282; Stop 306
acctctctcaactagatgtaactta

SEQ ID NO: 80178 - DNA, 25 bp, Artificial
  probe
  misc_feature (1)..(25): SEQ ID NO: 4248; WAN024BFZ_s_at; Start 288; Stop 312
ctcaactagatgtaacttacaaaac

SEQ ID NO: 80179 - DNA, 25 bp, Artificial
  probe
  misc_feature (1)..(25): SEQ ID NO: 4248; WAN024BFZ_s_at; Start 280; Stop 304
atacctctctcaactagatgtaact

SEQ ID NO: 80180 - DNA, 25 bp, Artificial
  probe
  misc_feature (1)..(25): SEQ ID NO: 4248; WAN024BFZ_s_at; Start 281; Stop 305
tacctctctcaactagatgtaactt

SEQ ID NO: 80181 - DNA, 25 bp, Artificial
  probe
  misc_feature (1)..(25): SEQ ID NO: 4248; WAN024BFZ_s_at; Start 286; Stop 310
ctctcaactagatgtaacttacaaa

SEQ ID NO: 80182 - DNA, 25 bp, Artificial
  probe
  misc_feature (1)..(25): SEQ ID NO: 4248; WAN024BFZ_s_at; Start 285; Stop 309
tctctcaactagatgtaacttacaa

SEQ ID NO: 80183 - DNA, 25 bp, Artificial
  probe
  misc_feature (1)..(25): SEQ ID NO: 4248; WAN024BFZ_s_at; Start 284; Stop 308
ctctctcaactagatgtaacttaca

SEQ ID NO: 80184 - DNA, 25 bp, Artificial
  probe
  misc_feature (1)..(25): SEQ ID NO: 4248; WAN024BFZ_s_at; Start 276; Stop 300
attcatacctctctcaactagatgt

SEQ ID NO: 80185 - DNA, 25 bp, Artificial
  probe
  misc_feature (1)..(25): SEQ ID NO: 4248; WAN024BFZ_s_at; Start 293; Stop 317
ctagatgtaacttacaaaacccctg

SEQ ID NO: 80186 - DNA, 25 bp, Artificial
  probe
  misc_feature (1)..(25): SEQ ID NO: 6845; WAN024BG2_x_at; Start 48; Stop 72
ccttgtaggtgttcagcgcacgaga

SEQ ID NO: 80187 - DNA, 25 bp, Artificial
  probe
  misc_feature (1)..(25): SEQ ID NO: 6845; WAN024BG2_x_at; Start 43; Stop 67
aagagccttgtaggtgttcagcgca

SEQ ID NO: 80188 - DNA, 25 bp, Artificial
  probe
  misc_feature (1)..(25): SEQ ID NO: 6845; WAN024BG2_x_at; Start 34; Stop 58
agccgtttcaagagccttgtaggtg

SEQ ID NO: 80189 - DNA, 25 bp, Artificial
  probe
  misc_feature (1)..(25): SEQ ID NO: 6845; WAN024BG2_x_at; Start 35; Stop 59
gccgtttcaagagccttgtaggtgt

SEQ ID NO: 80190 - DNA, 25 bp, Artificial
  probe
  misc_feature (1)..(25): SEQ ID NO: 6845; WAN024BG2_x_at; Start 46; Stop 70
agccttgtaggtgttcagcgcacga

SEQ ID NO: 80191 - DNA, 25 bp, Artificial
  probe
  misc_feature (1)..(25): SEQ ID NO: 6845; WAN024BG2_x_at; Start 41; Stop 65
tcaagagccttgtaggtgttcagcg

SEQ ID NO: 80192 - DNA, 25 bp, Artificial
  probe
  misc_feature (1)..(25): SEQ ID NO: 6845; WAN024BG2_x_at; Start 26; Stop 50
taagcgatagccgtttcaagagcct

SEQ ID NO: 80193 - DNA, 25 bp, Artificial
  probe
  misc_feature (1)..(25): SEQ ID NO: 6845; WAN024BG2_x_at; Start 16; Stop 40
agtaaacaattaagcgatagccgtt

SEQ ID NO: 80194 - DNA, 25 bp, Artificial
  probe
  misc_feature (1)..(25): SEQ ID NO: 6845; WAN024BG2_x_at; Start 38; Stop 62
gtttcaagagccttgtaggtgttca

SEQ ID NO: 80195 - DNA, 25 bp, Artificial
  probe
  misc_feature (1)..(25): SEQ ID NO: 6845; WAN024BG2_x_at; Start 14; Stop 38
caagtaaacaattaagcgatagccg

SEQ ID NO: 80196 - DNA, 25 bp, Artificial
  probe
  misc_feature (1)..(25): SEQ ID NO: 6845; WAN024BG2_x_at; Start 32; Stop 56
atagccgtttcaagagccttgtagg

SEQ ID NO: 80197 - DNA, 25 bp, Artificial
  probe
  misc_feature (1)..(25): SEQ ID NO: 6845; WAN024BG2_x_at; Start 29; Stop 53
gcgatagccgtttcaagagccttgt

SEQ ID NO: 80198 - DNA, 25 bp, Artificial
  probe
  misc_feature (1)..(25): SEQ ID NO: 6845; WAN024BG2_x_at; Start 50; Stop 74
ttgtaggtgttcagcgcacgagatg

SEQ ID NO: 80199 - DNA, 25 bp, Artificial
  probe
  misc_feature (1)..(25): SEQ ID NO: 6845; WAN024BG2_x_at; Start 31; Stop 55
gatagccgtttcaagagccttgtag

SEQ ID NO: 80200 - DNA, 25 bp, Artificial
  probe
  misc_feature (1)..(25): SEQ ID NO: 6845; WAN024BG2_x_at; Start 28; Stop 52
agcgatagccgtttcaagagccttg

SEQ ID NO: 80201 - DNA, 25 bp, Artificial
  probe
  misc_feature (1)..(25): SEQ ID NO: 6845; WAN024BG2_x_at; Start 33; Stop 57
tagccgtttcaagagccttgtaggt

SEQ ID NO: 80202 - DNA, 25 bp, Artificial
  probe
  misc_feature (1)..(25): SEQ ID NO: 6845; WAN024BG2_x_at; Start 39; Stop 63
tttcaagagccttgtaggtgttcag

SEQ ID NO: 80203 - DNA, 25 bp, Artificial
  probe
  misc_feature (1)..(25): SEQ ID NO: 6845; WAN024BG2_x_at; Start 24; Stop 48
attaagcgatagccgtttcaagagc

SEQ ID NO: 80204 - DNA, 25 bp, Artificial
  probe
  misc_feature (1)..(25): SEQ ID NO: 6845; WAN024BG2_x_at; Start 21; Stop 45
acaattaagcgatagccgtttcaag

SEQ ID NO: 80205 - DNA, 25 bp, Artificial
  probe
  misc_feature (1)..(25): SEQ ID NO: 6845; WAN024BG2_x_at; Start 15; Stop 39
aagtaaacaattaagcgatagccgt

SEQ ID NO: 80206 - DNA, 25 bp, Artificial
  probe
  misc_feature (1)..(25): SEQ ID NO: 6845; WAN024BG2_x_at; Start 30; Stop 54
cgatagccgtttcaagagccttgta

SEQ ID NO: 80207 - DNA, 25 bp, Artificial
  probe
  misc_feature (1)..(25): SEQ ID NO: 6845; WAN024BG2_x_at; Start 22; Stop 46
caattaagcgatagccgtttcaaga

SEQ ID NO: 80208 - DNA, 25 bp, Artificial
  probe
  misc_feature (1)..(25): SEQ ID NO: 6845; WAN024BG2_x_at; Start 19; Stop 43
aaacaattaagcgatagccgtttca

SEQ ID NO: 80209 - DNA, 25 bp, Artificial
  probe
  misc_feature (1)..(25): SEQ ID NO: 6845; WAN024BG2_x_at; Start 23; Stop 47
aattaagcgatagccgtttcaagag

SEQ ID NO: 80210 - DNA, 25 bp, Artificial
  probe
  misc_feature (1)..(25): SEQ ID NO: 6845; WAN024BG2_x_at; Start 42; Stop 66
caagagccttgtaggtgttcagcgc

SEQ ID NO: 80211 - DNA, 25 bp, Artificial
  probe
  misc_feature (1)..(25): SEQ ID NO: 6845; WAN024BG2_x_at; Start 47; Stop 71
gccttgtaggtgttcagcgcacgag

SEQ ID NO: 80212 - DNA, 25 bp, Artificial
  probe
  misc_feature (1)..(25): SEQ ID NO: 6845; WAN024BG2_x_at; Start 45; Stop 69
gagccttgtaggtgttcagcgcacg

SEQ ID NO: 80213 - DNA, 25 bp, Artificial
  probe
  misc_feature (1)..(25): SEQ ID NO: 6845; WAN024BG2_x_at; Start 40; Stop 64
ttcaagagccttgtaggtgttcagc

SEQ ID NO: 80214 - DNA, 25 bp, Artificial
  probe
  misc_feature (1)..(25): SEQ ID NO: 6845; WAN024BG2_x_at; Start 49; Stop 73
cttgtaggtgttcagcgcacgagat

SEQ ID NO: 80215 - DNA, 25 bp, Artificial
  probe
  misc_feature (1)..(25): SEQ ID NO: 6845; WAN024BG2_x_at; Start 20; Stop 44
aacaattaagcgatagccgtttcaa

SEQ ID NO: 80216 - DNA, 25 bp, Artificial
  probe
  misc_feature (1)..(25): SEQ ID NO: 6845; WAN024BG2_x_at; Start 37; Stop 61
cgtttcaagagccttgtaggtgttc

SEQ ID NO: 80217 - DNA, 25 bp, Artificial
  probe
  misc_feature (1)..(25): SEQ ID NO: 6845; WAN024BG2_x_at; Start 44; Stop 68
agagccttgtaggtgttcagcgcac

SEQ ID NO: 80218 - DNA, 25 bp, Artificial
  probe
  misc_feature (1)..(25): SEQ ID NO: 6845; WAN024BG2_x_at; Start 51; Stop 75
tgtaggtgttcagcgcacgagatgt

SEQ ID NO: 80219 - DNA, 25 bp, Artificial
  probe
  misc_feature (1)..(25): SEQ ID NO: 6845; WAN024BG2_x_at; Start 27; Stop 51
aagcgatagccgtttcaagagcctt

SEQ ID NO: 80220 - DNA, 25 bp, Artificial
  probe
  misc_feature (1)..(25): SEQ ID NO: 7328; WAN024BG3_s_at; Start 31; Stop 55
atcgtaacaccacctttgaacaaga

SEQ ID NO: 80221 - DNA, 25 bp, Artificial
  probe
  misc_feature (1)..(25): SEQ ID NO: 7328; WAN024BG3_s_at; Start 47; Stop 71
tgaacaagagttacttcaacccatt

SEQ ID NO: 80222 - DNA, 25 bp, Artificial
  probe
  misc_feature (1)..(25): SEQ ID NO: 7328; WAN024BG3_s_at; Start 40; Stop 64
ccacctttgaacaagagttacttca

SEQ ID NO: 80223 - DNA, 25 bp, Artificial
  probe
  misc_feature (1)..(25): SEQ ID NO: 7328; WAN024BG3_s_at; Start 45; Stop 69
tttgaacaagagttacttcaaccca

SEQ ID NO: 80224 - DNA, 25 bp, Artificial
  probe
  misc_feature (1)..(25): SEQ ID NO: 7328; WAN024BG3_s_at; Start 33; Stop 57
cgtaacaccacctttgaacaagagt

SEQ ID NO: 80225 - DNA, 25 bp, Artificial
  probe
  misc_feature (1)..(25): SEQ ID NO: 7328; WAN024BG3_s_at; Start 30; Stop 54
aatcgtaacaccacctttgaacaag

SEQ ID NO: 80226 - DNA, 25 bp, Artificial
  probe
  misc_feature (1)..(25): SEQ ID NO: 7328; WAN024BG3_s_at; Start 41; Stop 65
cacctttgaacaagagttacttcaa

SEQ ID NO: 80227 - DNA, 25 bp, Artificial
  probe
  misc_feature (1)..(25): SEQ ID NO: 7328; WAN024BG3_s_at; Start 35; Stop 59
taacaccacctttgaacaagagtta

SEQ ID NO: 80228 - DNA, 25 bp, Artificial
  probe
  misc_feature (1)..(25): SEQ ID NO: 7328; WAN024BG3_s_at; Start 46; Stop 70
ttgaacaagagttacttcaacccat

SEQ ID NO: 80229 - DNA, 25 bp, Artificial
  probe
  misc_feature (1)..(25): SEQ ID NO: 7328; WAN024BG3_s_at; Start 32; Stop 56
tcgtaacaccacctttgaacaagag

SEQ ID NO: 80230 - DNA, 25 bp, Artificial
  probe
  misc_feature (1)..(25): SEQ ID NO: 7328; WAN024BG3_s_at; Start 37; Stop 61
acaccacctttgaacaagagttact

SEQ ID NO: 80231 - DNA, 25 bp, Artificial
  probe
  misc_feature (1)..(25): SEQ ID NO: 7328; WAN024BG3_s_at; Start 38; Stop 62
caccacctttgaacaagagttactt

SEQ ID NO: 80232 - DNA, 25 bp, Artificial
  probe
  misc_feature (1)..(25): SEQ ID NO: 7131; WAN024BG4_at; Start 7; Stop 31
tataacttattagacttcctgcgaa

SEQ ID NO: 80233 - DNA, 25 bp, Artificial
  probe
  misc_feature (1)..(25): SEQ ID NO: 7131; WAN024BG4_at; Start 1; Stop 25
ctggactataacttattagacttcc

SEQ ID NO: 80234 - DNA, 25 bp, Artificial
  probe
  misc_feature (1)..(25): SEQ ID NO: 7131; WAN024BG4_at; Start 2; Stop 26
tggactataacttattagacttcct

SEQ ID NO: 80235 - DNA, 25 bp, Artificial
  probe
  misc_feature (1)..(25): SEQ ID NO: 7131; WAN024BG4_at; Start 3; Stop 27
ggactataacttattagacttcctg

SEQ ID NO: 80236 - DNA, 25 bp, Artificial
  probe
  misc_feature (1)..(25): SEQ ID NO: 7131; WAN024BG4_at; Start 5; Stop 29
actataacttattagacttcctgcg

SEQ ID NO: 80237 - DNA, 25 bp, Artificial
  probe
  misc_feature (1)..(25): SEQ ID NO: 7131; WAN024BG4_at; Start 4; Stop 28
gactataacttattagacttcctgc

SEQ ID NO: 80238 - DNA, 25 bp, Artificial
  probe
  misc_feature (1)..(25): SEQ ID NO: 7131; WAN024BG4_at; Start 6; Stop 30
ctataacttattagacttcctgcga

SEQ ID NO: 80239 - DNA, 25 bp, Artificial
  probe
  misc_feature (1)..(25): SEQ ID NO: 7529; WAN024BG5_at; Start 22; Stop 46
tcattttactatagttctatgaatt

SEQ ID NO: 80240 - DNA, 25 bp, Artificial
  probe
  misc_feature (1)..(25): SEQ ID NO: 7529; WAN024BG5_at; Start 23; Stop 47
cattttactatagttctatgaatta

SEQ ID NO: 80241 - DNA, 25 bp, Artificial
  probe
  misc_feature (1)..(25): SEQ ID NO: 7529; WAN024BG5_at; Start 21; Stop 45
ttcattttactatagttctatgaat

SEQ ID NO: 80242 - DNA, 25 bp, Artificial
  probe
  misc_feature (1)..(25): SEQ ID NO: 6376; WAN024BG6_s_at; Start 14; Stop 38
tggctatgtccaaagatacgatatt

SEQ ID NO: 80243 - DNA, 25 bp, Artificial
  probe
  misc_feature (1)..(25): SEQ ID NO: 6376; WAN024BG6_s_at; Start 40; Stop 64
atgggaatggctatcaatcattacc

SEQ ID NO: 80244 - DNA, 25 bp, Artificial
  probe
  misc_feature (1)..(25): SEQ ID NO: 6376; WAN024BG6_s_at; Start 13; Stop 37
ttggctatgtccaaagatacgatat

SEQ ID NO: 80245 - DNA, 25 bp, Artificial
  probe
  misc_feature (1)..(25): SEQ ID NO: 6376; WAN024BG6_s_at; Start 19; Stop 43
atgtccaaagatacgatattgatgg

SEQ ID NO: 80246 - DNA, 25 bp, Artificial
  probe
  misc_feature (1)..(25): SEQ ID NO: 6376; WAN024BG6_s_at; Start 28; Stop 52
gatacgatattgatgggaatggcta

SEQ ID NO: 80247 - DNA, 25 bp, Artificial
  probe
  misc_feature (1)..(25): SEQ ID NO: 6376; WAN024BG6_s_at; Start 5; Stop 29
aacatttattggctatgtccaaaga

SEQ ID NO: 80248 - DNA, 25 bp, Artificial
  probe
  misc_feature (1)..(25): SEQ ID NO: 6376; WAN024BG6_s_at; Start 30; Stop 54
tacgatattgatgggaatggctatc

SEQ ID NO: 80249 - DNA, 25 bp, Artificial
  probe
  misc_feature (1)..(25): SEQ ID NO: 6376; WAN024BG6_s_at; Start 15; Stop 39
ggctatgtccaaagatacgatattg

SEQ ID NO: 80250 - DNA, 25 bp, Artificial
  probe
  misc_feature (1)..(25): SEQ ID NO: 6376; WAN024BG6_s_at; Start 2; Stop 26
tgaaacatttattggctatgtccaa

SEQ ID NO: 80251 - DNA, 25 bp, Artificial
  probe
  misc_feature (1)..(25): SEQ ID NO: 6376; WAN024BG6_s_at; Start 24; Stop 48
caaagatacgatattgatgggaatg

SEQ ID NO: 80252 - DNA, 25 bp, Artificial
  probe
  misc_feature (1)..(25): SEQ ID NO: 6376; WAN024BG6_s_at; Start 16; Stop 40
gctatgtccaaagatacgatattga

SEQ ID NO: 80253 - DNA, 25 bp, Artificial
  probe
  misc_feature (1)..(25): SEQ ID NO: 6376; WAN024BG6_s_at; Start 42; Stop 66
gggaatggctatcaatcattaccgt

SEQ ID NO: 80254 - DNA, 25 bp, Artificial
  probe
  misc_feature (1)..(25): SEQ ID NO: 6376; WAN024BG6_s_at; Start 17; Stop 41
ctatgtccaaagatacgatattgat

SEQ ID NO: 80255 - DNA, 25 bp, Artificial
  probe
  misc_feature (1)..(25): SEQ ID NO: 6376; WAN024BG6_s_at; Start 27; Stop 51
agatacgatattgatgggaatggct

SEQ ID NO: 80256 - DNA, 25 bp, Artificial
  probe
  misc_feature (1)..(25): SEQ ID NO: 6376; WAN024BG6_s_at; Start 20; Stop 44
tgtccaaagatacgatattgatggg

SEQ ID NO: 80257 - DNA, 25 bp, Artificial
  probe
  misc_feature (1)..(25): SEQ ID NO: 6376; WAN024BG6_s_at; Start 21; Stop 45
gtccaaagatacgatattgatggga

SEQ ID NO: 80258 - DNA, 25 bp, Artificial
  probe
  misc_feature (1)..(25): SEQ ID NO: 6376; WAN024BG6_s_at; Start 9; Stop 33
tttattggctatgtccaaagatacg

SEQ ID NO: 80259 - DNA, 25 bp, Artificial
  probe
  misc_feature (1)..(25): SEQ ID NO: 6376; WAN024BG6_s_at; Start 22; Stop 46
tccaaagatacgatattgatgggaa

SEQ ID NO: 80260 - DNA, 25 bp, Artificial
  probe
  misc_feature (1)..(25): SEQ ID NO: 6376; WAN024BG6_s_at; Start 12; Stop 36
attggctatgtccaaagatacgata

SEQ ID NO: 80261 - DNA, 25 bp, Artificial
  probe
  misc_feature (1)..(25): SEQ ID NO: 6376; WAN024BG6_s_at; Start 1; Stop 25
atgaaacatttattggctatgtcca

SEQ ID NO: 80262 - DNA, 25 bp, Artificial
  probe
  misc_feature (1)..(25): SEQ ID NO: 6376; WAN024BG6_s_at; Start 26; Stop 50
aagatacgatattgatgggaatggc

SEQ ID NO: 80263 - DNA, 25 bp, Artificial
  probe
  misc_feature (1)..(25): SEQ ID NO: 6376; WAN024BG6_s_at; Start 11; Stop 35
tattggctatgtccaaagatacgat

SEQ ID NO: 80264 - DNA, 25 bp, Artificial
  probe
  misc_feature (1)..(25): SEQ ID NO: 6376; WAN024BG6_s_at; Start 41; Stop 65
tgggaatggctatcaatcattaccg

SEQ ID NO: 80265 - DNA, 25 bp, Artificial
  probe
  misc_feature (1)..(25): SEQ ID NO: 6376; WAN024BG6_s_at; Start 23; Stop 47
ccaaagatacgatattgatgggaat

SEQ ID NO: 80266 - DNA, 25 bp, Artificial
  probe
  misc_feature (1)..(25): SEQ ID NO: 6376; WAN024BG6_s_at; Start 18; Stop 42
tatgtccaaagatacgatattgatg

SEQ ID NO: 80267 - DNA, 25 bp, Artificial
  probe
  misc_feature (1)..(25): SEQ ID NO: 6376; WAN024BG6_s_at; Start 33; Stop 57
gatattgatgggaatggctatcaat

SEQ ID NO: 80268 - DNA, 25 bp, Artificial
  probe
  misc_feature (1)..(25): SEQ ID NO: 6376; WAN024BG6_s_at; Start 35; Stop 59
tattgatgggaatggctatcaatca

SEQ ID NO: 80269 - DNA, 25 bp, Artificial
  probe
  misc_feature (1)..(25): SEQ ID NO: 6376; WAN024BG6_s_at; Start 25; Stop 49
aaagatacgatattgatgggaatgg

SEQ ID NO: 80270 - DNA, 25 bp, Artificial
  probe
  misc_feature (1)..(25): SEQ ID NO: 6376; WAN024BG6_s_at; Start 7; Stop 31
catttattggctatgtccaaagata

SEQ ID NO: 80271 - DNA, 25 bp, Artificial
  probe
  misc_feature (1)..(25): SEQ ID NO: 6376; WAN024BG6_s_at; Start 10; Stop 34
ttattggctatgtccaaagatacga

SEQ ID NO: 80272 - DNA, 25 bp, Artificial
  probe
  misc_feature (1)..(25): SEQ ID NO: 6376; WAN024BG6_s_at; Start 38; Stop 62
tgatgggaatggctatcaatcatta

SEQ ID NO: 80273 - DNA, 25 bp, Artificial
  probe
  misc_feature (1)..(25): SEQ ID NO: 6376; WAN024BG6_s_at; Start 3; Stop 27
gaaacatttattggctatgtccaaa

SEQ ID NO: 80274 - DNA, 25 bp, Artificial
  probe
  misc_feature (1)..(25): SEQ ID NO: 6376; WAN024BG6_s_at; Start 39; Stop 63
gatgggaatggctatcaatcattac

SEQ ID NO: 80275 - DNA, 25 bp, Artificial
  probe
  misc_feature (1)..(25): SEQ ID NO: 6376; WAN024BG6_s_at; Start 32; Stop 56
cgatattgatgggaatggctatcaa

SEQ ID NO: 80276 - DNA, 25 bp, Artificial
  probe
  misc_feature (1)..(25): SEQ ID NO: 25; WAN024BG8_x_at; Start 31; Stop 55
gaggcctatttaccatggactaaag

SEQ ID NO: 80277 - DNA, 25 bp, Artificial
  probe
  misc_feature (1)..(25): SEQ ID NO: 25; WAN024BG8_x_at; Start 42; Stop 66
accatggactaaagttgtacaagaa

SEQ ID NO: 80278 - DNA, 25 bp, Artificial
  probe
  misc_feature (1)..(25): SEQ ID NO: 25; WAN024BG8_x_at; Start 38; Stop 62
atttaccatggactaaagttgtaca

SEQ ID NO: 80279 - DNA, 25 bp, Artificial
  probe
  misc_feature (1)..(25): SEQ ID NO: 25; WAN024BG8_x_at; Start 25; Stop 49
gttttagaggcctatttaccatgga

SEQ ID NO: 80280 - DNA, 25 bp, Artificial
  probe
  misc_feature (1)..(25): SEQ ID NO: 25; WAN024BG8_x_at; Start 45; Stop 69
atggactaaagttgtacaagaaaag

SEQ ID NO: 80281 - DNA, 25 bp, Artificial
  probe
  misc_feature (1)..(25): SEQ ID NO: 25; WAN024BG8_x_at; Start 30; Stop 54
agaggcctatttaccatggactaaa

SEQ ID NO: 80282 - DNA, 25 bp, Artificial
  probe
  misc_feature (1)..(25): SEQ ID NO: 25; WAN024BG8_x_at; Start 41; Stop 65
taccatggactaaagttgtacaaga

SEQ ID NO: 80283 - DNA, 25 bp, Artificial
  probe
  misc_feature (1)..(25): SEQ ID NO: 25; WAN024BG8_x_at; Start 36; Stop 60
ctatttaccatggactaaagttgta

SEQ ID NO: 80284 - DNA, 25 bp, Artificial
  probe
  misc_feature (1)..(25): SEQ ID NO: 25; WAN024BG8_x_at; Start 43; Stop 67
ccatggactaaagttgtacaagaaa

SEQ ID NO: 80285 - DNA, 25 bp, Artificial
  probe
  misc_feature (1)..(25): SEQ ID NO: 25; WAN024BG8_x_at; Start 23; Stop 47
aggttttagaggcctatttaccatg

SEQ ID NO: 80286 - DNA, 25 bp, Artificial
  probe
  misc_feature (1)..(25): SEQ ID NO: 25; WAN024BG8_x_at; Start 35; Stop 59
cctatttaccatggactaaagttgt

SEQ ID NO: 80287 - DNA, 25 bp, Artificial
  probe
  misc_feature (1)..(25): SEQ ID NO: 25; WAN024BG8_x_at; Start 26; Stop 50
ttttagaggcctatttaccatggac

SEQ ID NO: 80288 - DNA, 25 bp, Artificial
  probe
  misc_feature (1)..(25): SEQ ID NO: 25; WAN024BG8_x_at; Start 29; Stop 53
tagaggcctatttaccatggactaa

SEQ ID NO: 80289 - DNA, 25 bp, Artificial
  probe
  misc_feature (1)..(25): SEQ ID NO: 25; WAN024BG8_x_at; Start 34; Stop 58
gcctatttaccatggactaaagttg

SEQ ID NO: 80290 - DNA, 25 bp, Artificial
  probe
  misc_feature (1)..(25): SEQ ID NO: 25; WAN024BG8_x_at; Start 28; Stop 52
ttagaggcctatttaccatggacta

SEQ ID NO: 80291 - DNA, 25 bp, Artificial
  probe
  misc_feature (1)..(25): SEQ ID NO: 25; WAN024BG8_x_at; Start 39; Stop 63
tttaccatggactaaagttgtacaa

SEQ ID NO: 80292 - DNA, 25 bp, Artificial
  probe
  misc_feature (1)..(25): SEQ ID NO: 25; WAN024BG8_x_at; Start 27; Stop 51
tttagaggcctatttaccatggact

SEQ ID NO: 80293 - DNA, 25 bp, Artificial
  probe
  misc_feature (1)..(25): SEQ ID NO: 25; WAN024BG8_x_at; Start 48; Stop 72
gactaaagttgtacaagaaaagtgc

SEQ ID NO: 80294 - DNA, 25 bp, Artificial
  probe
  misc_feature (1)..(25): SEQ ID NO: 25; WAN024BG8_x_at; Start 37; Stop 61
tatttaccatggactaaagttgtac

SEQ ID NO: 80295 - DNA, 25 bp, Artificial
  probe
  misc_feature (1)..(25): SEQ ID NO: 25; WAN024BG8_x_at; Start 50; Stop 74
ctaaagttgtacaagaaaagtgcaa

SEQ ID NO: 80296 - DNA, 25 bp, Artificial
  probe
  misc_feature (1)..(25): SEQ ID NO: 25; WAN024BG8_x_at; Start 32; Stop 56
aggcctatttaccatggactaaagt

SEQ ID NO: 80297 - DNA, 25 bp, Artificial
  probe
  misc_feature (1)..(25): SEQ ID NO: 25; WAN024BG8_x_at; Start 44; Stop 68
catggactaaagttgtacaagaaaa

SEQ ID NO: 80298 - DNA, 25 bp, Artificial
  probe
  misc_feature (1)..(25): SEQ ID NO: 25; WAN024BG8_x_at; Start 49; Stop 73
actaaagttgtacaagaaaagtgca

SEQ ID NO: 80299 - DNA, 25 bp, Artificial
  probe
  misc_feature (1)..(25): SEQ ID NO: 25; WAN024BG8_x_at; Start 40; Stop 64
ttaccatggactaaagttgtacaag

SEQ ID NO: 80300 - DNA, 25 bp, Artificial
  probe
  misc_feature (1)..(25): SEQ ID NO: 25; WAN024BG8_x_at; Start 51; Stop 75
taaagttgtacaagaaaagtgcaaa

SEQ ID NO: 80301 - DNA, 25 bp, Artificial
  probe
  misc_feature (1)..(25): SEQ ID NO: 6613; WAN024BGA_s_at; Start 78; Stop 102
ggatgcaacagaggtaaaaataaat

SEQ ID NO: 80302 - DNA, 25 bp, Artificial
  probe
  misc_feature (1)..(25): SEQ ID NO: 6613; WAN024BGA_s_at; Start 73; Stop 97
attgtggatgcaacagaggtaaaaa

SEQ ID NO: 80303 - DNA, 25 bp, Artificial
  probe
  misc_feature (1)..(25): SEQ ID NO: 6613; WAN024BGA_s_at; Start 71; Stop 95
tgattgtggatgcaacagaggtaaa

SEQ ID NO: 80304 - DNA, 25 bp, Artificial
  probe
  misc_feature (1)..(25): SEQ ID NO: 6613; WAN024BGA_s_at; Start 70; Stop 94
gtgattgtggatgcaacagaggtaa

SEQ ID NO: 80305 - DNA, 25 bp, Artificial
  probe
  misc_feature (1)..(25): SEQ ID NO: 6613; WAN024BGA_s_at; Start 77; Stop 101
tggatgcaacagaggtaaaaataaa

SEQ ID NO: 80306 - DNA, 25 bp, Artificial
  probe
  misc_feature (1)..(25): SEQ ID NO: 6613; WAN024BGA_s_at; Start 82; Stop 106
gcaacagaggtaaaaataaatcgtc

SEQ ID NO: 80307 - DNA, 25 bp, Artificial
  probe
  misc_feature (1)..(25): SEQ ID NO: 6613; WAN024BGA_s_at; Start 79; Stop 103
gatgcaacagaggtaaaaataaatc

SEQ ID NO: 80308 - DNA, 25 bp, Artificial
  probe
  misc_feature (1)..(25): SEQ ID NO: 6613; WAN024BGA_s_at; Start 68; Stop 92
cggtgattgtggatgcaacagaggt

SEQ ID NO: 80309 - DNA, 25 bp, Artificial
  probe
  misc_feature (1)..(25): SEQ ID NO: 6613; WAN024BGA_s_at; Start 67; Stop 91
acggtgattgtggatgcaacagagg

SEQ ID NO: 80310 - DNA, 25 bp, Artificial
  probe
  misc_feature (1)..(25): SEQ ID NO: 6613; WAN024BGA_s_at; Start 74; Stop 98
ttgtggatgcaacagaggtaaaaat

SEQ ID NO: 80311 - DNA, 25 bp, Artificial
  probe
  misc_feature (1)..(25): SEQ ID NO: 6613; WAN024BGA_s_at; Start 81; Stop 105
tgcaacagaggtaaaaataaatcgt

SEQ ID NO: 80312 - DNA, 25 bp, Artificial
  probe
  misc_feature (1)..(25): SEQ ID NO: 6613; WAN024BGA_s_at; Start 72; Stop 96
gattgtggatgcaacagaggtaaaa

SEQ ID NO: 80313 - DNA, 25 bp, Artificial
  probe
  misc_feature (1)..(25): SEQ ID NO: 6613; WAN024BGA_s_at; Start 76; Stop 100
gtggatgcaacagaggtaaaaataa

SEQ ID NO: 80314 - DNA, 25 bp, Artificial
  probe
  misc_feature (1)..(25): SEQ ID NO: 6613; WAN024BGA_s_at; Start 69; Stop 93
ggtgattgtggatgcaacagaggta

SEQ ID NO: 80315 - DNA, 25 bp, Artificial
  probe
  misc_feature (1)..(25): SEQ ID NO: 6613; WAN024BGA_s_at; Start 80; Stop 104
atgcaacagaggtaaaaataaatcg

SEQ ID NO: 80316 - DNA, 25 bp, Artificial
  probe
  misc_feature (1)..(25): SEQ ID NO: 6613; WAN024BGA_s_at; Start 75; Stop 99
tgtggatgcaacagaggtaaaaata

SEQ ID NO: 80317 - DNA, 25 bp, Artificial
  probe
  misc_feature (1)..(25): SEQ ID NO: 6617; WAN024BGB_at; Start 15; Stop 39
cgcttttcatttggccactcttcaa

SEQ ID NO: 80318 - DNA, 25 bp, Artificial
  probe
  misc_feature (1)..(25): SEQ ID NO: 6617; WAN024BGB_at; Start 6; Stop 30
ttgtttgatcgcttttcatttggcc

SEQ ID NO: 80319 - DNA, 25 bp, Artificial
  probe
  misc_feature (1)..(25): SEQ ID NO: 6617; WAN024BGB_at; Start 13; Stop 37
atcgcttttcatttggccactcttc

SEQ ID NO: 80320 - DNA, 25 bp, Artificial
  probe
  misc_feature (1)..(25): SEQ ID NO: 6617; WAN024BGB_at; Start 7; Stop 31
tgtttgatcgcttttcatttggcca

SEQ ID NO: 80321 - DNA, 25 bp, Artificial
  probe
  misc_feature (1)..(25): SEQ ID NO: 6617; WAN024BGB_at; Start 9; Stop 33
tttgatcgcttttcatttggccact

SEQ ID NO: 80322 - DNA, 25 bp, Artificial
  probe
  misc_feature (1)..(25): SEQ ID NO: 6617; WAN024BGB_at; Start 16; Stop 40
gcttttcatttggccactcttcaat

SEQ ID NO: 80323 - DNA, 25 bp, Artificial
  probe
  misc_feature (1)..(25): SEQ ID NO: 6617; WAN024BGB_at; Start 11; Stop 35
tgatcgcttttcatttggccactct

SEQ ID NO: 80324 - DNA, 25 bp, Artificial
  probe
  misc_feature (1)..(25): SEQ ID NO: 6617; WAN024BGB_at; Start 18; Stop 42
ttttcatttggccactcttcaatat

SEQ ID NO: 80325 - DNA, 25 bp, Artificial
  probe
  misc_feature (1)..(25): SEQ ID NO: 6617; WAN024BGB_at; Start 8; Stop 32
gtttgatcgcttttcatttggccac

SEQ ID NO: 80326 - DNA, 25 bp, Artificial
  probe
  misc_feature (1)..(25): SEQ ID NO: 6617; WAN024BGB_at; Start 10; Stop 34
ttgatcgcttttcatttggccactc

SEQ ID NO: 80327 - DNA, 25 bp, Artificial
  probe
  misc_feature (1)..(25): SEQ ID NO: 6617; WAN024BGB_at; Start 17; Stop 41
cttttcatttggccactcttcaata

SEQ ID NO: 80328 - DNA, 25 bp, Artificial
  probe
  misc_feature (1)..(25): SEQ ID NO: 6617; WAN024BGB_at; Start 12; Stop 36
gatcgcttttcatttggccactctt

SEQ ID NO: 80329 - DNA, 25 bp, Artificial
  probe
  misc_feature (1)..(25): SEQ ID NO: 6617; WAN024BGB_at; Start 14; Stop 38
tcgcttttcatttggccactcttca

SEQ ID NO: 80330 - DNA, 25 bp, Artificial
  probe
  misc_feature (1)..(25): SEQ ID NO: 7281; WAN024BGC_x_at; Start 10; Stop 34
taccgcacttatgaacaaattgcgg

SEQ ID NO: 80331 - DNA, 25 bp, Artificial
  probe
  misc_feature (1)..(25): SEQ ID NO: 7281; WAN024BGC_x_at; Start 14; Stop 38
gcacttatgaacaaattgcggctga

SEQ ID NO: 80332 - DNA, 25 bp, Artificial
  probe
  misc_feature (1)..(25): SEQ ID NO: 7281; WAN024BGC_x_at; Start 35; Stop 59
ctgattttggtattcacgaaagcaa

SEQ ID NO: 80333 - DNA, 25 bp, Artificial
  probe
  misc_feature (1)..(25): SEQ ID NO: 7281; WAN024BGC_x_at; Start 27; Stop 51
aattgcggctgattttggtattcac

SEQ ID NO: 80334 - DNA, 25 bp, Artificial
  probe
  misc_feature (1)..(25): SEQ ID NO: 7281; WAN024BGC_x_at; Start 18; Stop 42
ttatgaacaaattgcggctgatttt

SEQ ID NO: 80335 - DNA, 25 bp, Artificial
  probe
  misc_feature (1)..(25): SEQ ID NO: 7281; WAN024BGC_x_at; Start 9; Stop 33
ataccgcacttatgaacaaattgcg

SEQ ID NO: 80336 - DNA, 25 bp, Artificial
  probe
  misc_feature (1)..(25): SEQ ID NO: 7281; WAN024BGC_x_at; Start 12; Stop 36
ccgcacttatgaacaaattgcggct

SEQ ID NO: 80337 - DNA, 25 bp, Artificial
  probe
  misc_feature (1)..(25): SEQ ID NO: 7281; WAN024BGC_x_at; Start 11; Stop 35
accgcacttatgaacaaattgcggc

SEQ ID NO: 80338 - DNA, 25 bp, Artificial
  probe
  misc_feature (1)..(25): SEQ ID NO: 7281; WAN024BGC_x_at; Start 19; Stop 43
tatgaacaaattgcggctgattttg

SEQ ID NO: 80339 - DNA, 25 bp, Artificial
  probe
  misc_feature (1)..(25): SEQ ID NO: 7281; WAN024BGC_x_at; Start 7; Stop 31
gaataccgcacttatgaacaaattg

SEQ ID NO: 80340 - DNA, 25 bp, Artificial
  probe
  misc_feature (1)..(25): SEQ ID NO: 7281; WAN024BGC_x_at; Start 17; Stop 41
cttatgaacaaattgcggctgattt

SEQ ID NO: 80341 - DNA, 25 bp, Artificial
  probe
  misc_feature (1)..(25): SEQ ID NO: 7281; WAN024BGC_x_at; Start 44; Stop 68
gtattcacgaaagcaacttaatccg

SEQ ID NO: 80342 - DNA, 25 bp, Artificial
  probe
  misc_feature (1)..(25): SEQ ID NO: 7281; WAN024BGC_x_at; Start 5; Stop 29
gagaataccgcacttatgaacaaat

SEQ ID NO: 80343 - DNA, 25 bp, Artificial
  probe
  misc_feature (1)..(25): SEQ ID NO: 7281; WAN024BGC_x_at; Start 31; Stop 55
gcggctgattttggtattcacgaaa

SEQ ID NO: 80344 - DNA, 25 bp, Artificial
  probe
  misc_feature (1)..(25): SEQ ID NO: 7281; WAN024BGC_x_at; Start 47; Stop 71
ttcacgaaagcaacttaatccgtcg

SEQ ID NO: 80345 - DNA, 25 bp, Artificial
  probe
  misc_feature (1)..(25): SEQ ID NO: 7281; WAN024BGC_x_at; Start 15; Stop 39
cacttatgaacaaattgcggctgat

SEQ ID NO: 80346 - DNA, 25 bp, Artificial
  probe
  misc_feature (1)..(25): SEQ ID NO: 7281; WAN024BGC_x_at; Start 45; Stop 69
tattcacgaaagcaacttaatccgt

SEQ ID NO: 80347 - DNA, 25 bp, Artificial
  probe
  misc_feature (1)..(25): SEQ ID NO: 7281; WAN024BGC_x_at; Start 16; Stop 40
acttatgaacaaattgcggctgatt

SEQ ID NO: 80348 - DNA, 25 bp, Artificial
  probe
  misc_feature (1)..(25): SEQ ID NO: 7281; WAN024BGC_x_at; Start 33; Stop 57
ggctgattttggtattcacgaaagc

SEQ ID NO: 80349 - DNA, 25 bp, Artificial
  probe
  misc_feature (1)..(25): SEQ ID NO: 7281; WAN024BGC_x_at; Start 4; Stop 28
cgagaataccgcacttatgaacaaa

SEQ ID NO: 80350 - DNA, 25 bp, Artificial
  probe
  misc_feature (1)..(25): SEQ ID NO: 7281; WAN024BGC_x_at; Start 26; Stop 50
aaattgcggctgattttggtattca

SEQ ID NO: 80351 - DNA, 25 bp, Artificial
  probe
  misc_feature (1)..(25): SEQ ID NO: 7281; WAN024BGC_x_at; Start 23; Stop 47
aacaaattgcggctgattttggtat

SEQ ID NO: 80352 - DNA, 25 bp, Artificial
  probe
  misc_feature (1)..(25): SEQ ID NO: 7281; WAN024BGC_x_at; Start 3; Stop 27
gcgagaataccgcacttatgaacaa

SEQ ID NO: 80353 - DNA, 25 bp, Artificial
  probe
  misc_feature (1)..(25): SEQ ID NO: 7281; WAN024BGC_x_at; Start 29; Stop 53
ttgcggctgattttggtattcacga

SEQ ID NO: 80354 - DNA, 25 bp, Artificial
  probe
  misc_feature (1)..(25): SEQ ID NO: 7281; WAN024BGC_x_at; Start 6; Stop 30
agaataccgcacttatgaacaaatt

SEQ ID NO: 80355 - DNA, 25 bp, Artificial
  probe
  misc_feature (1)..(25): SEQ ID NO: 7281; WAN024BGC_x_at; Start 51; Stop 75
cgaaagcaacttaatccgtcggagc

SEQ ID NO: 80356 - DNA, 25 bp, Artificial
  probe
  misc_feature (1)..(25): SEQ ID NO: 7281; WAN024BGC_x_at; Start 32; Stop 56
cggctgattttggtattcacgaaag

SEQ ID NO: 80357 - DNA, 25 bp, Artificial
  probe
  misc_feature (1)..(25): SEQ ID NO: 7281; WAN024BGC_x_at; Start 25; Stop 49
caaattgcggctgattttggtattc

SEQ ID NO: 80358 - DNA, 25 bp, Artificial
  probe
  misc_feature (1)..(25): SEQ ID NO: 7281; WAN024BGC_x_at; Start 28; Stop 52
attgcggctgattttggtattcacg

SEQ ID NO: 80359 - DNA, 25 bp, Artificial
  probe
  misc_feature (1)..(25): SEQ ID NO: 7281; WAN024BGC_x_at; Start 24; Stop 48
acaaattgcggctgattttggtatt

SEQ ID NO: 80360 - DNA, 25 bp, Artificial
  probe
  misc_feature (1)..(25): SEQ ID NO: 7281; WAN024BGC_x_at; Start 30; Stop 54
tgcggctgattttggtattcacgaa

SEQ ID NO: 80361 - DNA, 25 bp, Artificial
  probe
  misc_feature (1)..(25): SEQ ID NO: 7281; WAN024BGC_x_at; Start 34; Stop 58
gctgattttggtattcacgaaagca

SEQ ID NO: 80362 - DNA, 25 bp, Artificial
  probe
  misc_feature (1)..(25): SEQ ID NO: 7281; WAN024BGC_x_at; Start 8; Stop 32
aataccgcacttatgaacaaattgc

SEQ ID NO: 80363 - DNA, 25 bp, Artificial
  probe
  misc_feature (1)..(25): SEQ ID NO: 7281; WAN024BGC_x_at; Start 13; Stop 37
cgcacttatgaacaaattgcggctg

SEQ ID NO: 80364 - DNA, 25 bp, Artificial
  probe
  misc_feature (1)..(25): SEQ ID NO: 7282; WAN024BGD_at; Start 135; Stop 159
tgctgagaatacggtgattgtggat

SEQ ID NO: 80365 - DNA, 25 bp, Artificial
  probe
  misc_feature (1)..(25): SEQ ID NO: 7282; WAN024BGD_at; Start 125; Stop 149
ctcatcttagtgctgagaatacggt

SEQ ID NO: 80366 - DNA, 25 bp, Artificial
  probe
  misc_feature (1)..(25): SEQ ID NO: 7282; WAN024BGD_at; Start 119; Stop 143
caaaaactcatcttagtgctgagaa

SEQ ID NO: 80367 - DNA, 25 bp, Artificial
  probe
  misc_feature (1)..(25): SEQ ID NO: 7282; WAN024BGD_at; Start 126; Stop 150
tcatcttagtgctgagaatacggtg

SEQ ID NO: 80368 - DNA, 25 bp, Artificial
  probe
  misc_feature (1)..(25): SEQ ID NO: 7282; WAN024BGD_at; Start 129; Stop 153
tcttagtgctgagaatacggtgatt

SEQ ID NO: 80369 - DNA, 25 bp, Artificial
  probe
  misc_feature (1)..(25): SEQ ID NO: 7282; WAN024BGD_at; Start 127; Stop 151
catcttagtgctgagaatacggtga

SEQ ID NO: 80370 - DNA, 25 bp, Artificial
  probe
  misc_feature (1)..(25): SEQ ID NO: 7282; WAN024BGD_at; Start 130; Stop 154
cttagtgctgagaatacggtgattg

SEQ ID NO: 80371 - DNA, 25 bp, Artificial
  probe
  misc_feature (1)..(25): SEQ ID NO: 7282; WAN024BGD_at; Start 117; Stop 141
ttcaaaaactcatcttagtgctgag

SEQ ID NO: 80372 - DNA, 25 bp, Artificial
  probe
  misc_feature (1)..(25): SEQ ID NO: 7282; WAN024BGD_at; Start 115; Stop 139
atttcaaaaactcatcttagtgctg

SEQ ID NO: 80373 - DNA, 25 bp, Artificial
  probe
  misc_feature (1)..(25): SEQ ID NO: 7282; WAN024BGD_at; Start 134; Stop 158
gtgctgagaatacggtgattgtgga

SEQ ID NO: 80374 - DNA, 25 bp, Artificial
  probe
  misc_feature (1)..(25): SEQ ID NO: 7282; WAN024BGD_at; Start 118; Stop 142
tcaaaaactcatcttagtgctgaga

SEQ ID NO: 80375 - DNA, 25 bp, Artificial
  probe
  misc_feature (1)..(25): SEQ ID NO: 7282; WAN024BGD_at; Start 124; Stop 148
actcatcttagtgctgagaatacgg

SEQ ID NO: 80376 - DNA, 25 bp, Artificial
  probe
  misc_feature (1)..(25): SEQ ID NO: 7282; WAN024BGD_at; Start 121; Stop 145
aaaactcatcttagtgctgagaata

SEQ ID NO: 80377 - DNA, 25 bp, Artificial
  probe
  misc_feature (1)..(25): SEQ ID NO: 7282; WAN024BGD_at; Start 112; Stop 136
acgatttcaaaaactcatcttagtg

SEQ ID NO: 80378 - DNA, 25 bp, Artificial
  probe
  misc_feature (1)..(25): SEQ ID NO: 7282; WAN024BGD_at; Start 123; Stop 147
aactcatcttagtgctgagaatacg

SEQ ID NO: 80379 - DNA, 25 bp, Artificial
  probe
  misc_feature (1)..(25): SEQ ID NO: 7282; WAN024BGD_at; Start 122; Stop 146
aaactcatcttagtgctgagaatac

SEQ ID NO: 80380 - DNA, 25 bp, Artificial
  probe
  misc_feature (1)..(25): SEQ ID NO: 7282; WAN024BGD_at; Start 120; Stop 144
aaaaactcatcttagtgctgagaat

SEQ ID NO: 80381 - DNA, 25 bp, Artificial
  probe
  misc_feature (1)..(25): SEQ ID NO: 7282; WAN024BGD_at; Start 113; Stop 137
cgatttcaaaaactcatcttagtgc

SEQ ID NO: 80382 - DNA, 25 bp, Artificial
  probe
  misc_feature (1)..(25): SEQ ID NO: 7282; WAN024BGD_at; Start 110; Stop 134
ttacgatttcaaaaactcatcttag

SEQ ID NO: 80383 - DNA, 25 bp, Artificial
  probe
  misc_feature (1)..(25): SEQ ID NO: 7282; WAN024BGD_at; Start 109; Stop 133
gttacgatttcaaaaactcatctta

SEQ ID NO: 80384 - DNA, 25 bp, Artificial
  probe
  misc_feature (1)..(25): SEQ ID NO: 7282; WAN024BGD_at; Start 132; Stop 156
tagtgctgagaatacggtgattgtg

SEQ ID NO: 80385 - DNA, 25 bp, Artificial
  probe
  misc_feature (1)..(25): SEQ ID NO: 7282; WAN024BGD_at; Start 131; Stop 155
ttagtgctgagaatacggtgattgt

SEQ ID NO: 80386 - DNA, 25 bp, Artificial
  probe
  misc_feature (1)..(25): SEQ ID NO: 7282; WAN024BGD_at; Start 128; Stop 152
atcttagtgctgagaatacggtgat

SEQ ID NO: 80387 - DNA, 25 bp, Artificial
  probe
  misc_feature (1)..(25): SEQ ID NO: 7282; WAN024BGD_at; Start 114; Stop 138
gatttcaaaaactcatcttagtgct

SEQ ID NO: 80388 - DNA, 25 bp, Artificial
  probe
  misc_feature (1)..(25): SEQ ID NO: 7282; WAN024BGD_at; Start 108; Stop 132
tgttacgatttcaaaaactcatctt

SEQ ID NO: 80389 - DNA, 25 bp, Artificial
  probe
  misc_feature (1)..(25): SEQ ID NO: 7282; WAN024BGD_at; Start 133; Stop 157
agtgctgagaatacggtgattgtgg

SEQ ID NO: 80390 - DNA, 25 bp, Artificial
  probe
  misc_feature (1)..(25): SEQ ID NO: 7282; WAN024BGD_at; Start 111; Stop 135
tacgatttcaaaaactcatcttagt

SEQ ID NO: 80391 - DNA, 25 bp, Artificial
  probe
  misc_feature (1)..(25): SEQ ID NO: 7282; WAN024BGD_at; Start 116; Stop 140
tttcaaaaactcatcttagtgctga

SEQ ID NO: 80392 - DNA, 25 bp, Artificial
  probe
  misc_feature (1)..(25): SEQ ID NO: 6910; WAN024BGE_at; Start 80; Stop 104
tttctcgctatgaaggctcagacga

SEQ ID NO: 80393 - DNA, 25 bp, Artificial
  probe
  misc_feature (1)..(25): SEQ ID NO: 6910; WAN024BGE_at; Start 84; Stop 108
tcgctatgaaggctcagacgattgt

SEQ ID NO: 80394 - DNA, 25 bp, Artificial
  probe
  misc_feature (1)..(25): SEQ ID NO: 6910; WAN024BGE_at; Start 82; Stop 106
tctcgctatgaaggctcagacgatt

SEQ ID NO: 80395 - DNA, 25 bp, Artificial
  probe
  misc_feature (1)..(25): SEQ ID NO: 6910; WAN024BGE_at; Start 77; Stop 101
atatttctcgctatgaaggctcaga

SEQ ID NO: 80396 - DNA, 25 bp, Artificial
  probe
  misc_feature (1)..(25): SEQ ID NO: 6910; WAN024BGE_at; Start 76; Stop 100
gatatttctcgctatgaaggctcag

SEQ ID NO: 80397 - DNA, 25 bp, Artificial
  probe
  misc_feature (1)..(25): SEQ ID NO: 6910; WAN024BGE_at; Start 81; Stop 105
ttctcgctatgaaggctcagacgat

SEQ ID NO: 80398 - DNA, 25 bp, Artificial
  probe
  misc_feature (1)..(25): SEQ ID NO: 6910; WAN024BGE_at; Start 83; Stop 107
ctcgctatgaaggctcagacgattg

SEQ ID NO: 80399 - DNA, 25 bp, Artificial
  probe
  misc_feature (1)..(25): SEQ ID NO: 6910; WAN024BGE_at; Start 79; Stop 103
atttctcgctatgaaggctcagacg

SEQ ID NO: 80400 - DNA, 25 bp, Artificial
  probe
  misc_feature (1)..(25): SEQ ID NO: 6910; WAN024BGE_at; Start 78; Stop 102
tatttctcgctatgaaggctcagac

SEQ ID NO: 80401 - DNA, 25 bp, Artificial
  probe
  misc_feature (1)..(25): SEQ ID NO: 7463; WAN024BGF_x_at; Start 58; Stop 82
atcatcgtaaacgcttcggatattt

SEQ ID NO: 80402 - DNA, 25 bp, Artificial
  probe
  misc_feature (1)..(25): SEQ ID NO: 7463; WAN024BGF_x_at; Start 55; Stop 79
gaaatcatcgtaaacgcttcggata

SEQ ID NO: 80403 - DNA, 25 bp, Artificial
  probe
  misc_feature (1)..(25): SEQ ID NO: 7463; WAN024BGF_x_at; Start 44; Stop 68
aacaacctatcgaaatcatcgtaaa

SEQ ID NO: 80404 - DNA, 25 bp, Artificial
  probe
  misc_feature (1)..(25): SEQ ID NO: 7463; WAN024BGF_x_at; Start 41; Stop 65
ttcaacaacctatcgaaatcatcgt

SEQ ID NO: 80405 - DNA, 25 bp, Artificial
  probe
  misc_feature (1)..(25): SEQ ID NO: 7463; WAN024BGF_x_at; Start 56; Stop 80
aaatcatcgtaaacgcttcggatat

SEQ ID NO: 80406 - DNA, 25 bp, Artificial
  probe
  misc_feature (1)..(25): SEQ ID NO: 7463; WAN024BGF_x_at; Start 40; Stop 64
tttcaacaacctatcgaaatcatcg

SEQ ID NO: 80407 - DNA, 25 bp, Artificial
  probe
  misc_feature (1)..(25): SEQ ID NO: 7463; WAN024BGF_x_at; Start 52; Stop 76
atcgaaatcatcgtaaacgcttcgg

SEQ ID NO: 80408 - DNA, 25 bp, Artificial
  probe
  misc_feature (1)..(25): SEQ ID NO: 7463; WAN024BGF_x_at; Start 5; Stop 29
gaatatctttgccaaagcaaaaacg

SEQ ID NO: 80409 - DNA, 25 bp, Artificial
  probe
  misc_feature (1)..(25): SEQ ID NO: 7463; WAN024BGF_x_at; Start 3; Stop 27
gagaatatctttgccaaagcaaaaa

SEQ ID NO: 80410 - DNA, 25 bp, Artificial
  probe
  misc_feature (1)..(25): SEQ ID NO: 7463; WAN024BGF_x_at; Start 54; Stop 78
cgaaatcatcgtaaacgcttcggat

SEQ ID NO: 80411 - DNA, 25 bp, Artificial
  probe
  misc_feature (1)..(25): SEQ ID NO: 7463; WAN024BGF_x_at; Start 50; Stop 74
ctatcgaaatcatcgtaaacgcttc

SEQ ID NO: 80412 - DNA, 25 bp, Artificial
  probe
  misc_feature (1)..(25): SEQ ID NO: 7463; WAN024BGF_x_at; Start 36; Stop 60
atgttttcaacaacctatcgaaatc

SEQ ID NO: 80413 - DNA, 25 bp, Artificial
  probe
  misc_feature (1)..(25): SEQ ID NO: 7463; WAN024BGF_x_at; Start 51; Stop 75
tatcgaaatcatcgtaaacgcttcg

SEQ ID NO: 80414 - DNA, 25 bp, Artificial
  probe
  misc_feature (1)..(25): SEQ ID NO: 7463; WAN024BGF_x_at; Start 38; Stop 62
gttttcaacaacctatcgaaatcat

SEQ ID NO: 80415 - DNA, 25 bp, Artificial
  probe
  misc_feature (1)..(25): SEQ ID NO: 7463; WAN024BGF_x_at; Start 35; Stop 59
aatgttttcaacaacctatcgaaat

SEQ ID NO: 80416 - DNA, 25 bp, Artificial
  probe
  misc_feature (1)..(25): SEQ ID NO: 7463; WAN024BGF_x_at; Start 47; Stop 71
aacctatcgaaatcatcgtaaacgc

SEQ ID NO: 80417 - DNA, 25 bp, Artificial
  probe
  misc_feature (1)..(25): SEQ ID NO: 7463; WAN024BGF_x_at; Start 7; Stop 31
atatctttgccaaagcaaaaacgtt

SEQ ID NO: 80418 - DNA, 25 bp, Artificial
  probe
  misc_feature (1)..(25): SEQ ID NO: 7463; WAN024BGF_x_at; Start 48; Stop 72
acctatcgaaatcatcgtaaacgct

SEQ ID NO: 80419 - DNA, 25 bp, Artificial
  probe
  misc_feature (1)..(25): SEQ ID NO: 7463; WAN024BGF_x_at; Start 4; Stop 28
agaatatctttgccaaagcaaaaac

SEQ ID NO: 80420 - DNA, 25 bp, Artificial
  probe
  misc_feature (1)..(25): SEQ ID NO: 7463; WAN024BGF_x_at; Start 32; Stop 56
taaaatgttttcaacaacctatcga

SEQ ID NO: 80421 - DNA, 25 bp, Artificial
  probe
  misc_feature (1)..(25): SEQ ID NO: 7463; WAN024BGF_x_at; Start 46; Stop 70
caacctatcgaaatcatcgtaaacg

SEQ ID NO: 80422 - DNA, 25 bp, Artificial
  probe
  misc_feature (1)..(25): SEQ ID NO: 7463; WAN024BGF_x_at; Start 60; Stop 84
catcgtaaacgcttcggatatttta

SEQ ID NO: 80423 - DNA, 25 bp, Artificial
  probe
  misc_feature (1)..(25): SEQ ID NO: 7463; WAN024BGF_x_at; Start 43; Stop 67
caacaacctatcgaaatcatcgtaa

SEQ ID NO: 80424 - DNA, 25 bp, Artificial
  probe
  misc_feature (1)..(25): SEQ ID NO: 7463; WAN024BGF_x_at; Start 37; Stop 61
tgttttcaacaacctatcgaaatca

SEQ ID NO: 80425 - DNA, 25 bp, Artificial
  probe
  misc_feature (1)..(25): SEQ ID NO: 7463; WAN024BGF_x_at; Start 45; Stop 69
acaacctatcgaaatcatcgtaaac

SEQ ID NO: 80426 - DNA, 25 bp, Artificial
  probe
  misc_feature (1)..(25): SEQ ID NO: 7463; WAN024BGF_x_at; Start 53; Stop 77
tcgaaatcatcgtaaacgcttcgga

SEQ ID NO: 80427 - DNA, 25 bp, Artificial
  probe
  misc_feature (1)..(25): SEQ ID NO: 7463; WAN024BGF_x_at; Start 39; Stop 63
ttttcaacaacctatcgaaatcatc

SEQ ID NO: 80428 - DNA, 25 bp, Artificial
  probe
  misc_feature (1)..(25): SEQ ID NO: 7463; WAN024BGF_x_at; Start 2; Stop 26
tgagaatatctttgccaaagcaaaa

SEQ ID NO: 80429 - DNA, 25 bp, Artificial
  probe
  misc_feature (1)..(25): SEQ ID NO: 7463; WAN024BGF_x_at; Start 49; Stop 73
cctatcgaaatcatcgtaaacgctt

SEQ ID NO: 80430 - DNA, 25 bp, Artificial
  probe
  misc_feature (1)..(25): SEQ ID NO: 7463; WAN024BGF_x_at; Start 1; Stop 25
ttgagaatatctttgccaaagcaaa

SEQ ID NO: 80431 - DNA, 25 bp, Artificial
  probe
  misc_feature (1)..(25): SEQ ID NO: 7463; WAN024BGF_x_at; Start 57; Stop 81
aatcatcgtaaacgcttcggatatt

SEQ ID NO: 80432 - DNA, 25 bp, Artificial
  probe
  misc_feature (1)..(25): SEQ ID NO: 7463; WAN024BGF_x_at; Start 6; Stop 30
aatatctttgccaaagcaaaaacgt

SEQ ID NO: 80433 - DNA, 25 bp, Artificial
  probe
  misc_feature (1)..(25): SEQ ID NO: 7463; WAN024BGF_x_at; Start 42; Stop 66
tcaacaacctatcgaaatcatcgta

SEQ ID NO: 80434 - DNA, 25 bp, Artificial
  probe
  misc_feature (1)..(25): SEQ ID NO: 7463; WAN024BGF_x_at; Start 59; Stop 83
tcatcgtaaacgcttcggatatttt

SEQ ID NO: 80435 - DNA, 25 bp, Artificial
  probe
  misc_feature (1)..(25): SEQ ID NO: 7622; WAN024BGG_at; Start 33; Stop 57
cttagatagtgcatggttacaggct

SEQ ID NO: 80436 - DNA, 25 bp, Artificial
  probe
  misc_feature (1)..(25): SEQ ID NO: 7622; WAN024BGG_at; Start 26; Stop 50
ttctatccttagatagtgcatggtt

SEQ ID NO: 80437 - DNA, 25 bp, Artificial
  probe
  misc_feature (1)..(25): SEQ ID NO: 7622; WAN024BGG_at; Start 56; Stop 80
ctttatctttagctgttagcggatt

SEQ ID NO: 80438 - DNA, 25 bp, Artificial
  probe
  misc_feature (1)..(25): SEQ ID NO: 7622; WAN024BGG_at; Start 58; Stop 82
ttatctttagctgttagcggattga

SEQ ID NO: 80439 - DNA, 25 bp, Artificial
  probe
  misc_feature (1)..(25): SEQ ID NO: 7622; WAN024BGG_at; Start 25; Stop 49
cttctatccttagatagtgcatggt

SEQ ID NO: 80440 - DNA, 25 bp, Artificial
  probe
  misc_feature (1)..(25): SEQ ID NO: 7622; WAN024BGG_at; Start 65; Stop 89
tagctgttagcggattgagtttgct

SEQ ID NO: 80441 - DNA, 25 bp, Artificial
  probe
  misc_feature (1)..(25): SEQ ID NO: 7622; WAN024BGG_at; Start 19; Stop 43
accttgcttctatccttagatagtg

SEQ ID NO: 80442 - DNA, 25 bp, Artificial
  probe
  misc_feature (1)..(25): SEQ ID NO: 7622; WAN024BGG_at; Start 62; Stop 86
ctttagctgttagcggattgagttt

SEQ ID NO: 80443 - DNA, 25 bp, Artificial
  probe
  misc_feature (1)..(25): SEQ ID NO: 7622; WAN024BGG_at; Start 61; Stop 85
tctttagctgttagcggattgagtt

SEQ ID NO: 80444 - DNA, 25 bp, Artificial
  probe
  misc_feature (1)..(25): SEQ ID NO: 7622; WAN024BGG_at; Start 29; Stop 53
tatccttagatagtgcatggttaca

SEQ ID NO: 80445 - DNA, 25 bp, Artificial
  probe
  misc_feature (1)..(25): SEQ ID NO: 7622; WAN024BGG_at; Start 55; Stop 79
gctttatctttagctgttagcggat

SEQ ID NO: 80446 - DNA, 25 bp, Artificial
  probe
  misc_feature (1)..(25): SEQ ID NO: 7622; WAN024BGG_at; Start 21; Stop 45
cttgcttctatccttagatagtgca

SEQ ID NO: 80447 - DNA, 25 bp, Artificial
  probe
  misc_feature (1)..(25): SEQ ID NO: 7622; WAN024BGG_at; Start 67; Stop 91
gctgttagcggattgagtttgctgg

SEQ ID NO: 80448 - DNA, 25 bp, Artificial
  probe
  misc_feature (1)..(25): SEQ ID NO: 7622; WAN024BGG_at; Start 59; Stop 83
tatctttagctgttagcggattgag

SEQ ID NO: 80449 - DNA, 25 bp, Artificial
  probe
  misc_feature (1)..(25): SEQ ID NO: 7622; WAN024BGG_at; Start 13; Stop 37
ttctcaaccttgcttctatccttag

SEQ ID NO: 80450 - DNA, 25 bp, Artificial
  probe
  misc_feature (1)..(25): SEQ ID NO: 7622; WAN024BGG_at; Start 23; Stop 47
tgcttctatccttagatagtgcatg

SEQ ID NO: 80451 - DNA, 25 bp, Artificial
  probe
  misc_feature (1)..(25): SEQ ID NO: 7622; WAN024BGG_at; Start 32; Stop 56
ccttagatagtgcatggttacaggc

SEQ ID NO: 80452 - DNA, 25 bp, Artificial
  probe
  misc_feature (1)..(25): SEQ ID NO: 7622; WAN024BGG_at; Start 14; Stop 38
tctcaaccttgcttctatccttaga

SEQ ID NO: 80453 - DNA, 25 bp, Artificial
  probe
  misc_feature (1)..(25): SEQ ID NO: 7622; WAN024BGG_at; Start 16; Stop 40
tcaaccttgcttctatccttagata

SEQ ID NO: 80454 - DNA, 25 bp, Artificial
  probe
  misc_feature (1)..(25): SEQ ID NO: 7622; WAN024BGG_at; Start 15; Stop 39
ctcaaccttgcttctatccttagat

SEQ ID NO: 80455 - DNA, 25 bp, Artificial
  probe
  misc_feature (1)..(25): SEQ ID NO: 7622; WAN024BGG_at; Start 60; Stop 84
atctttagctgttagcggattgagt

SEQ ID NO: 80456 - DNA, 25 bp, Artificial
  probe
  misc_feature (1)..(25): SEQ ID NO: 7622; WAN024BGG_at; Start 31; Stop 55
tccttagatagtgcatggttacagg

SEQ ID NO: 80457 - DNA, 25 bp, Artificial
  probe
  misc_feature (1)..(25): SEQ ID NO: 7622; WAN024BGG_at; Start 57; Stop 81
tttatctttagctgttagcggattg

SEQ ID NO: 80458 - DNA, 25 bp, Artificial
  probe
  misc_feature (1)..(25): SEQ ID NO: 7622; WAN024BGG_at; Start 28; Stop 52
ctatccttagatagtgcatggttac

SEQ ID NO: 80459 - DNA, 25 bp, Artificial
  probe
  misc_feature (1)..(25): SEQ ID NO: 7622; WAN024BGG_at; Start 54; Stop 78
ggctttatctttagctgttagcgga

SEQ ID NO: 80460 - DNA, 25 bp, Artificial
  probe
  misc_feature (1)..(25): SEQ ID NO: 7622; WAN024BGG_at; Start 18; Stop 42
aaccttgcttctatccttagatagt

SEQ ID NO: 80461 - DNA, 25 bp, Artificial
  probe
  misc_feature (1)..(25): SEQ ID NO: 7622; WAN024BGG_at; Start 66; Stop 90
agctgttagcggattgagtttgctg

SEQ ID NO: 80462 - DNA, 25 bp, Artificial
  probe
  misc_feature (1)..(25): SEQ ID NO: 7622; WAN024BGG_at; Start 17; Stop 41
caaccttgcttctatccttagatag

SEQ ID NO: 80463 - DNA, 25 bp, Artificial
  probe
  misc_feature (1)..(25): SEQ ID NO: 7622; WAN024BGG_at; Start 30; Stop 54
atccttagatagtgcatggttacag

SEQ ID NO: 80464 - DNA, 25 bp, Artificial
  probe
  misc_feature (1)..(25): SEQ ID NO: 7622; WAN024BGG_at; Start 12; Stop 36
gttctcaaccttgcttctatcctta

SEQ ID NO: 80465 - DNA, 25 bp, Artificial
  probe
  misc_feature (1)..(25): SEQ ID NO: 7622; WAN024BGG_at; Start 20; Stop 44
ccttgcttctatccttagatagtgc

SEQ ID NO: 80466 - DNA, 25 bp, Artificial
  probe
  misc_feature (1)..(25): SEQ ID NO: 7622; WAN024BGG_at; Start 24; Stop 48
gcttctatccttagatagtgcatgg

SEQ ID NO: 80467 - DNA, 25 bp, Artificial
  probe
  misc_feature (1)..(25): SEQ ID NO: 7622; WAN024BGG_at; Start 27; Stop 51
tctatccttagatagtgcatggtta

SEQ ID NO: 80468 - DNA, 25 bp, Artificial
  probe
  misc_feature (1)..(25): SEQ ID NO: 7622; WAN024BGG_at; Start 11; Stop 35
tgttctcaaccttgcttctatcctt

SEQ ID NO: 80469 - DNA, 25 bp, Artificial
  probe
  misc_feature (1)..(25): SEQ ID NO: 6253; WAN024BGH_at; Start 114; Stop 138
caagccgctaatagctgaagataaa

SEQ ID NO: 80470 - DNA, 25 bp, Artificial
  probe
  misc_feature (1)..(25): SEQ ID NO: 6253; WAN024BGH_at; Start 147; Stop 171
ccatgcactgtctaaggatagaagc

SEQ ID NO: 80471 - DNA, 25 bp, Artificial
  probe
  misc_feature (1)..(25): SEQ ID NO: 6253; WAN024BGH_at; Start 150; Stop 174
tgcactgtctaaggatagaagcaag

SEQ ID NO: 80472 - DNA, 25 bp, Artificial
  probe
  misc_feature (1)..(25): SEQ ID NO: 6253; WAN024BGH_at; Start 117; Stop 141
gccgctaatagctgaagataaagcc

SEQ ID NO: 80473 - DNA, 25 bp, Artificial
  probe
  misc_feature (1)..(25): SEQ ID NO: 6253; WAN024BGH_at; Start 156; Stop 180
gtctaaggatagaagcaaggttgag

SEQ ID NO: 80474 - DNA, 25 bp, Artificial
  probe
  misc_feature (1)..(25): SEQ ID NO: 6253; WAN024BGH_at; Start 46; Stop 70
gacagtggttatcaagggctcatga

SEQ ID NO: 80475 - DNA, 25 bp, Artificial
  probe
  misc_feature (1)..(25): SEQ ID NO: 6253; WAN024BGH_at; Start 152; Stop 176
cactgtctaaggatagaagcaaggt

SEQ ID NO: 80476 - DNA, 25 bp, Artificial
  probe
  misc_feature (1)..(25): SEQ ID NO: 6253; WAN024BGH_at; Start 144; Stop 168
taaccatgcactgtctaaggataga

SEQ ID NO: 80477 - DNA, 25 bp, Artificial
  probe
  misc_feature (1)..(25): SEQ ID NO: 6253; WAN024BGH_at; Start 154; Stop 178
ctgtctaaggatagaagcaaggttg

SEQ ID NO: 80478 - DNA, 25 bp, Artificial
  probe
  misc_feature (1)..(25): SEQ ID NO: 6253; WAN024BGH_at; Start 52; Stop 76
ggttatcaagggctcatgaagatat

SEQ ID NO: 80479 - DNA, 25 bp, Artificial
  probe
  misc_feature (1)..(25): SEQ ID NO: 6253; WAN024BGH_at; Start 41; Stop 65
tggctgacagtggttatcaagggct

SEQ ID NO: 80480 - DNA, 25 bp, Artificial
  probe
  misc_feature (1)..(25): SEQ ID NO: 6253; WAN024BGH_at; Start 258; Stop 282
taggcatactatatattttttattc

SEQ ID NO: 80481 - DNA, 25 bp, Artificial
  probe
  misc_feature (1)..(25): SEQ ID NO: 6253; WAN024BGH_at; Start 119; Stop 143
cgctaatagctgaagataaagccta

SEQ ID NO: 80482 - DNA, 25 bp, Artificial
  probe
  misc_feature (1)..(25): SEQ ID NO: 6253; WAN024BGH_at; Start 130; Stop 154
gaagataaagcctataaccatgcac

SEQ ID NO: 80483 - DNA, 25 bp, Artificial
  probe
  misc_feature (1)..(25): SEQ ID NO: 6253; WAN024BGH_at; Start 125; Stop 149
tagctgaagataaagcctataacca

SEQ ID NO: 80484 - DNA, 25 bp, Artificial
  probe
  misc_feature (1)..(25): SEQ ID NO: 6253; WAN024BGH_at; Start 45; Stop 69
tgacagtggttatcaagggctcatg

SEQ ID NO: 80485 - DNA, 25 bp, Artificial
  probe
  misc_feature (1)..(25): SEQ ID NO: 6253; WAN024BGH_at; Start 109; Stop 133
aaactcaagccgctaatagctgaag

SEQ ID NO: 80486 - DNA, 25 bp, Artificial
  probe
  misc_feature (1)..(25): SEQ ID NO: 6253; WAN024BGH_at; Start 135; Stop 159
taaagcctataaccatgcactgtct

SEQ ID NO: 80487 - DNA, 25 bp, Artificial
  probe
  misc_feature (1)..(25): SEQ ID NO: 6253; WAN024BGH_at; Start 145; Stop 169
aaccatgcactgtctaaggatagaa

SEQ ID NO: 80488 - DNA, 25 bp, Artificial
  probe
  misc_feature (1)..(25): SEQ ID NO: 6253; WAN024BGH_at; Start 120; Stop 144
gctaatagctgaagataaagcctat

SEQ ID NO: 80489 - DNA, 25 bp, Artificial
  probe
  misc_feature (1)..(25): SEQ ID NO: 6253; WAN024BGH_at; Start 49; Stop 73
agtggttatcaagggctcatgaaga

SEQ ID NO: 80490 - DNA, 25 bp, Artificial
  probe
  misc_feature (1)..(25): SEQ ID NO: 6253; WAN024BGH_at; Start 148; Stop 172
catgcactgtctaaggatagaagca

SEQ ID NO: 80491 - DNA, 25 bp, Artificial
  probe
  misc_feature (1)..(25): SEQ ID NO: 6253; WAN024BGH_at; Start 139; Stop 163
gcctataaccatgcactgtctaagg

SEQ ID NO: 80492 - DNA, 25 bp, Artificial
  probe
  misc_feature (1)..(25): SEQ ID NO: 6253; WAN024BGH_at; Start 245; Stop 269
gcttcggatattttaggcatactat

SEQ ID NO: 80493 - DNA, 25 bp, Artificial
  probe
  misc_feature (1)..(25): SEQ ID NO: 6253; WAN024BGH_at; Start 248; Stop 272
tcggatattttaggcatactatata

SEQ ID NO: 80494 - DNA, 25 bp, Artificial
  probe
  misc_feature (1)..(25): SEQ ID NO: 6253; WAN024BGH_at; Start 48; Stop 72
cagtggttatcaagggctcatgaag

SEQ ID NO: 80495 - DNA, 25 bp, Artificial
  probe
  misc_feature (1)..(25): SEQ ID NO: 6253; WAN024BGH_at; Start 112; Stop 136
ctcaagccgctaatagctgaagata

SEQ ID NO: 80496 - DNA, 25 bp, Artificial
  probe
  misc_feature (1)..(25): SEQ ID NO: 6253; WAN024BGH_at; Start 133; Stop 157
gataaagcctataaccatgcactgt

SEQ ID NO: 80497 - DNA, 25 bp, Artificial
  probe
  misc_feature (1)..(25): SEQ ID NO: 6253; WAN024BGH_at; Start 43; Stop 67
gctgacagtggttatcaagggctca

SEQ ID NO: 80498 - DNA, 25 bp, Artificial
  probe
  misc_feature (1)..(25): SEQ ID NO: 6253; WAN024BGH_at; Start 141; Stop 165
ctataaccatgcactgtctaaggat

SEQ ID NO: 80499 - DNA, 25 bp, Artificial
  probe
  misc_feature (1)..(25): SEQ ID NO: 6253; WAN024BGH_at; Start 105; Stop 129
cagcaaactcaagccgctaatagct

SEQ ID NO: 80500 - DNA, 25 bp, Artificial
  probe
  misc_feature (1)..(25): SEQ ID NO: 6253; WAN024BGH_at; Start 127; Stop 151
gctgaagataaagcctataaccatg

SEQ ID NO: 80501 - DNA, 25 bp, Artificial
  probe
  misc_feature (1)..(25): SEQ ID NO: 6253; WAN024BGH_at; Start 137; Stop 161
aagcctataaccatgcactgtctaa

SEQ ID NO: 80502 - DNA, 25 bp, Artificial
  probe
  misc_feature (1)..(25): SEQ ID NO: 6253; WAN024BGH_at; Start 110; Stop 134
aactcaagccgctaatagctgaaga

SEQ ID NO: 80503 - DNA, 25 bp, Artificial
  probe
  misc_feature (1)..(25): SEQ ID NO: 5333; WAN024BGI_at; Start 118; Stop 142
caatcgttcggaattttgcttttct

SEQ ID NO: 80504 - DNA, 25 bp, Artificial
  probe
  misc_feature (1)..(25): SEQ ID NO: 5333; WAN024BGI_at; Start 103; Stop 127
cagttcaggattaaacaatcgttcg

SEQ ID NO: 80505 - DNA, 25 bp, Artificial
  probe
  misc_feature (1)..(25): SEQ ID NO: 5333; WAN024BGI_at; Start 252; Stop 276
ctatcaaaaaagacgctctactatt

SEQ ID NO: 80506 - DNA, 25 bp, Artificial
  probe
  misc_feature (1)..(25): SEQ ID NO: 5333; WAN024BGI_at; Start 191; Stop 215
tttgcaattttttgtgcgtagcaga

SEQ ID NO: 80507 - DNA, 25 bp, Artificial
  probe
  misc_feature (1)..(25): SEQ ID NO: 5333; WAN024BGI_at; Start 211; Stop 235
gcagatttttgcaatcaaatcaaaa

SEQ ID NO: 80508 - DNA, 25 bp, Artificial
  probe
  misc_feature (1)..(25): SEQ ID NO: 5333; WAN024BGI_at; Start 58; Stop 82
tacaatactttgctattataccaaa

SEQ ID NO: 80509 - DNA, 25 bp, Artificial
  probe
  misc_feature (1)..(25): SEQ ID NO: 5333; WAN024BGI_at; Start 199; Stop 223
tttttgtgcgtagcagatttttgca

SEQ ID NO: 80510 - DNA, 25 bp, Artificial
  probe
  misc_feature (1)..(25): SEQ ID NO: 5333; WAN024BGI_at; Start 20; Stop 44
ccattctttttcttcataatgaaac

SEQ ID NO: 80511 - DNA, 25 bp, Artificial
  probe
  misc_feature (1)..(25): SEQ ID NO: 5333; WAN024BGI_at; Start 84; Stop 108
ttccctccagcaaacaatacagttc

SEQ ID NO: 80512 - DNA, 25 bp, Artificial
  probe
  misc_feature (1)..(25): SEQ ID NO: 5333; WAN024BGI_at; Start 247; Stop 271
tataactatcaaaaaagacgctcta

SEQ ID NO: 80513 - DNA, 25 bp, Artificial
  probe
  misc_feature (1)..(25): SEQ ID NO: 5333; WAN024BGI_at; Start 91; Stop 115
cagcaaacaatacagttcaggatta

SEQ ID NO: 80514 - DNA, 25 bp, Artificial
  probe
  misc_feature (1)..(25): SEQ ID NO: 5333; WAN024BGI_at; Start 69; Stop 93
gctattataccaaatttccctccag

SEQ ID NO: 80515 - DNA, 25 bp, Artificial
  probe
  misc_feature (1)..(25): SEQ ID NO: 5333; WAN024BGI_at; Start 172; Stop 196
gacttatttggcaagcttttttgca

SEQ ID NO: 80516 - DNA, 25 bp, Artificial
  probe
  misc_feature (1)..(25): SEQ ID NO: 5333; WAN024BGI_at; Start 2; Stop 26
tgccactttttagctttaccattct

SEQ ID NO: 80517 - DNA, 25 bp, Artificial
  probe
  misc_feature (1)..(25): SEQ ID NO: 5333; WAN024BGI_at; Start 94; Stop 118
caaacaatacagttcaggattaaac

SEQ ID NO: 80518 - DNA, 25 bp, Artificial
  probe
  misc_feature (1)..(25): SEQ ID NO: 5333; WAN024BGI_at; Start 194; Stop 218
gcaattttttgtgcgtagcagattt

SEQ ID NO: 80519 - DNA, 25 bp, Artificial
  probe
  misc_feature (1)..(25): SEQ ID NO: 5333; WAN024BGI_at; Start 87; Stop 111
cctccagcaaacaatacagttcagg

SEQ ID NO: 80520 - DNA, 25 bp, Artificial
  probe
  misc_feature (1)..(25): SEQ ID NO: 5333; WAN024BGI_at; Start 159; Stop 183
aatacactatcttgacttatttggc

SEQ ID NO: 80521 - DNA, 25 bp, Artificial
  probe
  misc_feature (1)..(25): SEQ ID NO: 5333; WAN024BGI_at; Start 74; Stop 98
tataccaaatttccctccagcaaac

SEQ ID NO: 80522 - DNA, 25 bp, Artificial
  probe
  misc_feature (1)..(25): SEQ ID NO: 5333; WAN024BGI_at; Start 71; Stop 95
tattataccaaatttccctccagca

SEQ ID NO: 80523 - DNA, 25 bp, Artificial
  probe
  misc_feature (1)..(25): SEQ ID NO: 5333; WAN024BGI_at; Start 107; Stop 131
tcaggattaaacaatcgttcggaat

SEQ ID NO: 80524 - DNA, 25 bp, Artificial
  probe
  misc_feature (1)..(25): SEQ ID NO: 5333; WAN024BGI_at; Start 145; Stop 169
tgtactagatatataatacactatc

SEQ ID NO: 80525 - DNA, 25 bp, Artificial
  probe
  misc_feature (1)..(25): SEQ ID NO: 5333; WAN024BGI_at; Start 89; Stop 113
tccagcaaacaatacagttcaggat

SEQ ID NO: 80526 - DNA, 25 bp, Artificial
  probe
  misc_feature (1)..(25): SEQ ID NO: 5333; WAN024BGI_at; Start 183; Stop 207
caagcttttttgcaattttttgtgc

SEQ ID NO: 80527 - DNA, 25 bp, Artificial
  probe
  misc_feature (1)..(25): SEQ ID NO: 5333; WAN024BGI_at; Start 99; Stop 123
aatacagttcaggattaaacaatcg

SEQ ID NO: 80528 - DNA, 25 bp, Artificial
  probe
  misc_feature (1)..(25): SEQ ID NO: 5333; WAN024BGI_at; Start 81; Stop 105
aatttccctccagcaaacaatacag

SEQ ID NO: 80529 - DNA, 25 bp, Artificial
  probe
  misc_feature (1)..(25): SEQ ID NO: 5333; WAN024BGI_at; Start 255; Stop 279
tcaaaaaagacgctctactatttaa

SEQ ID NO: 80530 - DNA, 25 bp, Artificial
  probe
  misc_feature (1)..(25): SEQ ID NO: 5333; WAN024BGI_at; Start 245; Stop 269
aatataactatcaaaaaagacgctc

SEQ ID NO: 80531 - DNA, 25 bp, Artificial
  probe
  misc_feature (1)..(25): SEQ ID NO: 5333; WAN024BGI_at; Start 30; Stop 54
tcttcataatgaaactccttttctt

SEQ ID NO: 80532 - DNA, 25 bp, Artificial
  probe
  misc_feature (1)..(25): SEQ ID NO: 5333; WAN024BGI_at; Start 13; Stop 37
agctttaccattctttttcttcata

SEQ ID NO: 80533 - DNA, 25 bp, Artificial
  probe
  misc_feature (1)..(25): SEQ ID NO: 5333; WAN024BGI_at; Start 105; Stop 129
gttcaggattaaacaatcgttcgga

SEQ ID NO: 80534 - DNA, 25 bp, Artificial
  probe
  misc_feature (1)..(25): SEQ ID NO: 5333; WAN024BGI_at; Start 76; Stop 100
taccaaatttccctccagcaaacaa

SEQ ID NO: 80535 - DNA, 25 bp, Artificial
  probe
  misc_feature (1)..(25): SEQ ID NO: 5333; WAN024BGI_at; Start 249; Stop 273
taactatcaaaaaagacgctctact

SEQ ID NO: 80536 - DNA, 25 bp, Artificial
  probe
  misc_feature (1)..(25): SEQ ID NO: 5333; WAN024BGI_at; Start 203; Stop 227
tgtgcgtagcagatttttgcaatca

SEQ ID NO: 80537 - DNA, 25 bp, Artificial
  probe
  misc_feature (1)..(25): SEQ ID NO: 5760; WAN024BGJ_at; Start 169; Stop 193
agccttcatagcgtggcattttttt

SEQ ID NO: 80538 - DNA, 25 bp, Artificial
  probe
  misc_feature (1)..(25): SEQ ID NO: 5760; WAN024BGJ_at; Start 171; Stop 195
ccttcatagcgtggcatttttttta

SEQ ID NO: 80539 - DNA, 25 bp, Artificial
  probe
  misc_feature (1)..(25): SEQ ID NO: 5760; WAN024BGJ_at; Start 170; Stop 194
gccttcatagcgtggcatttttttt

SEQ ID NO: 80540 - DNA, 25 bp, Artificial
  probe
  misc_feature (1)..(25): SEQ ID NO: 5760; WAN024BGJ_at; Start 172; Stop 196
cttcatagcgtggcattttttttac

SEQ ID NO: 80541 - DNA, 25 bp, Artificial
  probe
  misc_feature (1)..(25): SEQ ID NO: 5760; WAN024BGJ_at; Start 160; Stop 184
aatcgcttgagccttcatagcgtgg

SEQ ID NO: 80542 - DNA, 25 bp, Artificial
  probe
  misc_feature (1)..(25): SEQ ID NO: 5760; WAN024BGJ_at; Start 165; Stop 189
cttgagccttcatagcgtggcattt

SEQ ID NO: 80543 - DNA, 25 bp, Artificial
  probe
  misc_feature (1)..(25): SEQ ID NO: 5760; WAN024BGJ_at; Start 158; Stop 182
acaatcgcttgagccttcatagcgt

SEQ ID NO: 80544 - DNA, 25 bp, Artificial
  probe
  misc_feature (1)..(25): SEQ ID NO: 5760; WAN024BGJ_at; Start 162; Stop 186
tcgcttgagccttcatagcgtggca

SEQ ID NO: 80545 - DNA, 25 bp, Artificial
  probe
  misc_feature (1)..(25): SEQ ID NO: 5760; WAN024BGJ_at; Start 156; Stop 180
tgacaatcgcttgagccttcatagc

SEQ ID NO: 80546 - DNA, 25 bp, Artificial
  probe
  misc_feature (1)..(25): SEQ ID NO: 5760; WAN024BGJ_at; Start 157; Stop 181
gacaatcgcttgagccttcatagcg

SEQ ID NO: 80547 - DNA, 25 bp, Artificial
  probe
  misc_feature (1)..(25): SEQ ID NO: 5760; WAN024BGJ_at; Start 166; Stop 190
ttgagccttcatagcgtggcatttt

SEQ ID NO: 80548 - DNA, 25 bp, Artificial
  probe
  misc_feature (1)..(25): SEQ ID NO: 5760; WAN024BGJ_at; Start 164; Stop 188
gcttgagccttcatagcgtggcatt

SEQ ID NO: 80549 - DNA, 25 bp, Artificial
  probe
  misc_feature (1)..(25): SEQ ID NO: 5760; WAN024BGJ_at; Start 159; Stop 183
caatcgcttgagccttcatagcgtg

SEQ ID NO: 80550 - DNA, 25 bp, Artificial
  probe
  misc_feature (1)..(25): SEQ ID NO: 5760; WAN024BGJ_at; Start 167; Stop 191
tgagccttcatagcgtggcattttt

SEQ ID NO: 80551 - DNA, 25 bp, Artificial
  probe
  misc_feature (1)..(25): SEQ ID NO: 5760; WAN024BGJ_at; Start 168; Stop 192
gagccttcatagcgtggcatttttt

SEQ ID NO: 80552 - DNA, 25 bp, Artificial
  probe
  misc_feature (1)..(25): SEQ ID NO: 5760; WAN024BGJ_at; Start 161; Stop 185
atcgcttgagccttcatagcgtggc

SEQ ID NO: 80553 - DNA, 25 bp, Artificial
  probe
  misc_feature (1)..(25): SEQ ID NO: 5760; WAN024BGJ_at; Start 163; Stop 187
cgcttgagccttcatagcgtggcat

SEQ ID NO: 80554 - DNA, 25 bp, Artificial
  probe
  misc_feature (1)..(25): SEQ ID NO: 3711; WAN024BGK_at; Start 96; Stop 120
caatacatgcgagaatagcgcactt

SEQ ID NO: 80555 - DNA, 25 bp, Artificial
  probe
  misc_feature (1)..(25): SEQ ID NO: 3711; WAN024BGK_at; Start 98; Stop 122
atacatgcgagaatagcgcacttat

SEQ ID NO: 80556 - DNA, 25 bp, Artificial
  probe
  misc_feature (1)..(25): SEQ ID NO: 3711; WAN024BGK_at; Start 100; Stop 124
acatgcgagaatagcgcacttatga

SEQ ID NO: 80557 - DNA, 25 bp, Artificial
  probe
  misc_feature (1)..(25): SEQ ID NO: 3711; WAN024BGK_at; Start 99; Stop 123
tacatgcgagaatagcgcacttatg

SEQ ID NO: 80558 - DNA, 25 bp, Artificial
  probe
  misc_feature (1)..(25): SEQ ID NO: 3711; WAN024BGK_at; Start 97; Stop 121
aatacatgcgagaatagcgcactta

SEQ ID NO: 80559 - DNA, 25 bp, Artificial
  probe
  misc_feature (1)..(25): SEQ ID NO: 3711; WAN024BGK_at; Start 209; Stop 233
ttttacgatttcaaattctgcccta

SEQ ID NO: 80560 - DNA, 25 bp, Artificial
  probe
  misc_feature (1)..(25): SEQ ID NO: 5845; WAN024BGL_at; Start 145; Stop 169
cacgaagattcacagtttaaaggag

SEQ ID NO: 80561 - DNA, 25 bp, Artificial
  probe
  misc_feature (1)..(25): SEQ ID NO: 5845; WAN024BGL_at; Start 167; Stop 191
gagatcactatgttgaatgttatgc

SEQ ID NO: 80562 - DNA, 25 bp, Artificial
  probe
  misc_feature (1)..(25): SEQ ID NO: 5845; WAN024BGL_at; Start 201; Stop 225
taatacggttatagcaagagataga

SEQ ID NO: 80563 - DNA, 25 bp, Artificial
  probe
  misc_feature (1)..(25): SEQ ID NO: 5845; WAN024BGL_at; Start 151; Stop 175
gattcacagtttaaaggagatcact

SEQ ID NO: 80564 - DNA, 25 bp, Artificial
  probe
  misc_feature (1)..(25): SEQ ID NO: 5845; WAN024BGL_at; Start 243; Stop 267
tccgttatgtggaaaagattttata

SEQ ID NO: 80565 - DNA, 25 bp, Artificial
  probe
  misc_feature (1)..(25): SEQ ID NO: 5845; WAN024BGL_at; Start 74; Stop 98
gaaatattgaagctgaggctattag

SEQ ID NO: 80566 - DNA, 25 bp, Artificial
  probe
  misc_feature (1)..(25): SEQ ID NO: 5845; WAN024BGL_at; Start 92; Stop 116
ctattagaagaaattgtgagcgtgg

SEQ ID NO: 80567 - DNA, 25 bp, Artificial
  probe
  misc_feature (1)..(25): SEQ ID NO: 5845; WAN024BGL_at; Start 11; Stop 35
gcttcatcattcatagaactactat

SEQ ID NO: 80568 - DNA, 25 bp, Artificial
  probe
  misc_feature (1)..(25): SEQ ID NO: 5845; WAN024BGL_at; Start 106; Stop 130
tgtgagcgtggtgctattttttcag

SEQ ID NO: 80569 - DNA, 25 bp, Artificial
  probe
  misc_feature (1)..(25): SEQ ID NO: 5845; WAN024BGL_at; Start 224; Stop 248
gaataacagtccctatcgatccgtt

SEQ ID NO: 80570 - DNA, 25 bp, Artificial
  probe
  misc_feature (1)..(25): SEQ ID NO: 5845; WAN024BGL_at; Start 70; Stop 94
gtaagaaatattgaagctgaggcta

SEQ ID NO: 80571 - DNA, 25 bp, Artificial
  probe
  misc_feature (1)..(25): SEQ ID NO: 5845; WAN024BGL_at; Start 184; Stop 208
tgttatgctgttttagataatacgg

SEQ ID NO: 80572 - DNA, 25 bp, Artificial
  probe
  misc_feature (1)..(25): SEQ ID NO: 5845; WAN024BGL_at; Start 137; Stop 161
taaaatatcacgaagattcacagtt

SEQ ID NO: 80573 - DNA, 25 bp, Artificial
  probe
  misc_feature (1)..(25): SEQ ID NO: 5845; WAN024BGL_at; Start 222; Stop 246
tagaataacagtccctatcgatccg

SEQ ID NO: 80574 - DNA, 25 bp, Artificial
  probe
  misc_feature (1)..(25): SEQ ID NO: 5845; WAN024BGL_at; Start 127; Stop 151
tcaggtaaaataaaatatcacgaag

SEQ ID NO: 80575 - DNA, 25 bp, Artificial
  probe
  misc_feature (1)..(25): SEQ ID NO: 5845; WAN024BGL_at; Start 154; Stop 178
tcacagtttaaaggagatcactatg

SEQ ID NO: 80576 - DNA, 25 bp, Artificial
  probe
  misc_feature (1)..(25): SEQ ID NO: 5845; WAN024BGL_at; Start 18; Stop 42
cattcatagaactactataccatat

SEQ ID NO: 80577 - DNA, 25 bp, Artificial
  probe
  misc_feature (1)..(25): SEQ ID NO: 5845; WAN024BGL_at; Start 197; Stop 221
tagataatacggttatagcaagaga

SEQ ID NO: 80578 - DNA, 25 bp, Artificial
  probe
  misc_feature (1)..(25): SEQ ID NO: 5845; WAN024BGL_at; Start 162; Stop 186
taaaggagatcactatgttgaatgt

SEQ ID NO: 80579 - DNA, 25 bp, Artificial
  probe
  misc_feature (1)..(25): SEQ ID NO: 5845; WAN024BGL_at; Start 98; Stop 122
gaagaaattgtgagcgtggtgctat

SEQ ID NO: 80580 - DNA, 25 bp, Artificial
  probe
  misc_feature (1)..(25): SEQ ID NO: 5845; WAN024BGL_at; Start 64; Stop 88
tggaaagtaagaaatattgaagctg

SEQ ID NO: 80581 - DNA, 25 bp, Artificial
  probe
  misc_feature (1)..(25): SEQ ID NO: 5845; WAN024BGL_at; Start 95; Stop 119
ttagaagaaattgtgagcgtggtgc

SEQ ID NO: 80582 - DNA, 25 bp, Artificial
  probe
  misc_feature (1)..(25): SEQ ID NO: 5845; WAN024BGL_at; Start 227; Stop 251
taacagtccctatcgatccgttatg

SEQ ID NO: 80583 - DNA, 25 bp, Artificial
  probe
  misc_feature (1)..(25): SEQ ID NO: 5845; WAN024BGL_at; Start 157; Stop 181
cagtttaaaggagatcactatgttg

SEQ ID NO: 80584 - DNA, 25 bp, Artificial
  probe
  misc_feature (1)..(25): SEQ ID NO: 5845; WAN024BGL_at; Start 85; Stop 109
gctgaggctattagaagaaattgtg

SEQ ID NO: 80585 - DNA, 25 bp, Artificial
  probe
  misc_feature (1)..(25): SEQ ID NO: 5845; WAN024BGL_at; Start 214; Stop 238
gcaagagatagaataacagtcccta

SEQ ID NO: 80586 - DNA, 25 bp, Artificial
  probe
  misc_feature (1)..(25): SEQ ID NO: 5845; WAN024BGL_at; Start 51; Stop 75
gcaggaagtctattggaaagtaaga

SEQ ID NO: 80587 - DNA, 25 bp, Artificial
  probe
  misc_feature (1)..(25): SEQ ID NO: 5845; WAN024BGL_at; Start 212; Stop 236
tagcaagagatagaataacagtccc

SEQ ID NO: 80588 - DNA, 25 bp, Artificial
  probe
  misc_feature (1)..(25): SEQ ID NO: 5845; WAN024BGL_at; Start 111; Stop 135
gcgtggtgctattttttcaggtaaa

SEQ ID NO: 80589 - DNA, 25 bp, Artificial
  probe
  misc_feature (1)..(25): SEQ ID NO: 5845; WAN024BGL_at; Start 237; Stop 261
tatcgatccgttatgtggaaaagat

SEQ ID NO: 80590 - DNA, 25 bp, Artificial
  probe
  misc_feature (1)..(25): SEQ ID NO: 5845; WAN024BGL_at; Start 230; Stop 254
cagtccctatcgatccgttatgtgg

SEQ ID NO: 80591 - DNA, 25 bp, Artificial
  probe
  misc_feature (1)..(25): SEQ ID NO: 5845; WAN024BGL_at; Start 172; Stop 196
cactatgttgaatgttatgctgttt

SEQ ID NO: 80592 - DNA, 25 bp, Artificial
  probe
  misc_feature (1)..(25): SEQ ID NO: 5845; WAN024BGL_at; Start 234; Stop 258
ccctatcgatccgttatgtggaaaa

SEQ ID NO: 80593 - DNA, 25 bp, Artificial
  probe
  misc_feature (1)..(25): SEQ ID NO: 5845; WAN024BGL_at; Start 2; Stop 26
tgtttacttgcttcatcattcatag

SEQ ID NO: 80594 - DNA, 25 bp, Artificial
  probe
  misc_feature (1)..(25): SEQ ID NO: 3393; WAN024BGM_at; Start 365; Stop 389
tgattgatagccattcccatcaata

SEQ ID NO: 80595 - DNA, 25 bp, Artificial
  probe
  misc_feature (1)..(25): SEQ ID NO: 3393; WAN024BGM_at; Start 369; Stop 393
tgatagccattcccatcaatatcgt

SEQ ID NO: 80596 - DNA, 25 bp, Artificial
  probe
  misc_feature (1)..(25): SEQ ID NO: 3393; WAN024BGM_at; Start 377; Stop 401
attcccatcaatatcgtatctttgg

SEQ ID NO: 80597 - DNA, 25 bp, Artificial
  probe
  misc_feature (1)..(25): SEQ ID NO: 3393; WAN024BGM_at; Start 360; Stop 384
ggtaatgattgatagccattcccat

SEQ ID NO: 80598 - DNA, 25 bp, Artificial
  probe
  misc_feature (1)..(25): SEQ ID NO: 3393; WAN024BGM_at; Start 373; Stop 397
agccattcccatcaatatcgtatct

SEQ ID NO: 80599 - DNA, 25 bp, Artificial
  probe
  misc_feature (1)..(25): SEQ ID NO: 3393; WAN024BGM_at; Start 361; Stop 385
gtaatgattgatagccattcccatc

SEQ ID NO: 80600 - DNA, 25 bp, Artificial
  probe
  misc_feature (1)..(25): SEQ ID NO: 3393; WAN024BGM_at; Start 358; Stop 382
acggtaatgattgatagccattccc

SEQ ID NO: 80601 - DNA, 25 bp, Artificial
  probe
  misc_feature (1)..(25): SEQ ID NO: 3393; WAN024BGM_at; Start 359; Stop 383
cggtaatgattgatagccattccca

SEQ ID NO: 80602 - DNA, 25 bp, Artificial
  probe
  misc_feature (1)..(25): SEQ ID NO: 3393; WAN024BGM_at; Start 367; Stop 391
attgatagccattcccatcaatatc

SEQ ID NO: 80603 - DNA, 25 bp, Artificial
  probe
  misc_feature (1)..(25): SEQ ID NO: 3393; WAN024BGM_at; Start 378; Stop 402
ttcccatcaatatcgtatctttgga

SEQ ID NO: 80604 - DNA, 25 bp, Artificial
  probe
  misc_feature (1)..(25): SEQ ID NO: 3393; WAN024BGM_at; Start 372; Stop 396
tagccattcccatcaatatcgtatc

SEQ ID NO: 80605 - DNA, 25 bp, Artificial
  probe
  misc_feature (1)..(25): SEQ ID NO: 3393; WAN024BGM_at; Start 363; Stop 387
aatgattgatagccattcccatcaa

SEQ ID NO: 80606 - DNA, 25 bp, Artificial
  probe
  misc_feature (1)..(25): SEQ ID NO: 3393; WAN024BGM_at; Start 376; Stop 400
cattcccatcaatatcgtatctttg

SEQ ID NO: 80607 - DNA, 25 bp, Artificial
  probe
  misc_feature (1)..(25): SEQ ID NO: 3393; WAN024BGM_at; Start 366; Stop 390
gattgatagccattcccatcaatat

SEQ ID NO: 80608 - DNA, 25 bp, Artificial
  probe
  misc_feature (1)..(25): SEQ ID NO: 3393; WAN024BGM_at; Start 370; Stop 394
gatagccattcccatcaatatcgta

SEQ ID NO: 80609 - DNA, 25 bp, Artificial
  probe
  misc_feature (1)..(25): SEQ ID NO: 3393; WAN024BGM_at; Start 364; Stop 388
atgattgatagccattcccatcaat

SEQ ID NO: 80610 - DNA, 25 bp, Artificial
  probe
  misc_feature (1)..(25): SEQ ID NO: 3393; WAN024BGM_at; Start 362; Stop 386
taatgattgatagccattcccatca

SEQ ID NO: 80611 - DNA, 25 bp, Artificial
  probe
  misc_feature (1)..(25): SEQ ID NO: 3393; WAN024BGM_at; Start 371; Stop 395
atagccattcccatcaatatcgtat

SEQ ID NO: 80612 - DNA, 25 bp, Artificial
  probe
  misc_feature (1)..(25): SEQ ID NO: 3393; WAN024BGM_at; Start 368; Stop 392
ttgatagccattcccatcaatatcg

SEQ ID NO: 80613 - DNA, 25 bp, Artificial
  probe
  misc_feature (1)..(25): SEQ ID NO: 3393; WAN024BGM_at; Start 375; Stop 399
ccattcccatcaatatcgtatcttt

SEQ ID NO: 80614 - DNA, 25 bp, Artificial
  probe
  misc_feature (1)..(25): SEQ ID NO: 3393; WAN024BGM_at; Start 374; Stop 398
gccattcccatcaatatcgtatctt

SEQ ID NO: 80615 - DNA, 25 bp, Artificial
  probe
  misc_feature (1)..(25): SEQ ID NO: 2750; WAN024BGP_s_at; Start 166; Stop 190
atggtaactattcaatacatgcgag

SEQ ID NO: 80616 - DNA, 25 bp, Artificial
  probe
  misc_feature (1)..(25): SEQ ID NO: 2750; WAN024BGP_s_at; Start 167; Stop 191
tggtaactattcaatacatgcgaga

SEQ ID NO: 80617 - DNA, 25 bp, Artificial
  probe
  misc_feature (1)..(25): SEQ ID NO: 2750; WAN024BGP_s_at; Start 168; Stop 192
ggtaactattcaatacatgcgagaa

SEQ ID NO: 80618 - DNA, 25 bp, Artificial
  probe
  misc_feature (1)..(25): SEQ ID NO: 605; WAN024BGQ_at; Start 36; Stop 60
agactccctgcgaaattatgaagca

SEQ ID NO: 80619 - DNA, 25 bp, Artificial
  probe
  misc_feature (1)..(25): SEQ ID NO: 605; WAN024BGQ_at; Start 11; Stop 35
cattgacacctaccaaagagtcaat

SEQ ID NO: 80620 - DNA, 25 bp, Artificial
  probe
  misc_feature (1)..(25): SEQ ID NO: 605; WAN024BGQ_at; Start 29; Stop 53
agtcaatagactccctgcgaaatta

SEQ ID NO: 80621 - DNA, 25 bp, Artificial
  probe
  misc_feature (1)..(25): SEQ ID NO: 605; WAN024BGQ_at; Start 15; Stop 39
gacacctaccaaagagtcaatagac

SEQ ID NO: 80622 - DNA, 25 bp, Artificial
  probe
  misc_feature (1)..(25): SEQ ID NO: 605; WAN024BGQ_at; Start 9; Stop 33
aacattgacacctaccaaagagtca

SEQ ID NO: 80623 - DNA, 25 bp, Artificial
  probe
  misc_feature (1)..(25): SEQ ID NO: 605; WAN024BGQ_at; Start 8; Stop 32
aaacattgacacctaccaaagagtc

SEQ ID NO: 80624 - DNA, 25 bp, Artificial
  probe
  misc_feature (1)..(25): SEQ ID NO: 605; WAN024BGQ_at; Start 32; Stop 56
caatagactccctgcgaaattatga

SEQ ID NO: 80625 - DNA, 25 bp, Artificial
  probe
  misc_feature (1)..(25): SEQ ID NO: 605; WAN024BGQ_at; Start 13; Stop 37
ttgacacctaccaaagagtcaatag

SEQ ID NO: 80626 - DNA, 25 bp, Artificial
  probe
  misc_feature (1)..(25): SEQ ID NO: 605; WAN024BGQ_at; Start 14; Stop 38
tgacacctaccaaagagtcaataga

SEQ ID NO: 80627 - DNA, 25 bp, Artificial
  probe
  misc_feature (1)..(25): SEQ ID NO: 605; WAN024BGQ_at; Start 12; Stop 36
attgacacctaccaaagagtcaata

SEQ ID NO: 80628 - DNA, 25 bp, Artificial
  probe
  misc_feature (1)..(25): SEQ ID NO: 605; WAN024BGQ_at; Start 23; Stop 47
ccaaagagtcaatagactccctgcg

SEQ ID NO: 80629 - DNA, 25 bp, Artificial
  probe
  misc_feature (1)..(25): SEQ ID NO: 605; WAN024BGQ_at; Start 30; Stop 54
gtcaatagactccctgcgaaattat

SEQ ID NO: 80630 - DNA, 25 bp, Artificial
  probe
  misc_feature (1)..(25): SEQ ID NO: 605; WAN024BGQ_at; Start 37; Stop 61
gactccctgcgaaattatgaagcaa

SEQ ID NO: 80631 - DNA, 25 bp, Artificial
  probe
  misc_feature (1)..(25): SEQ ID NO: 605; WAN024BGQ_at; Start 21; Stop 45
taccaaagagtcaatagactccctg

SEQ ID NO: 80632 - DNA, 25 bp, Artificial
  probe
  misc_feature (1)..(25): SEQ ID NO: 605; WAN024BGQ_at; Start 39; Stop 63
ctccctgcgaaattatgaagcaagt

SEQ ID NO: 80633 - DNA, 25 bp, Artificial
  probe
  misc_feature (1)..(25): SEQ ID NO: 605; WAN024BGQ_at; Start 10; Stop 34
acattgacacctaccaaagagtcaa

SEQ ID NO: 80634 - DNA, 25 bp, Artificial
  probe
  misc_feature (1)..(25): SEQ ID NO: 605; WAN024BGQ_at; Start 31; Stop 55
tcaatagactccctgcgaaattatg

SEQ ID NO: 80635 - DNA, 25 bp, Artificial
  probe
  misc_feature (1)..(25): SEQ ID NO: 605; WAN024BGQ_at; Start 20; Stop 44
ctaccaaagagtcaatagactccct

SEQ ID NO: 80636 - DNA, 25 bp, Artificial
  probe
  misc_feature (1)..(25): SEQ ID NO: 605; WAN024BGQ_at; Start 26; Stop 50
aagagtcaatagactccctgcgaaa

SEQ ID NO: 80637 - DNA, 25 bp, Artificial
  probe
  misc_feature (1)..(25): SEQ ID NO: 605; WAN024BGQ_at; Start 28; Stop 52
gagtcaatagactccctgcgaaatt

SEQ ID NO: 80638 - DNA, 25 bp, Artificial
  probe
  misc_feature (1)..(25): SEQ ID NO: 605; WAN024BGQ_at; Start 18; Stop 42
acctaccaaagagtcaatagactcc

SEQ ID NO: 80639 - DNA, 25 bp, Artificial
  probe
  misc_feature (1)..(25): SEQ ID NO: 605; WAN024BGQ_at; Start 188; Stop 212
aattaagcctagaataccgcactta

SEQ ID NO: 80640 - DNA, 25 bp, Artificial
  probe
  misc_feature (1)..(25): SEQ ID NO: 605; WAN024BGQ_at; Start 24; Stop 48
caaagagtcaatagactccctgcga

SEQ ID NO: 80641 - DNA, 25 bp, Artificial
  probe
  misc_feature (1)..(25): SEQ ID NO: 605; WAN024BGQ_at; Start 187; Stop 211
aaattaagcctagaataccgcactt

SEQ ID NO: 80642 - DNA, 25 bp, Artificial
  probe
  misc_feature (1)..(25): SEQ ID NO: 605; WAN024BGQ_at; Start 35; Stop 59
tagactccctgcgaaattatgaagc

SEQ ID NO: 80643 - DNA, 25 bp, Artificial
  probe
  misc_feature (1)..(25): SEQ ID NO: 605; WAN024BGQ_at; Start 16; Stop 40
acacctaccaaagagtcaatagact

SEQ ID NO: 80644 - DNA, 25 bp, Artificial
  probe
  misc_feature (1)..(25): SEQ ID NO: 605; WAN024BGQ_at; Start 33; Stop 57
aatagactccctgcgaaattatgaa

SEQ ID NO: 80645 - DNA, 25 bp, Artificial
  probe
  misc_feature (1)..(25): SEQ ID NO: 605; WAN024BGQ_at; Start 19; Stop 43
cctaccaaagagtcaatagactccc

SEQ ID NO: 80646 - DNA, 25 bp, Artificial
  probe
  misc_feature (1)..(25): SEQ ID NO: 605; WAN024BGQ_at; Start 38; Stop 62
actccctgcgaaattatgaagcaag

SEQ ID NO: 80647 - DNA, 25 bp, Artificial
  probe
  misc_feature (1)..(25): SEQ ID NO: 605; WAN024BGQ_at; Start 17; Stop 41
cacctaccaaagagtcaatagactc

SEQ ID NO: 80648 - DNA, 25 bp, Artificial
  probe
  misc_feature (1)..(25): SEQ ID NO: 605; WAN024BGQ_at; Start 25; Stop 49
aaagagtcaatagactccctgcgaa

SEQ ID NO: 80649 - DNA, 25 bp, Artificial
  probe
  misc_feature (1)..(25): SEQ ID NO: 605; WAN024BGQ_at; Start 27; Stop 51
agagtcaatagactccctgcgaaat

SEQ ID NO: 80650 - DNA, 25 bp, Artificial
  probe
  misc_feature (1)..(25): SEQ ID NO: 605; WAN024BGQ_at; Start 22; Stop 46
accaaagagtcaatagactccctgc

SEQ ID NO: 80651 - DNA, 25 bp, Artificial
  probe
  misc_feature (1)..(25): SEQ ID NO: 605; WAN024BGQ_at; Start 7; Stop 31
aaaacattgacacctaccaaagagt

SEQ ID NO: 80652 - DNA, 25 bp, Artificial
  probe
  misc_feature (1)..(25): SEQ ID NO: 4696; WAN024BGR_at; Start 58; Stop 82
agggagaattgtttctattgccatg

SEQ ID NO: 80653 - DNA, 25 bp, Artificial
  probe
  misc_feature (1)..(25): SEQ ID NO: 4696; WAN024BGR_at; Start 68; Stop 92
gtttctattgccatgatatgaagtt

SEQ ID NO: 80654 - DNA, 25 bp, Artificial
  probe
  misc_feature (1)..(25): SEQ ID NO: 4696; WAN024BGR_at; Start 56; Stop 80
caagggagaattgtttctattgcca

SEQ ID NO: 80655 - DNA, 25 bp, Artificial
  probe
  misc_feature (1)..(25): SEQ ID NO: 4696; WAN024BGR_at; Start 14; Stop 38
aagaaatttcacgctatgaaggctc

SEQ ID NO: 80656 - DNA, 25 bp, Artificial
  probe
  misc_feature (1)..(25): SEQ ID NO: 4696; WAN024BGR_at; Start 71; Stop 95
tctattgccatgatatgaagttgtt

SEQ ID NO: 80657 - DNA, 25 bp, Artificial
  probe
  misc_feature (1)..(25): SEQ ID NO: 4696; WAN024BGR_at; Start 60; Stop 84
ggagaattgtttctattgccatgat

SEQ ID NO: 80658 - DNA, 25 bp, Artificial
  probe
  misc_feature (1)..(25): SEQ ID NO: 4696; WAN024BGR_at; Start 67; Stop 91
tgtttctattgccatgatatgaagt

SEQ ID NO: 80659 - DNA, 25 bp, Artificial
  probe
  misc_feature (1)..(25): SEQ ID NO: 4696; WAN024BGR_at; Start 55; Stop 79
tcaagggagaattgtttctattgcc

SEQ ID NO: 80660 - DNA, 25 bp, Artificial
  probe
  misc_feature (1)..(25): SEQ ID NO: 4696; WAN024BGR_at; Start 62; Stop 86
agaattgtttctattgccatgatat

SEQ ID NO: 80661 - DNA, 25 bp, Artificial
  probe
  misc_feature (1)..(25): SEQ ID NO: 4696; WAN024BGR_at; Start 18; Stop 42
aatttcacgctatgaaggctcaagc

SEQ ID NO: 80662 - DNA, 25 bp, Artificial
  probe
  misc_feature (1)..(25): SEQ ID NO: 4696; WAN024BGR_at; Start 69; Stop 93
tttctattgccatgatatgaagttg

SEQ ID NO: 80663 - DNA, 25 bp, Artificial
  probe
  misc_feature (1)..(25): SEQ ID NO: 4696; WAN024BGR_at; Start 72; Stop 96
ctattgccatgatatgaagttgttc

SEQ ID NO: 80664 - DNA, 25 bp, Artificial
  probe
  misc_feature (1)..(25): SEQ ID NO: 4696; WAN024BGR_at; Start 59; Stop 83
gggagaattgtttctattgccatga

SEQ ID NO: 80665 - DNA, 25 bp, Artificial
  probe
  misc_feature (1)..(25): SEQ ID NO: 4696; WAN024BGR_at; Start 11; Stop 35
aaaaagaaatttcacgctatgaagg

SEQ ID NO: 80666 - DNA, 25 bp, Artificial
  probe
  misc_feature (1)..(25): SEQ ID NO: 4696; WAN024BGR_at; Start 57; Stop 81
aagggagaattgtttctattgccat

SEQ ID NO: 80667 - DNA, 25 bp, Artificial
  probe
  misc_feature (1)..(25): SEQ ID NO: 4696; WAN024BGR_at; Start 61; Stop 85
gagaattgtttctattgccatgata

SEQ ID NO: 80668 - DNA, 25 bp, Artificial
  probe
  misc_feature (1)..(25): SEQ ID NO: 4696; WAN024BGR_at; Start 70; Stop 94
ttctattgccatgatatgaagttgt

SEQ ID NO: 80669 - DNA, 25 bp, Artificial
  probe
  misc_feature (1)..(25): SEQ ID NO: 4696; WAN024BGR_at; Start 10; Stop 34
taaaaagaaatttcacgctatgaag

SEQ ID NO: 80670 - DNA, 25 bp, Artificial
  probe
  misc_feature (1)..(25): SEQ ID NO: 4696; WAN024BGR_at; Start 66; Stop 90
ttgtttctattgccatgatatgaag

SEQ ID NO: 80671 - DNA, 25 bp, Artificial
  probe
  misc_feature (1)..(25): SEQ ID NO: 4696; WAN024BGR_at; Start 63; Stop 87
gaattgtttctattgccatgatatg

SEQ ID NO: 80672 - DNA, 25 bp, Artificial
  probe
  misc_feature (1)..(25): SEQ ID NO: 4696; WAN024BGR_at; Start 17; Stop 41
aaatttcacgctatgaaggctcaag

SEQ ID NO: 80673 - DNA, 25 bp, Artificial
  probe
  misc_feature (1)..(25): SEQ ID NO: 4696; WAN024BGR_at; Start 65; Stop 89
attgtttctattgccatgatatgaa

SEQ ID NO: 80674 - DNA, 25 bp, Artificial
  probe
  misc_feature (1)..(25): SEQ ID NO: 4696; WAN024BGR_at; Start 64; Stop 88
aattgtttctattgccatgatatga

SEQ ID NO: 80675 - DNA, 25 bp, Artificial
  probe
  misc_feature (1)..(25): SEQ ID NO: 4696; WAN024BGR_at; Start 12; Stop 36
aaaagaaatttcacgctatgaaggc

SEQ ID NO: 80676 - DNA, 25 bp, Artificial
  probe
  misc_feature (1)..(25): SEQ ID NO: 4696; WAN024BGR_at; Start 13; Stop 37
aaagaaatttcacgctatgaaggct

SEQ ID NO: 80677 - DNA, 25 bp, Artificial
  probe
  misc_feature (1)..(25): SEQ ID NO: 4696; WAN024BGR_at; Start 16; Stop 40
gaaatttcacgctatgaaggctcaa

SEQ ID NO: 80678 - DNA, 25 bp, Artificial
  probe
  misc_feature (1)..(25): SEQ ID NO: 4696; WAN024BGR_at; Start 6; Stop 30
ctggtaaaaagaaatttcacgctat

SEQ ID NO: 80679 - DNA, 25 bp, Artificial
  probe
  misc_feature (1)..(25): SEQ ID NO: 1377; WAN024BGS_at; Start 55; Stop 79
tcaatcgttaatagccagaaaccac

SEQ ID NO: 80680 - DNA, 25 bp, Artificial
  probe
  misc_feature (1)..(25): SEQ ID NO: 1377; WAN024BGS_at; Start 54; Stop 78
ttcaatcgttaatagccagaaacca

SEQ ID NO: 80681 - DNA, 25 bp, Artificial
  probe
  misc_feature (1)..(25): SEQ ID NO: 1377; WAN024BGS_at; Start 52; Stop 76
atttcaatcgttaatagccagaaac

SEQ ID NO: 80682 - DNA, 25 bp, Artificial
  probe
  misc_feature (1)..(25): SEQ ID NO: 1377; WAN024BGS_at; Start 51; Stop 75
tatttcaatcgttaatagccagaaa

SEQ ID NO: 80683 - DNA, 25 bp, Artificial
  probe
  misc_feature (1)..(25): SEQ ID NO: 1377; WAN024BGS_at; Start 1; Stop 25
atgacagtaatcttaggatttttat

SEQ ID NO: 80684 - DNA, 25 bp, Artificial
  probe
  misc_feature (1)..(25): SEQ ID NO: 1377; WAN024BGS_at; Start 5; Stop 29
cagtaatcttaggatttttatttct

SEQ ID NO: 80685 - DNA, 25 bp, Artificial
  probe
  misc_feature (1)..(25): SEQ ID NO: 1377; WAN024BGS_at; Start 53; Stop 77
tttcaatcgttaatagccagaaacc

SEQ ID NO: 80686 - DNA, 25 bp, Artificial
  probe
  misc_feature (1)..(25): SEQ ID NO: 1377; WAN024BGS_at; Start 2; Stop 26
tgacagtaatcttaggatttttatt

SEQ ID NO: 80687 - DNA, 25 bp, Artificial
  probe
  misc_feature (1)..(25): SEQ ID NO: 1788; WAN024BGT_s_at; Start 118; Stop 142
gtgaaagatgtaaacgaagacctta

SEQ ID NO: 80688 - DNA, 25 bp, Artificial
  probe
  misc_feature (1)..(25): SEQ ID NO: 1788; WAN024BGT_s_at; Start 124; Stop 148
gatgtaaacgaagaccttatgaaag

SEQ ID NO: 80689 - DNA, 25 bp, Artificial
  probe
  misc_feature (1)..(25): SEQ ID NO: 1788; WAN024BGT_s_at; Start 11; Stop 35
ttcttgctgcctgcggtgcaggtgt

SEQ ID NO: 80690 - DNA, 25 bp, Artificial
  probe
  misc_feature (1)..(25): SEQ ID NO: 1788; WAN024BGT_s_at; Start 28; Stop 52
gcaggtgttaactcaagtcaccaaa

SEQ ID NO: 80691 - DNA, 25 bp, Artificial
  probe
  misc_feature (1)..(25): SEQ ID NO: 1788; WAN024BGT_s_at; Start 196; Stop 220
ccaggtatcccagttatcgaagctg

SEQ ID NO: 80692 - DNA, 25 bp, Artificial
  probe
  misc_feature (1)..(25): SEQ ID NO: 1788; WAN024BGT_s_at; Start 192; Stop 216
tgaaccaggtatcccagttatcgaa

SEQ ID NO: 80693 - DNA, 25 bp, Artificial
  probe
  misc_feature (1)..(25): SEQ ID NO: 1788; WAN024BGT_s_at; Start 191; Stop 215
ttgaaccaggtatcccagttatcga

SEQ ID NO: 80694 - DNA, 25 bp, Artificial
  probe
  misc_feature (1)..(25): SEQ ID NO: 1788; WAN024BGT_s_at; Start 197; Stop 221
caggtatcccagttatcgaagctgg

SEQ ID NO: 80695 - DNA, 25 bp, Artificial
  probe
  misc_feature (1)..(25): SEQ ID NO: 1788; WAN024BGT_s_at; Start 138; Stop 162
ccttatgaaaggttacgatatcttt

SEQ ID NO: 80696 - DNA, 25 bp, Artificial
  probe
  misc_feature (1)..(25): SEQ ID NO: 1788; WAN024BGT_s_at; Start 23; Stop 47
gcggtgcaggtgttaactcaagtca

SEQ ID NO: 80697 - DNA, 25 bp, Artificial
  probe
  misc_feature (1)..(25): SEQ ID NO: 1788; WAN024BGT_s_at; Start 17; Stop 41
ctgcctgcggtgcaggtgttaactc

SEQ ID NO: 80698 - DNA, 25 bp, Artificial
  probe
  misc_feature (1)..(25): SEQ ID NO: 1788; WAN024BGT_s_at; Start 32; Stop 56
gtgttaactcaagtcaccaaattaa

SEQ ID NO: 80699 - DNA, 25 bp, Artificial
  probe
  misc_feature (1)..(25): SEQ ID NO: 1788; WAN024BGT_s_at; Start 29; Stop 53
caggtgttaactcaagtcaccaaat

SEQ ID NO: 80700 - DNA, 25 bp, Artificial
  probe
  misc_feature (1)..(25): SEQ ID NO: 1788; WAN024BGT_s_at; Start 136; Stop 160
gaccttatgaaaggttacgatatct

SEQ ID NO: 80701 - DNA, 25 bp, Artificial
  probe
  misc_feature (1)..(25): SEQ ID NO: 1788; WAN024BGT_s_at; Start 40; Stop 64
tcaagtcaccaaattaaaagtgctc

SEQ ID NO: 80702 - DNA, 25 bp, Artificial
  probe
  misc_feature (1)..(25): SEQ ID NO: 1788; WAN024BGT_s_at; Start 15; Stop 39
tgctgcctgcggtgcaggtgttaac

SEQ ID NO: 80703 - DNA, 25 bp, Artificial
  probe
  misc_feature (1)..(25): SEQ ID NO: 1788; WAN024BGT_s_at; Start 26; Stop 50
gtgcaggtgttaactcaagtcacca

SEQ ID NO: 80704 - DNA, 25 bp, Artificial
  probe
  misc_feature (1)..(25): SEQ ID NO: 1788; WAN024BGT_s_at; Start 132; Stop 156
cgaagaccttatgaaaggttacgat

SEQ ID NO: 80705 - DNA, 25 bp, Artificial
  probe
  misc_feature (1)..(25): SEQ ID NO: 1788; WAN024BGT_s_at; Start 116; Stop 140
tggtgaaagatgtaaacgaagacct

SEQ ID NO: 80706 - DNA, 25 bp, Artificial
  probe
  misc_feature (1)..(25): SEQ ID NO: 1788; WAN024BGT_s_at; Start 194; Stop 218
aaccaggtatcccagttatcgaagc

SEQ ID NO: 80707 - DNA, 25 bp, Artificial
  probe
  misc_feature (1)..(25): SEQ ID NO: 1788; WAN024BGT_s_at; Start 10; Stop 34
attcttgctgcctgcggtgcaggtg

SEQ ID NO: 80708 - DNA, 25 bp, Artificial
  probe
  misc_feature (1)..(25): SEQ ID NO: 1788; WAN024BGT_s_at; Start 42; Stop 66
aagtcaccaaattaaaagtgctcta

SEQ ID NO: 80709 - DNA, 25 bp, Artificial
  probe
  misc_feature (1)..(25): SEQ ID NO: 1788; WAN024BGT_s_at; Start 22; Stop 46
tgcggtgcaggtgttaactcaagtc

SEQ ID NO: 80710 - DNA, 25 bp, Artificial
  probe
  misc_feature (1)..(25): SEQ ID NO: 1788; WAN024BGT_s_at; Start 195; Stop 219
accaggtatcccagttatcgaagct

SEQ ID NO: 80711 - DNA, 25 bp, Artificial
  probe
  misc_feature (1)..(25): SEQ ID NO: 1788; WAN024BGT_s_at; Start 125; Stop 149
atgtaaacgaagaccttatgaaagg

SEQ ID NO: 80712 - DNA, 25 bp, Artificial
  probe
  misc_feature (1)..(25): SEQ ID NO: 1788; WAN024BGT_s_at; Start 24; Stop 48
cggtgcaggtgttaactcaagtcac

SEQ ID NO: 80713 - DNA, 25 bp, Artificial
  probe
  misc_feature (1)..(25): SEQ ID NO: 1788; WAN024BGT_s_at; Start 190; Stop 214
tttgaaccaggtatcccagttatcg

SEQ ID NO: 80714 - DNA, 25 bp, Artificial
  probe
  misc_feature (1)..(25): SEQ ID NO: 1788; WAN024BGT_s_at; Start 19; Stop 43
gcctgcggtgcaggtgttaactcaa

SEQ ID NO: 80715 - DNA, 25 bp, Artificial
  probe
  misc_feature (1)..(25): SEQ ID NO: 1788; WAN024BGT_s_at; Start 20; Stop 44
cctgcggtgcaggtgttaactcaag

SEQ ID NO: 80716 - DNA, 25 bp, Artificial
  probe
  misc_feature (1)..(25): SEQ ID NO: 1788; WAN024BGT_s_at; Start 120; Stop 144
gaaagatgtaaacgaagaccttatg

SEQ ID NO: 80717 - DNA, 25 bp, Artificial
  probe
  misc_feature (1)..(25): SEQ ID NO: 1788; WAN024BGT_s_at; Start 147; Stop 171
aggttacgatatctttacaccaatc

SEQ ID NO: 80718 - DNA, 25 bp, Artificial
  probe
  misc_feature (1)..(25): SEQ ID NO: 1788; WAN024BGT_s_at; Start 31; Stop 55
ggtgttaactcaagtcaccaaatta

SEQ ID NO: 80719 - DNA, 25 bp, Artificial
  probe
  misc_feature (1)..(25): SEQ ID NO: 1788; WAN024BGT_s_at; Start 38; Stop 62
actcaagtcaccaaattaaaagtgc

SEQ ID NO: 80720 - DNA, 25 bp, Artificial
  probe
  misc_feature (1)..(25): SEQ ID NO: 1788; WAN024BGT_s_at; Start 144; Stop 168
gaaaggttacgatatctttacacca

SEQ ID NO: 80721 - DNA, 25 bp, Artificial
  probe
  misc_feature (1)..(25): SEQ ID NO: 1059; WAN024BGU_at; Start 31; Stop 55
tggcaactgtatgcagcaatcggtg

SEQ ID NO: 80722 - DNA, 25 bp, Artificial
  probe
  misc_feature (1)..(25): SEQ ID NO: 1059; WAN024BGU_at; Start 719; Stop 743
tgtctgagtacaatctagccaacct

SEQ ID NO: 80723 - DNA, 25 bp, Artificial
  probe
  misc_feature (1)..(25): SEQ ID NO: 1059; WAN024BGU_at; Start 253; Stop 277
gaaatccttgtttctgtgggcgata

SEQ ID NO: 80724 - DNA, 25 bp, Artificial
  probe
  misc_feature (1)..(25): SEQ ID NO: 1059; WAN024BGU_at; Start 477; Stop 501
tccagtggctggaaattctgttgct

SEQ ID NO: 80725 - DNA, 25 bp, Artificial
  probe
  misc_feature (1)..(25): SEQ ID NO: 1059; WAN024BGU_at; Start 111; Stop 135
tcagactgctctaaaagatgagcct

SEQ ID NO: 80726 - DNA, 25 bp, Artificial
  probe
  misc_feature (1)..(25): SEQ ID NO: 1059; WAN024BGU_at; Start 840; Stop 864
tggtgaagcagctagtccagcagcc

SEQ ID NO: 80727 - DNA, 25 bp, Artificial
  probe
  misc_feature (1)..(25): SEQ ID NO: 1059; WAN024BGU_at; Start 591; Stop 615
aactgttctcagtaccctagaggga

SEQ ID NO: 80728 - DNA, 25 bp, Artificial
  probe
  misc_feature (1)..(25): SEQ ID NO: 1059; WAN024BGU_at; Start 892; Stop 916
tatactattgatgtgacaggcgagg

SEQ ID NO: 80729 - DNA, 25 bp, Artificial
  probe
  misc_feature (1)..(25): SEQ ID NO: 1059; WAN024BGU_at; Start 1123; Stop 1147
ggtgctaaggtcatcagtaatccaa

SEQ ID NO: 80730 - DNA, 25 bp, Artificial
  probe
  misc_feature (1)..(25): SEQ ID NO: 1059; WAN024BGU_at; Start 423; Stop 447
tccacagttaccagcgccagtagga

SEQ ID NO: 80731 - DNA, 25 bp, Artificial
  probe
  misc_feature (1)..(25): SEQ ID NO: 1059; WAN024BGU_at; Start 527; Stop 551
cccgtgatgcgcgtgcagatgctgc

SEQ ID NO: 80732 - DNA, 25 bp, Artificial
  probe
  misc_feature (1)..(25): SEQ ID NO: 1059; WAN024BGU_at; Start 95; Stop 119
tctttagacaaccttctcagactgc

SEQ ID NO: 80733 - DNA, 25 bp, Artificial
  probe
  misc_feature (1)..(25): SEQ ID NO: 1059; WAN024BGU_at; Start 560; Stop 584
taagcaaggctcaaagtcaattgga

SEQ ID NO: 80734 - DNA, 25 bp, Artificial
  probe
  misc_feature (1)..(25): SEQ ID NO: 1059; WAN024BGU_at; Start 386; Stop 410
tcaatcaagcacgaaatgaagccgc

SEQ ID NO: 80735 - DNA, 25 bp, Artificial
  probe
  misc_feature (1)..(25): SEQ ID NO: 1059; WAN024BGU_at; Start 323; Stop 347
cgcaggcggcctatgattcagctag

SEQ ID NO: 80736 - DNA, 25 bp, Artificial
  probe
  misc_feature (1)..(25): SEQ ID NO: 1059; WAN024BGU_at; Start 636; Stop 660
caatgtttctaaatctccaacaggg

SEQ ID NO: 80737 - DNA, 25 bp, Artificial
  probe
  misc_feature (1)..(25): SEQ ID NO: 1059; WAN024BGU_at; Start 1066; Stop 1090
gtttcattgggaaatgctgacgcag

SEQ ID NO: 80738 - DNA, 25 bp, Artificial
  probe
  misc_feature (1)..(25): SEQ ID NO: 1059; WAN024BGU_at; Start 437; Stop 461
cgccagtaggaggagaagatgcaac

SEQ ID NO: 80739 - DNA, 25 bp, Artificial
  probe
  misc_feature (1)..(25): SEQ ID NO: 1059; WAN024BGU_at; Start 181; Stop 205
ttattgtcagggacagtaacagcaa

SEQ ID NO: 80740 - DNA, 25 bp, Artificial
  probe
  misc_feature (1)..(25): SEQ ID NO: 1059; WAN024BGU_at; Start 855; Stop 879
tccagcagccgggaataatacaggt

SEQ ID NO: 80741 - DNA, 25 bp, Artificial
  probe
  misc_feature (1)..(25): SEQ ID NO: 1059; WAN024BGU_at; Start 337; Stop 361
gattcagctagtcgagcagtagcta

SEQ ID NO: 80742 - DNA, 25 bp, Artificial
  probe
  misc_feature (1)..(25): SEQ ID NO: 1059; WAN024BGU_at; Start 130; Stop 154
gagcctactcatcttgttgttgcca

SEQ ID NO: 80743 - DNA, 25 bp, Artificial
  probe
  misc_feature (1)..(25): SEQ ID NO: 1059; WAN024BGU_at; Start 276; Stop 300
taaggtcagcgaagggcaggcttta

SEQ ID NO: 80744 - DNA, 25 bp, Artificial
  probe
  misc_feature (1)..(25): SEQ ID NO: 1059; WAN024BGU_at; Start 290; Stop 314
ggcaggctttagtcaagtacagtag

SEQ ID NO: 80745 - DNA, 25 bp, Artificial
  probe
  misc_feature (1)..(25): SEQ ID NO: 1059; WAN024BGU_at; Start 576; Stop 600
tcaattggatgcaacaactgttctc

SEQ ID NO: 80746 - DNA, 25 bp, Artificial
  probe
  misc_feature (1)..(25): SEQ ID NO: 1059; WAN024BGU_at; Start 307; Stop 331
tacagtagttcagaagcgcaggcgg

SEQ ID NO: 80747 - DNA, 25 bp, Artificial
  probe
  misc_feature (1)..(25): SEQ ID NO: 1059; WAN024BGU_at; Start 908; Stop 932
caggcgaggttggtgatttgaaaca

SEQ ID NO: 80748 - DNA, 25 bp, Artificial
  probe
  misc_feature (1)..(25): SEQ ID NO: 1059; WAN024BGU_at; Start 462; Stop 486
ggtgcaaagcccaactccagtggct

SEQ ID NO: 80749 - DNA, 25 bp, Artificial
  probe
  misc_feature (1)..(25): SEQ ID NO: 1059; WAN024BGU_at; Start 820; Stop 844
tctgactatcctaaaaacaatggtg

SEQ ID NO: 80750 - DNA, 25 bp, Artificial
  probe
  misc_feature (1)..(25): SEQ ID NO: 1059; WAN024BGU_at; Start 734; Stop 758
tagccaacctttctgtaggtcaaga

SEQ ID NO: 80751 - DNA, 25 bp, Artificial
  probe
  misc_feature (1)..(25): SEQ ID NO: 1059; WAN024BGU_at; Start 514; Stop 538
caattgggtgatgcccgtgatgcgc

SEQ ID NO: 80752 - DNA, 25 bp, Artificial
  probe
  misc_feature (1)..(25): SEQ ID NO: 1059; WAN024BGU_at; Start 779; Stop 803
tgtatcctgataaaaaatggactgg

SEQ ID NO: 80753 - DNA, 25 bp, Artificial
  probe
  misc_feature (1)..(25): SEQ ID NO: 1059; WAN024BGU_at; Start 15; Stop 39
tggtaaagctaaaaagtggcaactg

SEQ ID NO: 80754 - DNA, 25 bp, Artificial
  probe
  misc_feature (1)..(25): SEQ ID NO: 1059; WAN024BGU_at; Start 1021; Stop 1045
tatgtctggattgtggatgaacaac

SEQ ID NO: 80755 - DNA, 25 bp, Artificial
  probe
  misc_feature (1)..(25): SEQ ID NO: 1775; WAN024BGV_at; Start 162; Stop 186
tacaccaatcgctgcaacagacctt

SEQ ID NO: 80756 - DNA, 25 bp, Artificial
  probe
  misc_feature (1)..(25): SEQ ID NO: 1775; WAN024BGV_at; Start 165; Stop 189
accaatcgctgcaacagaccttggt

SEQ ID NO: 80757 - DNA, 25 bp, Artificial
  probe
  misc_feature (1)..(25): SEQ ID NO: 1775; WAN024BGV_at; Start 163; Stop 187
acaccaatcgctgcaacagaccttg

SEQ ID NO: 80758 - DNA, 25 bp, Artificial
  probe
  misc_feature (1)..(25): SEQ ID NO: 1775; WAN024BGV_at; Start 168; Stop 192
aatcgctgcaacagaccttggtttt

SEQ ID NO: 80759 - DNA, 25 bp, Artificial
  probe
  misc_feature (1)..(25): SEQ ID NO: 1775; WAN024BGV_at; Start 166; Stop 190
ccaatcgctgcaacagaccttggtt

SEQ ID NO: 80760 - DNA, 25 bp, Artificial
  probe
  misc_feature (1)..(25): SEQ ID NO: 1775; WAN024BGV_at; Start 161; Stop 185
ttacaccaatcgctgcaacagacct

SEQ ID NO: 80761 - DNA, 25 bp, Artificial
  probe
  misc_feature (1)..(25): SEQ ID NO: 1775; WAN024BGV_at; Start 171; Stop 195
cgctgcaacagaccttggttttgaa

SEQ ID NO: 80762 - DNA, 25 bp, Artificial
  probe
  misc_feature (1)..(25): SEQ ID NO: 1775; WAN024BGV_at; Start 170; Stop 194
tcgctgcaacagaccttggttttga

SEQ ID NO: 80763 - DNA, 25 bp, Artificial
  probe
  misc_feature (1)..(25): SEQ ID NO: 1775; WAN024BGV_at; Start 167; Stop 191
caatcgctgcaacagaccttggttt

SEQ ID NO: 80764 - DNA, 25 bp, Artificial
  probe
  misc_feature (1)..(25): SEQ ID NO: 1775; WAN024BGV_at; Start 169; Stop 193
atcgctgcaacagaccttggttttg

SEQ ID NO: 80765 - DNA, 25 bp, Artificial
  probe
  misc_feature (1)..(25): SEQ ID NO: 1775; WAN024BGV_at; Start 164; Stop 188
caccaatcgctgcaacagaccttgg

SEQ ID NO: 80766 - DNA, 25 bp, Artificial
  probe
  misc_feature (1)..(25): SEQ ID NO: 5028; WAN024BGW_x_at; Start 57; Stop 81
gtatagtagttctatgaatgatgaa

SEQ ID NO: 80767 - DNA, 25 bp, Artificial
  probe
  misc_feature (1)..(25): SEQ ID NO: 5028; WAN024BGW_x_at; Start 34; Stop 58
gacttcctgcgaaacaaaatatggt

SEQ ID NO: 80768 - DNA, 25 bp, Artificial
  probe
  misc_feature (1)..(25): SEQ ID NO: 5028; WAN024BGW_x_at; Start 54; Stop 78
atggtatagtagttctatgaatgat

SEQ ID NO: 80769 - DNA, 25 bp, Artificial
  probe
  misc_feature (1)..(25): SEQ ID NO: 5028; WAN024BGW_x_at; Start 58; Stop 82
tatagtagttctatgaatgatgaag

SEQ ID NO: 80770 - DNA, 25 bp, Artificial
  probe
  misc_feature (1)..(25): SEQ ID NO: 5028; WAN024BGW_x_at; Start 56; Stop 80
ggtatagtagttctatgaatgatga

SEQ ID NO: 80771 - DNA, 25 bp, Artificial
  probe
  misc_feature (1)..(25): SEQ ID NO: 5028; WAN024BGW_x_at; Start 213; Stop 237
attaagcctagaagaccttcttatg

SEQ ID NO: 80772 - DNA, 25 bp, Artificial
  probe
  misc_feature (1)..(25): SEQ ID NO: 5028; WAN024BGW_x_at; Start 35; Stop 59
acttcctgcgaaacaaaatatggta

SEQ ID NO: 80773 - DNA, 25 bp, Artificial
  probe
  misc_feature (1)..(25): SEQ ID NO: 5028; WAN024BGW_x_at; Start 59; Stop 83
atagtagttctatgaatgatgaagc

SEQ ID NO: 80774 - DNA, 25 bp, Artificial
  probe
  misc_feature (1)..(25): SEQ ID NO: 5028; WAN024BGW_x_at; Start 407; Stop 431
ttgatgcgacggaagtaaaaatcaa

SEQ ID NO: 80775 - DNA, 25 bp, Artificial
  probe
  misc_feature (1)..(25): SEQ ID NO: 5028; WAN024BGW_x_at; Start 101; Stop 125
atgcacgatttaagcgtcttgttgg

SEQ ID NO: 80776 - DNA, 25 bp, Artificial
  probe
  misc_feature (1)..(25): SEQ ID NO: 5028; WAN024BGW_x_at; Start 61; Stop 85
agtagttctatgaatgatgaagcaa

SEQ ID NO: 80777 - DNA, 25 bp, Artificial
  probe
  misc_feature (1)..(25): SEQ ID NO: 5028; WAN024BGW_x_at; Start 283; Stop 307
gcggctgattttggtattcacgaaa

SEQ ID NO: 80778 - DNA, 25 bp, Artificial
  probe
  misc_feature (1)..(25): SEQ ID NO: 5028; WAN024BGW_x_at; Start 408; Stop 432
tgatgcgacggaagtaaaaatcaat

SEQ ID NO: 80779 - DNA, 25 bp, Artificial
  probe
  misc_feature (1)..(25): SEQ ID NO: 5028; WAN024BGW_x_at; Start 53; Stop 77
tatggtatagtagttctatgaatga

SEQ ID NO: 80780 - DNA, 25 bp, Artificial
  probe
  misc_feature (1)..(25): SEQ ID NO: 5028; WAN024BGW_x_at; Start 402; Stop 426
aatgattgatgcgacggaagtaaaa

SEQ ID NO: 80781 - DNA, 25 bp, Artificial
  probe
  misc_feature (1)..(25): SEQ ID NO: 5028; WAN024BGW_x_at; Start 96; Stop 120
aactgatgcacgatttaagcgtctt

SEQ ID NO: 80782 - DNA, 25 bp, Artificial
  probe
  misc_feature (1)..(25): SEQ ID NO: 5028; WAN024BGW_x_at; Start 98; Stop 122
ctgatgcacgatttaagcgtcttgt

SEQ ID NO: 80783 - DNA, 25 bp, Artificial
  probe
  misc_feature (1)..(25): SEQ ID NO: 5028; WAN024BGW_x_at; Start 55; Stop 79
tggtatagtagttctatgaatgatg

SEQ ID NO: 80784 - DNA, 25 bp, Artificial
  probe
  misc_feature (1)..(25): SEQ ID NO: 5028; WAN024BGW_x_at; Start 52; Stop 76
atatggtatagtagttctatgaatg

SEQ ID NO: 80785 - DNA, 25 bp, Artificial
  probe
  misc_feature (1)..(25): SEQ ID NO: 5028; WAN024BGW_x_at; Start 403; Stop 427
atgattgatgcgacggaagtaaaaa

SEQ ID NO: 80786 - DNA, 25 bp, Artificial
  probe
  misc_feature (1)..(25): SEQ ID NO: 5028; WAN024BGW_x_at; Start 51; Stop 75
aatatggtatagtagttctatgaat

SEQ ID NO: 80787 - DNA, 25 bp, Artificial
  probe
  misc_feature (1)..(25): SEQ ID NO: 5028; WAN024BGW_x_at; Start 404; Stop 428
tgattgatgcgacggaagtaaaaat

SEQ ID NO: 80788 - DNA, 25 bp, Artificial
  probe
  misc_feature (1)..(25): SEQ ID NO: 5028; WAN024BGW_x_at; Start 102; Stop 126
tgcacgatttaagcgtcttgttggt

SEQ ID NO: 80789 - DNA, 25 bp, Artificial
  probe
  misc_feature (1)..(25): SEQ ID NO: 5028; WAN024BGW_x_at; Start 36; Stop 60
cttcctgcgaaacaaaatatggtat

SEQ ID NO: 80790 - DNA, 25 bp, Artificial
  probe
  misc_feature (1)..(25): SEQ ID NO: 5028; WAN024BGW_x_at; Start 60; Stop 84
tagtagttctatgaatgatgaagca

SEQ ID NO: 80791 - DNA, 25 bp, Artificial
  probe
  misc_feature (1)..(25): SEQ ID NO: 5028; WAN024BGW_x_at; Start 97; Stop 121
actgatgcacgatttaagcgtcttg

SEQ ID NO: 80792 - DNA, 25 bp, Artificial
  probe
  misc_feature (1)..(25): SEQ ID NO: 5028; WAN024BGW_x_at; Start 406; Stop 430
attgatgcgacggaagtaaaaatca

SEQ ID NO: 80793 - DNA, 25 bp, Artificial
  probe
  misc_feature (1)..(25): SEQ ID NO: 5028; WAN024BGW_x_at; Start 106; Stop 130
cgatttaagcgtcttgttggtgttc

SEQ ID NO: 80794 - DNA, 25 bp, Artificial
  probe
  misc_feature (1)..(25): SEQ ID NO: 5028; WAN024BGW_x_at; Start 410; Stop 434
atgcgacggaagtaaaaatcaatcg

SEQ ID NO: 80795 - DNA, 25 bp, Artificial
  probe
  misc_feature (1)..(25): SEQ ID NO: 5028; WAN024BGW_x_at; Start 33; Stop 57
agacttcctgcgaaacaaaatatgg

SEQ ID NO: 80796 - DNA, 25 bp, Artificial
  probe
  misc_feature (1)..(25): SEQ ID NO: 5028; WAN024BGW_x_at; Start 100; Stop 124
gatgcacgatttaagcgtcttgttg

SEQ ID NO: 80797 - DNA, 25 bp, Artificial
  probe
  misc_feature (1)..(25): SEQ ID NO: 5028; WAN024BGW_x_at; Start 32; Stop 56
tagacttcctgcgaaacaaaatatg

SEQ ID NO: 80798 - DNA, 25 bp, Artificial
  probe
  misc_feature (1)..(25): SEQ ID NO: 5028; WAN024BGW_x_at; Start 295; Stop 319
ggtattcacgaaagcaacttaatcc

SEQ ID NO: 80799 - DNA, 25 bp, Artificial
  probe
  misc_feature (1)..(25): SEQ ID NO: 5028; WAN024BGW_x_at; Start 409; Stop 433
gatgcgacggaagtaaaaatcaatc

SEQ ID NO: 80800 - DNA, 25 bp, Artificial
  probe
  misc_feature (1)..(25): SEQ ID NO: 5973; WAN024BGY_x_at; Start 488; Stop 512
gtcacaagtcaagggagattgtttc

SEQ ID NO: 80801 - DNA, 25 bp, Artificial
  probe
  misc_feature (1)..(25): SEQ ID NO: 5973; WAN024BGY_x_at; Start 316; Stop 340
tgggttgaagtaactcttgttcaaa

SEQ ID NO: 80802 - DNA, 25 bp, Artificial
  probe
  misc_feature (1)..(25): SEQ ID NO: 5973; WAN024BGY_x_at; Start 489; Stop 513
tcacaagtcaagggagattgtttct

SEQ ID NO: 80803 - DNA, 25 bp, Artificial
  probe
  misc_feature (1)..(25): SEQ ID NO: 5973; WAN024BGY_x_at; Start 472; Stop 496
gaaggctcaagcgattgtcacaagt

SEQ ID NO: 80804 - DNA, 25 bp, Artificial
  probe
  misc_feature (1)..(25): SEQ ID NO: 5973; WAN024BGY_x_at; Start 474; Stop 498
aggctcaagcgattgtcacaagtca

SEQ ID NO: 80805 - DNA, 25 bp, Artificial
  probe
  misc_feature (1)..(25): SEQ ID NO: 5973; WAN024BGY_x_at; Start 475; Stop 499
ggctcaagcgattgtcacaagtcaa

SEQ ID NO: 80806 - DNA, 25 bp, Artificial
  probe
  misc_feature (1)..(25): SEQ ID NO: 5973; WAN024BGY_x_at; Start 471; Stop 495
tgaaggctcaagcgattgtcacaag

SEQ ID NO: 80807 - DNA, 25 bp, Artificial
  probe
  misc_feature (1)..(25): SEQ ID NO: 5973; WAN024BGY_x_at; Start 476; Stop 500
gctcaagcgattgtcacaagtcaag

SEQ ID NO: 80808 - DNA, 25 bp, Artificial
  probe
  misc_feature (1)..(25): SEQ ID NO: 5973; WAN024BGY_x_at; Start 482; Stop 506
gcgattgtcacaagtcaagggagat

SEQ ID NO: 80809 - DNA, 25 bp, Artificial
  probe
  misc_feature (1)..(25): SEQ ID NO: 5973; WAN024BGY_x_at; Start 479; Stop 503
caagcgattgtcacaagtcaaggga

SEQ ID NO: 80810 - DNA, 25 bp, Artificial
  probe
  misc_feature (1)..(25): SEQ ID NO: 5973; WAN024BGY_x_at; Start 470; Stop 494
atgaaggctcaagcgattgtcacaa

SEQ ID NO: 80811 - DNA, 25 bp, Artificial
  probe
  misc_feature (1)..(25): SEQ ID NO: 5973; WAN024BGY_x_at; Start 481; Stop 505
agcgattgtcacaagtcaagggaga

SEQ ID NO: 80812 - DNA, 25 bp, Artificial
  probe
  misc_feature (1)..(25): SEQ ID NO: 5973; WAN024BGY_x_at; Start 480; Stop 504
aagcgattgtcacaagtcaagggag

SEQ ID NO: 80813 - DNA, 25 bp, Artificial
  probe
  misc_feature (1)..(25): SEQ ID NO: 5973; WAN024BGY_x_at; Start 484; Stop 508
gattgtcacaagtcaagggagattg

SEQ ID NO: 80814 - DNA, 25 bp, Artificial
  probe
  misc_feature (1)..(25): SEQ ID NO: 5973; WAN024BGY_x_at; Start 477; Stop 501
ctcaagcgattgtcacaagtcaagg

SEQ ID NO: 80815 - DNA, 25 bp, Artificial
  probe
  misc_feature (1)..(25): SEQ ID NO: 5973; WAN024BGY_x_at; Start 487; Stop 511
tgtcacaagtcaagggagattgttt

SEQ ID NO: 80816 - DNA, 25 bp, Artificial
  probe
  misc_feature (1)..(25): SEQ ID NO: 5973; WAN024BGY_x_at; Start 473; Stop 497
aaggctcaagcgattgtcacaagtc

SEQ ID NO: 80817 - DNA, 25 bp, Artificial
  probe
  misc_feature (1)..(25): SEQ ID NO: 5973; WAN024BGY_x_at; Start 478; Stop 502
tcaagcgattgtcacaagtcaaggg

SEQ ID NO: 80818 - DNA, 25 bp, Artificial
  probe
  misc_feature (1)..(25): SEQ ID NO: 5973; WAN024BGY_x_at; Start 485; Stop 509
attgtcacaagtcaagggagattgt

SEQ ID NO: 80819 - DNA, 25 bp, Artificial
  probe
  misc_feature (1)..(25): SEQ ID NO: 5973; WAN024BGY_x_at; Start 486; Stop 510
ttgtcacaagtcaagggagattgtt

SEQ ID NO: 80820 - DNA, 25 bp, Artificial
  probe
  misc_feature (1)..(25): SEQ ID NO: 5973; WAN024BGY_x_at; Start 490; Stop 514
cacaagtcaagggagattgtttctt

SEQ ID NO: 80821 - DNA, 25 bp, Artificial
  probe
  misc_feature (1)..(25): SEQ ID NO: 5973; WAN024BGY_x_at; Start 483; Stop 507
cgattgtcacaagtcaagggagatt

SEQ ID NO: 80822 - DNA, 25 bp, Artificial
  probe
  misc_feature (1)..(25): SEQ ID NO: 5973; WAN024BGY_x_at; Start 469; Stop 493
tatgaaggctcaagcgattgtcaca

SEQ ID NO: 80823 - DNA, 25 bp, Artificial
  probe
  misc_feature (1)..(25): SEQ ID NO: 5973; WAN024BGY_x_at; Start 315; Stop 339
atgggttgaagtaactcttgttcaa

SEQ ID NO: 80824 - DNA, 25 bp, Artificial
  probe
  misc_feature (1)..(25): SEQ ID NO: 3783; WAN024BGZ_x_at; Start 385; Stop 409
ttatcaatcatgaactaggattcta

SEQ ID NO: 80825 - DNA, 25 bp, Artificial
  probe
  misc_feature (1)..(25): SEQ ID NO: 3783; WAN024BGZ_x_at; Start 35; Stop 59
gattgtcacaagtcaagggagaatt

SEQ ID NO: 80826 - DNA, 25 bp, Artificial
  probe
  misc_feature (1)..(25): SEQ ID NO: 3783; WAN024BGZ_x_at; Start 384; Stop 408
attatcaatcatgaactaggattct

SEQ ID NO: 80827 - DNA, 25 bp, Artificial
  probe
  misc_feature (1)..(25): SEQ ID NO: 3783; WAN024BGZ_x_at; Start 34; Stop 58
cgattgtcacaagtcaagggagaat

SEQ ID NO: 80828 - DNA, 25 bp, Artificial
  probe
  misc_feature (1)..(25): SEQ ID NO: 7604; WAN024BH2_at; Start 167; Stop 191
ttactgaggatgggtggtcgatccc

SEQ ID NO: 80829 - DNA, 25 bp, Artificial
  probe
  misc_feature (1)..(25): SEQ ID NO: 7604; WAN024BH2_at; Start 161; Stop 185
ttaaatttactgaggatgggtggtc

SEQ ID NO: 80830 - DNA, 25 bp, Artificial
  probe
  misc_feature (1)..(25): SEQ ID NO: 7604; WAN024BH2_at; Start 158; Stop 182
aagttaaatttactgaggatgggtg

SEQ ID NO: 80831 - DNA, 25 bp, Artificial
  probe
  misc_feature (1)..(25): SEQ ID NO: 7604; WAN024BH2_at; Start 163; Stop 187
aaatttactgaggatgggtggtcga

SEQ ID NO: 80832 - DNA, 25 bp, Artificial
  probe
  misc_feature (1)..(25): SEQ ID NO: 7604; WAN024BH2_at; Start 155; Stop 179
atcaagttaaatttactgaggatgg

SEQ ID NO: 80833 - DNA, 25 bp, Artificial
  probe
  misc_feature (1)..(25): SEQ ID NO: 7604; WAN024BH2_at; Start 175; Stop 199
gatgggtggtcgatcccaaagatgg

SEQ ID NO: 80834 - DNA, 25 bp, Artificial
  probe
  misc_feature (1)..(25): SEQ ID NO: 7604; WAN024BH2_at; Start 156; Stop 180
tcaagttaaatttactgaggatggg

SEQ ID NO: 80835 - DNA, 25 bp, Artificial
  probe
  misc_feature (1)..(25): SEQ ID NO: 7604; WAN024BH2_at; Start 159; Stop 183
agttaaatttactgaggatgggtgg

SEQ ID NO: 80836 - DNA, 25 bp, Artificial
  probe
  misc_feature (1)..(25): SEQ ID NO: 7604; WAN024BH2_at; Start 165; Stop 189
atttactgaggatgggtggtcgatc

SEQ ID NO: 80837 - DNA, 25 bp, Artificial
  probe
  misc_feature (1)..(25): SEQ ID NO: 7604; WAN024BH2_at; Start 157; Stop 181
caagttaaatttactgaggatgggt

SEQ ID NO: 80838 - DNA, 25 bp, Artificial
  probe
  misc_feature (1)..(25): SEQ ID NO: 7604; WAN024BH2_at; Start 169; Stop 193
actgaggatgggtggtcgatcccaa

SEQ ID NO: 80839 - DNA, 25 bp, Artificial
  probe
  misc_feature (1)..(25): SEQ ID NO: 7604; WAN024BH2_at; Start 173; Stop 197
aggatgggtggtcgatcccaaagat

SEQ ID NO: 80840 - DNA, 25 bp, Artificial
  probe
  misc_feature (1)..(25): SEQ ID NO: 7604; WAN024BH2_at; Start 162; Stop 186
taaatttactgaggatgggtggtcg

SEQ ID NO: 80841 - DNA, 25 bp, Artificial
  probe
  misc_feature (1)..(25): SEQ ID NO: 7604; WAN024BH2_at; Start 166; Stop 190
tttactgaggatgggtggtcgatcc

SEQ ID NO: 80842 - DNA, 25 bp, Artificial
  probe
  misc_feature (1)..(25): SEQ ID NO: 7604; WAN024BH2_at; Start 174; Stop 198
ggatgggtggtcgatcccaaagatg

SEQ ID NO: 80843 - DNA, 25 bp, Artificial
  probe
  misc_feature (1)..(25): SEQ ID NO: 7604; WAN024BH2_at; Start 171; Stop 195
tgaggatgggtggtcgatcccaaag

SEQ ID NO: 80844 - DNA, 25 bp, Artificial
  probe
  misc_feature (1)..(25): SEQ ID NO: 7604; WAN024BH2_at; Start 172; Stop 196
gaggatgggtggtcgatcccaaaga

SEQ ID NO: 80845 - DNA, 25 bp, Artificial
  probe
  misc_feature (1)..(25): SEQ ID NO: 7604; WAN024BH2_at; Start 164; Stop 188
aatttactgaggatgggtggtcgat

SEQ ID NO: 80846 - DNA, 25 bp, Artificial
  probe
  misc_feature (1)..(25): SEQ ID NO: 7604; WAN024BH2_at; Start 170; Stop 194
ctgaggatgggtggtcgatcccaaa

SEQ ID NO: 80847 - DNA, 25 bp, Artificial
  probe
  misc_feature (1)..(25): SEQ ID NO: 7604; WAN024BH2_at; Start 168; Stop 192
tactgaggatgggtggtcgatccca

SEQ ID NO: 80848 - DNA, 25 bp, Artificial
  probe
  misc_feature (1)..(25): SEQ ID NO: 7426; WAN024BH3_s_at; Start 20; Stop 44
tattgccactgtatctttccgagaa

SEQ ID NO: 80849 - DNA, 25 bp, Artificial
  probe
  misc_feature (1)..(25): SEQ ID NO: 7426; WAN024BH3_s_at; Start 37; Stop 61
tccgagaactatgggaacaatcgca

SEQ ID NO: 80850 - DNA, 25 bp, Artificial
  probe
  misc_feature (1)..(25): SEQ ID NO: 7426; WAN024BH3_s_at; Start 40; Stop 64
gagaactatgggaacaatcgcaaac

SEQ ID NO: 80851 - DNA, 25 bp, Artificial
  probe
  misc_feature (1)..(25): SEQ ID NO: 7426; WAN024BH3_s_at; Start 18; Stop 42
gatattgccactgtatctttccgag

SEQ ID NO: 80852 - DNA, 25 bp, Artificial
  probe
  misc_feature (1)..(25): SEQ ID NO: 7426; WAN024BH3_s_at; Start 49; Stop 73
gggaacaatcgcaaacgaaagcaga

SEQ ID NO: 80853 - DNA, 25 bp, Artificial
  probe
  misc_feature (1)..(25): SEQ ID NO: 7426; WAN024BH3_s_at; Start 44; Stop 68
actatgggaacaatcgcaaacgaaa

SEQ ID NO: 80854 - DNA, 25 bp, Artificial
  probe
  misc_feature (1)..(25): SEQ ID NO: 7426; WAN024BH3_s_at; Start 68; Stop 92
agcagaaaatttcttggaaattcct

SEQ ID NO: 80855 - DNA, 25 bp, Artificial
  probe
  misc_feature (1)..(25): SEQ ID NO: 7426; WAN024BH3_s_at; Start 1; Stop 25
ttgaagtgcccaactccgatattgc

SEQ ID NO: 80856 - DNA, 25 bp, Artificial
  probe
  misc_feature (1)..(25): SEQ ID NO: 7426; WAN024BH3_s_at; Start 51; Stop 75
gaacaatcgcaaacgaaagcagaaa

SEQ ID NO: 80857 - DNA, 25 bp, Artificial
  probe
  misc_feature (1)..(25): SEQ ID NO: 7426; WAN024BH3_s_at; Start 11; Stop 35
caactccgatattgccactgtatct

SEQ ID NO: 80858 - DNA, 25 bp, Artificial
  probe
  misc_feature (1)..(25): SEQ ID NO: 7426; WAN024BH3_s_at; Start 7; Stop 31
tgcccaactccgatattgccactgt

SEQ ID NO: 80859 - DNA, 25 bp, Artificial
  probe
  misc_feature (1)..(25): SEQ ID NO: 7426; WAN024BH3_s_at; Start 54; Stop 78
caatcgcaaacgaaagcagaaaatt

SEQ ID NO: 80860 - DNA, 25 bp, Artificial
  probe
  misc_feature (1)..(25): SEQ ID NO: 7426; WAN024BH3_s_at; Start 43; Stop 67
aactatgggaacaatcgcaaacgaa

SEQ ID NO: 80861 - DNA, 25 bp, Artificial
  probe
  misc_feature (1)..(25): SEQ ID NO: 7426; WAN024BH3_s_at; Start 48; Stop 72
tgggaacaatcgcaaacgaaagcag

SEQ ID NO: 80862 - DNA, 25 bp, Artificial
  probe
  misc_feature (1)..(25): SEQ ID NO: 7426; WAN024BH3_s_at; Start 64; Stop 88
cgaaagcagaaaatttcttggaaat

SEQ ID NO: 80863 - DNA, 25 bp, Artificial
  probe
  misc_feature (1)..(25): SEQ ID NO: 7426; WAN024BH3_s_at; Start 42; Stop 66
gaactatgggaacaatcgcaaacga

SEQ ID NO: 80864 - DNA, 25 bp, Artificial
  probe
  misc_feature (1)..(25): SEQ ID NO: 7426; WAN024BH3_s_at; Start 57; Stop 81
tcgcaaacgaaagcagaaaatttct

SEQ ID NO: 80865 - DNA, 25 bp, Artificial
  probe
  misc_feature (1)..(25): SEQ ID NO: 7426; WAN024BH3_s_at; Start 23; Stop 47
tgccactgtatctttccgagaacta

SEQ ID NO: 80866 - DNA, 25 bp, Artificial
  probe
  misc_feature (1)..(25): SEQ ID NO: 7426; WAN024BH3_s_at; Start 46; Stop 70
tatgggaacaatcgcaaacgaaagc

SEQ ID NO: 80867 - DNA, 25 bp, Artificial
  probe
  misc_feature (1)..(25): SEQ ID NO: 7426; WAN024BH3_s_at; Start 28; Stop 52
ctgtatctttccgagaactatggga

SEQ ID NO: 80868 - DNA, 25 bp, Artificial
  probe
  misc_feature (1)..(25): SEQ ID NO: 7426; WAN024BH3_s_at; Start 41; Stop 65
agaactatgggaacaatcgcaaacg

SEQ ID NO: 80869 - DNA, 25 bp, Artificial
  probe
  misc_feature (1)..(25): SEQ ID NO: 7426; WAN024BH3_s_at; Start 31; Stop 55
tatctttccgagaactatgggaaca

SEQ ID NO: 80870 - DNA, 25 bp, Artificial
  probe
  misc_feature (1)..(25): SEQ ID NO: 7426; WAN024BH3_s_at; Start 2; Stop 26
tgaagtgcccaactccgatattgcc

SEQ ID NO: 80871 - DNA, 25 bp, Artificial
  probe
  misc_feature (1)..(25): SEQ ID NO: 7426; WAN024BH3_s_at; Start 8; Stop 32
gcccaactccgatattgccactgta

SEQ ID NO: 80872 - DNA, 25 bp, Artificial
  probe
  misc_feature (1)..(25): SEQ ID NO: 7426; WAN024BH3_s_at; Start 22; Stop 46
ttgccactgtatctttccgagaact

SEQ ID NO: 80873 - DNA, 25 bp, Artificial
  probe
  misc_feature (1)..(25): SEQ ID NO: 7426; WAN024BH3_s_at; Start 9; Stop 33
cccaactccgatattgccactgtat

SEQ ID NO: 80874 - DNA, 25 bp, Artificial
  probe
  misc_feature (1)..(25): SEQ ID NO: 7426; WAN024BH3_s_at; Start 3; Stop 27
gaagtgcccaactccgatattgcca

SEQ ID NO: 80875 - DNA, 25 bp, Artificial
  probe
  misc_feature (1)..(25): SEQ ID NO: 7426; WAN024BH3_s_at; Start 26; Stop 50
cactgtatctttccgagaactatgg

SEQ ID NO: 80876 - DNA, 25 bp, Artificial
  probe
  misc_feature (1)..(25): SEQ ID NO: 7426; WAN024BH3_s_at; Start 39; Stop 63
cgagaactatgggaacaatcgcaaa

SEQ ID NO: 80877 - DNA, 25 bp, Artificial
  probe
  misc_feature (1)..(25): SEQ ID NO: 7426; WAN024BH3_s_at; Start 36; Stop 60
ttccgagaactatgggaacaatcgc

SEQ ID NO: 80878 - DNA, 25 bp, Artificial
  probe
  misc_feature (1)..(25): SEQ ID NO: 7426; WAN024BH3_s_at; Start 33; Stop 57
tctttccgagaactatgggaacaat

SEQ ID NO: 80879 - DNA, 25 bp, Artificial
  probe
  misc_feature (1)..(25): SEQ ID NO: 7426; WAN024BH3_s_at; Start 35; Stop 59
tttccgagaactatgggaacaatcg

SEQ ID NO: 80880 - DNA, 25 bp, Artificial
  probe
  misc_feature (1)..(25): SEQ ID NO: 7426; WAN024BH3_s_at; Start 60; Stop 84
caaacgaaagcagaaaatttcttgg

SEQ ID NO: 80881 - DNA, 25 bp, Artificial
  probe
  misc_feature (1)..(25): SEQ ID NO: 7426; WAN024BH3_s_at; Start 4; Stop 28
aagtgcccaactccgatattgccac

SEQ ID NO: 80882 - DNA, 25 bp, Artificial
  probe
  misc_feature (1)..(25): SEQ ID NO: 6360; WAN024BH4_at; Start 247; Stop 271
tcaaacaagggtgttgactatgaca

SEQ ID NO: 80883 - DNA, 25 bp, Artificial
  probe
  misc_feature (1)..(25): SEQ ID NO: 6360; WAN024BH4_at; Start 93; Stop 117
cctaacaggccacggttatgtgaca

SEQ ID NO: 80884 - DNA, 25 bp, Artificial
  probe
  misc_feature (1)..(25): SEQ ID NO: 6360; WAN024BH4_at; Start 53; Stop 77
caactgaaaagactgctgtcattga

SEQ ID NO: 80885 - DNA, 25 bp, Artificial
  probe
  misc_feature (1)..(25): SEQ ID NO: 6360; WAN024BH4_at; Start 261; Stop 285
tgactatgacagtttggatgggcag

SEQ ID NO: 80886 - DNA, 25 bp, Artificial
  probe
  misc_feature (1)..(25): SEQ ID NO: 6360; WAN024BH4_at; Start 254; Stop 278
agggtgttgactatgacagtttgga

SEQ ID NO: 80887 - DNA, 25 bp, Artificial
  probe
  misc_feature (1)..(25): SEQ ID NO: 6360; WAN024BH4_at; Start 95; Stop 119
taacaggccacggttatgtgacaga

SEQ ID NO: 80888 - DNA, 25 bp, Artificial
  probe
  misc_feature (1)..(25): SEQ ID NO: 6360; WAN024BH4_at; Start 102; Stop 126
ccacggttatgtgacagattttgaa

SEQ ID NO: 80889 - DNA, 25 bp, Artificial
  probe
  misc_feature (1)..(25): SEQ ID NO: 6360; WAN024BH4_at; Start 256; Stop 280
ggtgttgactatgacagtttggatg

SEQ ID NO: 80890 - DNA, 25 bp, Artificial
  probe
  misc_feature (1)..(25): SEQ ID NO: 6360; WAN024BH4_at; Start 65; Stop 89
ctgctgtcattgaagagatgattaa

SEQ ID NO: 80891 - DNA, 25 bp, Artificial
  probe
  misc_feature (1)..(25): SEQ ID NO: 6360; WAN024BH4_at; Start 264; Stop 288
ctatgacagtttggatgggcaggca

SEQ ID NO: 80892 - DNA, 25 bp, Artificial
  probe
  misc_feature (1)..(25): SEQ ID NO: 6360; WAN024BH4_at; Start 98; Stop 122
caggccacggttatgtgacagattt

SEQ ID NO: 80893 - DNA, 25 bp, Artificial
  probe
  misc_feature (1)..(25): SEQ ID NO: 6360; WAN024BH4_at; Start 248; Stop 272
caaacaagggtgttgactatgacag

SEQ ID NO: 80894 - DNA, 25 bp, Artificial
  probe
  misc_feature (1)..(25): SEQ ID NO: 6360; WAN024BH4_at; Start 263; Stop 287
actatgacagtttggatgggcaggc

SEQ ID NO: 80895 - DNA, 25 bp, Artificial
  probe
  misc_feature (1)..(25): SEQ ID NO: 6360; WAN024BH4_at; Start 83; Stop 107
tgattaaaagcctaacaggccacgg

SEQ ID NO: 80896 - DNA, 25 bp, Artificial
  probe
  misc_feature (1)..(25): SEQ ID NO: 6360; WAN024BH4_at; Start 80; Stop 104
agatgattaaaagcctaacaggcca

SEQ ID NO: 80897 - DNA, 25 bp, Artificial
  probe
  misc_feature (1)..(25): SEQ ID NO: 6360; WAN024BH4_at; Start 91; Stop 115
agcctaacaggccacggttatgtga

SEQ ID NO: 80898 - DNA, 25 bp, Artificial
  probe
  misc_feature (1)..(25): SEQ ID NO: 6360; WAN024BH4_at; Start 63; Stop 87
gactgctgtcattgaagagatgatt

SEQ ID NO: 80899 - DNA, 25 bp, Artificial
  probe
  misc_feature (1)..(25): SEQ ID NO: 6360; WAN024BH4_at; Start 58; Stop 82
gaaaagactgctgtcattgaagaga

SEQ ID NO: 80900 - DNA, 25 bp, Artificial
  probe
  misc_feature (1)..(25): SEQ ID NO: 6360; WAN024BH4_at; Start 272; Stop 296
gtttggatgggcaggcaactgacct

SEQ ID NO: 80901 - DNA, 25 bp, Artificial
  probe
  misc_feature (1)..(25): SEQ ID NO: 6360; WAN024BH4_at; Start 267; Stop 291
tgacagtttggatgggcaggcaact

SEQ ID NO: 80902 - DNA, 25 bp, Artificial
  probe
  misc_feature (1)..(25): SEQ ID NO: 6360; WAN024BH4_at; Start 88; Stop 112
aaaagcctaacaggccacggttatg

SEQ ID NO: 80903 - DNA, 25 bp, Artificial
  probe
  misc_feature (1)..(25): SEQ ID NO: 6360; WAN024BH4_at; Start 252; Stop 276
caagggtgttgactatgacagtttg

SEQ ID NO: 80904 - DNA, 25 bp, Artificial
  probe
  misc_feature (1)..(25): SEQ ID NO: 6360; WAN024BH4_at; Start 250; Stop 274
aacaagggtgttgactatgacagtt

SEQ ID NO: 80905 - DNA, 25 bp, Artificial
  probe
  misc_feature (1)..(25): SEQ ID NO: 6360; WAN024BH4_at; Start 105; Stop 129
cggttatgtgacagattttgaaacc

SEQ ID NO: 80906 - DNA, 25 bp, Artificial
  probe
  misc_feature (1)..(25): SEQ ID NO: 6360; WAN024BH4_at; Start 100; Stop 124
ggccacggttatgtgacagattttg

SEQ ID NO: 80907 - DNA, 25 bp, Artificial
  probe
  misc_feature (1)..(25): SEQ ID NO: 6360; WAN024BH4_at; Start 259; Stop 283
gttgactatgacagtttggatgggc

SEQ ID NO: 80908 - DNA, 25 bp, Artificial
  probe
  misc_feature (1)..(25): SEQ ID NO: 6360; WAN024BH4_at; Start 106; Stop 130
ggttatgtgacagattttgaaacct

SEQ ID NO: 80909 - DNA, 25 bp, Artificial
  probe
  misc_feature (1)..(25): SEQ ID NO: 6360; WAN024BH4_at; Start 60; Stop 84
aaagactgctgtcattgaagagatg

SEQ ID NO: 80910 - DNA, 25 bp, Artificial
  probe
  misc_feature (1)..(25): SEQ ID NO: 6360; WAN024BH4_at; Start 265; Stop 289
tatgacagtttggatgggcaggcaa

SEQ ID NO: 80911 - DNA, 25 bp, Artificial
  probe
  misc_feature (1)..(25): SEQ ID NO: 6360; WAN024BH4_at; Start 96; Stop 120
aacaggccacggttatgtgacagat

SEQ ID NO: 80912 - DNA, 25 bp, Artificial
  probe
  misc_feature (1)..(25): SEQ ID NO: 6360; WAN024BH4_at; Start 52; Stop 76
gcaactgaaaagactgctgtcattg

SEQ ID NO: 80913 - DNA, 25 bp, Artificial
  probe
  misc_feature (1)..(25): SEQ ID NO: 6360; WAN024BH4_at; Start 79; Stop 103
gagatgattaaaagcctaacaggcc

SEQ ID NO: 80914 - DNA, 25 bp, Artificial
  probe
  misc_feature (1)..(25): SEQ ID NO: 6360; WAN024BH4_at; Start 55; Stop 79
actgaaaagactgctgtcattgaag

SEQ ID NO: 80915 - DNA, 25 bp, Artificial
  probe
  misc_feature (1)..(25): SEQ ID NO: 6360; WAN024BH4_at; Start 266; Stop 290
atgacagtttggatgggcaggcaac

SEQ ID NO: 80916 - DNA, 25 bp, Artificial
  probe
  misc_feature (1)..(25): SEQ ID NO: 1655; WAN024BH5_at; Start 188; Stop 212
gaagagttgcgacaaagattgcaag

SEQ ID NO: 80917 - DNA, 25 bp, Artificial
  probe
  misc_feature (1)..(25): SEQ ID NO: 1655; WAN024BH5_at; Start 87; Stop 111
ggcaccaaatggaatcgctccctca

SEQ ID NO: 80918 - DNA, 25 bp, Artificial
  probe
  misc_feature (1)..(25): SEQ ID NO: 1655; WAN024BH5_at; Start 243; Stop 267
tgccatggctacagaaccacctgaa

SEQ ID NO: 80919 - DNA, 25 bp, Artificial
  probe
  misc_feature (1)..(25): SEQ ID NO: 1655; WAN024BH5_at; Start 105; Stop 129
tccctcagtgataaatgacaagccc

SEQ ID NO: 80920 - DNA, 25 bp, Artificial
  probe
  misc_feature (1)..(25): SEQ ID NO: 1655; WAN024BH5_at; Start 3; Stop 27
gagtttgataccagtaagaccaacg

SEQ ID NO: 80921 - DNA, 25 bp, Artificial
  probe
  misc_feature (1)..(25): SEQ ID NO: 1655; WAN024BH5_at; Start 210; Stop 234
aagtggtggcaccattcctccagcc

SEQ ID NO: 80922 - DNA, 25 bp, Artificial
  probe
  misc_feature (1)..(25): SEQ ID NO: 1655; WAN024BH5_at; Start 256; Stop 280
gaaccacctgaagaaacagttgctg

SEQ ID NO: 80923 - DNA, 25 bp, Artificial
  probe
  misc_feature (1)..(25): SEQ ID NO: 1655; WAN024BH5_at; Start 24; Stop 48
aacgagtccacctgctactgctgaa

SEQ ID NO: 80924 - DNA, 25 bp, Artificial
  probe
  misc_feature (1)..(25): SEQ ID NO: 1655; WAN024BH5_at; Start 141; Stop 165
tgtcaaaccagagttacgttcttcc

SEQ ID NO: 80925 - DNA, 25 bp, Artificial
  probe
  misc_feature (1)..(25): SEQ ID NO: 1655; WAN024BH5_at; Start 272; Stop 296
cagttgctgcaagcgtacctgtacc

SEQ ID NO: 80926 - DNA, 25 bp, Artificial
  probe
  misc_feature (1)..(25): SEQ ID NO: 1655; WAN024BH5_at; Start 34; Stop 58
cctgctactgctgaaccaaggatga

SEQ ID NO: 80927 - DNA, 25 bp, Artificial
  probe
  misc_feature (1)..(25): SEQ ID NO: 1655; WAN024BH5_at; Start 126; Stop 150
gcccatgatgatgtttgtcaaacca

SEQ ID NO: 80928 - DNA, 25 bp, Artificial
  probe
  misc_feature (1)..(25): SEQ ID NO: 1655; WAN024BH5_at; Start 135; Stop 159
gatgtttgtcaaaccagagttacgt

SEQ ID NO: 80929 - DNA, 25 bp, Artificial
  probe
  misc_feature (1)..(25): SEQ ID NO: 1655; WAN024BH5_at; Start 236; Stop 260
taactgctgccatggctacagaacc

SEQ ID NO: 80930 - DNA, 25 bp, Artificial
  probe
  misc_feature (1)..(25): SEQ ID NO: 1655; WAN024BH5_at; Start 15; Stop 39
agtaagaccaacgagtccacctgct

SEQ ID NO: 80931 - DNA, 25 bp, Artificial
  probe
  misc_feature (1)..(25): SEQ ID NO: 1655; WAN024BH5_at; Start 114; Stop 138
gataaatgacaagcccatgatgatg

SEQ ID NO: 80932 - DNA, 25 bp, Artificial
  probe
  misc_feature (1)..(25): SEQ ID NO: 1655; WAN024BH5_at; Start 248; Stop 272
tggctacagaaccacctgaagaaac

SEQ ID NO: 80933 - DNA, 25 bp, Artificial
  probe
  misc_feature (1)..(25): SEQ ID NO: 1655; WAN024BH5_at; Start 60; Stop 84
gcttggaatcgcacgagctgggtca

SEQ ID NO: 80934 - DNA, 25 bp, Artificial
  probe
  misc_feature (1)..(25): SEQ ID NO: 1655; WAN024BH5_at; Start 214; Stop 238
ggtggcaccattcctccagccataa

SEQ ID NO: 80935 - DNA, 25 bp, Artificial
  probe
  misc_feature (1)..(25): SEQ ID NO: 1655; WAN024BH5_at; Start 66; Stop 90
aatcgcacgagctgggtcagcggca

SEQ ID NO: 80936 - DNA, 25 bp, Artificial
  probe
  misc_feature (1)..(25): SEQ ID NO: 1655; WAN024BH5_at; Start 276; Stop 300
tgctgcaagcgtacctgtaccaaag

SEQ ID NO: 80937 - DNA, 25 bp, Artificial
  probe
  misc_feature (1)..(25): SEQ ID NO: 1655; WAN024BH5_at; Start 200; Stop 224
caaagattgcaagtggtggcaccat

SEQ ID NO: 80938 - DNA, 25 bp, Artificial
  probe
  misc_feature (1)..(25): SEQ ID NO: 1655; WAN024BH5_at; Start 160; Stop 184
tcttccttagtaaatttatctttga

SEQ ID NO: 80939 - DNA, 25 bp, Artificial
  probe
  misc_feature (1)..(25): SEQ ID NO: 1655; WAN024BH5_at; Start 176; Stop 200
tatctttgaaaagaagagttgcgac

SEQ ID NO: 80940 - DNA, 25 bp, Artificial
  probe
  misc_feature (1)..(25): SEQ ID NO: 1655; WAN024BH5_at; Start 78; Stop 102
tgggtcagcggcaccaaatggaatc

SEQ ID NO: 80941 - DNA, 25 bp, Artificial
  probe
  misc_feature (1)..(25): SEQ ID NO: 1655; WAN024BH5_at; Start 268; Stop 292
gaaacagttgctgcaagcgtacctg

SEQ ID NO: 80942 - DNA, 25 bp, Artificial
  probe
  misc_feature (1)..(25): SEQ ID NO: 1655; WAN024BH5_at; Start 197; Stop 221
cgacaaagattgcaagtggtggcac

SEQ ID NO: 80943 - DNA, 25 bp, Artificial
  probe
  misc_feature (1)..(25): SEQ ID NO: 1655; WAN024BH5_at; Start 92; Stop 116
caaatggaatcgctccctcagtgat

SEQ ID NO: 80944 - DNA, 25 bp, Artificial
  probe
  misc_feature (1)..(25): SEQ ID NO: 1655; WAN024BH5_at; Start 39; Stop 63
tactgctgaaccaaggatgaagctt

SEQ ID NO: 80945 - DNA, 25 bp, Artificial
  probe
  misc_feature (1)..(25): SEQ ID NO: 1655; WAN024BH5_at; Start 228; Stop 252
tccagccataactgctgccatggct

SEQ ID NO: 80946 - DNA, 25 bp, Artificial
  probe
  misc_feature (1)..(25): SEQ ID NO: 1655; WAN024BH5_at; Start 53; Stop 77
ggatgaagcttggaatcgcacgagc

SEQ ID NO: 80947 - DNA, 25 bp, Artificial
  probe
  misc_feature (1)..(25): SEQ ID NO: 1655; WAN024BH5_at; Start 8; Stop 32
tgataccagtaagaccaacgagtcc

SEQ ID NO: 80948 - DNA, 25 bp, Artificial
  probe
  misc_feature (1)..(25): SEQ ID NO: 1655; WAN024BH5_at; Start 50; Stop 74
caaggatgaagcttggaatcgcacg

SEQ ID NO: 80949 - DNA, 25 bp, Artificial
  probe
  misc_feature (1)..(25): SEQ ID NO: 1655; WAN024BH5_at; Start 98; Stop 122
gaatcgctccctcagtgataaatga

SEQ ID NO: 80950 - DNA, 25 bp, Artificial
  probe
  misc_feature (1)..(25): SEQ ID NO: 5410; WAN024BH6_at; Start 188; Stop 212
gcgattgtagcaacggttttttgaa

SEQ ID NO: 80951 - DNA, 25 bp, Artificial
  probe
  misc_feature (1)..(25): SEQ ID NO: 5410; WAN024BH6_at; Start 150; Stop 174
taatcgtgatacttgcggtaatcaa

SEQ ID NO: 80952 - DNA, 25 bp, Artificial
  probe
  misc_feature (1)..(25): SEQ ID NO: 5410; WAN024BH6_at; Start 94; Stop 118
cgtctggcttgtcgtaggttctttt

SEQ ID NO: 80953 - DNA, 25 bp, Artificial
  probe
  misc_feature (1)..(25): SEQ ID NO: 5410; WAN024BH6_at; Start 65; Stop 89
tccttttggatttctttgacaatgg

SEQ ID NO: 80954 - DNA, 25 bp, Artificial
  probe
  misc_feature (1)..(25): SEQ ID NO: 5410; WAN024BH6_at; Start 168; Stop 192
taatcaagccaaggatactagcgat

SEQ ID NO: 80955 - DNA, 25 bp, Artificial
  probe
  misc_feature (1)..(25): SEQ ID NO: 5410; WAN024BH6_at; Start 148; Stop 172
cataatcgtgatacttgcggtaatc

SEQ ID NO: 80956 - DNA, 25 bp, Artificial
  probe
  misc_feature (1)..(25): SEQ ID NO: 5410; WAN024BH6_at; Start 166; Stop 190
ggtaatcaagccaaggatactagcg

SEQ ID NO: 80957 - DNA, 25 bp, Artificial
  probe
  misc_feature (1)..(25): SEQ ID NO: 5410; WAN024BH6_at; Start 159; Stop 183
tacttgcggtaatcaagccaaggat

SEQ ID NO: 80958 - DNA, 25 bp, Artificial
  probe
  misc_feature (1)..(25): SEQ ID NO: 5410; WAN024BH6_at; Start 219; Stop 243
taaagccttttttgatgtgttctgt

SEQ ID NO: 80959 - DNA, 25 bp, Artificial
  probe
  misc_feature (1)..(25): SEQ ID NO: 5410; WAN024BH6_at; Start 25; Stop 49
gttagtctctttagttggactggtg

SEQ ID NO: 80960 - DNA, 25 bp, Artificial
  probe
  misc_feature (1)..(25): SEQ ID NO: 5410; WAN024BH6_at; Start 209; Stop 233
tgaaagactgtaaagccttttttga

SEQ ID NO: 80961 - DNA, 25 bp, Artificial
  probe
  misc_feature (1)..(25): SEQ ID NO: 5410; WAN024BH6_at; Start 20; Stop 44
ctagtgttagtctctttagttggac

SEQ ID NO: 80962 - DNA, 25 bp, Artificial
  probe
  misc_feature (1)..(25): SEQ ID NO: 5410; WAN024BH6_at; Start 2; Stop 26
tgctgtgttttttcttgactagtgt

SEQ ID NO: 80963 - DNA, 25 bp, Artificial
  probe
  misc_feature (1)..(25): SEQ ID NO: 5410; WAN024BH6_at; Start 85; Stop 109
aatggttgtcgtctggcttgtcgta

SEQ ID NO: 80964 - DNA, 25 bp, Artificial
  probe
  misc_feature (1)..(25): SEQ ID NO: 5410; WAN024BH6_at; Start 172; Stop 196
caagccaaggatactagcgattgta

SEQ ID NO: 80965 - DNA, 25 bp, Artificial
  probe
  misc_feature (1)..(25): SEQ ID NO: 5410; WAN024BH6_at; Start 183; Stop 207
tactagcgattgtagcaacggtttt

SEQ ID NO: 80966 - DNA, 25 bp, Artificial
  probe
  misc_feature (1)..(25): SEQ ID NO: 5410; WAN024BH6_at; Start 176; Stop 200
ccaaggatactagcgattgtagcaa

SEQ ID NO: 80967 - DNA, 25 bp, Artificial
  probe
  misc_feature (1)..(25): SEQ ID NO: 5410; WAN024BH6_at; Start 77; Stop 101
tctttgacaatggttgtcgtctggc

SEQ ID NO: 80968 - DNA, 25 bp, Artificial
  probe
  misc_feature (1)..(25): SEQ ID NO: 5410; WAN024BH6_at; Start 142; Stop 166
ggcgttcataatcgtgatacttgcg

SEQ ID NO: 80969 - DNA, 25 bp, Artificial
  probe
  misc_feature (1)..(25): SEQ ID NO: 5410; WAN024BH6_at; Start 71; Stop 95
tggatttctttgacaatggttgtcg

SEQ ID NO: 80970 - DNA, 25 bp, Artificial
  probe
  misc_feature (1)..(25): SEQ ID NO: 5410; WAN024BH6_at; Start 81; Stop 105
tgacaatggttgtcgtctggcttgt

SEQ ID NO: 80971 - DNA, 25 bp, Artificial
  probe
  misc_feature (1)..(25): SEQ ID NO: 5410; WAN024BH6_at; Start 180; Stop 204
ggatactagcgattgtagcaacggt

SEQ ID NO: 80972 - DNA, 25 bp, Artificial
  probe
  misc_feature (1)..(25): SEQ ID NO: 5410; WAN024BH6_at; Start 61; Stop 85
ggattccttttggatttctttgaca

SEQ ID NO: 80973 - DNA, 25 bp, Artificial
  probe
  misc_feature (1)..(25): SEQ ID NO: 5410; WAN024BH6_at; Start 121; Stop 145
aatatttttgttattatccaaggcg

SEQ ID NO: 80974 - DNA, 25 bp, Artificial
  probe
  misc_feature (1)..(25): SEQ ID NO: 5410; WAN024BH6_at; Start 156; Stop 180
tgatacttgcggtaatcaagccaag

SEQ ID NO: 80975 - DNA, 25 bp, Artificial
  probe
  misc_feature (1)..(25): SEQ ID NO: 5410; WAN024BH6_at; Start 163; Stop 187
tgcggtaatcaagccaaggatacta

SEQ ID NO: 80976 - DNA, 25 bp, Artificial
  probe
  misc_feature (1)..(25): SEQ ID NO: 5410; WAN024BH6_at; Start 5; Stop 29
tgtgttttttcttgactagtgttag

SEQ ID NO: 80977 - DNA, 25 bp, Artificial
  probe
  misc_feature (1)..(25): SEQ ID NO: 5410; WAN024BH6_at; Start 30; Stop 54
tctctttagttggactggtgttttc

SEQ ID NO: 80978 - DNA, 25 bp, Artificial
  probe
  misc_feature (1)..(25): SEQ ID NO: 5410; WAN024BH6_at; Start 144; Stop 168
cgttcataatcgtgatacttgcggt

SEQ ID NO: 80979 - DNA, 25 bp, Artificial
  probe
  misc_feature (1)..(25): SEQ ID NO: 5410; WAN024BH6_at; Start 231; Stop 255
tgatgtgttctgtttttggttttga

SEQ ID NO: 80980 - DNA, 25 bp, Artificial
  probe
  misc_feature (1)..(25): SEQ ID NO: 5410; WAN024BH6_at; Start 137; Stop 161
tccaaggcgttcataatcgtgatac

SEQ ID NO: 80981 - DNA, 25 bp, Artificial
  probe
  misc_feature (1)..(25): SEQ ID NO: 5410; WAN024BH6_at; Start 127; Stop 151
tttgttattatccaaggcgttcata

SEQ ID NO: 80982 - DNA, 25 bp, Artificial
  probe
  misc_feature (1)..(25): SEQ ID NO: 5410; WAN024BH6_at; Start 91; Stop 115
tgtcgtctggcttgtcgtaggttct

SEQ ID NO: 80983 - DNA, 25 bp, Artificial
  probe
  misc_feature (1)..(25): SEQ ID NO: 5410; WAN024BH6_at; Start 134; Stop 158
ttatccaaggcgttcataatcgtga

SEQ ID NO: 80984 - DNA, 25 bp, Artificial
  probe
  misc_feature (1)..(25): SEQ ID NO: 1519; WAN024BH7_at; Start 218; Stop 242
caattccgattagggatttcccagg

SEQ ID NO: 80985 - DNA, 25 bp, Artificial
  probe
  misc_feature (1)..(25): SEQ ID NO: 1519; WAN024BH7_at; Start 196; Stop 220
gcaatatcggagttgggcacttcaa

SEQ ID NO: 80986 - DNA, 25 bp, Artificial
  probe
  misc_feature (1)..(25): SEQ ID NO: 1519; WAN024BH7_at; Start 265; Stop 289
tctttggcagccaaggctagagcga

SEQ ID NO: 80987 - DNA, 25 bp, Artificial
  probe
  misc_feature (1)..(25): SEQ ID NO: 1519; WAN024BH7_at; Start 102; Stop 126
tgcggttccattaacagccttccct

SEQ ID NO: 80988 - DNA, 25 bp, Artificial
  probe
  misc_feature (1)..(25): SEQ ID NO: 1519; WAN024BH7_at; Start 331; Stop 355
acagccggcttgacttcatacttgg

SEQ ID NO: 80989 - DNA, 25 bp, Artificial
  probe
  misc_feature (1)..(25): SEQ ID NO: 1519; WAN024BH7_at; Start 246; Stop 270
tggtgcttcaatccggacatctttg

SEQ ID NO: 80990 - DNA, 25 bp, Artificial
  probe
  misc_feature (1)..(25): SEQ ID NO: 1519; WAN024BH7_at; Start 23; Stop 47
cgttaactgctactgacttccctga

SEQ ID NO: 80991 - DNA, 25 bp, Artificial
  probe
  misc_feature (1)..(25): SEQ ID NO: 1519; WAN024BH7_at; Start 189; Stop 213
tacagtggcaatatcggagttgggc

SEQ ID NO: 80992 - DNA, 25 bp, Artificial
  probe
  misc_feature (1)..(25): SEQ ID NO: 1519; WAN024BH7_at; Start 276; Stop 300
caaggctagagcgaggtcatctgat

SEQ ID NO: 80993 - DNA, 25 bp, Artificial
  probe
  misc_feature (1)..(25): SEQ ID NO: 1519; WAN024BH7_at; Start 346; Stop 370
tcatacttggtcactgatggcccaa

SEQ ID NO: 80994 - DNA, 25 bp, Artificial
  probe
  misc_feature (1)..(25): SEQ ID NO: 1519; WAN024BH7_at; Start 155; Stop 179
tcgtttgcgattgttcccatagttc

SEQ ID NO: 80995 - DNA, 25 bp, Artificial
  probe
  misc_feature (1)..(25): SEQ ID NO: 1519; WAN024BH7_at; Start 52; Stop 76
gttgaacctgcaactagcaagtggg

SEQ ID NO: 80996 - DNA, 25 bp, Artificial
  probe
  misc_feature (1)..(25): SEQ ID NO: 1519; WAN024BH7_at; Start 282; Stop 306
tagagcgaggtcatctgatagattg

SEQ ID NO: 80997 - DNA, 25 bp, Artificial
  probe
  misc_feature (1)..(25): SEQ ID NO: 1519; WAN024BH7_at; Start 298; Stop 322
gatagattggaaatgcggttgaccc

SEQ ID NO: 80998 - DNA, 25 bp, Artificial
  probe
  misc_feature (1)..(25): SEQ ID NO: 1519; WAN024BH7_at; Start 174; Stop 198
tagttctcggaaagatacagtggca

SEQ ID NO: 80999 - DNA, 25 bp, Artificial
  probe
  misc_feature (1)..(25): SEQ ID NO: 1519; WAN024BH7_at; Start 409; Stop 433
gcaaaggttgcttctaagattttga

SEQ ID NO: 81000 - DNA, 25 bp, Artificial
  probe
  misc_feature (1)..(25): SEQ ID NO: 1519; WAN024BH7_at; Start 110; Stop 134
cattaacagccttccctaaaggaat

SEQ ID NO: 81001 - DNA, 25 bp, Artificial
  probe
  misc_feature (1)..(25): SEQ ID NO: 1519; WAN024BH7_at; Start 140; Stop 164
agaaattttctgctttcgtttgcga

SEQ ID NO: 81002 - DNA, 25 bp, Artificial
  probe
  misc_feature (1)..(25): SEQ ID NO: 1519; WAN024BH7_at; Start 81; Stop 105
tttagaaaggtcaaaagctcttgcg

SEQ ID NO: 81003 - DNA, 25 bp, Artificial
  probe
  misc_feature (1)..(25): SEQ ID NO: 1519; WAN024BH7_at; Start 232; Stop 256
gatttcccagggattggtgcttcaa

SEQ ID NO: 81004 - DNA, 25 bp, Artificial
  probe
  misc_feature (1)..(25): SEQ ID NO: 1519; WAN024BH7_at; Start 424; Stop 448
aagattttgatattttctctgacaa

SEQ ID NO: 81005 - DNA, 25 bp, Artificial
  probe
  misc_feature (1)..(25): SEQ ID NO: 1519; WAN024BH7_at; Start 311; Stop 335
tgcggttgacccttacaccaacagc

SEQ ID NO: 81006 - DNA, 25 bp, Artificial
  probe
  misc_feature (1)..(25): SEQ ID NO: 1519; WAN024BH7_at; Start 382; Stop 406
tcaactgttaccttaataccaaagc

SEQ ID NO: 81007 - DNA, 25 bp, Artificial
  probe
  misc_feature (1)..(25): SEQ ID NO: 1519; WAN024BH7_at; Start 15; Stop 39
aataatgccgttaactgctactgac

SEQ ID NO: 81008 - DNA, 25 bp, Artificial
  probe
  misc_feature (1)..(25): SEQ ID NO: 1519; WAN024BH7_at; Start 94; Stop 118
aaagctcttgcggttccattaacag

SEQ ID NO: 81009 - DNA, 25 bp, Artificial
  probe
  misc_feature (1)..(25): SEQ ID NO: 1519; WAN024BH7_at; Start 255; Stop 279
aatccggacatctttggcagccaag

SEQ ID NO: 81010 - DNA, 25 bp, Artificial
  probe
  misc_feature (1)..(25): SEQ ID NO: 1519; WAN024BH7_at; Start 444; Stop 468
gacaattttcttctctttagactga

SEQ ID NO: 81011 - DNA, 25 bp, Artificial
  probe
  misc_feature (1)..(25): SEQ ID NO: 1519; WAN024BH7_at; Start 209; Stop 233
tgggcacttcaattccgattaggga

SEQ ID NO: 81012 - DNA, 25 bp, Artificial
  probe
  misc_feature (1)..(25): SEQ ID NO: 1519; WAN024BH7_at; Start 395; Stop 419
taataccaaagctagcaaaggttgc

SEQ ID NO: 81013 - DNA, 25 bp, Artificial
  probe
  misc_feature (1)..(25): SEQ ID NO: 1519; WAN024BH7_at; Start 45; Stop 69
tgaacccgttgaacctgcaactagc

SEQ ID NO: 81014 - DNA, 25 bp, Artificial
  probe
  misc_feature (1)..(25): SEQ ID NO: 1519; WAN024BH7_at; Start 361; Stop 385
gatggcccaatttcggcccgttcaa

SEQ ID NO: 81015 - DNA, 25 bp, Artificial
  probe
  misc_feature (1)..(25): SEQ ID NO: 1519; WAN024BH7_at; Start 161; Stop 185
gcgattgttcccatagttctcggaa

SEQ ID NO: 81016 - DNA, 25 bp, Artificial
  probe
  misc_feature (1)..(25): SEQ ID NO: 1519; WAN024BH7_at; Start 33; Stop 57
tactgacttccctgaacccgttgaa

SEQ ID NO: 81017 - DNA, 25 bp, Artificial
  probe
  misc_feature (1)..(25): SEQ ID NO: 1519; WAN024BH7_at; Start 2; Stop 26
tgagaatgctagcaataatgccgtt

SEQ ID NO: 81018 - DNA, 25 bp, Artificial
  probe
  misc_feature (1)..(25): SEQ ID NO: 4998; WAN024BH8_at; Start 223; Stop 247
cagaaacgaggtaaaggagagcatt

SEQ ID NO: 81019 - DNA, 25 bp, Artificial
  probe
  misc_feature (1)..(25): SEQ ID NO: 4998; WAN024BH8_at; Start 16; Stop 40
tctttccagttctgctttagacggt

SEQ ID NO: 81020 - DNA, 25 bp, Artificial
  probe
  misc_feature (1)..(25): SEQ ID NO: 4998; WAN024BH8_at; Start 35; Stop 59
gacggtctccgtcttgttgtacttg

SEQ ID NO: 81021 - DNA, 25 bp, Artificial
  probe
  misc_feature (1)..(25): SEQ ID NO: 4998; WAN024BH8_at; Start 173; Stop 197
tttgcgtaggtaaccataaaccaca

SEQ ID NO: 81022 - DNA, 25 bp, Artificial
  probe
  misc_feature (1)..(25): SEQ ID NO: 4998; WAN024BH8_at; Start 86; Stop 110
taccatatttcacaggcatttcggg

SEQ ID NO: 81023 - DNA, 25 bp, Artificial
  probe
  misc_feature (1)..(25): SEQ ID NO: 4998; WAN024BH8_at; Start 176; Stop 200
gcgtaggtaaccataaaccacacca

SEQ ID NO: 81024 - DNA, 25 bp, Artificial
  probe
  misc_feature (1)..(25): SEQ ID NO: 4998; WAN024BH8_at; Start 3; Stop 27
gaatcgcttcttttctttccagttc

SEQ ID NO: 81025 - DNA, 25 bp, Artificial
  probe
  misc_feature (1)..(25): SEQ ID NO: 4998; WAN024BH8_at; Start 56; Stop 80
cttgtattcttgtttgccattcttc

SEQ ID NO: 81026 - DNA, 25 bp, Artificial
  probe
  misc_feature (1)..(25): SEQ ID NO: 4998; WAN024BH8_at; Start 125; Stop 149
gcaccaaacggtccaatcttttcat

SEQ ID NO: 81027 - DNA, 25 bp, Artificial
  probe
  misc_feature (1)..(25): SEQ ID NO: 4998; WAN024BH8_at; Start 38; Stop 62
ggtctccgtcttgttgtacttgtat

SEQ ID NO: 81028 - DNA, 25 bp, Artificial
  probe
  misc_feature (1)..(25): SEQ ID NO: 4998; WAN024BH8_at; Start 229; Stop 253
cgaggtaaaggagagcatttgaagt

SEQ ID NO: 81029 - DNA, 25 bp, Artificial
  probe
  misc_feature (1)..(25): SEQ ID NO: 4998; WAN024BH8_at; Start 102; Stop 126
catttcgggaagagaaaaagactgc

SEQ ID NO: 81030 - DNA, 25 bp, Artificial
  probe
  misc_feature (1)..(25): SEQ ID NO: 4998; WAN024BH8_at; Start 91; Stop 115
tatttcacaggcatttcgggaagag

SEQ ID NO: 81031 - DNA, 25 bp, Artificial
  probe
  misc_feature (1)..(25): SEQ ID NO: 4998; WAN024BH8_at; Start 162; Stop 186
tatgcttgtggtttgcgtaggtaac

SEQ ID NO: 81032 - DNA, 25 bp, Artificial
  probe
  misc_feature (1)..(25): SEQ ID NO: 4998; WAN024BH8_at; Start 121; Stop 145
gactgcaccaaacggtccaatcttt

SEQ ID NO: 81033 - DNA, 25 bp, Artificial
  probe
  misc_feature (1)..(25): SEQ ID NO: 4998; WAN024BH8_at; Start 67; Stop 91
gtttgccattcttctattataccat

SEQ ID NO: 81034 - DNA, 25 bp, Artificial
  probe
  misc_feature (1)..(25): SEQ ID NO: 4998; WAN024BH8_at; Start 189; Stop 213
taaaccacaccacttacgattgctc

SEQ ID NO: 81035 - DNA, 25 bp, Artificial
  probe
  misc_feature (1)..(25): SEQ ID NO: 4998; WAN024BH8_at; Start 133; Stop 157
cggtccaatcttttcatttttctat

SEQ ID NO: 81036 - DNA, 25 bp, Artificial
  probe
  misc_feature (1)..(25): SEQ ID NO: 4998; WAN024BH8_at; Start 94; Stop 118
ttcacaggcatttcgggaagagaaa

SEQ ID NO: 81037 - DNA, 25 bp, Artificial
  probe
  misc_feature (1)..(25): SEQ ID NO: 4998; WAN024BH8_at; Start 164; Stop 188
tgcttgtggtttgcgtaggtaacca

SEQ ID NO: 81038 - DNA, 25 bp, Artificial
  probe
  misc_feature (1)..(25): SEQ ID NO: 4998; WAN024BH8_at; Start 84; Stop 108
tataccatatttcacaggcatttcg

SEQ ID NO: 81039 - DNA, 25 bp, Artificial
  probe
  misc_feature (1)..(25): SEQ ID NO: 4998; WAN024BH8_at; Start 154; Stop 178
ctattttttatgcttgtggtttgcg

SEQ ID NO: 81040 - DNA, 25 bp, Artificial
  probe
  misc_feature (1)..(25): SEQ ID NO: 4998; WAN024BH8_at; Start 20; Stop 44
tccagttctgctttagacggtctcc

SEQ ID NO: 81041 - DNA, 25 bp, Artificial
  probe
  misc_feature (1)..(25): SEQ ID NO: 4998; WAN024BH8_at; Start 107; Stop 131
cgggaagagaaaaagactgcaccaa

SEQ ID NO: 81042 - DNA, 25 bp, Artificial
  probe
  misc_feature (1)..(25): SEQ ID NO: 4998; WAN024BH8_at; Start 105; Stop 129
ttcgggaagagaaaaagactgcacc

SEQ ID NO: 81043 - DNA, 25 bp, Artificial
  probe
  misc_feature (1)..(25): SEQ ID NO: 4998; WAN024BH8_at; Start 199; Stop 223
cacttacgattgctcctaccaagac

SEQ ID NO: 81044 - DNA, 25 bp, Artificial
  probe
  misc_feature (1)..(25): SEQ ID NO: 4998; WAN024BH8_at; Start 22; Stop 46
cagttctgctttagacggtctccgt

SEQ ID NO: 81045 - DNA, 25 bp, Artificial
  probe
  misc_feature (1)..(25): SEQ ID NO: 4998; WAN024BH8_at; Start 210; Stop 234
gctcctaccaagacagaaacgaggt

SEQ ID NO: 81046 - DNA, 25 bp, Artificial
  probe
  misc_feature (1)..(25): SEQ ID NO: 4998; WAN024BH8_at; Start 117; Stop 141
aaaagactgcaccaaacggtccaat

SEQ ID NO: 81047 - DNA, 25 bp, Artificial
  probe
  misc_feature (1)..(25): SEQ ID NO: 4998; WAN024BH8_at; Start 206; Stop 230
gattgctcctaccaagacagaaacg

SEQ ID NO: 81048 - DNA, 25 bp, Artificial
  probe
  misc_feature (1)..(25): SEQ ID NO: 4998; WAN024BH8_at; Start 50; Stop 74
gttgtacttgtattcttgtttgcca

SEQ ID NO: 81049 - DNA, 25 bp, Artificial
  probe
  misc_feature (1)..(25): SEQ ID NO: 4998; WAN024BH8_at; Start 217; Stop 241
ccaagacagaaacgaggtaaaggag

SEQ ID NO: 81050 - DNA, 25 bp, Artificial
  probe
  misc_feature (1)..(25): SEQ ID NO: 4998; WAN024BH8_at; Start 113; Stop 137
gagaaaaagactgcaccaaacggtc

SEQ ID NO: 81051 - DNA, 25 bp, Artificial
  probe
  misc_feature (1)..(25): SEQ ID NO: 4998; WAN024BH8_at; Start 203; Stop 227
tacgattgctcctaccaagacagaa

SEQ ID NO: 81052 - DNA, 25 bp, Artificial
  probe
  misc_feature (1)..(25): SEQ ID NO: 2829; WAN024BH9_at; Start 219; Stop 243
ggcaagaaccaaggcacctgcgata

SEQ ID NO: 81053 - DNA, 25 bp, Artificial
  probe
  misc_feature (1)..(25): SEQ ID NO: 2829; WAN024BH9_at; Start 212; Stop 236
tcttgatggcaagaaccaaggcacc

SEQ ID NO: 81054 - DNA, 25 bp, Artificial
  probe
  misc_feature (1)..(25): SEQ ID NO: 2829; WAN024BH9_at; Start 3; Stop 27
gtcaacagccatcattccaccaagg

SEQ ID NO: 81055 - DNA, 25 bp, Artificial
  probe
  misc_feature (1)..(25): SEQ ID NO: 2829; WAN024BH9_at; Start 106; Stop 130
gggatattcacagctagcataacaa

SEQ ID NO: 81056 - DNA, 25 bp, Artificial
  probe
  misc_feature (1)..(25): SEQ ID NO: 2829; WAN024BH9_at; Start 137; Stop 161
tcaagattgttccaagaagtggcaa

SEQ ID NO: 81057 - DNA, 25 bp, Artificial
  probe
  misc_feature (1)..(25): SEQ ID NO: 2829; WAN024BH9_at; Start 93; Stop 117
gattgcagccattgggatattcaca

SEQ ID NO: 81058 - DNA, 25 bp, Artificial
  probe
  misc_feature (1)..(25): SEQ ID NO: 2829; WAN024BH9_at; Start 86; Stop 110
cagtgttgattgcagccattgggat

SEQ ID NO: 81059 - DNA, 25 bp, Artificial
  probe
  misc_feature (1)..(25): SEQ ID NO: 2829; WAN024BH9_at; Start 67; Stop 91
cctaggaagtcattcatagcagtgt

SEQ ID NO: 81060 - DNA, 25 bp, Artificial
  probe
  misc_feature (1)..(25): SEQ ID NO: 2829; WAN024BH9_at; Start 254; Stop 278
caagggcacctaggaaaccagatga

SEQ ID NO: 81061 - DNA, 25 bp, Artificial
  probe
  misc_feature (1)..(25): SEQ ID NO: 2829; WAN024BH9_at; Start 80; Stop 104
tcatagcagtgttgattgcagccat

SEQ ID NO: 81062 - DNA, 25 bp, Artificial
  probe
  misc_feature (1)..(25): SEQ ID NO: 2829; WAN024BH9_at; Start 172; Stop 196
gatttagcaccttcgagtgaacgag

SEQ ID NO: 81063 - DNA, 25 bp, Artificial
  probe
  misc_feature (1)..(25): SEQ ID NO: 2829; WAN024BH9_at; Start 264; Stop 288
taggaaaccagatgagacacctgca

SEQ ID NO: 81064 - DNA, 25 bp, Artificial
  probe
  misc_feature (1)..(25): SEQ ID NO: 2829; WAN024BH9_at; Start 237; Stop 261
tgcgataaatccaccaacaagggca

SEQ ID NO: 81065 - DNA, 25 bp, Artificial
  probe
  misc_feature (1)..(25): SEQ ID NO: 2829; WAN024BH9_at; Start 198; Stop 222
aactttaacgtatttcttgatggca

SEQ ID NO: 81066 - DNA, 25 bp, Artificial
  probe
  misc_feature (1)..(25): SEQ ID NO: 2829; WAN024BH9_at; Start 118; Stop 142
gctagcataacaaatcctgtcaaga

SEQ ID NO: 81067 - DNA, 25 bp, Artificial
  probe
  misc_feature (1)..(25): SEQ ID NO: 2829; WAN024BH9_at; Start 22; Stop 46
ccaaggacgataccaagaaggacag

SEQ ID NO: 81068 - DNA, 25 bp, Artificial
  probe
  misc_feature (1)..(25): SEQ ID NO: 2829; WAN024BH9_at; Start 274; Stop 298
gatgagacacctgcaagagttgaag

SEQ ID NO: 81069 - DNA, 25 bp, Artificial
  probe
  misc_feature (1)..(25): SEQ ID NO: 2829; WAN024BH9_at; Start 242; Stop 266
taaatccaccaacaagggcacctag

SEQ ID NO: 81070 - DNA, 25 bp, Artificial
  probe
  misc_feature (1)..(25): SEQ ID NO: 2829; WAN024BH9_at; Start 27; Stop 51
gacgataccaagaaggacagctgaa

SEQ ID NO: 81071 - DNA, 25 bp, Artificial
  probe
  misc_feature (1)..(25): SEQ ID NO: 2829; WAN024BH9_at; Start 179; Stop 203
caccttcgagtgaacgaggaacttt

SEQ ID NO: 81072 - DNA, 25 bp, Artificial
  probe
  misc_feature (1)..(25): SEQ ID NO: 2829; WAN024BH9_at; Start 32; Stop 56
taccaagaaggacagctgaacctcc

SEQ ID NO: 81073 - DNA, 25 bp, Artificial
  probe
  misc_feature (1)..(25): SEQ ID NO: 2829; WAN024BH9_at; Start 293; Stop 317
ttgaagttgcttcaccacctgcggc

SEQ ID NO: 81074 - DNA, 25 bp, Artificial
  probe
  misc_feature (1)..(25): SEQ ID NO: 2829; WAN024BH9_at; Start 100; Stop 124
gccattgggatattcacagctagca

SEQ ID NO: 81075 - DNA, 25 bp, Artificial
  probe
  misc_feature (1)..(25): SEQ ID NO: 2829; WAN024BH9_at; Start 144; Stop 168
tgttccaagaagtggcaatagaagg

SEQ ID NO: 81076 - DNA, 25 bp, Artificial
  probe
  misc_feature (1)..(25): SEQ ID NO: 2829; WAN024BH9_at; Start 297; Stop 321
agttgcttcaccacctgcggcataa

SEQ ID NO: 81077 - DNA, 25 bp, Artificial
  probe
  misc_feature (1)..(25): SEQ ID NO: 2829; WAN024BH9_at; Start 215; Stop 239
tgatggcaagaaccaaggcacctgc

SEQ ID NO: 81078 - DNA, 25 bp, Artificial
  probe
  misc_feature (1)..(25): SEQ ID NO: 2829; WAN024BH9_at; Start 158; Stop 182
gcaatagaaggattgatttagcacc

SEQ ID NO: 81079 - DNA, 25 bp, Artificial
  probe
  misc_feature (1)..(25): SEQ ID NO: 2829; WAN024BH9_at; Start 62; Stop 86
gaccgcctaggaagtcattcatagc

SEQ ID NO: 81080 - DNA, 25 bp, Artificial
  probe
  misc_feature (1)..(25): SEQ ID NO: 2829; WAN024BH9_at; Start 57; Stop 81
tccaagaccgcctaggaagtcattc

SEQ ID NO: 81081 - DNA, 25 bp, Artificial
  probe
  misc_feature (1)..(25): SEQ ID NO: 2829; WAN024BH9_at; Start 39; Stop 63
aaggacagctgaacctcctccaaga

SEQ ID NO: 81082 - DNA, 25 bp, Artificial
  probe
  misc_feature (1)..(25): SEQ ID NO: 2829; WAN024BH9_at; Start 229; Stop 253
aaggcacctgcgataaatccaccaa

SEQ ID NO: 81083 - DNA, 25 bp, Artificial
  probe
  misc_feature (1)..(25): SEQ ID NO: 2829; WAN024BH9_at; Start 128; Stop 152
caaatcctgtcaagattgttccaag

SEQ ID NO: 81084 - DNA, 25 bp, Artificial
  probe
  misc_feature (1)..(25): SEQ ID NO: 2829; WAN024BH9_at; Start 14; Stop 38
tcattccaccaaggacgataccaag

SEQ ID NO: 81085 - DNA, 25 bp, Artificial
  probe
  misc_feature (1)..(25): SEQ ID NO: 2829; WAN024BH9_at; Start 281; Stop 305
cacctgcaagagttgaagttgcttc

SEQ ID NO: 81086 - DNA, 25 bp, Artificial
  probe
  misc_feature (1)..(25): SEQ ID NO: 5682; WAN024BHA_at; Start 186; Stop 210
tacaatcgctagtatccttggcttg

SEQ ID NO: 81087 - DNA, 25 bp, Artificial
  probe
  misc_feature (1)..(25): SEQ ID NO: 5682; WAN024BHA_at; Start 77; Stop 101
taataaatcataatcaaaggagaga

SEQ ID NO: 81088 - DNA, 25 bp, Artificial
  probe
  misc_feature (1)..(25): SEQ ID NO: 5682; WAN024BHA_at; Start 544; Stop 568
tagcttccctccaaacttggaaaga

SEQ ID NO: 81089 - DNA, 25 bp, Artificial
  probe
  misc_feature (1)..(25): SEQ ID NO: 5682; WAN024BHA_at; Start 378; Stop 402
gcaagaggaaacaccaaaatctagc

SEQ ID NO: 81090 - DNA, 25 bp, Artificial
  probe
  misc_feature (1)..(25): SEQ ID NO: 5682; WAN024BHA_at; Start 175; Stop 199
aaaaccgttgctacaatcgctagta

SEQ ID NO: 81091 - DNA, 25 bp, Artificial
  probe
  misc_feature (1)..(25): SEQ ID NO: 5682; WAN024BHA_at; Start 62; Stop 86
taaagaaacagagtataataaatca

SEQ ID NO: 81092 - DNA, 25 bp, Artificial
  probe
  misc_feature (1)..(25): SEQ ID NO: 5682; WAN024BHA_at; Start 338; Stop 362
gtccaactaaagagactaacactag

SEQ ID NO: 81093 - DNA, 25 bp, Artificial
  probe
  misc_feature (1)..(25): SEQ ID NO: 5682; WAN024BHA_at; Start 456; Stop 480
tcctgcttcaagtaaacctgctact

SEQ ID NO: 81094 - DNA, 25 bp, Artificial
  probe
  misc_feature (1)..(25): SEQ ID NO: 5682; WAN024BHA_at; Start 360; Stop 384
tagtcaagaaaaaacacagcaagag

SEQ ID NO: 81095 - DNA, 25 bp, Artificial
  probe
  misc_feature (1)..(25): SEQ ID NO: 5682; WAN024BHA_at; Start 171; Stop 195
tcaaaaaaccgttgctacaatcgct

SEQ ID NO: 81096 - DNA, 25 bp, Artificial
  probe
  misc_feature (1)..(25): SEQ ID NO: 5682; WAN024BHA_at; Start 474; Stop 498
tgctactgaaaacgaaaaacagtcc

SEQ ID NO: 81097 - DNA, 25 bp, Artificial
  probe
  misc_feature (1)..(25): SEQ ID NO: 5682; WAN024BHA_at; Start 10; Stop 34
gaaacggagcttgcgacaagaaagg

SEQ ID NO: 81098 - DNA, 25 bp, Artificial
  probe
  misc_feature (1)..(25): SEQ ID NO: 5682; WAN024BHA_at; Start 142; Stop 166
gaacacatcaaaaaaggctttacag

SEQ ID NO: 81099 - DNA, 25 bp, Artificial
  probe
  misc_feature (1)..(25): SEQ ID NO: 5682; WAN024BHA_at; Start 604; Stop 628
ttggtaccttcagctggaccgatga

SEQ ID NO: 81100 - DNA, 25 bp, Artificial
  probe
  misc_feature (1)..(25): SEQ ID NO: 5682; WAN024BHA_at; Start 480; Stop 504
tgaaaacgaaaaacagtccaatgcg

SEQ ID NO: 81101 - DNA, 25 bp, Artificial
  probe
  misc_feature (1)..(25): SEQ ID NO: 5682; WAN024BHA_at; Start 495; Stop 519
gtccaatgcgccaacttcagaaaat

SEQ ID NO: 81102 - DNA, 25 bp, Artificial
  probe
  misc_feature (1)..(25): SEQ ID NO: 5682; WAN024BHA_at; Start 509; Stop 533
cttcagaaaataaaagcaatcaata

SEQ ID NO: 81103 - DNA, 25 bp, Artificial
  probe
  misc_feature (1)..(25): SEQ ID NO: 5682; WAN024BHA_at; Start 195; Stop 219
tagtatccttggcttgattaccgca

SEQ ID NO: 81104 - DNA, 25 bp, Artificial
  probe
  misc_feature (1)..(25): SEQ ID NO: 5682; WAN024BHA_at; Start 111; Stop 135
taactatcgtagaacttcaaaacca

SEQ ID NO: 81105 - DNA, 25 bp, Artificial
  probe
  misc_feature (1)..(25): SEQ ID NO: 5682; WAN024BHA_at; Start 206; Stop 230
gcttgattaccgcaagtatcacgat

SEQ ID NO: 81106 - DNA, 25 bp, Artificial
  probe
  misc_feature (1)..(25): SEQ ID NO: 5682; WAN024BHA_at; Start 598; Stop 622
cgaggtttggtaccttcagctggac

SEQ ID NO: 81107 - DNA, 25 bp, Artificial
  probe
  misc_feature (1)..(25): SEQ ID NO: 5682; WAN024BHA_at; Start 149; Stop 173
tcaaaaaaggctttacagtctttca

SEQ ID NO: 81108 - DNA, 25 bp, Artificial
  probe
  misc_feature (1)..(25): SEQ ID NO: 5682; WAN024BHA_at; Start 487; Stop 511
gaaaaacagtccaatgcgccaactt

SEQ ID NO: 81109 - DNA, 25 bp, Artificial
  probe
  misc_feature (1)..(25): SEQ ID NO: 5682; WAN024BHA_at; Start 127; Stop 151
tcaaaaccaaaaacagaacacatca

SEQ ID NO: 81110 - DNA, 25 bp, Artificial
  probe
  misc_feature (1)..(25): SEQ ID NO: 5682; WAN024BHA_at; Start 90; Stop 114
tcaaaggagagaatgtatgtctaac

SEQ ID NO: 81111 - DNA, 25 bp, Artificial
  probe
  misc_feature (1)..(25): SEQ ID NO: 5682; WAN024BHA_at; Start 1; Stop 25
ttgtatcatgaaacggagcttgcga

SEQ ID NO: 81112 - DNA, 25 bp, Artificial
  probe
  misc_feature (1)..(25): SEQ ID NO: 5682; WAN024BHA_at; Start 354; Stop 378
taacactagtcaagaaaaaacacag

SEQ ID NO: 81113 - DNA, 25 bp, Artificial
  probe
  misc_feature (1)..(25): SEQ ID NO: 5682; WAN024BHA_at; Start 370; Stop 394
aaaacacagcaagaggaaacaccaa

SEQ ID NO: 81114 - DNA, 25 bp, Artificial
  probe
  misc_feature (1)..(25): SEQ ID NO: 5682; WAN024BHA_at; Start 98; Stop 122
gagaatgtatgtctaactatcgtag

SEQ ID NO: 81115 - DNA, 25 bp, Artificial
  probe
  misc_feature (1)..(25): SEQ ID NO: 5682; WAN024BHA_at; Start 443; Stop 467
aggactcttctactcctgcttcaag

SEQ ID NO: 81116 - DNA, 25 bp, Artificial
  probe
  misc_feature (1)..(25): SEQ ID NO: 5682; WAN024BHA_at; Start 328; Stop 352
gaaaacaccagtccaactaaagaga

SEQ ID NO: 81117 - DNA, 25 bp, Artificial
  probe
  misc_feature (1)..(25): SEQ ID NO: 5682; WAN024BHA_at; Start 6; Stop 30
tcatgaaacggagcttgcgacaaga

SEQ ID NO: 81118 - DNA, 25 bp, Artificial
  probe
  misc_feature (1)..(25): SEQ ID NO: 5682; WAN024BHA_at; Start 217; Stop 241
gcaagtatcacgattatgaacgcct

SEQ ID NO: 81119 - DNA, 25 bp, Artificial
  probe
  misc_feature (1)..(25): SEQ ID NO: 5682; WAN024BHA_at; Start 552; Stop 576
ctccaaacttggaaagaagctattt

SEQ ID NO: 81120 - DNA, 25 bp, Artificial
  probe
  misc_feature (1)..(25): SEQ ID NO: 782; WAN024BHB_at; Start 1470; Stop 1494
ccttggtggaatgatggctgttgac

SEQ ID NO: 81121 - DNA, 25 bp, Artificial
  probe
  misc_feature (1)..(25): SEQ ID NO: 782; WAN024BHB_at; Start 1455; Stop 1479
ccttcttggtatcgtccttggtgga

SEQ ID NO: 81122 - DNA, 25 bp, Artificial
  probe
  misc_feature (1)..(25): SEQ ID NO: 782; WAN024BHB_at; Start 1294; Stop 1318
aaagttcctcgttcactcgaaggtg

SEQ ID NO: 81123 - DNA, 25 bp, Artificial
  probe
  misc_feature (1)..(25): SEQ ID NO: 782; WAN024BHB_at; Start 1165; Stop 1189
ggtaaaattccttatgccgcaggtg

SEQ ID NO: 81124 - DNA, 25 bp, Artificial
  probe
  misc_feature (1)..(25): SEQ ID NO: 782; WAN024BHB_at; Start 594; Stop 618
tatcaaggtcgaaaccaacggtgct

SEQ ID NO: 81125 - DNA, 25 bp, Artificial
  probe
  misc_feature (1)..(25): SEQ ID NO: 782; WAN024BHB_at; Start 1237; Stop 1261
gcccttgttggtggatttatcgcag

SEQ ID NO: 81126 - DNA, 25 bp, Artificial
  probe
  misc_feature (1)..(25): SEQ ID NO: 782; WAN024BHB_at; Start 1822; Stop 1846
ctcatggcgccacacggaggaatct

SEQ ID NO: 81127 - DNA, 25 bp, Artificial
  probe
  misc_feature (1)..(25): SEQ ID NO: 782; WAN024BHB_at; Start 1590; Stop 1614
tatggctggaggaatggtgccacca

SEQ ID NO: 81128 - DNA, 25 bp, Artificial
  probe
  misc_feature (1)..(25): SEQ ID NO: 782; WAN024BHB_at; Start 261; Stop 285
tgactacgagagcttggatggacaa

SEQ ID NO: 81129 - DNA, 25 bp, Artificial
  probe
  misc_feature (1)..(25): SEQ ID NO: 782; WAN024BHB_at; Start 638; Stop 662
taactgcagaagatatccgtaaggc

SEQ ID NO: 81130 - DNA, 25 bp, Artificial
  probe
  misc_feature (1)..(25): SEQ ID NO: 782; WAN024BHB_at; Start 1219; Stop 1243
tcatctggtttcctaggtgcccttg

SEQ ID NO: 81131 - DNA, 25 bp, Artificial
  probe
  misc_feature (1)..(25): SEQ ID NO: 782; WAN024BHB_at; Start 612; Stop 636
cggtgctagcggtgttggaaatcaa

SEQ ID NO: 81132 - DNA, 25 bp, Artificial
  probe
  misc_feature (1)..(25): SEQ ID NO: 782; WAN024BHB_at; Start 1531; Stop 1555
ggtacaggtacgcttgcagcaactg

SEQ ID NO: 81133 - DNA, 25 bp, Artificial
  probe
  misc_feature (1)..(25): SEQ ID NO: 782; WAN024BHB_at; Start 791; Stop 815
gagatactgaagtctaccgtgccgc

SEQ ID NO: 81134 - DNA, 25 bp, Artificial
  probe
  misc_feature (1)..(25): SEQ ID NO: 782; WAN024BHB_at; Start 556; Stop 580
gaagcccttcaaaaagtagctgctg

SEQ ID NO: 81135 - DNA, 25 bp, Artificial
  probe
  misc_feature (1)..(25): SEQ ID NO: 782; WAN024BHB_at; Start 1202; Stop 1226
caactcttgcaggtgtctcatctgg

SEQ ID NO: 81136 - DNA, 25 bp, Artificial
  probe
  misc_feature (1)..(25): SEQ ID NO: 782; WAN024BHB_at; Start 1678; Stop 1702
ggtttgacaaacatcatcatgggct

SEQ ID NO: 81137 - DNA, 25 bp, Artificial
  probe
  misc_feature (1)..(25): SEQ ID NO: 782; WAN024BHB_at; Start 57; Stop 81
tgaaaaaacagctgtcatcgacgag

SEQ ID NO: 81138 - DNA, 25 bp, Artificial
  probe
  misc_feature (1)..(25): SEQ ID NO: 782; WAN024BHB_at; Start 918; Stop 942
tatcggtggtggtatcatgattgcc

SEQ ID NO: 81139 - DNA, 25 bp, Artificial
  probe
  misc_feature (1)..(25): SEQ ID NO: 782; WAN024BHB_at; Start 1725; Stop 1749
gattccatttggtgccgctgaccca

SEQ ID NO: 81140 - DNA, 25 bp, Artificial
  probe
  misc_feature (1)..(25): SEQ ID NO: 782; WAN024BHB_at; Start 1769; Stop 1793
tcatccttggttcagcagtagcagg

SEQ ID NO: 81141 - DNA, 25 bp, Artificial
  probe
  misc_feature (1)..(25): SEQ ID NO: 782; WAN024BHB_at; Start 1373; Stop 1397
tgctagctgtgaatatcccaatggc

SEQ ID NO: 81142 - DNA, 25 bp, Artificial
  probe
  misc_feature (1)..(25): SEQ ID NO: 782; WAN024BHB_at; Start 1259; Stop 1283
caggtgccttggttcttgccatcaa

SEQ ID NO: 81143 - DNA, 25 bp, Artificial
  probe
  misc_feature (1)..(25): SEQ ID NO: 782; WAN024BHB_at; Start 1888; Stop 1912
tctgtcttggtaggagcaatcgtaa

SEQ ID NO: 81144 - DNA, 25 bp, Artificial
  probe
  misc_feature (1)..(25): SEQ ID NO: 782; WAN024BHB_at; Start 1496; Stop 1520
tgggtggaccagttaataaagcagc

SEQ ID NO: 81145 - DNA, 25 bp, Artificial
  probe
  misc_feature (1)..(25): SEQ ID NO: 782; WAN024BHB_at; Start 722; Stop 746
cattgatcaatcgtccagttgctga

SEQ ID NO: 81146 - DNA, 25 bp, Artificial
  probe
  misc_feature (1)..(25): SEQ ID NO: 782; WAN024BHB_at; Start 1562; Stop 1586
caggtggttctgtagccatggcagc

SEQ ID NO: 81147 - DNA, 25 bp, Artificial
  probe
  misc_feature (1)..(25): SEQ ID NO: 782; WAN024BHB_at; Start 1837; Stop 1861
ggaggaatcttcgttatcgccctta

SEQ ID NO: 81148 - DNA, 25 bp, Artificial
  probe
  misc_feature (1)..(25): SEQ ID NO: 782; WAN024BHB_at; Start 745; Stop 769
gacggtatccgtaagacagaagagc

SEQ ID NO: 81149 - DNA, 25 bp, Artificial
  probe
  misc_feature (1)..(25): SEQ ID NO: 782; WAN024BHB_at; Start 1067; Stop 1091
cagtctttgcgggttatgttgccta

SEQ ID NO: 81150 - DNA, 25 bp, Artificial
  probe
  misc_feature (1)..(25): SEQ ID NO: 782; WAN024BHB_at; Start 936; Stop 960
gattgcccttgccttcttgattgac

SEQ ID NO: 81151 - DNA, 25 bp, Artificial
  probe
  misc_feature (1)..(25): SEQ ID NO: 782; WAN024BHB_at; Start 1180; Stop 1204
gccgcaggtggtgaagcaacttcaa

SEQ ID NO: 81152 - DNA, 25 bp, Artificial
  probe
  misc_feature (1)..(25): SEQ ID NO: 782; WAN024BHB_at; Start 515; Stop 539
cagcttgtacaacaggtattgccca

SEQ ID NO: 81153 - DNA, 25 bp, Artificial
  probe
  misc_feature (1)..(25): SEQ ID NO: 782; WAN024BHB_at; Start 1706; Stop 1730
catttatcactgagggagcgattcc

SEQ ID NO: 81154 - DNA, 25 bp, Artificial
  probe
  misc_feature (1)..(25): SEQ ID NO: 2386; WAN024BHC_at; Start 1912; Stop 1936
gaaaaacttcttggtcgaggagaca

SEQ ID NO: 81155 - DNA, 25 bp, Artificial
  probe
  misc_feature (1)..(25): SEQ ID NO: 2386; WAN024BHC_at; Start 1111; Stop 1135
gatgacctcgctctagccttggctg

SEQ ID NO: 81156 - DNA, 25 bp, Artificial
  probe
  misc_feature (1)..(25): SEQ ID NO: 2386; WAN024BHC_at; Start 1959; Stop 1983
aaatcatccagttcgtctccaaggc

SEQ ID NO: 81157 - DNA, 25 bp, Artificial
  probe
  misc_feature (1)..(25): SEQ ID NO: 2386; WAN024BHC_at; Start 698; Stop 722
tgcctcctgttgatatggaaacggg

SEQ ID NO: 81158 - DNA, 25 bp, Artificial
  probe
  misc_feature (1)..(25): SEQ ID NO: 2386; WAN024BHC_at; Start 1759; Stop 1783
gcgcgtgctgcaggtatccacatga

SEQ ID NO: 81159 - DNA, 25 bp, Artificial
  probe
  misc_feature (1)..(25): SEQ ID NO: 2386; WAN024BHC_at; Start 760; Stop 784
cctattccagaagaaaagtgggtgg

SEQ ID NO: 81160 - DNA, 25 bp, Artificial
  probe
  misc_feature (1)..(25): SEQ ID NO: 2386; WAN024BHC_at; Start 622; Stop 646
gaagaaaaagctcgccaaaaggctg

SEQ ID NO: 81161 - DNA, 25 bp, Artificial
  probe
  misc_feature (1)..(25): SEQ ID NO: 2386; WAN024BHC_at; Start 1698; Stop 1722
tgacctcatgatggtggccagcaag

SEQ ID NO: 81162 - DNA, 25 bp, Artificial
  probe
  misc_feature (1)..(25): SEQ ID NO: 2386; WAN024BHC_at; Start 1174; Stop 1198
tccctaatcggaattgaagtgccca

SEQ ID NO: 81163 - DNA, 25 bp, Artificial
  probe
  misc_feature (1)..(25): SEQ ID NO: 2386; WAN024BHC_at; Start 547; Stop 571
gaatttttcagtagaggctttgcca

SEQ ID NO: 81164 - DNA, 25 bp, Artificial
  probe
  misc_feature (1)..(25): SEQ ID NO: 2386; WAN024BHC_at; Start 1052; Stop 1076
ccaagtatgaagtcaagccggctgt

SEQ ID NO: 81165 - DNA, 25 bp, Artificial
  probe
  misc_feature (1)..(25): SEQ ID NO: 2386; WAN024BHC_at; Start 1833; Stop 1857
ggccaatgttccatctcgtgtagca

SEQ ID NO: 81166 - DNA, 25 bp, Artificial
  probe
  misc_feature (1)..(25): SEQ ID NO: 2386; WAN024BHC_at; Start 1137; Stop 1161
caaagatgtccggattgaagcacca

SEQ ID NO: 81167 - DNA, 25 bp, Artificial
  probe
  misc_feature (1)..(25): SEQ ID NO: 2386; WAN024BHC_at; Start 1779; Stop 1803
catgattcttgcaactcagcgtcca

SEQ ID NO: 81168 - DNA, 25 bp, Artificial
  probe
  misc_feature (1)..(25): SEQ ID NO: 2386; WAN024BHC_at; Start 1078; Stop 1102
ggtgtaagggtcaaccgcatttcca

SEQ ID NO: 81169 - DNA, 25 bp, Artificial
  probe
  misc_feature (1)..(25): SEQ ID NO: 2386; WAN024BHC_at; Start 1639; Stop 1663
cagtctgagtacaagcaaattccgc

SEQ ID NO: 81170 - DNA, 25 bp, Artificial
  probe
  misc_feature (1)..(25): SEQ ID NO: 2386; WAN024BHC_at; Start 374; Stop 398
cagatctgactggttttcgaacgac

SEQ ID NO: 81171 - DNA, 25 bp, Artificial
  probe
  misc_feature (1)..(25): SEQ ID NO: 2386; WAN024BHC_at; Start 32; Stop 56
ggagaccgtctaaagcagaactgga

SEQ ID NO: 81172 - DNA, 25 bp, Artificial
  probe
  misc_feature (1)..(25): SEQ ID NO: 2386; WAN024BHC_at; Start 778; Stop 802
tgggtggaaccagaaatcatcctgc

SEQ ID NO: 81173 - DNA, 25 bp, Artificial
  probe
  misc_feature (1)..(25): SEQ ID NO: 2386; WAN024BHC_at; Start 15; Stop 39
tacaagtacaacaagacggagaccg

SEQ ID NO: 81174 - DNA, 25 bp, Artificial
  probe
  misc_feature (1)..(25): SEQ ID NO: 2386; WAN024BHC_at; Start 342; Stop 366
cgttctaaaagggaccatggctcag

SEQ ID NO: 81175 - DNA, 25 bp, Artificial
  probe
  misc_feature (1)..(25): SEQ ID NO: 2386; WAN024BHC_at; Start 235; Stop 259
tggatacgaaaacaggaaggactct

SEQ ID NO: 81176 - DNA, 25 bp, Artificial
  probe
  misc_feature (1)..(25): SEQ ID NO: 2386; WAN024BHC_at; Start 161; Stop 185
taattcgcttgctagtgggtagcct

SEQ ID NO: 81177 - DNA, 25 bp, Artificial
  probe
  misc_feature (1)..(25): SEQ ID NO: 2386; WAN024BHC_at; Start 2153; Stop 2177
ttatcgaaacacagaaagccagtgc

SEQ ID NO: 81178 - DNA, 25 bp, Artificial
  probe
  misc_feature (1)..(25): SEQ ID NO: 2386; WAN024BHC_at; Start 2035; Stop 2059
caggcagatgcagactacgatgaga

SEQ ID NO: 81179 - DNA, 25 bp, Artificial
  probe
  misc_feature (1)..(25): SEQ ID NO: 2386; WAN024BHC_at; Start 1874; Stop 1898
gaacagactcccgtacgattttgga

SEQ ID NO: 81180 - DNA, 25 bp, Artificial
  probe
  misc_feature (1)..(25): SEQ ID NO: 2386; WAN024BHC_at; Start 1856; Stop 1880
catttgcggtttcatcaggaacaga

SEQ ID NO: 81181 - DNA, 25 bp, Artificial
  probe
  misc_feature (1)..(25): SEQ ID NO: 2386; WAN024BHC_at; Start 1989; Stop 2013
tatctcggatgacgatgttgagcgc

SEQ ID NO: 81182 - DNA, 25 bp, Artificial
  probe
  misc_feature (1)..(25): SEQ ID NO: 2386; WAN024BHC_at; Start 865; Stop 889
gatttttcagccaaagaagcccttg

SEQ ID NO: 81183 - DNA, 25 bp, Artificial
  probe
  misc_feature (1)..(25): SEQ ID NO: 2386; WAN024BHC_at; Start 505; Stop 529
ggttctctcctagtcagcccttggt

SEQ ID NO: 81184 - DNA, 25 bp, Artificial
  probe
  misc_feature (1)..(25): SEQ ID NO: 2386; WAN024BHC_at; Start 356; Stop 380
ccatggctcaggttgtgacagatct

SEQ ID NO: 81185 - DNA, 25 bp, Artificial
  probe
  misc_feature (1)..(25): SEQ ID NO: 2386; WAN024BHC_at; Start 1567; Stop 1591
tatgaactctttgccaaggtgggag

SEQ ID NO: 81186 - DNA, 25 bp, Artificial
  probe
  misc_feature (1)..(25): SEQ ID NO: 2386; WAN024BHC_at; Start 1737; Stop 1761
tatcatccgtcttgggcagaaggcg

SEQ ID NO: 81187 - DNA, 25 bp, Artificial
  probe
  misc_feature (1)..(25): SEQ ID NO: 2386; WAN024BHC_at; Start 2201; Stop 2225
cagttggatttaaccgtgcgacccg

SEQ ID NO: 81188 - DNA, 25 bp, Artificial
  probe
  misc_feature (1)..(25): SEQ ID NO: 3118; WAN024BHD_at; Start 51; Stop 75
gtttgcacaagctatgtctttgtta

SEQ ID NO: 81189 - DNA, 25 bp, Artificial
  probe
  misc_feature (1)..(25): SEQ ID NO: 3118; WAN024BHD_at; Start 22; Stop 46
tttgtttatggagtagacgcaagtg

SEQ ID NO: 81190 - DNA, 25 bp, Artificial
  probe
  misc_feature (1)..(25): SEQ ID NO: 3118; WAN024BHD_at; Start 168; Stop 192
gaatgccattcttgaaattgtcggt

SEQ ID NO: 81191 - DNA, 25 bp, Artificial
  probe
  misc_feature (1)..(25): SEQ ID NO: 3118; WAN024BHD_at; Start 55; Stop 79
gcacaagctatgtctttgttacaga

SEQ ID NO: 81192 - DNA, 25 bp, Artificial
  probe
  misc_feature (1)..(25): SEQ ID NO: 3118; WAN024BHD_at; Start 57; Stop 81
acaagctatgtctttgttacagaag

SEQ ID NO: 81193 - DNA, 25 bp, Artificial
  probe
  misc_feature (1)..(25): SEQ ID NO: 3118; WAN024BHD_at; Start 59; Stop 83
aagctatgtctttgttacagaaggg

SEQ ID NO: 81194 - DNA, 25 bp, Artificial
  probe
  misc_feature (1)..(25): SEQ ID NO: 3118; WAN024BHD_at; Start 163; Stop 187
gttcggaatgccattcttgaaattg

SEQ ID NO: 81195 - DNA, 25 bp, Artificial
  probe
  misc_feature (1)..(25): SEQ ID NO: 3118; WAN024BHD_at; Start 170; Stop 194
atgccattcttgaaattgtcggtgg

SEQ ID NO: 81196 - DNA, 25 bp, Artificial
  probe
  misc_feature (1)..(25): SEQ ID NO: 3118; WAN024BHD_at; Start 164; Stop 188
ttcggaatgccattcttgaaattgt

SEQ ID NO: 81197 - DNA, 25 bp, Artificial
  probe
  misc_feature (1)..(25): SEQ ID NO: 3118; WAN024BHD_at; Start 62; Stop 86
ctatgtctttgttacagaagggatt

SEQ ID NO: 81198 - DNA, 25 bp, Artificial
  probe
  misc_feature (1)..(25): SEQ ID NO: 3118; WAN024BHD_at; Start 61; Stop 85
gctatgtctttgttacagaagggat

SEQ ID NO: 81199 - DNA, 25 bp, Artificial
  probe
  misc_feature (1)..(25): SEQ ID NO: 3118; WAN024BHD_at; Start 66; Stop 90
gtctttgttacagaagggattgatt

SEQ ID NO: 81200 - DNA, 25 bp, Artificial
  probe
  misc_feature (1)..(25): SEQ ID NO: 3118; WAN024BHD_at; Start 52; Stop 76
tttgcacaagctatgtctttgttac

SEQ ID NO: 81201 - DNA, 25 bp, Artificial
  probe
  misc_feature (1)..(25): SEQ ID NO: 3118; WAN024BHD_at; Start 167; Stop 191
ggaatgccattcttgaaattgtcgg

SEQ ID NO: 81202 - DNA, 25 bp, Artificial
  probe
  misc_feature (1)..(25): SEQ ID NO: 3118; WAN024BHD_at; Start 166; Stop 190
cggaatgccattcttgaaattgtcg

SEQ ID NO: 81203 - DNA, 25 bp, Artificial
  probe
  misc_feature (1)..(25): SEQ ID NO: 3118; WAN024BHD_at; Start 162; Stop 186
tgttcggaatgccattcttgaaatt

SEQ ID NO: 81204 - DNA, 25 bp, Artificial
  probe
  misc_feature (1)..(25): SEQ ID NO: 3118; WAN024BHD_at; Start 67; Stop 91
tctttgttacagaagggattgattg

SEQ ID NO: 81205 - DNA, 25 bp, Artificial
  probe
  misc_feature (1)..(25): SEQ ID NO: 3118; WAN024BHD_at; Start 50; Stop 74
tgtttgcacaagctatgtctttgtt

SEQ ID NO: 81206 - DNA, 25 bp, Artificial
  probe
  misc_feature (1)..(25): SEQ ID NO: 3118; WAN024BHD_at; Start 165; Stop 189
tcggaatgccattcttgaaattgtc

SEQ ID NO: 81207 - DNA, 25 bp, Artificial
  probe
  misc_feature (1)..(25): SEQ ID NO: 3118; WAN024BHD_at; Start 65; Stop 89
tgtctttgttacagaagggattgat

SEQ ID NO: 81208 - DNA, 25 bp, Artificial
  probe
  misc_feature (1)..(25): SEQ ID NO: 3118; WAN024BHD_at; Start 20; Stop 44
gttttgtttatggagtagacgcaag

SEQ ID NO: 81209 - DNA, 25 bp, Artificial
  probe
  misc_feature (1)..(25): SEQ ID NO: 3118; WAN024BHD_at; Start 169; Stop 193
aatgccattcttgaaattgtcggtg

SEQ ID NO: 81210 - DNA, 25 bp, Artificial
  probe
  misc_feature (1)..(25): SEQ ID NO: 3118; WAN024BHD_at; Start 53; Stop 77
ttgcacaagctatgtctttgttaca

SEQ ID NO: 81211 - DNA, 25 bp, Artificial
  probe
  misc_feature (1)..(25): SEQ ID NO: 3118; WAN024BHD_at; Start 23; Stop 47
ttgtttatggagtagacgcaagtgc

SEQ ID NO: 81212 - DNA, 25 bp, Artificial
  probe
  misc_feature (1)..(25): SEQ ID NO: 3118; WAN024BHD_at; Start 21; Stop 45
ttttgtttatggagtagacgcaagt

SEQ ID NO: 81213 - DNA, 25 bp, Artificial
  probe
  misc_feature (1)..(25): SEQ ID NO: 3118; WAN024BHD_at; Start 56; Stop 80
cacaagctatgtctttgttacagaa

SEQ ID NO: 81214 - DNA, 25 bp, Artificial
  probe
  misc_feature (1)..(25): SEQ ID NO: 3118; WAN024BHD_at; Start 49; Stop 73
atgtttgcacaagctatgtctttgt

SEQ ID NO: 81215 - DNA, 25 bp, Artificial
  probe
  misc_feature (1)..(25): SEQ ID NO: 3118; WAN024BHD_at; Start 60; Stop 84
agctatgtctttgttacagaaggga

SEQ ID NO: 81216 - DNA, 25 bp, Artificial
  probe
  misc_feature (1)..(25): SEQ ID NO: 3118; WAN024BHD_at; Start 54; Stop 78
tgcacaagctatgtctttgttacag

SEQ ID NO: 81217 - DNA, 25 bp, Artificial
  probe
  misc_feature (1)..(25): SEQ ID NO: 3118; WAN024BHD_at; Start 19; Stop 43
ggttttgtttatggagtagacgcaa

SEQ ID NO: 81218 - DNA, 25 bp, Artificial
  probe
  misc_feature (1)..(25): SEQ ID NO: 3118; WAN024BHD_at; Start 63; Stop 87
tatgtctttgttacagaagggattg

SEQ ID NO: 81219 - DNA, 25 bp, Artificial
  probe
  misc_feature (1)..(25): SEQ ID NO: 3118; WAN024BHD_at; Start 58; Stop 82
caagctatgtctttgttacagaagg

SEQ ID NO: 81220 - DNA, 25 bp, Artificial
  probe
  misc_feature (1)..(25): SEQ ID NO: 3118; WAN024BHD_at; Start 64; Stop 88
atgtctttgttacagaagggattga

SEQ ID NO: 81221 - DNA, 25 bp, Artificial
  probe
  misc_feature (1)..(25): SEQ ID NO: 3118; WAN024BHD_at; Start 18; Stop 42
aggttttgtttatggagtagacgca

SEQ ID NO: 81222 - DNA, 25 bp, Artificial
  probe
  misc_feature (1)..(25): SEQ ID NO: 1309; WAN024BHE_at; Start 193; Stop 217
gttagaacaggaaaagagacagata

SEQ ID NO: 81223 - DNA, 25 bp, Artificial
  probe
  misc_feature (1)..(25): SEQ ID NO: 1309; WAN024BHE_at; Start 216; Stop 240
tatcactacaagttatcagcaacat

SEQ ID NO: 81224 - DNA, 25 bp, Artificial
  probe
  misc_feature (1)..(25): SEQ ID NO: 1309; WAN024BHE_at; Start 192; Stop 216
ggttagaacaggaaaagagacagat

SEQ ID NO: 81225 - DNA, 25 bp, Artificial
  probe
  misc_feature (1)..(25): SEQ ID NO: 1309; WAN024BHE_at; Start 205; Stop 229
aaagagacagatatcactacaagtt

SEQ ID NO: 81226 - DNA, 25 bp, Artificial
  probe
  misc_feature (1)..(25): SEQ ID NO: 1309; WAN024BHE_at; Start 287; Stop 311
aaaagaaaattgaagagctacatac

SEQ ID NO: 81227 - DNA, 25 bp, Artificial
  probe
  misc_feature (1)..(25): SEQ ID NO: 1309; WAN024BHE_at; Start 212; Stop 236
cagatatcactacaagttatcagca

SEQ ID NO: 81228 - DNA, 25 bp, Artificial
  probe
  misc_feature (1)..(25): SEQ ID NO: 1309; WAN024BHE_at; Start 218; Stop 242
tcactacaagttatcagcaacatct

SEQ ID NO: 81229 - DNA, 25 bp, Artificial
  probe
  misc_feature (1)..(25): SEQ ID NO: 1309; WAN024BHE_at; Start 204; Stop 228
aaaagagacagatatcactacaagt

SEQ ID NO: 81230 - DNA, 25 bp, Artificial
  probe
  misc_feature (1)..(25): SEQ ID NO: 1309; WAN024BHE_at; Start 227; Stop 251
gttatcagcaacatcttaaaagact

SEQ ID NO: 81231 - DNA, 25 bp, Artificial
  probe
  misc_feature (1)..(25): SEQ ID NO: 1309; WAN024BHE_at; Start 224; Stop 248
caagttatcagcaacatcttaaaag

SEQ ID NO: 81232 - DNA, 25 bp, Artificial
  probe
  misc_feature (1)..(25): SEQ ID NO: 1309; WAN024BHE_at; Start 203; Stop 227
gaaaagagacagatatcactacaag

SEQ ID NO: 81233 - DNA, 25 bp, Artificial
  probe
  misc_feature (1)..(25): SEQ ID NO: 1309; WAN024BHE_at; Start 200; Stop 224
caggaaaagagacagatatcactac

SEQ ID NO: 81234 - DNA, 25 bp, Artificial
  probe
  misc_feature (1)..(25): SEQ ID NO: 1309; WAN024BHE_at; Start 113; Stop 137
attatgaagcagcttttcaaaagcg

SEQ ID NO: 81235 - DNA, 25 bp, Artificial
  probe
  misc_feature (1)..(25): SEQ ID NO: 1309; WAN024BHE_at; Start 109; Stop 133
gtaaattatgaagcagcttttcaaa

SEQ ID NO: 81236 - DNA, 25 bp, Artificial
  probe
  misc_feature (1)..(25): SEQ ID NO: 1309; WAN024BHE_at; Start 222; Stop 246
tacaagttatcagcaacatcttaaa

SEQ ID NO: 81237 - DNA, 25 bp, Artificial
  probe
  misc_feature (1)..(25): SEQ ID NO: 1309; WAN024BHE_at; Start 214; Stop 238
gatatcactacaagttatcagcaac

SEQ ID NO: 81238 - DNA, 25 bp, Artificial
  probe
  misc_feature (1)..(25): SEQ ID NO: 1309; WAN024BHE_at; Start 195; Stop 219
tagaacaggaaaagagacagatatc

SEQ ID NO: 81239 - DNA, 25 bp, Artificial
  probe
  misc_feature (1)..(25): SEQ ID NO: 1309; WAN024BHE_at; Start 201; Stop 225
aggaaaagagacagatatcactaca

SEQ ID NO: 81240 - DNA, 25 bp, Artificial
  probe
  misc_feature (1)..(25): SEQ ID NO: 1309; WAN024BHE_at; Start 208; Stop 232
gagacagatatcactacaagttatc

SEQ ID NO: 81241 - DNA, 25 bp, Artificial
  probe
  misc_feature (1)..(25): SEQ ID NO: 1309; WAN024BHE_at; Start 202; Stop 226
ggaaaagagacagatatcactacaa

SEQ ID NO: 81242 - DNA, 25 bp, Artificial
  probe
  misc_feature (1)..(25): SEQ ID NO: 1309; WAN024BHE_at; Start 189; Stop 213
agaggttagaacaggaaaagagaca

SEQ ID NO: 81243 - DNA, 25 bp, Artificial
  probe
  misc_feature (1)..(25): SEQ ID NO: 1309; WAN024BHE_at; Start 194; Stop 218
ttagaacaggaaaagagacagatat

SEQ ID NO: 81244 - DNA, 25 bp, Artificial
  probe
  misc_feature (1)..(25): SEQ ID NO: 1309; WAN024BHE_at; Start 283; Stop 307
agtcaaaagaaaattgaagagctac

SEQ ID NO: 81245 - DNA, 25 bp, Artificial
  probe
  misc_feature (1)..(25): SEQ ID NO: 1309; WAN024BHE_at; Start 185; Stop 209
ttacagaggttagaacaggaaaaga

SEQ ID NO: 81246 - DNA, 25 bp, Artificial
  probe
  misc_feature (1)..(25): SEQ ID NO: 1309; WAN024BHE_at; Start 206; Stop 230
aagagacagatatcactacaagtta

SEQ ID NO: 81247 - DNA, 25 bp, Artificial
  probe
  misc_feature (1)..(25): SEQ ID NO: 1309; WAN024BHE_at; Start 219; Stop 243
cactacaagttatcagcaacatctt

SEQ ID NO: 81248 - DNA, 25 bp, Artificial
  probe
  misc_feature (1)..(25): SEQ ID NO: 1309; WAN024BHE_at; Start 190; Stop 214
gaggttagaacaggaaaagagacag

SEQ ID NO: 81249 - DNA, 25 bp, Artificial
  probe
  misc_feature (1)..(25): SEQ ID NO: 1309; WAN024BHE_at; Start 210; Stop 234
gacagatatcactacaagttatcag

SEQ ID NO: 81250 - DNA, 25 bp, Artificial
  probe
  misc_feature (1)..(25): SEQ ID NO: 1309; WAN024BHE_at; Start 285; Stop 309
tcaaaagaaaattgaagagctacat

SEQ ID NO: 81251 - DNA, 25 bp, Artificial
  probe
  misc_feature (1)..(25): SEQ ID NO: 1309; WAN024BHE_at; Start 186; Stop 210
tacagaggttagaacaggaaaagag

SEQ ID NO: 81252 - DNA, 25 bp, Artificial
  probe
  misc_feature (1)..(25): SEQ ID NO: 1309; WAN024BHE_at; Start 226; Stop 250
agttatcagcaacatcttaaaagac

SEQ ID NO: 81253 - DNA, 25 bp, Artificial
  probe
  misc_feature (1)..(25): SEQ ID NO: 1309; WAN024BHE_at; Start 197; Stop 221
gaacaggaaaagagacagatatcac

SEQ ID NO: 81254 - DNA, 25 bp, Artificial
  probe
  misc_feature (1)..(25): SEQ ID NO: 1309; WAN024BHE_at; Start 188; Stop 212
cagaggttagaacaggaaaagagac

SEQ ID NO: 81255 - DNA, 25 bp, Artificial
  probe
  misc_feature (1)..(25): SEQ ID NO: 1309; WAN024BHE_at; Start 198; Stop 222
aacaggaaaagagacagatatcact

SEQ ID NO: 81256 - DNA, 25 bp, Artificial
  probe
  misc_feature (1)..(25): SEQ ID NO: 6980; WAN024BHF_at; Start 587; Stop 611
tatcgatcacacgtgatgtttctgg

SEQ ID NO: 81257 - DNA, 25 bp, Artificial
  probe
  misc_feature (1)..(25): SEQ ID NO: 6980; WAN024BHF_at; Start 117; Stop 141
ggagctagctcaagaaattattcga

SEQ ID NO: 81258 - DNA, 25 bp, Artificial
  probe
  misc_feature (1)..(25): SEQ ID NO: 6980; WAN024BHF_at; Start 1136; Stop 1160
tcatgtttgaagtaccgagtcagga

SEQ ID NO: 81259 - DNA, 25 bp, Artificial
  probe
  misc_feature (1)..(25): SEQ ID NO: 6980; WAN024BHF_at; Start 573; Stop 597
aaagagcgagaatgtatcgatcaca

SEQ ID NO: 81260 - DNA, 25 bp, Artificial
  probe
  misc_feature (1)..(25): SEQ ID NO: 6980; WAN024BHF_at; Start 468; Stop 492
ggatgtggaaaatatcctcctcaaa

SEQ ID NO: 81261 - DNA, 25 bp, Artificial
  probe
  misc_feature (1)..(25): SEQ ID NO: 6980; WAN024BHF_at; Start 766; Stop 790
gaaatcgtcaaacaacgtcttggag

SEQ ID NO: 81262 - DNA, 25 bp, Artificial
  probe
  misc_feature (1)..(25): SEQ ID NO: 6980; WAN024BHF_at; Start 1108; Stop 1132
tctattatcgaagaaacaatgctag

SEQ ID NO: 81263 - DNA, 25 bp, Artificial
  probe
  misc_feature (1)..(25): SEQ ID NO: 6980; WAN024BHF_at; Start 291; Stop 315
tttccacgatacacgcgaagagtca

SEQ ID NO: 81264 - DNA, 25 bp, Artificial
  probe
  misc_feature (1)..(25): SEQ ID NO: 6980; WAN024BHF_at; Start 513; Stop 537
taacattgagcgtgcagaacgtggg

SEQ ID NO: 81265 - DNA, 25 bp, Artificial
  probe
  misc_feature (1)..(25): SEQ ID NO: 6980; WAN024BHF_at; Start 669; Stop 693
tcctcaaggtggtcgcaagcatcca

SEQ ID NO: 81266 - DNA, 25 bp, Artificial
  probe
  misc_feature (1)..(25): SEQ ID NO: 6980; WAN024BHF_at; Start 635; Stop 659
tcaagattatcgagggaaccgtcgc

SEQ ID NO: 81267 - DNA, 25 bp, Artificial
  probe
  misc_feature (1)..(25): SEQ ID NO: 6980; WAN024BHF_at; Start 527; Stop 551
cagaacgtgggattatctacgtgga

SEQ ID NO: 81268 - DNA, 25 bp, Artificial
  probe
  misc_feature (1)..(25): SEQ ID NO: 6980; WAN024BHF_at; Start 641; Stop 665
ttatcgagggaaccgtcgcaagcgt

SEQ ID NO: 81269 - DNA, 25 bp, Artificial
  probe
  misc_feature (1)..(25): SEQ ID NO: 6980; WAN024BHF_at; Start 480; Stop 504
tatcctcctcaaactcttgcaggct

SEQ ID NO: 81270 - DNA, 25 bp, Artificial
  probe
  misc_feature (1)..(25): SEQ ID NO: 6980; WAN024BHF_at; Start 106; Stop 130
aatgaatgcgtggagctagctcaag

SEQ ID NO: 81271 - DNA, 25 bp, Artificial
  probe
  misc_feature (1)..(25): SEQ ID NO: 6980; WAN024BHF_at; Start 424; Stop 448
attgcggatgcgacagctctgacgg

SEQ ID NO: 81272 - DNA, 25 bp, Artificial
  probe
  misc_feature (1)..(25): SEQ ID NO: 6980; WAN024BHF_at; Start 558; Stop 582
tgacaagattgctaaaaagagcgag

SEQ ID NO: 81273 - DNA, 25 bp, Artificial
  probe
  misc_feature (1)..(25): SEQ ID NO: 6980; WAN024BHF_at; Start 498; Stop 522
gcaggctgctgactttaacattgag

SEQ ID NO: 81274 - DNA, 25 bp, Artificial
  probe
  misc_feature (1)..(25): SEQ ID NO: 6980; WAN024BHF_at; Start 247; Stop 271
cgtgccttggcagtggcggtttata

SEQ ID NO: 81275 - DNA, 25 bp, Artificial
  probe
  misc_feature (1)..(25): SEQ ID NO: 6980; WAN024BHF_at; Start 1123; Stop 1147
acaatgctagatgtcatgtttgaag

SEQ ID NO: 81276 - DNA, 25 bp, Artificial
  probe
  misc_feature (1)..(25): SEQ ID NO: 6980; WAN024BHF_at; Start 986; Stop 1010
tggtcaaacagtaccaaaccttgct

SEQ ID NO: 81277 - DNA, 25 bp, Artificial
  probe
  misc_feature (1)..(25): SEQ ID NO: 6980; WAN024BHF_at; Start 1173; Stop 1197
ggtccgcatcactaaagaagctgtt

SEQ ID NO: 81278 - DNA, 25 bp, Artificial
  probe
  misc_feature (1)..(25): SEQ ID NO: 6980; WAN024BHF_at; Start 831; Stop 855
tgaaaacagctcttacatgcaagaa

SEQ ID NO: 81279 - DNA, 25 bp, Artificial
  probe
  misc_feature (1)..(25): SEQ ID NO: 6980; WAN024BHF_at; Start 257; Stop 281
cagtggcggtttataatcattacaa

SEQ ID NO: 81280 - DNA, 25 bp, Artificial
  probe
  misc_feature (1)..(25): SEQ ID NO: 6980; WAN024BHF_at; Start 816; Stop 840
taacaaggcgattgatgaaaacagc

SEQ ID NO: 81281 - DNA, 25 bp, Artificial
  probe
  misc_feature (1)..(25): SEQ ID NO: 6980; WAN024BHF_at; Start 849; Stop 873
gcaagaaatcatcgcagaggatatt

SEQ ID NO: 81282 - DNA, 25 bp, Artificial
  probe
  misc_feature (1)..(25): SEQ ID NO: 6980; WAN024BHF_at; Start 384; Stop 408
tgctcagaccttggctaagagcttg

SEQ ID NO: 81283 - DNA, 25 bp, Artificial
  probe
  misc_feature (1)..(25): SEQ ID NO: 6980; WAN024BHF_at; Start 656; Stop 680
tcgcaagcgtacctcctcaaggtgg

SEQ ID NO: 81284 - DNA, 25 bp, Artificial
  probe
  misc_feature (1)..(25): SEQ ID NO: 6980; WAN024BHF_at; Start 413; Stop 437
taccttttgcgattgcggatgcgac

SEQ ID NO: 81285 - DNA, 25 bp, Artificial
  probe
  misc_feature (1)..(25): SEQ ID NO: 6980; WAN024BHF_at; Start 438; Stop 462
agctctgacggaggctggttatgta

SEQ ID NO: 81286 - DNA, 25 bp, Artificial
  probe
  misc_feature (1)..(25): SEQ ID NO: 6980; WAN024BHF_at; Start 274; Stop 298
cattacaaacgcatcaatttccacg

SEQ ID NO: 81287 - DNA, 25 bp, Artificial
  probe
  misc_feature (1)..(25): SEQ ID NO: 6980; WAN024BHF_at; Start 748; Stop 772
gcctttgatggcattgaagaaatcg

SEQ ID NO: 81288 - DNA, 25 bp, Artificial
  probe
  misc_feature (1)..(25): SEQ ID NO: 6980; WAN024BHF_at; Start 780; Stop 804
acgtcttggagaaaaagtcatcgga

SEQ ID NO: 81289 - DNA, 25 bp, Artificial
  probe
  misc_feature (1)..(25): SEQ ID NO: 6980; WAN024BHF_at; Start 399; Stop 423
taagagcttgaatgtaccttttgcg

SEQ ID NO: 81290 - DNA, 25 bp, Artificial
  probe
  misc_feature (1)..(25): SEQ ID NO: 6727; WAN024BHG_at; Start 80; Stop 104
tcgctgggaacaacgcctttatctg

SEQ ID NO: 81291 - DNA, 25 bp, Artificial
  probe
  misc_feature (1)..(25): SEQ ID NO: 6727; WAN024BHG_at; Start 103; Stop 127
tgtaatgaatgtgtagagttagccc

SEQ ID NO: 81292 - DNA, 25 bp, Artificial
  probe
  misc_feature (1)..(25): SEQ ID NO: 6727; WAN024BHG_at; Start 93; Stop 117
cgcctttatctgtaatgaatgtgta

SEQ ID NO: 81293 - DNA, 25 bp, Artificial
  probe
  misc_feature (1)..(25): SEQ ID NO: 6727; WAN024BHG_at; Start 95; Stop 119
cctttatctgtaatgaatgtgtaga

SEQ ID NO: 81294 - DNA, 25 bp, Artificial
  probe
  misc_feature (1)..(25): SEQ ID NO: 6727; WAN024BHG_at; Start 116; Stop 140
tagagttagcccaggaaatcattcg

SEQ ID NO: 81295 - DNA, 25 bp, Artificial
  probe
  misc_feature (1)..(25): SEQ ID NO: 6727; WAN024BHG_at; Start 106; Stop 130
aatgaatgtgtagagttagcccagg

SEQ ID NO: 81296 - DNA, 25 bp, Artificial
  probe
  misc_feature (1)..(25): SEQ ID NO: 6727; WAN024BHG_at; Start 112; Stop 136
tgtgtagagttagcccaggaaatca

SEQ ID NO: 81297 - DNA, 25 bp, Artificial
  probe
  misc_feature (1)..(25): SEQ ID NO: 6727; WAN024BHG_at; Start 108; Stop 132
tgaatgtgtagagttagcccaggaa

SEQ ID NO: 81298 - DNA, 25 bp, Artificial
  probe
  misc_feature (1)..(25): SEQ ID NO: 6727; WAN024BHG_at; Start 105; Stop 129
taatgaatgtgtagagttagcccag

SEQ ID NO: 81299 - DNA, 25 bp, Artificial
  probe
  misc_feature (1)..(25): SEQ ID NO: 6727; WAN024BHG_at; Start 87; Stop 111
gaacaacgcctttatctgtaatgaa

SEQ ID NO: 81300 - DNA, 25 bp, Artificial
  probe
  misc_feature (1)..(25): SEQ ID NO: 6727; WAN024BHG_at; Start 110; Stop 134
aatgtgtagagttagcccaggaaat

SEQ ID NO: 81301 - DNA, 25 bp, Artificial
  probe
  misc_feature (1)..(25): SEQ ID NO: 6727; WAN024BHG_at; Start 8; Stop 32
caactaggaataatgatatgatggt

SEQ ID NO: 81302 - DNA, 25 bp, Artificial
  probe
  misc_feature (1)..(25): SEQ ID NO: 6727; WAN024BHG_at; Start 84; Stop 108
tgggaacaacgcctttatctgtaat

SEQ ID NO: 81303 - DNA, 25 bp, Artificial
  probe
  misc_feature (1)..(25): SEQ ID NO: 6727; WAN024BHG_at; Start 78; Stop 102
aatcgctgggaacaacgcctttatc

SEQ ID NO: 81304 - DNA, 25 bp, Artificial
  probe
  misc_feature (1)..(25): SEQ ID NO: 6727; WAN024BHG_at; Start 126; Stop 150
ccaggaaatcattcgggaagagttg

SEQ ID NO: 81305 - DNA, 25 bp, Artificial
  probe
  misc_feature (1)..(25): SEQ ID NO: 6727; WAN024BHG_at; Start 91; Stop 115
aacgcctttatctgtaatgaatgtg

SEQ ID NO: 81306 - DNA, 25 bp, Artificial
  probe
  misc_feature (1)..(25): SEQ ID NO: 6727; WAN024BHG_at; Start 122; Stop 146
tagcccaggaaatcattcgggaaga

SEQ ID NO: 81307 - DNA, 25 bp, Artificial
  probe
  misc_feature (1)..(25): SEQ ID NO: 6727; WAN024BHG_at; Start 2; Stop 26
tgcctacaactaggaataatgatat

SEQ ID NO: 81308 - DNA, 25 bp, Artificial
  probe
  misc_feature (1)..(25): SEQ ID NO: 6727; WAN024BHG_at; Start 147; Stop 171
gttggcggaagaagtcttggcagac

SEQ ID NO: 81309 - DNA, 25 bp, Artificial
  probe
  misc_feature (1)..(25): SEQ ID NO: 6727; WAN024BHG_at; Start 109; Stop 133
gaatgtgtagagttagcccaggaaa

SEQ ID NO: 81310 - DNA, 25 bp, Artificial
  probe
  misc_feature (1)..(25): SEQ ID NO: 6727; WAN024BHG_at; Start 119; Stop 143
agttagcccaggaaatcattcggga

SEQ ID NO: 81311 - DNA, 25 bp, Artificial
  probe
  misc_feature (1)..(25): SEQ ID NO: 6727; WAN024BHG_at; Start 117; Stop 141
agagttagcccaggaaatcattcgg

SEQ ID NO: 81312 - DNA, 25 bp, Artificial
  probe
  misc_feature (1)..(25): SEQ ID NO: 6727; WAN024BHG_at; Start 90; Stop 114
caacgcctttatctgtaatgaatgt

SEQ ID NO: 81313 - DNA, 25 bp, Artificial
  probe
  misc_feature (1)..(25): SEQ ID NO: 6727; WAN024BHG_at; Start 124; Stop 148
gcccaggaaatcattcgggaagagt

SEQ ID NO: 81314 - DNA, 25 bp, Artificial
  probe
  misc_feature (1)..(25): SEQ ID NO: 6727; WAN024BHG_at; Start 138; Stop 162
tcgggaagagttggcggaagaagtc

SEQ ID NO: 81315 - DNA, 25 bp, Artificial
  probe
  misc_feature (1)..(25): SEQ ID NO: 6727; WAN024BHG_at; Start 81; Stop 105
cgctgggaacaacgcctttatctgt

SEQ ID NO: 81316 - DNA, 25 bp, Artificial
  probe
  misc_feature (1)..(25): SEQ ID NO: 6727; WAN024BHG_at; Start 131; Stop 155
aaatcattcgggaagagttggcgga

SEQ ID NO: 81317 - DNA, 25 bp, Artificial
  probe
  misc_feature (1)..(25): SEQ ID NO: 6727; WAN024BHG_at; Start 120; Stop 144
gttagcccaggaaatcattcgggaa

SEQ ID NO: 81318 - DNA, 25 bp, Artificial
  probe
  misc_feature (1)..(25): SEQ ID NO: 6727; WAN024BHG_at; Start 86; Stop 110
ggaacaacgcctttatctgtaatga

SEQ ID NO: 81319 - DNA, 25 bp, Artificial
  probe
  misc_feature (1)..(25): SEQ ID NO: 6727; WAN024BHG_at; Start 125; Stop 149
cccaggaaatcattcgggaagagtt

SEQ ID NO: 81320 - DNA, 25 bp, Artificial
  probe
  misc_feature (1)..(25): SEQ ID NO: 6727; WAN024BHG_at; Start 4; Stop 28
cctacaactaggaataatgatatga

SEQ ID NO: 81321 - DNA, 25 bp, Artificial
  probe
  misc_feature (1)..(25): SEQ ID NO: 6727; WAN024BHG_at; Start 85; Stop 109
gggaacaacgcctttatctgtaatg

SEQ ID NO: 81322 - DNA, 25 bp, Artificial
  probe
  misc_feature (1)..(25): SEQ ID NO: 6727; WAN024BHG_at; Start 132; Stop 156
aatcattcgggaagagttggcggaa

SEQ ID NO: 81323 - DNA, 25 bp, Artificial
  probe
  misc_feature (1)..(25): SEQ ID NO: 6727; WAN024BHG_at; Start 118; Stop 142
gagttagcccaggaaatcattcggg

SEQ ID NO: 81324 - DNA, 25 bp, Artificial
  probe
  misc_feature (1)..(25): SEQ ID NO: 3123; WAN024BHH_at; Start 819; Stop 843
taaggcgattgacgaaaacagctca

SEQ ID NO: 81325 - DNA, 25 bp, Artificial
  probe
  misc_feature (1)..(25): SEQ ID NO: 3123; WAN024BHH_at; Start 857; Stop 881
tcatcgctgaagacattcaaaaatt

SEQ ID NO: 81326 - DNA, 25 bp, Artificial
  probe
  misc_feature (1)..(25): SEQ ID NO: 3123; WAN024BHH_at; Start 854; Stop 878
aaatcatcgctgaagacattcaaaa

SEQ ID NO: 81327 - DNA, 25 bp, Artificial
  probe
  misc_feature (1)..(25): SEQ ID NO: 3123; WAN024BHH_at; Start 750; Stop 774
ttttgatggtattgaagaaattgtc

SEQ ID NO: 81328 - DNA, 25 bp, Artificial
  probe
  misc_feature (1)..(25): SEQ ID NO: 3123; WAN024BHH_at; Start 856; Stop 880
atcatcgctgaagacattcaaaaat

SEQ ID NO: 81329 - DNA, 25 bp, Artificial
  probe
  misc_feature (1)..(25): SEQ ID NO: 3123; WAN024BHH_at; Start 861; Stop 885
cgctgaagacattcaaaaatttggt

SEQ ID NO: 81330 - DNA, 25 bp, Artificial
  probe
  misc_feature (1)..(25): SEQ ID NO: 3123; WAN024BHH_at; Start 852; Stop 876
agaaatcatcgctgaagacattcaa

SEQ ID NO: 81331 - DNA, 25 bp, Artificial
  probe
  misc_feature (1)..(25): SEQ ID NO: 3123; WAN024BHH_at; Start 853; Stop 877
gaaatcatcgctgaagacattcaaa

SEQ ID NO: 81332 - DNA, 25 bp, Artificial
  probe
  misc_feature (1)..(25): SEQ ID NO: 3123; WAN024BHH_at; Start 1208; Stop 1232
ataaaccgatcctagaaacagccta

SEQ ID NO: 81333 - DNA, 25 bp, Artificial
  probe
  misc_feature (1)..(25): SEQ ID NO: 3123; WAN024BHH_at; Start 669; Stop 693
gcctcaaggtggacgcaaacatcca

SEQ ID NO: 81334 - DNA, 25 bp, Artificial
  probe
  misc_feature (1)..(25): SEQ ID NO: 3123; WAN024BHH_at; Start 851; Stop 875
aagaaatcatcgctgaagacattca

SEQ ID NO: 81335 - DNA, 25 bp, Artificial
  probe
  misc_feature (1)..(25): SEQ ID NO: 3123; WAN024BHH_at; Start 667; Stop 691
ccgcctcaaggtggacgcaaacatc

SEQ ID NO: 81336 - DNA, 25 bp, Artificial
  probe
  misc_feature (1)..(25): SEQ ID NO: 3123; WAN024BHH_at; Start 668; Stop 692
cgcctcaaggtggacgcaaacatcc

SEQ ID NO: 81337 - DNA, 25 bp, Artificial
  probe
  misc_feature (1)..(25): SEQ ID NO: 3123; WAN024BHH_at; Start 748; Stop 772
gcttttgatggtattgaagaaattg

SEQ ID NO: 81338 - DNA, 25 bp, Artificial
  probe
  misc_feature (1)..(25): SEQ ID NO: 3123; WAN024BHH_at; Start 849; Stop 873
gcaagaaatcatcgctgaagacatt

SEQ ID NO: 81339 - DNA, 25 bp, Artificial
  probe
  misc_feature (1)..(25): SEQ ID NO: 3123; WAN024BHH_at; Start 749; Stop 773
cttttgatggtattgaagaaattgt

SEQ ID NO: 81340 - DNA, 25 bp, Artificial
  probe
  misc_feature (1)..(25): SEQ ID NO: 3123; WAN024BHH_at; Start 858; Stop 882
catcgctgaagacattcaaaaattt

SEQ ID NO: 81341 - DNA, 25 bp, Artificial
  probe
  misc_feature (1)..(25): SEQ ID NO: 3123; WAN024BHH_at; Start 859; Stop 883
atcgctgaagacattcaaaaatttg

SEQ ID NO: 81342 - DNA, 25 bp, Artificial
  probe
  misc_feature (1)..(25): SEQ ID NO: 3123; WAN024BHH_at; Start 747; Stop 771
tgcttttgatggtattgaagaaatt

SEQ ID NO: 81343 - DNA, 25 bp, Artificial
  probe
  misc_feature (1)..(25): SEQ ID NO: 3123; WAN024BHH_at; Start 850; Stop 874
caagaaatcatcgctgaagacattc

SEQ ID NO: 81344 - DNA, 25 bp, Artificial
  probe
  misc_feature (1)..(25): SEQ ID NO: 3123; WAN024BHH_at; Start 860; Stop 884
tcgctgaagacattcaaaaatttgg

SEQ ID NO: 81345 - DNA, 25 bp, Artificial
  probe
  misc_feature (1)..(25): SEQ ID NO: 3123; WAN024BHH_at; Start 855; Stop 879
aatcatcgctgaagacattcaaaaa

SEQ ID NO: 81346 - DNA, 25 bp, Artificial
  probe
  misc_feature (1)..(25): SEQ ID NO: 7028; WAN024BHI_at; Start 151; Stop 175
ctaaaaacagaagcaacttatagag

SEQ ID NO: 81347 - DNA, 25 bp, Artificial
  probe
  misc_feature (1)..(25): SEQ ID NO: 7028; WAN024BHI_at; Start 159; Stop 183
agaagcaacttatagagaagaaact

SEQ ID NO: 81348 - DNA, 25 bp, Artificial
  probe
  misc_feature (1)..(25): SEQ ID NO: 7028; WAN024BHI_at; Start 143; Stop 167
cagaacaactaaaaacagaagcaac

SEQ ID NO: 81349 - DNA, 25 bp, Artificial
  probe
  misc_feature (1)..(25): SEQ ID NO: 7028; WAN024BHI_at; Start 136; Stop 160
caaggatcagaacaactaaaaacag

SEQ ID NO: 81350 - DNA, 25 bp, Artificial
  probe
  misc_feature (1)..(25): SEQ ID NO: 7028; WAN024BHI_at; Start 90; Stop 114
tcttaaaaaaatagatcgactgtta

SEQ ID NO: 81351 - DNA, 25 bp, Artificial
  probe
  misc_feature (1)..(25): SEQ ID NO: 7028; WAN024BHI_at; Start 132; Stop 156
agatcaaggatcagaacaactaaaa

SEQ ID NO: 81352 - DNA, 25 bp, Artificial
  probe
  misc_feature (1)..(25): SEQ ID NO: 7028; WAN024BHI_at; Start 148; Stop 172
caactaaaaacagaagcaacttata

SEQ ID NO: 81353 - DNA, 25 bp, Artificial
  probe
  misc_feature (1)..(25): SEQ ID NO: 7028; WAN024BHI_at; Start 156; Stop 180
aacagaagcaacttatagagaagaa

SEQ ID NO: 81354 - DNA, 25 bp, Artificial
  probe
  misc_feature (1)..(25): SEQ ID NO: 7028; WAN024BHI_at; Start 158; Stop 182
cagaagcaacttatagagaagaaac

SEQ ID NO: 81355 - DNA, 25 bp, Artificial
  probe
  misc_feature (1)..(25): SEQ ID NO: 7028; WAN024BHI_at; Start 125; Stop 149
tcactccagatcaaggatcagaaca

SEQ ID NO: 81356 - DNA, 25 bp, Artificial
  probe
  misc_feature (1)..(25): SEQ ID NO: 7028; WAN024BHI_at; Start 140; Stop 164
gatcagaacaactaaaaacagaagc

SEQ ID NO: 81357 - DNA, 25 bp, Artificial
  probe
  misc_feature (1)..(25): SEQ ID NO: 7028; WAN024BHI_at; Start 126; Stop 150
cactccagatcaaggatcagaacaa

SEQ ID NO: 81358 - DNA, 25 bp, Artificial
  probe
  misc_feature (1)..(25): SEQ ID NO: 7028; WAN024BHI_at; Start 137; Stop 161
aaggatcagaacaactaaaaacaga

SEQ ID NO: 81359 - DNA, 25 bp, Artificial
  probe
  misc_feature (1)..(25): SEQ ID NO: 7028; WAN024BHI_at; Start 128; Stop 152
ctccagatcaaggatcagaacaact

SEQ ID NO: 81360 - DNA, 25 bp, Artificial
  probe
  misc_feature (1)..(25): SEQ ID NO: 7028; WAN024BHI_at; Start 123; Stop 147
tttcactccagatcaaggatcagaa

SEQ ID NO: 81361 - DNA, 25 bp, Artificial
  probe
  misc_feature (1)..(25): SEQ ID NO: 7028; WAN024BHI_at; Start 130; Stop 154
ccagatcaaggatcagaacaactaa

SEQ ID NO: 81362 - DNA, 25 bp, Artificial
  probe
  misc_feature (1)..(25): SEQ ID NO: 7028; WAN024BHI_at; Start 135; Stop 159
tcaaggatcagaacaactaaaaaca

SEQ ID NO: 81363 - DNA, 25 bp, Artificial
  probe
  misc_feature (1)..(25): SEQ ID NO: 7028; WAN024BHI_at; Start 152; Stop 176
taaaaacagaagcaacttatagaga

SEQ ID NO: 81364 - DNA, 25 bp, Artificial
  probe
  misc_feature (1)..(25): SEQ ID NO: 7028; WAN024BHI_at; Start 133; Stop 157
gatcaaggatcagaacaactaaaaa

SEQ ID NO: 81365 - DNA, 25 bp, Artificial
  probe
  misc_feature (1)..(25): SEQ ID NO: 7028; WAN024BHI_at; Start 139; Stop 163
ggatcagaacaactaaaaacagaag

SEQ ID NO: 81366 - DNA, 25 bp, Artificial
  probe
  misc_feature (1)..(25): SEQ ID NO: 7028; WAN024BHI_at; Start 93; Stop 117
taaaaaaatagatcgactgttagat

SEQ ID NO: 81367 - DNA, 25 bp, Artificial
  probe
  misc_feature (1)..(25): SEQ ID NO: 7028; WAN024BHI_at; Start 154; Stop 178
aaaacagaagcaacttatagagaag

SEQ ID NO: 81368 - DNA, 25 bp, Artificial
  probe
  misc_feature (1)..(25): SEQ ID NO: 7028; WAN024BHI_at; Start 127; Stop 151
actccagatcaaggatcagaacaac

SEQ ID NO: 81369 - DNA, 25 bp, Artificial
  probe
  misc_feature (1)..(25): SEQ ID NO: 7028; WAN024BHI_at; Start 142; Stop 166
tcagaacaactaaaaacagaagcaa

SEQ ID NO: 81370 - DNA, 25 bp, Artificial
  probe
  misc_feature (1)..(25): SEQ ID NO: 7028; WAN024BHI_at; Start 121; Stop 145
attttcactccagatcaaggatcag

SEQ ID NO: 81371 - DNA, 25 bp, Artificial
  probe
  misc_feature (1)..(25): SEQ ID NO: 7028; WAN024BHI_at; Start 131; Stop 155
cagatcaaggatcagaacaactaaa

SEQ ID NO: 81372 - DNA, 25 bp, Artificial
  probe
  misc_feature (1)..(25): SEQ ID NO: 7028; WAN024BHI_at; Start 163; Stop 187
gcaacttatagagaagaaactttgg

SEQ ID NO: 81373 - DNA, 25 bp, Artificial
  probe
  misc_feature (1)..(25): SEQ ID NO: 7028; WAN024BHI_at; Start 122; Stop 146
ttttcactccagatcaaggatcaga

SEQ ID NO: 81374 - DNA, 25 bp, Artificial
  probe
  misc_feature (1)..(25): SEQ ID NO: 7028; WAN024BHI_at; Start 124; Stop 148
ttcactccagatcaaggatcagaac

SEQ ID NO: 81375 - DNA, 25 bp, Artificial
  probe
  misc_feature (1)..(25): SEQ ID NO: 7028; WAN024BHI_at; Start 129; Stop 153
tccagatcaaggatcagaacaacta

SEQ ID NO: 81376 - DNA, 25 bp, Artificial
  probe
  misc_feature (1)..(25): SEQ ID NO: 7028; WAN024BHI_at; Start 144; Stop 168
agaacaactaaaaacagaagcaact

SEQ ID NO: 81377 - DNA, 25 bp, Artificial
  probe
  misc_feature (1)..(25): SEQ ID NO: 7028; WAN024BHI_at; Start 155; Stop 179
aaacagaagcaacttatagagaaga

SEQ ID NO: 81378 - DNA, 25 bp, Artificial
  probe
  misc_feature (1)..(25): SEQ ID NO: 7028; WAN024BHI_at; Start 160; Stop 184
gaagcaacttatagagaagaaactt

SEQ ID NO: 81379 - DNA, 25 bp, Artificial
  probe
  misc_feature (1)..(25): SEQ ID NO: 7028; WAN024BHI_at; Start 245; Stop 269
tagagaggtttaggaaaaatagtca

SEQ ID NO: 81380 - DNA, 25 bp, Artificial
  probe
  misc_feature (1)..(25): SEQ ID NO: 3073; WAN024BHJ_s_at; Start 175; Stop 199
gaagaaactttggacgacacattaa

SEQ ID NO: 81381 - DNA, 25 bp, Artificial
  probe
  misc_feature (1)..(25): SEQ ID NO: 3073; WAN024BHJ_s_at; Start 181; Stop 205
actttggacgacacattaaaggaag

SEQ ID NO: 81382 - DNA, 25 bp, Artificial
  probe
  misc_feature (1)..(25): SEQ ID NO: 3073; WAN024BHJ_s_at; Start 177; Stop 201
agaaactttggacgacacattaaag

SEQ ID NO: 81383 - DNA, 25 bp, Artificial
  probe
  misc_feature (1)..(25): SEQ ID NO: 3073; WAN024BHJ_s_at; Start 182; Stop 206
ctttggacgacacattaaaggaagc

SEQ ID NO: 81384 - DNA, 25 bp, Artificial
  probe
  misc_feature (1)..(25): SEQ ID NO: 1933; WAN024BHK_at; Start 85; Stop 109
aaatcatctaacccagatttccaaa

SEQ ID NO: 81385 - DNA, 25 bp, Artificial
  probe
  misc_feature (1)..(25): SEQ ID NO: 1933; WAN024BHK_at; Start 16; Stop 40
tttgtcgtagtatttggcagtgatg

SEQ ID NO: 81386 - DNA, 25 bp, Artificial
  probe
  misc_feature (1)..(25): SEQ ID NO: 1933; WAN024BHK_at; Start 11; Stop 35
atcattttgtcgtagtatttggcag

SEQ ID NO: 81387 - DNA, 25 bp, Artificial
  probe
  misc_feature (1)..(25): SEQ ID NO: 1933; WAN024BHK_at; Start 80; Stop 104
tatctaaatcatctaacccagattt

SEQ ID NO: 81388 - DNA, 25 bp, Artificial
  probe
  misc_feature (1)..(25): SEQ ID NO: 1933; WAN024BHK_at; Start 77; Stop 101
ccttatctaaatcatctaacccaga

SEQ ID NO: 81389 - DNA, 25 bp, Artificial
  probe
  misc_feature (1)..(25): SEQ ID NO: 1933; WAN024BHK_at; Start 9; Stop 33
tcatcattttgtcgtagtatttggc

SEQ ID NO: 81390 - DNA, 25 bp, Artificial
  probe
  misc_feature (1)..(25): SEQ ID NO: 1933; WAN024BHK_at; Start 12; Stop 36
tcattttgtcgtagtatttggcagt

SEQ ID NO: 81391 - DNA, 25 bp, Artificial
  probe
  misc_feature (1)..(25): SEQ ID NO: 1933; WAN024BHK_at; Start 14; Stop 38
attttgtcgtagtatttggcagtga

SEQ ID NO: 81392 - DNA, 25 bp, Artificial
  probe
  misc_feature (1)..(25): SEQ ID NO: 1933; WAN024BHK_at; Start 15; Stop 39
ttttgtcgtagtatttggcagtgat

SEQ ID NO: 81393 - DNA, 25 bp, Artificial
  probe
  misc_feature (1)..(25): SEQ ID NO: 1933; WAN024BHK_at; Start 116; Stop 140
cttggttgaccaataacttaccagg

SEQ ID NO: 81394 - DNA, 25 bp, Artificial
  probe
  misc_feature (1)..(25): SEQ ID NO: 1933; WAN024BHK_at; Start 86; Stop 110
aatcatctaacccagatttccaaac

SEQ ID NO: 81395 - DNA, 25 bp, Artificial
  probe
  misc_feature (1)..(25): SEQ ID NO: 1933; WAN024BHK_at; Start 84; Stop 108
taaatcatctaacccagatttccaa

SEQ ID NO: 81396 - DNA, 25 bp, Artificial
  probe
  misc_feature (1)..(25): SEQ ID NO: 1933; WAN024BHK_at; Start 10; Stop 34
catcattttgtcgtagtatttggca

SEQ ID NO: 81397 - DNA, 25 bp, Artificial
  probe
  misc_feature (1)..(25): SEQ ID NO: 1933; WAN024BHK_at; Start 82; Stop 106
tctaaatcatctaacccagatttcc

SEQ ID NO: 81398 - DNA, 25 bp, Artificial
  probe
  misc_feature (1)..(25): SEQ ID NO: 1933; WAN024BHK_at; Start 8; Stop 32
atcatcattttgtcgtagtatttgg

SEQ ID NO: 81399 - DNA, 25 bp, Artificial
  probe
  misc_feature (1)..(25): SEQ ID NO: 1933; WAN024BHK_at; Start 17; Stop 41
ttgtcgtagtatttggcagtgatgg

SEQ ID NO: 81400 - DNA, 25 bp, Artificial
  probe
  misc_feature (1)..(25): SEQ ID NO: 1933; WAN024BHK_at; Start 81; Stop 105
atctaaatcatctaacccagatttc

SEQ ID NO: 81401 - DNA, 25 bp, Artificial
  probe
  misc_feature (1)..(25): SEQ ID NO: 1933; WAN024BHK_at; Start 78; Stop 102
cttatctaaatcatctaacccagat

SEQ ID NO: 81402 - DNA, 25 bp, Artificial
  probe
  misc_feature (1)..(25): SEQ ID NO: 1933; WAN024BHK_at; Start 118; Stop 142
tggttgaccaataacttaccaggta

SEQ ID NO: 81403 - DNA, 25 bp, Artificial
  probe
  misc_feature (1)..(25): SEQ ID NO: 1933; WAN024BHK_at; Start 87; Stop 111
atcatctaacccagatttccaaacc

SEQ ID NO: 81404 - DNA, 25 bp, Artificial
  probe
  misc_feature (1)..(25): SEQ ID NO: 1933; WAN024BHK_at; Start 83; Stop 107
ctaaatcatctaacccagatttcca

SEQ ID NO: 81405 - DNA, 25 bp, Artificial
  probe
  misc_feature (1)..(25): SEQ ID NO: 1933; WAN024BHK_at; Start 79; Stop 103
ttatctaaatcatctaacccagatt

SEQ ID NO: 81406 - DNA, 25 bp, Artificial
  probe
  misc_feature (1)..(25): SEQ ID NO: 1933; WAN024BHK_at; Start 88; Stop 112
tcatctaacccagatttccaaacct

SEQ ID NO: 81407 - DNA, 25 bp, Artificial
  probe
  misc_feature (1)..(25): SEQ ID NO: 1933; WAN024BHK_at; Start 13; Stop 37
cattttgtcgtagtatttggcagtg

SEQ ID NO: 81408 - DNA, 25 bp, Artificial
  probe
  misc_feature (1)..(25): SEQ ID NO: 1933; WAN024BHK_at; Start 89; Stop 113
catctaacccagatttccaaacctg

SEQ ID NO: 81409 - DNA, 25 bp, Artificial
  probe
  misc_feature (1)..(25): SEQ ID NO: 1933; WAN024BHK_at; Start 115; Stop 139
acttggttgaccaataacttaccag

SEQ ID NO: 81410 - DNA, 25 bp, Artificial
  probe
  misc_feature (1)..(25): SEQ ID NO: 759; WAN024BHL_at; Start 747; Stop 771
tcatgctattgaagcaactgccggt

SEQ ID NO: 81411 - DNA, 25 bp, Artificial
  probe
  misc_feature (1)..(25): SEQ ID NO: 759; WAN024BHL_at; Start 54; Stop 78
aggttgtctggctcaggctggtcaa

SEQ ID NO: 81412 - DNA, 25 bp, Artificial
  probe
  misc_feature (1)..(25): SEQ ID NO: 759; WAN024BHL_at; Start 582; Stop 606
agaactgtgggctcttttgacggag

SEQ ID NO: 81413 - DNA, 25 bp, Artificial
  probe
  misc_feature (1)..(25): SEQ ID NO: 759; WAN024BHL_at; Start 919; Stop 943
aactgggatgttgacaagctttatc

SEQ ID NO: 81414 - DNA, 25 bp, Artificial
  probe
  misc_feature (1)..(25): SEQ ID NO: 759; WAN024BHL_at; Start 395; Stop 419
cagcccaggtggattcttctattgg

SEQ ID NO: 81415 - DNA, 25 bp, Artificial
  probe
  misc_feature (1)..(25): SEQ ID NO: 759; WAN024BHL_at; Start 375; Stop 399
tcagataccgactagcttaacagcc

SEQ ID NO: 81416 - DNA, 25 bp, Artificial
  probe
  misc_feature (1)..(25): SEQ ID NO: 759; WAN024BHL_at; Start 909; Stop 933
tgactatgaaaactgggatgttgac

SEQ ID NO: 81417 - DNA, 25 bp, Artificial
  probe
  misc_feature (1)..(25): SEQ ID NO: 759; WAN024BHL_at; Start 968; Stop 992
cgcgtggcaataccttgaaattggt

SEQ ID NO: 81418 - DNA, 25 bp, Artificial
  probe
  misc_feature (1)..(25): SEQ ID NO: 759; WAN024BHL_at; Start 703; Stop 727
gacaatggtgtacgcctttacctca

SEQ ID NO: 81419 - DNA, 25 bp, Artificial
  probe
  misc_feature (1)..(25): SEQ ID NO: 759; WAN024BHL_at; Start 460; Stop 484
gtaggaacttttgcccaaccagatg

SEQ ID NO: 81420 - DNA, 25 bp, Artificial
  probe
  misc_feature (1)..(25): SEQ ID NO: 759; WAN024BHL_at; Start 738; Stop 762
cactattggtcatgctattgaagca

SEQ ID NO: 81421 - DNA, 25 bp, Artificial
  probe
  misc_feature (1)..(25): SEQ ID NO: 759; WAN024BHL_at; Start 409; Stop 433
tcttctattggtggaaagacgggtg

SEQ ID NO: 81422 - DNA, 25 bp, Artificial
  probe
  misc_feature (1)..(25): SEQ ID NO: 759; WAN024BHL_at; Start 728; Stop 752
actttggtcacactattggtcatgc

SEQ ID NO: 81423 - DNA, 25 bp, Artificial
  probe
  misc_feature (1)..(25): SEQ ID NO: 759; WAN024BHL_at; Start 753; Stop 777
tattgaagcaactgccggttatggt

SEQ ID NO: 81424 - DNA, 25 bp, Artificial
  probe
  misc_feature (1)..(25): SEQ ID NO: 759; WAN024BHL_at; Start 713; Stop 737
tacgcctttacctcaactttggtca

SEQ ID NO: 81425 - DNA, 25 bp, Artificial
  probe
  misc_feature (1)..(25): SEQ ID NO: 759; WAN024BHL_at; Start 360; Stop 384
gggcattcattttgttcagataccg

SEQ ID NO: 81426 - DNA, 25 bp, Artificial
  probe
  misc_feature (1)..(25): SEQ ID NO: 759; WAN024BHL_at; Start 867; Stop 891
tcagtccattacagatatgtgtcag

SEQ ID NO: 81427 - DNA, 25 bp, Artificial
  probe
  misc_feature (1)..(25): SEQ ID NO: 759; WAN024BHL_at; Start 251; Stop 275
tctatgaattcctagttaagcaggg

SEQ ID NO: 81428 - DNA, 25 bp, Artificial
  probe
  misc_feature (1)..(25): SEQ ID NO: 759; WAN024BHL_at; Start 950; Stop 974
tgactcatgacaaaaaagcgcgtgg

SEQ ID NO: 81429 - DNA, 25 bp, Artificial
  probe
  misc_feature (1)..(25): SEQ ID NO: 759; WAN024BHL_at; Start 243; Stop 267
tcagaaagtctatgaattcctagtt

SEQ ID NO: 81430 - DNA, 25 bp, Artificial
  probe
  misc_feature (1)..(25): SEQ ID NO: 759; WAN024BHL_at; Start 443; Stop 467
catttgccaagaatatggtaggaac

SEQ ID NO: 81431 - DNA, 25 bp, Artificial
  probe
  misc_feature (1)..(25): SEQ ID NO: 759; WAN024BHL_at; Start 810; Stop 834
catggtgcagatttccaaggttgct

SEQ ID NO: 81432 - DNA, 25 bp, Artificial
  probe
  misc_feature (1)..(25): SEQ ID NO: 759; WAN024BHL_at; Start 801; Stop 825
ggccatgggcatggtgcagatttcc

SEQ ID NO: 81433 - DNA, 25 bp, Artificial
  probe
  misc_feature (1)..(25): SEQ ID NO: 759; WAN024BHL_at; Start 61; Stop 85
ctggctcaggctggtcaatggttgc

SEQ ID NO: 81434 - DNA, 25 bp, Artificial
  probe
  misc_feature (1)..(25): SEQ ID NO: 759; WAN024BHL_at; Start 275; Stop 299
ggttgactcgtagcgatggaatcgt

SEQ ID NO: 81435 - DNA, 25 bp, Artificial
  probe
  misc_feature (1)..(25): SEQ ID NO: 759; WAN024BHL_at; Start 283; Stop 307
cgtagcgatggaatcgtggctctcg

SEQ ID NO: 81436 - DNA, 25 bp, Artificial
  probe
  misc_feature (1)..(25): SEQ ID NO: 759; WAN024BHL_at; Start 594; Stop 618
tcttttgacggagctggatggttct

SEQ ID NO: 81437 - DNA, 25 bp, Artificial
  probe
  misc_feature (1)..(25): SEQ ID NO: 759; WAN024BHL_at; Start 420; Stop 444
tggaaagacgggtgttaacactcca

SEQ ID NO: 81438 - DNA, 25 bp, Artificial
  probe
  misc_feature (1)..(25): SEQ ID NO: 759; WAN024BHL_at; Start 960; Stop 984
caaaaaagcgcgtggcaataccttg

SEQ ID NO: 81439 - DNA, 25 bp, Artificial
  probe
  misc_feature (1)..(25): SEQ ID NO: 759; WAN024BHL_at; Start 882; Stop 906
tatgtgtcagaaatttggcttgcct

SEQ ID NO: 81440 - DNA, 25 bp, Artificial
  probe
  misc_feature (1)..(25): SEQ ID NO: 759; WAN024BHL_at; Start 429; Stop 453
gggtgttaacactccatttgccaag

SEQ ID NO: 81441 - DNA, 25 bp, Artificial
  probe
  misc_feature (1)..(25): SEQ ID NO: 759; WAN024BHL_at; Start 384; Stop 408
gactagcttaacagcccaggtggat

SEQ ID NO: 81442 - DNA, 25 bp, Artificial
  probe
  misc_feature (1)..(25): SEQ ID NO: 759; WAN024BHL_at; Start 697; Stop 721
gagttggacaatggtgtacgccttt

SEQ ID NO: 81443 - DNA, 25 bp, Artificial
  probe
  misc_feature (1)..(25): SEQ ID NO: 759; WAN024BHL_at; Start 851; Stop 875
tgccagctggcataactcagtccat

SEQ ID NO: 81444 - DNA, 25 bp, Artificial
  probe
  misc_feature (1)..(25): SEQ ID NO: 760; WAN024BHM_at; Start 801; Stop 825
tgccatgggaatggtacagatttcc

SEQ ID NO: 81445 - DNA, 25 bp, Artificial
  probe
  misc_feature (1)..(25): SEQ ID NO: 760; WAN024BHM_at; Start 715; Stop 739
cgtctttacctcaattttggccaca

SEQ ID NO: 81446 - DNA, 25 bp, Artificial
  probe
  misc_feature (1)..(25): SEQ ID NO: 760; WAN024BHM_at; Start 382; Stop 406
ccgactagtttgacagctcaggttg

SEQ ID NO: 81447 - DNA, 25 bp, Artificial
  probe
  misc_feature (1)..(25): SEQ ID NO: 760; WAN024BHM_at; Start 255; Stop 279
tgaatttctagtcaagcaaggtctg

SEQ ID NO: 81448 - DNA, 25 bp, Artificial
  probe
  misc_feature (1)..(25): SEQ ID NO: 760; WAN024BHM_at; Start 863; Stop 887
ttacccaatctatcacagagatgtg

SEQ ID NO: 81449 - DNA, 25 bp, Artificial
  probe
  misc_feature (1)..(25): SEQ ID NO: 760; WAN024BHM_at; Start 750; Stop 774
tgccatcgaagcgactgccggttat

SEQ ID NO: 81450 - DNA, 25 bp, Artificial
  probe
  misc_feature (1)..(25): SEQ ID NO: 760; WAN024BHM_at; Start 375; Stop 399
tcagattccgactagtttgacagct

SEQ ID NO: 81451 - DNA, 25 bp, Artificial
  probe
  misc_feature (1)..(25): SEQ ID NO: 760; WAN024BHM_at; Start 413; Stop 437
ctatcggtggaaagacaggcgttaa

SEQ ID NO: 81452 - DNA, 25 bp, Artificial
  probe
  misc_feature (1)..(25): SEQ ID NO: 760; WAN024BHM_at; Start 366; Stop 390
tcactttgttcagattccgactagt

SEQ ID NO: 81453 - DNA, 25 bp, Artificial
  probe
  misc_feature (1)..(25): SEQ ID NO: 760; WAN024BHM_at; Start 703; Stop 727
gacaatggtattcgtctttacctca

SEQ ID NO: 81454 - DNA, 25 bp, Artificial
  probe
  misc_feature (1)..(25): SEQ ID NO: 760; WAN024BHM_at; Start 794; Stop 818
aggctgttgccatgggaatggtaca

SEQ ID NO: 81455 - DNA, 25 bp, Artificial
  probe
  misc_feature (1)..(25): SEQ ID NO: 760; WAN024BHM_at; Start 868; Stop 892
caatctatcacagagatgtgtcaga

SEQ ID NO: 81456 - DNA, 25 bp, Artificial
  probe
  misc_feature (1)..(25): SEQ ID NO: 760; WAN024BHM_at; Start 60; Stop 84
tatggcccaggctggtcagtggttg

SEQ ID NO: 81457 - DNA, 25 bp, Artificial
  probe
  misc_feature (1)..(25): SEQ ID NO: 760; WAN024BHM_at; Start 360; Stop 384
gggtattcactttgttcagattccg

SEQ ID NO: 81458 - DNA, 25 bp, Artificial
  probe
  misc_feature (1)..(25): SEQ ID NO: 760; WAN024BHM_at; Start 55; Stop 79
ggttgtatggcccaggctggtcagt

SEQ ID NO: 81459 - DNA, 25 bp, Artificial
  probe
  misc_feature (1)..(25): SEQ ID NO: 760; WAN024BHM_at; Start 743; Stop 767
ttggccatgccatcgaagcgactgc

SEQ ID NO: 81460 - DNA, 25 bp, Artificial
  probe
  misc_feature (1)..(25): SEQ ID NO: 760; WAN024BHM_at; Start 378; Stop 402
gattccgactagtttgacagctcag

SEQ ID NO: 81461 - DNA, 25 bp, Artificial
  probe
  misc_feature (1)..(25): SEQ ID NO: 760; WAN024BHM_at; Start 440; Stop 464
caccatttgctaaaaatatggtggg

SEQ ID NO: 81462 - DNA, 25 bp, Artificial
  probe
  misc_feature (1)..(25): SEQ ID NO: 760; WAN024BHM_at; Start 754; Stop 778
atcgaagcgactgccggttatggca

SEQ ID NO: 81463 - DNA, 25 bp, Artificial
  probe
  misc_feature (1)..(25): SEQ ID NO: 760; WAN024BHM_at; Start 386; Stop 410
ctagtttgacagctcaggttgattc

SEQ ID NO: 81464 - DNA, 25 bp, Artificial
  probe
  misc_feature (1)..(25): SEQ ID NO: 760; WAN024BHM_at; Start 409; Stop 433
tcttctatcggtggaaagacaggcg

SEQ ID NO: 81465 - DNA, 25 bp, Artificial
  probe
  misc_feature (1)..(25): SEQ ID NO: 760; WAN024BHM_at; Start 399; Stop 423
tcaggttgattcttctatcggtgga

SEQ ID NO: 81466 - DNA, 25 bp, Artificial
  probe
  misc_feature (1)..(25): SEQ ID NO: 760; WAN024BHM_at; Start 875; Stop 899
tcacagagatgtgtcagaaattcgg

SEQ ID NO: 81467 - DNA, 25 bp, Artificial
  probe
  misc_feature (1)..(25): SEQ ID NO: 760; WAN024BHM_at; Start 711; Stop 735
tattcgtctttacctcaattttggc

SEQ ID NO: 81468 - DNA, 25 bp, Artificial
  probe
  misc_feature (1)..(25): SEQ ID NO: 760; WAN024BHM_at; Start 725; Stop 749
tcaattttggccacactattggcca

SEQ ID NO: 81469 - DNA, 25 bp, Artificial
  probe
  misc_feature (1)..(25): SEQ ID NO: 760; WAN024BHM_at; Start 251; Stop 275
tctatgaatttctagtcaagcaagg

SEQ ID NO: 81470 - DNA, 25 bp, Artificial
  probe
  misc_feature (1)..(25): SEQ ID NO: 760; WAN024BHM_at; Start 395; Stop 419
cagctcaggttgattcttctatcgg

SEQ ID NO: 81471 - DNA, 25 bp, Artificial
  probe
  misc_feature (1)..(25): SEQ ID NO: 760; WAN024BHM_at; Start 389; Stop 413
gtttgacagctcaggttgattcttc

SEQ ID NO: 81472 - DNA, 25 bp, Artificial
  probe
  misc_feature (1)..(25): SEQ ID NO: 760; WAN024BHM_at; Start 859; Stop 883
ggcattacccaatctatcacagaga

SEQ ID NO: 81473 - DNA, 25 bp, Artificial
  probe
  misc_feature (1)..(25): SEQ ID NO: 760; WAN024BHM_at; Start 739; Stop 763
actattggccatgccatcgaagcga

SEQ ID NO: 81474 - DNA, 25 bp, Artificial
  probe
  misc_feature (1)..(25): SEQ ID NO: 760; WAN024BHM_at; Start 736; Stop 760
cacactattggccatgccatcgaag

SEQ ID NO: 81475 - DNA, 25 bp, Artificial
  probe
  misc_feature (1)..(25): SEQ ID NO: 760; WAN024BHM_at; Start 697; Stop 721
gagttggacaatggtattcgtcttt

SEQ ID NO: 81476 - DNA, 25 bp, Artificial
  probe
  misc_feature (1)..(25): SEQ ID NO: 760; WAN024BHM_at; Start 257; Stop 281
aatttctagtcaagcaaggtctgac

SEQ ID NO: 81477 - DNA, 25 bp, Artificial
  probe
  misc_feature (1)..(25): SEQ ID NO: 760; WAN024BHM_at; Start 851; Stop 875
tgccagctggcattacccaatctat

SEQ ID NO: 81478 - DNA, 25 bp, Artificial
  probe
  misc_feature (1)..(25): SEQ ID NO: 1088; WAN024BHN_at; Start 64; Stop 88
tttactgattggtttgatcaagcct

SEQ ID NO: 81479 - DNA, 25 bp, Artificial
  probe
  misc_feature (1)..(25): SEQ ID NO: 1088; WAN024BHN_at; Start 62; Stop 86
tgtttactgattggtttgatcaagc

SEQ ID NO: 81480 - DNA, 25 bp, Artificial
  probe
  misc_feature (1)..(25): SEQ ID NO: 1088; WAN024BHN_at; Start 63; Stop 87
gtttactgattggtttgatcaagcc

SEQ ID NO: 81481 - DNA, 25 bp, Artificial
  probe
  misc_feature (1)..(25): SEQ ID NO: 1088; WAN024BHN_at; Start 67; Stop 91
actgattggtttgatcaagccttgc

SEQ ID NO: 81482 - DNA, 25 bp, Artificial
  probe
  misc_feature (1)..(25): SEQ ID NO: 1088; WAN024BHN_at; Start 65; Stop 89
ttactgattggtttgatcaagcctt

SEQ ID NO: 81483 - DNA, 25 bp, Artificial
  probe
  misc_feature (1)..(25): SEQ ID NO: 1088; WAN024BHN_at; Start 165; Stop 189
gttgaaaggagagtctcatgacggt

SEQ ID NO: 81484 - DNA, 25 bp, Artificial
  probe
  misc_feature (1)..(25): SEQ ID NO: 1088; WAN024BHN_at; Start 166; Stop 190
ttgaaaggagagtctcatgacggtg

SEQ ID NO: 81485 - DNA, 25 bp, Artificial
  probe
  misc_feature (1)..(25): SEQ ID NO: 1088; WAN024BHN_at; Start 162; Stop 186
gtggttgaaaggagagtctcatgac

SEQ ID NO: 81486 - DNA, 25 bp, Artificial
  probe
  misc_feature (1)..(25): SEQ ID NO: 1088; WAN024BHN_at; Start 163; Stop 187
tggttgaaaggagagtctcatgacg

SEQ ID NO: 81487 - DNA, 25 bp, Artificial
  probe
  misc_feature (1)..(25): SEQ ID NO: 1088; WAN024BHN_at; Start 66; Stop 90
tactgattggtttgatcaagccttg

SEQ ID NO: 81488 - DNA, 25 bp, Artificial
  probe
  misc_feature (1)..(25): SEQ ID NO: 1088; WAN024BHN_at; Start 167; Stop 191
tgaaaggagagtctcatgacggtgg

SEQ ID NO: 81489 - DNA, 25 bp, Artificial
  probe
  misc_feature (1)..(25): SEQ ID NO: 1088; WAN024BHN_at; Start 61; Stop 85
atgtttactgattggtttgatcaag

SEQ ID NO: 81490 - DNA, 25 bp, Artificial
  probe
  misc_feature (1)..(25): SEQ ID NO: 1088; WAN024BHN_at; Start 59; Stop 83
aaatgtttactgattggtttgatca

SEQ ID NO: 81491 - DNA, 25 bp, Artificial
  probe
  misc_feature (1)..(25): SEQ ID NO: 1088; WAN024BHN_at; Start 168; Stop 192
gaaaggagagtctcatgacggtggt

SEQ ID NO: 81492 - DNA, 25 bp, Artificial
  probe
  misc_feature (1)..(25): SEQ ID NO: 1088; WAN024BHN_at; Start 69; Stop 93
tgattggtttgatcaagccttgctt

SEQ ID NO: 81493 - DNA, 25 bp, Artificial
  probe
  misc_feature (1)..(25): SEQ ID NO: 1088; WAN024BHN_at; Start 58; Stop 82
gaaatgtttactgattggtttgatc

SEQ ID NO: 81494 - DNA, 25 bp, Artificial
  probe
  misc_feature (1)..(25): SEQ ID NO: 1088; WAN024BHN_at; Start 60; Stop 84
aatgtttactgattggtttgatcaa

SEQ ID NO: 81495 - DNA, 25 bp, Artificial
  probe
  misc_feature (1)..(25): SEQ ID NO: 1088; WAN024BHN_at; Start 68; Stop 92
ctgattggtttgatcaagccttgct

SEQ ID NO: 81496 - DNA, 25 bp, Artificial
  probe
  misc_feature (1)..(25): SEQ ID NO: 1088; WAN024BHN_at; Start 164; Stop 188
ggttgaaaggagagtctcatgacgg

SEQ ID NO: 81497 - DNA, 25 bp, Artificial
  probe
  misc_feature (1)..(25): SEQ ID NO: 1087; WAN024BHO_at; Start 137; Stop 161
tcgtcgttttccttatgagaatgga

SEQ ID NO: 81498 - DNA, 25 bp, Artificial
  probe
  misc_feature (1)..(25): SEQ ID NO: 1087; WAN024BHO_at; Start 141; Stop 165
cgttttccttatgagaatggagtgg

SEQ ID NO: 81499 - DNA, 25 bp, Artificial
  probe
  misc_feature (1)..(25): SEQ ID NO: 1087; WAN024BHO_at; Start 73; Stop 97
tggtttgaccaaaccttgcttcgcc

SEQ ID NO: 81500 - DNA, 25 bp, Artificial
  probe
  misc_feature (1)..(25): SEQ ID NO: 1087; WAN024BHO_at; Start 68; Stop 92
caggttggtttgaccaaaccttgct

SEQ ID NO: 81501 - DNA, 25 bp, Artificial
  probe
  misc_feature (1)..(25): SEQ ID NO: 1087; WAN024BHO_at; Start 142; Stop 166
gttttccttatgagaatggagtggt

SEQ ID NO: 81502 - DNA, 25 bp, Artificial
  probe
  misc_feature (1)..(25): SEQ ID NO: 1087; WAN024BHO_at; Start 166; Stop 190
ttgaaaggagaatatcatgaatatg

SEQ ID NO: 81503 - DNA, 25 bp, Artificial
  probe
  misc_feature (1)..(25): SEQ ID NO: 1087; WAN024BHO_at; Start 143; Stop 167
ttttccttatgagaatggagtggtt

SEQ ID NO: 81504 - DNA, 25 bp, Artificial
  probe
  misc_feature (1)..(25): SEQ ID NO: 1087; WAN024BHO_at; Start 80; Stop 104
accaaaccttgcttcgccaattcat

SEQ ID NO: 81505 - DNA, 25 bp, Artificial
  probe
  misc_feature (1)..(25): SEQ ID NO: 1087; WAN024BHO_at; Start 138; Stop 162
cgtcgttttccttatgagaatggag

SEQ ID NO: 81506 - DNA, 25 bp, Artificial
  probe
  misc_feature (1)..(25): SEQ ID NO: 1087; WAN024BHO_at; Start 135; Stop 159
tttcgtcgttttccttatgagaatg

SEQ ID NO: 81507 - DNA, 25 bp, Artificial
  probe
  misc_feature (1)..(25): SEQ ID NO: 1087; WAN024BHO_at; Start 172; Stop 196
ggagaatatcatgaatatgatctaa

SEQ ID NO: 81508 - DNA, 25 bp, Artificial
  probe
  misc_feature (1)..(25): SEQ ID NO: 1087; WAN024BHO_at; Start 76; Stop 100
tttgaccaaaccttgcttcgccaat

SEQ ID NO: 81509 - DNA, 25 bp, Artificial
  probe
  misc_feature (1)..(25): SEQ ID NO: 1087; WAN024BHO_at; Start 173; Stop 197
gagaatatcatgaatatgatctaac

SEQ ID NO: 81510 - DNA, 25 bp, Artificial
  probe
  misc_feature (1)..(25): SEQ ID NO: 1087; WAN024BHO_at; Start 77; Stop 101
ttgaccaaaccttgcttcgccaatt

SEQ ID NO: 81511 - DNA, 25 bp, Artificial
  probe
  misc_feature (1)..(25): SEQ ID NO: 1087; WAN024BHO_at; Start 136; Stop 160
ttcgtcgttttccttatgagaatgg

SEQ ID NO: 81512 - DNA, 25 bp, Artificial
  probe
  misc_feature (1)..(25): SEQ ID NO: 1087; WAN024BHO_at; Start 162; Stop 186
gtggttgaaaggagaatatcatgaa

SEQ ID NO: 81513 - DNA, 25 bp, Artificial
  probe
  misc_feature (1)..(25): SEQ ID NO: 1087; WAN024BHO_at; Start 169; Stop 193
aaaggagaatatcatgaatatgatc

SEQ ID NO: 81514 - DNA, 25 bp, Artificial
  probe
  misc_feature (1)..(25): SEQ ID NO: 1087; WAN024BHO_at; Start 163; Stop 187
tggttgaaaggagaatatcatgaat

SEQ ID NO: 81515 - DNA, 25 bp, Artificial
  probe
  misc_feature (1)..(25): SEQ ID NO: 1087; WAN024BHO_at; Start 139; Stop 163
gtcgttttccttatgagaatggagt

SEQ ID NO: 81516 - DNA, 25 bp, Artificial
  probe
  misc_feature (1)..(25): SEQ ID NO: 1087; WAN024BHO_at; Start 74; Stop 98
ggtttgaccaaaccttgcttcgcca

SEQ ID NO: 81517 - DNA, 25 bp, Artificial
  probe
  misc_feature (1)..(25): SEQ ID NO: 1087; WAN024BHO_at; Start 81; Stop 105
ccaaaccttgcttcgccaattcatt

SEQ ID NO: 81518 - DNA, 25 bp, Artificial
  probe
  misc_feature (1)..(25): SEQ ID NO: 1087; WAN024BHO_at; Start 167; Stop 191
tgaaaggagaatatcatgaatatga

SEQ ID NO: 81519 - DNA, 25 bp, Artificial
  probe
  misc_feature (1)..(25): SEQ ID NO: 1087; WAN024BHO_at; Start 170; Stop 194
aaggagaatatcatgaatatgatct

SEQ ID NO: 81520 - DNA, 25 bp, Artificial
  probe
  misc_feature (1)..(25): SEQ ID NO: 1087; WAN024BHO_at; Start 146; Stop 170
tccttatgagaatggagtggttgaa

SEQ ID NO: 81521 - DNA, 25 bp, Artificial
  probe
  misc_feature (1)..(25): SEQ ID NO: 1087; WAN024BHO_at; Start 145; Stop 169
ttccttatgagaatggagtggttga

SEQ ID NO: 81522 - DNA, 25 bp, Artificial
  probe
  misc_feature (1)..(25): SEQ ID NO: 1087; WAN024BHO_at; Start 75; Stop 99
gtttgaccaaaccttgcttcgccaa

SEQ ID NO: 81523 - DNA, 25 bp, Artificial
  probe
  misc_feature (1)..(25): SEQ ID NO: 1087; WAN024BHO_at; Start 168; Stop 192
gaaaggagaatatcatgaatatgat

SEQ ID NO: 81524 - DNA, 25 bp, Artificial
  probe
  misc_feature (1)..(25): SEQ ID NO: 1087; WAN024BHO_at; Start 79; Stop 103
gaccaaaccttgcttcgccaattca

SEQ ID NO: 81525 - DNA, 25 bp, Artificial
  probe
  misc_feature (1)..(25): SEQ ID NO: 1087; WAN024BHO_at; Start 165; Stop 189
gttgaaaggagaatatcatgaatat

SEQ ID NO: 81526 - DNA, 25 bp, Artificial
  probe
  misc_feature (1)..(25): SEQ ID NO: 1087; WAN024BHO_at; Start 140; Stop 164
tcgttttccttatgagaatggagtg

SEQ ID NO: 81527 - DNA, 25 bp, Artificial
  probe
  misc_feature (1)..(25): SEQ ID NO: 1087; WAN024BHO_at; Start 144; Stop 168
tttccttatgagaatggagtggttg

SEQ ID NO: 81528 - DNA, 25 bp, Artificial
  probe
  misc_feature (1)..(25): SEQ ID NO: 1087; WAN024BHO_at; Start 164; Stop 188
ggttgaaaggagaatatcatgaata

SEQ ID NO: 81529 - DNA, 25 bp, Artificial
  probe
  misc_feature (1)..(25): SEQ ID NO: 1087; WAN024BHO_at; Start 72; Stop 96
ttggtttgaccaaaccttgcttcgc

SEQ ID NO: 81530 - DNA, 25 bp, Artificial
  probe
  misc_feature (1)..(25): SEQ ID NO: 1087; WAN024BHO_at; Start 175; Stop 199
gaatatcatgaatatgatctaacta

SEQ ID NO: 81531 - DNA, 25 bp, Artificial
  probe
  misc_feature (1)..(25): SEQ ID NO: 6328; WAN024BHP_at; Start 63; Stop 87
cttactgaaaatgctttgtatcggt

SEQ ID NO: 81532 - DNA, 25 bp, Artificial
  probe
  misc_feature (1)..(25): SEQ ID NO: 6328; WAN024BHP_at; Start 483; Stop 507
acttgggatggttttagggatggtg

SEQ ID NO: 81533 - DNA, 25 bp, Artificial
  probe
  misc_feature (1)..(25): SEQ ID NO: 6328; WAN024BHP_at; Start 64; Stop 88
ttactgaaaatgctttgtatcggtg

SEQ ID NO: 81534 - DNA, 25 bp, Artificial
  probe
  misc_feature (1)..(25): SEQ ID NO: 6328; WAN024BHP_at; Start 66; Stop 90
actgaaaatgctttgtatcggtgag

SEQ ID NO: 81535 - DNA, 25 bp, Artificial
  probe
  misc_feature (1)..(25): SEQ ID NO: 6328; WAN024BHP_at; Start 65; Stop 89
tactgaaaatgctttgtatcggtga

SEQ ID NO: 81536 - DNA, 25 bp, Artificial
  probe
  misc_feature (1)..(25): SEQ ID NO: 6328; WAN024BHP_at; Start 482; Stop 506
cacttgggatggttttagggatggt

SEQ ID NO: 81537 - DNA, 25 bp, Artificial
  probe
  misc_feature (1)..(25): SEQ ID NO: 6328; WAN024BHP_at; Start 484; Stop 508
cttgggatggttttagggatggtgc

SEQ ID NO: 81538 - DNA, 25 bp, Artificial
  probe
  misc_feature (1)..(25): SEQ ID NO: 6328; WAN024BHP_at; Start 62; Stop 86
acttactgaaaatgctttgtatcgg

SEQ ID NO: 81539 - DNA, 25 bp, Artificial
  probe
  misc_feature (1)..(25): SEQ ID NO: 6931; WAN024BHQ_at; Start 135; Stop 159
ttcattgggaatgtttttagggatg

SEQ ID NO: 81540 - DNA, 25 bp, Artificial
  probe
  misc_feature (1)..(25): SEQ ID NO: 6931; WAN024BHQ_at; Start 74; Stop 98
caagtgttttgttcgctttggctca

SEQ ID NO: 81541 - DNA, 25 bp, Artificial
  probe
  misc_feature (1)..(25): SEQ ID NO: 6931; WAN024BHQ_at; Start 75; Stop 99
aagtgttttgttcgctttggctcat

SEQ ID NO: 81542 - DNA, 25 bp, Artificial
  probe
  misc_feature (1)..(25): SEQ ID NO: 6931; WAN024BHQ_at; Start 130; Stop 154
tatgtttcattgggaatgtttttag

SEQ ID NO: 81543 - DNA, 25 bp, Artificial
  probe
  misc_feature (1)..(25): SEQ ID NO: 6931; WAN024BHQ_at; Start 78; Stop 102
tgttttgttcgctttggctcatcat

SEQ ID NO: 81544 - DNA, 25 bp, Artificial
  probe
  misc_feature (1)..(25): SEQ ID NO: 6931; WAN024BHQ_at; Start 84; Stop 108
gttcgctttggctcatcatccagga

SEQ ID NO: 81545 - DNA, 25 bp, Artificial
  probe
  misc_feature (1)..(25): SEQ ID NO: 6931; WAN024BHQ_at; Start 138; Stop 162
attgggaatgtttttagggatggtg

SEQ ID NO: 81546 - DNA, 25 bp, Artificial
  probe
  misc_feature (1)..(25): SEQ ID NO: 6931; WAN024BHQ_at; Start 128; Stop 152
tgtatgtttcattgggaatgttttt

SEQ ID NO: 81547 - DNA, 25 bp, Artificial
  probe
  misc_feature (1)..(25): SEQ ID NO: 6931; WAN024BHQ_at; Start 81; Stop 105
tttgttcgctttggctcatcatcca

SEQ ID NO: 81548 - DNA, 25 bp, Artificial
  probe
  misc_feature (1)..(25): SEQ ID NO: 6931; WAN024BHQ_at; Start 139; Stop 163
ttgggaatgtttttagggatggtgc

SEQ ID NO: 81549 - DNA, 25 bp, Artificial
  probe
  misc_feature (1)..(25): SEQ ID NO: 6931; WAN024BHQ_at; Start 137; Stop 161
cattgggaatgtttttagggatggt

SEQ ID NO: 81550 - DNA, 25 bp, Artificial
  probe
  misc_feature (1)..(25): SEQ ID NO: 6931; WAN024BHQ_at; Start 126; Stop 150
tttgtatgtttcattgggaatgttt

SEQ ID NO: 81551 - DNA, 25 bp, Artificial
  probe
  misc_feature (1)..(25): SEQ ID NO: 6931; WAN024BHQ_at; Start 125; Stop 149
gtttgtatgtttcattgggaatgtt

SEQ ID NO: 81552 - DNA, 25 bp, Artificial
  probe
  misc_feature (1)..(25): SEQ ID NO: 6931; WAN024BHQ_at; Start 80; Stop 104
ttttgttcgctttggctcatcatcc

SEQ ID NO: 81553 - DNA, 25 bp, Artificial
  probe
  misc_feature (1)..(25): SEQ ID NO: 6931; WAN024BHQ_at; Start 124; Stop 148
tgtttgtatgtttcattgggaatgt

SEQ ID NO: 81554 - DNA, 25 bp, Artificial
  probe
  misc_feature (1)..(25): SEQ ID NO: 6931; WAN024BHQ_at; Start 71; Stop 95
tgacaagtgttttgttcgctttggc

SEQ ID NO: 81555 - DNA, 25 bp, Artificial
  probe
  misc_feature (1)..(25): SEQ ID NO: 6931; WAN024BHQ_at; Start 73; Stop 97
acaagtgttttgttcgctttggctc

SEQ ID NO: 81556 - DNA, 25 bp, Artificial
  probe
  misc_feature (1)..(25): SEQ ID NO: 6931; WAN024BHQ_at; Start 79; Stop 103
gttttgttcgctttggctcatcatc

SEQ ID NO: 81557 - DNA, 25 bp, Artificial
  probe
  misc_feature (1)..(25): SEQ ID NO: 6931; WAN024BHQ_at; Start 131; Stop 155
atgtttcattgggaatgtttttagg

SEQ ID NO: 81558 - DNA, 25 bp, Artificial
  probe
  misc_feature (1)..(25): SEQ ID NO: 6931; WAN024BHQ_at; Start 127; Stop 151
ttgtatgtttcattgggaatgtttt

SEQ ID NO: 81559 - DNA, 25 bp, Artificial
  probe
  misc_feature (1)..(25): SEQ ID NO: 6931; WAN024BHQ_at; Start 82; Stop 106
ttgttcgctttggctcatcatccag

SEQ ID NO: 81560 - DNA, 25 bp, Artificial
  probe
  misc_feature (1)..(25): SEQ ID NO: 6931; WAN024BHQ_at; Start 83; Stop 107
tgttcgctttggctcatcatccagg

SEQ ID NO: 81561 - DNA, 25 bp, Artificial
  probe
  misc_feature (1)..(25): SEQ ID NO: 6931; WAN024BHQ_at; Start 72; Stop 96
gacaagtgttttgttcgctttggct

SEQ ID NO: 81562 - DNA, 25 bp, Artificial
  probe
  misc_feature (1)..(25): SEQ ID NO: 6931; WAN024BHQ_at; Start 136; Stop 160
tcattgggaatgtttttagggatgg

SEQ ID NO: 81563 - DNA, 25 bp, Artificial
  probe
  misc_feature (1)..(25): SEQ ID NO: 6931; WAN024BHQ_at; Start 129; Stop 153
gtatgtttcattgggaatgttttta

SEQ ID NO: 81564 - DNA, 25 bp, Artificial
  probe
  misc_feature (1)..(25): SEQ ID NO: 6931; WAN024BHQ_at; Start 77; Stop 101
gtgttttgttcgctttggctcatca

SEQ ID NO: 81565 - DNA, 25 bp, Artificial
  probe
  misc_feature (1)..(25): SEQ ID NO: 6931; WAN024BHQ_at; Start 69; Stop 93
gttgacaagtgttttgttcgctttg

SEQ ID NO: 81566 - DNA, 25 bp, Artificial
  probe
  misc_feature (1)..(25): SEQ ID NO: 6931; WAN024BHQ_at; Start 70; Stop 94
ttgacaagtgttttgttcgctttgg

SEQ ID NO: 81567 - DNA, 25 bp, Artificial
  probe
  misc_feature (1)..(25): SEQ ID NO: 6931; WAN024BHQ_at; Start 76; Stop 100
agtgttttgttcgctttggctcatc

SEQ ID NO: 81568 - DNA, 25 bp, Artificial
  probe
  misc_feature (1)..(25): SEQ ID NO: 716; WAN024BHR_at; Start 581; Stop 605
ttctttaataatagctggtctgtct

SEQ ID NO: 81569 - DNA, 25 bp, Artificial
  probe
  misc_feature (1)..(25): SEQ ID NO: 716; WAN024BHR_at; Start 242; Stop 266
ttagcctaatccatgctcaaggaac

SEQ ID NO: 81570 - DNA, 25 bp, Artificial
  probe
  misc_feature (1)..(25): SEQ ID NO: 716; WAN024BHR_at; Start 495; Stop 519
tttagggcttgtgcgctacaaatcg

SEQ ID NO: 81571 - DNA, 25 bp, Artificial
  probe
  misc_feature (1)..(25): SEQ ID NO: 716; WAN024BHR_at; Start 555; Stop 579
gaacctatcagtctatgtcttattt

SEQ ID NO: 81572 - DNA, 25 bp, Artificial
  probe
  misc_feature (1)..(25): SEQ ID NO: 716; WAN024BHR_at; Start 250; Stop 274
atccatgctcaaggaactacgaatc

SEQ ID NO: 81573 - DNA, 25 bp, Artificial
  probe
  misc_feature (1)..(25): SEQ ID NO: 716; WAN024BHR_at; Start 248; Stop 272
taatccatgctcaaggaactacgaa

SEQ ID NO: 81574 - DNA, 25 bp, Artificial
  probe
  misc_feature (1)..(25): SEQ ID NO: 716; WAN024BHR_at; Start 554; Stop 578
ggaacctatcagtctatgtcttatt

SEQ ID NO: 81575 - DNA, 25 bp, Artificial
  probe
  misc_feature (1)..(25): SEQ ID NO: 716; WAN024BHR_at; Start 552; Stop 576
gtggaacctatcagtctatgtctta

SEQ ID NO: 81576 - DNA, 25 bp, Artificial
  probe
  misc_feature (1)..(25): SEQ ID NO: 716; WAN024BHR_at; Start 492; Stop 516
gtttttagggcttgtgcgctacaaa

SEQ ID NO: 81577 - DNA, 25 bp, Artificial
  probe
  misc_feature (1)..(25): SEQ ID NO: 716; WAN024BHR_at; Start 500; Stop 524
ggcttgtgcgctacaaatcggactt

SEQ ID NO: 81578 - DNA, 25 bp, Artificial
  probe
  misc_feature (1)..(25): SEQ ID NO: 716; WAN024BHR_at; Start 83; Stop 107
ttagtgagttaaccatactacagat

SEQ ID NO: 81579 - DNA, 25 bp, Artificial
  probe
  misc_feature (1)..(25): SEQ ID NO: 716; WAN024BHR_at; Start 79; Stop 103
tgtattagtgagttaaccatactac

SEQ ID NO: 81580 - DNA, 25 bp, Artificial
  probe
  misc_feature (1)..(25): SEQ ID NO: 716; WAN024BHR_at; Start 243; Stop 267
tagcctaatccatgctcaaggaact

SEQ ID NO: 81581 - DNA, 25 bp, Artificial
  probe
  misc_feature (1)..(25): SEQ ID NO: 716; WAN024BHR_at; Start 81; Stop 105
tattagtgagttaaccatactacag

SEQ ID NO: 81582 - DNA, 25 bp, Artificial
  probe
  misc_feature (1)..(25): SEQ ID NO: 716; WAN024BHR_at; Start 498; Stop 522
agggcttgtgcgctacaaatcggac

SEQ ID NO: 81583 - DNA, 25 bp, Artificial
  probe
  misc_feature (1)..(25): SEQ ID NO: 716; WAN024BHR_at; Start 491; Stop 515
tgtttttagggcttgtgcgctacaa

SEQ ID NO: 81584 - DNA, 25 bp, Artificial
  probe
  misc_feature (1)..(25): SEQ ID NO: 716; WAN024BHR_at; Start 551; Stop 575
tgtggaacctatcagtctatgtctt

SEQ ID NO: 81585 - DNA, 25 bp, Artificial
  probe
  misc_feature (1)..(25): SEQ ID NO: 716; WAN024BHR_at; Start 66; Stop 90
actgaaattgctttgtattagtgag

SEQ ID NO: 81586 - DNA, 25 bp, Artificial
  probe
  misc_feature (1)..(25): SEQ ID NO: 716; WAN024BHR_at; Start 499; Stop 523
gggcttgtgcgctacaaatcggact

SEQ ID NO: 81587 - DNA, 25 bp, Artificial
  probe
  misc_feature (1)..(25): SEQ ID NO: 716; WAN024BHR_at; Start 246; Stop 270
cctaatccatgctcaaggaactacg

SEQ ID NO: 81588 - DNA, 25 bp, Artificial
  probe
  misc_feature (1)..(25): SEQ ID NO: 716; WAN024BHR_at; Start 563; Stop 587
cagtctatgtcttattttttcttta

SEQ ID NO: 81589 - DNA, 25 bp, Artificial
  probe
  misc_feature (1)..(25): SEQ ID NO: 716; WAN024BHR_at; Start 550; Stop 574
gtgtggaacctatcagtctatgtct

SEQ ID NO: 81590 - DNA, 25 bp, Artificial
  probe
  misc_feature (1)..(25): SEQ ID NO: 716; WAN024BHR_at; Start 233; Stop 257
atctatgttttagcctaatccatgc

SEQ ID NO: 81591 - DNA, 25 bp, Artificial
  probe
  misc_feature (1)..(25): SEQ ID NO: 716; WAN024BHR_at; Start 494; Stop 518
ttttagggcttgtgcgctacaaatc

SEQ ID NO: 81592 - DNA, 25 bp, Artificial
  probe
  misc_feature (1)..(25): SEQ ID NO: 716; WAN024BHR_at; Start 245; Stop 269
gcctaatccatgctcaaggaactac

SEQ ID NO: 81593 - DNA, 25 bp, Artificial
  probe
  misc_feature (1)..(25): SEQ ID NO: 716; WAN024BHR_at; Start 249; Stop 273
aatccatgctcaaggaactacgaat

SEQ ID NO: 81594 - DNA, 25 bp, Artificial
  probe
  misc_feature (1)..(25): SEQ ID NO: 716; WAN024BHR_at; Start 548; Stop 572
tggtgtggaacctatcagtctatgt

SEQ ID NO: 81595 - DNA, 25 bp, Artificial
  probe
  misc_feature (1)..(25): SEQ ID NO: 716; WAN024BHR_at; Start 549; Stop 573
ggtgtggaacctatcagtctatgtc

SEQ ID NO: 81596 - DNA, 25 bp, Artificial
  probe
  misc_feature (1)..(25): SEQ ID NO: 716; WAN024BHR_at; Start 547; Stop 571
ttggtgtggaacctatcagtctatg

SEQ ID NO: 81597 - DNA, 25 bp, Artificial
  probe
  misc_feature (1)..(25): SEQ ID NO: 716; WAN024BHR_at; Start 75; Stop 99
gctttgtattagtgagttaaccata

SEQ ID NO: 81598 - DNA, 25 bp, Artificial
  probe
  misc_feature (1)..(25): SEQ ID NO: 716; WAN024BHR_at; Start 62; Stop 86
acttactgaaattgctttgtattag

SEQ ID NO: 81599 - DNA, 25 bp, Artificial
  probe
  misc_feature (1)..(25): SEQ ID NO: 716; WAN024BHR_at; Start 580; Stop 604
tttctttaataatagctggtctgtc

SEQ ID NO: 81600 - DNA, 25 bp, Artificial
  probe
  misc_feature (1)..(25): SEQ ID NO: 716; WAN024BHR_at; Start 230; Stop 254
taaatctatgttttagcctaatcca

SEQ ID NO: 81601 - DNA, 25 bp, Artificial
  probe
  misc_feature (1)..(25): SEQ ID NO: 716; WAN024BHR_at; Start 72; Stop 96
attgctttgtattagtgagttaacc

SEQ ID NO: 81602 - DNA, 25 bp, Artificial
  probe
  misc_feature (1)..(25): SEQ ID NO: 715; WAN024BHS_at; Start 195; Stop 219
atgccttggtattggactagctagt

SEQ ID NO: 81603 - DNA, 25 bp, Artificial
  probe
  misc_feature (1)..(25): SEQ ID NO: 715; WAN024BHS_at; Start 481; Stop 505
tcacttggaatgtttttaggtatgg

SEQ ID NO: 81604 - DNA, 25 bp, Artificial
  probe
  misc_feature (1)..(25): SEQ ID NO: 715; WAN024BHS_at; Start 210; Stop 234
actagctagtctactgattataagt

SEQ ID NO: 81605 - DNA, 25 bp, Artificial
  probe
  misc_feature (1)..(25): SEQ ID NO: 715; WAN024BHS_at; Start 204; Stop 228
tattggactagctagtctactgatt

SEQ ID NO: 81606 - DNA, 25 bp, Artificial
  probe
  misc_feature (1)..(25): SEQ ID NO: 715; WAN024BHS_at; Start 472; Stop 496
ctgtacgtttcacttggaatgtttt

SEQ ID NO: 81607 - DNA, 25 bp, Artificial
  probe
  misc_feature (1)..(25): SEQ ID NO: 715; WAN024BHS_at; Start 202; Stop 226
ggtattggactagctagtctactga

SEQ ID NO: 81608 - DNA, 25 bp, Artificial
  probe
  misc_feature (1)..(25): SEQ ID NO: 715; WAN024BHS_at; Start 198; Stop 222
ccttggtattggactagctagtcta

SEQ ID NO: 81609 - DNA, 25 bp, Artificial
  probe
  misc_feature (1)..(25): SEQ ID NO: 715; WAN024BHS_at; Start 205; Stop 229
attggactagctagtctactgatta

SEQ ID NO: 81610 - DNA, 25 bp, Artificial
  probe
  misc_feature (1)..(25): SEQ ID NO: 715; WAN024BHS_at; Start 201; Stop 225
tggtattggactagctagtctactg

SEQ ID NO: 81611 - DNA, 25 bp, Artificial
  probe
  misc_feature (1)..(25): SEQ ID NO: 715; WAN024BHS_at; Start 110; Stop 134
tctatggtgcgtctcttttttcttt

SEQ ID NO: 81612 - DNA, 25 bp, Artificial
  probe
  misc_feature (1)..(25): SEQ ID NO: 715; WAN024BHS_at; Start 468; Stop 492
gtgtctgtacgtttcacttggaatg

SEQ ID NO: 81613 - DNA, 25 bp, Artificial
  probe
  misc_feature (1)..(25): SEQ ID NO: 715; WAN024BHS_at; Start 207; Stop 231
tggactagctagtctactgattata

SEQ ID NO: 81614 - DNA, 25 bp, Artificial
  probe
  misc_feature (1)..(25): SEQ ID NO: 715; WAN024BHS_at; Start 470; Stop 494
gtctgtacgtttcacttggaatgtt

SEQ ID NO: 81615 - DNA, 25 bp, Artificial
  probe
  misc_feature (1)..(25): SEQ ID NO: 715; WAN024BHS_at; Start 193; Stop 217
aaatgccttggtattggactagcta

SEQ ID NO: 81616 - DNA, 25 bp, Artificial
  probe
  misc_feature (1)..(25): SEQ ID NO: 715; WAN024BHS_at; Start 109; Stop 133
ctctatggtgcgtctcttttttctt

SEQ ID NO: 81617 - DNA, 25 bp, Artificial
  probe
  misc_feature (1)..(25): SEQ ID NO: 715; WAN024BHS_at; Start 209; Stop 233
gactagctagtctactgattataag

SEQ ID NO: 81618 - DNA, 25 bp, Artificial
  probe
  misc_feature (1)..(25): SEQ ID NO: 715; WAN024BHS_at; Start 466; Stop 490
tggtgtctgtacgtttcacttggaa

SEQ ID NO: 81619 - DNA, 25 bp, Artificial
  probe
  misc_feature (1)..(25): SEQ ID NO: 715; WAN024BHS_at; Start 200; Stop 224
ttggtattggactagctagtctact

SEQ ID NO: 81620 - DNA, 25 bp, Artificial
  probe
  misc_feature (1)..(25): SEQ ID NO: 715; WAN024BHS_at; Start 465; Stop 489
ttggtgtctgtacgtttcacttgga

SEQ ID NO: 81621 - DNA, 25 bp, Artificial
  probe
  misc_feature (1)..(25): SEQ ID NO: 715; WAN024BHS_at; Start 482; Stop 506
cacttggaatgtttttaggtatggt

SEQ ID NO: 81622 - DNA, 25 bp, Artificial
  probe
  misc_feature (1)..(25): SEQ ID NO: 715; WAN024BHS_at; Start 471; Stop 495
tctgtacgtttcacttggaatgttt

SEQ ID NO: 81623 - DNA, 25 bp, Artificial
  probe
  misc_feature (1)..(25): SEQ ID NO: 715; WAN024BHS_at; Start 469; Stop 493
tgtctgtacgtttcacttggaatgt

SEQ ID NO: 81624 - DNA, 25 bp, Artificial
  probe
  misc_feature (1)..(25): SEQ ID NO: 715; WAN024BHS_at; Start 203; Stop 227
gtattggactagctagtctactgat

SEQ ID NO: 81625 - DNA, 25 bp, Artificial
  probe
  misc_feature (1)..(25): SEQ ID NO: 715; WAN024BHS_at; Start 108; Stop 132
tctctatggtgcgtctcttttttct

SEQ ID NO: 81626 - DNA, 25 bp, Artificial
  probe
  misc_feature (1)..(25): SEQ ID NO: 715; WAN024BHS_at; Start 194; Stop 218
aatgccttggtattggactagctag

SEQ ID NO: 81627 - DNA, 25 bp, Artificial
  probe
  misc_feature (1)..(25): SEQ ID NO: 715; WAN024BHS_at; Start 208; Stop 232
ggactagctagtctactgattataa

SEQ ID NO: 81628 - DNA, 25 bp, Artificial
  probe
  misc_feature (1)..(25): SEQ ID NO: 715; WAN024BHS_at; Start 484; Stop 508
cttggaatgtttttaggtatggtgc

SEQ ID NO: 81629 - DNA, 25 bp, Artificial
  probe
  misc_feature (1)..(25): SEQ ID NO: 715; WAN024BHS_at; Start 192; Stop 216
gaaatgccttggtattggactagct

SEQ ID NO: 81630 - DNA, 25 bp, Artificial
  probe
  misc_feature (1)..(25): SEQ ID NO: 715; WAN024BHS_at; Start 199; Stop 223
cttggtattggactagctagtctac

SEQ ID NO: 81631 - DNA, 25 bp, Artificial
  probe
  misc_feature (1)..(25): SEQ ID NO: 715; WAN024BHS_at; Start 191; Stop 215
tgaaatgccttggtattggactagc

SEQ ID NO: 81632 - DNA, 25 bp, Artificial
  probe
  misc_feature (1)..(25): SEQ ID NO: 715; WAN024BHS_at; Start 111; Stop 135
ctatggtgcgtctcttttttctttt

SEQ ID NO: 81633 - DNA, 25 bp, Artificial
  probe
  misc_feature (1)..(25): SEQ ID NO: 715; WAN024BHS_at; Start 467; Stop 491
ggtgtctgtacgtttcacttggaat

SEQ ID NO: 81634 - DNA, 25 bp, Artificial
  probe
  misc_feature (1)..(25): SEQ ID NO: 715; WAN024BHS_at; Start 197; Stop 221
gccttggtattggactagctagtct

SEQ ID NO: 81635 - DNA, 25 bp, Artificial
  probe
  misc_feature (1)..(25): SEQ ID NO: 715; WAN024BHS_at; Start 196; Stop 220
tgccttggtattggactagctagtc

SEQ ID NO: 81636 - DNA, 25 bp, Artificial
  probe
  misc_feature (1)..(25): SEQ ID NO: 714; WAN024BHT_s_at; Start 63; Stop 87
cttattgaaatttctttgtatcggt

SEQ ID NO: 81637 - DNA, 25 bp, Artificial
  probe
  misc_feature (1)..(25): SEQ ID NO: 714; WAN024BHT_s_at; Start 54; Stop 78
atctctatacttattgaaatttctt

SEQ ID NO: 81638 - DNA, 25 bp, Artificial
  probe
  misc_feature (1)..(25): SEQ ID NO: 714; WAN024BHT_s_at; Start 66; Stop 90
attgaaatttctttgtatcggtgag

SEQ ID NO: 81639 - DNA, 25 bp, Artificial
  probe
  misc_feature (1)..(25): SEQ ID NO: 714; WAN024BHT_s_at; Start 53; Stop 77
tatctctatacttattgaaatttct

SEQ ID NO: 81640 - DNA, 25 bp, Artificial
  probe
  misc_feature (1)..(25): SEQ ID NO: 714; WAN024BHT_s_at; Start 65; Stop 89
tattgaaatttctttgtatcggtga

SEQ ID NO: 81641 - DNA, 25 bp, Artificial
  probe
  misc_feature (1)..(25): SEQ ID NO: 714; WAN024BHT_s_at; Start 55; Stop 79
tctctatacttattgaaatttcttt

SEQ ID NO: 81642 - DNA, 25 bp, Artificial
  probe
  misc_feature (1)..(25): SEQ ID NO: 714; WAN024BHT_s_at; Start 64; Stop 88
ttattgaaatttctttgtatcggtg

SEQ ID NO: 81643 - DNA, 25 bp, Artificial
  probe
  misc_feature (1)..(25): SEQ ID NO: 714; WAN024BHT_s_at; Start 56; Stop 80
ctctatacttattgaaatttctttg

SEQ ID NO: 81644 - DNA, 25 bp, Artificial
  probe
  misc_feature (1)..(25): SEQ ID NO: 714; WAN024BHT_s_at; Start 57; Stop 81
tctatacttattgaaatttctttgt

SEQ ID NO: 81645 - DNA, 25 bp, Artificial
  probe
  misc_feature (1)..(25): SEQ ID NO: 714; WAN024BHT_s_at; Start 62; Stop 86
acttattgaaatttctttgtatcgg

SEQ ID NO: 81646 - DNA, 25 bp, Artificial
  probe
  misc_feature (1)..(25): SEQ ID NO: 714; WAN024BHT_s_at; Start 52; Stop 76
gtatctctatacttattgaaatttc

SEQ ID NO: 81647 - DNA, 25 bp, Artificial
  probe
  misc_feature (1)..(25): SEQ ID NO: 714; WAN024BHT_s_at; Start 61; Stop 85
tacttattgaaatttctttgtatcg

SEQ ID NO: 81648 - DNA, 25 bp, Artificial
  probe
  misc_feature (1)..(25): SEQ ID NO: 6957; WAN024BHU_at; Start 474; Stop 498
tgacaaggtgatggcctatcgtagc

SEQ ID NO: 81649 - DNA, 25 bp, Artificial
  probe
  misc_feature (1)..(25): SEQ ID NO: 6957; WAN024BHU_at; Start 304; Stop 328
gctgatcaagttaaggagctcatgt

SEQ ID NO: 81650 - DNA, 25 bp, Artificial
  probe
  misc_feature (1)..(25): SEQ ID NO: 6957; WAN024BHU_at; Start 313; Stop 337
gttaaggagctcatgtctgaagtag

SEQ ID NO: 81651 - DNA, 25 bp, Artificial
  probe
  misc_feature (1)..(25): SEQ ID NO: 6957; WAN024BHU_at; Start 706; Stop 730
atgtatatggaaaaggtggatttgc

SEQ ID NO: 81652 - DNA, 25 bp, Artificial
  probe
  misc_feature (1)..(25): SEQ ID NO: 6957; WAN024BHU_at; Start 488; Stop 512
cctatcgtagcggctacatgttcaa

SEQ ID NO: 81653 - DNA, 25 bp, Artificial
  probe
  misc_feature (1)..(25): SEQ ID NO: 6957; WAN024BHU_at; Start 595; Stop 619
gacataacagggtactctgcttttg

SEQ ID NO: 81654 - DNA, 25 bp, Artificial
  probe
  misc_feature (1)..(25): SEQ ID NO: 6957; WAN024BHU_at; Start 478; Stop 502
aaggtgatggcctatcgtagcggct

SEQ ID NO: 81655 - DNA, 25 bp, Artificial
  probe
  misc_feature (1)..(25): SEQ ID NO: 6957; WAN024BHU_at; Start 300; Stop 324
atcggctgatcaagttaaggagctc

SEQ ID NO: 81656 - DNA, 25 bp, Artificial
  probe
  misc_feature (1)..(25): SEQ ID NO: 6957; WAN024BHU_at; Start 133; Stop 157
ggtaatcatatttcatatcttaatc

SEQ ID NO: 81657 - DNA, 25 bp, Artificial
  probe
  misc_feature (1)..(25): SEQ ID NO: 6957; WAN024BHU_at; Start 591; Stop 615
attggacataacagggtactctgct

SEQ ID NO: 81658 - DNA, 25 bp, Artificial
  probe
  misc_feature (1)..(25): SEQ ID NO: 6957; WAN024BHU_at; Start 480; Stop 504
ggtgatggcctatcgtagcggctac

SEQ ID NO: 81659 - DNA, 25 bp, Artificial
  probe
  misc_feature (1)..(25): SEQ ID NO: 6957; WAN024BHU_at; Start 713; Stop 737
tggaaaaggtggatttgcttgaaaa

SEQ ID NO: 81660 - DNA, 25 bp, Artificial
  probe
  misc_feature (1)..(25): SEQ ID NO: 6957; WAN024BHU_at; Start 479; Stop 503
aggtgatggcctatcgtagcggcta

SEQ ID NO: 81661 - DNA, 25 bp, Artificial
  probe
  misc_feature (1)..(25): SEQ ID NO: 6957; WAN024BHU_at; Start 312; Stop 336
agttaaggagctcatgtctgaagta

SEQ ID NO: 81662 - DNA, 25 bp, Artificial
  probe
  misc_feature (1)..(25): SEQ ID NO: 6957; WAN024BHU_at; Start 709; Stop 733
tatatggaaaaggtggatttgcttg

SEQ ID NO: 81663 - DNA, 25 bp, Artificial
  probe
  misc_feature (1)..(25): SEQ ID NO: 6957; WAN024BHU_at; Start 594; Stop 618
ggacataacagggtactctgctttt

SEQ ID NO: 81664 - DNA, 25 bp, Artificial
  probe
  misc_feature (1)..(25): SEQ ID NO: 6957; WAN024BHU_at; Start 299; Stop 323
tatcggctgatcaagttaaggagct

SEQ ID NO: 81665 - DNA, 25 bp, Artificial
  probe
  misc_feature (1)..(25): SEQ ID NO: 6957; WAN024BHU_at; Start 303; Stop 327
ggctgatcaagttaaggagctcatg

SEQ ID NO: 81666 - DNA, 25 bp, Artificial
  probe
  misc_feature (1)..(25): SEQ ID NO: 6957; WAN024BHU_at; Start 481; Stop 505
gtgatggcctatcgtagcggctaca

SEQ ID NO: 81667 - DNA, 25 bp, Artificial
  probe
  misc_feature (1)..(25): SEQ ID NO: 6957; WAN024BHU_at; Start 482; Stop 506
tgatggcctatcgtagcggctacat

SEQ ID NO: 81668 - DNA, 25 bp, Artificial
  probe
  misc_feature (1)..(25): SEQ ID NO: 6957; WAN024BHU_at; Start 589; Stop 613
agattggacataacagggtactctg

SEQ ID NO: 81669 - DNA, 25 bp, Artificial
  probe
  misc_feature (1)..(25): SEQ ID NO: 6957; WAN024BHU_at; Start 664; Stop 688
tggttagattaccaaaatctacatg

SEQ ID NO: 81670 - DNA, 25 bp, Artificial
  probe
  misc_feature (1)..(25): SEQ ID NO: 6957; WAN024BHU_at; Start 711; Stop 735
tatggaaaaggtggatttgcttgaa

SEQ ID NO: 81671 - DNA, 25 bp, Artificial
  probe
  misc_feature (1)..(25): SEQ ID NO: 6957; WAN024BHU_at; Start 707; Stop 731
tgtatatggaaaaggtggatttgct

SEQ ID NO: 81672 - DNA, 25 bp, Artificial
  probe
  misc_feature (1)..(25): SEQ ID NO: 6957; WAN024BHU_at; Start 483; Stop 507
gatggcctatcgtagcggctacatg

SEQ ID NO: 81673 - DNA, 25 bp, Artificial
  probe
  misc_feature (1)..(25): SEQ ID NO: 6957; WAN024BHU_at; Start 590; Stop 614
gattggacataacagggtactctgc

SEQ ID NO: 81674 - DNA, 25 bp, Artificial
  probe
  misc_feature (1)..(25): SEQ ID NO: 6957; WAN024BHU_at; Start 301; Stop 325
tcggctgatcaagttaaggagctca

SEQ ID NO: 81675 - DNA, 25 bp, Artificial
  probe
  misc_feature (1)..(25): SEQ ID NO: 6957; WAN024BHU_at; Start 130; Stop 154
caaggtaatcatatttcatatctta

SEQ ID NO: 81676 - DNA, 25 bp, Artificial
  probe
  misc_feature (1)..(25): SEQ ID NO: 6957; WAN024BHU_at; Start 485; Stop 509
tggcctatcgtagcggctacatgtt

SEQ ID NO: 81677 - DNA, 25 bp, Artificial
  probe
  misc_feature (1)..(25): SEQ ID NO: 6957; WAN024BHU_at; Start 592; Stop 616
ttggacataacagggtactctgctt

SEQ ID NO: 81678 - DNA, 25 bp, Artificial
  probe
  misc_feature (1)..(25): SEQ ID NO: 6957; WAN024BHU_at; Start 668; Stop 692
tagattaccaaaatctacatgttaa

SEQ ID NO: 81679 - DNA, 25 bp, Artificial
  probe
  misc_feature (1)..(25): SEQ ID NO: 6957; WAN024BHU_at; Start 305; Stop 329
ctgatcaagttaaggagctcatgtc

SEQ ID NO: 81680 - DNA, 25 bp, Artificial
  probe
  misc_feature (1)..(25): SEQ ID NO: 6957; WAN024BHU_at; Start 665; Stop 689
ggttagattaccaaaatctacatgt

SEQ ID NO: 81681 - DNA, 25 bp, Artificial
  probe
  misc_feature (1)..(25): SEQ ID NO: 6957; WAN024BHU_at; Start 302; Stop 326
cggctgatcaagttaaggagctcat

SEQ ID NO: 81682 - DNA, 25 bp, Artificial
  probe
  misc_feature (1)..(25): SEQ ID NO: 6958; WAN024BHV_at; Start 447; Stop 471
aatcgcaccagagtatctagaaaca

SEQ ID NO: 81683 - DNA, 25 bp, Artificial
  probe
  misc_feature (1)..(25): SEQ ID NO: 6958; WAN024BHV_at; Start 307; Stop 331
gatcaagttaaggaatttatgtctg

SEQ ID NO: 81684 - DNA, 25 bp, Artificial
  probe
  misc_feature (1)..(25): SEQ ID NO: 6958; WAN024BHV_at; Start 428; Stop 452
cgcgtgaaatcataaaagaaatcgc

SEQ ID NO: 81685 - DNA, 25 bp, Artificial
  probe
  misc_feature (1)..(25): SEQ ID NO: 6958; WAN024BHV_at; Start 328; Stop 352
tctgaagcggacgtcgttgttccta

SEQ ID NO: 81686 - DNA, 25 bp, Artificial
  probe
  misc_feature (1)..(25): SEQ ID NO: 6958; WAN024BHV_at; Start 463; Stop 487
ctagaaacatttgataaggtgatgg

SEQ ID NO: 81687 - DNA, 25 bp, Artificial
  probe
  misc_feature (1)..(25): SEQ ID NO: 6958; WAN024BHV_at; Start 411; Stop 435
tagtcatttagatacaacgcgtgaa

SEQ ID NO: 81688 - DNA, 25 bp, Artificial
  probe
  misc_feature (1)..(25): SEQ ID NO: 6958; WAN024BHV_at; Start 445; Stop 469
gaaatcgcaccagagtatctagaaa

SEQ ID NO: 81689 - DNA, 25 bp, Artificial
  probe
  misc_feature (1)..(25): SEQ ID NO: 6958; WAN024BHV_at; Start 442; Stop 466
aaagaaatcgcaccagagtatctag

SEQ ID NO: 81690 - DNA, 25 bp, Artificial
  probe
  misc_feature (1)..(25): SEQ ID NO: 6958; WAN024BHV_at; Start 590; Stop 614
gattggatatatcaaggtactctgc

SEQ ID NO: 81691 - DNA, 25 bp, Artificial
  probe
  misc_feature (1)..(25): SEQ ID NO: 6958; WAN024BHV_at; Start 433; Stop 457
gaaatcataaaagaaatcgcaccag

SEQ ID NO: 81692 - DNA, 25 bp, Artificial
  probe
  misc_feature (1)..(25): SEQ ID NO: 6958; WAN024BHV_at; Start 375; Stop 399
gactctctattcacattatgcacat

SEQ ID NO: 81693 - DNA, 25 bp, Artificial
  probe
  misc_feature (1)..(25): SEQ ID NO: 6958; WAN024BHV_at; Start 587; Stop 611
gaagattggatatatcaaggtactc

SEQ ID NO: 81694 - DNA, 25 bp, Artificial
  probe
  misc_feature (1)..(25): SEQ ID NO: 6958; WAN024BHV_at; Start 372; Stop 396
agagactctctattcacattatgca

SEQ ID NO: 81695 - DNA, 25 bp, Artificial
  probe
  misc_feature (1)..(25): SEQ ID NO: 6958; WAN024BHV_at; Start 415; Stop 439
catttagatacaacgcgtgaaatca

SEQ ID NO: 81696 - DNA, 25 bp, Artificial
  probe
  misc_feature (1)..(25): SEQ ID NO: 6958; WAN024BHV_at; Start 315; Stop 339
taaggaatttatgtctgaagcggac

SEQ ID NO: 81697 - DNA, 25 bp, Artificial
  probe
  misc_feature (1)..(25): SEQ ID NO: 6958; WAN024BHV_at; Start 425; Stop 449
caacgcgtgaaatcataaaagaaat

SEQ ID NO: 81698 - DNA, 25 bp, Artificial
  probe
  misc_feature (1)..(25): SEQ ID NO: 6958; WAN024BHV_at; Start 593; Stop 617
tggatatatcaaggtactctgcttt

SEQ ID NO: 81699 - DNA, 25 bp, Artificial
  probe
  misc_feature (1)..(25): SEQ ID NO: 6958; WAN024BHV_at; Start 320; Stop 344
aatttatgtctgaagcggacgtcgt

SEQ ID NO: 81700 - DNA, 25 bp, Artificial
  probe
  misc_feature (1)..(25): SEQ ID NO: 6958; WAN024BHV_at; Start 449; Stop 473
tcgcaccagagtatctagaaacatt

SEQ ID NO: 81701 - DNA, 25 bp, Artificial
  probe
  misc_feature (1)..(25): SEQ ID NO: 6958; WAN024BHV_at; Start 406; Stop 430
gattctagtcatttagatacaacgc

SEQ ID NO: 81702 - DNA, 25 bp, Artificial
  probe
  misc_feature (1)..(25): SEQ ID NO: 6958; WAN024BHV_at; Start 457; Stop 481
gagtatctagaaacatttgataagg

SEQ ID NO: 81703 - DNA, 25 bp, Artificial
  probe
  misc_feature (1)..(25): SEQ ID NO: 6958; WAN024BHV_at; Start 421; Stop 445
gatacaacgcgtgaaatcataaaag

SEQ ID NO: 81704 - DNA, 25 bp, Artificial
  probe
  misc_feature (1)..(25): SEQ ID NO: 6958; WAN024BHV_at; Start 454; Stop 478
ccagagtatctagaaacatttgata

SEQ ID NO: 81705 - DNA, 25 bp, Artificial
  probe
  misc_feature (1)..(25): SEQ ID NO: 6958; WAN024BHV_at; Start 330; Stop 354
tgaagcggacgtcgttgttcctaaa

SEQ ID NO: 81706 - DNA, 25 bp, Artificial
  probe
  misc_feature (1)..(25): SEQ ID NO: 6958; WAN024BHV_at; Start 409; Stop 433
tctagtcatttagatacaacgcgtg

SEQ ID NO: 81707 - DNA, 25 bp, Artificial
  probe
  misc_feature (1)..(25): SEQ ID NO: 6958; WAN024BHV_at; Start 435; Stop 459
aatcataaaagaaatcgcaccagag

SEQ ID NO: 81708 - DNA, 25 bp, Artificial
  probe
  misc_feature (1)..(25): SEQ ID NO: 6958; WAN024BHV_at; Start 394; Stop 418
gcacatactcatgattctagtcatt

SEQ ID NO: 81709 - DNA, 25 bp, Artificial
  probe
  misc_feature (1)..(25): SEQ ID NO: 6958; WAN024BHV_at; Start 322; Stop 346
tttatgtctgaagcggacgtcgttg

SEQ ID NO: 81710 - DNA, 25 bp, Artificial
  probe
  misc_feature (1)..(25): SEQ ID NO: 6958; WAN024BHV_at; Start 326; Stop 350
tgtctgaagcggacgtcgttgttcc

SEQ ID NO: 81711 - DNA, 25 bp, Artificial
  probe
  misc_feature (1)..(25): SEQ ID NO: 6958; WAN024BHV_at; Start 318; Stop 342
ggaatttatgtctgaagcggacgtc

SEQ ID NO: 81712 - DNA, 25 bp, Artificial
  probe
  misc_feature (1)..(25): SEQ ID NO: 6958; WAN024BHV_at; Start 437; Stop 461
tcataaaagaaatcgcaccagagta

SEQ ID NO: 81713 - DNA, 25 bp, Artificial
  probe
  misc_feature (1)..(25): SEQ ID NO: 6958; WAN024BHV_at; Start 595; Stop 619
gatatatcaaggtactctgcttttg

SEQ ID NO: 81714 - DNA, 25 bp, Artificial
  probe
  misc_feature (1)..(25): SEQ ID NO: 6958; WAN024BHV_at; Start 440; Stop 464
taaaagaaatcgcaccagagtatct

SEQ ID NO: 81715 - DNA, 25 bp, Artificial
  probe
  misc_feature (1)..(25): SEQ ID NO: 6958; WAN024BHV_at; Start 451; Stop 475
gcaccagagtatctagaaacatttg

SEQ ID NO: 81716 - DNA, 25 bp, Artificial
  probe
  misc_feature (1)..(25): SEQ ID NO: 3119; WAN024BHW_s_at; Start 438; Stop 462
tataaaagaggtttcgccagaatat

SEQ ID NO: 81717 - DNA, 25 bp, Artificial
  probe
  misc_feature (1)..(25): SEQ ID NO: 3119; WAN024BHW_s_at; Start 447; Stop 471
ggtttcgccagaatatttagcaaca

SEQ ID NO: 81718 - DNA, 25 bp, Artificial
  probe
  misc_feature (1)..(25): SEQ ID NO: 3119; WAN024BHW_s_at; Start 331; Stop 355
gaagtagatgtcgttgttcccaaaa

SEQ ID NO: 81719 - DNA, 25 bp, Artificial
  probe
  misc_feature (1)..(25): SEQ ID NO: 3119; WAN024BHW_s_at; Start 327; Stop 351
gtctgaagtagatgtcgttgttccc

SEQ ID NO: 81720 - DNA, 25 bp, Artificial
  probe
  misc_feature (1)..(25): SEQ ID NO: 3119; WAN024BHW_s_at; Start 333; Stop 357
agtagatgtcgttgttcccaaaaag

SEQ ID NO: 81721 - DNA, 25 bp, Artificial
  probe
  misc_feature (1)..(25): SEQ ID NO: 3119; WAN024BHW_s_at; Start 335; Stop 359
tagatgtcgttgttcccaaaaagag

SEQ ID NO: 81722 - DNA, 25 bp, Artificial
  probe
  misc_feature (1)..(25): SEQ ID NO: 3119; WAN024BHW_s_at; Start 436; Stop 460
attataaaagaggtttcgccagaat

SEQ ID NO: 81723 - DNA, 25 bp, Artificial
  probe
  misc_feature (1)..(25): SEQ ID NO: 3119; WAN024BHW_s_at; Start 328; Stop 352
tctgaagtagatgtcgttgttccca

SEQ ID NO: 81724 - DNA, 25 bp, Artificial
  probe
  misc_feature (1)..(25): SEQ ID NO: 3119; WAN024BHW_s_at; Start 459; Stop 483
atatttagcaacatttgacaaggtg

SEQ ID NO: 81725 - DNA, 25 bp, Artificial
  probe
  misc_feature (1)..(25): SEQ ID NO: 3119; WAN024BHW_s_at; Start 336; Stop 360
agatgtcgttgttcccaaaaagaga

SEQ ID NO: 81726 - DNA, 25 bp, Artificial
  probe
  misc_feature (1)..(25): SEQ ID NO: 3119; WAN024BHW_s_at; Start 445; Stop 469
gaggtttcgccagaatatttagcaa

SEQ ID NO: 81727 - DNA, 25 bp, Artificial
  probe
  misc_feature (1)..(25): SEQ ID NO: 3119; WAN024BHW_s_at; Start 448; Stop 472
gtttcgccagaatatttagcaacat

SEQ ID NO: 81728 - DNA, 25 bp, Artificial
  probe
  misc_feature (1)..(25): SEQ ID NO: 3119; WAN024BHW_s_at; Start 451; Stop 475
tcgccagaatatttagcaacatttg

SEQ ID NO: 81729 - DNA, 25 bp, Artificial
  probe
  misc_feature (1)..(25): SEQ ID NO: 3119; WAN024BHW_s_at; Start 453; Stop 477
gccagaatatttagcaacatttgac

SEQ ID NO: 81730 - DNA, 25 bp, Artificial
  probe
  misc_feature (1)..(25): SEQ ID NO: 3119; WAN024BHW_s_at; Start 462; Stop 486
tttagcaacatttgacaaggtgatg

SEQ ID NO: 81731 - DNA, 25 bp, Artificial
  probe
  misc_feature (1)..(25): SEQ ID NO: 3119; WAN024BHW_s_at; Start 329; Stop 353
ctgaagtagatgtcgttgttcccaa

SEQ ID NO: 81732 - DNA, 25 bp, Artificial
  probe
  misc_feature (1)..(25): SEQ ID NO: 3119; WAN024BHW_s_at; Start 443; Stop 467
aagaggtttcgccagaatatttagc

SEQ ID NO: 81733 - DNA, 25 bp, Artificial
  probe
  misc_feature (1)..(25): SEQ ID NO: 3119; WAN024BHW_s_at; Start 330; Stop 354
tgaagtagatgtcgttgttcccaaa

SEQ ID NO: 81734 - DNA, 25 bp, Artificial
  probe
  misc_feature (1)..(25): SEQ ID NO: 3119; WAN024BHW_s_at; Start 457; Stop 481
gaatatttagcaacatttgacaagg

SEQ ID NO: 81735 - DNA, 25 bp, Artificial
  probe
  misc_feature (1)..(25): SEQ ID NO: 3119; WAN024BHW_s_at; Start 446; Stop 470
aggtttcgccagaatatttagcaac

SEQ ID NO: 81736 - DNA, 25 bp, Artificial
  probe
  misc_feature (1)..(25): SEQ ID NO: 3119; WAN024BHW_s_at; Start 452; Stop 476
cgccagaatatttagcaacatttga

SEQ ID NO: 81737 - DNA, 25 bp, Artificial
  probe
  misc_feature (1)..(25): SEQ ID NO: 3119; WAN024BHW_s_at; Start 458; Stop 482
aatatttagcaacatttgacaaggt

SEQ ID NO: 81738 - DNA, 25 bp, Artificial
  probe
  misc_feature (1)..(25): SEQ ID NO: 3119; WAN024BHW_s_at; Start 463; Stop 487
ttagcaacatttgacaaggtgatgg

SEQ ID NO: 81739 - DNA, 25 bp, Artificial
  probe
  misc_feature (1)..(25): SEQ ID NO: 3119; WAN024BHW_s_at; Start 455; Stop 479
cagaatatttagcaacatttgacaa

SEQ ID NO: 81740 - DNA, 25 bp, Artificial
  probe
  misc_feature (1)..(25): SEQ ID NO: 3119; WAN024BHW_s_at; Start 323; Stop 347
tcatgtctgaagtagatgtcgttgt

SEQ ID NO: 81741 - DNA, 25 bp, Artificial
  probe
  misc_feature (1)..(25): SEQ ID NO: 3119; WAN024BHW_s_at; Start 326; Stop 350
tgtctgaagtagatgtcgttgttcc

SEQ ID NO: 81742 - DNA, 25 bp, Artificial
  probe
  misc_feature (1)..(25): SEQ ID NO: 3119; WAN024BHW_s_at; Start 437; Stop 461
ttataaaagaggtttcgccagaata

SEQ ID NO: 81743 - DNA, 25 bp, Artificial
  probe
  misc_feature (1)..(25): SEQ ID NO: 3119; WAN024BHW_s_at; Start 439; Stop 463
ataaaagaggtttcgccagaatatt

SEQ ID NO: 81744 - DNA, 25 bp, Artificial
  probe
  misc_feature (1)..(25): SEQ ID NO: 3119; WAN024BHW_s_at; Start 444; Stop 468
agaggtttcgccagaatatttagca

SEQ ID NO: 81745 - DNA, 25 bp, Artificial
  probe
  misc_feature (1)..(25): SEQ ID NO: 3119; WAN024BHW_s_at; Start 460; Stop 484
tatttagcaacatttgacaaggtga

SEQ ID NO: 81746 - DNA, 25 bp, Artificial
  probe
  misc_feature (1)..(25): SEQ ID NO: 3119; WAN024BHW_s_at; Start 334; Stop 358
gtagatgtcgttgttcccaaaaaga

SEQ ID NO: 81747 - DNA, 25 bp, Artificial
  probe
  misc_feature (1)..(25): SEQ ID NO: 3119; WAN024BHW_s_at; Start 454; Stop 478
ccagaatatttagcaacatttgaca

SEQ ID NO: 81748 - DNA, 25 bp, Artificial
  probe
  misc_feature (1)..(25): SEQ ID NO: 3119; WAN024BHW_s_at; Start 324; Stop 348
catgtctgaagtagatgtcgttgtt

SEQ ID NO: 81749 - DNA, 25 bp, Artificial
  probe
  misc_feature (1)..(25): SEQ ID NO: 3119; WAN024BHW_s_at; Start 449; Stop 473
tttcgccagaatatttagcaacatt

SEQ ID NO: 81750 - DNA, 25 bp, Artificial
  probe
  misc_feature (1)..(25): SEQ ID NO: 3841; WAN024BHX_at; Start 45; Stop 69
ggatgttcttattggcttgtttgga

SEQ ID NO: 81751 - DNA, 25 bp, Artificial
  probe
  misc_feature (1)..(25): SEQ ID NO: 3841; WAN024BHX_at; Start 448; Stop 472
cagccagttttactatctgtacgac

SEQ ID NO: 81752 - DNA, 25 bp, Artificial
  probe
  misc_feature (1)..(25): SEQ ID NO: 3841; WAN024BHX_at; Start 540; Stop 564
ggagctgtattaccctcggaaccaa

SEQ ID NO: 81753 - DNA, 25 bp, Artificial
  probe
  misc_feature (1)..(25): SEQ ID NO: 3841; WAN024BHX_at; Start 315; Stop 339
catcggagattttataagaaaaacg

SEQ ID NO: 81754 - DNA, 25 bp, Artificial
  probe
  misc_feature (1)..(25): SEQ ID NO: 3841; WAN024BHX_at; Start 222; Stop 246
tgaagaagttttgaccgcaaataaa

SEQ ID NO: 81755 - DNA, 25 bp, Artificial
  probe
  misc_feature (1)..(25): SEQ ID NO: 3841; WAN024BHX_at; Start 229; Stop 253
gttttgaccgcaaataaagcactct

SEQ ID NO: 81756 - DNA, 25 bp, Artificial
  probe
  misc_feature (1)..(25): SEQ ID NO: 3841; WAN024BHX_at; Start 14; Stop 38
gcattatctatattagcttaaaacg

SEQ ID NO: 81757 - DNA, 25 bp, Artificial
  probe
  misc_feature (1)..(25): SEQ ID NO: 3841; WAN024BHX_at; Start 471; Stop 495
accaggtattacaggggtgtggcaa

SEQ ID NO: 81758 - DNA, 25 bp, Artificial
  probe
  misc_feature (1)..(25): SEQ ID NO: 3841; WAN024BHX_at; Start 543; Stop 567
gctgtattaccctcggaaccaatcc

SEQ ID NO: 81759 - DNA, 25 bp, Artificial
  probe
  misc_feature (1)..(25): SEQ ID NO: 3841; WAN024BHX_at; Start 377; Stop 401
ttggagatatgagtcttattggacc

SEQ ID NO: 81760 - DNA, 25 bp, Artificial
  probe
  misc_feature (1)..(25): SEQ ID NO: 3841; WAN024BHX_at; Start 136; Stop 160
gggagtatattttttacacaataca

SEQ ID NO: 81761 - DNA, 25 bp, Artificial
  probe
  misc_feature (1)..(25): SEQ ID NO: 3841; WAN024BHX_at; Start 68; Stop 92
gaacaatattcacagtcttgccctg

SEQ ID NO: 81762 - DNA, 25 bp, Artificial
  probe
  misc_feature (1)..(25): SEQ ID NO: 3841; WAN024BHX_at; Start 37; Stop 61
cgagttatggatgttcttattggct

SEQ ID NO: 81763 - DNA, 25 bp, Artificial
  probe
  misc_feature (1)..(25): SEQ ID NO: 3841; WAN024BHX_at; Start 556; Stop 580
cggaaccaatcctttttattagatg

SEQ ID NO: 81764 - DNA, 25 bp, Artificial
  probe
  misc_feature (1)..(25): SEQ ID NO: 3841; WAN024BHX_at; Start 29; Stop 53
gcttaaaacgagttatggatgttct

SEQ ID NO: 81765 - DNA, 25 bp, Artificial
  probe
  misc_feature (1)..(25): SEQ ID NO: 3841; WAN024BHX_at; Start 78; Stop 102
cacagtcttgccctgttctctaata

SEQ ID NO: 81766 - DNA, 25 bp, Artificial
  probe
  misc_feature (1)..(25): SEQ ID NO: 3841; WAN024BHX_at; Start 529; Stop 553
cgctgtgaaatggagctgtattacc

SEQ ID NO: 81767 - DNA, 25 bp, Artificial
  probe
  misc_feature (1)..(25): SEQ ID NO: 3841; WAN024BHX_at; Start 458; Stop 482
tactatctgtacgaccaggtattac

SEQ ID NO: 81768 - DNA, 25 bp, Artificial
  probe
  misc_feature (1)..(25): SEQ ID NO: 3841; WAN024BHX_at; Start 460; Stop 484
ctatctgtacgaccaggtattacag

SEQ ID NO: 81769 - DNA, 25 bp, Artificial
  probe
  misc_feature (1)..(25): SEQ ID NO: 3841; WAN024BHX_at; Start 562; Stop 586
caatcctttttattagatgtcaaaa

SEQ ID NO: 81770 - DNA, 25 bp, Artificial
  probe
  misc_feature (1)..(25): SEQ ID NO: 3841; WAN024BHX_at; Start 143; Stop 167
tattttttacacaatacagagtggg

SEQ ID NO: 81771 - DNA, 25 bp, Artificial
  probe
  misc_feature (1)..(25): SEQ ID NO: 3841; WAN024BHX_at; Start 367; Stop 391
aacttgttgtttggagatatgagtc

SEQ ID NO: 81772 - DNA, 25 bp, Artificial
  probe
  misc_feature (1)..(25): SEQ ID NO: 3841; WAN024BHX_at; Start 452; Stop 476
cagttttactatctgtacgaccagg

SEQ ID NO: 81773 - DNA, 25 bp, Artificial
  probe
  misc_feature (1)..(25): SEQ ID NO: 3841; WAN024BHX_at; Start 437; Stop 461
ctaaggaagaacagccagttttact

SEQ ID NO: 81774 - DNA, 25 bp, Artificial
  probe
  misc_feature (1)..(25): SEQ ID NO: 3841; WAN024BHX_at; Start 306; Stop 330
tcttaccaacatcggagattttata

SEQ ID NO: 81775 - DNA, 25 bp, Artificial
  probe
  misc_feature (1)..(25): SEQ ID NO: 3841; WAN024BHX_at; Start 22; Stop 46
tatattagcttaaaacgagttatgg

SEQ ID NO: 81776 - DNA, 25 bp, Artificial
  probe
  misc_feature (1)..(25): SEQ ID NO: 3841; WAN024BHX_at; Start 535; Stop 559
gaaatggagctgtattaccctcgga

SEQ ID NO: 81777 - DNA, 25 bp, Artificial
  probe
  misc_feature (1)..(25): SEQ ID NO: 3841; WAN024BHX_at; Start 86; Stop 110
tgccctgttctctaataatttatat

SEQ ID NO: 81778 - DNA, 25 bp, Artificial
  probe
  misc_feature (1)..(25): SEQ ID NO: 3841; WAN024BHX_at; Start 58; Stop 82
ggcttgtttggaacaatattcacag

SEQ ID NO: 81779 - DNA, 25 bp, Artificial
  probe
  misc_feature (1)..(25): SEQ ID NO: 3841; WAN024BHX_at; Start 1; Stop 25
gtgaaaagaaatagcattatctata

SEQ ID NO: 81780 - DNA, 25 bp, Artificial
  probe
  misc_feature (1)..(25): SEQ ID NO: 3841; WAN024BHX_at; Start 332; Stop 356
gaaaaacgagtattgatgaaattcc

SEQ ID NO: 81781 - DNA, 25 bp, Artificial
  probe
  misc_feature (1)..(25): SEQ ID NO: 3841; WAN024BHX_at; Start 442; Stop 466
gaagaacagccagttttactatctg

SEQ ID NO: 81782 - DNA, 25 bp, Artificial
  probe
  misc_feature (1)..(25): SEQ ID NO: 3841; WAN024BHX_at; Start 311; Stop 335
ccaacatcggagattttataagaaa

SEQ ID NO: 81783 - DNA, 25 bp, Artificial
  probe
  misc_feature (1)..(25): SEQ ID NO: 3841; WAN024BHX_at; Start 358; Stop 382
caatttataaacttgttgtttggag

SEQ ID NO: 81784 - DNA, 25 bp, Artificial
  probe
  misc_feature (1)..(25): SEQ ID NO: 1797; WAN024BHY_at; Start 1; Stop 25
atgattaccatgagaggagagttta

SEQ ID NO: 81785 - DNA, 25 bp, Artificial
  probe
  misc_feature (1)..(25): SEQ ID NO: 1797; WAN024BHY_at; Start 5; Stop 29
ttaccatgagaggagagtttaaggt

SEQ ID NO: 81786 - DNA, 25 bp, Artificial
  probe
  misc_feature (1)..(25): SEQ ID NO: 1797; WAN024BHY_at; Start 168; Stop 192
tatattcttcacacaatatagagtg

SEQ ID NO: 81787 - DNA, 25 bp, Artificial
  probe
  misc_feature (1)..(25): SEQ ID NO: 1797; WAN024BHY_at; Start 2; Stop 26
tgattaccatgagaggagagtttaa

SEQ ID NO: 81788 - DNA, 25 bp, Artificial
  probe
  misc_feature (1)..(25): SEQ ID NO: 1797; WAN024BHY_at; Start 4; Stop 28
attaccatgagaggagagtttaagg

SEQ ID NO: 81789 - DNA, 25 bp, Artificial
  probe
  misc_feature (1)..(25): SEQ ID NO: 1797; WAN024BHY_at; Start 169; Stop 193
atattcttcacacaatatagagtgg

SEQ ID NO: 81790 - DNA, 25 bp, Artificial
  probe
  misc_feature (1)..(25): SEQ ID NO: 1797; WAN024BHY_at; Start 7; Stop 31
accatgagaggagagtttaaggtga

SEQ ID NO: 81791 - DNA, 25 bp, Artificial
  probe
  misc_feature (1)..(25): SEQ ID NO: 1797; WAN024BHY_at; Start 3; Stop 27
gattaccatgagaggagagtttaag

SEQ ID NO: 81792 - DNA, 25 bp, Artificial
  probe
  misc_feature (1)..(25): SEQ ID NO: 1797; WAN024BHY_at; Start 6; Stop 30
taccatgagaggagagtttaaggtg

SEQ ID NO: 81793 - DNA, 25 bp, Artificial
  probe
  misc_feature (1)..(25): SEQ ID NO: 1797; WAN024BHY_at; Start 170; Stop 194
tattcttcacacaatatagagtggg

SEQ ID NO: 81794 - DNA, 25 bp, Artificial
  probe
  misc_feature (1)..(25): SEQ ID NO: 1797; WAN024BHY_at; Start 171; Stop 195
attcttcacacaatatagagtgggg

SEQ ID NO: 81795 - DNA, 25 bp, Artificial
  probe
  misc_feature (1)..(25): SEQ ID NO: 6725; WAN024BHZ_at; Start 634; Stop 658
catgaaaaatatggttcttacggta

SEQ ID NO: 81796 - DNA, 25 bp, Artificial
  probe
  misc_feature (1)..(25): SEQ ID NO: 6725; WAN024BHZ_at; Start 224; Stop 248
gaaattcggtgatgtcaggagtttt

SEQ ID NO: 81797 - DNA, 25 bp, Artificial
  probe
  misc_feature (1)..(25): SEQ ID NO: 6725; WAN024BHZ_at; Start 604; Stop 628
ggtgtcgttctcaataaatttaatg

SEQ ID NO: 81798 - DNA, 25 bp, Artificial
  probe
  misc_feature (1)..(25): SEQ ID NO: 6725; WAN024BHZ_at; Start 594; Stop 618
actatttttaggtgtcgttctcaat

SEQ ID NO: 81799 - DNA, 25 bp, Artificial
  probe
  misc_feature (1)..(25): SEQ ID NO: 6725; WAN024BHZ_at; Start 209; Stop 233
tagatggcgatatccgaaattcggt

SEQ ID NO: 81800 - DNA, 25 bp, Artificial
  probe
  misc_feature (1)..(25): SEQ ID NO: 6725; WAN024BHZ_at; Start 507; Stop 531
tgatgcgtctatcttggtaacggca

SEQ ID NO: 81801 - DNA, 25 bp, Artificial
  probe
  misc_feature (1)..(25): SEQ ID NO: 6725; WAN024BHZ_at; Start 641; Stop 665
aatatggttcttacggtaattatgg

SEQ ID NO: 81802 - DNA, 25 bp, Artificial
  probe
  misc_feature (1)..(25): SEQ ID NO: 6725; WAN024BHZ_at; Start 257; Stop 281
gtgaaaaaattacaggcttaacaga

SEQ ID NO: 81803 - DNA, 25 bp, Artificial
  probe
  misc_feature (1)..(25): SEQ ID NO: 6725; WAN024BHZ_at; Start 231; Stop 255
ggtgatgtcaggagtttttaaatct

SEQ ID NO: 81804 - DNA, 25 bp, Artificial
  probe
  misc_feature (1)..(25): SEQ ID NO: 6725; WAN024BHZ_at; Start 508; Stop 532
gatgcgtctatcttggtaacggcaa

SEQ ID NO: 81805 - DNA, 25 bp, Artificial
  probe
  misc_feature (1)..(25): SEQ ID NO: 6725; WAN024BHZ_at; Start 511; Stop 535
gcgtctatcttggtaacggcaacgg

SEQ ID NO: 81806 - DNA, 25 bp, Artificial
  probe
  misc_feature (1)..(25): SEQ ID NO: 6725; WAN024BHZ_at; Start 229; Stop 253
tcggtgatgtcaggagtttttaaat

SEQ ID NO: 81807 - DNA, 25 bp, Artificial
  probe
  misc_feature (1)..(25): SEQ ID NO: 6725; WAN024BHZ_at; Start 613; Stop 637
ctcaataaatttaatgttcaacatg

SEQ ID NO: 81808 - DNA, 25 bp, Artificial
  probe
  misc_feature (1)..(25): SEQ ID NO: 6725; WAN024BHZ_at; Start 221; Stop 245
tccgaaattcggtgatgtcaggagt

SEQ ID NO: 81809 - DNA, 25 bp, Artificial
  probe
  misc_feature (1)..(25): SEQ ID NO: 6725; WAN024BHZ_at; Start 460; Stop 484
gcacctattggagttgttattgatt

SEQ ID NO: 81810 - DNA, 25 bp, Artificial
  probe
  misc_feature (1)..(25): SEQ ID NO: 6725; WAN024BHZ_at; Start 213; Stop 237
tggcgatatccgaaattcggtgatg

SEQ ID NO: 81811 - DNA, 25 bp, Artificial
  probe
  misc_feature (1)..(25): SEQ ID NO: 6725; WAN024BHZ_at; Start 514; Stop 538
tctatcttggtaacggcaacgggtg

SEQ ID NO: 81812 - DNA, 25 bp, Artificial
  probe
  misc_feature (1)..(25): SEQ ID NO: 6725; WAN024BHZ_at; Start 200; Stop 224
ctcttttgatagatggcgatatccg

SEQ ID NO: 81813 - DNA, 25 bp, Artificial
  probe
  misc_feature (1)..(25): SEQ ID NO: 6725; WAN024BHZ_at; Start 160; Stop 184
ataaatatagcatggtcttttgcgc

SEQ ID NO: 81814 - DNA, 25 bp, Artificial
  probe
  misc_feature (1)..(25): SEQ ID NO: 6725; WAN024BHZ_at; Start 520; Stop 544
ttggtaacggcaacgggtgaggtga

SEQ ID NO: 81815 - DNA, 25 bp, Artificial
  probe
  misc_feature (1)..(25): SEQ ID NO: 6725; WAN024BHZ_at; Start 202; Stop 226
cttttgatagatggcgatatccgaa

SEQ ID NO: 81816 - DNA, 25 bp, Artificial
  probe
  misc_feature (1)..(25): SEQ ID NO: 6725; WAN024BHZ_at; Start 222; Stop 246
ccgaaattcggtgatgtcaggagtt

SEQ ID NO: 81817 - DNA, 25 bp, Artificial
  probe
  misc_feature (1)..(25): SEQ ID NO: 6725; WAN024BHZ_at; Start 505; Stop 529
tgtgatgcgtctatcttggtaacgg

SEQ ID NO: 81818 - DNA, 25 bp, Artificial
  probe
  misc_feature (1)..(25): SEQ ID NO: 6725; WAN024BHZ_at; Start 627; Stop 651
tgttcaacatgaaaaatatggttct

SEQ ID NO: 81819 - DNA, 25 bp, Artificial
  probe
  misc_feature (1)..(25): SEQ ID NO: 6725; WAN024BHZ_at; Start 149; Stop 173
caactacttctataaatatagcatg

SEQ ID NO: 81820 - DNA, 25 bp, Artificial
  probe
  misc_feature (1)..(25): SEQ ID NO: 6725; WAN024BHZ_at; Start 512; Stop 536
cgtctatcttggtaacggcaacggg

SEQ ID NO: 81821 - DNA, 25 bp, Artificial
  probe
  misc_feature (1)..(25): SEQ ID NO: 6725; WAN024BHZ_at; Start 609; Stop 633
cgttctcaataaatttaatgttcaa

SEQ ID NO: 81822 - DNA, 25 bp, Artificial
  probe
  misc_feature (1)..(25): SEQ ID NO: 6725; WAN024BHZ_at; Start 602; Stop 626
taggtgtcgttctcaataaatttaa

SEQ ID NO: 81823 - DNA, 25 bp, Artificial
  probe
  misc_feature (1)..(25): SEQ ID NO: 6725; WAN024BHZ_at; Start 207; Stop 231
gatagatggcgatatccgaaattcg

SEQ ID NO: 81824 - DNA, 25 bp, Artificial
  probe
  misc_feature (1)..(25): SEQ ID NO: 6725; WAN024BHZ_at; Start 510; Stop 534
tgcgtctatcttggtaacggcaacg

SEQ ID NO: 81825 - DNA, 25 bp, Artificial
  probe
  misc_feature (1)..(25): SEQ ID NO: 6725; WAN024BHZ_at; Start 216; Stop 240
cgatatccgaaattcggtgatgtca

SEQ ID NO: 81826 - DNA, 25 bp, Artificial
  probe
  misc_feature (1)..(25): SEQ ID NO: 6725; WAN024BHZ_at; Start 197; Stop 221
aaactcttttgatagatggcgatat

SEQ ID NO: 81827 - DNA, 25 bp, Artificial
  probe
  misc_feature (1)..(25): SEQ ID NO: 6725; WAN024BHZ_at; Start 515; Stop 539
ctatcttggtaacggcaacgggtga

SEQ ID NO: 81828 - DNA, 25 bp, Artificial
  probe
  misc_feature (1)..(25): SEQ ID NO: 6725; WAN024BHZ_at; Start 210; Stop 234
agatggcgatatccgaaattcggtg

SEQ ID NO: 81829 - DNA, 25 bp, Artificial
  probe
  misc_feature (1)..(25): SEQ ID NO: 6904; WAN024BI3_x_at; Start 40; Stop 64
gtaccaagattatttgagatgatta

SEQ ID NO: 81830 - DNA, 25 bp, Artificial
  probe
  misc_feature (1)..(25): SEQ ID NO: 6904; WAN024BI3_x_at; Start 23; Stop 47
aaataaatagtcttgtagtaccaag

SEQ ID NO: 81831 - DNA, 25 bp, Artificial
  probe
  misc_feature (1)..(25): SEQ ID NO: 6904; WAN024BI3_x_at; Start 19; Stop 43
atggaaataaatagtcttgtagtac

SEQ ID NO: 81832 - DNA, 25 bp, Artificial
  probe
  misc_feature (1)..(25): SEQ ID NO: 6904; WAN024BI3_x_at; Start 6; Stop 30
ggctatgggaactatggaaataaat

SEQ ID NO: 81833 - DNA, 25 bp, Artificial
  probe
  misc_feature (1)..(25): SEQ ID NO: 6904; WAN024BI3_x_at; Start 32; Stop 56
gtcttgtagtaccaagattatttga

SEQ ID NO: 81834 - DNA, 25 bp, Artificial
  probe
  misc_feature (1)..(25): SEQ ID NO: 6904; WAN024BI3_x_at; Start 17; Stop 41
ctatggaaataaatagtcttgtagt

SEQ ID NO: 81835 - DNA, 25 bp, Artificial
  probe
  misc_feature (1)..(25): SEQ ID NO: 6904; WAN024BI3_x_at; Start 41; Stop 65
taccaagattatttgagatgattat

SEQ ID NO: 81836 - DNA, 25 bp, Artificial
  probe
  misc_feature (1)..(25): SEQ ID NO: 6904; WAN024BI3_x_at; Start 22; Stop 46
gaaataaatagtcttgtagtaccaa

SEQ ID NO: 81837 - DNA, 25 bp, Artificial
  probe
  misc_feature (1)..(25): SEQ ID NO: 6904; WAN024BI3_x_at; Start 26; Stop 50
taaatagtcttgtagtaccaagatt

SEQ ID NO: 81838 - DNA, 25 bp, Artificial
  probe
  misc_feature (1)..(25): SEQ ID NO: 6904; WAN024BI3_x_at; Start 21; Stop 45
ggaaataaatagtcttgtagtacca

SEQ ID NO: 81839 - DNA, 25 bp, Artificial
  probe
  misc_feature (1)..(25): SEQ ID NO: 6904; WAN024BI3_x_at; Start 24; Stop 48
aataaatagtcttgtagtaccaaga

SEQ ID NO: 81840 - DNA, 25 bp, Artificial
  probe
  misc_feature (1)..(25): SEQ ID NO: 6904; WAN024BI3_x_at; Start 7; Stop 31
gctatgggaactatggaaataaata

SEQ ID NO: 81841 - DNA, 25 bp, Artificial
  probe
  misc_feature (1)..(25): SEQ ID NO: 6904; WAN024BI3_x_at; Start 43; Stop 67
ccaagattatttgagatgattatta

SEQ ID NO: 81842 - DNA, 25 bp, Artificial
  probe
  misc_feature (1)..(25): SEQ ID NO: 6904; WAN024BI3_x_at; Start 37; Stop 61
gtagtaccaagattatttgagatga

SEQ ID NO: 81843 - DNA, 25 bp, Artificial
  probe
  misc_feature (1)..(25): SEQ ID NO: 6904; WAN024BI3_x_at; Start 27; Stop 51
aaatagtcttgtagtaccaagatta

SEQ ID NO: 81844 - DNA, 25 bp, Artificial
  probe
  misc_feature (1)..(25): SEQ ID NO: 6904; WAN024BI3_x_at; Start 36; Stop 60
tgtagtaccaagattatttgagatg

SEQ ID NO: 81845 - DNA, 25 bp, Artificial
  probe
  misc_feature (1)..(25): SEQ ID NO: 6904; WAN024BI3_x_at; Start 47; Stop 71
gattatttgagatgattattatggg

SEQ ID NO: 81846 - DNA, 25 bp, Artificial
  probe
  misc_feature (1)..(25): SEQ ID NO: 6904; WAN024BI3_x_at; Start 5; Stop 29
gggctatgggaactatggaaataaa

SEQ ID NO: 81847 - DNA, 25 bp, Artificial
  probe
  misc_feature (1)..(25): SEQ ID NO: 6904; WAN024BI3_x_at; Start 18; Stop 42
tatggaaataaatagtcttgtagta

SEQ ID NO: 81848 - DNA, 25 bp, Artificial
  probe
  misc_feature (1)..(25): SEQ ID NO: 6904; WAN024BI3_x_at; Start 16; Stop 40
actatggaaataaatagtcttgtag

SEQ ID NO: 81849 - DNA, 25 bp, Artificial
  probe
  misc_feature (1)..(25): SEQ ID NO: 6904; WAN024BI3_x_at; Start 38; Stop 62
tagtaccaagattatttgagatgat

SEQ ID NO: 81850 - DNA, 25 bp, Artificial
  probe
  misc_feature (1)..(25): SEQ ID NO: 6904; WAN024BI3_x_at; Start 25; Stop 49
ataaatagtcttgtagtaccaagat

SEQ ID NO: 81851 - DNA, 25 bp, Artificial
  probe
  misc_feature (1)..(25): SEQ ID NO: 6904; WAN024BI3_x_at; Start 20; Stop 44
tggaaataaatagtcttgtagtacc

SEQ ID NO: 81852 - DNA, 25 bp, Artificial
  probe
  misc_feature (1)..(25): SEQ ID NO: 6904; WAN024BI3_x_at; Start 49; Stop 73
ttatttgagatgattattatgggag

SEQ ID NO: 81853 - DNA, 25 bp, Artificial
  probe
  misc_feature (1)..(25): SEQ ID NO: 6904; WAN024BI3_x_at; Start 28; Stop 52
aatagtcttgtagtaccaagattat

SEQ ID NO: 81854 - DNA, 25 bp, Artificial
  probe
  misc_feature (1)..(25): SEQ ID NO: 6904; WAN024BI3_x_at; Start 50; Stop 74
tatttgagatgattattatgggagg

SEQ ID NO: 81855 - DNA, 25 bp, Artificial
  probe
  misc_feature (1)..(25): SEQ ID NO: 6904; WAN024BI3_x_at; Start 34; Stop 58
cttgtagtaccaagattatttgaga

SEQ ID NO: 81856 - DNA, 25 bp, Artificial
  probe
  misc_feature (1)..(25): SEQ ID NO: 6904; WAN024BI3_x_at; Start 31; Stop 55
agtcttgtagtaccaagattatttg

SEQ ID NO: 81857 - DNA, 25 bp, Artificial
  probe
  misc_feature (1)..(25): SEQ ID NO: 6904; WAN024BI3_x_at; Start 51; Stop 75
atttgagatgattattatgggaggg

SEQ ID NO: 81858 - DNA, 25 bp, Artificial
  probe
  misc_feature (1)..(25): SEQ ID NO: 6904; WAN024BI3_x_at; Start 15; Stop 39
aactatggaaataaatagtcttgta

SEQ ID NO: 81859 - DNA, 25 bp, Artificial
  probe
  misc_feature (1)..(25): SEQ ID NO: 6904; WAN024BI3_x_at; Start 30; Stop 54
tagtcttgtagtaccaagattattt

SEQ ID NO: 81860 - DNA, 25 bp, Artificial
  probe
  misc_feature (1)..(25): SEQ ID NO: 6904; WAN024BI3_x_at; Start 35; Stop 59
ttgtagtaccaagattatttgagat

SEQ ID NO: 81861 - DNA, 25 bp, Artificial
  probe
  misc_feature (1)..(25): SEQ ID NO: 6904; WAN024BI3_x_at; Start 44; Stop 68
caagattatttgagatgattattat

SEQ ID NO: 81862 - DNA, 25 bp, Artificial
  probe
  misc_feature (1)..(25): SEQ ID NO: 6904; WAN024BI3_x_at; Start 33; Stop 57
tcttgtagtaccaagattatttgag

SEQ ID NO: 81863 - DNA, 25 bp, Artificial
  probe
  misc_feature (1)..(25): SEQ ID NO: 15; WAN024BI4_x_at; Start 42; Stop 66
accaagattatttgagatgattact

SEQ ID NO: 81864 - DNA, 25 bp, Artificial
  probe
  misc_feature (1)..(25): SEQ ID NO: 15; WAN024BI4_x_at; Start 23; Stop 47
aaataaatagtcttacagtaccaag

SEQ ID NO: 81865 - DNA, 25 bp, Artificial
  probe
  misc_feature (1)..(25): SEQ ID NO: 15; WAN024BI4_x_at; Start 27; Stop 51
aaatagtcttacagtaccaagatta

SEQ ID NO: 81866 - DNA, 25 bp, Artificial
  probe
  misc_feature (1)..(25): SEQ ID NO: 15; WAN024BI4_x_at; Start 32; Stop 56
gtcttacagtaccaagattatttga

SEQ ID NO: 81867 - DNA, 25 bp, Artificial
  probe
  misc_feature (1)..(25): SEQ ID NO: 15; WAN024BI4_x_at; Start 17; Stop 41
ctatggaaataaatagtcttacagt

SEQ ID NO: 81868 - DNA, 25 bp, Artificial
  probe
  misc_feature (1)..(25): SEQ ID NO: 15; WAN024BI4_x_at; Start 41; Stop 65
taccaagattatttgagatgattac

SEQ ID NO: 81869 - DNA, 25 bp, Artificial
  probe
  misc_feature (1)..(25): SEQ ID NO: 15; WAN024BI4_x_at; Start 57; Stop 81
gatgattactatgggagggggagtt

SEQ ID NO: 81870 - DNA, 25 bp, Artificial
  probe
  misc_feature (1)..(25): SEQ ID NO: 15; WAN024BI4_x_at; Start 22; Stop 46
gaaataaatagtcttacagtaccaa

SEQ ID NO: 81871 - DNA, 25 bp, Artificial
  probe
  misc_feature (1)..(25): SEQ ID NO: 15; WAN024BI4_x_at; Start 21; Stop 45
ggaaataaatagtcttacagtacca

SEQ ID NO: 81872 - DNA, 25 bp, Artificial
  probe
  misc_feature (1)..(25): SEQ ID NO: 15; WAN024BI4_x_at; Start 48; Stop 72
attatttgagatgattactatggga

SEQ ID NO: 81873 - DNA, 25 bp, Artificial
  probe
  misc_feature (1)..(25): SEQ ID NO: 15; WAN024BI4_x_at; Start 24; Stop 48
aataaatagtcttacagtaccaaga

SEQ ID NO: 81874 - DNA, 25 bp, Artificial
  probe
  misc_feature (1)..(25): SEQ ID NO: 15; WAN024BI4_x_at; Start 43; Stop 67
ccaagattatttgagatgattacta

SEQ ID NO: 81875 - DNA, 25 bp, Artificial
  probe
  misc_feature (1)..(25): SEQ ID NO: 15; WAN024BI4_x_at; Start 37; Stop 61
acagtaccaagattatttgagatga

SEQ ID NO: 81876 - DNA, 25 bp, Artificial
  probe
  misc_feature (1)..(25): SEQ ID NO: 15; WAN024BI4_x_at; Start 47; Stop 71
gattatttgagatgattactatggg

SEQ ID NO: 81877 - DNA, 25 bp, Artificial
  probe
  misc_feature (1)..(25): SEQ ID NO: 15; WAN024BI4_x_at; Start 38; Stop 62
cagtaccaagattatttgagatgat

SEQ ID NO: 81878 - DNA, 25 bp, Artificial
  probe
  misc_feature (1)..(25): SEQ ID NO: 15; WAN024BI4_x_at; Start 16; Stop 40
actatggaaataaatagtcttacag

SEQ ID NO: 81879 - DNA, 25 bp, Artificial
  probe
  misc_feature (1)..(25): SEQ ID NO: 15; WAN024BI4_x_at; Start 18; Stop 42
tatggaaataaatagtcttacagta

SEQ ID NO: 81880 - DNA, 25 bp, Artificial
  probe
  misc_feature (1)..(25): SEQ ID NO: 15; WAN024BI4_x_at; Start 20; Stop 44
tggaaataaatagtcttacagtacc

SEQ ID NO: 81881 - DNA, 25 bp, Artificial
  probe
  misc_feature (1)..(25): SEQ ID NO: 15; WAN024BI4_x_at; Start 49; Stop 73
ttatttgagatgattactatgggag

SEQ ID NO: 81882 - DNA, 25 bp, Artificial
  probe
  misc_feature (1)..(25): SEQ ID NO: 15; WAN024BI4_x_at; Start 36; Stop 60
tacagtaccaagattatttgagatg

SEQ ID NO: 81883 - DNA, 25 bp, Artificial
  probe
  misc_feature (1)..(25): SEQ ID NO: 15; WAN024BI4_x_at; Start 28; Stop 52
aatagtcttacagtaccaagattat

SEQ ID NO: 81884 - DNA, 25 bp, Artificial
  probe
  misc_feature (1)..(25): SEQ ID NO: 15; WAN024BI4_x_at; Start 50; Stop 74
tatttgagatgattactatgggagg

SEQ ID NO: 81885 - DNA, 25 bp, Artificial
  probe
  misc_feature (1)..(25): SEQ ID NO: 15; WAN024BI4_x_at; Start 6; Stop 30
ggatatgggaactatggaaataaat

SEQ ID NO: 81886 - DNA, 25 bp, Artificial
  probe
  misc_feature (1)..(25): SEQ ID NO: 15; WAN024BI4_x_at; Start 34; Stop 58
cttacagtaccaagattatttgaga

SEQ ID NO: 81887 - DNA, 25 bp, Artificial
  probe
  misc_feature (1)..(25): SEQ ID NO: 15; WAN024BI4_x_at; Start 31; Stop 55
agtcttacagtaccaagattatttg

SEQ ID NO: 81888 - DNA, 25 bp, Artificial
  probe
  misc_feature (1)..(25): SEQ ID NO: 15; WAN024BI4_x_at; Start 46; Stop 70
agattatttgagatgattactatgg

SEQ ID NO: 81889 - DNA, 25 bp, Artificial
  probe
  misc_feature (1)..(25): SEQ ID NO: 15; WAN024BI4_x_at; Start 51; Stop 75
atttgagatgattactatgggaggg

SEQ ID NO: 81890 - DNA, 25 bp, Artificial
  probe
  misc_feature (1)..(25): SEQ ID NO: 15; WAN024BI4_x_at; Start 15; Stop 39
aactatggaaataaatagtcttaca

SEQ ID NO: 81891 - DNA, 25 bp, Artificial
  probe
  misc_feature (1)..(25): SEQ ID NO: 15; WAN024BI4_x_at; Start 25; Stop 49
ataaatagtcttacagtaccaagat

SEQ ID NO: 81892 - DNA, 25 bp, Artificial
  probe
  misc_feature (1)..(25): SEQ ID NO: 15; WAN024BI4_x_at; Start 30; Stop 54
tagtcttacagtaccaagattattt

SEQ ID NO: 81893 - DNA, 25 bp, Artificial
  probe
  misc_feature (1)..(25): SEQ ID NO: 15; WAN024BI4_x_at; Start 26; Stop 50
taaatagtcttacagtaccaagatt

SEQ ID NO: 81894 - DNA, 25 bp, Artificial
  probe
  misc_feature (1)..(25): SEQ ID NO: 15; WAN024BI4_x_at; Start 44; Stop 68
caagattatttgagatgattactat

SEQ ID NO: 81895 - DNA, 25 bp, Artificial
  probe
  misc_feature (1)..(25): SEQ ID NO: 15; WAN024BI4_x_at; Start 35; Stop 59
ttacagtaccaagattatttgagat

SEQ ID NO: 81896 - DNA, 25 bp, Artificial
  probe
  misc_feature (1)..(25): SEQ ID NO: 15; WAN024BI4_x_at; Start 33; Stop 57
tcttacagtaccaagattatttgag

SEQ ID NO: 81897 - DNA, 25 bp, Artificial
  probe
  misc_feature (1)..(25): SEQ ID NO: 1978; WAN024BI5_at; Start 249; Stop 273
tagatctagtgagaagattactggc

SEQ ID NO: 81898 - DNA, 25 bp, Artificial
  probe
  misc_feature (1)..(25): SEQ ID NO: 1978; WAN024BI5_at; Start 17; Stop 41
tcacacagaaaaaattggagatcgt

SEQ ID NO: 81899 - DNA, 25 bp, Artificial
  probe
  misc_feature (1)..(25): SEQ ID NO: 1978; WAN024BI5_at; Start 457; Stop 481
actgctcccataggtatcgtgattg

SEQ ID NO: 81900 - DNA, 25 bp, Artificial
  probe
  misc_feature (1)..(25): SEQ ID NO: 1978; WAN024BI5_at; Start 292; Stop 316
ggtacaacagacttgtcacaaggtc

SEQ ID NO: 81901 - DNA, 25 bp, Artificial
  probe
  misc_feature (1)..(25): SEQ ID NO: 1978; WAN024BI5_at; Start 376; Stop 400
cccacagctcttttacaaagtgaga

SEQ ID NO: 81902 - DNA, 25 bp, Artificial
  probe
  misc_feature (1)..(25): SEQ ID NO: 1978; WAN024BI5_at; Start 90; Stop 114
aagtggagataatttgaaagtcatc

SEQ ID NO: 81903 - DNA, 25 bp, Artificial
  probe
  misc_feature (1)..(25): SEQ ID NO: 1978; WAN024BI5_at; Start 442; Stop 466
tatatcattgtggatactgctccca

SEQ ID NO: 81904 - DNA, 25 bp, Artificial
  probe
  misc_feature (1)..(25): SEQ ID NO: 1978; WAN024BI5_at; Start 221; Stop 245
ttcgtaactcggtcatgtcaggtgt

SEQ ID NO: 81905 - DNA, 25 bp, Artificial
  probe
  misc_feature (1)..(25): SEQ ID NO: 1978; WAN024BI5_at; Start 324; Stop 348
taccaatgttgaaaatctctttgtc

SEQ ID NO: 81906 - DNA, 25 bp, Artificial
  probe
  misc_feature (1)..(25): SEQ ID NO: 1978; WAN024BI5_at; Start 574; Stop 598
cacttggaacaaacaggcaagccgt

SEQ ID NO: 81907 - DNA, 25 bp, Artificial
  probe
  misc_feature (1)..(25): SEQ ID NO: 1978; WAN024BI5_at; Start 591; Stop 615
caagccgtttttaggagttgtgcta

SEQ ID NO: 81908 - DNA, 25 bp, Artificial
  probe
  misc_feature (1)..(25): SEQ ID NO: 1978; WAN024BI5_at; Start 525; Stop 549
tacggcagttggtgaagtacatcgc

SEQ ID NO: 81909 - DNA, 25 bp, Artificial
  probe
  misc_feature (1)..(25): SEQ ID NO: 1978; WAN024BI5_at; Start 310; Stop 334
caaggtctatgtgataccaatgttg

SEQ ID NO: 81910 - DNA, 25 bp, Artificial
  probe
  misc_feature (1)..(25): SEQ ID NO: 1978; WAN024BI5_at; Start 180; Stop 204
tgcgcatgcaggctataaaacccta

SEQ ID NO: 81911 - DNA, 25 bp, Artificial
  probe
  misc_feature (1)..(25): SEQ ID NO: 1978; WAN024BI5_at; Start 477; Stop 501
gattgatgcagttattgtgacacag

SEQ ID NO: 81912 - DNA, 25 bp, Artificial
  probe
  misc_feature (1)..(25): SEQ ID NO: 1978; WAN024BI5_at; Start 115; Stop 139
tctattacttcagttaagccgggag

SEQ ID NO: 81913 - DNA, 25 bp, Artificial
  probe
  misc_feature (1)..(25): SEQ ID NO: 1978; WAN024BI5_at; Start 30; Stop 54
attggagatcgtaaaaaaggcagag

SEQ ID NO: 81914 - DNA, 25 bp, Artificial
  probe
  misc_feature (1)..(25): SEQ ID NO: 1978; WAN024BI5_at; Start 259; Stop 283
gagaagattactggcttaacagagt

SEQ ID NO: 81915 - DNA, 25 bp, Artificial
  probe
  misc_feature (1)..(25): SEQ ID NO: 1978; WAN024BI5_at; Start 542; Stop 566
tacatcgccgtgatgttcaaaaggc

SEQ ID NO: 81916 - DNA, 25 bp, Artificial
  probe
  misc_feature (1)..(25): SEQ ID NO: 1978; WAN024BI5_at; Start 213; Stop 237
tgcggatattcgtaactcggtcatg

SEQ ID NO: 81917 - DNA, 25 bp, Artificial
  probe
  misc_feature (1)..(25): SEQ ID NO: 1978; WAN024BI5_at; Start 505; Stop 529
tgtgatgcttctgttttgattacgg

SEQ ID NO: 81918 - DNA, 25 bp, Artificial
  probe
  misc_feature (1)..(25): SEQ ID NO: 1978; WAN024BI5_at; Start 52; Stop 76
gaggagtactacaatgccttgcgta

SEQ ID NO: 81919 - DNA, 25 bp, Artificial
  probe
  misc_feature (1)..(25): SEQ ID NO: 1978; WAN024BI5_at; Start 339; Stop 363
tctctttgtcattcaggcgggttcc

SEQ ID NO: 81920 - DNA, 25 bp, Artificial
  probe
  misc_feature (1)..(25): SEQ ID NO: 1978; WAN024BI5_at; Start 195; Stop 219
taaaaccctattaattgatgcggat

SEQ ID NO: 81921 - DNA, 25 bp, Artificial
  probe
  misc_feature (1)..(25): SEQ ID NO: 1978; WAN024BI5_at; Start 489; Stop 513
tattgtgacacagaaatgtgatgct

SEQ ID NO: 81922 - DNA, 25 bp, Artificial
  probe
  misc_feature (1)..(25): SEQ ID NO: 1978; WAN024BI5_at; Start 557; Stop 581
ttcaaaaggcgaaagaacacttgga

SEQ ID NO: 81923 - DNA, 25 bp, Artificial
  probe
  misc_feature (1)..(25): SEQ ID NO: 1978; WAN024BI5_at; Start 407; Stop 431
gaacgatgatagataccctgcgtaa

SEQ ID NO: 81924 - DNA, 25 bp, Artificial
  probe
  misc_feature (1)..(25): SEQ ID NO: 1978; WAN024BI5_at; Start 129; Stop 153
taagccgggagaaggaaagtctaca

SEQ ID NO: 81925 - DNA, 25 bp, Artificial
  probe
  misc_feature (1)..(25): SEQ ID NO: 1978; WAN024BI5_at; Start 159; Stop 183
tactaacattgcttgggcttttgcg

SEQ ID NO: 81926 - DNA, 25 bp, Artificial
  probe
  misc_feature (1)..(25): SEQ ID NO: 1978; WAN024BI5_at; Start 234; Stop 258
catgtcaggtgtttttagatctagt

SEQ ID NO: 81927 - DNA, 25 bp, Artificial
  probe
  misc_feature (1)..(25): SEQ ID NO: 1978; WAN024BI5_at; Start 278; Stop 302
cagagtttttatcaggtacaacaga

SEQ ID NO: 81928 - DNA, 25 bp, Artificial
  probe
  misc_feature (1)..(25): SEQ ID NO: 1978; WAN024BI5_at; Start 391; Stop 415
caaagtgagaatttcagaacgatga

SEQ ID NO: 81929 - DNA, 25 bp, Artificial
  probe
  misc_feature (1)..(25): SEQ ID NO: 1978; WAN024BI5_at; Start 351; Stop 375
tcaggcgggttccatttcaccaaac

SEQ ID NO: 81930 - DNA, 25 bp, Artificial
  probe
  misc_feature (1)..(25): SEQ ID NO: 1978; WAN024BI5_at; Start 605; Stop 629
gagttgtgctaagtaaactgaatac

SEQ ID NO: 81931 - DNA, 25 bp, Artificial
  probe
  misc_feature (1)..(25): SEQ ID NO: 1979; WAN024BI6_at; Start 437; Stop 461
ttgactatatcgtcgtagacactgc

SEQ ID NO: 81932 - DNA, 25 bp, Artificial
  probe
  misc_feature (1)..(25): SEQ ID NO: 1979; WAN024BI6_at; Start 433; Stop 457
tattttgactatatcgtcgtagaca

SEQ ID NO: 81933 - DNA, 25 bp, Artificial
  probe
  misc_feature (1)..(25): SEQ ID NO: 1979; WAN024BI6_at; Start 597; Stop 621
gtgtttaggagttgtgttgaataaa

SEQ ID NO: 81934 - DNA, 25 bp, Artificial
  probe
  misc_feature (1)..(25): SEQ ID NO: 1979; WAN024BI6_at; Start 436; Stop 460
tttgactatatcgtcgtagacactg

SEQ ID NO: 81935 - DNA, 25 bp, Artificial
  probe
  misc_feature (1)..(25): SEQ ID NO: 1979; WAN024BI6_at; Start 596; Stop 620
cgtgtttaggagttgtgttgaataa

SEQ ID NO: 81936 - DNA, 25 bp, Artificial
  probe
  misc_feature (1)..(25): SEQ ID NO: 1979; WAN024BI6_at; Start 435; Stop 459
ttttgactatatcgtcgtagacact

SEQ ID NO: 81937 - DNA, 25 bp, Artificial
  probe
  misc_feature (1)..(25): SEQ ID NO: 1979; WAN024BI6_at; Start 434; Stop 458
attttgactatatcgtcgtagacac

SEQ ID NO: 81938 - DNA, 25 bp, Artificial
  probe
  misc_feature (1)..(25): SEQ ID NO: 2003; WAN024BI7_s_at; Start 83; Stop 107
tacagttgagcggagataaactaaa

SEQ ID NO: 81939 - DNA, 25 bp, Artificial
  probe
  misc_feature (1)..(25): SEQ ID NO: 2003; WAN024BI7_s_at; Start 84; Stop 108
acagttgagcggagataaactaaaa

SEQ ID NO: 81940 - DNA, 25 bp, Artificial
  probe
  misc_feature (1)..(25): SEQ ID NO: 2003; WAN024BI7_s_at; Start 85; Stop 109
cagttgagcggagataaactaaaag

SEQ ID NO: 81941 - DNA, 25 bp, Artificial
  probe
  misc_feature (1)..(25): SEQ ID NO: 2003; WAN024BI7_s_at; Start 86; Stop 110
agttgagcggagataaactaaaagt

SEQ ID NO: 81942 - DNA, 25 bp, Artificial
  probe
  misc_feature (1)..(25): SEQ ID NO: 3120; WAN024BI8_at; Start 273; Stop 297
cctgacagaatttttatcaggaact

SEQ ID NO: 81943 - DNA, 25 bp, Artificial
  probe
  misc_feature (1)..(25): SEQ ID NO: 3120; WAN024BI8_at; Start 275; Stop 299
tgacagaatttttatcaggaactac

SEQ ID NO: 81944 - DNA, 25 bp, Artificial
  probe
  misc_feature (1)..(25): SEQ ID NO: 3120; WAN024BI8_at; Start 556; Stop 580
attcaaaaagcaaaagaacagttgg

SEQ ID NO: 81945 - DNA, 25 bp, Artificial
  probe
  misc_feature (1)..(25): SEQ ID NO: 3120; WAN024BI8_at; Start 263; Stop 287
agattacaggcctgacagaattttt

SEQ ID NO: 81946 - DNA, 25 bp, Artificial
  probe
  misc_feature (1)..(25): SEQ ID NO: 3120; WAN024BI8_at; Start 563; Stop 587
aagcaaaagaacagttggaacacac

SEQ ID NO: 81947 - DNA, 25 bp, Artificial
  probe
  misc_feature (1)..(25): SEQ ID NO: 3120; WAN024BI8_at; Start 551; Stop 575
gggatattcaaaaagcaaaagaaca

SEQ ID NO: 81948 - DNA, 25 bp, Artificial
  probe
  misc_feature (1)..(25): SEQ ID NO: 3120; WAN024BI8_at; Start 552; Stop 576
ggatattcaaaaagcaaaagaacag

SEQ ID NO: 81949 - DNA, 25 bp, Artificial
  probe
  misc_feature (1)..(25): SEQ ID NO: 3120; WAN024BI8_at; Start 566; Stop 590
caaaagaacagttggaacacacagg

SEQ ID NO: 81950 - DNA, 25 bp, Artificial
  probe
  misc_feature (1)..(25): SEQ ID NO: 3120; WAN024BI8_at; Start 268; Stop 292
acaggcctgacagaatttttatcag

SEQ ID NO: 81951 - DNA, 25 bp, Artificial
  probe
  misc_feature (1)..(25): SEQ ID NO: 3120; WAN024BI8_at; Start 305; Stop 329
tatcacaagggctttgtgataccaa

SEQ ID NO: 81952 - DNA, 25 bp, Artificial
  probe
  misc_feature (1)..(25): SEQ ID NO: 3120; WAN024BI8_at; Start 553; Stop 577
gatattcaaaaagcaaaagaacagt

SEQ ID NO: 81953 - DNA, 25 bp, Artificial
  probe
  misc_feature (1)..(25): SEQ ID NO: 3120; WAN024BI8_at; Start 564; Stop 588
agcaaaagaacagttggaacacaca

SEQ ID NO: 81954 - DNA, 25 bp, Artificial
  probe
  misc_feature (1)..(25): SEQ ID NO: 3120; WAN024BI8_at; Start 558; Stop 582
tcaaaaagcaaaagaacagttggaa

SEQ ID NO: 81955 - DNA, 25 bp, Artificial
  probe
  misc_feature (1)..(25): SEQ ID NO: 3120; WAN024BI8_at; Start 261; Stop 285
taagattacaggcctgacagaattt

SEQ ID NO: 81956 - DNA, 25 bp, Artificial
  probe
  misc_feature (1)..(25): SEQ ID NO: 3120; WAN024BI8_at; Start 562; Stop 586
aaagcaaaagaacagttggaacaca

SEQ ID NO: 81957 - DNA, 25 bp, Artificial
  probe
  misc_feature (1)..(25): SEQ ID NO: 3120; WAN024BI8_at; Start 270; Stop 294
aggcctgacagaatttttatcagga

SEQ ID NO: 81958 - DNA, 25 bp, Artificial
  probe
  misc_feature (1)..(25): SEQ ID NO: 3120; WAN024BI8_at; Start 555; Stop 579
tattcaaaaagcaaaagaacagttg

SEQ ID NO: 81959 - DNA, 25 bp, Artificial
  probe
  misc_feature (1)..(25): SEQ ID NO: 3120; WAN024BI8_at; Start 267; Stop 291
tacaggcctgacagaatttttatca

SEQ ID NO: 81960 - DNA, 25 bp, Artificial
  probe
  misc_feature (1)..(25): SEQ ID NO: 3120; WAN024BI8_at; Start 565; Stop 589
gcaaaagaacagttggaacacacag

SEQ ID NO: 81961 - DNA, 25 bp, Artificial
  probe
  misc_feature (1)..(25): SEQ ID NO: 3120; WAN024BI8_at; Start 274; Stop 298
ctgacagaatttttatcaggaacta

SEQ ID NO: 81962 - DNA, 25 bp, Artificial
  probe
  misc_feature (1)..(25): SEQ ID NO: 3120; WAN024BI8_at; Start 554; Stop 578
atattcaaaaagcaaaagaacagtt

SEQ ID NO: 81963 - DNA, 25 bp, Artificial
  probe
  misc_feature (1)..(25): SEQ ID NO: 3120; WAN024BI8_at; Start 272; Stop 296
gcctgacagaatttttatcaggaac

SEQ ID NO: 81964 - DNA, 25 bp, Artificial
  probe
  misc_feature (1)..(25): SEQ ID NO: 3120; WAN024BI8_at; Start 557; Stop 581
ttcaaaaagcaaaagaacagttgga

SEQ ID NO: 81965 - DNA, 25 bp, Artificial
  probe
  misc_feature (1)..(25): SEQ ID NO: 3120; WAN024BI8_at; Start 262; Stop 286
aagattacaggcctgacagaatttt

SEQ ID NO: 81966 - DNA, 25 bp, Artificial
  probe
  misc_feature (1)..(25): SEQ ID NO: 3120; WAN024BI8_at; Start 269; Stop 293
caggcctgacagaatttttatcagg

SEQ ID NO: 81967 - DNA, 25 bp, Artificial
  probe
  misc_feature (1)..(25): SEQ ID NO: 3120; WAN024BI8_at; Start 271; Stop 295
ggcctgacagaatttttatcaggaa

SEQ ID NO: 81968 - DNA, 25 bp, Artificial
  probe
  misc_feature (1)..(25): SEQ ID NO: 3120; WAN024BI8_at; Start 260; Stop 284
ataagattacaggcctgacagaatt

SEQ ID NO: 81969 - DNA, 25 bp, Artificial
  probe
  misc_feature (1)..(25): SEQ ID NO: 6258; WAN024BI9_s_at; Start 2; Stop 26
aatatggagcgaaaaaagcgaaaga

SEQ ID NO: 81970 - DNA, 25 bp, Artificial
  probe
  misc_feature (1)..(25): SEQ ID NO: 6258; WAN024BI9_s_at; Start 1; Stop 25
aaatatggagcgaaaaaagcgaaag

SEQ ID NO: 81971 - DNA, 25 bp, Artificial
  probe
  misc_feature (1)..(25): SEQ ID NO: 6258; WAN024BI9_s_at; Start 3; Stop 27
atatggagcgaaaaaagcgaaagaa

SEQ ID NO: 81972 - DNA, 25 bp, Artificial
  probe
  misc_feature (1)..(25): SEQ ID NO: 6257; WAN024BIC_s_at; Start 4; Stop 28
tacggagaagcgaaggctcaggaac

SEQ ID NO: 81973 - DNA, 25 bp, Artificial
  probe
  misc_feature (1)..(25): SEQ ID NO: 6257; WAN024BIC_s_at; Start 5; Stop 29
acggagaagcgaaggctcaggaact

SEQ ID NO: 81974 - DNA, 25 bp, Artificial
  probe
  misc_feature (1)..(25): SEQ ID NO: 6257; WAN024BIC_s_at; Start 3; Stop 27
atacggagaagcgaaggctcaggaa

SEQ ID NO: 81975 - DNA, 25 bp, Artificial
  probe
  misc_feature (1)..(25): SEQ ID NO: 6257; WAN024BIC_s_at; Start 6; Stop 30
cggagaagcgaaggctcaggaactt

SEQ ID NO: 81976 - DNA, 25 bp, Artificial
  probe
  misc_feature (1)..(25): SEQ ID NO: 48; WAN024BID_at; Start 694; Stop 718
gaaaatcctcgacaaattgtaatga

SEQ ID NO: 81977 - DNA, 25 bp, Artificial
  probe
  misc_feature (1)..(25): SEQ ID NO: 48; WAN024BID_at; Start 397; Stop 421
gtcattgcccatatcgagcgctacg

SEQ ID NO: 81978 - DNA, 25 bp, Artificial
  probe
  misc_feature (1)..(25): SEQ ID NO: 48; WAN024BID_at; Start 632; Stop 656
tcgaagcttatagcatagttgccaa

SEQ ID NO: 81979 - DNA, 25 bp, Artificial
  probe
  misc_feature (1)..(25): SEQ ID NO: 48; WAN024BID_at; Start 414; Stop 438
gcgctacgatgctcttgaacaaaat

SEQ ID NO: 81980 - DNA, 25 bp, Artificial
  probe
  misc_feature (1)..(25): SEQ ID NO: 48; WAN024BID_at; Start 642; Stop 666
tagcatagttgccaaaaagtacggg

SEQ ID NO: 81981 - DNA, 25 bp, Artificial
  probe
  misc_feature (1)..(25): SEQ ID NO: 48; WAN024BID_at; Start 691; Stop 715
gaagaaaatcctcgacaaattgtaa

SEQ ID NO: 81982 - DNA, 25 bp, Artificial
  probe
  misc_feature (1)..(25): SEQ ID NO: 48; WAN024BID_at; Start 621; Stop 645
tcctcacatgttcgaagcttatagc

SEQ ID NO: 81983 - DNA, 25 bp, Artificial
  probe
  misc_feature (1)..(25): SEQ ID NO: 48; WAN024BID_at; Start 556; Stop 580
tattttttggagcatgatctggttc

SEQ ID NO: 81984 - DNA, 25 bp, Artificial
  probe
  misc_feature (1)..(25): SEQ ID NO: 48; WAN024BID_at; Start 520; Stop 544
ggagaacgctacaagttcatgaaaa

SEQ ID NO: 81985 - DNA, 25 bp, Artificial
  probe
  misc_feature (1)..(25): SEQ ID NO: 48; WAN024BID_at; Start 424; Stop 448
gctcttgaacaaaatgaaaagcgtg

SEQ ID NO: 81986 - DNA, 25 bp, Artificial
  probe
  misc_feature (1)..(25): SEQ ID NO: 48; WAN024BID_at; Start 613; Stop 637
ggtagacctcctcacatgttcgaag

SEQ ID NO: 81987 - DNA, 25 bp, Artificial
  probe
  misc_feature (1)..(25): SEQ ID NO: 48; WAN024BID_at; Start 436; Stop 460
aatgaaaagcgtgttcgtgagctga

SEQ ID NO: 81988 - DNA, 25 bp, Artificial
  probe
  misc_feature (1)..(25): SEQ ID NO: 48; WAN024BID_at; Start 357; Stop 381
tagtgcattaagcaaaatcttgatg

SEQ ID NO: 81989 - DNA, 25 bp, Artificial
  probe
  misc_feature (1)..(25): SEQ ID NO: 48; WAN024BID_at; Start 571; Stop 595
gatctggttcatgtgattgcaagtg

SEQ ID NO: 81990 - DNA, 25 bp, Artificial
  probe
  misc_feature (1)..(25): SEQ ID NO: 48; WAN024BID_at; Start 463; Stop 487
gcaatggggtgttacacacaagtaa

SEQ ID NO: 81991 - DNA, 25 bp, Artificial
  probe
  misc_feature (1)..(25): SEQ ID NO: 48; WAN024BID_at; Start 372; Stop 396
aatcttgatgttgggtattacccca

SEQ ID NO: 81992 - DNA, 25 bp, Artificial
  probe
  misc_feature (1)..(25): SEQ ID NO: 48; WAN024BID_at; Start 317; Stop 341
tcattgagtttagtatggatacacc

SEQ ID NO: 81993 - DNA, 25 bp, Artificial
  probe
  misc_feature (1)..(25): SEQ ID NO: 48; WAN024BID_at; Start 550; Stop 574
gctcagtattttttggagcatgatc

SEQ ID NO: 81994 - DNA, 25 bp, Artificial
  probe
  misc_feature (1)..(25): SEQ ID NO: 48; WAN024BID_at; Start 503; Stop 527
tcaaacccaagctatttggagaacg

SEQ ID NO: 81995 - DNA, 25 bp, Artificial
  probe
  misc_feature (1)..(25): SEQ ID NO: 48; WAN024BID_at; Start 306; Stop 330
tcgttatgctctcattgagtttagt

SEQ ID NO: 81996 - DNA, 25 bp, Artificial
  probe
  misc_feature (1)..(25): SEQ ID NO: 48; WAN024BID_at; Start 667; Stop 691
gaagagaaggcgagagaactctttg

SEQ ID NO: 81997 - DNA, 25 bp, Artificial
  probe
  misc_feature (1)..(25): SEQ ID NO: 48; WAN024BID_at; Start 345; Stop 369
tcgtgacattcatagtgcattaagc

SEQ ID NO: 81998 - DNA, 25 bp, Artificial
  probe
  misc_feature (1)..(25): SEQ ID NO: 48; WAN024BID_at; Start 509; Stop 533
ccaagctatttggagaacgctacaa

SEQ ID NO: 81999 - DNA, 25 bp, Artificial
  probe
  misc_feature (1)..(25): SEQ ID NO: 48; WAN024BID_at; Start 496; Stop 520
cacgtcctcaaacccaagctatttg

SEQ ID NO: 82000 - DNA, 25 bp, Artificial
  probe
  misc_feature (1)..(25): SEQ ID NO: 48; WAN024BID_at; Start 444; Stop 468
gcgtgttcgtgagctgattgcaatg

SEQ ID NO: 82001 - DNA, 25 bp, Artificial
  probe
  misc_feature (1)..(25): SEQ ID NO: 48; WAN024BID_at; Start 682; Stop 706
gaactctttgaagaaaatcctcgac

SEQ ID NO: 82002 - DNA, 25 bp, Artificial
  probe
  misc_feature (1)..(25): SEQ ID NO: 48; WAN024BID_at; Start 402; Stop 426
tgcccatatcgagcgctacgatgct

SEQ ID NO: 82003 - DNA, 25 bp, Artificial
  probe
  misc_feature (1)..(25): SEQ ID NO: 48; WAN024BID_at; Start 385; Stop 409
ggtattaccccagtcattgcccata

SEQ ID NO: 82004 - DNA, 25 bp, Artificial
  probe
  misc_feature (1)..(25): SEQ ID NO: 48; WAN024BID_at; Start 327; Stop 351
tagtatggatacaccatatcgtgac

SEQ ID NO: 82005 - DNA, 25 bp, Artificial
  probe
  misc_feature (1)..(25): SEQ ID NO: 48; WAN024BID_at; Start 333; Stop 357
ggatacaccatatcgtgacattcat

SEQ ID NO: 82006 - DNA, 25 bp, Artificial
  probe
  misc_feature (1)..(25): SEQ ID NO: 48; WAN024BID_at; Start 18; Stop 42
gcacatcgtctttgatgtagatgat

SEQ ID NO: 82007 - DNA, 25 bp, Artificial
  probe
  misc_feature (1)..(25): SEQ ID NO: 48; WAN024BID_at; Start 408; Stop 432
tatcgagcgctacgatgctcttgaa

SEQ ID NO: 82008 - DNA, 25 bp, Artificial
  probe
  misc_feature (1)..(25): SEQ ID NO: 48; WAN024BID_at; Start 390; Stop 414
taccccagtcattgcccatatcgag

SEQ ID NO: 82009 - DNA, 25 bp, Artificial
  probe
  misc_feature (1)..(25): SEQ ID NO: 48; WAN024BID_at; Start 513; Stop 537
gctatttggagaacgctacaagttc

SEQ ID NO: 82010 - DNA, 25 bp, Artificial
  probe
  misc_feature (1)..(25): SEQ ID NO: 49; WAN024BIE_at; Start 622; Stop 646
tcctcatatggcagaagcatatgac

SEQ ID NO: 82011 - DNA, 25 bp, Artificial
  probe
  misc_feature (1)..(25): SEQ ID NO: 49; WAN024BIE_at; Start 633; Stop 657
cagaagcatatgaccttgttaccca

SEQ ID NO: 82012 - DNA, 25 bp, Artificial
  probe
  misc_feature (1)..(25): SEQ ID NO: 49; WAN024BIE_at; Start 616; Stop 640
tagacctcctcatatggcagaagca

SEQ ID NO: 82013 - DNA, 25 bp, Artificial
  probe
  misc_feature (1)..(25): SEQ ID NO: 49; WAN024BIE_at; Start 555; Stop 579
agtattttttagagcaggatttggt

SEQ ID NO: 82014 - DNA, 25 bp, Artificial
  probe
  misc_feature (1)..(25): SEQ ID NO: 49; WAN024BIE_at; Start 620; Stop 644
cctcctcatatggcagaagcatatg

SEQ ID NO: 82015 - DNA, 25 bp, Artificial
  probe
  misc_feature (1)..(25): SEQ ID NO: 49; WAN024BIE_at; Start 614; Stop 638
ggtagacctcctcatatggcagaag

SEQ ID NO: 82016 - DNA, 25 bp, Artificial
  probe
  misc_feature (1)..(25): SEQ ID NO: 49; WAN024BIE_at; Start 636; Stop 660
aagcatatgaccttgttacccaaaa

SEQ ID NO: 82017 - DNA, 25 bp, Artificial
  probe
  misc_feature (1)..(25): SEQ ID NO: 49; WAN024BIE_at; Start 613; Stop 637
cggtagacctcctcatatggcagaa

SEQ ID NO: 82018 - DNA, 25 bp, Artificial
  probe
  misc_feature (1)..(25): SEQ ID NO: 49; WAN024BIE_at; Start 553; Stop 577
tcagtattttttagagcaggatttg

SEQ ID NO: 82019 - DNA, 25 bp, Artificial
  probe
  misc_feature (1)..(25): SEQ ID NO: 49; WAN024BIE_at; Start 551; Stop 575
gctcagtattttttagagcaggatt

SEQ ID NO: 82020 - DNA, 25 bp, Artificial
  probe
  misc_feature (1)..(25): SEQ ID NO: 49; WAN024BIE_at; Start 557; Stop 581
tattttttagagcaggatttggttc

SEQ ID NO: 82021 - DNA, 25 bp, Artificial
  probe
  misc_feature (1)..(25): SEQ ID NO: 49; WAN024BIE_at; Start 618; Stop 642
gacctcctcatatggcagaagcata

SEQ ID NO: 82022 - DNA, 25 bp, Artificial
  probe
  misc_feature (1)..(25): SEQ ID NO: 49; WAN024BIE_at; Start 637; Stop 661
agcatatgaccttgttacccaaaaa

SEQ ID NO: 82023 - DNA, 25 bp, Artificial
  probe
  misc_feature (1)..(25): SEQ ID NO: 49; WAN024BIE_at; Start 619; Stop 643
acctcctcatatggcagaagcatat

SEQ ID NO: 82024 - DNA, 25 bp, Artificial
  probe
  misc_feature (1)..(25): SEQ ID NO: 49; WAN024BIE_at; Start 568; Stop 592
gcaggatttggttcatatcattgca

SEQ ID NO: 82025 - DNA, 25 bp, Artificial
  probe
  misc_feature (1)..(25): SEQ ID NO: 49; WAN024BIE_at; Start 621; Stop 645
ctcctcatatggcagaagcatatga

SEQ ID NO: 82026 - DNA, 25 bp, Artificial
  probe
  misc_feature (1)..(25): SEQ ID NO: 49; WAN024BIE_at; Start 615; Stop 639
gtagacctcctcatatggcagaagc

SEQ ID NO: 82027 - DNA, 25 bp, Artificial
  probe
  misc_feature (1)..(25): SEQ ID NO: 49; WAN024BIE_at; Start 634; Stop 658
agaagcatatgaccttgttacccaa

SEQ ID NO: 82028 - DNA, 25 bp, Artificial
  probe
  misc_feature (1)..(25): SEQ ID NO: 49; WAN024BIE_at; Start 569; Stop 593
caggatttggttcatatcattgcaa

SEQ ID NO: 82029 - DNA, 25 bp, Artificial
  probe
  misc_feature (1)..(25): SEQ ID NO: 49; WAN024BIE_at; Start 638; Stop 662
gcatatgaccttgttacccaaaaat

SEQ ID NO: 82030 - DNA, 25 bp, Artificial
  probe
  misc_feature (1)..(25): SEQ ID NO: 49; WAN024BIE_at; Start 617; Stop 641
agacctcctcatatggcagaagcat

SEQ ID NO: 82031 - DNA, 25 bp, Artificial
  probe
  misc_feature (1)..(25): SEQ ID NO: 49; WAN024BIE_at; Start 552; Stop 576
ctcagtattttttagagcaggattt

SEQ ID NO: 82032 - DNA, 25 bp, Artificial
  probe
  misc_feature (1)..(25): SEQ ID NO: 49; WAN024BIE_at; Start 554; Stop 578
cagtattttttagagcaggatttgg

SEQ ID NO: 82033 - DNA, 25 bp, Artificial
  probe
  misc_feature (1)..(25): SEQ ID NO: 49; WAN024BIE_at; Start 635; Stop 659
gaagcatatgaccttgttacccaaa

SEQ ID NO: 82034 - DNA, 25 bp, Artificial
  probe
  misc_feature (1)..(25): SEQ ID NO: 53; WAN024BIF_at; Start 690; Stop 714
tattgaaaatcctcgcttaatctta

SEQ ID NO: 82035 - DNA, 25 bp, Artificial
  probe
  misc_feature (1)..(25): SEQ ID NO: 53; WAN024BIF_at; Start 631; Stop 655
aaagaagcctatgaacttatctcaa

SEQ ID NO: 82036 - DNA, 25 bp, Artificial
  probe
  misc_feature (1)..(25): SEQ ID NO: 53; WAN024BIF_at; Start 648; Stop 672
tatctcaaaacaatacggtgaaaga

SEQ ID NO: 82037 - DNA, 25 bp, Artificial
  probe
  misc_feature (1)..(25): SEQ ID NO: 53; WAN024BIF_at; Start 656; Stop 680
aacaatacggtgaaagaagagcgag

SEQ ID NO: 82038 - DNA, 25 bp, Artificial
  probe
  misc_feature (1)..(25): SEQ ID NO: 53; WAN024BIF_at; Start 697; Stop 721
aatcctcgcttaatcttatctgatc

SEQ ID NO: 82039 - DNA, 25 bp, Artificial
  probe
  misc_feature (1)..(25): SEQ ID NO: 53; WAN024BIF_at; Start 659; Stop 683
aatacggtgaaagaagagcgagaga

SEQ ID NO: 82040 - DNA, 25 bp, Artificial
  probe
  misc_feature (1)..(25): SEQ ID NO: 53; WAN024BIF_at; Start 632; Stop 656
aagaagcctatgaacttatctcaaa

SEQ ID NO: 82041 - DNA, 25 bp, Artificial
  probe
  misc_feature (1)..(25): SEQ ID NO: 53; WAN024BIF_at; Start 695; Stop 719
aaaatcctcgcttaatcttatctga

SEQ ID NO: 82042 - DNA, 25 bp, Artificial
  probe
  misc_feature (1)..(25): SEQ ID NO: 53; WAN024BIF_at; Start 694; Stop 718
gaaaatcctcgcttaatcttatctg

SEQ ID NO: 82043 - DNA, 25 bp, Artificial
  probe
  misc_feature (1)..(25): SEQ ID NO: 53; WAN024BIF_at; Start 645; Stop 669
acttatctcaaaacaatacggtgaa

SEQ ID NO: 82044 - DNA, 25 bp, Artificial
  probe
  misc_feature (1)..(25): SEQ ID NO: 53; WAN024BIF_at; Start 664; Stop 688
ggtgaaagaagagcgagagaattat

SEQ ID NO: 82045 - DNA, 25 bp, Artificial
  probe
  misc_feature (1)..(25): SEQ ID NO: 53; WAN024BIF_at; Start 657; Stop 681
acaatacggtgaaagaagagcgaga

SEQ ID NO: 82046 - DNA, 25 bp, Artificial
  probe
  misc_feature (1)..(25): SEQ ID NO: 53; WAN024BIF_at; Start 643; Stop 667
gaacttatctcaaaacaatacggtg

SEQ ID NO: 82047 - DNA, 25 bp, Artificial
  probe
  misc_feature (1)..(25): SEQ ID NO: 53; WAN024BIF_at; Start 644; Stop 668
aacttatctcaaaacaatacggtga

SEQ ID NO: 82048 - DNA, 25 bp, Artificial
  probe
  misc_feature (1)..(25): SEQ ID NO: 53; WAN024BIF_at; Start 654; Stop 678
aaaacaatacggtgaaagaagagcg

SEQ ID NO: 82049 - DNA, 25 bp, Artificial
  probe
  misc_feature (1)..(25): SEQ ID NO: 53; WAN024BIF_at; Start 658; Stop 682
caatacggtgaaagaagagcgagag

SEQ ID NO: 82050 - DNA, 25 bp, Artificial
  probe
  misc_feature (1)..(25): SEQ ID NO: 53; WAN024BIF_at; Start 671; Stop 695
gaagagcgagagaattatttattga

SEQ ID NO: 82051 - DNA, 25 bp, Artificial
  probe
  misc_feature (1)..(25): SEQ ID NO: 53; WAN024BIF_at; Start 634; Stop 658
gaagcctatgaacttatctcaaaac

SEQ ID NO: 82052 - DNA, 25 bp, Artificial
  probe
  misc_feature (1)..(25): SEQ ID NO: 53; WAN024BIF_at; Start 637; Stop 661
gcctatgaacttatctcaaaacaat

SEQ ID NO: 82053 - DNA, 25 bp, Artificial
  probe
  misc_feature (1)..(25): SEQ ID NO: 53; WAN024BIF_at; Start 647; Stop 671
ttatctcaaaacaatacggtgaaag

SEQ ID NO: 82054 - DNA, 25 bp, Artificial
  probe
  misc_feature (1)..(25): SEQ ID NO: 53; WAN024BIF_at; Start 674; Stop 698
gagcgagagaattatttattgaaaa

SEQ ID NO: 82055 - DNA, 25 bp, Artificial
  probe
  misc_feature (1)..(25): SEQ ID NO: 53; WAN024BIF_at; Start 650; Stop 674
tctcaaaacaatacggtgaaagaag

SEQ ID NO: 82056 - DNA, 25 bp, Artificial
  probe
  misc_feature (1)..(25): SEQ ID NO: 53; WAN024BIF_at; Start 699; Stop 723
tcctcgcttaatcttatctgatcaa

SEQ ID NO: 82057 - DNA, 25 bp, Artificial
  probe
  misc_feature (1)..(25): SEQ ID NO: 53; WAN024BIF_at; Start 663; Stop 687
cggtgaaagaagagcgagagaatta

SEQ ID NO: 82058 - DNA, 25 bp, Artificial
  probe
  misc_feature (1)..(25): SEQ ID NO: 53; WAN024BIF_at; Start 667; Stop 691
gaaagaagagcgagagaattattta

SEQ ID NO: 82059 - DNA, 25 bp, Artificial
  probe
  misc_feature (1)..(25): SEQ ID NO: 53; WAN024BIF_at; Start 653; Stop 677
caaaacaatacggtgaaagaagagc

SEQ ID NO: 82060 - DNA, 25 bp, Artificial
  probe
  misc_feature (1)..(25): SEQ ID NO: 53; WAN024BIF_at; Start 703; Stop 727
cgcttaatcttatctgatcaaatta

SEQ ID NO: 82061 - DNA, 25 bp, Artificial
  probe
  misc_feature (1)..(25): SEQ ID NO: 53; WAN024BIF_at; Start 677; Stop 701
cgagagaattatttattgaaaatcc

SEQ ID NO: 82062 - DNA, 25 bp, Artificial
  probe
  misc_feature (1)..(25): SEQ ID NO: 53; WAN024BIF_at; Start 598; Stop 622
atgcacaatttgaacaaacgtcccc

SEQ ID NO: 82063 - DNA, 25 bp, Artificial
  probe
  misc_feature (1)..(25): SEQ ID NO: 53; WAN024BIF_at; Start 661; Stop 685
tacggtgaaagaagagcgagagaat

SEQ ID NO: 82064 - DNA, 25 bp, Artificial
  probe
  misc_feature (1)..(25): SEQ ID NO: 53; WAN024BIF_at; Start 662; Stop 686
acggtgaaagaagagcgagagaatt

SEQ ID NO: 82065 - DNA, 25 bp, Artificial
  probe
  misc_feature (1)..(25): SEQ ID NO: 53; WAN024BIF_at; Start 642; Stop 666
tgaacttatctcaaaacaatacggt

SEQ ID NO: 82066 - DNA, 25 bp, Artificial
  probe
  misc_feature (1)..(25): SEQ ID NO: 53; WAN024BIF_at; Start 700; Stop 724
cctcgcttaatcttatctgatcaaa

SEQ ID NO: 82067 - DNA, 25 bp, Artificial
  probe
  misc_feature (1)..(25): SEQ ID NO: 53; WAN024BIF_at; Start 655; Stop 679
aaacaatacggtgaaagaagagcga

SEQ ID NO: 82068 - DNA, 25 bp, Artificial
  probe
  misc_feature (1)..(25): SEQ ID NO: 1703; WAN024BIG_s_at; Start 248; Stop 272
acacaccagatgttctggataagct

SEQ ID NO: 82069 - DNA, 25 bp, Artificial
  probe
  misc_feature (1)..(25): SEQ ID NO: 1703; WAN024BIG_s_at; Start 246; Stop 270
ctacacaccagatgttctggataag

SEQ ID NO: 82070 - DNA, 25 bp, Artificial
  probe
  misc_feature (1)..(25): SEQ ID NO: 1703; WAN024BIG_s_at; Start 250; Stop 274
acaccagatgttctggataagctgg

SEQ ID NO: 82071 - DNA, 25 bp, Artificial
  probe
  misc_feature (1)..(25): SEQ ID NO: 1703; WAN024BIG_s_at; Start 249; Stop 273
cacaccagatgttctggataagctg

SEQ ID NO: 82072 - DNA, 25 bp, Artificial
  probe
  misc_feature (1)..(25): SEQ ID NO: 1703; WAN024BIG_s_at; Start 282; Stop 306
gcggattccgaccctcaatgatagt

SEQ ID NO: 82073 - DNA, 25 bp, Artificial
  probe
  misc_feature (1)..(25): SEQ ID NO: 1703; WAN024BIG_s_at; Start 241; Stop 265
atttactacacaccagatgttctgg

SEQ ID NO: 82074 - DNA, 25 bp, Artificial
  probe
  misc_feature (1)..(25): SEQ ID NO: 1703; WAN024BIG_s_at; Start 236; Stop 260
ctgaaatttactacacaccagatgt

SEQ ID NO: 82075 - DNA, 25 bp, Artificial
  probe
  misc_feature (1)..(25): SEQ ID NO: 1703; WAN024BIG_s_at; Start 244; Stop 268
tactacacaccagatgttctggata

SEQ ID NO: 82076 - DNA, 25 bp, Artificial
  probe
  misc_feature (1)..(25): SEQ ID NO: 1703; WAN024BIG_s_at; Start 242; Stop 266
tttactacacaccagatgttctgga

SEQ ID NO: 82077 - DNA, 25 bp, Artificial
  probe
  misc_feature (1)..(25): SEQ ID NO: 1703; WAN024BIG_s_at; Start 247; Stop 271
tacacaccagatgttctggataagc

SEQ ID NO: 82078 - DNA, 25 bp, Artificial
  probe
  misc_feature (1)..(25): SEQ ID NO: 1703; WAN024BIG_s_at; Start 243; Stop 267
ttactacacaccagatgttctggat

SEQ ID NO: 82079 - DNA, 25 bp, Artificial
  probe
  misc_feature (1)..(25): SEQ ID NO: 1703; WAN024BIG_s_at; Start 235; Stop 259
gctgaaatttactacacaccagatg

SEQ ID NO: 82080 - DNA, 25 bp, Artificial
  probe
  misc_feature (1)..(25): SEQ ID NO: 1703; WAN024BIG_s_at; Start 245; Stop 269
actacacaccagatgttctggataa

SEQ ID NO: 82081 - DNA, 25 bp, Artificial
  probe
  misc_feature (1)..(25): SEQ ID NO: 50; WAN024BIH_at; Start 69; Stop 93
ggcacttttaagagaagcttataat

SEQ ID NO: 82082 - DNA, 25 bp, Artificial
  probe
  misc_feature (1)..(25): SEQ ID NO: 50; WAN024BIH_at; Start 110; Stop 134
ttgtgtctacttcgcatcgtcgaaa

SEQ ID NO: 82083 - DNA, 25 bp, Artificial
  probe
  misc_feature (1)..(25): SEQ ID NO: 50; WAN024BIH_at; Start 103; Stop 127
cgaatgattgtgtctacttcgcatc

SEQ ID NO: 82084 - DNA, 25 bp, Artificial
  probe
  misc_feature (1)..(25): SEQ ID NO: 50; WAN024BIH_at; Start 70; Stop 94
gcacttttaagagaagcttataatc

SEQ ID NO: 82085 - DNA, 25 bp, Artificial
  probe
  misc_feature (1)..(25): SEQ ID NO: 50; WAN024BIH_at; Start 67; Stop 91
aaggcacttttaagagaagcttata

SEQ ID NO: 82086 - DNA, 25 bp, Artificial
  probe
  misc_feature (1)..(25): SEQ ID NO: 50; WAN024BIH_at; Start 112; Stop 136
gtgtctacttcgcatcgtcgaaaag

SEQ ID NO: 82087 - DNA, 25 bp, Artificial
  probe
  misc_feature (1)..(25): SEQ ID NO: 50; WAN024BIH_at; Start 101; Stop 125
ttcgaatgattgtgtctacttcgca

SEQ ID NO: 82088 - DNA, 25 bp, Artificial
  probe
  misc_feature (1)..(25): SEQ ID NO: 50; WAN024BIH_at; Start 107; Stop 131
tgattgtgtctacttcgcatcgtcg

SEQ ID NO: 82089 - DNA, 25 bp, Artificial
  probe
  misc_feature (1)..(25): SEQ ID NO: 50; WAN024BIH_at; Start 105; Stop 129
aatgattgtgtctacttcgcatcgt

SEQ ID NO: 82090 - DNA, 25 bp, Artificial
  probe
  misc_feature (1)..(25): SEQ ID NO: 50; WAN024BIH_at; Start 75; Stop 99
tttaagagaagcttataatcaagga

SEQ ID NO: 82091 - DNA, 25 bp, Artificial
  probe
  misc_feature (1)..(25): SEQ ID NO: 50; WAN024BIH_at; Start 71; Stop 95
cacttttaagagaagcttataatca

SEQ ID NO: 82092 - DNA, 25 bp, Artificial
  probe
  misc_feature (1)..(25): SEQ ID NO: 50; WAN024BIH_at; Start 102; Stop 126
tcgaatgattgtgtctacttcgcat

SEQ ID NO: 82093 - DNA, 25 bp, Artificial
  probe
  misc_feature (1)..(25): SEQ ID NO: 50; WAN024BIH_at; Start 106; Stop 130
atgattgtgtctacttcgcatcgtc

SEQ ID NO: 82094 - DNA, 25 bp, Artificial
  probe
  misc_feature (1)..(25): SEQ ID NO: 50; WAN024BIH_at; Start 104; Stop 128
gaatgattgtgtctacttcgcatcg

SEQ ID NO: 82095 - DNA, 25 bp, Artificial
  probe
  misc_feature (1)..(25): SEQ ID NO: 50; WAN024BIH_at; Start 68; Stop 92
aggcacttttaagagaagcttataa

SEQ ID NO: 82096 - DNA, 25 bp, Artificial
  probe
  misc_feature (1)..(25): SEQ ID NO: 50; WAN024BIH_at; Start 109; Stop 133
attgtgtctacttcgcatcgtcgaa

SEQ ID NO: 82097 - DNA, 25 bp, Artificial
  probe
  misc_feature (1)..(25): SEQ ID NO: 50; WAN024BIH_at; Start 74; Stop 98
ttttaagagaagcttataatcaagg

SEQ ID NO: 82098 - DNA, 25 bp, Artificial
  probe
  misc_feature (1)..(25): SEQ ID NO: 50; WAN024BIH_at; Start 64; Stop 88
agcaaggcacttttaagagaagctt

SEQ ID NO: 82099 - DNA, 25 bp, Artificial
  probe
  misc_feature (1)..(25): SEQ ID NO: 50; WAN024BIH_at; Start 111; Stop 135
tgtgtctacttcgcatcgtcgaaaa

SEQ ID NO: 82100 - DNA, 25 bp, Artificial
  probe
  misc_feature (1)..(25): SEQ ID NO: 50; WAN024BIH_at; Start 72; Stop 96
acttttaagagaagcttataatcaa

SEQ ID NO: 82101 - DNA, 25 bp, Artificial
  probe
  misc_feature (1)..(25): SEQ ID NO: 50; WAN024BIH_at; Start 113; Stop 137
tgtctacttcgcatcgtcgaaaagg

SEQ ID NO: 82102 - DNA, 25 bp, Artificial
  probe
  misc_feature (1)..(25): SEQ ID NO: 50; WAN024BIH_at; Start 108; Stop 132
gattgtgtctacttcgcatcgtcga

SEQ ID NO: 82103 - DNA, 25 bp, Artificial
  probe
  misc_feature (1)..(25): SEQ ID NO: 50; WAN024BIH_at; Start 66; Stop 90
caaggcacttttaagagaagcttat

SEQ ID NO: 82104 - DNA, 25 bp, Artificial
  probe
  misc_feature (1)..(25): SEQ ID NO: 50; WAN024BIH_at; Start 65; Stop 89
gcaaggcacttttaagagaagctta

SEQ ID NO: 82105 - DNA, 25 bp, Artificial
  probe
  misc_feature (1)..(25): SEQ ID NO: 50; WAN024BIH_at; Start 114; Stop 138
gtctacttcgcatcgtcgaaaaggg

SEQ ID NO: 82106 - DNA, 25 bp, Artificial
  probe
  misc_feature (1)..(25): SEQ ID NO: 50; WAN024BIH_at; Start 73; Stop 97
cttttaagagaagcttataatcaag

SEQ ID NO: 82107 - DNA, 25 bp, Artificial
  probe
  misc_feature (1)..(25): SEQ ID NO: 1890; WAN024BII_at; Start 553; Stop 577
cagtatttcttggagcgtgatttgg

SEQ ID NO: 82108 - DNA, 25 bp, Artificial
  probe
  misc_feature (1)..(25): SEQ ID NO: 1890; WAN024BII_at; Start 556; Stop 580
tatttcttggagcgtgatttggttc

SEQ ID NO: 82109 - DNA, 25 bp, Artificial
  probe
  misc_feature (1)..(25): SEQ ID NO: 1890; WAN024BII_at; Start 557; Stop 581
atttcttggagcgtgatttggttca

SEQ ID NO: 82110 - DNA, 25 bp, Artificial
  probe
  misc_feature (1)..(25): SEQ ID NO: 1890; WAN024BII_at; Start 558; Stop 582
tttcttggagcgtgatttggttcat

SEQ ID NO: 82111 - DNA, 25 bp, Artificial
  probe
  misc_feature (1)..(25): SEQ ID NO: 1890; WAN024BII_at; Start 554; Stop 578
agtatttcttggagcgtgatttggt

SEQ ID NO: 82112 - DNA, 25 bp, Artificial
  probe
  misc_feature (1)..(25): SEQ ID NO: 1890; WAN024BII_at; Start 555; Stop 579
gtatttcttggagcgtgatttggtt

SEQ ID NO: 82113 - DNA, 25 bp, Artificial
  probe
  misc_feature (1)..(25): SEQ ID NO: 1890; WAN024BII_at; Start 588; Stop 612
tgcaagtgatatgcataatgtggac

SEQ ID NO: 82114 - DNA, 25 bp, Artificial
  probe
  misc_feature (1)..(25): SEQ ID NO: 1704; WAN024BIJ_x_at; Start 560; Stop 584
ttttggaacgtgatttagttcatgt

SEQ ID NO: 82115 - DNA, 25 bp, Artificial
  probe
  misc_feature (1)..(25): SEQ ID NO: 1704; WAN024BIJ_x_at; Start 708; Stop 732
aattataatggatcaattaatttag

SEQ ID NO: 82116 - DNA, 25 bp, Artificial
  probe
  misc_feature (1)..(25): SEQ ID NO: 1704; WAN024BIJ_x_at; Start 559; Stop 583
tttttggaacgtgatttagttcatg

SEQ ID NO: 82117 - DNA, 25 bp, Artificial
  probe
  misc_feature (1)..(25): SEQ ID NO: 7038; WAN024BIL_at; Start 51; Stop 75
tgatgacaaaaaaagccaaagcagt

SEQ ID NO: 82118 - DNA, 25 bp, Artificial
  probe
  misc_feature (1)..(25): SEQ ID NO: 7038; WAN024BIL_at; Start 48; Stop 72
ccctgatgacaaaaaaagccaaagc

SEQ ID NO: 82119 - DNA, 25 bp, Artificial
  probe
  misc_feature (1)..(25): SEQ ID NO: 7038; WAN024BIL_at; Start 52; Stop 76
gatgacaaaaaaagccaaagcagta

SEQ ID NO: 82120 - DNA, 25 bp, Artificial
  probe
  misc_feature (1)..(25): SEQ ID NO: 7038; WAN024BIL_at; Start 53; Stop 77
atgacaaaaaaagccaaagcagtaa

SEQ ID NO: 82121 - DNA, 25 bp, Artificial
  probe
  misc_feature (1)..(25): SEQ ID NO: 7038; WAN024BIL_at; Start 54; Stop 78
tgacaaaaaaagccaaagcagtaaa

SEQ ID NO: 82122 - DNA, 25 bp, Artificial
  probe
  misc_feature (1)..(25): SEQ ID NO: 7038; WAN024BIL_at; Start 46; Stop 70
ttccctgatgacaaaaaaagccaaa

SEQ ID NO: 82123 - DNA, 25 bp, Artificial
  probe
  misc_feature (1)..(25): SEQ ID NO: 7038; WAN024BIL_at; Start 49; Stop 73
cctgatgacaaaaaaagccaaagca

SEQ ID NO: 82124 - DNA, 25 bp, Artificial
  probe
  misc_feature (1)..(25): SEQ ID NO: 7038; WAN024BIL_at; Start 50; Stop 74
ctgatgacaaaaaaagccaaagcag

SEQ ID NO: 82125 - DNA, 25 bp, Artificial
  probe
  misc_feature (1)..(25): SEQ ID NO: 7038; WAN024BIL_at; Start 47; Stop 71
tccctgatgacaaaaaaagccaaag

SEQ ID NO: 82126 - DNA, 25 bp, Artificial
  probe
  misc_feature (1)..(25): SEQ ID NO: 4968; WAN024BIM_at; Start 121; Stop 145
ctcttcaaacatcttgtccaagtcg

SEQ ID NO: 82127 - DNA, 25 bp, Artificial
  probe
  misc_feature (1)..(25): SEQ ID NO: 4968; WAN024BIM_at; Start 67; Stop 91
tttctctttgtcatcagggaaagta

SEQ ID NO: 82128 - DNA, 25 bp, Artificial
  probe
  misc_feature (1)..(25): SEQ ID NO: 4968; WAN024BIM_at; Start 39; Stop 63
tctagtttttcttttctgctttgac

SEQ ID NO: 82129 - DNA, 25 bp, Artificial
  probe
  misc_feature (1)..(25): SEQ ID NO: 4968; WAN024BIM_at; Start 144; Stop 168
cgtctcgttttgtaaatttgacagc

SEQ ID NO: 82130 - DNA, 25 bp, Artificial
  probe
  misc_feature (1)..(25): SEQ ID NO: 4968; WAN024BIM_at; Start 9; Stop 33
cactagatgggagttgttgaaaagc

SEQ ID NO: 82131 - DNA, 25 bp, Artificial
  probe
  misc_feature (1)..(25): SEQ ID NO: 4968; WAN024BIM_at; Start 62; Stop 86
acttttttctctttgtcatcaggga

SEQ ID NO: 82132 - DNA, 25 bp, Artificial
  probe
  misc_feature (1)..(25): SEQ ID NO: 4968; WAN024BIM_at; Start 61; Stop 85
gacttttttctctttgtcatcaggg

SEQ ID NO: 82133 - DNA, 25 bp, Artificial
  probe
  misc_feature (1)..(25): SEQ ID NO: 4968; WAN024BIM_at; Start 126; Stop 150
caaacatcttgtccaagtcgtctcg

SEQ ID NO: 82134 - DNA, 25 bp, Artificial
  probe
  misc_feature (1)..(25): SEQ ID NO: 4968; WAN024BIM_at; Start 75; Stop 99
tgtcatcagggaaagtaacttgttt

SEQ ID NO: 82135 - DNA, 25 bp, Artificial
  probe
  misc_feature (1)..(25): SEQ ID NO: 4968; WAN024BIM_at; Start 69; Stop 93
tctctttgtcatcagggaaagtaac

SEQ ID NO: 82136 - DNA, 25 bp, Artificial
  probe
  misc_feature (1)..(25): SEQ ID NO: 4968; WAN024BIM_at; Start 135; Stop 159
tgtccaagtcgtctcgttttgtaaa

SEQ ID NO: 82137 - DNA, 25 bp, Artificial
  probe
  misc_feature (1)..(25): SEQ ID NO: 4968; WAN024BIM_at; Start 116; Stop 140
gcaaactcttcaaacatcttgtcca

SEQ ID NO: 82138 - DNA, 25 bp, Artificial
  probe
  misc_feature (1)..(25): SEQ ID NO: 4968; WAN024BIM_at; Start 130; Stop 154
catcttgtccaagtcgtctcgtttt

SEQ ID NO: 82139 - DNA, 25 bp, Artificial
  probe
  misc_feature (1)..(25): SEQ ID NO: 4968; WAN024BIM_at; Start 114; Stop 138
tagcaaactcttcaaacatcttgtc

SEQ ID NO: 82140 - DNA, 25 bp, Artificial
  probe
  misc_feature (1)..(25): SEQ ID NO: 4968; WAN024BIM_at; Start 139; Stop 163
caagtcgtctcgttttgtaaatttg

SEQ ID NO: 82141 - DNA, 25 bp, Artificial
  probe
  misc_feature (1)..(25): SEQ ID NO: 4968; WAN024BIM_at; Start 11; Stop 35
ctagatgggagttgttgaaaagcag

SEQ ID NO: 82142 - DNA, 25 bp, Artificial
  probe
  misc_feature (1)..(25): SEQ ID NO: 4968; WAN024BIM_at; Start 77; Stop 101
tcatcagggaaagtaacttgtttca

SEQ ID NO: 82143 - DNA, 25 bp, Artificial
  probe
  misc_feature (1)..(25): SEQ ID NO: 4968; WAN024BIM_at; Start 65; Stop 89
tttttctctttgtcatcagggaaag

SEQ ID NO: 82144 - DNA, 25 bp, Artificial
  probe
  misc_feature (1)..(25): SEQ ID NO: 4968; WAN024BIM_at; Start 142; Stop 166
gtcgtctcgttttgtaaatttgaca

SEQ ID NO: 82145 - DNA, 25 bp, Artificial
  probe
  misc_feature (1)..(25): SEQ ID NO: 4968; WAN024BIM_at; Start 132; Stop 156
tcttgtccaagtcgtctcgttttgt

SEQ ID NO: 82146 - DNA, 25 bp, Artificial
  probe
  misc_feature (1)..(25): SEQ ID NO: 4968; WAN024BIM_at; Start 78; Stop 102
catcagggaaagtaacttgtttcaa

SEQ ID NO: 82147 - DNA, 25 bp, Artificial
  probe
  misc_feature (1)..(25): SEQ ID NO: 4968; WAN024BIM_at; Start 1; Stop 25
ttgaagtacactagatgggagttgt

SEQ ID NO: 82148 - DNA, 25 bp, Artificial
  probe
  misc_feature (1)..(25): SEQ ID NO: 4968; WAN024BIM_at; Start 133; Stop 157
cttgtccaagtcgtctcgttttgta

SEQ ID NO: 82149 - DNA, 25 bp, Artificial
  probe
  misc_feature (1)..(25): SEQ ID NO: 4968; WAN024BIM_at; Start 48; Stop 72
tcttttctgctttgacttttttctc

SEQ ID NO: 82150 - DNA, 25 bp, Artificial
  probe
  misc_feature (1)..(25): SEQ ID NO: 4968; WAN024BIM_at; Start 202; Stop 226
attatactattattttgcggaaaag

SEQ ID NO: 82151 - DNA, 25 bp, Artificial
  probe
  misc_feature (1)..(25): SEQ ID NO: 4968; WAN024BIM_at; Start 70; Stop 94
ctctttgtcatcagggaaagtaact

SEQ ID NO: 82152 - DNA, 25 bp, Artificial
  probe
  misc_feature (1)..(25): SEQ ID NO: 4968; WAN024BIM_at; Start 73; Stop 97
tttgtcatcagggaaagtaacttgt

SEQ ID NO: 82153 - DNA, 25 bp, Artificial
  probe
  misc_feature (1)..(25): SEQ ID NO: 4968; WAN024BIM_at; Start 128; Stop 152
aacatcttgtccaagtcgtctcgtt

SEQ ID NO: 82154 - DNA, 25 bp, Artificial
  probe
  misc_feature (1)..(25): SEQ ID NO: 4968; WAN024BIM_at; Start 197; Stop 221
cctctattatactattattttgcgg

SEQ ID NO: 82155 - DNA, 25 bp, Artificial
  probe
  misc_feature (1)..(25): SEQ ID NO: 4968; WAN024BIM_at; Start 74; Stop 98
ttgtcatcagggaaagtaacttgtt

SEQ ID NO: 82156 - DNA, 25 bp, Artificial
  probe
  misc_feature (1)..(25): SEQ ID NO: 4968; WAN024BIM_at; Start 7; Stop 31
tacactagatgggagttgttgaaaa

SEQ ID NO: 82157 - DNA, 25 bp, Artificial
  probe
  misc_feature (1)..(25): SEQ ID NO: 4968; WAN024BIM_at; Start 3; Stop 27
gaagtacactagatgggagttgttg

SEQ ID NO: 82158 - DNA, 25 bp, Artificial
  probe
  misc_feature (1)..(25): SEQ ID NO: 4968; WAN024BIM_at; Start 10; Stop 34
actagatgggagttgttgaaaagca

SEQ ID NO: 82159 - DNA, 25 bp, Artificial
  probe
  misc_feature (1)..(25): SEQ ID NO: 4968; WAN024BIM_at; Start 5; Stop 29
agtacactagatgggagttgttgaa

SEQ ID NO: 82160 - DNA, 25 bp, Artificial
  probe
  misc_feature (1)..(25): SEQ ID NO: 5560; WAN024BIN_at; Start 63; Stop 87
tgacaaagaaaaaagccaaaacagc

SEQ ID NO: 82161 - DNA, 25 bp, Artificial
  probe
  misc_feature (1)..(25): SEQ ID NO: 5560; WAN024BIN_at; Start 64; Stop 88
gacaaagaaaaaagccaaaacagca

SEQ ID NO: 82162 - DNA, 25 bp, Artificial
  probe
  misc_feature (1)..(25): SEQ ID NO: 5560; WAN024BIN_at; Start 62; Stop 86
atgacaaagaaaaaagccaaaacag

SEQ ID NO: 82163 - DNA, 25 bp, Artificial
  probe
  misc_feature (1)..(25): SEQ ID NO: 2558; WAN024BIO_at; Start 26; Stop 50
ctagtttttctttgctgttttggct

SEQ ID NO: 82164 - DNA, 25 bp, Artificial
  probe
  misc_feature (1)..(25): SEQ ID NO: 2558; WAN024BIO_at; Start 119; Stop 143
tgcccaagttgtctcattttgtaaa

SEQ ID NO: 82165 - DNA, 25 bp, Artificial
  probe
  misc_feature (1)..(25): SEQ ID NO: 2558; WAN024BIO_at; Start 25; Stop 49
tctagtttttctttgctgttttggc

SEQ ID NO: 82166 - DNA, 25 bp, Artificial
  probe
  misc_feature (1)..(25): SEQ ID NO: 2558; WAN024BIO_at; Start 127; Stop 151
ttgtctcattttgtaaattttacag

SEQ ID NO: 82167 - DNA, 25 bp, Artificial
  probe
  misc_feature (1)..(25): SEQ ID NO: 2558; WAN024BIO_at; Start 126; Stop 150
gttgtctcattttgtaaattttaca

SEQ ID NO: 82168 - DNA, 25 bp, Artificial
  probe
  misc_feature (1)..(25): SEQ ID NO: 2558; WAN024BIO_at; Start 39; Stop 63
gctgttttggcttttttctttgtca

SEQ ID NO: 82169 - DNA, 25 bp, Artificial
  probe
  misc_feature (1)..(25): SEQ ID NO: 2558; WAN024BIO_at; Start 98; Stop 122
taggaaattcttcaaacatcttgcc

SEQ ID NO: 82170 - DNA, 25 bp, Artificial
  probe
  misc_feature (1)..(25): SEQ ID NO: 2558; WAN024BIO_at; Start 113; Stop 137
acatcttgcccaagttgtctcattt

SEQ ID NO: 82171 - DNA, 25 bp, Artificial
  probe
  misc_feature (1)..(25): SEQ ID NO: 2558; WAN024BIO_at; Start 110; Stop 134
caaacatcttgcccaagttgtctca

SEQ ID NO: 82172 - DNA, 25 bp, Artificial
  probe
  misc_feature (1)..(25): SEQ ID NO: 2558; WAN024BIO_at; Start 114; Stop 138
catcttgcccaagttgtctcatttt

SEQ ID NO: 82173 - DNA, 25 bp, Artificial
  probe
  misc_feature (1)..(25): SEQ ID NO: 2558; WAN024BIO_at; Start 123; Stop 147
caagttgtctcattttgtaaatttt

SEQ ID NO: 82174 - DNA, 25 bp, Artificial
  probe
  misc_feature (1)..(25): SEQ ID NO: 2558; WAN024BIO_at; Start 100; Stop 124
ggaaattcttcaaacatcttgccca

SEQ ID NO: 82175 - DNA, 25 bp, Artificial
  probe
  misc_feature (1)..(25): SEQ ID NO: 2558; WAN024BIO_at; Start 121; Stop 145
cccaagttgtctcattttgtaaatt

SEQ ID NO: 82176 - DNA, 25 bp, Artificial
  probe
  misc_feature (1)..(25): SEQ ID NO: 2558; WAN024BIO_at; Start 117; Stop 141
cttgcccaagttgtctcattttgta

SEQ ID NO: 82177 - DNA, 25 bp, Artificial
  probe
  misc_feature (1)..(25): SEQ ID NO: 2558; WAN024BIO_at; Start 24; Stop 48
atctagtttttctttgctgttttgg

SEQ ID NO: 82178 - DNA, 25 bp, Artificial
  probe
  misc_feature (1)..(25): SEQ ID NO: 2558; WAN024BIO_at; Start 38; Stop 62
tgctgttttggcttttttctttgtc

SEQ ID NO: 82179 - DNA, 25 bp, Artificial
  probe
  misc_feature (1)..(25): SEQ ID NO: 2558; WAN024BIO_at; Start 101; Stop 125
gaaattcttcaaacatcttgcccaa

SEQ ID NO: 82180 - DNA, 25 bp, Artificial
  probe
  misc_feature (1)..(25): SEQ ID NO: 2558; WAN024BIO_at; Start 118; Stop 142
ttgcccaagttgtctcattttgtaa

SEQ ID NO: 82181 - DNA, 25 bp, Artificial
  probe
  misc_feature (1)..(25): SEQ ID NO: 2558; WAN024BIO_at; Start 97; Stop 121
ttaggaaattcttcaaacatcttgc

SEQ ID NO: 82182 - DNA, 25 bp, Artificial
  probe
  misc_feature (1)..(25): SEQ ID NO: 2558; WAN024BIO_at; Start 104; Stop 128
attcttcaaacatcttgcccaagtt

SEQ ID NO: 82183 - DNA, 25 bp, Artificial
  probe
  misc_feature (1)..(25): SEQ ID NO: 2558; WAN024BIO_at; Start 116; Stop 140
tcttgcccaagttgtctcattttgt

SEQ ID NO: 82184 - DNA, 25 bp, Artificial
  probe
  misc_feature (1)..(25): SEQ ID NO: 2558; WAN024BIO_at; Start 128; Stop 152
tgtctcattttgtaaattttacagc

SEQ ID NO: 82185 - DNA, 25 bp, Artificial
  probe
  misc_feature (1)..(25): SEQ ID NO: 2558; WAN024BIO_at; Start 99; Stop 123
aggaaattcttcaaacatcttgccc

SEQ ID NO: 82186 - DNA, 25 bp, Artificial
  probe
  misc_feature (1)..(25): SEQ ID NO: 2558; WAN024BIO_at; Start 112; Stop 136
aacatcttgcccaagttgtctcatt

SEQ ID NO: 82187 - DNA, 25 bp, Artificial
  probe
  misc_feature (1)..(25): SEQ ID NO: 2558; WAN024BIO_at; Start 105; Stop 129
ttcttcaaacatcttgcccaagttg

SEQ ID NO: 82188 - DNA, 25 bp, Artificial
  probe
  misc_feature (1)..(25): SEQ ID NO: 2558; WAN024BIO_at; Start 120; Stop 144
gcccaagttgtctcattttgtaaat

SEQ ID NO: 82189 - DNA, 25 bp, Artificial
  probe
  misc_feature (1)..(25): SEQ ID NO: 2558; WAN024BIO_at; Start 115; Stop 139
atcttgcccaagttgtctcattttg

SEQ ID NO: 82190 - DNA, 25 bp, Artificial
  probe
  misc_feature (1)..(25): SEQ ID NO: 2558; WAN024BIO_at; Start 111; Stop 135
aaacatcttgcccaagttgtctcat

SEQ ID NO: 82191 - DNA, 25 bp, Artificial
  probe
  misc_feature (1)..(25): SEQ ID NO: 2558; WAN024BIO_at; Start 40; Stop 64
ctgttttggcttttttctttgtcat

SEQ ID NO: 82192 - DNA, 25 bp, Artificial
  probe
  misc_feature (1)..(25): SEQ ID NO: 4087; WAN024BIP_at; Start 46; Stop 70
caagtcatcaagataccaagccgtc

SEQ ID NO: 82193 - DNA, 25 bp, Artificial
  probe
  misc_feature (1)..(25): SEQ ID NO: 4087; WAN024BIP_at; Start 38; Stop 62
ccaaaattcaagtcatcaagatacc

SEQ ID NO: 82194 - DNA, 25 bp, Artificial
  probe
  misc_feature (1)..(25): SEQ ID NO: 4087; WAN024BIP_at; Start 248; Stop 272
ttactaactctctcgtcaaataact

SEQ ID NO: 82195 - DNA, 25 bp, Artificial
  probe
  misc_feature (1)..(25): SEQ ID NO: 4087; WAN024BIP_at; Start 43; Stop 67
attcaagtcatcaagataccaagcc

SEQ ID NO: 82196 - DNA, 25 bp, Artificial
  probe
  misc_feature (1)..(25): SEQ ID NO: 4087; WAN024BIP_at; Start 37; Stop 61
accaaaattcaagtcatcaagatac

SEQ ID NO: 82197 - DNA, 25 bp, Artificial
  probe
  misc_feature (1)..(25): SEQ ID NO: 4087; WAN024BIP_at; Start 42; Stop 66
aattcaagtcatcaagataccaagc

SEQ ID NO: 82198 - DNA, 25 bp, Artificial
  probe
  misc_feature (1)..(25): SEQ ID NO: 4087; WAN024BIP_at; Start 45; Stop 69
tcaagtcatcaagataccaagccgt

SEQ ID NO: 82199 - DNA, 25 bp, Artificial
  probe
  misc_feature (1)..(25): SEQ ID NO: 4087; WAN024BIP_at; Start 250; Stop 274
actaactctctcgtcaaataactaa

SEQ ID NO: 82200 - DNA, 25 bp, Artificial
  probe
  misc_feature (1)..(25): SEQ ID NO: 4087; WAN024BIP_at; Start 44; Stop 68
ttcaagtcatcaagataccaagccg

SEQ ID NO: 82201 - DNA, 25 bp, Artificial
  probe
  misc_feature (1)..(25): SEQ ID NO: 4087; WAN024BIP_at; Start 35; Stop 59
agaccaaaattcaagtcatcaagat

SEQ ID NO: 82202 - DNA, 25 bp, Artificial
  probe
  misc_feature (1)..(25): SEQ ID NO: 4087; WAN024BIP_at; Start 34; Stop 58
gagaccaaaattcaagtcatcaaga

SEQ ID NO: 82203 - DNA, 25 bp, Artificial
  probe
  misc_feature (1)..(25): SEQ ID NO: 4087; WAN024BIP_at; Start 50; Stop 74
tcatcaagataccaagccgtcaagc

SEQ ID NO: 82204 - DNA, 25 bp, Artificial
  probe
  misc_feature (1)..(25): SEQ ID NO: 4087; WAN024BIP_at; Start 249; Stop 273
tactaactctctcgtcaaataacta

SEQ ID NO: 82205 - DNA, 25 bp, Artificial
  probe
  misc_feature (1)..(25): SEQ ID NO: 4087; WAN024BIP_at; Start 49; Stop 73
gtcatcaagataccaagccgtcaag

SEQ ID NO: 82206 - DNA, 25 bp, Artificial
  probe
  misc_feature (1)..(25): SEQ ID NO: 4087; WAN024BIP_at; Start 41; Stop 65
aaattcaagtcatcaagataccaag

SEQ ID NO: 82207 - DNA, 25 bp, Artificial
  probe
  misc_feature (1)..(25): SEQ ID NO: 4087; WAN024BIP_at; Start 48; Stop 72
agtcatcaagataccaagccgtcaa

SEQ ID NO: 82208 - DNA, 25 bp, Artificial
  probe
  misc_feature (1)..(25): SEQ ID NO: 4087; WAN024BIP_at; Start 52; Stop 76
atcaagataccaagccgtcaagcaa

SEQ ID NO: 82209 - DNA, 25 bp, Artificial
  probe
  misc_feature (1)..(25): SEQ ID NO: 4087; WAN024BIP_at; Start 40; Stop 64
aaaattcaagtcatcaagataccaa

SEQ ID NO: 82210 - DNA, 25 bp, Artificial
  probe
  misc_feature (1)..(25): SEQ ID NO: 4087; WAN024BIP_at; Start 51; Stop 75
catcaagataccaagccgtcaagca

SEQ ID NO: 82211 - DNA, 25 bp, Artificial
  probe
  misc_feature (1)..(25): SEQ ID NO: 4087; WAN024BIP_at; Start 47; Stop 71
aagtcatcaagataccaagccgtca

SEQ ID NO: 82212 - DNA, 25 bp, Artificial
  probe
  misc_feature (1)..(25): SEQ ID NO: 4087; WAN024BIP_at; Start 251; Stop 275
ctaactctctcgtcaaataactaat

SEQ ID NO: 82213 - DNA, 25 bp, Artificial
  probe
  misc_feature (1)..(25): SEQ ID NO: 4087; WAN024BIP_at; Start 39; Stop 63
caaaattcaagtcatcaagatacca

SEQ ID NO: 82214 - DNA, 25 bp, Artificial
  probe
  misc_feature (1)..(25): SEQ ID NO: 4087; WAN024BIP_at; Start 36; Stop 60
gaccaaaattcaagtcatcaagata

SEQ ID NO: 82215 - DNA, 25 bp, Artificial
  probe
  misc_feature (1)..(25): SEQ ID NO: 18; WAN024BIX_s_at; Start 26; Stop 50
ctggatcattctcatcaggattact

SEQ ID NO: 82216 - DNA, 25 bp, Artificial
  probe
  misc_feature (1)..(25): SEQ ID NO: 18; WAN024BIX_s_at; Start 24; Stop 48
tcctggatcattctcatcaggatta

SEQ ID NO: 82217 - DNA, 25 bp, Artificial
  probe
  misc_feature (1)..(25): SEQ ID NO: 18; WAN024BIX_s_at; Start 23; Stop 47
atcctggatcattctcatcaggatt

SEQ ID NO: 82218 - DNA, 25 bp, Artificial
  probe
  misc_feature (1)..(25): SEQ ID NO: 18; WAN024BIX_s_at; Start 22; Stop 46
gatcctggatcattctcatcaggat

SEQ ID NO: 82219 - DNA, 25 bp, Artificial
  probe
  misc_feature (1)..(25): SEQ ID NO: 18; WAN024BIX_s_at; Start 25; Stop 49
cctggatcattctcatcaggattac

SEQ ID NO: 82220 - DNA, 25 bp, Artificial
  probe
  misc_feature (1)..(25): SEQ ID NO: 4119; WAN024BIY_at; Start 201; Stop 225
aacgagccgttatcaagttgatagg

SEQ ID NO: 82221 - DNA, 25 bp, Artificial
  probe
  misc_feature (1)..(25): SEQ ID NO: 4119; WAN024BIY_at; Start 180; Stop 204
catgcaggaatttatcattcaaacg

SEQ ID NO: 82222 - DNA, 25 bp, Artificial
  probe
  misc_feature (1)..(25): SEQ ID NO: 4119; WAN024BIY_at; Start 171; Stop 195
ccctatgggcatgcaggaatttatc

SEQ ID NO: 82223 - DNA, 25 bp, Artificial
  probe
  misc_feature (1)..(25): SEQ ID NO: 4119; WAN024BIY_at; Start 172; Stop 196
cctatgggcatgcaggaatttatca

SEQ ID NO: 82224 - DNA, 25 bp, Artificial
  probe
  misc_feature (1)..(25): SEQ ID NO: 4119; WAN024BIY_at; Start 18; Stop 42
gggagattatagctatttactcttt

SEQ ID NO: 82225 - DNA, 25 bp, Artificial
  probe
  misc_feature (1)..(25): SEQ ID NO: 4119; WAN024BIY_at; Start 203; Stop 227
cgagccgttatcaagttgataggca

SEQ ID NO: 82226 - DNA, 25 bp, Artificial
  probe
  misc_feature (1)..(25): SEQ ID NO: 4119; WAN024BIY_at; Start 13; Stop 37
gaaaagggagattatagctatttac

SEQ ID NO: 82227 - DNA, 25 bp, Artificial
  probe
  misc_feature (1)..(25): SEQ ID NO: 4119; WAN024BIY_at; Start 148; Stop 172
gatagtttggcctatattcctaccc

SEQ ID NO: 82228 - DNA, 25 bp, Artificial
  probe
  misc_feature (1)..(25): SEQ ID NO: 4119; WAN024BIY_at; Start 162; Stop 186
tattcctacccctatgggcatgcag

SEQ ID NO: 82229 - DNA, 25 bp, Artificial
  probe
  misc_feature (1)..(25): SEQ ID NO: 4119; WAN024BIY_at; Start 83; Stop 107
gtcaagaactggtgatgagccgatt

SEQ ID NO: 82230 - DNA, 25 bp, Artificial
  probe
  misc_feature (1)..(25): SEQ ID NO: 4119; WAN024BIY_at; Start 174; Stop 198
tatgggcatgcaggaatttatcatt

SEQ ID NO: 82231 - DNA, 25 bp, Artificial
  probe
  misc_feature (1)..(25): SEQ ID NO: 4119; WAN024BIY_at; Start 214; Stop 238
caagttgataggcaaaagattgagc

SEQ ID NO: 82232 - DNA, 25 bp, Artificial
  probe
  misc_feature (1)..(25): SEQ ID NO: 4119; WAN024BIY_at; Start 165; Stop 189
tcctacccctatgggcatgcaggaa

SEQ ID NO: 82233 - DNA, 25 bp, Artificial
  probe
  misc_feature (1)..(25): SEQ ID NO: 4119; WAN024BIY_at; Start 184; Stop 208
caggaatttatcattcaaacgagcc

SEQ ID NO: 82234 - DNA, 25 bp, Artificial
  probe
  misc_feature (1)..(25): SEQ ID NO: 4119; WAN024BIY_at; Start 88; Stop 112
gaactggtgatgagccgattttcta

SEQ ID NO: 82235 - DNA, 25 bp, Artificial
  probe
  misc_feature (1)..(25): SEQ ID NO: 4119; WAN024BIY_at; Start 217; Stop 241
gttgataggcaaaagattgagctag

SEQ ID NO: 82236 - DNA, 25 bp, Artificial
  probe
  misc_feature (1)..(25): SEQ ID NO: 4119; WAN024BIY_at; Start 94; Stop 118
gtgatgagccgattttctaatccca

SEQ ID NO: 82237 - DNA, 25 bp, Artificial
  probe
  misc_feature (1)..(25): SEQ ID NO: 4119; WAN024BIY_at; Start 34; Stop 58
ttactctttcataatgaggaaaagg

SEQ ID NO: 82238 - DNA, 25 bp, Artificial
  probe
  misc_feature (1)..(25): SEQ ID NO: 4119; WAN024BIY_at; Start 89; Stop 113
aactggtgatgagccgattttctaa

SEQ ID NO: 82239 - DNA, 25 bp, Artificial
  probe
  misc_feature (1)..(25): SEQ ID NO: 4119; WAN024BIY_at; Start 85; Stop 109
caagaactggtgatgagccgatttt

SEQ ID NO: 82240 - DNA, 25 bp, Artificial
  probe
  misc_feature (1)..(25): SEQ ID NO: 4119; WAN024BIY_at; Start 199; Stop 223
caaacgagccgttatcaagttgata

SEQ ID NO: 82241 - DNA, 25 bp, Artificial
  probe
  misc_feature (1)..(25): SEQ ID NO: 4119; WAN024BIY_at; Start 79; Stop 103
catggtcaagaactggtgatgagcc

SEQ ID NO: 82242 - DNA, 25 bp, Artificial
  probe
  misc_feature (1)..(25): SEQ ID NO: 4119; WAN024BIY_at; Start 81; Stop 105
tggtcaagaactggtgatgagccga

SEQ ID NO: 82243 - DNA, 25 bp, Artificial
  probe
  misc_feature (1)..(25): SEQ ID NO: 4119; WAN024BIY_at; Start 207; Stop 231
ccgttatcaagttgataggcaaaag

SEQ ID NO: 82244 - DNA, 25 bp, Artificial
  probe
  misc_feature (1)..(25): SEQ ID NO: 4119; WAN024BIY_at; Start 190; Stop 214
tttatcattcaaacgagccgttatc

SEQ ID NO: 82245 - DNA, 25 bp, Artificial
  probe
  misc_feature (1)..(25): SEQ ID NO: 4119; WAN024BIY_at; Start 157; Stop 181
gcctatattcctacccctatgggca

SEQ ID NO: 82246 - DNA, 25 bp, Artificial
  probe
  misc_feature (1)..(25): SEQ ID NO: 4119; WAN024BIY_at; Start 169; Stop 193
acccctatgggcatgcaggaattta

SEQ ID NO: 82247 - DNA, 25 bp, Artificial
  probe
  misc_feature (1)..(25): SEQ ID NO: 4119; WAN024BIY_at; Start 29; Stop 53
gctatttactctttcataatgagga

SEQ ID NO: 82248 - DNA, 25 bp, Artificial
  probe
  misc_feature (1)..(25): SEQ ID NO: 4119; WAN024BIY_at; Start 92; Stop 116
tggtgatgagccgattttctaatcc

SEQ ID NO: 82249 - DNA, 25 bp, Artificial
  probe
  misc_feature (1)..(25): SEQ ID NO: 4119; WAN024BIY_at; Start 187; Stop 211
gaatttatcattcaaacgagccgtt

SEQ ID NO: 82250 - DNA, 25 bp, Artificial
  probe
  misc_feature (1)..(25): SEQ ID NO: 4119; WAN024BIY_at; Start 135; Stop 159
tttaaaggatagtgatagtttggcc

SEQ ID NO: 82251 - DNA, 25 bp, Artificial
  probe
  misc_feature (1)..(25): SEQ ID NO: 4119; WAN024BIY_at; Start 194; Stop 218
tcattcaaacgagccgttatcaagt

SEQ ID NO: 82252 - DNA, 25 bp, Artificial
  probe
  misc_feature (1)..(25): SEQ ID NO: 4119; WAN024BIY_at; Start 177; Stop 201
gggcatgcaggaatttatcattcaa

SEQ ID NO: 82253 - DNA, 25 bp, Artificial
  probe
  misc_feature (1)..(25): SEQ ID NO: 4119; WAN024BIY_at; Start 155; Stop 179
tggcctatattcctacccctatggg

SEQ ID NO: 82254 - DNA, 25 bp, Artificial
  probe
  misc_feature (1)..(25): SEQ ID NO: 3889; WAN024BIZ_at; Start 52; Stop 76
attgaccagctttatgatgtggaag

SEQ ID NO: 82255 - DNA, 25 bp, Artificial
  probe
  misc_feature (1)..(25): SEQ ID NO: 3889; WAN024BIZ_at; Start 51; Stop 75
gattgaccagctttatgatgtggaa

SEQ ID NO: 82256 - DNA, 25 bp, Artificial
  probe
  misc_feature (1)..(25): SEQ ID NO: 3889; WAN024BIZ_at; Start 45; Stop 69
ggaagtgattgaccagctttatgat

SEQ ID NO: 82257 - DNA, 25 bp, Artificial
  probe
  misc_feature (1)..(25): SEQ ID NO: 3889; WAN024BIZ_at; Start 60; Stop 84
gctttatgatgtggaagtgcatgaa

SEQ ID NO: 82258 - DNA, 25 bp, Artificial
  probe
  misc_feature (1)..(25): SEQ ID NO: 3889; WAN024BIZ_at; Start 39; Stop 63
gcagttggaagtgattgaccagctt

SEQ ID NO: 82259 - DNA, 25 bp, Artificial
  probe
  misc_feature (1)..(25): SEQ ID NO: 3889; WAN024BIZ_at; Start 41; Stop 65
agttggaagtgattgaccagcttta

SEQ ID NO: 82260 - DNA, 25 bp, Artificial
  probe
  misc_feature (1)..(25): SEQ ID NO: 3889; WAN024BIZ_at; Start 56; Stop 80
accagctttatgatgtggaagtgca

SEQ ID NO: 82261 - DNA, 25 bp, Artificial
  probe
  misc_feature (1)..(25): SEQ ID NO: 3889; WAN024BIZ_at; Start 42; Stop 66
gttggaagtgattgaccagctttat

SEQ ID NO: 82262 - DNA, 25 bp, Artificial
  probe
  misc_feature (1)..(25): SEQ ID NO: 3889; WAN024BIZ_at; Start 29; Stop 53
agtttgatgagcagttggaagtgat

SEQ ID NO: 82263 - DNA, 25 bp, Artificial
  probe
  misc_feature (1)..(25): SEQ ID NO: 3889; WAN024BIZ_at; Start 100; Stop 124
tacctgcttttctataatgaggaaa

SEQ ID NO: 82264 - DNA, 25 bp, Artificial
  probe
  misc_feature (1)..(25): SEQ ID NO: 3889; WAN024BIZ_at; Start 102; Stop 126
cctgcttttctataatgaggaaaag

SEQ ID NO: 82265 - DNA, 25 bp, Artificial
  probe
  misc_feature (1)..(25): SEQ ID NO: 3889; WAN024BIZ_at; Start 34; Stop 58
gatgagcagttggaagtgattgacc

SEQ ID NO: 82266 - DNA, 25 bp, Artificial
  probe
  misc_feature (1)..(25): SEQ ID NO: 3889; WAN024BIZ_at; Start 31; Stop 55
tttgatgagcagttggaagtgattg

SEQ ID NO: 82267 - DNA, 25 bp, Artificial
  probe
  misc_feature (1)..(25): SEQ ID NO: 3889; WAN024BIZ_at; Start 36; Stop 60
tgagcagttggaagtgattgaccag

SEQ ID NO: 82268 - DNA, 25 bp, Artificial
  probe
  misc_feature (1)..(25): SEQ ID NO: 3889; WAN024BIZ_at; Start 49; Stop 73
gtgattgaccagctttatgatgtgg

SEQ ID NO: 82269 - DNA, 25 bp, Artificial
  probe
  misc_feature (1)..(25): SEQ ID NO: 3889; WAN024BIZ_at; Start 38; Stop 62
agcagttggaagtgattgaccagct

SEQ ID NO: 82270 - DNA, 25 bp, Artificial
  probe
  misc_feature (1)..(25): SEQ ID NO: 3889; WAN024BIZ_at; Start 55; Stop 79
gaccagctttatgatgtggaagtgc

SEQ ID NO: 82271 - DNA, 25 bp, Artificial
  probe
  misc_feature (1)..(25): SEQ ID NO: 3889; WAN024BIZ_at; Start 46; Stop 70
gaagtgattgaccagctttatgatg

SEQ ID NO: 82272 - DNA, 25 bp, Artificial
  probe
  misc_feature (1)..(25): SEQ ID NO: 3889; WAN024BIZ_at; Start 58; Stop 82
cagctttatgatgtggaagtgcatg

SEQ ID NO: 82273 - DNA, 25 bp, Artificial
  probe
  misc_feature (1)..(25): SEQ ID NO: 3889; WAN024BIZ_at; Start 27; Stop 51
tcagtttgatgagcagttggaagtg

SEQ ID NO: 82274 - DNA, 25 bp, Artificial
  probe
  misc_feature (1)..(25): SEQ ID NO: 3889; WAN024BIZ_at; Start 98; Stop 122
gctacctgcttttctataatgagga

SEQ ID NO: 82275 - DNA, 25 bp, Artificial
  probe
  misc_feature (1)..(25): SEQ ID NO: 3889; WAN024BIZ_at; Start 25; Stop 49
attcagtttgatgagcagttggaag

SEQ ID NO: 82276 - DNA, 25 bp, Artificial
  probe
  misc_feature (1)..(25): SEQ ID NO: 3889; WAN024BIZ_at; Start 96; Stop 120
tagctacctgcttttctataatgag

SEQ ID NO: 82277 - DNA, 25 bp, Artificial
  probe
  misc_feature (1)..(25): SEQ ID NO: 3889; WAN024BIZ_at; Start 50; Stop 74
tgattgaccagctttatgatgtgga

SEQ ID NO: 82278 - DNA, 25 bp, Artificial
  probe
  misc_feature (1)..(25): SEQ ID NO: 3889; WAN024BIZ_at; Start 89; Stop 113
gagattatagctacctgcttttcta

SEQ ID NO: 82279 - DNA, 25 bp, Artificial
  probe
  misc_feature (1)..(25): SEQ ID NO: 3889; WAN024BIZ_at; Start 44; Stop 68
tggaagtgattgaccagctttatga

SEQ ID NO: 82280 - DNA, 25 bp, Artificial
  probe
  misc_feature (1)..(25): SEQ ID NO: 3889; WAN024BIZ_at; Start 37; Stop 61
gagcagttggaagtgattgaccagc

SEQ ID NO: 82281 - DNA, 25 bp, Artificial
  probe
  misc_feature (1)..(25): SEQ ID NO: 3889; WAN024BIZ_at; Start 54; Stop 78
tgaccagctttatgatgtggaagtg

SEQ ID NO: 82282 - DNA, 25 bp, Artificial
  probe
  misc_feature (1)..(25): SEQ ID NO: 3889; WAN024BIZ_at; Start 33; Stop 57
tgatgagcagttggaagtgattgac

SEQ ID NO: 82283 - DNA, 25 bp, Artificial
  probe
  misc_feature (1)..(25): SEQ ID NO: 3889; WAN024BIZ_at; Start 57; Stop 81
ccagctttatgatgtggaagtgcat

SEQ ID NO: 82284 - DNA, 25 bp, Artificial
  probe
  misc_feature (1)..(25): SEQ ID NO: 3889; WAN024BIZ_at; Start 97; Stop 121
agctacctgcttttctataatgagg

SEQ ID NO: 82285 - DNA, 25 bp, Artificial
  probe
  misc_feature (1)..(25): SEQ ID NO: 3889; WAN024BIZ_at; Start 40; Stop 64
cagttggaagtgattgaccagcttt

SEQ ID NO: 82286 - DNA, 25 bp, Artificial
  probe
  misc_feature (1)..(25): SEQ ID NO: 3889; WAN024BIZ_at; Start 91; Stop 115
gattatagctacctgcttttctata

SEQ ID NO: 82287 - DNA, 25 bp, Artificial
  probe
  misc_feature (1)..(25): SEQ ID NO: 3889; WAN024BIZ_at; Start 48; Stop 72
agtgattgaccagctttatgatgtg

SEQ ID NO: 82288 - DNA, 25 bp, Artificial
  probe
  misc_feature (1)..(25): SEQ ID NO: 7591; WAN024BJ3_at; Start 110; Stop 134
gcttcttttctatcaacagtaacct

SEQ ID NO: 82289 - DNA, 25 bp, Artificial
  probe
  misc_feature (1)..(25): SEQ ID NO: 7591; WAN024BJ3_at; Start 179; Stop 203
gtcgtagttacatagccatcctctc

SEQ ID NO: 82290 - DNA, 25 bp, Artificial
  probe
  misc_feature (1)..(25): SEQ ID NO: 7591; WAN024BJ3_at; Start 1; Stop 25
ttgctcctgtcctgcagaaaggtca

SEQ ID NO: 82291 - DNA, 25 bp, Artificial
  probe
  misc_feature (1)..(25): SEQ ID NO: 7591; WAN024BJ3_at; Start 174; Stop 198
tccttgtcgtagttacatagccatc

SEQ ID NO: 82292 - DNA, 25 bp, Artificial
  probe
  misc_feature (1)..(25): SEQ ID NO: 7591; WAN024BJ3_at; Start 162; Stop 186
taacatcgtaggtccttgtcgtagt

SEQ ID NO: 82293 - DNA, 25 bp, Artificial
  probe
  misc_feature (1)..(25): SEQ ID NO: 7591; WAN024BJ3_at; Start 195; Stop 219
catcctctccatcaattgtaacagg

SEQ ID NO: 82294 - DNA, 25 bp, Artificial
  probe
  misc_feature (1)..(25): SEQ ID NO: 7591; WAN024BJ3_at; Start 23; Stop 47
tcattgtctgcttcatatttagtag

SEQ ID NO: 82295 - DNA, 25 bp, Artificial
  probe
  misc_feature (1)..(25): SEQ ID NO: 7591; WAN024BJ3_at; Start 5; Stop 29
tcctgtcctgcagaaaggtcattgt

SEQ ID NO: 82296 - DNA, 25 bp, Artificial
  probe
  misc_feature (1)..(25): SEQ ID NO: 7591; WAN024BJ3_at; Start 153; Stop 177
tctctggattaacatcgtaggtcct

SEQ ID NO: 82297 - DNA, 25 bp, Artificial
  probe
  misc_feature (1)..(25): SEQ ID NO: 7591; WAN024BJ3_at; Start 15; Stop 39
cagaaaggtcattgtctgcttcata

SEQ ID NO: 82298 - DNA, 25 bp, Artificial
  probe
  misc_feature (1)..(25): SEQ ID NO: 7591; WAN024BJ3_at; Start 158; Stop 182
ggattaacatcgtaggtccttgtcg

SEQ ID NO: 82299 - DNA, 25 bp, Artificial
  probe
  misc_feature (1)..(25): SEQ ID NO: 7591; WAN024BJ3_at; Start 104; Stop 128
tccgtggcttcttttctatcaacag

SEQ ID NO: 82300 - DNA, 25 bp, Artificial
  probe
  misc_feature (1)..(25): SEQ ID NO: 7591; WAN024BJ3_at; Start 81; Stop 105
tagctggaactttgataactgtatc

SEQ ID NO: 82301 - DNA, 25 bp, Artificial
  probe
  misc_feature (1)..(25): SEQ ID NO: 7591; WAN024BJ3_at; Start 52; Stop 76
tggaacaagaacttcttcaaccttg

SEQ ID NO: 82302 - DNA, 25 bp, Artificial
  probe
  misc_feature (1)..(25): SEQ ID NO: 7591; WAN024BJ3_at; Start 225; Stop 249
cactacggtcttttgtttcatcttt

SEQ ID NO: 82303 - DNA, 25 bp, Artificial
  probe
  misc_feature (1)..(25): SEQ ID NO: 7591; WAN024BJ3_at; Start 65; Stop 89
tcttcaaccttgcttttagctggaa

SEQ ID NO: 82304 - DNA, 25 bp, Artificial
  probe
  misc_feature (1)..(25): SEQ ID NO: 7591; WAN024BJ3_at; Start 208; Stop 232
aattgtaacaggattttcactacgg

SEQ ID NO: 82305 - DNA, 25 bp, Artificial
  probe
  misc_feature (1)..(25): SEQ ID NO: 7591; WAN024BJ3_at; Start 97; Stop 121
aactgtatccgtggcttcttttcta

SEQ ID NO: 82306 - DNA, 25 bp, Artificial
  probe
  misc_feature (1)..(25): SEQ ID NO: 7591; WAN024BJ3_at; Start 87; Stop 111
gaactttgataactgtatccgtggc

SEQ ID NO: 82307 - DNA, 25 bp, Artificial
  probe
  misc_feature (1)..(25): SEQ ID NO: 7591; WAN024BJ3_at; Start 148; Stop 172
accagtctctggattaacatcgtag

SEQ ID NO: 82308 - DNA, 25 bp, Artificial
  probe
  misc_feature (1)..(25): SEQ ID NO: 7591; WAN024BJ3_at; Start 8; Stop 32
tgtcctgcagaaaggtcattgtctg

SEQ ID NO: 82309 - DNA, 25 bp, Artificial
  probe
  misc_feature (1)..(25): SEQ ID NO: 7591; WAN024BJ3_at; Start 170; Stop 194
taggtccttgtcgtagttacatagc

SEQ ID NO: 82310 - DNA, 25 bp, Artificial
  probe
  misc_feature (1)..(25): SEQ ID NO: 7591; WAN024BJ3_at; Start 75; Stop 99
tgcttttagctggaactttgataac

SEQ ID NO: 82311 - DNA, 25 bp, Artificial
  probe
  misc_feature (1)..(25): SEQ ID NO: 7591; WAN024BJ3_at; Start 242; Stop 266
tcatctttttcataacgaattcgcg

SEQ ID NO: 82312 - DNA, 25 bp, Artificial
  probe
  misc_feature (1)..(25): SEQ ID NO: 7591; WAN024BJ3_at; Start 189; Stop 213
catagccatcctctccatcaattgt

SEQ ID NO: 82313 - DNA, 25 bp, Artificial
  probe
  misc_feature (1)..(25): SEQ ID NO: 7591; WAN024BJ3_at; Start 71; Stop 95
accttgcttttagctggaactttga

SEQ ID NO: 82314 - DNA, 25 bp, Artificial
  probe
  misc_feature (1)..(25): SEQ ID NO: 7591; WAN024BJ3_at; Start 184; Stop 208
agttacatagccatcctctccatca

SEQ ID NO: 82315 - DNA, 25 bp, Artificial
  probe
  misc_feature (1)..(25): SEQ ID NO: 7591; WAN024BJ3_at; Start 249; Stop 273
tttcataacgaattcgcgtacttga

SEQ ID NO: 82316 - DNA, 25 bp, Artificial
  probe
  misc_feature (1)..(25): SEQ ID NO: 7591; WAN024BJ3_at; Start 211; Stop 235
tgtaacaggattttcactacggtct

SEQ ID NO: 82317 - DNA, 25 bp, Artificial
  probe
  misc_feature (1)..(25): SEQ ID NO: 7591; WAN024BJ3_at; Start 90; Stop 114
ctttgataactgtatccgtggcttc

SEQ ID NO: 82318 - DNA, 25 bp, Artificial
  probe
  misc_feature (1)..(25): SEQ ID NO: 7591; WAN024BJ3_at; Start 60; Stop 84
gaacttcttcaaccttgcttttagc

SEQ ID NO: 82319 - DNA, 25 bp, Artificial
  probe
  misc_feature (1)..(25): SEQ ID NO: 7591; WAN024BJ3_at; Start 106; Stop 130
cgtggcttcttttctatcaacagta

SEQ ID NO: 82320 - DNA, 25 bp, Artificial
  probe
  misc_feature (1)..(25): SEQ ID NO: 7591; WAN024BJ3_at; Start 165; Stop 189
catcgtaggtccttgtcgtagttac

SEQ ID NO: 82321 - DNA, 25 bp, Artificial
  probe
  misc_feature (1)..(25): SEQ ID NO: 7591; WAN024BJ3_at; Start 216; Stop 240
caggattttcactacggtcttttgt

SEQ ID NO: 82322 - DNA, 25 bp, Artificial
  probe
  misc_feature (1)..(25): SEQ ID NO: 7152; WAN024BJ4_at; Start 101; Stop 125
aaaaagttgttgttcctgagcaatc

SEQ ID NO: 82323 - DNA, 25 bp, Artificial
  probe
  misc_feature (1)..(25): SEQ ID NO: 7152; WAN024BJ4_at; Start 385; Stop 409
gagttagcggtcaatacaagtatag

SEQ ID NO: 82324 - DNA, 25 bp, Artificial
  probe
  misc_feature (1)..(25): SEQ ID NO: 7152; WAN024BJ4_at; Start 266; Stop 290
tggcaacaggttgggtacaagttaa

SEQ ID NO: 82325 - DNA, 25 bp, Artificial
  probe
  misc_feature (1)..(25): SEQ ID NO: 7152; WAN024BJ4_at; Start 1; Stop 25
ctggtagatgaacgtgatggaacaa

SEQ ID NO: 82326 - DNA, 25 bp, Artificial
  probe
  misc_feature (1)..(25): SEQ ID NO: 7152; WAN024BJ4_at; Start 184; Stop 208
gaaccagctaaagcagttgctccaa

SEQ ID NO: 82327 - DNA, 25 bp, Artificial
  probe
  misc_feature (1)..(25): SEQ ID NO: 7152; WAN024BJ4_at; Start 333; Stop 357
caatcaatggttccaagttggtggt

SEQ ID NO: 82328 - DNA, 25 bp, Artificial
  probe
  misc_feature (1)..(25): SEQ ID NO: 7152; WAN024BJ4_at; Start 111; Stop 135
tgttcctgagcaatcatctattcct

SEQ ID NO: 82329 - DNA, 25 bp, Artificial
  probe
  misc_feature (1)..(25): SEQ ID NO: 7152; WAN024BJ4_at; Start 144; Stop 168
tgtatctgttacatctaaccaagga

SEQ ID NO: 82330 - DNA, 25 bp, Artificial
  probe
  misc_feature (1)..(25): SEQ ID NO: 7152; WAN024BJ4_at; Start 345; Stop 369
ccaagttggtggtaaatggtattat

SEQ ID NO: 82331 - DNA, 25 bp, Artificial
  probe
  misc_feature (1)..(25): SEQ ID NO: 7152; WAN024BJ4_at; Start 309; Stop 333
caacagcaacggttctatgaaagtc

SEQ ID NO: 82332 - DNA, 25 bp, Artificial
  probe
  misc_feature (1)..(25): SEQ ID NO: 7152; WAN024BJ4_at; Start 432; Stop 456
tggtgaatgggtgcgtctaactaat

SEQ ID NO: 82333 - DNA, 25 bp, Artificial
  probe
  misc_feature (1)..(25): SEQ ID NO: 7152; WAN024BJ4_at; Start 190; Stop 214
gctaaagcagttgctccaacaacag

SEQ ID NO: 82334 - DNA, 25 bp, Artificial
  probe
  misc_feature (1)..(25): SEQ ID NO: 7152; WAN024BJ4_at; Start 20; Stop 44
gaacaattgaagaaactacttctcg

SEQ ID NO: 82335 - DNA, 25 bp, Artificial
  probe
  misc_feature (1)..(25): SEQ ID NO: 7152; WAN024BJ4_at; Start 157; Stop 181
tctaaccaaggaacagatgtagcag

SEQ ID NO: 82336 - DNA, 25 bp, Artificial
  probe
  misc_feature (1)..(25): SEQ ID NO: 7152; WAN024BJ4_at; Start 377; Stop 401
catcgggtgagttagcggtcaatac

SEQ ID NO: 82337 - DNA, 25 bp, Artificial
  probe
  misc_feature (1)..(25): SEQ ID NO: 7152; WAN024BJ4_at; Start 40; Stop 64
tctcgtcaaattactaaagagatgg

SEQ ID NO: 82338 - DNA, 25 bp, Artificial
  probe
  misc_feature (1)..(25): SEQ ID NO: 7152; WAN024BJ4_at; Start 396; Stop 420
caatacaagtatagatggctataga

SEQ ID NO: 82339 - DNA, 25 bp, Artificial
  probe
  misc_feature (1)..(25): SEQ ID NO: 7152; WAN024BJ4_at; Start 262; Stop 286
tccatggcaacaggttgggtacaag

SEQ ID NO: 82340 - DNA, 25 bp, Artificial
  probe
  misc_feature (1)..(25): SEQ ID NO: 7152; WAN024BJ4_at; Start 60; Stop 84
gatggtaaaaagacgtataaggaga

SEQ ID NO: 82341 - DNA, 25 bp, Artificial
  probe
  misc_feature (1)..(25): SEQ ID NO: 7152; WAN024BJ4_at; Start 118; Stop 142
gagcaatcatctattccttcgtatc

SEQ ID NO: 82342 - DNA, 25 bp, Artificial
  probe
  misc_feature (1)..(25): SEQ ID NO: 7152; WAN024BJ4_at; Start 179; Stop 203
cagtagaaccagctaaagcagttgc

SEQ ID NO: 82343 - DNA, 25 bp, Artificial
  probe
  misc_feature (1)..(25): SEQ ID NO: 7152; WAN024BJ4_at; Start 223; Stop 247
caagaaaatggtatgtggtattttt

SEQ ID NO: 82344 - DNA, 25 bp, Artificial
  probe
  misc_feature (1)..(25): SEQ ID NO: 7152; WAN024BJ4_at; Start 167; Stop 191
gaacagatgtagcagtagaaccagc

SEQ ID NO: 82345 - DNA, 25 bp, Artificial
  probe
  misc_feature (1)..(25): SEQ ID NO: 7152; WAN024BJ4_at; Start 31; Stop 55
gaaactacttctcgtcaaattacta

SEQ ID NO: 82346 - DNA, 25 bp, Artificial
  probe
  misc_feature (1)..(25): SEQ ID NO: 7152; WAN024BJ4_at; Start 314; Stop 338
gcaacggttctatgaaagtcaatca

SEQ ID NO: 82347 - DNA, 25 bp, Artificial
  probe
  misc_feature (1)..(25): SEQ ID NO: 7152; WAN024BJ4_at; Start 89; Stop 113
cgagagaacctgaaaaagttgttgt

SEQ ID NO: 82348 - DNA, 25 bp, Artificial
  probe
  misc_feature (1)..(25): SEQ ID NO: 7152; WAN024BJ4_at; Start 392; Stop 416
cggtcaatacaagtatagatggcta

SEQ ID NO: 82349 - DNA, 25 bp, Artificial
  probe
  misc_feature (1)..(25): SEQ ID NO: 7152; WAN024BJ4_at; Start 11; Stop 35
aacgtgatggaacaattgaagaaac

SEQ ID NO: 82350 - DNA, 25 bp, Artificial
  probe
  misc_feature (1)..(25): SEQ ID NO: 7152; WAN024BJ4_at; Start 322; Stop 346
tctatgaaagtcaatcaatggttcc

SEQ ID NO: 82351 - DNA, 25 bp, Artificial
  probe
  misc_feature (1)..(25): SEQ ID NO: 7152; WAN024BJ4_at; Start 127; Stop 151
tctattccttcgtatcctgtatctg

SEQ ID NO: 82352 - DNA, 25 bp, Artificial
  probe
  misc_feature (1)..(25): SEQ ID NO: 7152; WAN024BJ4_at; Start 75; Stop 99
tataaggagagggacgagagaacct

SEQ ID NO: 82353 - DNA, 25 bp, Artificial
  probe
  misc_feature (1)..(25): SEQ ID NO: 7152; WAN024BJ4_at; Start 255; Stop 279
tgatggttccatggcaacaggttgg

SEQ ID NO: 82354 - DNA, 25 bp, Artificial
  probe
  misc_feature (1)..(25): SEQ ID NO: 7152; WAN024BJ4_at; Start 53; Stop 77
ctaaagagatggtaaaaagacgtat

SEQ ID NO: 82355 - DNA, 25 bp, Artificial
  probe
  misc_feature (1)..(25): SEQ ID NO: 7152; WAN024BJ4_at; Start 424; Stop 448
aatgataatggtgaatgggtgcgtc

SEQ ID NO: 82356 - DNA, 25 bp, Artificial
  probe
  misc_feature (1)..(25): SEQ ID NO: 6229; WAN024BJ5_at; Start 13; Stop 37
gctcattttgctctttttgaagcta

SEQ ID NO: 82357 - DNA, 25 bp, Artificial
  probe
  misc_feature (1)..(25): SEQ ID NO: 6229; WAN024BJ5_at; Start 38; Stop 62
tactcatcccaactcataacttttg

SEQ ID NO: 82358 - DNA, 25 bp, Artificial
  probe
  misc_feature (1)..(25): SEQ ID NO: 6229; WAN024BJ5_at; Start 94; Stop 118
ttccctcagttttcggatgacggtg

SEQ ID NO: 82359 - DNA, 25 bp, Artificial
  probe
  misc_feature (1)..(25): SEQ ID NO: 6229; WAN024BJ5_at; Start 22; Stop 46
gctctttttgaagctatactcatcc

SEQ ID NO: 82360 - DNA, 25 bp, Artificial
  probe
  misc_feature (1)..(25): SEQ ID NO: 6229; WAN024BJ5_at; Start 63; Stop 87
gcaacttggtccaatcggtttcaaa

SEQ ID NO: 82361 - DNA, 25 bp, Artificial
  probe
  misc_feature (1)..(25): SEQ ID NO: 6229; WAN024BJ5_at; Start 28; Stop 52
tttgaagctatactcatcccaactc

SEQ ID NO: 82362 - DNA, 25 bp, Artificial
  probe
  misc_feature (1)..(25): SEQ ID NO: 6229; WAN024BJ5_at; Start 90; Stop 114
taaattccctcagttttcggatgac

SEQ ID NO: 82363 - DNA, 25 bp, Artificial
  probe
  misc_feature (1)..(25): SEQ ID NO: 6229; WAN024BJ5_at; Start 99; Stop 123
tcagttttcggatgacggtggaagt

SEQ ID NO: 82364 - DNA, 25 bp, Artificial
  probe
  misc_feature (1)..(25): SEQ ID NO: 6229; WAN024BJ5_at; Start 88; Stop 112
cttaaattccctcagttttcggatg

SEQ ID NO: 82365 - DNA, 25 bp, Artificial
  probe
  misc_feature (1)..(25): SEQ ID NO: 6229; WAN024BJ5_at; Start 97; Stop 121
cctcagttttcggatgacggtggaa

SEQ ID NO: 82366 - DNA, 25 bp, Artificial
  probe
  misc_feature (1)..(25): SEQ ID NO: 6229; WAN024BJ5_at; Start 31; Stop 55
gaagctatactcatcccaactcata

SEQ ID NO: 82367 - DNA, 25 bp, Artificial
  probe
  misc_feature (1)..(25): SEQ ID NO: 6229; WAN024BJ5_at; Start 33; Stop 57
agctatactcatcccaactcataac

SEQ ID NO: 82368 - DNA, 25 bp, Artificial
  probe
  misc_feature (1)..(25): SEQ ID NO: 6229; WAN024BJ5_at; Start 60; Stop 84
ttggcaacttggtccaatcggtttc

SEQ ID NO: 82369 - DNA, 25 bp, Artificial
  probe
  misc_feature (1)..(25): SEQ ID NO: 6229; WAN024BJ5_at; Start 55; Stop 79
aacttttggcaacttggtccaatcg

SEQ ID NO: 82370 - DNA, 25 bp, Artificial
  probe
  misc_feature (1)..(25): SEQ ID NO: 6229; WAN024BJ5_at; Start 41; Stop 65
tcatcccaactcataacttttggca

SEQ ID NO: 82371 - DNA, 25 bp, Artificial
  probe
  misc_feature (1)..(25): SEQ ID NO: 6229; WAN024BJ5_at; Start 62; Stop 86
ggcaacttggtccaatcggtttcaa

SEQ ID NO: 82372 - DNA, 25 bp, Artificial
  probe
  misc_feature (1)..(25): SEQ ID NO: 6229; WAN024BJ5_at; Start 10; Stop 34
gaagctcattttgctctttttgaag

SEQ ID NO: 82373 - DNA, 25 bp, Artificial
  probe
  misc_feature (1)..(25): SEQ ID NO: 6229; WAN024BJ5_at; Start 24; Stop 48
tctttttgaagctatactcatccca

SEQ ID NO: 82374 - DNA, 25 bp, Artificial
  probe
  misc_feature (1)..(25): SEQ ID NO: 6229; WAN024BJ5_at; Start 47; Stop 71
caactcataacttttggcaacttgg

SEQ ID NO: 82375 - DNA, 25 bp, Artificial
  probe
  misc_feature (1)..(25): SEQ ID NO: 6229; WAN024BJ5_at; Start 95; Stop 119
tccctcagttttcggatgacggtgg

SEQ ID NO: 82376 - DNA, 25 bp, Artificial
  probe
  misc_feature (1)..(25): SEQ ID NO: 6229; WAN024BJ5_at; Start 4; Stop 28
ggcaatgaagctcattttgctcttt

SEQ ID NO: 82377 - DNA, 25 bp, Artificial
  probe
  misc_feature (1)..(25): SEQ ID NO: 6229; WAN024BJ5_at; Start 16; Stop 40
cattttgctctttttgaagctatac

SEQ ID NO: 82378 - DNA, 25 bp, Artificial
  probe
  misc_feature (1)..(25): SEQ ID NO: 6229; WAN024BJ5_at; Start 98; Stop 122
ctcagttttcggatgacggtggaag

SEQ ID NO: 82379 - DNA, 25 bp, Artificial
  probe
  misc_feature (1)..(25): SEQ ID NO: 6229; WAN024BJ5_at; Start 48; Stop 72
aactcataacttttggcaacttggt

SEQ ID NO: 82380 - DNA, 25 bp, Artificial
  probe
  misc_feature (1)..(25): SEQ ID NO: 6229; WAN024BJ5_at; Start 92; Stop 116
aattccctcagttttcggatgacgg

SEQ ID NO: 82381 - DNA, 25 bp, Artificial
  probe
  misc_feature (1)..(25): SEQ ID NO: 6229; WAN024BJ5_at; Start 2; Stop 26
tgggcaatgaagctcattttgctct

SEQ ID NO: 82382 - DNA, 25 bp, Artificial
  probe
  misc_feature (1)..(25): SEQ ID NO: 6229; WAN024BJ5_at; Start 1; Stop 25
ttgggcaatgaagctcattttgctc

SEQ ID NO: 82383 - DNA, 25 bp, Artificial
  probe
  misc_feature (1)..(25): SEQ ID NO: 6229; WAN024BJ5_at; Start 52; Stop 76
cataacttttggcaacttggtccaa

SEQ ID NO: 82384 - DNA, 25 bp, Artificial
  probe
  misc_feature (1)..(25): SEQ ID NO: 6229; WAN024BJ5_at; Start 26; Stop 50
tttttgaagctatactcatcccaac

SEQ ID NO: 82385 - DNA, 25 bp, Artificial
  probe
  misc_feature (1)..(25): SEQ ID NO: 6229; WAN024BJ5_at; Start 91; Stop 115
aaattccctcagttttcggatgacg

SEQ ID NO: 82386 - DNA, 25 bp, Artificial
  probe
  misc_feature (1)..(25): SEQ ID NO: 6229; WAN024BJ5_at; Start 50; Stop 74
ctcataacttttggcaacttggtcc

SEQ ID NO: 82387 - DNA, 25 bp, Artificial
  probe
  misc_feature (1)..(25): SEQ ID NO: 6229; WAN024BJ5_at; Start 56; Stop 80
acttttggcaacttggtccaatcgg

SEQ ID NO: 82388 - DNA, 25 bp, Artificial
  probe
  misc_feature (1)..(25): SEQ ID NO: 6229; WAN024BJ5_at; Start 54; Stop 78
taacttttggcaacttggtccaatc

SEQ ID NO: 82389 - DNA, 25 bp, Artificial
  probe
  misc_feature (1)..(25): SEQ ID NO: 6229; WAN024BJ5_at; Start 57; Stop 81
cttttggcaacttggtccaatcggt

SEQ ID NO: 82390 - DNA, 25 bp, Artificial
  probe
  misc_feature (1)..(25): SEQ ID NO: 6224; WAN024BJ6_at; Start 69; Stop 93
tcttgtaaaatttagaactatcaat

SEQ ID NO: 82391 - DNA, 25 bp, Artificial
  probe
  misc_feature (1)..(25): SEQ ID NO: 6224; WAN024BJ6_at; Start 1; Stop 25
ttgatttggcaaggtgtcagaaata

SEQ ID NO: 82392 - DNA, 25 bp, Artificial
  probe
  misc_feature (1)..(25): SEQ ID NO: 6224; WAN024BJ6_at; Start 11; Stop 35
aaggtgtcagaaataaaggttgtgt

SEQ ID NO: 82393 - DNA, 25 bp, Artificial
  probe
  misc_feature (1)..(25): SEQ ID NO: 6224; WAN024BJ6_at; Start 5; Stop 29
tttggcaaggtgtcagaaataaagg

SEQ ID NO: 82394 - DNA, 25 bp, Artificial
  probe
  misc_feature (1)..(25): SEQ ID NO: 6224; WAN024BJ6_at; Start 20; Stop 44
gaaataaaggttgtgtatttggaga

SEQ ID NO: 82395 - DNA, 25 bp, Artificial
  probe
  misc_feature (1)..(25): SEQ ID NO: 6224; WAN024BJ6_at; Start 65; Stop 89
ccagtcttgtaaaatttagaactat

SEQ ID NO: 82396 - DNA, 25 bp, Artificial
  probe
  misc_feature (1)..(25): SEQ ID NO: 6224; WAN024BJ6_at; Start 64; Stop 88
tccagtcttgtaaaatttagaacta

SEQ ID NO: 82397 - DNA, 25 bp, Artificial
  probe
  misc_feature (1)..(25): SEQ ID NO: 6224; WAN024BJ6_at; Start 2; Stop 26
tgatttggcaaggtgtcagaaataa

SEQ ID NO: 82398 - DNA, 25 bp, Artificial
  probe
  misc_feature (1)..(25): SEQ ID NO: 6224; WAN024BJ6_at; Start 21; Stop 45
aaataaaggttgtgtatttggagag

SEQ ID NO: 82399 - DNA, 25 bp, Artificial
  probe
  misc_feature (1)..(25): SEQ ID NO: 6224; WAN024BJ6_at; Start 8; Stop 32
ggcaaggtgtcagaaataaaggttg

SEQ ID NO: 82400 - DNA, 25 bp, Artificial
  probe
  misc_feature (1)..(25): SEQ ID NO: 6224; WAN024BJ6_at; Start 4; Stop 28
atttggcaaggtgtcagaaataaag

SEQ ID NO: 82401 - DNA, 25 bp, Artificial
  probe
  misc_feature (1)..(25): SEQ ID NO: 6224; WAN024BJ6_at; Start 14; Stop 38
gtgtcagaaataaaggttgtgtatt

SEQ ID NO: 82402 - DNA, 25 bp, Artificial
  probe
  misc_feature (1)..(25): SEQ ID NO: 6224; WAN024BJ6_at; Start 16; Stop 40
gtcagaaataaaggttgtgtatttg

SEQ ID NO: 82403 - DNA, 25 bp, Artificial
  probe
  misc_feature (1)..(25): SEQ ID NO: 6224; WAN024BJ6_at; Start 6; Stop 30
ttggcaaggtgtcagaaataaaggt

SEQ ID NO: 82404 - DNA, 25 bp, Artificial
  probe
  misc_feature (1)..(25): SEQ ID NO: 6224; WAN024BJ6_at; Start 26; Stop 50
aaggttgtgtatttggagaggggat

SEQ ID NO: 82405 - DNA, 25 bp, Artificial
  probe
  misc_feature (1)..(25): SEQ ID NO: 6224; WAN024BJ6_at; Start 31; Stop 55
tgtgtatttggagaggggattaatt

SEQ ID NO: 82406 - DNA, 25 bp, Artificial
  probe
  misc_feature (1)..(25): SEQ ID NO: 6224; WAN024BJ6_at; Start 71; Stop 95
ttgtaaaatttagaactatcaatca

SEQ ID NO: 82407 - DNA, 25 bp, Artificial
  probe
  misc_feature (1)..(25): SEQ ID NO: 6224; WAN024BJ6_at; Start 66; Stop 90
cagtcttgtaaaatttagaactatc

SEQ ID NO: 82408 - DNA, 25 bp, Artificial
  probe
  misc_feature (1)..(25): SEQ ID NO: 6224; WAN024BJ6_at; Start 9; Stop 33
gcaaggtgtcagaaataaaggttgt

SEQ ID NO: 82409 - DNA, 25 bp, Artificial
  probe
  misc_feature (1)..(25): SEQ ID NO: 6224; WAN024BJ6_at; Start 3; Stop 27
gatttggcaaggtgtcagaaataaa

SEQ ID NO: 82410 - DNA, 25 bp, Artificial
  probe
  misc_feature (1)..(25): SEQ ID NO: 6224; WAN024BJ6_at; Start 13; Stop 37
ggtgtcagaaataaaggttgtgtat

SEQ ID NO: 82411 - DNA, 25 bp, Artificial
  probe
  misc_feature (1)..(25): SEQ ID NO: 6224; WAN024BJ6_at; Start 19; Stop 43
agaaataaaggttgtgtatttggag

SEQ ID NO: 82412 - DNA, 25 bp, Artificial
  probe
  misc_feature (1)..(25): SEQ ID NO: 6224; WAN024BJ6_at; Start 68; Stop 92
gtcttgtaaaatttagaactatcaa

SEQ ID NO: 82413 - DNA, 25 bp, Artificial
  probe
  misc_feature (1)..(25): SEQ ID NO: 6224; WAN024BJ6_at; Start 22; Stop 46
aataaaggttgtgtatttggagagg

SEQ ID NO: 82414 - DNA, 25 bp, Artificial
  probe
  misc_feature (1)..(25): SEQ ID NO: 6224; WAN024BJ6_at; Start 72; Stop 96
tgtaaaatttagaactatcaatcag

SEQ ID NO: 82415 - DNA, 25 bp, Artificial
  probe
  misc_feature (1)..(25): SEQ ID NO: 6224; WAN024BJ6_at; Start 10; Stop 34
caaggtgtcagaaataaaggttgtg

SEQ ID NO: 82416 - DNA, 25 bp, Artificial
  probe
  misc_feature (1)..(25): SEQ ID NO: 6224; WAN024BJ6_at; Start 17; Stop 41
tcagaaataaaggttgtgtatttgg

SEQ ID NO: 82417 - DNA, 25 bp, Artificial
  probe
  misc_feature (1)..(25): SEQ ID NO: 6224; WAN024BJ6_at; Start 15; Stop 39
tgtcagaaataaaggttgtgtattt

SEQ ID NO: 82418 - DNA, 25 bp, Artificial
  probe
  misc_feature (1)..(25): SEQ ID NO: 6224; WAN024BJ6_at; Start 63; Stop 87
atccagtcttgtaaaatttagaact

SEQ ID NO: 82419 - DNA, 25 bp, Artificial
  probe
  misc_feature (1)..(25): SEQ ID NO: 6224; WAN024BJ6_at; Start 23; Stop 47
ataaaggttgtgtatttggagaggg

SEQ ID NO: 82420 - DNA, 25 bp, Artificial
  probe
  misc_feature (1)..(25): SEQ ID NO: 6224; WAN024BJ6_at; Start 67; Stop 91
agtcttgtaaaatttagaactatca

SEQ ID NO: 82421 - DNA, 25 bp, Artificial
  probe
  misc_feature (1)..(25): SEQ ID NO: 6224; WAN024BJ6_at; Start 7; Stop 31
tggcaaggtgtcagaaataaaggtt

SEQ ID NO: 82422 - DNA, 25 bp, Artificial
  probe
  misc_feature (1)..(25): SEQ ID NO: 6224; WAN024BJ6_at; Start 70; Stop 94
cttgtaaaatttagaactatcaatc

SEQ ID NO: 82423 - DNA, 25 bp, Artificial
  probe
  misc_feature (1)..(25): SEQ ID NO: 6224; WAN024BJ6_at; Start 18; Stop 42
cagaaataaaggttgtgtatttgga

SEQ ID NO: 82424 - DNA, 25 bp, Artificial
  probe
  misc_feature (1)..(25): SEQ ID NO: 6147; WAN024BJ7_at; Start 54; Stop 78
tcttggtgttcacaaggatatccag

SEQ ID NO: 82425 - DNA, 25 bp, Artificial
  probe
  misc_feature (1)..(25): SEQ ID NO: 6147; WAN024BJ7_at; Start 8; Stop 32
tttctcttctagctcagggtaaaga

SEQ ID NO: 82426 - DNA, 25 bp, Artificial
  probe
  misc_feature (1)..(25): SEQ ID NO: 6147; WAN024BJ7_at; Start 15; Stop 39
tctagctcagggtaaagagatggga

SEQ ID NO: 82427 - DNA, 25 bp, Artificial
  probe
  misc_feature (1)..(25): SEQ ID NO: 6147; WAN024BJ7_at; Start 96; Stop 120
gcttttggtgacctttgcacttcga

SEQ ID NO: 82428 - DNA, 25 bp, Artificial
  probe
  misc_feature (1)..(25): SEQ ID NO: 6147; WAN024BJ7_at; Start 132; Stop 156
tattgactgttggttaccaataaaa

SEQ ID NO: 82429 - DNA, 25 bp, Artificial
  probe
  misc_feature (1)..(25): SEQ ID NO: 6147; WAN024BJ7_at; Start 260; Stop 284
tgtattttagtagacttcctgcgaa

SEQ ID NO: 82430 - DNA, 25 bp, Artificial
  probe
  misc_feature (1)..(25): SEQ ID NO: 6147; WAN024BJ7_at; Start 76; Stop 100
cagaaaaagaggataggttcgcttt

SEQ ID NO: 82431 - DNA, 25 bp, Artificial
  probe
  misc_feature (1)..(25): SEQ ID NO: 6147; WAN024BJ7_at; Start 5; Stop 29
cattttctcttctagctcagggtaa

SEQ ID NO: 82432 - DNA, 25 bp, Artificial
  probe
  misc_feature (1)..(25): SEQ ID NO: 6147; WAN024BJ7_at; Start 101; Stop 125
tggtgacctttgcacttcgattatc

SEQ ID NO: 82433 - DNA, 25 bp, Artificial
  probe
  misc_feature (1)..(25): SEQ ID NO: 6147; WAN024BJ7_at; Start 24; Stop 48
gggtaaagagatgggaattagcata

SEQ ID NO: 82434 - DNA, 25 bp, Artificial
  probe
  misc_feature (1)..(25): SEQ ID NO: 6147; WAN024BJ7_at; Start 213; Stop 237
tattgttcctagagatatggtgatt

SEQ ID NO: 82435 - DNA, 25 bp, Artificial
  probe
  misc_feature (1)..(25): SEQ ID NO: 6147; WAN024BJ7_at; Start 171; Stop 195
tgctttagaggatgctgtggaattc

SEQ ID NO: 82436 - DNA, 25 bp, Artificial
  probe
  misc_feature (1)..(25): SEQ ID NO: 6147; WAN024BJ7_at; Start 105; Stop 129
gacctttgcacttcgattatcttta

SEQ ID NO: 82437 - DNA, 25 bp, Artificial
  probe
  misc_feature (1)..(25): SEQ ID NO: 6147; WAN024BJ7_at; Start 91; Stop 115
ggttcgcttttggtgacctttgcac

SEQ ID NO: 82438 - DNA, 25 bp, Artificial
  probe
  misc_feature (1)..(25): SEQ ID NO: 6147; WAN024BJ7_at; Start 230; Stop 254
tggtgattaataatagcaaaccggt

SEQ ID NO: 82439 - DNA, 25 bp, Artificial
  probe
  misc_feature (1)..(25): SEQ ID NO: 6147; WAN024BJ7_at; Start 162; Stop 186
tagagttcatgctttagaggatgct

SEQ ID NO: 82440 - DNA, 25 bp, Artificial
  probe
  misc_feature (1)..(25): SEQ ID NO: 6147; WAN024BJ7_at; Start 178; Stop 202
gaggatgctgtggaattctatgaaa

SEQ ID NO: 82441 - DNA, 25 bp, Artificial
  probe
  misc_feature (1)..(25): SEQ ID NO: 6147; WAN024BJ7_at; Start 120; Stop 144
attatctttaactattgactgttgg

SEQ ID NO: 82442 - DNA, 25 bp, Artificial
  probe
  misc_feature (1)..(25): SEQ ID NO: 6147; WAN024BJ7_at; Start 156; Stop 180
aggtgttagagttcatgctttagag

SEQ ID NO: 82443 - DNA, 25 bp, Artificial
  probe
  misc_feature (1)..(25): SEQ ID NO: 6147; WAN024BJ7_at; Start 63; Stop 87
tcacaaggatatccagaaaaagagg

SEQ ID NO: 82444 - DNA, 25 bp, Artificial
  probe
  misc_feature (1)..(25): SEQ ID NO: 6147; WAN024BJ7_at; Start 2; Stop 26
tgtcattttctcttctagctcaggg

SEQ ID NO: 82445 - DNA, 25 bp, Artificial
  probe
  misc_feature (1)..(25): SEQ ID NO: 6147; WAN024BJ7_at; Start 74; Stop 98
tccagaaaaagaggataggttcgct

SEQ ID NO: 82446 - DNA, 25 bp, Artificial
  probe
  misc_feature (1)..(25): SEQ ID NO: 6147; WAN024BJ7_at; Start 168; Stop 192
tcatgctttagaggatgctgtggaa

SEQ ID NO: 82447 - DNA, 25 bp, Artificial
  probe
  misc_feature (1)..(25): SEQ ID NO: 6147; WAN024BJ7_at; Start 128; Stop 152
taactattgactgttggttaccaat

SEQ ID NO: 82448 - DNA, 25 bp, Artificial
  probe
  misc_feature (1)..(25): SEQ ID NO: 6147; WAN024BJ7_at; Start 12; Stop 36
tcttctagctcagggtaaagagatg

SEQ ID NO: 82449 - DNA, 25 bp, Artificial
  probe
  misc_feature (1)..(25): SEQ ID NO: 6147; WAN024BJ7_at; Start 57; Stop 81
tggtgttcacaaggatatccagaaa

SEQ ID NO: 82450 - DNA, 25 bp, Artificial
  probe
  misc_feature (1)..(25): SEQ ID NO: 6147; WAN024BJ7_at; Start 47; Stop 71
tagattatcttggtgttcacaagga

SEQ ID NO: 82451 - DNA, 25 bp, Artificial
  probe
  misc_feature (1)..(25): SEQ ID NO: 6147; WAN024BJ7_at; Start 216; Stop 240
tgttcctagagatatggtgattaat

SEQ ID NO: 82452 - DNA, 25 bp, Artificial
  probe
  misc_feature (1)..(25): SEQ ID NO: 6147; WAN024BJ7_at; Start 208; Stop 232
ggttttattgttcctagagatatgg

SEQ ID NO: 82453 - DNA, 25 bp, Artificial
  probe
  misc_feature (1)..(25): SEQ ID NO: 6147; WAN024BJ7_at; Start 146; Stop 170
taccaataaaaggtgttagagttca

SEQ ID NO: 82454 - DNA, 25 bp, Artificial
  probe
  misc_feature (1)..(25): SEQ ID NO: 6147; WAN024BJ7_at; Start 149; Stop 173
caataaaaggtgttagagttcatgc

SEQ ID NO: 82455 - DNA, 25 bp, Artificial
  probe
  misc_feature (1)..(25): SEQ ID NO: 6147; WAN024BJ7_at; Start 258; Stop 282
tatgtattttagtagacttcctgcg

SEQ ID NO: 82456 - DNA, 25 bp, Artificial
  probe
  misc_feature (1)..(25): SEQ ID NO: 6147; WAN024BJ7_at; Start 21; Stop 45
tcagggtaaagagatgggaattagc

SEQ ID NO: 82457 - DNA, 25 bp, Artificial
  probe
  misc_feature (1)..(25): SEQ ID NO: 6147; WAN024BJ7_at; Start 180; Stop 204
ggatgctgtggaattctatgaaaaa

SEQ ID NO: 82458 - DNA, 25 bp, Artificial
  probe
  misc_feature (1)..(25): SEQ ID NO: 6145; WAN024BJ8_at; Start 55; Stop 79
aaaaagaaatgccgcgctatggaaa

SEQ ID NO: 82459 - DNA, 25 bp, Artificial
  probe
  misc_feature (1)..(25): SEQ ID NO: 6145; WAN024BJ8_at; Start 56; Stop 80
aaaagaaatgccgcgctatggaaaa

SEQ ID NO: 82460 - DNA, 25 bp, Artificial
  probe
  misc_feature (1)..(25): SEQ ID NO: 6145; WAN024BJ8_at; Start 52; Stop 76
ggtaaaaagaaatgccgcgctatgg

SEQ ID NO: 82461 - DNA, 25 bp, Artificial
  probe
  misc_feature (1)..(25): SEQ ID NO: 6145; WAN024BJ8_at; Start 51; Stop 75
tggtaaaaagaaatgccgcgctatg

SEQ ID NO: 82462 - DNA, 25 bp, Artificial
  probe
  misc_feature (1)..(25): SEQ ID NO: 6145; WAN024BJ8_at; Start 54; Stop 78
taaaaagaaatgccgcgctatggaa

SEQ ID NO: 82463 - DNA, 25 bp, Artificial
  probe
  misc_feature (1)..(25): SEQ ID NO: 6145; WAN024BJ8_at; Start 53; Stop 77
gtaaaaagaaatgccgcgctatgga

SEQ ID NO: 82464 - DNA, 25 bp, Artificial
  probe
  misc_feature (1)..(25): SEQ ID NO: 6145; WAN024BJ8_at; Start 50; Stop 74
ctggtaaaaagaaatgccgcgctat

SEQ ID NO: 82465 - DNA, 25 bp, Artificial
  probe
  misc_feature (1)..(25): SEQ ID NO: 6145; WAN024BJ8_at; Start 57; Stop 81
aaagaaatgccgcgctatggaaaaa

SEQ ID NO: 82466 - DNA, 25 bp, Artificial
  probe
  misc_feature (1)..(25): SEQ ID NO: 6047; WAN024BJ9_at; Start 123; Stop 147
tcccatagcaaacaacatactatca

SEQ ID NO: 82467 - DNA, 25 bp, Artificial
  probe
  misc_feature (1)..(25): SEQ ID NO: 6047; WAN024BJ9_at; Start 135; Stop 159
caacatactatcactgttgatagca

SEQ ID NO: 82468 - DNA, 25 bp, Artificial
  probe
  misc_feature (1)..(25): SEQ ID NO: 6047; WAN024BJ9_at; Start 55; Stop 79
aagggctctgccatatttttagttt

SEQ ID NO: 82469 - DNA, 25 bp, Artificial
  probe
  misc_feature (1)..(25): SEQ ID NO: 6047; WAN024BJ9_at; Start 261; Stop 285
gacgattatttttggcctaccatat

SEQ ID NO: 82470 - DNA, 25 bp, Artificial
  probe
  misc_feature (1)..(25): SEQ ID NO: 6047; WAN024BJ9_at; Start 66; Stop 90
catatttttagttttagtgggacat

SEQ ID NO: 82471 - DNA, 25 bp, Artificial
  probe
  misc_feature (1)..(25): SEQ ID NO: 6047; WAN024BJ9_at; Start 74; Stop 98
tagttttagtgggacatgtattact

SEQ ID NO: 82472 - DNA, 25 bp, Artificial
  probe
  misc_feature (1)..(25): SEQ ID NO: 6047; WAN024BJ9_at; Start 258; Stop 282
gaagacgattatttttggcctacca

SEQ ID NO: 82473 - DNA, 25 bp, Artificial
  probe
  misc_feature (1)..(25): SEQ ID NO: 6047; WAN024BJ9_at; Start 145; Stop 169
tcactgttgatagcacaaatctaca

SEQ ID NO: 82474 - DNA, 25 bp, Artificial
  probe
  misc_feature (1)..(25): SEQ ID NO: 6047; WAN024BJ9_at; Start 19; Stop 43
caaaagtctggtcgaatcgaatgga

SEQ ID NO: 82475 - DNA, 25 bp, Artificial
  probe
  misc_feature (1)..(25): SEQ ID NO: 6047; WAN024BJ9_at; Start 7; Stop 31
gcttatagtaaacaaaagtctggtc

SEQ ID NO: 82476 - DNA, 25 bp, Artificial
  probe
  misc_feature (1)..(25): SEQ ID NO: 6047; WAN024BJ9_at; Start 52; Stop 76
ggaaagggctctgccatatttttag

SEQ ID NO: 82477 - DNA, 25 bp, Artificial
  probe
  misc_feature (1)..(25): SEQ ID NO: 6047; WAN024BJ9_at; Start 12; Stop 36
tagtaaacaaaagtctggtcgaatc

SEQ ID NO: 82478 - DNA, 25 bp, Artificial
  probe
  misc_feature (1)..(25): SEQ ID NO: 6047; WAN024BJ9_at; Start 2; Stop 26
tgaatgcttatagtaaacaaaagtc

SEQ ID NO: 82479 - DNA, 25 bp, Artificial
  probe
  misc_feature (1)..(25): SEQ ID NO: 6047; WAN024BJ9_at; Start 247; Stop 271
tatgctaagaagaagacgattattt

SEQ ID NO: 82480 - DNA, 25 bp, Artificial
  probe
  misc_feature (1)..(25): SEQ ID NO: 6047; WAN024BJ9_at; Start 93; Stop 117
attacttggtctgtatcaatcggaa

SEQ ID NO: 82481 - DNA, 25 bp, Artificial
  probe
  misc_feature (1)..(25): SEQ ID NO: 6047; WAN024BJ9_at; Start 146; Stop 170
cactgttgatagcacaaatctacat

SEQ ID NO: 82482 - DNA, 25 bp, Artificial
  probe
  misc_feature (1)..(25): SEQ ID NO: 6047; WAN024BJ9_at; Start 25; Stop 49
tctggtcgaatcgaatggatagatt

SEQ ID NO: 82483 - DNA, 25 bp, Artificial
  probe
  misc_feature (1)..(25): SEQ ID NO: 6047; WAN024BJ9_at; Start 273; Stop 297
tggcctaccatatattttttattcg

SEQ ID NO: 82484 - DNA, 25 bp, Artificial
  probe
  misc_feature (1)..(25): SEQ ID NO: 6047; WAN024BJ9_at; Start 79; Stop 103
ttagtgggacatgtattacttggtc

SEQ ID NO: 82485 - DNA, 25 bp, Artificial
  probe
  misc_feature (1)..(25): SEQ ID NO: 6047; WAN024BJ9_at; Start 289; Stop 313
ttttattcgatcattcatttttgtc

SEQ ID NO: 82486 - DNA, 25 bp, Artificial
  probe
  misc_feature (1)..(25): SEQ ID NO: 6047; WAN024BJ9_at; Start 92; Stop 116
tattacttggtctgtatcaatcgga

SEQ ID NO: 82487 - DNA, 25 bp, Artificial
  probe
  misc_feature (1)..(25): SEQ ID NO: 6047; WAN024BJ9_at; Start 58; Stop 82
ggctctgccatatttttagttttag

SEQ ID NO: 82488 - DNA, 25 bp, Artificial
  probe
  misc_feature (1)..(25): SEQ ID NO: 6047; WAN024BJ9_at; Start 17; Stop 41
aacaaaagtctggtcgaatcgaatg

SEQ ID NO: 82489 - DNA, 25 bp, Artificial
  probe
  misc_feature (1)..(25): SEQ ID NO: 6047; WAN024BJ9_at; Start 9; Stop 33
ttatagtaaacaaaagtctggtcga

SEQ ID NO: 82490 - DNA, 25 bp, Artificial
  probe
  misc_feature (1)..(25): SEQ ID NO: 6047; WAN024BJ9_at; Start 43; Stop 67
atagattttggaaagggctctgcca

SEQ ID NO: 82491 - DNA, 25 bp, Artificial
  probe
  misc_feature (1)..(25): SEQ ID NO: 6047; WAN024BJ9_at; Start 244; Stop 268
caatatgctaagaagaagacgatta

SEQ ID NO: 82492 - DNA, 25 bp, Artificial
  probe
  misc_feature (1)..(25): SEQ ID NO: 6047; WAN024BJ9_at; Start 86; Stop 110
gacatgtattacttggtctgtatca

SEQ ID NO: 82493 - DNA, 25 bp, Artificial
  probe
  misc_feature (1)..(25): SEQ ID NO: 6047; WAN024BJ9_at; Start 15; Stop 39
taaacaaaagtctggtcgaatcgaa

SEQ ID NO: 82494 - DNA, 25 bp, Artificial
  probe
  misc_feature (1)..(25): SEQ ID NO: 6047; WAN024BJ9_at; Start 45; Stop 69
agattttggaaagggctctgccata

SEQ ID NO: 82495 - DNA, 25 bp, Artificial
  probe
  misc_feature (1)..(25): SEQ ID NO: 6047; WAN024BJ9_at; Start 22; Stop 46
aagtctggtcgaatcgaatggatag

SEQ ID NO: 82496 - DNA, 25 bp, Artificial
  probe
  misc_feature (1)..(25): SEQ ID NO: 6047; WAN024BJ9_at; Start 128; Stop 152
tagcaaacaacatactatcactgtt

SEQ ID NO: 82497 - DNA, 25 bp, Artificial
  probe
  misc_feature (1)..(25): SEQ ID NO: 6047; WAN024BJ9_at; Start 83; Stop 107
tgggacatgtattacttggtctgta

SEQ ID NO: 82498 - DNA, 25 bp, Artificial
  probe
  misc_feature (1)..(25): SEQ ID NO: 6047; WAN024BJ9_at; Start 255; Stop 279
gaagaagacgattatttttggccta

SEQ ID NO: 82499 - DNA, 25 bp, Artificial
  probe
  misc_feature (1)..(25): SEQ ID NO: 6047; WAN024BJ9_at; Start 30; Stop 54
tcgaatcgaatggatagattttgga

SEQ ID NO: 82500 - DNA, 25 bp, Artificial
  probe
  misc_feature (1)..(25): SEQ ID NO: 6046; WAN024BJA_at; Start 39; Stop 63
agaaaacaggagagctaaaccacca

SEQ ID NO: 82501 - DNA, 25 bp, Artificial
  probe
  misc_feature (1)..(25): SEQ ID NO: 6046; WAN024BJA_at; Start 37; Stop 61
agagaaaacaggagagctaaaccac

SEQ ID NO: 82502 - DNA, 25 bp, Artificial
  probe
  misc_feature (1)..(25): SEQ ID NO: 6046; WAN024BJA_at; Start 45; Stop 69
caggagagctaaaccaccaagtaaa

SEQ ID NO: 82503 - DNA, 25 bp, Artificial
  probe
  misc_feature (1)..(25): SEQ ID NO: 6046; WAN024BJA_at; Start 1; Stop 25
atgaatgatttgggtttatggctgg

SEQ ID NO: 82504 - DNA, 25 bp, Artificial
  probe
  misc_feature (1)..(25): SEQ ID NO: 6046; WAN024BJA_at; Start 38; Stop 62
gagaaaacaggagagctaaaccacc

SEQ ID NO: 82505 - DNA, 25 bp, Artificial
  probe
  misc_feature (1)..(25): SEQ ID NO: 6046; WAN024BJA_at; Start 2; Stop 26
tgaatgatttgggtttatggctggt

SEQ ID NO: 82506 - DNA, 25 bp, Artificial
  probe
  misc_feature (1)..(25): SEQ ID NO: 6046; WAN024BJA_at; Start 36; Stop 60
aagagaaaacaggagagctaaacca

SEQ ID NO: 82507 - DNA, 25 bp, Artificial
  probe
  misc_feature (1)..(25): SEQ ID NO: 6046; WAN024BJA_at; Start 40; Stop 64
gaaaacaggagagctaaaccaccaa

SEQ ID NO: 82508 - DNA, 25 bp, Artificial
  probe
  misc_feature (1)..(25): SEQ ID NO: 6046; WAN024BJA_at; Start 5; Stop 29
atgatttgggtttatggctggttaa

SEQ ID NO: 82509 - DNA, 25 bp, Artificial
  probe
  misc_feature (1)..(25): SEQ ID NO: 6046; WAN024BJA_at; Start 3; Stop 27
gaatgatttgggtttatggctggtt

SEQ ID NO: 82510 - DNA, 25 bp, Artificial
  probe
  misc_feature (1)..(25): SEQ ID NO: 6046; WAN024BJA_at; Start 44; Stop 68
acaggagagctaaaccaccaagtaa

SEQ ID NO: 82511 - DNA, 25 bp, Artificial
  probe
  misc_feature (1)..(25): SEQ ID NO: 6046; WAN024BJA_at; Start 4; Stop 28
aatgatttgggtttatggctggtta

SEQ ID NO: 82512 - DNA, 25 bp, Artificial
  probe
  misc_feature (1)..(25): SEQ ID NO: 6057; WAN024BJC_s_at; Start 36; Stop 60
agagtttcctcgtttggaagacatt

SEQ ID NO: 82513 - DNA, 25 bp, Artificial
  probe
  misc_feature (1)..(25): SEQ ID NO: 6057; WAN024BJC_s_at; Start 47; Stop 71
gtttggaagacattctagaagatag

SEQ ID NO: 82514 - DNA, 25 bp, Artificial
  probe
  misc_feature (1)..(25): SEQ ID NO: 6057; WAN024BJC_s_at; Start 35; Stop 59
gagagtttcctcgtttggaagacat

SEQ ID NO: 82515 - DNA, 25 bp, Artificial
  probe
  misc_feature (1)..(25): SEQ ID NO: 6057; WAN024BJC_s_at; Start 32; Stop 56
tacgagagtttcctcgtttggaaga

SEQ ID NO: 82516 - DNA, 25 bp, Artificial
  probe
  misc_feature (1)..(25): SEQ ID NO: 6057; WAN024BJC_s_at; Start 39; Stop 63
gtttcctcgtttggaagacattcta

SEQ ID NO: 82517 - DNA, 25 bp, Artificial
  probe
  misc_feature (1)..(25): SEQ ID NO: 6057; WAN024BJC_s_at; Start 40; Stop 64
tttcctcgtttggaagacattctag

SEQ ID NO: 82518 - DNA, 25 bp, Artificial
  probe
  misc_feature (1)..(25): SEQ ID NO: 6057; WAN024BJC_s_at; Start 41; Stop 65
ttcctcgtttggaagacattctaga

SEQ ID NO: 82519 - DNA, 25 bp, Artificial
  probe
  misc_feature (1)..(25): SEQ ID NO: 6057; WAN024BJC_s_at; Start 23; Stop 47
ctctttgtttacgagagtttcctcg

SEQ ID NO: 82520 - DNA, 25 bp, Artificial
  probe
  misc_feature (1)..(25): SEQ ID NO: 6057; WAN024BJC_s_at; Start 45; Stop 69
tcgtttggaagacattctagaagat

SEQ ID NO: 82521 - DNA, 25 bp, Artificial
  probe
  misc_feature (1)..(25): SEQ ID NO: 6057; WAN024BJC_s_at; Start 43; Stop 67
cctcgtttggaagacattctagaag

SEQ ID NO: 82522 - DNA, 25 bp, Artificial
  probe
  misc_feature (1)..(25): SEQ ID NO: 6057; WAN024BJC_s_at; Start 46; Stop 70
cgtttggaagacattctagaagata

SEQ ID NO: 82523 - DNA, 25 bp, Artificial
  probe
  misc_feature (1)..(25): SEQ ID NO: 6057; WAN024BJC_s_at; Start 34; Stop 58
cgagagtttcctcgtttggaagaca

SEQ ID NO: 82524 - DNA, 25 bp, Artificial
  probe
  misc_feature (1)..(25): SEQ ID NO: 6057; WAN024BJC_s_at; Start 37; Stop 61
gagtttcctcgtttggaagacattc

SEQ ID NO: 82525 - DNA, 25 bp, Artificial
  probe
  misc_feature (1)..(25): SEQ ID NO: 6057; WAN024BJC_s_at; Start 38; Stop 62
agtttcctcgtttggaagacattct

SEQ ID NO: 82526 - DNA, 25 bp, Artificial
  probe
  misc_feature (1)..(25): SEQ ID NO: 6057; WAN024BJC_s_at; Start 44; Stop 68
ctcgtttggaagacattctagaaga

SEQ ID NO: 82527 - DNA, 25 bp, Artificial
  probe
  misc_feature (1)..(25): SEQ ID NO: 6057; WAN024BJC_s_at; Start 42; Stop 66
tcctcgtttggaagacattctagaa

SEQ ID NO: 82528 - DNA, 25 bp, Artificial
  probe
  misc_feature (1)..(25): SEQ ID NO: 6225; WAN024BJD_at; Start 202; Stop 226
catgattttgaggacctctccaacc

SEQ ID NO: 82529 - DNA, 25 bp, Artificial
  probe
  misc_feature (1)..(25): SEQ ID NO: 6225; WAN024BJD_at; Start 63; Stop 87
tagtgaagaggtcttctggtttacc

SEQ ID NO: 82530 - DNA, 25 bp, Artificial
  probe
  misc_feature (1)..(25): SEQ ID NO: 6225; WAN024BJD_at; Start 54; Stop 78
ctttaggattagtgaagaggtcttc

SEQ ID NO: 82531 - DNA, 25 bp, Artificial
  probe
  misc_feature (1)..(25): SEQ ID NO: 6225; WAN024BJD_at; Start 9; Stop 33
cattgagtatgagataacgttgaag

SEQ ID NO: 82532 - DNA, 25 bp, Artificial
  probe
  misc_feature (1)..(25): SEQ ID NO: 6225; WAN024BJD_at; Start 179; Stop 203
aagccttcctgagccagatcttgca

SEQ ID NO: 82533 - DNA, 25 bp, Artificial
  probe
  misc_feature (1)..(25): SEQ ID NO: 6225; WAN024BJD_at; Start 189; Stop 213
gagccagatcttgcatgattttgag

SEQ ID NO: 82534 - DNA, 25 bp, Artificial
  probe
  misc_feature (1)..(25): SEQ ID NO: 6225; WAN024BJD_at; Start 172; Stop 196
catggtcaagccttcctgagccaga

SEQ ID NO: 82535 - DNA, 25 bp, Artificial
  probe
  misc_feature (1)..(25): SEQ ID NO: 6225; WAN024BJD_at; Start 105; Stop 129
ccttatccataaagataacacggtg

SEQ ID NO: 82536 - DNA, 25 bp, Artificial
  probe
  misc_feature (1)..(25): SEQ ID NO: 6225; WAN024BJD_at; Start 163; Stop 187
tacgacaatcatggtcaagccttcc

SEQ ID NO: 82537 - DNA, 25 bp, Artificial
  probe
  misc_feature (1)..(25): SEQ ID NO: 6225; WAN024BJD_at; Start 185; Stop 209
tcctgagccagatcttgcatgattt

SEQ ID NO: 82538 - DNA, 25 bp, Artificial
  probe
  misc_feature (1)..(25): SEQ ID NO: 6225; WAN024BJD_at; Start 175; Stop 199
ggtcaagccttcctgagccagatct

SEQ ID NO: 82539 - DNA, 25 bp, Artificial
  probe
  misc_feature (1)..(25): SEQ ID NO: 6225; WAN024BJD_at; Start 120; Stop 144
taacacggtgagagacatcacgggc

SEQ ID NO: 82540 - DNA, 25 bp, Artificial
  probe
  misc_feature (1)..(25): SEQ ID NO: 6225; WAN024BJD_at; Start 198; Stop 222
cttgcatgattttgaggacctctcc

SEQ ID NO: 82541 - DNA, 25 bp, Artificial
  probe
  misc_feature (1)..(25): SEQ ID NO: 6225; WAN024BJD_at; Start 133; Stop 157
gacatcacgggcaaattccatttca

SEQ ID NO: 82542 - DNA, 25 bp, Artificial
  probe
  misc_feature (1)..(25): SEQ ID NO: 6225; WAN024BJD_at; Start 149; Stop 173
tccatttcatgggttacgacaatca

SEQ ID NO: 82543 - DNA, 25 bp, Artificial
  probe
  misc_feature (1)..(25): SEQ ID NO: 6225; WAN024BJD_at; Start 166; Stop 190
gacaatcatggtcaagccttcctga

SEQ ID NO: 82544 - DNA, 25 bp, Artificial
  probe
  misc_feature (1)..(25): SEQ ID NO: 6225; WAN024BJD_at; Start 193; Stop 217
cagatcttgcatgattttgaggacc

SEQ ID NO: 82545 - DNA, 25 bp, Artificial
  probe
  misc_feature (1)..(25): SEQ ID NO: 6225; WAN024BJD_at; Start 118; Stop 142
gataacacggtgagagacatcacgg

SEQ ID NO: 82546 - DNA, 25 bp, Artificial
  probe
  misc_feature (1)..(25): SEQ ID NO: 6225; WAN024BJD_at; Start 80; Stop 104
ggtttaccttcttcagcaatcacac

SEQ ID NO: 82547 - DNA, 25 bp, Artificial
  probe
  misc_feature (1)..(25): SEQ ID NO: 6225; WAN024BJD_at; Start 181; Stop 205
gccttcctgagccagatcttgcatg

SEQ ID NO: 82548 - DNA, 25 bp, Artificial
  probe
  misc_feature (1)..(25): SEQ ID NO: 6225; WAN024BJD_at; Start 43; Stop 67
tgtacggtcttctttaggattagtg

SEQ ID NO: 82549 - DNA, 25 bp, Artificial
  probe
  misc_feature (1)..(25): SEQ ID NO: 6225; WAN024BJD_at; Start 15; Stop 39
gtatgagataacgttgaagaaattc

SEQ ID NO: 82550 - DNA, 25 bp, Artificial
  probe
  misc_feature (1)..(25): SEQ ID NO: 6225; WAN024BJD_at; Start 20; Stop 44
agataacgttgaagaaattcttttg

SEQ ID NO: 82551 - DNA, 25 bp, Artificial
  probe
  misc_feature (1)..(25): SEQ ID NO: 6225; WAN024BJD_at; Start 169; Stop 193
aatcatggtcaagccttcctgagcc

SEQ ID NO: 82552 - DNA, 25 bp, Artificial
  probe
  misc_feature (1)..(25): SEQ ID NO: 6225; WAN024BJD_at; Start 127; Stop 151
gtgagagacatcacgggcaaattcc

SEQ ID NO: 82553 - DNA, 25 bp, Artificial
  probe
  misc_feature (1)..(25): SEQ ID NO: 6225; WAN024BJD_at; Start 110; Stop 134
tccataaagataacacggtgagaga

SEQ ID NO: 82554 - DNA, 25 bp, Artificial
  probe
  misc_feature (1)..(25): SEQ ID NO: 6225; WAN024BJD_at; Start 72; Stop 96
ggtcttctggtttaccttcttcagc

SEQ ID NO: 82555 - DNA, 25 bp, Artificial
  probe
  misc_feature (1)..(25): SEQ ID NO: 6225; WAN024BJD_at; Start 144; Stop 168
caaattccatttcatgggttacgac

SEQ ID NO: 82556 - DNA, 25 bp, Artificial
  probe
  misc_feature (1)..(25): SEQ ID NO: 6225; WAN024BJD_at; Start 210; Stop 234
tgaggacctctccaaccatttctgg

SEQ ID NO: 82557 - DNA, 25 bp, Artificial
  probe
  misc_feature (1)..(25): SEQ ID NO: 6225; WAN024BJD_at; Start 137; Stop 161
tcacgggcaaattccatttcatggg

SEQ ID NO: 82558 - DNA, 25 bp, Artificial
  probe
  misc_feature (1)..(25): SEQ ID NO: 6225; WAN024BJD_at; Start 140; Stop 164
cgggcaaattccatttcatgggtta

SEQ ID NO: 82559 - DNA, 25 bp, Artificial
  probe
  misc_feature (1)..(25): SEQ ID NO: 6225; WAN024BJD_at; Start 218; Stop 242
tctccaaccatttctggatcgagag

SEQ ID NO: 82560 - DNA, 25 bp, Artificial
  probe
  misc_feature (1)..(25): SEQ ID NO: 6225; WAN024BJD_at; Start 95; Stop 119
gcaatcacacccttatccataaaga

SEQ ID NO: 82561 - DNA, 25 bp, Artificial
  probe
  misc_feature (1)..(25): SEQ ID NO: 6225; WAN024BJD_at; Start 123; Stop 147
cacggtgagagacatcacgggcaaa

SEQ ID NO: 82562 - DNA, 25 bp, Artificial
  probe
  misc_feature (1)..(25): SEQ ID NO: 6146; WAN024BJE_at; Start 57; Stop 81
ctctggaatgttttctgttcacagt

SEQ ID NO: 82563 - DNA, 25 bp, Artificial
  probe
  misc_feature (1)..(25): SEQ ID NO: 6146; WAN024BJE_at; Start 31; Stop 55
ccaaaacattccaaagtcttgtctg

SEQ ID NO: 82564 - DNA, 25 bp, Artificial
  probe
  misc_feature (1)..(25): SEQ ID NO: 6146; WAN024BJE_at; Start 30; Stop 54
gccaaaacattccaaagtcttgtct

SEQ ID NO: 82565 - DNA, 25 bp, Artificial
  probe
  misc_feature (1)..(25): SEQ ID NO: 6146; WAN024BJE_at; Start 28; Stop 52
gagccaaaacattccaaagtcttgt

SEQ ID NO: 82566 - DNA, 25 bp, Artificial
  probe
  misc_feature (1)..(25): SEQ ID NO: 6146; WAN024BJE_at; Start 25; Stop 49
atagagccaaaacattccaaagtct

SEQ ID NO: 82567 - DNA, 25 bp, Artificial
  probe
  misc_feature (1)..(25): SEQ ID NO: 6146; WAN024BJE_at; Start 42; Stop 66
caaagtcttgtctgactctggaatg

SEQ ID NO: 82568 - DNA, 25 bp, Artificial
  probe
  misc_feature (1)..(25): SEQ ID NO: 6146; WAN024BJE_at; Start 56; Stop 80
actctggaatgttttctgttcacag

SEQ ID NO: 82569 - DNA, 25 bp, Artificial
  probe
  misc_feature (1)..(25): SEQ ID NO: 6146; WAN024BJE_at; Start 43; Stop 67
aaagtcttgtctgactctggaatgt

SEQ ID NO: 82570 - DNA, 25 bp, Artificial
  probe
  misc_feature (1)..(25): SEQ ID NO: 6146; WAN024BJE_at; Start 23; Stop 47
ttatagagccaaaacattccaaagt

SEQ ID NO: 82571 - DNA, 25 bp, Artificial
  probe
  misc_feature (1)..(25): SEQ ID NO: 6146; WAN024BJE_at; Start 53; Stop 77
ctgactctggaatgttttctgttca

SEQ ID NO: 82572 - DNA, 25 bp, Artificial
  probe
  misc_feature (1)..(25): SEQ ID NO: 6146; WAN024BJE_at; Start 26; Stop 50
tagagccaaaacattccaaagtctt

SEQ ID NO: 82573 - DNA, 25 bp, Artificial
  probe
  misc_feature (1)..(25): SEQ ID NO: 6146; WAN024BJE_at; Start 24; Stop 48
tatagagccaaaacattccaaagtc

SEQ ID NO: 82574 - DNA, 25 bp, Artificial
  probe
  misc_feature (1)..(25): SEQ ID NO: 6146; WAN024BJE_at; Start 35; Stop 59
aacattccaaagtcttgtctgactc

SEQ ID NO: 82575 - DNA, 25 bp, Artificial
  probe
  misc_feature (1)..(25): SEQ ID NO: 6146; WAN024BJE_at; Start 32; Stop 56
caaaacattccaaagtcttgtctga

SEQ ID NO: 82576 - DNA, 25 bp, Artificial
  probe
  misc_feature (1)..(25): SEQ ID NO: 6146; WAN024BJE_at; Start 59; Stop 83
ctggaatgttttctgttcacagttg

SEQ ID NO: 82577 - DNA, 25 bp, Artificial
  probe
  misc_feature (1)..(25): SEQ ID NO: 6146; WAN024BJE_at; Start 38; Stop 62
attccaaagtcttgtctgactctgg

SEQ ID NO: 82578 - DNA, 25 bp, Artificial
  probe
  misc_feature (1)..(25): SEQ ID NO: 6146; WAN024BJE_at; Start 72; Stop 96
tgttcacagttgttttgtaactgcc

SEQ ID NO: 82579 - DNA, 25 bp, Artificial
  probe
  misc_feature (1)..(25): SEQ ID NO: 6146; WAN024BJE_at; Start 41; Stop 65
ccaaagtcttgtctgactctggaat

SEQ ID NO: 82580 - DNA, 25 bp, Artificial
  probe
  misc_feature (1)..(25): SEQ ID NO: 6146; WAN024BJE_at; Start 33; Stop 57
aaaacattccaaagtcttgtctgac

SEQ ID NO: 82581 - DNA, 25 bp, Artificial
  probe
  misc_feature (1)..(25): SEQ ID NO: 6146; WAN024BJE_at; Start 39; Stop 63
ttccaaagtcttgtctgactctgga

SEQ ID NO: 82582 - DNA, 25 bp, Artificial
  probe
  misc_feature (1)..(25): SEQ ID NO: 6146; WAN024BJE_at; Start 49; Stop 73
ttgtctgactctggaatgttttctg

SEQ ID NO: 82583 - DNA, 25 bp, Artificial
  probe
  misc_feature (1)..(25): SEQ ID NO: 6146; WAN024BJE_at; Start 40; Stop 64
tccaaagtcttgtctgactctggaa

SEQ ID NO: 82584 - DNA, 25 bp, Artificial
  probe
  misc_feature (1)..(25): SEQ ID NO: 6146; WAN024BJE_at; Start 55; Stop 79
gactctggaatgttttctgttcaca

SEQ ID NO: 82585 - DNA, 25 bp, Artificial
  probe
  misc_feature (1)..(25): SEQ ID NO: 6146; WAN024BJE_at; Start 22; Stop 46
attatagagccaaaacattccaaag

SEQ ID NO: 82586 - DNA, 25 bp, Artificial
  probe
  misc_feature (1)..(25): SEQ ID NO: 6146; WAN024BJE_at; Start 27; Stop 51
agagccaaaacattccaaagtcttg

SEQ ID NO: 82587 - DNA, 25 bp, Artificial
  probe
  misc_feature (1)..(25): SEQ ID NO: 6146; WAN024BJE_at; Start 34; Stop 58
aaacattccaaagtcttgtctgact

SEQ ID NO: 82588 - DNA, 25 bp, Artificial
  probe
  misc_feature (1)..(25): SEQ ID NO: 6146; WAN024BJE_at; Start 52; Stop 76
tctgactctggaatgttttctgttc

SEQ ID NO: 82589 - DNA, 25 bp, Artificial
  probe
  misc_feature (1)..(25): SEQ ID NO: 6146; WAN024BJE_at; Start 61; Stop 85
ggaatgttttctgttcacagttgtt

SEQ ID NO: 82590 - DNA, 25 bp, Artificial
  probe
  misc_feature (1)..(25): SEQ ID NO: 6146; WAN024BJE_at; Start 20; Stop 44
aaattatagagccaaaacattccaa

SEQ ID NO: 82591 - DNA, 25 bp, Artificial
  probe
  misc_feature (1)..(25): SEQ ID NO: 6146; WAN024BJE_at; Start 37; Stop 61
cattccaaagtcttgtctgactctg

SEQ ID NO: 82592 - DNA, 25 bp, Artificial
  probe
  misc_feature (1)..(25): SEQ ID NO: 6146; WAN024BJE_at; Start 47; Stop 71
tcttgtctgactctggaatgttttc

SEQ ID NO: 82593 - DNA, 25 bp, Artificial
  probe
  misc_feature (1)..(25): SEQ ID NO: 6146; WAN024BJE_at; Start 48; Stop 72
cttgtctgactctggaatgttttct

SEQ ID NO: 82594 - DNA, 25 bp, Artificial
  probe
  misc_feature (1)..(25): SEQ ID NO: 6146; WAN024BJE_at; Start 50; Stop 74
tgtctgactctggaatgttttctgt

SEQ ID NO: 82595 - DNA, 25 bp, Artificial
  probe
  misc_feature (1)..(25): SEQ ID NO: 6146; WAN024BJE_at; Start 44; Stop 68
aagtcttgtctgactctggaatgtt

SEQ ID NO: 82596 - DNA, 25 bp, Artificial
  probe
  misc_feature (1)..(25): SEQ ID NO: 6226; WAN024BJF_at; Start 212; Stop 236
tccaaaagactttgactattttcca

SEQ ID NO: 82597 - DNA, 25 bp, Artificial
  probe
  misc_feature (1)..(25): SEQ ID NO: 6226; WAN024BJF_at; Start 102; Stop 126
gcgtagccgtcaaaccgtaaagata

SEQ ID NO: 82598 - DNA, 25 bp, Artificial
  probe
  misc_feature (1)..(25): SEQ ID NO: 6226; WAN024BJF_at; Start 98; Stop 122
tcaggcgtagccgtcaaaccgtaaa

SEQ ID NO: 82599 - DNA, 25 bp, Artificial
  probe
  misc_feature (1)..(25): SEQ ID NO: 6226; WAN024BJF_at; Start 204; Stop 228
catactcatccaaaagactttgact

SEQ ID NO: 82600 - DNA, 25 bp, Artificial
  probe
  misc_feature (1)..(25): SEQ ID NO: 6226; WAN024BJF_at; Start 133; Stop 157
tctaaactgagcaacaactttttca

SEQ ID NO: 82601 - DNA, 25 bp, Artificial
  probe
  misc_feature (1)..(25): SEQ ID NO: 6226; WAN024BJF_at; Start 42; Stop 66
tatggagtatctcaccaattctctg

SEQ ID NO: 82602 - DNA, 25 bp, Artificial
  probe
  misc_feature (1)..(25): SEQ ID NO: 6226; WAN024BJF_at; Start 57; Stop 81
caattctctgaaaaacaataggctc

SEQ ID NO: 82603 - DNA, 25 bp, Artificial
  probe
  misc_feature (1)..(25): SEQ ID NO: 6226; WAN024BJF_at; Start 73; Stop 97
aataggctcatgaccattcttacgc

SEQ ID NO: 82604 - DNA, 25 bp, Artificial
  probe
  misc_feature (1)..(25): SEQ ID NO: 6226; WAN024BJF_at; Start 130; Stop 154
ccctctaaactgagcaacaactttt

SEQ ID NO: 82605 - DNA, 25 bp, Artificial
  probe
  misc_feature (1)..(25): SEQ ID NO: 6226; WAN024BJF_at; Start 80; Stop 104
tcatgaccattcttacgctcaggcg

SEQ ID NO: 82606 - DNA, 25 bp, Artificial
  probe
  misc_feature (1)..(25): SEQ ID NO: 6226; WAN024BJF_at; Start 38; Stop 62
gcagtatggagtatctcaccaattc

SEQ ID NO: 82607 - DNA, 25 bp, Artificial
  probe
  misc_feature (1)..(25): SEQ ID NO: 6226; WAN024BJF_at; Start 118; Stop 142
gtaaagatacttccctctaaactga

SEQ ID NO: 82608 - DNA, 25 bp, Artificial
  probe
  misc_feature (1)..(25): SEQ ID NO: 6226; WAN024BJF_at; Start 65; Stop 89
tgaaaaacaataggctcatgaccat

SEQ ID NO: 82609 - DNA, 25 bp, Artificial
  probe
  misc_feature (1)..(25): SEQ ID NO: 6226; WAN024BJF_at; Start 30; Stop 54
tcttatcagcagtatggagtatctc

SEQ ID NO: 82610 - DNA, 25 bp, Artificial
  probe
  misc_feature (1)..(25): SEQ ID NO: 6226; WAN024BJF_at; Start 89; Stop 113
ttcttacgctcaggcgtagccgtca

SEQ ID NO: 82611 - DNA, 25 bp, Artificial
  probe
  misc_feature (1)..(25): SEQ ID NO: 6226; WAN024BJF_at; Start 153; Stop 177
tttcaaacatcaaggcagagacatg

SEQ ID NO: 82612 - DNA, 25 bp, Artificial
  probe
  misc_feature (1)..(25): SEQ ID NO: 6226; WAN024BJF_at; Start 83; Stop 107
tgaccattcttacgctcaggcgtag

SEQ ID NO: 82613 - DNA, 25 bp, Artificial
  probe
  misc_feature (1)..(25): SEQ ID NO: 6226; WAN024BJF_at; Start 35; Stop 59
tcagcagtatggagtatctcaccaa

SEQ ID NO: 82614 - DNA, 25 bp, Artificial
  probe
  misc_feature (1)..(25): SEQ ID NO: 6226; WAN024BJF_at; Start 170; Stop 194
gagacatgatgacactcatccacaa

SEQ ID NO: 82615 - DNA, 25 bp, Artificial
  probe
  misc_feature (1)..(25): SEQ ID NO: 6226; WAN024BJF_at; Start 143; Stop 167
gcaacaactttttcaaacatcaagg

SEQ ID NO: 82616 - DNA, 25 bp, Artificial
  probe
  misc_feature (1)..(25): SEQ ID NO: 6226; WAN024BJF_at; Start 166; Stop 190
ggcagagacatgatgacactcatcc

SEQ ID NO: 82617 - DNA, 25 bp, Artificial
  probe
  misc_feature (1)..(25): SEQ ID NO: 6226; WAN024BJF_at; Start 123; Stop 147
gatacttccctctaaactgagcaac

SEQ ID NO: 82618 - DNA, 25 bp, Artificial
  probe
  misc_feature (1)..(25): SEQ ID NO: 6226; WAN024BJF_at; Start 148; Stop 172
aactttttcaaacatcaaggcagag

SEQ ID NO: 82619 - DNA, 25 bp, Artificial
  probe
  misc_feature (1)..(25): SEQ ID NO: 6226; WAN024BJF_at; Start 195; Stop 219
tcatcatctcatactcatccaaaag

SEQ ID NO: 82620 - DNA, 25 bp, Artificial
  probe
  misc_feature (1)..(25): SEQ ID NO: 6226; WAN024BJF_at; Start 77; Stop 101
ggctcatgaccattcttacgctcag

SEQ ID NO: 82621 - DNA, 25 bp, Artificial
  probe
  misc_feature (1)..(25): SEQ ID NO: 6226; WAN024BJF_at; Start 22; Stop 46
cgtttccctcttatcagcagtatgg

SEQ ID NO: 82622 - DNA, 25 bp, Artificial
  probe
  misc_feature (1)..(25): SEQ ID NO: 6226; WAN024BJF_at; Start 60; Stop 84
ttctctgaaaaacaataggctcatg

SEQ ID NO: 82623 - DNA, 25 bp, Artificial
  probe
  misc_feature (1)..(25): SEQ ID NO: 6226; WAN024BJF_at; Start 201; Stop 225
tctcatactcatccaaaagactttg

SEQ ID NO: 82624 - DNA, 25 bp, Artificial
  probe
  misc_feature (1)..(25): SEQ ID NO: 6226; WAN024BJF_at; Start 45; Stop 69
ggagtatctcaccaattctctgaaa

SEQ ID NO: 82625 - DNA, 25 bp, Artificial
  probe
  misc_feature (1)..(25): SEQ ID NO: 6226; WAN024BJF_at; Start 17; Stop 41
aaatccgtttccctcttatcagcag

SEQ ID NO: 82626 - DNA, 25 bp, Artificial
  probe
  misc_feature (1)..(25): SEQ ID NO: 6226; WAN024BJF_at; Start 33; Stop 57
tatcagcagtatggagtatctcacc

SEQ ID NO: 82627 - DNA, 25 bp, Artificial
  probe
  misc_feature (1)..(25): SEQ ID NO: 6226; WAN024BJF_at; Start 162; Stop 186
tcaaggcagagacatgatgacactc

SEQ ID NO: 82628 - DNA, 25 bp, Artificial
  probe
  misc_feature (1)..(25): SEQ ID NO: 6226; WAN024BJF_at; Start 179; Stop 203
tgacactcatccacaatcatcatct

SEQ ID NO: 82629 - DNA, 25 bp, Artificial
  probe
  misc_feature (1)..(25): SEQ ID NO: 6226; WAN024BJF_at; Start 26; Stop 50
tccctcttatcagcagtatggagta

SEQ ID NO: 82630 - DNA, 25 bp, Artificial
  probe
  misc_feature (1)..(25): SEQ ID NO: 6230; WAN024BJG_at; Start 198; Stop 222
tacagtgtttacatttaggtgggtg

SEQ ID NO: 82631 - DNA, 25 bp, Artificial
  probe
  misc_feature (1)..(25): SEQ ID NO: 6230; WAN024BJG_at; Start 17; Stop 41
ctcaccatttccgagatttggcaat

SEQ ID NO: 82632 - DNA, 25 bp, Artificial
  probe
  misc_feature (1)..(25): SEQ ID NO: 6230; WAN024BJG_at; Start 137; Stop 161
ccaatctcgataaaagggattttag

SEQ ID NO: 82633 - DNA, 25 bp, Artificial
  probe
  misc_feature (1)..(25): SEQ ID NO: 6230; WAN024BJG_at; Start 209; Stop 233
catttaggtgggtgataatcaagtg

SEQ ID NO: 82634 - DNA, 25 bp, Artificial
  probe
  misc_feature (1)..(25): SEQ ID NO: 6230; WAN024BJG_at; Start 114; Stop 138
aatgaatgaggctagggaaaccacc

SEQ ID NO: 82635 - DNA, 25 bp, Artificial
  probe
  misc_feature (1)..(25): SEQ ID NO: 6230; WAN024BJG_at; Start 78; Stop 102
tccgacaggacttgcattgaaatcg

SEQ ID NO: 82636 - DNA, 25 bp, Artificial
  probe
  misc_feature (1)..(25): SEQ ID NO: 6230; WAN024BJG_at; Start 180; Stop 204
atttgatttgttttcctttacagtg

SEQ ID NO: 82637 - DNA, 25 bp, Artificial
  probe
  misc_feature (1)..(25): SEQ ID NO: 6230; WAN024BJG_at; Start 95; Stop 119
tgaaatcgtctctttttcaaatgaa

SEQ ID NO: 82638 - DNA, 25 bp, Artificial
  probe
  misc_feature (1)..(25): SEQ ID NO: 6230; WAN024BJG_at; Start 165; Stop 189
gcttttggaagtcgtatttgatttg

SEQ ID NO: 82639 - DNA, 25 bp, Artificial
  probe
  misc_feature (1)..(25): SEQ ID NO: 6230; WAN024BJG_at; Start 111; Stop 135
tcaaatgaatgaggctagggaaacc

SEQ ID NO: 82640 - DNA, 25 bp, Artificial
  probe
  misc_feature (1)..(25): SEQ ID NO: 6230; WAN024BJG_at; Start 126; Stop 150
tagggaaaccaccaatctcgataaa

SEQ ID NO: 82641 - DNA, 25 bp, Artificial
  probe
  misc_feature (1)..(25): SEQ ID NO: 6230; WAN024BJG_at; Start 118; Stop 142
aatgaggctagggaaaccaccaatc

SEQ ID NO: 82642 - DNA, 25 bp, Artificial
  probe
  misc_feature (1)..(25): SEQ ID NO: 6230; WAN024BJG_at; Start 234; Stop 258
tagcgaagacttcgatatgggtatc

SEQ ID NO: 82643 - DNA, 25 bp, Artificial
  probe
  misc_feature (1)..(25): SEQ ID NO: 6230; WAN024BJG_at; Start 58; Stop 82
tgtttcagctacagtgactttccga

SEQ ID NO: 82644 - DNA, 25 bp, Artificial
  probe
  misc_feature (1)..(25): SEQ ID NO: 6230; WAN024BJG_at; Start 255; Stop 279
tatcgtgctgaatggctttatttaa

SEQ ID NO: 82645 - DNA, 25 bp, Artificial
  probe
  misc_feature (1)..(25): SEQ ID NO: 6230; WAN024BJG_at; Start 224; Stop 248
taatcaagtgtagcgaagacttcga

SEQ ID NO: 82646 - DNA, 25 bp, Artificial
  probe
  misc_feature (1)..(25): SEQ ID NO: 6230; WAN024BJG_at; Start 73; Stop 97
gactttccgacaggacttgcattga

SEQ ID NO: 82647 - DNA, 25 bp, Artificial
  probe
  misc_feature (1)..(25): SEQ ID NO: 6230; WAN024BJG_at; Start 238; Stop 262
gaagacttcgatatgggtatcgtgc

SEQ ID NO: 82648 - DNA, 25 bp, Artificial
  probe
  misc_feature (1)..(25): SEQ ID NO: 6230; WAN024BJG_at; Start 62; Stop 86
tcagctacagtgactttccgacagg

SEQ ID NO: 82649 - DNA, 25 bp, Artificial
  probe
  misc_feature (1)..(25): SEQ ID NO: 6230; WAN024BJG_at; Start 69; Stop 93
cagtgactttccgacaggacttgca

SEQ ID NO: 82650 - DNA, 25 bp, Artificial
  probe
  misc_feature (1)..(25): SEQ ID NO: 6230; WAN024BJG_at; Start 65; Stop 89
gctacagtgactttccgacaggact

SEQ ID NO: 82651 - DNA, 25 bp, Artificial
  probe
  misc_feature (1)..(25): SEQ ID NO: 6230; WAN024BJG_at; Start 51; Stop 75
cgagagttgtttcagctacagtgac

SEQ ID NO: 82652 - DNA, 25 bp, Artificial
  probe
  misc_feature (1)..(25): SEQ ID NO: 6230; WAN024BJG_at; Start 47; Stop 71
tgaacgagagttgtttcagctacag

SEQ ID NO: 82653 - DNA, 25 bp, Artificial
  probe
  misc_feature (1)..(25): SEQ ID NO: 6230; WAN024BJG_at; Start 132; Stop 156
aaccaccaatctcgataaaagggat

SEQ ID NO: 82654 - DNA, 25 bp, Artificial
  probe
  misc_feature (1)..(25): SEQ ID NO: 6230; WAN024BJG_at; Start 219; Stop 243
ggtgataatcaagtgtagcgaagac

SEQ ID NO: 82655 - DNA, 25 bp, Artificial
  probe
  misc_feature (1)..(25): SEQ ID NO: 6230; WAN024BJG_at; Start 31; Stop 55
gatttggcaatttttctgaacgaga

SEQ ID NO: 82656 - DNA, 25 bp, Artificial
  probe
  misc_feature (1)..(25): SEQ ID NO: 6230; WAN024BJG_at; Start 83; Stop 107
caggacttgcattgaaatcgtctct

SEQ ID NO: 82657 - DNA, 25 bp, Artificial
  probe
  misc_feature (1)..(25): SEQ ID NO: 6230; WAN024BJG_at; Start 7; Stop 31
aattttctgtctcaccatttccgag

SEQ ID NO: 82658 - DNA, 25 bp, Artificial
  probe
  misc_feature (1)..(25): SEQ ID NO: 6230; WAN024BJG_at; Start 251; Stop 275
tgggtatcgtgctgaatggctttat

SEQ ID NO: 82659 - DNA, 25 bp, Artificial
  probe
  misc_feature (1)..(25): SEQ ID NO: 6230; WAN024BJG_at; Start 1; Stop 25
ttgggcaattttctgtctcaccatt

SEQ ID NO: 82660 - DNA, 25 bp, Artificial
  probe
  misc_feature (1)..(25): SEQ ID NO: 6230; WAN024BJG_at; Start 36; Stop 60
ggcaatttttctgaacgagagttgt

SEQ ID NO: 82661 - DNA, 25 bp, Artificial
  probe
  misc_feature (1)..(25): SEQ ID NO: 6230; WAN024BJG_at; Start 247; Stop 271
gatatgggtatcgtgctgaatggct

SEQ ID NO: 82662 - DNA, 25 bp, Artificial
  probe
  misc_feature (1)..(25): SEQ ID NO: 6230; WAN024BJG_at; Start 161; Stop 185
gaaggcttttggaagtcgtatttga

SEQ ID NO: 82663 - DNA, 25 bp, Artificial
  probe
  misc_feature (1)..(25): SEQ ID NO: 6230; WAN024BJG_at; Start 123; Stop 147
ggctagggaaaccaccaatctcgat

SEQ ID NO: 82664 - DNA, 25 bp, Artificial
  probe
  misc_feature (1)..(25): SEQ ID NO: 6055; WAN024BJH_at; Start 156; Stop 180
tgagaaacccttaaggtatctgtta

SEQ ID NO: 82665 - DNA, 25 bp, Artificial
  probe
  misc_feature (1)..(25): SEQ ID NO: 6055; WAN024BJH_at; Start 189; Stop 213
tatatttctactagttctagctaaa

SEQ ID NO: 82666 - DNA, 25 bp, Artificial
  probe
  misc_feature (1)..(25): SEQ ID NO: 6055; WAN024BJH_at; Start 191; Stop 215
tatttctactagttctagctaaaaa

SEQ ID NO: 82667 - DNA, 25 bp, Artificial
  probe
  misc_feature (1)..(25): SEQ ID NO: 6055; WAN024BJH_at; Start 170; Stop 194
ggtatctgttatttgactatatatt

SEQ ID NO: 82668 - DNA, 25 bp, Artificial
  probe
  misc_feature (1)..(25): SEQ ID NO: 6055; WAN024BJH_at; Start 175; Stop 199
ctgttatttgactatatatttctac

SEQ ID NO: 82669 - DNA, 25 bp, Artificial
  probe
  misc_feature (1)..(25): SEQ ID NO: 6055; WAN024BJH_at; Start 186; Stop 210
ctatatatttctactagttctagct

SEQ ID NO: 82670 - DNA, 25 bp, Artificial
  probe
  misc_feature (1)..(25): SEQ ID NO: 6055; WAN024BJH_at; Start 167; Stop 191
taaggtatctgttatttgactatat

SEQ ID NO: 82671 - DNA, 25 bp, Artificial
  probe
  misc_feature (1)..(25): SEQ ID NO: 6055; WAN024BJH_at; Start 146; Stop 170
tttatgtagatgagaaacccttaag

SEQ ID NO: 82672 - DNA, 25 bp, Artificial
  probe
  misc_feature (1)..(25): SEQ ID NO: 6055; WAN024BJH_at; Start 184; Stop 208
gactatatatttctactagttctag

SEQ ID NO: 82673 - DNA, 25 bp, Artificial
  probe
  misc_feature (1)..(25): SEQ ID NO: 6055; WAN024BJH_at; Start 144; Stop 168
tttttatgtagatgagaaaccctta

SEQ ID NO: 82674 - DNA, 25 bp, Artificial
  probe
  misc_feature (1)..(25): SEQ ID NO: 6055; WAN024BJH_at; Start 148; Stop 172
tatgtagatgagaaacccttaaggt

SEQ ID NO: 82675 - DNA, 25 bp, Artificial
  probe
  misc_feature (1)..(25): SEQ ID NO: 6055; WAN024BJH_at; Start 215; Stop 239
aaaaatatcccaatcttatgaactg

SEQ ID NO: 82676 - DNA, 25 bp, Artificial
  probe
  misc_feature (1)..(25): SEQ ID NO: 6055; WAN024BJH_at; Start 217; Stop 241
aaatatcccaatcttatgaactgca

SEQ ID NO: 82677 - DNA, 25 bp, Artificial
  probe
  misc_feature (1)..(25): SEQ ID NO: 6055; WAN024BJH_at; Start 164; Stop 188
ccttaaggtatctgttatttgacta

SEQ ID NO: 82678 - DNA, 25 bp, Artificial
  probe
  misc_feature (1)..(25): SEQ ID NO: 6055; WAN024BJH_at; Start 216; Stop 240
aaaatatcccaatcttatgaactgc

SEQ ID NO: 82679 - DNA, 25 bp, Artificial
  probe
  misc_feature (1)..(25): SEQ ID NO: 6055; WAN024BJH_at; Start 145; Stop 169
ttttatgtagatgagaaacccttaa

SEQ ID NO: 82680 - DNA, 25 bp, Artificial
  probe
  misc_feature (1)..(25): SEQ ID NO: 6055; WAN024BJH_at; Start 155; Stop 179
atgagaaacccttaaggtatctgtt

SEQ ID NO: 82681 - DNA, 25 bp, Artificial
  probe
  misc_feature (1)..(25): SEQ ID NO: 6055; WAN024BJH_at; Start 153; Stop 177
agatgagaaacccttaaggtatctg

SEQ ID NO: 82682 - DNA, 25 bp, Artificial
  probe
  misc_feature (1)..(25): SEQ ID NO: 6055; WAN024BJH_at; Start 168; Stop 192
aaggtatctgttatttgactatata

SEQ ID NO: 82683 - DNA, 25 bp, Artificial
  probe
  misc_feature (1)..(25): SEQ ID NO: 6055; WAN024BJH_at; Start 185; Stop 209
actatatatttctactagttctagc

SEQ ID NO: 82684 - DNA, 25 bp, Artificial
  probe
  misc_feature (1)..(25): SEQ ID NO: 6055; WAN024BJH_at; Start 218; Stop 242
aatatcccaatcttatgaactgcac

SEQ ID NO: 82685 - DNA, 25 bp, Artificial
  probe
  misc_feature (1)..(25): SEQ ID NO: 6055; WAN024BJH_at; Start 166; Stop 190
ttaaggtatctgttatttgactata

SEQ ID NO: 82686 - DNA, 25 bp, Artificial
  probe
  misc_feature (1)..(25): SEQ ID NO: 6055; WAN024BJH_at; Start 147; Stop 171
ttatgtagatgagaaacccttaagg

SEQ ID NO: 82687 - DNA, 25 bp, Artificial
  probe
  misc_feature (1)..(25): SEQ ID NO: 6055; WAN024BJH_at; Start 163; Stop 187
cccttaaggtatctgttatttgact

SEQ ID NO: 82688 - DNA, 25 bp, Artificial
  probe
  misc_feature (1)..(25): SEQ ID NO: 6055; WAN024BJH_at; Start 151; Stop 175
gtagatgagaaacccttaaggtatc

SEQ ID NO: 82689 - DNA, 25 bp, Artificial
  probe
  misc_feature (1)..(25): SEQ ID NO: 6055; WAN024BJH_at; Start 165; Stop 189
cttaaggtatctgttatttgactat

SEQ ID NO: 82690 - DNA, 25 bp, Artificial
  probe
  misc_feature (1)..(25): SEQ ID NO: 6055; WAN024BJH_at; Start 221; Stop 245
atcccaatcttatgaactgcacccc

SEQ ID NO: 82691 - DNA, 25 bp, Artificial
  probe
  misc_feature (1)..(25): SEQ ID NO: 6055; WAN024BJH_at; Start 154; Stop 178
gatgagaaacccttaaggtatctgt

SEQ ID NO: 82692 - DNA, 25 bp, Artificial
  probe
  misc_feature (1)..(25): SEQ ID NO: 6055; WAN024BJH_at; Start 222; Stop 246
tcccaatcttatgaactgcacccca

SEQ ID NO: 82693 - DNA, 25 bp, Artificial
  probe
  misc_feature (1)..(25): SEQ ID NO: 6055; WAN024BJH_at; Start 220; Stop 244
tatcccaatcttatgaactgcaccc

SEQ ID NO: 82694 - DNA, 25 bp, Artificial
  probe
  misc_feature (1)..(25): SEQ ID NO: 6055; WAN024BJH_at; Start 187; Stop 211
tatatatttctactagttctagcta

SEQ ID NO: 82695 - DNA, 25 bp, Artificial
  probe
  misc_feature (1)..(25): SEQ ID NO: 6055; WAN024BJH_at; Start 149; Stop 173
atgtagatgagaaacccttaaggta

SEQ ID NO: 82696 - DNA, 25 bp, Artificial
  probe
  misc_feature (1)..(25): SEQ ID NO: 6055; WAN024BJH_at; Start 219; Stop 243
atatcccaatcttatgaactgcacc

SEQ ID NO: 82697 - DNA, 25 bp, Artificial
  probe
  misc_feature (1)..(25): SEQ ID NO: 6055; WAN024BJH_at; Start 150; Stop 174
tgtagatgagaaacccttaaggtat

SEQ ID NO: 82698 - DNA, 25 bp, Artificial
  probe
  misc_feature (1)..(25): SEQ ID NO: 6052; WAN024BJI_at; Start 111; Stop 135
cacgttcggtattttcatagaggaa

SEQ ID NO: 82699 - DNA, 25 bp, Artificial
  probe
  misc_feature (1)..(25): SEQ ID NO: 6052; WAN024BJI_at; Start 266; Stop 290
tagacaaagcctcggctgaggatgt

SEQ ID NO: 82700 - DNA, 25 bp, Artificial
  probe
  misc_feature (1)..(25): SEQ ID NO: 6052; WAN024BJI_at; Start 75; Stop 99
catctggtgtgaggatcatcgggat

SEQ ID NO: 82701 - DNA, 25 bp, Artificial
  probe
  misc_feature (1)..(25): SEQ ID NO: 6052; WAN024BJI_at; Start 192; Stop 216
ttttcagtgcgatacgaatggcatt

SEQ ID NO: 82702 - DNA, 25 bp, Artificial
  probe
  misc_feature (1)..(25): SEQ ID NO: 6052; WAN024BJI_at; Start 168; Stop 192
cagattgcacgctagcatccttatt

SEQ ID NO: 82703 - DNA, 25 bp, Artificial
  probe
  misc_feature (1)..(25): SEQ ID NO: 6052; WAN024BJI_at; Start 144; Stop 168
tagcgttgacaatggcaccattgac

SEQ ID NO: 82704 - DNA, 25 bp, Artificial
  probe
  misc_feature (1)..(25): SEQ ID NO: 6052; WAN024BJI_at; Start 204; Stop 228
tacgaatggcattgaagaggatacg

SEQ ID NO: 82705 - DNA, 25 bp, Artificial
  probe
  misc_feature (1)..(25): SEQ ID NO: 6052; WAN024BJI_at; Start 210; Stop 234
tggcattgaagaggatacgctggct

SEQ ID NO: 82706 - DNA, 25 bp, Artificial
  probe
  misc_feature (1)..(25): SEQ ID NO: 6052; WAN024BJI_at; Start 97; Stop 121
gatgatgatcggttcacgttcggta

SEQ ID NO: 82707 - DNA, 25 bp, Artificial
  probe
  misc_feature (1)..(25): SEQ ID NO: 6052; WAN024BJI_at; Start 278; Stop 302
cggctgaggatgtctggaccagata

SEQ ID NO: 82708 - DNA, 25 bp, Artificial
  probe
  misc_feature (1)..(25): SEQ ID NO: 6052; WAN024BJI_at; Start 64; Stop 88
gctttattcttcatctggtgtgagg

SEQ ID NO: 82709 - DNA, 25 bp, Artificial
  probe
  misc_feature (1)..(25): SEQ ID NO: 6052; WAN024BJI_at; Start 225; Stop 249
tacgctggctttggcgaatcaagtc

SEQ ID NO: 82710 - DNA, 25 bp, Artificial
  probe
  misc_feature (1)..(25): SEQ ID NO: 6052; WAN024BJI_at; Start 174; Stop 198
gcacgctagcatccttatttttcag

SEQ ID NO: 82711 - DNA, 25 bp, Artificial
  probe
  misc_feature (1)..(25): SEQ ID NO: 6052; WAN024BJI_at; Start 140; Stop 164
cgaatagcgttgacaatggcaccat

SEQ ID NO: 82712 - DNA, 25 bp, Artificial
  probe
  misc_feature (1)..(25): SEQ ID NO: 6052; WAN024BJI_at; Start 218; Stop 242
aagaggatacgctggctttggcgaa

SEQ ID NO: 82713 - DNA, 25 bp, Artificial
  probe
  misc_feature (1)..(25): SEQ ID NO: 6052; WAN024BJI_at; Start 245; Stop 269
aagtcgccagactctctcatgtaga

SEQ ID NO: 82714 - DNA, 25 bp, Artificial
  probe
  misc_feature (1)..(25): SEQ ID NO: 6052; WAN024BJI_at; Start 237; Stop 261
ggcgaatcaagtcgccagactctct

SEQ ID NO: 82715 - DNA, 25 bp, Artificial
  probe
  misc_feature (1)..(25): SEQ ID NO: 6052; WAN024BJI_at; Start 71; Stop 95
tcttcatctggtgtgaggatcatcg

SEQ ID NO: 82716 - DNA, 25 bp, Artificial
  probe
  misc_feature (1)..(25): SEQ ID NO: 6052; WAN024BJI_at; Start 183; Stop 207
catccttatttttcagtgcgatacg

SEQ ID NO: 82717 - DNA, 25 bp, Artificial
  probe
  misc_feature (1)..(25): SEQ ID NO: 6052; WAN024BJI_at; Start 103; Stop 127
gatcggttcacgttcggtattttca

SEQ ID NO: 82718 - DNA, 25 bp, Artificial
  probe
  misc_feature (1)..(25): SEQ ID NO: 6052; WAN024BJI_at; Start 164; Stop 188
ttgacagattgcacgctagcatcct

SEQ ID NO: 82719 - DNA, 25 bp, Artificial
  probe
  misc_feature (1)..(25): SEQ ID NO: 6052; WAN024BJI_at; Start 52; Stop 76
ggctgttttcttgctttattcttca

SEQ ID NO: 82720 - DNA, 25 bp, Artificial
  probe
  misc_feature (1)..(25): SEQ ID NO: 6052; WAN024BJI_at; Start 90; Stop 114
tcatcgggatgatgatcggttcacg

SEQ ID NO: 82721 - DNA, 25 bp, Artificial
  probe
  misc_feature (1)..(25): SEQ ID NO: 6052; WAN024BJI_at; Start 137; Stop 161
gggcgaatagcgttgacaatggcac

SEQ ID NO: 82722 - DNA, 25 bp, Artificial
  probe
  misc_feature (1)..(25): SEQ ID NO: 6052; WAN024BJI_at; Start 160; Stop 184
accattgacagattgcacgctagca

SEQ ID NO: 82723 - DNA, 25 bp, Artificial
  probe
  misc_feature (1)..(25): SEQ ID NO: 6052; WAN024BJI_at; Start 257; Stop 281
tctctcatgtagacaaagcctcggc

SEQ ID NO: 82724 - DNA, 25 bp, Artificial
  probe
  misc_feature (1)..(25): SEQ ID NO: 6052; WAN024BJI_at; Start 196; Stop 220
cagtgcgatacgaatggcattgaag

SEQ ID NO: 82725 - DNA, 25 bp, Artificial
  probe
  misc_feature (1)..(25): SEQ ID NO: 6052; WAN024BJI_at; Start 274; Stop 298
gcctcggctgaggatgtctggacca

SEQ ID NO: 82726 - DNA, 25 bp, Artificial
  probe
  misc_feature (1)..(25): SEQ ID NO: 6052; WAN024BJI_at; Start 213; Stop 237
cattgaagaggatacgctggctttg

SEQ ID NO: 82727 - DNA, 25 bp, Artificial
  probe
  misc_feature (1)..(25): SEQ ID NO: 6052; WAN024BJI_at; Start 261; Stop 285
tcatgtagacaaagcctcggctgag

SEQ ID NO: 82728 - DNA, 25 bp, Artificial
  probe
  misc_feature (1)..(25): SEQ ID NO: 6052; WAN024BJI_at; Start 113; Stop 137
cgttcggtattttcatagaggaagg

SEQ ID NO: 82729 - DNA, 25 bp, Artificial
  probe
  misc_feature (1)..(25): SEQ ID NO: 6052; WAN024BJI_at; Start 231; Stop 255
ggctttggcgaatcaagtcgccaga

SEQ ID NO: 82730 - DNA, 25 bp, Artificial
  probe
  misc_feature (1)..(25): SEQ ID NO: 6052; WAN024BJI_at; Start 154; Stop 178
aatggcaccattgacagattgcacg

SEQ ID NO: 82731 - DNA, 25 bp, Artificial
  probe
  misc_feature (1)..(25): SEQ ID NO: 6052; WAN024BJI_at; Start 250; Stop 274
gccagactctctcatgtagacaaag

SEQ ID NO: 82732 - DNA, 25 bp, Artificial
  probe
  misc_feature (1)..(25): SEQ ID NO: 6101; WAN024BJJ_s_at; Start 26; Stop 50
ctttcgaagaggcagaagctacccg

SEQ ID NO: 82733 - DNA, 25 bp, Artificial
  probe
  misc_feature (1)..(25): SEQ ID NO: 6101; WAN024BJJ_s_at; Start 38; Stop 62
cagaagctacccgttatacggcatc

SEQ ID NO: 82734 - DNA, 25 bp, Artificial
  probe
  misc_feature (1)..(25): SEQ ID NO: 6101; WAN024BJJ_s_at; Start 28; Stop 52
ttcgaagaggcagaagctacccgtt

SEQ ID NO: 82735 - DNA, 25 bp, Artificial
  probe
  misc_feature (1)..(25): SEQ ID NO: 6101; WAN024BJJ_s_at; Start 35; Stop 59
aggcagaagctacccgttatacggc

SEQ ID NO: 82736 - DNA, 25 bp, Artificial
  probe
  misc_feature (1)..(25): SEQ ID NO: 6101; WAN024BJJ_s_at; Start 83; Stop 107
gctatgtcgggcagtacggtggggc

SEQ ID NO: 82737 - DNA, 25 bp, Artificial
  probe
  misc_feature (1)..(25): SEQ ID NO: 6101; WAN024BJJ_s_at; Start 84; Stop 108
ctatgtcgggcagtacggtggggct

SEQ ID NO: 82738 - DNA, 25 bp, Artificial
  probe
  misc_feature (1)..(25): SEQ ID NO: 6101; WAN024BJJ_s_at; Start 87; Stop 111
tgtcgggcagtacggtggggctaag

SEQ ID NO: 82739 - DNA, 25 bp, Artificial
  probe
  misc_feature (1)..(25): SEQ ID NO: 6101; WAN024BJJ_s_at; Start 30; Stop 54
cgaagaggcagaagctacccgttat

SEQ ID NO: 82740 - DNA, 25 bp, Artificial
  probe
  misc_feature (1)..(25): SEQ ID NO: 6101; WAN024BJJ_s_at; Start 32; Stop 56
aagaggcagaagctacccgttatac

SEQ ID NO: 82741 - DNA, 25 bp, Artificial
  probe
  misc_feature (1)..(25): SEQ ID NO: 6101; WAN024BJJ_s_at; Start 72; Stop 96
aagggtaataggctatgtcgggcag

SEQ ID NO: 82742 - DNA, 25 bp, Artificial
  probe
  misc_feature (1)..(25): SEQ ID NO: 6101; WAN024BJJ_s_at; Start 66; Stop 90
tcgtgaaagggtaataggctatgtc

SEQ ID NO: 82743 - DNA, 25 bp, Artificial
  probe
  misc_feature (1)..(25): SEQ ID NO: 6101; WAN024BJJ_s_at; Start 78; Stop 102
aataggctatgtcgggcagtacggt

SEQ ID NO: 82744 - DNA, 25 bp, Artificial
  probe
  misc_feature (1)..(25): SEQ ID NO: 6101; WAN024BJJ_s_at; Start 68; Stop 92
gtgaaagggtaataggctatgtcgg

SEQ ID NO: 82745 - DNA, 25 bp, Artificial
  probe
  misc_feature (1)..(25): SEQ ID NO: 6101; WAN024BJJ_s_at; Start 70; Stop 94
gaaagggtaataggctatgtcgggc

SEQ ID NO: 82746 - DNA, 25 bp, Artificial
  probe
  misc_feature (1)..(25): SEQ ID NO: 6101; WAN024BJJ_s_at; Start 79; Stop 103
ataggctatgtcgggcagtacggtg

SEQ ID NO: 82747 - DNA, 25 bp, Artificial
  probe
  misc_feature (1)..(25): SEQ ID NO: 6101; WAN024BJJ_s_at; Start 77; Stop 101
taataggctatgtcgggcagtacgg

SEQ ID NO: 82748 - DNA, 25 bp, Artificial
  probe
  misc_feature (1)..(25): SEQ ID NO: 6101; WAN024BJJ_s_at; Start 34; Stop 58
gaggcagaagctacccgttatacgg

SEQ ID NO: 82749 - DNA, 25 bp, Artificial
  probe
  misc_feature (1)..(25): SEQ ID NO: 6101; WAN024BJJ_s_at; Start 69; Stop 93
tgaaagggtaataggctatgtcggg

SEQ ID NO: 82750 - DNA, 25 bp, Artificial
  probe
  misc_feature (1)..(25): SEQ ID NO: 6101; WAN024BJJ_s_at; Start 76; Stop 100
gtaataggctatgtcgggcagtacg

SEQ ID NO: 82751 - DNA, 25 bp, Artificial
  probe
  misc_feature (1)..(25): SEQ ID NO: 6101; WAN024BJJ_s_at; Start 85; Stop 109
tatgtcgggcagtacggtggggcta

SEQ ID NO: 82752 - DNA, 25 bp, Artificial
  probe
  misc_feature (1)..(25): SEQ ID NO: 6101; WAN024BJJ_s_at; Start 86; Stop 110
atgtcgggcagtacggtggggctaa

SEQ ID NO: 82753 - DNA, 25 bp, Artificial
  probe
  misc_feature (1)..(25): SEQ ID NO: 6101; WAN024BJJ_s_at; Start 29; Stop 53
tcgaagaggcagaagctacccgtta

SEQ ID NO: 82754 - DNA, 25 bp, Artificial
  probe
  misc_feature (1)..(25): SEQ ID NO: 6101; WAN024BJJ_s_at; Start 27; Stop 51
tttcgaagaggcagaagctacccgt

SEQ ID NO: 82755 - DNA, 25 bp, Artificial
  probe
  misc_feature (1)..(25): SEQ ID NO: 6101; WAN024BJJ_s_at; Start 36; Stop 60
ggcagaagctacccgttatacggca

SEQ ID NO: 82756 - DNA, 25 bp, Artificial
  probe
  misc_feature (1)..(25): SEQ ID NO: 6101; WAN024BJJ_s_at; Start 67; Stop 91
cgtgaaagggtaataggctatgtcg

SEQ ID NO: 82757 - DNA, 25 bp, Artificial
  probe
  misc_feature (1)..(25): SEQ ID NO: 6101; WAN024BJJ_s_at; Start 33; Stop 57
agaggcagaagctacccgttatacg

SEQ ID NO: 82758 - DNA, 25 bp, Artificial
  probe
  misc_feature (1)..(25): SEQ ID NO: 6101; WAN024BJJ_s_at; Start 71; Stop 95
aaagggtaataggctatgtcgggca

SEQ ID NO: 82759 - DNA, 25 bp, Artificial
  probe
  misc_feature (1)..(25): SEQ ID NO: 6101; WAN024BJJ_s_at; Start 89; Stop 113
tcgggcagtacggtggggctaagaa

SEQ ID NO: 82760 - DNA, 25 bp, Artificial
  probe
  misc_feature (1)..(25): SEQ ID NO: 6101; WAN024BJJ_s_at; Start 24; Stop 48
gactttcgaagaggcagaagctacc

SEQ ID NO: 82761 - DNA, 25 bp, Artificial
  probe
  misc_feature (1)..(25): SEQ ID NO: 6101; WAN024BJJ_s_at; Start 23; Stop 47
tgactttcgaagaggcagaagctac

SEQ ID NO: 82762 - DNA, 25 bp, Artificial
  probe
  misc_feature (1)..(25): SEQ ID NO: 6101; WAN024BJJ_s_at; Start 80; Stop 104
taggctatgtcgggcagtacggtgg

SEQ ID NO: 82763 - DNA, 25 bp, Artificial
  probe
  misc_feature (1)..(25): SEQ ID NO: 6101; WAN024BJJ_s_at; Start 37; Stop 61
gcagaagctacccgttatacggcat

SEQ ID NO: 82764 - DNA, 25 bp, Artificial
  probe
  misc_feature (1)..(25): SEQ ID NO: 6101; WAN024BJJ_s_at; Start 75; Stop 99
ggtaataggctatgtcgggcagtac

SEQ ID NO: 82765 - DNA, 25 bp, Artificial
  probe
  misc_feature (1)..(25): SEQ ID NO: 6101; WAN024BJJ_s_at; Start 31; Stop 55
gaagaggcagaagctacccgttata

SEQ ID NO: 82766 - DNA, 25 bp, Artificial
  probe
  misc_feature (1)..(25): SEQ ID NO: 6054; WAN024BJK_at; Start 3; Stop 27
gatgaccagtggaatctctgtttca

SEQ ID NO: 82767 - DNA, 25 bp, Artificial
  probe
  misc_feature (1)..(25): SEQ ID NO: 6054; WAN024BJK_at; Start 59; Stop 83
tagaggtcccgtgggctaaactgcg

SEQ ID NO: 82768 - DNA, 25 bp, Artificial
  probe
  misc_feature (1)..(25): SEQ ID NO: 6054; WAN024BJK_at; Start 8; Stop 32
ccagtggaatctctgtttcaatggt

SEQ ID NO: 82769 - DNA, 25 bp, Artificial
  probe
  misc_feature (1)..(25): SEQ ID NO: 6054; WAN024BJK_at; Start 210; Stop 234
ctcgtggtcaccagccatgatatag

SEQ ID NO: 82770 - DNA, 25 bp, Artificial
  probe
  misc_feature (1)..(25): SEQ ID NO: 6054; WAN024BJK_at; Start 99; Stop 123
gataacaggtccatctgcaacaggg

SEQ ID NO: 82771 - DNA, 25 bp, Artificial
  probe
  misc_feature (1)..(25): SEQ ID NO: 6054; WAN024BJK_at; Start 173; Stop 197
gaaagtggattgtttctcctagtcc

SEQ ID NO: 82772 - DNA, 25 bp, Artificial
  probe
  misc_feature (1)..(25): SEQ ID NO: 6054; WAN024BJK_at; Start 137; Stop 161
tacccacttcaattgcagagacacc

SEQ ID NO: 82773 - DNA, 25 bp, Artificial
  probe
  misc_feature (1)..(25): SEQ ID NO: 6054; WAN024BJK_at; Start 83; Stop 107
gcaagccagcttcttcgataacagg

SEQ ID NO: 82774 - DNA, 25 bp, Artificial
  probe
  misc_feature (1)..(25): SEQ ID NO: 6054; WAN024BJK_at; Start 91; Stop 115
gcttcttcgataacaggtccatctg

SEQ ID NO: 82775 - DNA, 25 bp, Artificial
  probe
  misc_feature (1)..(25): SEQ ID NO: 6054; WAN024BJK_at; Start 108; Stop 132
tccatctgcaacagggtctgaaaag

SEQ ID NO: 82776 - DNA, 25 bp, Artificial
  probe
  misc_feature (1)..(25): SEQ ID NO: 6054; WAN024BJK_at; Start 87; Stop 111
gccagcttcttcgataacaggtcca

SEQ ID NO: 82777 - DNA, 25 bp, Artificial
  probe
  misc_feature (1)..(25): SEQ ID NO: 6054; WAN024BJK_at; Start 192; Stop 216
tagtccatccaaacctttctcgtgg

SEQ ID NO: 82778 - DNA, 25 bp, Artificial
  probe
  misc_feature (1)..(25): SEQ ID NO: 6054; WAN024BJK_at; Start 64; Stop 88
gtcccgtgggctaaactgcgcaagc

SEQ ID NO: 82779 - DNA, 25 bp, Artificial
  probe
  misc_feature (1)..(25): SEQ ID NO: 6054; WAN024BJK_at; Start 47; Stop 71
ctaaagcctgggtagaggtcccgtg

SEQ ID NO: 82780 - DNA, 25 bp, Artificial
  probe
  misc_feature (1)..(25): SEQ ID NO: 6054; WAN024BJK_at; Start 141; Stop 165
cacttcaattgcagagacacccaaa

SEQ ID NO: 82781 - DNA, 25 bp, Artificial
  probe
  misc_feature (1)..(25): SEQ ID NO: 6054; WAN024BJK_at; Start 180; Stop 204
gattgtttctcctagtccatccaaa

SEQ ID NO: 82782 - DNA, 25 bp, Artificial
  probe
  misc_feature (1)..(25): SEQ ID NO: 6054; WAN024BJK_at; Start 43; Stop 67
tcaactaaagcctgggtagaggtcc

SEQ ID NO: 82783 - DNA, 25 bp, Artificial
  probe
  misc_feature (1)..(25): SEQ ID NO: 6054; WAN024BJK_at; Start 123; Stop 147
gtctgaaaagggaatacccacttca

SEQ ID NO: 82784 - DNA, 25 bp, Artificial
  probe
  misc_feature (1)..(25): SEQ ID NO: 6054; WAN024BJK_at; Start 17; Stop 41
tctctgtttcaatggttttcaaggt

SEQ ID NO: 82785 - DNA, 25 bp, Artificial
  probe
  misc_feature (1)..(25): SEQ ID NO: 6054; WAN024BJK_at; Start 202; Stop 226
aaacctttctcgtggtcaccagcca

SEQ ID NO: 82786 - DNA, 25 bp, Artificial
  probe
  misc_feature (1)..(25): SEQ ID NO: 6054; WAN024BJK_at; Start 69; Stop 93
gtgggctaaactgcgcaagccagct

SEQ ID NO: 82787 - DNA, 25 bp, Artificial
  probe
  misc_feature (1)..(25): SEQ ID NO: 6054; WAN024BJK_at; Start 156; Stop 180
gacacccaaatcttctagaaagtgg

SEQ ID NO: 82788 - DNA, 25 bp, Artificial
  probe
  misc_feature (1)..(25): SEQ ID NO: 6054; WAN024BJK_at; Start 199; Stop 223
tccaaacctttctcgtggtcaccag

SEQ ID NO: 82789 - DNA, 25 bp, Artificial
  probe
  misc_feature (1)..(25): SEQ ID NO: 6054; WAN024BJK_at; Start 104; Stop 128
caggtccatctgcaacagggtctga

SEQ ID NO: 82790 - DNA, 25 bp, Artificial
  probe
  misc_feature (1)..(25): SEQ ID NO: 6054; WAN024BJK_at; Start 145; Stop 169
tcaattgcagagacacccaaatctt

SEQ ID NO: 82791 - DNA, 25 bp, Artificial
  probe
  misc_feature (1)..(25): SEQ ID NO: 6054; WAN024BJK_at; Start 115; Stop 139
gcaacagggtctgaaaagggaatac

SEQ ID NO: 82792 - DNA, 25 bp, Artificial
  probe
  misc_feature (1)..(25): SEQ ID NO: 6054; WAN024BJK_at; Start 75; Stop 99
taaactgcgcaagccagcttcttcg

SEQ ID NO: 82793 - DNA, 25 bp, Artificial
  probe
  misc_feature (1)..(25): SEQ ID NO: 6054; WAN024BJK_at; Start 25; Stop 49
tcaatggttttcaaggtttcaacta

SEQ ID NO: 82794 - DNA, 25 bp, Artificial
  probe
  misc_feature (1)..(25): SEQ ID NO: 6054; WAN024BJK_at; Start 112; Stop 136
tctgcaacagggtctgaaaagggaa

SEQ ID NO: 82795 - DNA, 25 bp, Artificial
  probe
  misc_feature (1)..(25): SEQ ID NO: 6054; WAN024BJK_at; Start 130; Stop 154
aagggaatacccacttcaattgcag

SEQ ID NO: 82796 - DNA, 25 bp, Artificial
  probe
  misc_feature (1)..(25): SEQ ID NO: 6054; WAN024BJK_at; Start 133; Stop 157
ggaatacccacttcaattgcagaga

SEQ ID NO: 82797 - DNA, 25 bp, Artificial
  probe
  misc_feature (1)..(25): SEQ ID NO: 6054; WAN024BJK_at; Start 101; Stop 125
taacaggtccatctgcaacagggtc

SEQ ID NO: 82798 - DNA, 25 bp, Artificial
  probe
  misc_feature (1)..(25): SEQ ID NO: 6054; WAN024BJK_at; Start 160; Stop 184
cccaaatcttctagaaagtggattg

SEQ ID NO: 82799 - DNA, 25 bp, Artificial
  probe
  misc_feature (1)..(25): SEQ ID NO: 6054; WAN024BJK_at; Start 150; Stop 174
tgcagagacacccaaatcttctaga

SEQ ID NO: 82800 - DNA, 25 bp, Artificial
  probe
  misc_feature (1)..(25): SEQ ID NO: 6234; WAN024BJL_at; Start 248; Stop 272
gttgcatccacaatcaccgtattct

SEQ ID NO: 82801 - DNA, 25 bp, Artificial
  probe
  misc_feature (1)..(25): SEQ ID NO: 6234; WAN024BJL_at; Start 262; Stop 286
caccgtattctcagcactaagatga

SEQ ID NO: 82802 - DNA, 25 bp, Artificial
  probe
  misc_feature (1)..(25): SEQ ID NO: 6234; WAN024BJL_at; Start 259; Stop 283
aatcaccgtattctcagcactaaga

SEQ ID NO: 82803 - DNA, 25 bp, Artificial
  probe
  misc_feature (1)..(25): SEQ ID NO: 6234; WAN024BJL_at; Start 168; Stop 192
gaggttccatagaatgacatttcta

SEQ ID NO: 82804 - DNA, 25 bp, Artificial
  probe
  misc_feature (1)..(25): SEQ ID NO: 6234; WAN024BJL_at; Start 245; Stop 269
tctgttgcatccacaatcaccgtat

SEQ ID NO: 82805 - DNA, 25 bp, Artificial
  probe
  misc_feature (1)..(25): SEQ ID NO: 6234; WAN024BJL_at; Start 166; Stop 190
ttgaggttccatagaatgacatttc

SEQ ID NO: 82806 - DNA, 25 bp, Artificial
  probe
  misc_feature (1)..(25): SEQ ID NO: 6234; WAN024BJL_at; Start 265; Stop 289
cgtattctcagcactaagatgagtt

SEQ ID NO: 82807 - DNA, 25 bp, Artificial
  probe
  misc_feature (1)..(25): SEQ ID NO: 6234; WAN024BJL_at; Start 199; Stop 223
cagaataattggctagttgattttt

SEQ ID NO: 82808 - DNA, 25 bp, Artificial
  probe
  misc_feature (1)..(25): SEQ ID NO: 6234; WAN024BJL_at; Start 193; Stop 217
ttttaccagaataattggctagttg

SEQ ID NO: 82809 - DNA, 25 bp, Artificial
  probe
  misc_feature (1)..(25): SEQ ID NO: 6234; WAN024BJL_at; Start 270; Stop 294
tctcagcactaagatgagtttttga

SEQ ID NO: 82810 - DNA, 25 bp, Artificial
  probe
  misc_feature (1)..(25): SEQ ID NO: 6234; WAN024BJL_at; Start 196; Stop 220
taccagaataattggctagttgatt

SEQ ID NO: 82811 - DNA, 25 bp, Artificial
  probe
  misc_feature (1)..(25): SEQ ID NO: 6234; WAN024BJL_at; Start 178; Stop 202
agaatgacatttctattttaccaga

SEQ ID NO: 82812 - DNA, 25 bp, Artificial
  probe
  misc_feature (1)..(25): SEQ ID NO: 6234; WAN024BJL_at; Start 230; Stop 254
cgatttatttttacctctgttgcat

SEQ ID NO: 82813 - DNA, 25 bp, Artificial
  probe
  misc_feature (1)..(25): SEQ ID NO: 6234; WAN024BJL_at; Start 261; Stop 285
tcaccgtattctcagcactaagatg

SEQ ID NO: 82814 - DNA, 25 bp, Artificial
  probe
  misc_feature (1)..(25): SEQ ID NO: 6234; WAN024BJL_at; Start 258; Stop 282
caatcaccgtattctcagcactaag

SEQ ID NO: 82815 - DNA, 25 bp, Artificial
  probe
  misc_feature (1)..(25): SEQ ID NO: 6234; WAN024BJL_at; Start 264; Stop 288
ccgtattctcagcactaagatgagt

SEQ ID NO: 82816 - DNA, 25 bp, Artificial
  probe
  misc_feature (1)..(25): SEQ ID NO: 6234; WAN024BJL_at; Start 267; Stop 291
tattctcagcactaagatgagtttt

SEQ ID NO: 82817 - DNA, 25 bp, Artificial
  probe
  misc_feature (1)..(25): SEQ ID NO: 6234; WAN024BJL_at; Start 228; Stop 252
gacgatttatttttacctctgttgc

SEQ ID NO: 82818 - DNA, 25 bp, Artificial
  probe
  misc_feature (1)..(25): SEQ ID NO: 6234; WAN024BJL_at; Start 190; Stop 214
ctattttaccagaataattggctag

SEQ ID NO: 82819 - DNA, 25 bp, Artificial
  probe
  misc_feature (1)..(25): SEQ ID NO: 6234; WAN024BJL_at; Start 156; Stop 180
tgacaatcgcttgaggttccataga

SEQ ID NO: 82820 - DNA, 25 bp, Artificial
  probe
  misc_feature (1)..(25): SEQ ID NO: 6234; WAN024BJL_at; Start 238; Stop 262
ttttacctctgttgcatccacaatc

SEQ ID NO: 82821 - DNA, 25 bp, Artificial
  probe
  misc_feature (1)..(25): SEQ ID NO: 6234; WAN024BJL_at; Start 157; Stop 181
gacaatcgcttgaggttccatagaa

SEQ ID NO: 82822 - DNA, 25 bp, Artificial
  probe
  misc_feature (1)..(25): SEQ ID NO: 6234; WAN024BJL_at; Start 162; Stop 186
tcgcttgaggttccatagaatgaca

SEQ ID NO: 82823 - DNA, 25 bp, Artificial
  probe
  misc_feature (1)..(25): SEQ ID NO: 6234; WAN024BJL_at; Start 164; Stop 188
gcttgaggttccatagaatgacatt

SEQ ID NO: 82824 - DNA, 25 bp, Artificial
  probe
  misc_feature (1)..(25): SEQ ID NO: 6234; WAN024BJL_at; Start 256; Stop 280
cacaatcaccgtattctcagcacta

SEQ ID NO: 82825 - DNA, 25 bp, Artificial
  probe
  misc_feature (1)..(25): SEQ ID NO: 6234; WAN024BJL_at; Start 240; Stop 264
ttacctctgttgcatccacaatcac

SEQ ID NO: 82826 - DNA, 25 bp, Artificial
  probe
  misc_feature (1)..(25): SEQ ID NO: 6234; WAN024BJL_at; Start 208; Stop 232
tggctagttgatttttttaggacga

SEQ ID NO: 82827 - DNA, 25 bp, Artificial
  probe
  misc_feature (1)..(25): SEQ ID NO: 6234; WAN024BJL_at; Start 161; Stop 185
atcgcttgaggttccatagaatgac

SEQ ID NO: 82828 - DNA, 25 bp, Artificial
  probe
  misc_feature (1)..(25): SEQ ID NO: 6234; WAN024BJL_at; Start 247; Stop 271
tgttgcatccacaatcaccgtattc

SEQ ID NO: 82829 - DNA, 25 bp, Artificial
  probe
  misc_feature (1)..(25): SEQ ID NO: 6234; WAN024BJL_at; Start 251; Stop 275
gcatccacaatcaccgtattctcag

SEQ ID NO: 82830 - DNA, 25 bp, Artificial
  probe
  misc_feature (1)..(25): SEQ ID NO: 6234; WAN024BJL_at; Start 235; Stop 259
tatttttacctctgttgcatccaca

SEQ ID NO: 82831 - DNA, 25 bp, Artificial
  probe
  misc_feature (1)..(25): SEQ ID NO: 6234; WAN024BJL_at; Start 160; Stop 184
aatcgcttgaggttccatagaatga

SEQ ID NO: 82832 - DNA, 25 bp, Artificial
  probe
  misc_feature (1)..(25): SEQ ID NO: 6234; WAN024BJL_at; Start 163; Stop 187
cgcttgaggttccatagaatgacat

SEQ ID NO: 82833 - DNA, 25 bp, Artificial
  probe
  misc_feature (1)..(25): SEQ ID NO: 6234; WAN024BJL_at; Start 159; Stop 183
caatcgcttgaggttccatagaatg

SEQ ID NO: 82834 - DNA, 25 bp, Artificial
  probe
  misc_feature (1)..(25): SEQ ID NO: 6148; WAN024BJM_s_at; Start 116; Stop 140
gcctgttggtcgtgactgtccaaaa

SEQ ID NO: 82835 - DNA, 25 bp, Artificial
  probe
  misc_feature (1)..(25): SEQ ID NO: 6148; WAN024BJM_s_at; Start 66; Stop 90
ttctatggttgcaatcgctatccag

SEQ ID NO: 82836 - DNA, 25 bp, Artificial
  probe
  misc_feature (1)..(25): SEQ ID NO: 6148; WAN024BJM_s_at; Start 40; Stop 64
agcgaaaaaccaagcgtaatcgcct

SEQ ID NO: 82837 - DNA, 25 bp, Artificial
  probe
  misc_feature (1)..(25): SEQ ID NO: 6148; WAN024BJM_s_at; Start 200; Stop 224
caaaggcgactacgaggaagaaaag

SEQ ID NO: 82838 - DNA, 25 bp, Artificial
  probe
  misc_feature (1)..(25): SEQ ID NO: 6148; WAN024BJM_s_at; Start 75; Stop 99
tgcaatcgctatccagaatgtgaat

SEQ ID NO: 82839 - DNA, 25 bp, Artificial
  probe
  misc_feature (1)..(25): SEQ ID NO: 6148; WAN024BJM_s_at; Start 90; Stop 114
gaatgtgaatttacctcttgggaca

SEQ ID NO: 82840 - DNA, 25 bp, Artificial
  probe
  misc_feature (1)..(25): SEQ ID NO: 6148; WAN024BJM_s_at; Start 93; Stop 117
tgtgaatttacctcttgggacaagc

SEQ ID NO: 82841 - DNA, 25 bp, Artificial
  probe
  misc_feature (1)..(25): SEQ ID NO: 6148; WAN024BJM_s_at; Start 37; Stop 61
ttgagcgaaaaaccaagcgtaatcg

SEQ ID NO: 82842 - DNA, 25 bp, Artificial
  probe
  misc_feature (1)..(25): SEQ ID NO: 6148; WAN024BJM_s_at; Start 182; Stop 206
caagcaggttgtttgtagcaaaggc

SEQ ID NO: 82843 - DNA, 25 bp, Artificial
  probe
  misc_feature (1)..(25): SEQ ID NO: 6148; WAN024BJM_s_at; Start 72; Stop 96
ggttgcaatcgctatccagaatgtg

SEQ ID NO: 82844 - DNA, 25 bp, Artificial
  probe
  misc_feature (1)..(25): SEQ ID NO: 6148; WAN024BJM_s_at; Start 1; Stop 25
gtgttgagtgtccaagctgtcatca

SEQ ID NO: 82845 - DNA, 25 bp, Artificial
  probe
  misc_feature (1)..(25): SEQ ID NO: 6148; WAN024BJM_s_at; Start 125; Stop 149
tcgtgactgtccaaaatgtggcaac

SEQ ID NO: 82846 - DNA, 25 bp, Artificial
  probe
  misc_feature (1)..(25): SEQ ID NO: 6148; WAN024BJM_s_at; Start 96; Stop 120
gaatttacctcttgggacaagcctg

SEQ ID NO: 82847 - DNA, 25 bp, Artificial
  probe
  misc_feature (1)..(25): SEQ ID NO: 6148; WAN024BJM_s_at; Start 197; Stop 221
tagcaaaggcgactacgaggaagaa

SEQ ID NO: 82848 - DNA, 25 bp, Artificial
  probe
  misc_feature (1)..(25): SEQ ID NO: 6148; WAN024BJM_s_at; Start 178; Stop 202
gtggcaagcaggttgtttgtagcaa

SEQ ID NO: 82849 - DNA, 25 bp, Artificial
  probe
  misc_feature (1)..(25): SEQ ID NO: 6148; WAN024BJM_s_at; Start 191; Stop 215
tgtttgtagcaaaggcgactacgag

SEQ ID NO: 82850 - DNA, 25 bp, Artificial
  probe
  misc_feature (1)..(25): SEQ ID NO: 6148; WAN024BJM_s_at; Start 11; Stop 35
tccaagctgtcatcagggacaaatt

SEQ ID NO: 82851 - DNA, 25 bp, Artificial
  probe
  misc_feature (1)..(25): SEQ ID NO: 6148; WAN024BJM_s_at; Start 155; Stop 179
catggagaaaaaagtccgtggtggt

SEQ ID NO: 82852 - DNA, 25 bp, Artificial
  probe
  misc_feature (1)..(25): SEQ ID NO: 6148; WAN024BJM_s_at; Start 202; Stop 226
aaggcgactacgaggaagaaaagat

SEQ ID NO: 82853 - DNA, 25 bp, Artificial
  probe
  misc_feature (1)..(25): SEQ ID NO: 6148; WAN024BJM_s_at; Start 5; Stop 29
tgagtgtccaagctgtcatcaggga

SEQ ID NO: 82854 - DNA, 25 bp, Artificial
  probe
  misc_feature (1)..(25): SEQ ID NO: 6148; WAN024BJM_s_at; Start 113; Stop 137
caagcctgttggtcgtgactgtcca

SEQ ID NO: 82855 - DNA, 25 bp, Artificial
  probe
  misc_feature (1)..(25): SEQ ID NO: 6148; WAN024BJM_s_at; Start 16; Stop 40
gctgtcatcagggacaaattattga

SEQ ID NO: 82856 - DNA, 25 bp, Artificial
  probe
  misc_feature (1)..(25): SEQ ID NO: 6148; WAN024BJM_s_at; Start 103; Stop 127
cctcttgggacaagcctgttggtcg

SEQ ID NO: 82857 - DNA, 25 bp, Artificial
  probe
  misc_feature (1)..(25): SEQ ID NO: 6148; WAN024BJM_s_at; Start 100; Stop 124
ttacctcttgggacaagcctgttgg

SEQ ID NO: 82858 - DNA, 25 bp, Artificial
  probe
  misc_feature (1)..(25): SEQ ID NO: 6148; WAN024BJM_s_at; Start 80; Stop 104
tcgctatccagaatgtgaatttacc

SEQ ID NO: 82859 - DNA, 25 bp, Artificial
  probe
  misc_feature (1)..(25): SEQ ID NO: 6148; WAN024BJM_s_at; Start 129; Stop 153
gactgtccaaaatgtggcaacttcc

SEQ ID NO: 82860 - DNA, 25 bp, Artificial
  probe
  misc_feature (1)..(25): SEQ ID NO: 6148; WAN024BJM_s_at; Start 107; Stop 131
ttgggacaagcctgttggtcgtgac

SEQ ID NO: 82861 - DNA, 25 bp, Artificial
  probe
  misc_feature (1)..(25): SEQ ID NO: 6148; WAN024BJM_s_at; Start 122; Stop 146
tggtcgtgactgtccaaaatgtggc

SEQ ID NO: 82862 - DNA, 25 bp, Artificial
  probe
  misc_feature (1)..(25): SEQ ID NO: 6148; WAN024BJM_s_at; Start 110; Stop 134
ggacaagcctgttggtcgtgactgt

SEQ ID NO: 82863 - DNA, 25 bp, Artificial
  probe
  misc_feature (1)..(25): SEQ ID NO: 6148; WAN024BJM_s_at; Start 31; Stop 55
aaattattgagcgaaaaaccaagcg

SEQ ID NO: 82864 - DNA, 25 bp, Artificial
  probe
  misc_feature (1)..(25): SEQ ID NO: 6148; WAN024BJM_s_at; Start 163; Stop 187
aaaaagtccgtggtggtggcaagca

SEQ ID NO: 82865 - DNA, 25 bp, Artificial
  probe
  misc_feature (1)..(25): SEQ ID NO: 6148; WAN024BJM_s_at; Start 34; Stop 58
ttattgagcgaaaaaccaagcgtaa

SEQ ID NO: 82866 - DNA, 25 bp, Artificial
  probe
  misc_feature (1)..(25): SEQ ID NO: 6148; WAN024BJM_s_at; Start 87; Stop 111
ccagaatgtgaatttacctcttggg

SEQ ID NO: 82867 - DNA, 25 bp, Artificial
  probe
  misc_feature (1)..(25): SEQ ID NO: 6148; WAN024BJM_s_at; Start 21; Stop 45
catcagggacaaattattgagcgaa

SEQ ID NO: 82868 - DNA, 25 bp, Artificial
  probe
  misc_feature (1)..(25): SEQ ID NO: 6233; WAN024BJN_at; Start 211; Stop 235
gaaggcttgggctttttgagcgata

SEQ ID NO: 82869 - DNA, 25 bp, Artificial
  probe
  misc_feature (1)..(25): SEQ ID NO: 6233; WAN024BJN_at; Start 75; Stop 99
cccctgtgatatcttttgctttgaa

SEQ ID NO: 82870 - DNA, 25 bp, Artificial
  probe
  misc_feature (1)..(25): SEQ ID NO: 6233; WAN024BJN_at; Start 115; Stop 139
gctgtcgctcgaaaccaagcggtca

SEQ ID NO: 82871 - DNA, 25 bp, Artificial
  probe
  misc_feature (1)..(25): SEQ ID NO: 6233; WAN024BJN_at; Start 117; Stop 141
tgtcgctcgaaaccaagcggtcatc

SEQ ID NO: 82872 - DNA, 25 bp, Artificial
  probe
  misc_feature (1)..(25): SEQ ID NO: 6233; WAN024BJN_at; Start 48; Stop 72
tgattggccagaagcggaatttagc

SEQ ID NO: 82873 - DNA, 25 bp, Artificial
  probe
  misc_feature (1)..(25): SEQ ID NO: 6233; WAN024BJN_at; Start 99; Stop 123
aggtacctacgtggcggctgtcgct

SEQ ID NO: 82874 - DNA, 25 bp, Artificial
  probe
  misc_feature (1)..(25): SEQ ID NO: 6233; WAN024BJN_at; Start 155; Stop 179
tattctccttctggaacagtaaagc

SEQ ID NO: 82875 - DNA, 25 bp, Artificial
  probe
  misc_feature (1)..(25): SEQ ID NO: 6233; WAN024BJN_at; Start 201; Stop 225
catcaactgtgaaggcttgggcttt

SEQ ID NO: 82876 - DNA, 25 bp, Artificial
  probe
  misc_feature (1)..(25): SEQ ID NO: 6233; WAN024BJN_at; Start 220; Stop 244
ggctttttgagcgatacttctaaag

SEQ ID NO: 82877 - DNA, 25 bp, Artificial
  probe
  misc_feature (1)..(25): SEQ ID NO: 6233; WAN024BJN_at; Start 180; Stop 204
taaagttggtgttgtagttgacatc

SEQ ID NO: 82878 - DNA, 25 bp, Artificial
  probe
  misc_feature (1)..(25): SEQ ID NO: 6233; WAN024BJN_at; Start 150; Stop 174
gaaggtattctccttctggaacagt

SEQ ID NO: 82879 - DNA, 25 bp, Artificial
  probe
  misc_feature (1)..(25): SEQ ID NO: 6233; WAN024BJN_at; Start 204; Stop 228
caactgtgaaggcttgggctttttg

SEQ ID NO: 82880 - DNA, 25 bp, Artificial
  probe
  misc_feature (1)..(25): SEQ ID NO: 6233; WAN024BJN_at; Start 198; Stop 222
tgacatcaactgtgaaggcttgggc

SEQ ID NO: 82881 - DNA, 25 bp, Artificial
  probe
  misc_feature (1)..(25): SEQ ID NO: 6233; WAN024BJN_at; Start 26; Stop 50
tcttaaaatgttccgatacgggtga

SEQ ID NO: 82882 - DNA, 25 bp, Artificial
  probe
  misc_feature (1)..(25): SEQ ID NO: 6233; WAN024BJN_at; Start 105; Stop 129
ctacgtggcggctgtcgctcgaaac

SEQ ID NO: 82883 - DNA, 25 bp, Artificial
  probe
  misc_feature (1)..(25): SEQ ID NO: 6233; WAN024BJN_at; Start 31; Stop 55
aaatgttccgatacgggtgattggc

SEQ ID NO: 82884 - DNA, 25 bp, Artificial
  probe
  misc_feature (1)..(25): SEQ ID NO: 6233; WAN024BJN_at; Start 160; Stop 184
tccttctggaacagtaaagctaaag

SEQ ID NO: 82885 - DNA, 25 bp, Artificial
  probe
  misc_feature (1)..(25): SEQ ID NO: 6233; WAN024BJN_at; Start 125; Stop 149
gaaaccaagcggtcatctccgagga

SEQ ID NO: 82886 - DNA, 25 bp, Artificial
  probe
  misc_feature (1)..(25): SEQ ID NO: 6233; WAN024BJN_at; Start 228; Stop 252
gagcgatacttctaaagaaagttcc

SEQ ID NO: 82887 - DNA, 25 bp, Artificial
  probe
  misc_feature (1)..(25): SEQ ID NO: 6233; WAN024BJN_at; Start 54; Stop 78
gccagaagcggaatttagcttcccc

SEQ ID NO: 82888 - DNA, 25 bp, Artificial
  probe
  misc_feature (1)..(25): SEQ ID NO: 6233; WAN024BJN_at; Start 215; Stop 239
gcttgggctttttgagcgatacttc

SEQ ID NO: 82889 - DNA, 25 bp, Artificial
  probe
  misc_feature (1)..(25): SEQ ID NO: 6233; WAN024BJN_at; Start 69; Stop 93
tagcttcccctgtgatatcttttgc

SEQ ID NO: 82890 - DNA, 25 bp, Artificial
  probe
  misc_feature (1)..(25): SEQ ID NO: 6233; WAN024BJN_at; Start 138; Stop 162
catctccgaggagaaggtattctcc

SEQ ID NO: 82891 - DNA, 25 bp, Artificial
  probe
  misc_feature (1)..(25): SEQ ID NO: 6233; WAN024BJN_at; Start 164; Stop 188
tctggaacagtaaagctaaagttgg

SEQ ID NO: 82892 - DNA, 25 bp, Artificial
  probe
  misc_feature (1)..(25): SEQ ID NO: 6233; WAN024BJN_at; Start 61; Stop 85
gcggaatttagcttcccctgtgata

SEQ ID NO: 82893 - DNA, 25 bp, Artificial
  probe
  misc_feature (1)..(25): SEQ ID NO: 6233; WAN024BJN_at; Start 133; Stop 157
gcggtcatctccgaggagaaggtat

SEQ ID NO: 82894 - DNA, 25 bp, Artificial
  probe
  misc_feature (1)..(25): SEQ ID NO: 6233; WAN024BJN_at; Start 93; Stop 117
ctttgaaggtacctacgtggcggct

SEQ ID NO: 82895 - DNA, 25 bp, Artificial
  probe
  misc_feature (1)..(25): SEQ ID NO: 6233; WAN024BJN_at; Start 38; Stop 62
ccgatacgggtgattggccagaagc

SEQ ID NO: 82896 - DNA, 25 bp, Artificial
  probe
  misc_feature (1)..(25): SEQ ID NO: 6233; WAN024BJN_at; Start 129; Stop 153
ccaagcggtcatctccgaggagaag

SEQ ID NO: 82897 - DNA, 25 bp, Artificial
  probe
  misc_feature (1)..(25): SEQ ID NO: 6233; WAN024BJN_at; Start 95; Stop 119
ttgaaggtacctacgtggcggctgt

SEQ ID NO: 82898 - DNA, 25 bp, Artificial
  probe
  misc_feature (1)..(25): SEQ ID NO: 6233; WAN024BJN_at; Start 171; Stop 195
cagtaaagctaaagttggtgttgta

SEQ ID NO: 82899 - DNA, 25 bp, Artificial
  probe
  misc_feature (1)..(25): SEQ ID NO: 6233; WAN024BJN_at; Start 89; Stop 113
tttgctttgaaggtacctacgtggc

SEQ ID NO: 82900 - DNA, 25 bp, Artificial
  probe
  misc_feature (1)..(25): SEQ ID NO: 6233; WAN024BJN_at; Start 255; Stop 279
tatttccttcaaagcccttgcctga

SEQ ID NO: 82901 - DNA, 25 bp, Artificial
  probe
  misc_feature (1)..(25): SEQ ID NO: 6233; WAN024BJN_at; Start 192; Stop 216
tgtagttgacatcaactgtgaaggc

SEQ ID NO: 82902 - DNA, 25 bp, Artificial
  probe
  misc_feature (1)..(25): SEQ ID NO: 7563; WAN024BJO_at; Start 67; Stop 91
gttgaaacggatatggaactaacta

SEQ ID NO: 82903 - DNA, 25 bp, Artificial
  probe
  misc_feature (1)..(25): SEQ ID NO: 7563; WAN024BJO_at; Start 69; Stop 93
tgaaacggatatggaactaactaat

SEQ ID NO: 82904 - DNA, 25 bp, Artificial
  probe
  misc_feature (1)..(25): SEQ ID NO: 7563; WAN024BJO_at; Start 66; Stop 90
tgttgaaacggatatggaactaact

SEQ ID NO: 82905 - DNA, 25 bp, Artificial
  probe
  misc_feature (1)..(25): SEQ ID NO: 7563; WAN024BJO_at; Start 68; Stop 92
ttgaaacggatatggaactaactaa

SEQ ID NO: 82906 - DNA, 25 bp, Artificial
  probe
  misc_feature (1)..(25): SEQ ID NO: 6527; WAN024BJP_at; Start 2; Stop 26
tgacactcgctaaactctgcgaaga

SEQ ID NO: 82907 - DNA, 25 bp, Artificial
  probe
  misc_feature (1)..(25): SEQ ID NO: 6527; WAN024BJP_at; Start 31; Stop 55
caagtagaactttgtctcttcgacg

SEQ ID NO: 82908 - DNA, 25 bp, Artificial
  probe
  misc_feature (1)..(25): SEQ ID NO: 6527; WAN024BJP_at; Start 217; Stop 241
aacgaagctgataggaatatgatcc

SEQ ID NO: 82909 - DNA, 25 bp, Artificial
  probe
  misc_feature (1)..(25): SEQ ID NO: 6527; WAN024BJP_at; Start 263; Stop 287
tagaaaacttagacgaccccacaga

SEQ ID NO: 82910 - DNA, 25 bp, Artificial
  probe
  misc_feature (1)..(25): SEQ ID NO: 6527; WAN024BJP_at; Start 256; Stop 280
gacgctctagaaaacttagacgacc

SEQ ID NO: 82911 - DNA, 25 bp, Artificial
  probe
  misc_feature (1)..(25): SEQ ID NO: 6527; WAN024BJP_at; Start 309; Stop 333
gtcttactacaatctaaaaaccatg

SEQ ID NO: 82912 - DNA, 25 bp, Artificial
  probe
  misc_feature (1)..(25): SEQ ID NO: 6527; WAN024BJP_at; Start 89; Stop 113
cagacacaaacgtgctcgctattga

SEQ ID NO: 82913 - DNA, 25 bp, Artificial
  probe
  misc_feature (1)..(25): SEQ ID NO: 6527; WAN024BJP_at; Start 167; Stop 191
acaaagaccacacacgctcagagca

SEQ ID NO: 82914 - DNA, 25 bp, Artificial
  probe
  misc_feature (1)..(25): SEQ ID NO: 6527; WAN024BJP_at; Start 152; Stop 176
tacacgaacttggacacaaagacca

SEQ ID NO: 82915 - DNA, 25 bp, Artificial
  probe
  misc_feature (1)..(25): SEQ ID NO: 6527; WAN024BJP_at; Start 52; Stop 76
gacggttcaaactggcacaatagcg

SEQ ID NO: 82916 - DNA, 25 bp, Artificial
  probe
  misc_feature (1)..(25): SEQ ID NO: 6527; WAN024BJP_at; Start 55; Stop 79
ggttcaaactggcacaatagcggtt

SEQ ID NO: 82917 - DNA, 25 bp, Artificial
  probe
  misc_feature (1)..(25): SEQ ID NO: 6527; WAN024BJP_at; Start 10; Stop 34
gctaaactctgcgaagaatatcaag

SEQ ID NO: 82918 - DNA, 25 bp, Artificial
  probe
  misc_feature (1)..(25): SEQ ID NO: 6527; WAN024BJP_at; Start 208; Stop 232
cgctgtgaaaacgaagctgatagga

SEQ ID NO: 82919 - DNA, 25 bp, Artificial
  probe
  misc_feature (1)..(25): SEQ ID NO: 6527; WAN024BJP_at; Start 143; Stop 167
aagtcgccctacacgaacttggaca

SEQ ID NO: 82920 - DNA, 25 bp, Artificial
  probe
  misc_feature (1)..(25): SEQ ID NO: 6527; WAN024BJP_at; Start 82; Stop 106
tacaatccagacacaaacgtgctcg

SEQ ID NO: 82921 - DNA, 25 bp, Artificial
  probe
  misc_feature (1)..(25): SEQ ID NO: 6527; WAN024BJP_at; Start 108; Stop 132
tattgaccacaacttgactcctgaa

SEQ ID NO: 82922 - DNA, 25 bp, Artificial
  probe
  misc_feature (1)..(25): SEQ ID NO: 6527; WAN024BJP_at; Start 236; Stop 260
tgatccatcatctcgtaaaagacgc

SEQ ID NO: 82923 - DNA, 25 bp, Artificial
  probe
  misc_feature (1)..(25): SEQ ID NO: 6527; WAN024BJP_at; Start 348; Stop 372
ggttaaagaagagtatttagcatta

SEQ ID NO: 82924 - DNA, 25 bp, Artificial
  probe
  misc_feature (1)..(25): SEQ ID NO: 6527; WAN024BJP_at; Start 201; Stop 225
ccgtctacgctgtgaaaacgaagct

SEQ ID NO: 82925 - DNA, 25 bp, Artificial
  probe
  misc_feature (1)..(25): SEQ ID NO: 6527; WAN024BJP_at; Start 61; Stop 85
aactggcacaatagcggtttctaca

SEQ ID NO: 82926 - DNA, 25 bp, Artificial
  probe
  misc_feature (1)..(25): SEQ ID NO: 6527; WAN024BJP_at; Start 292; Stop 316
gattacctcaaattcatgtcttact

SEQ ID NO: 82927 - DNA, 25 bp, Artificial
  probe
  misc_feature (1)..(25): SEQ ID NO: 6527; WAN024BJP_at; Start 243; Stop 267
tcatctcgtaaaagacgctctagaa

SEQ ID NO: 82928 - DNA, 25 bp, Artificial
  probe
  misc_feature (1)..(25): SEQ ID NO: 6527; WAN024BJP_at; Start 161; Stop 185
ttggacacaaagaccacacacgctc

SEQ ID NO: 82929 - DNA, 25 bp, Artificial
  probe
  misc_feature (1)..(25): SEQ ID NO: 6527; WAN024BJP_at; Start 17; Stop 41
tctgcgaagaatatcaagtagaact

SEQ ID NO: 82930 - DNA, 25 bp, Artificial
  probe
  misc_feature (1)..(25): SEQ ID NO: 6527; WAN024BJP_at; Start 316; Stop 340
tacaatctaaaaaccatgacaaatg

SEQ ID NO: 82931 - DNA, 25 bp, Artificial
  probe
  misc_feature (1)..(25): SEQ ID NO: 6527; WAN024BJP_at; Start 129; Stop 153
tgaacaacaaatccaagtcgcccta

SEQ ID NO: 82932 - DNA, 25 bp, Artificial
  probe
  misc_feature (1)..(25): SEQ ID NO: 6527; WAN024BJP_at; Start 69; Stop 93
caatagcggtttctacaatccagac

SEQ ID NO: 82933 - DNA, 25 bp, Artificial
  probe
  misc_feature (1)..(25): SEQ ID NO: 6527; WAN024BJP_at; Start 277; Stop 301
gaccccacagagtttgattacctca

SEQ ID NO: 82934 - DNA, 25 bp, Artificial
  probe
  misc_feature (1)..(25): SEQ ID NO: 6527; WAN024BJP_at; Start 95; Stop 119
caaacgtgctcgctattgaccacaa

SEQ ID NO: 82935 - DNA, 25 bp, Artificial
  probe
  misc_feature (1)..(25): SEQ ID NO: 6527; WAN024BJP_at; Start 122; Stop 146
tgactcctgaacaacaaatccaagt

SEQ ID NO: 82936 - DNA, 25 bp, Artificial
  probe
  misc_feature (1)..(25): SEQ ID NO: 6527; WAN024BJP_at; Start 44; Stop 68
gtctcttcgacggttcaaactggca

SEQ ID NO: 82937 - DNA, 25 bp, Artificial
  probe
  misc_feature (1)..(25): SEQ ID NO: 6527; WAN024BJP_at; Start 270; Stop 294
cttagacgaccccacagagtttgat

SEQ ID NO: 82938 - DNA, 25 bp, Artificial
  probe
  misc_feature (1)..(25): SEQ ID NO: 6527; WAN024BJP_at; Start 330; Stop 354
catgacaaatgaaatcatggttaaa

SEQ ID NO: 82939 - DNA, 25 bp, Artificial
  probe
  misc_feature (1)..(25): SEQ ID NO: 6527; WAN024BJP_at; Start 193; Stop 217
cagaacgcccgtctacgctgtgaaa

SEQ ID NO: 82940 - DNA, 25 bp, Artificial
  probe
  misc_feature (1)..(25): SEQ ID NO: 6985; WAN024BJQ_at; Start 59; Stop 83
gggatatcttgcgtgaacttagcga

SEQ ID NO: 82941 - DNA, 25 bp, Artificial
  probe
  misc_feature (1)..(25): SEQ ID NO: 6985; WAN024BJQ_at; Start 116; Stop 140
cagccagatcttattgcgcatgtta

SEQ ID NO: 82942 - DNA, 25 bp, Artificial
  probe
  misc_feature (1)..(25): SEQ ID NO: 6985; WAN024BJQ_at; Start 171; Stop 195
tactatcaccacagagtgtcctttc

SEQ ID NO: 82943 - DNA, 25 bp, Artificial
  probe
  misc_feature (1)..(25): SEQ ID NO: 6985; WAN024BJQ_at; Start 142; Stop 166
tcaggagagcattcttgtggtcgtg

SEQ ID NO: 82944 - DNA, 25 bp, Artificial
  probe
  misc_feature (1)..(25): SEQ ID NO: 6985; WAN024BJQ_at; Start 109; Stop 133
ggcggaacagccagatcttattgcg

SEQ ID NO: 82945 - DNA, 25 bp, Artificial
  probe
  misc_feature (1)..(25): SEQ ID NO: 6985; WAN024BJQ_at; Start 74; Stop 98
aacttagcgatagcgagatggatca

SEQ ID NO: 82946 - DNA, 25 bp, Artificial
  probe
  misc_feature (1)..(25): SEQ ID NO: 6985; WAN024BJQ_at; Start 157; Stop 181
tgtggtcgtggttgtactatcacca

SEQ ID NO: 82947 - DNA, 25 bp, Artificial
  probe
  misc_feature (1)..(25): SEQ ID NO: 6985; WAN024BJQ_at; Start 127; Stop 151
tattgcgcatgttattcaggagagc

SEQ ID NO: 82948 - DNA, 25 bp, Artificial
  probe
  misc_feature (1)..(25): SEQ ID NO: 6985; WAN024BJQ_at; Start 32; Stop 56
cactaagtacagaaggtaatccagc

SEQ ID NO: 82949 - DNA, 25 bp, Artificial
  probe
  misc_feature (1)..(25): SEQ ID NO: 6985; WAN024BJQ_at; Start 177; Stop 201
caccacagagtgtcctttcttaaca

SEQ ID NO: 82950 - DNA, 25 bp, Artificial
  probe
  misc_feature (1)..(25): SEQ ID NO: 6985; WAN024BJQ_at; Start 68; Stop 92
tgcgtgaacttagcgatagcgagat

SEQ ID NO: 82951 - DNA, 25 bp, Artificial
  probe
  misc_feature (1)..(25): SEQ ID NO: 6985; WAN024BJQ_at; Start 84; Stop 108
tagcgagatggatcaagctatggct

SEQ ID NO: 82952 - DNA, 25 bp, Artificial
  probe
  misc_feature (1)..(25): SEQ ID NO: 6985; WAN024BJQ_at; Start 2; Stop 26
tgtctgattggaaaaaacctattta

SEQ ID NO: 82953 - DNA, 25 bp, Artificial
  probe
  misc_feature (1)..(25): SEQ ID NO: 6985; WAN024BJQ_at; Start 139; Stop 163
tattcaggagagcattcttgtggtc

SEQ ID NO: 82954 - DNA, 25 bp, Artificial
  probe
  misc_feature (1)..(25): SEQ ID NO: 6985; WAN024BJQ_at; Start 96; Stop 120
tcaagctatggctggcggaacagcc

SEQ ID NO: 82955 - DNA, 25 bp, Artificial
  probe
  misc_feature (1)..(25): SEQ ID NO: 6985; WAN024BJQ_at; Start 181; Stop 205
acagagtgtcctttcttaacattca

SEQ ID NO: 82956 - DNA, 25 bp, Artificial
  probe
  misc_feature (1)..(25): SEQ ID NO: 6985; WAN024BJQ_at; Start 154; Stop 178
tcttgtggtcgtggttgtactatca

SEQ ID NO: 82957 - DNA, 25 bp, Artificial
  probe
  misc_feature (1)..(25): SEQ ID NO: 6985; WAN024BJQ_at; Start 70; Stop 94
cgtgaacttagcgatagcgagatgg

SEQ ID NO: 82958 - DNA, 25 bp, Artificial
  probe
  misc_feature (1)..(25): SEQ ID NO: 6985; WAN024BJQ_at; Start 92; Stop 116
tggatcaagctatggctggcggaac

SEQ ID NO: 82959 - DNA, 25 bp, Artificial
  probe
  misc_feature (1)..(25): SEQ ID NO: 6985; WAN024BJQ_at; Start 36; Stop 60
aagtacagaaggtaatccagctggg

SEQ ID NO: 82960 - DNA, 25 bp, Artificial
  probe
  misc_feature (1)..(25): SEQ ID NO: 6985; WAN024BJQ_at; Start 65; Stop 89
tcttgcgtgaacttagcgatagcga

SEQ ID NO: 82961 - DNA, 25 bp, Artificial
  probe
  misc_feature (1)..(25): SEQ ID NO: 6985; WAN024BJQ_at; Start 77; Stop 101
ttagcgatagcgagatggatcaagc

SEQ ID NO: 82962 - DNA, 25 bp, Artificial
  probe
  misc_feature (1)..(25): SEQ ID NO: 6985; WAN024BJQ_at; Start 25; Stop 49
tacgaatcactaagtacagaaggta

SEQ ID NO: 82963 - DNA, 25 bp, Artificial
  probe
  misc_feature (1)..(25): SEQ ID NO: 6985; WAN024BJQ_at; Start 131; Stop 155
gcgcatgttattcaggagagcattc

SEQ ID NO: 82964 - DNA, 25 bp, Artificial
  probe
  misc_feature (1)..(25): SEQ ID NO: 6985; WAN024BJQ_at; Start 113; Stop 137
gaacagccagatcttattgcgcatg

SEQ ID NO: 82965 - DNA, 25 bp, Artificial
  probe
  misc_feature (1)..(25): SEQ ID NO: 6985; WAN024BJQ_at; Start 166; Stop 190
ggttgtactatcaccacagagtgtc

SEQ ID NO: 82966 - DNA, 25 bp, Artificial
  probe
  misc_feature (1)..(25): SEQ ID NO: 6985; WAN024BJQ_at; Start 19; Stop 43
cctatttacgaatcactaagtacag

SEQ ID NO: 82967 - DNA, 25 bp, Artificial
  probe
  misc_feature (1)..(25): SEQ ID NO: 6985; WAN024BJQ_at; Start 151; Stop 175
cattcttgtggtcgtggttgtacta

SEQ ID NO: 82968 - DNA, 25 bp, Artificial
  probe
  misc_feature (1)..(25): SEQ ID NO: 6985; WAN024BJQ_at; Start 134; Stop 158
catgttattcaggagagcattcttg

SEQ ID NO: 82969 - DNA, 25 bp, Artificial
  probe
  misc_feature (1)..(25): SEQ ID NO: 6985; WAN024BJQ_at; Start 102; Stop 126
tatggctggcggaacagccagatct

SEQ ID NO: 82970 - DNA, 25 bp, Artificial
  probe
  misc_feature (1)..(25): SEQ ID NO: 6985; WAN024BJQ_at; Start 186; Stop 210
gtgtcctttcttaacattcatttgt

SEQ ID NO: 82971 - DNA, 25 bp, Artificial
  probe
  misc_feature (1)..(25): SEQ ID NO: 6985; WAN024BJQ_at; Start 122; Stop 146
gatcttattgcgcatgttattcagg

SEQ ID NO: 82972 - DNA, 25 bp, Artificial
  probe
  misc_feature (1)..(25): SEQ ID NO: 6985; WAN024BJQ_at; Start 87; Stop 111
cgagatggatcaagctatggctggc

SEQ ID NO: 82973 - DNA, 25 bp, Artificial
  probe
  misc_feature (1)..(25): SEQ ID NO: 6985; WAN024BJQ_at; Start 169; Stop 193
tgtactatcaccacagagtgtcctt

SEQ ID NO: 82974 - DNA, 25 bp, Artificial
  probe
  misc_feature (1)..(25): SEQ ID NO: 6967; WAN024BJR_at; Start 195; Stop 219
tcacgataagaatgtcgttgcaggc

SEQ ID NO: 82975 - DNA, 25 bp, Artificial
  probe
  misc_feature (1)..(25): SEQ ID NO: 6967; WAN024BJR_at; Start 66; Stop 90
taccagcaatcgaacagctttagca

SEQ ID NO: 82976 - DNA, 25 bp, Artificial
  probe
  misc_feature (1)..(25): SEQ ID NO: 6967; WAN024BJR_at; Start 124; Stop 148
catgtagccatactcattgcctgcg

SEQ ID NO: 82977 - DNA, 25 bp, Artificial
  probe
  misc_feature (1)..(25): SEQ ID NO: 6967; WAN024BJR_at; Start 10; Stop 34
tgcttcataaaatcctcctttccaa

SEQ ID NO: 82978 - DNA, 25 bp, Artificial
  probe
  misc_feature (1)..(25): SEQ ID NO: 6967; WAN024BJR_at; Start 118; Stop 142
ggttctcatgtagccatactcattg

SEQ ID NO: 82979 - DNA, 25 bp, Artificial
  probe
  misc_feature (1)..(25): SEQ ID NO: 6967; WAN024BJR_at; Start 161; Stop 185
cgctcggactattgactgtatggga

SEQ ID NO: 82980 - DNA, 25 bp, Artificial
  probe
  misc_feature (1)..(25): SEQ ID NO: 6967; WAN024BJR_at; Start 85; Stop 109
ttagcaaagctcacgggagttccac

SEQ ID NO: 82981 - DNA, 25 bp, Artificial
  probe
  misc_feature (1)..(25): SEQ ID NO: 6967; WAN024BJR_at; Start 23; Stop 47
cctcctttccaaatcacttatttgg

SEQ ID NO: 82982 - DNA, 25 bp, Artificial
  probe
  misc_feature (1)..(25): SEQ ID NO: 6967; WAN024BJR_at; Start 174; Stop 198
gactgtatgggagtatcattatcac

SEQ ID NO: 82983 - DNA, 25 bp, Artificial
  probe
  misc_feature (1)..(25): SEQ ID NO: 6967; WAN024BJR_at; Start 159; Stop 183
cacgctcggactattgactgtatgg

SEQ ID NO: 82984 - DNA, 25 bp, Artificial
  probe
  misc_feature (1)..(25): SEQ ID NO: 6967; WAN024BJR_at; Start 103; Stop 127
gttccacccctgcatggttctcatg

SEQ ID NO: 82985 - DNA, 25 bp, Artificial
  probe
  misc_feature (1)..(25): SEQ ID NO: 6967; WAN024BJR_at; Start 69; Stop 93
cagcaatcgaacagctttagcaaag

SEQ ID NO: 82986 - DNA, 25 bp, Artificial
  probe
  misc_feature (1)..(25): SEQ ID NO: 6967; WAN024BJR_at; Start 111; Stop 135
cctgcatggttctcatgtagccata

SEQ ID NO: 82987 - DNA, 25 bp, Artificial
  probe
  misc_feature (1)..(25): SEQ ID NO: 6967; WAN024BJR_at; Start 181; Stop 205
tgggagtatcattatcacgataaga

SEQ ID NO: 82988 - DNA, 25 bp, Artificial
  probe
  misc_feature (1)..(25): SEQ ID NO: 6967; WAN024BJR_at; Start 2; Stop 26
tgtcagtctgcttcataaaatcctc

SEQ ID NO: 82989 - DNA, 25 bp, Artificial
  probe
  misc_feature (1)..(25): SEQ ID NO: 6967; WAN024BJR_at; Start 90; Stop 114
aaagctcacgggagttccacccctg

SEQ ID NO: 82990 - DNA, 25 bp, Artificial
  probe
  misc_feature (1)..(25): SEQ ID NO: 6967; WAN024BJR_at; Start 128; Stop 152
tagccatactcattgcctgcgacgg

SEQ ID NO: 82991 - DNA, 25 bp, Artificial
  probe
  misc_feature (1)..(25): SEQ ID NO: 6967; WAN024BJR_at; Start 82; Stop 106
gctttagcaaagctcacgggagttc

SEQ ID NO: 82992 - DNA, 25 bp, Artificial
  probe
  misc_feature (1)..(25): SEQ ID NO: 6967; WAN024BJR_at; Start 148; Stop 172
gacggttttatcacgctcggactat

SEQ ID NO: 82993 - DNA, 25 bp, Artificial
  probe
  misc_feature (1)..(25): SEQ ID NO: 6967; WAN024BJR_at; Start 204; Stop 228
gaatgtcgttgcaggcaatcctgct

SEQ ID NO: 82994 - DNA, 25 bp, Artificial
  probe
  misc_feature (1)..(25): SEQ ID NO: 6967; WAN024BJR_at; Start 37; Stop 61
cacttatttggatttcataaaagtt

SEQ ID NO: 82995 - DNA, 25 bp, Artificial
  probe
  misc_feature (1)..(25): SEQ ID NO: 6967; WAN024BJR_at; Start 167; Stop 191
gactattgactgtatgggagtatca

SEQ ID NO: 82996 - DNA, 25 bp, Artificial
  probe
  misc_feature (1)..(25): SEQ ID NO: 6967; WAN024BJR_at; Start 61; Stop 85
tgttttaccagcaatcgaacagctt

SEQ ID NO: 82997 - DNA, 25 bp, Artificial
  probe
  misc_feature (1)..(25): SEQ ID NO: 6967; WAN024BJR_at; Start 57; Stop 81
aagttgttttaccagcaatcgaaca

SEQ ID NO: 82998 - DNA, 25 bp, Artificial
  probe
  misc_feature (1)..(25): SEQ ID NO: 6967; WAN024BJR_at; Start 213; Stop 237
tgcaggcaatcctgctaaagattgc

SEQ ID NO: 82999 - DNA, 25 bp, Artificial
  probe
  misc_feature (1)..(25): SEQ ID NO: 6967; WAN024BJR_at; Start 142; Stop 166
gcctgcgacggttttatcacgctcg

SEQ ID NO: 83000 - DNA, 25 bp, Artificial
  probe
  misc_feature (1)..(25): SEQ ID NO: 6967; WAN024BJR_at; Start 220; Stop 244
aatcctgctaaagattgcttctcgg

SEQ ID NO: 83001 - DNA, 25 bp, Artificial
  probe
  misc_feature (1)..(25): SEQ ID NO: 6967; WAN024BJR_at; Start 97; Stop 121
acgggagttccacccctgcatggtt

SEQ ID NO: 83002 - DNA, 25 bp, Artificial
  probe
  misc_feature (1)..(25): SEQ ID NO: 6967; WAN024BJR_at; Start 138; Stop 162
cattgcctgcgacggttttatcacg

SEQ ID NO: 83003 - DNA, 25 bp, Artificial
  probe
  misc_feature (1)..(25): SEQ ID NO: 6967; WAN024BJR_at; Start 225; Stop 249
tgctaaagattgcttctcggatcac

SEQ ID NO: 83004 - DNA, 25 bp, Artificial
  probe
  misc_feature (1)..(25): SEQ ID NO: 6967; WAN024BJR_at; Start 200; Stop 224
ataagaatgtcgttgcaggcaatcc

SEQ ID NO: 83005 - DNA, 25 bp, Artificial
  probe
  misc_feature (1)..(25): SEQ ID NO: 6967; WAN024BJR_at; Start 132; Stop 156
catactcattgcctgcgacggtttt

SEQ ID NO: 83006 - DNA, 25 bp, Artificial
  probe
  misc_feature (1)..(25): SEQ ID NO: 6967; WAN024BJR_at; Start 151; Stop 175
ggttttatcacgctcggactattga

SEQ ID NO: 83007 - DNA, 25 bp, Artificial
  probe
  misc_feature (1)..(25): SEQ ID NO: 6967; WAN024BJR_at; Start 77; Stop 101
gaacagctttagcaaagctcacggg

SEQ ID NO: 83008 - DNA, 25 bp, Artificial
  probe
  misc_feature (1)..(25): SEQ ID NO: 7055; WAN024BJS_at; Start 90; Stop 114
cctctattgtccgaaatgcagacaa

SEQ ID NO: 83009 - DNA, 25 bp, Artificial
  probe
  misc_feature (1)..(25): SEQ ID NO: 7055; WAN024BJS_at; Start 100; Stop 124
ccgaaatgcagacaagaaaatttaa

SEQ ID NO: 83010 - DNA, 25 bp, Artificial
  probe
  misc_feature (1)..(25): SEQ ID NO: 7055; WAN024BJS_at; Start 12; Stop 36
caagtggatattgtgtcctgtatgt

SEQ ID NO: 83011 - DNA, 25 bp, Artificial
  probe
  misc_feature (1)..(25): SEQ ID NO: 7055; WAN024BJS_at; Start 50; Stop 74
gattaaagataagggaagatactga

SEQ ID NO: 83012 - DNA, 25 bp, Artificial
  probe
  misc_feature (1)..(25): SEQ ID NO: 7055; WAN024BJS_at; Start 152; Stop 176
tgattacagagccagacgcaaagac

SEQ ID NO: 83013 - DNA, 25 bp, Artificial
  probe
  misc_feature (1)..(25): SEQ ID NO: 7055; WAN024BJS_at; Start 53; Stop 77
taaagataagggaagatactgaatt

SEQ ID NO: 83014 - DNA, 25 bp, Artificial
  probe
  misc_feature (1)..(25): SEQ ID NO: 7055; WAN024BJS_at; Start 92; Stop 116
tctattgtccgaaatgcagacaaga

SEQ ID NO: 83015 - DNA, 25 bp, Artificial
  probe
  misc_feature (1)..(25): SEQ ID NO: 7055; WAN024BJS_at; Start 28; Stop 52
cctgtatgtggaaataaaacacgat

SEQ ID NO: 83016 - DNA, 25 bp, Artificial
  probe
  misc_feature (1)..(25): SEQ ID NO: 7055; WAN024BJS_at; Start 150; Stop 174
tgtgattacagagccagacgcaaag

SEQ ID NO: 83017 - DNA, 25 bp, Artificial
  probe
  misc_feature (1)..(25): SEQ ID NO: 7055; WAN024BJS_at; Start 23; Stop 47
tgtgtcctgtatgtggaaataaaac

SEQ ID NO: 83018 - DNA, 25 bp, Artificial
  probe
  misc_feature (1)..(25): SEQ ID NO: 7055; WAN024BJS_at; Start 8; Stop 32
actacaagtggatattgtgtcctgt

SEQ ID NO: 83019 - DNA, 25 bp, Artificial
  probe
  misc_feature (1)..(25): SEQ ID NO: 7055; WAN024BJS_at; Start 156; Stop 180
tacagagccagacgcaaagacgcag

SEQ ID NO: 83020 - DNA, 25 bp, Artificial
  probe
  misc_feature (1)..(25): SEQ ID NO: 7055; WAN024BJS_at; Start 126; Stop 150
tgaaataaagcagttcaaagtaact

SEQ ID NO: 83021 - DNA, 25 bp, Artificial
  probe
  misc_feature (1)..(25): SEQ ID NO: 7055; WAN024BJS_at; Start 154; Stop 178
attacagagccagacgcaaagacgc

SEQ ID NO: 83022 - DNA, 25 bp, Artificial
  probe
  misc_feature (1)..(25): SEQ ID NO: 7055; WAN024BJS_at; Start 159; Stop 183
agagccagacgcaaagacgcagagc

SEQ ID NO: 83023 - DNA, 25 bp, Artificial
  probe
  misc_feature (1)..(25): SEQ ID NO: 7055; WAN024BJS_at; Start 140; Stop 164
tcaaagtaactgtgattacagagcc

SEQ ID NO: 83024 - DNA, 25 bp, Artificial
  probe
  misc_feature (1)..(25): SEQ ID NO: 7055; WAN024BJS_at; Start 57; Stop 81
gataagggaagatactgaattaaaa

SEQ ID NO: 83025 - DNA, 25 bp, Artificial
  probe
  misc_feature (1)..(25): SEQ ID NO: 7055; WAN024BJS_at; Start 17; Stop 41
ggatattgtgtcctgtatgtggaaa

SEQ ID NO: 83026 - DNA, 25 bp, Artificial
  probe
  misc_feature (1)..(25): SEQ ID NO: 7055; WAN024BJS_at; Start 148; Stop 172
actgtgattacagagccagacgcaa

SEQ ID NO: 83027 - DNA, 25 bp, Artificial
  probe
  misc_feature (1)..(25): SEQ ID NO: 7055; WAN024BJS_at; Start 131; Stop 155
taaagcagttcaaagtaactgtgat

SEQ ID NO: 83028 - DNA, 25 bp, Artificial
  probe
  misc_feature (1)..(25): SEQ ID NO: 7055; WAN024BJS_at; Start 155; Stop 179
ttacagagccagacgcaaagacgca

SEQ ID NO: 83029 - DNA, 25 bp, Artificial
  probe
  misc_feature (1)..(25): SEQ ID NO: 7055; WAN024BJS_at; Start 88; Stop 112
cccctctattgtccgaaatgcagac

SEQ ID NO: 83030 - DNA, 25 bp, Artificial
  probe
  misc_feature (1)..(25): SEQ ID NO: 7055; WAN024BJS_at; Start 47; Stop 71
cacgattaaagataagggaagatac

SEQ ID NO: 83031 - DNA, 25 bp, Artificial
  probe
  misc_feature (1)..(25): SEQ ID NO: 7055; WAN024BJS_at; Start 146; Stop 170
taactgtgattacagagccagacgc

SEQ ID NO: 83032 - DNA, 25 bp, Artificial
  probe
  misc_feature (1)..(25): SEQ ID NO: 7055; WAN024BJS_at; Start 5; Stop 29
taaactacaagtggatattgtgtcc

SEQ ID NO: 83033 - DNA, 25 bp, Artificial
  probe
  misc_feature (1)..(25): SEQ ID NO: 7055; WAN024BJS_at; Start 34; Stop 58
tgtggaaataaaacacgattaaaga

SEQ ID NO: 83034 - DNA, 25 bp, Artificial
  probe
  misc_feature (1)..(25): SEQ ID NO: 7055; WAN024BJS_at; Start 106; Stop 130
tgcagacaagaaaatttaattgaaa

SEQ ID NO: 83035 - DNA, 25 bp, Artificial
  probe
  misc_feature (1)..(25): SEQ ID NO: 7055; WAN024BJS_at; Start 141; Stop 165
caaagtaactgtgattacagagcca

SEQ ID NO: 83036 - DNA, 25 bp, Artificial
  probe
  misc_feature (1)..(25): SEQ ID NO: 7055; WAN024BJS_at; Start 94; Stop 118
tattgtccgaaatgcagacaagaaa

SEQ ID NO: 83037 - DNA, 25 bp, Artificial
  probe
  misc_feature (1)..(25): SEQ ID NO: 7055; WAN024BJS_at; Start 162; Stop 186
gccagacgcaaagacgcagagccga

SEQ ID NO: 83038 - DNA, 25 bp, Artificial
  probe
  misc_feature (1)..(25): SEQ ID NO: 7055; WAN024BJS_at; Start 97; Stop 121
tgtccgaaatgcagacaagaaaatt

SEQ ID NO: 83039 - DNA, 25 bp, Artificial
  probe
  misc_feature (1)..(25): SEQ ID NO: 7055; WAN024BJS_at; Start 153; Stop 177
gattacagagccagacgcaaagacg

SEQ ID NO: 83040 - DNA, 25 bp, Artificial
  probe
  misc_feature (1)..(25): SEQ ID NO: 7055; WAN024BJS_at; Start 26; Stop 50
gtcctgtatgtggaaataaaacacg

SEQ ID NO: 83041 - DNA, 25 bp, Artificial
  probe
  misc_feature (1)..(25): SEQ ID NO: 7055; WAN024BJS_at; Start 143; Stop 167
aagtaactgtgattacagagccaga

SEQ ID NO: 83042 - DNA, 25 bp, Artificial
  probe
  misc_feature (1)..(25): SEQ ID NO: 6279; WAN024BJT_at; Start 149; Stop 173
aatcgacactgaatttgctcaaatt

SEQ ID NO: 83043 - DNA, 25 bp, Artificial
  probe
  misc_feature (1)..(25): SEQ ID NO: 6279; WAN024BJT_at; Start 87; Stop 111
gttaggaactataaaaaatcatgaa

SEQ ID NO: 83044 - DNA, 25 bp, Artificial
  probe
  misc_feature (1)..(25): SEQ ID NO: 6279; WAN024BJT_at; Start 153; Stop 177
gacactgaatttgctcaaatttttg

SEQ ID NO: 83045 - DNA, 25 bp, Artificial
  probe
  misc_feature (1)..(25): SEQ ID NO: 6279; WAN024BJT_at; Start 141; Stop 165
tcttaaaaaatcgacactgaatttg

SEQ ID NO: 83046 - DNA, 25 bp, Artificial
  probe
  misc_feature (1)..(25): SEQ ID NO: 6279; WAN024BJT_at; Start 118; Stop 142
aatttgcatgtaactgggcagtgtc

SEQ ID NO: 83047 - DNA, 25 bp, Artificial
  probe
  misc_feature (1)..(25): SEQ ID NO: 6279; WAN024BJT_at; Start 146; Stop 170
aaaaatcgacactgaatttgctcaa

SEQ ID NO: 83048 - DNA, 25 bp, Artificial
  probe
  misc_feature (1)..(25): SEQ ID NO: 6279; WAN024BJT_at; Start 119; Stop 143
atttgcatgtaactgggcagtgtct

SEQ ID NO: 83049 - DNA, 25 bp, Artificial
  probe
  misc_feature (1)..(25): SEQ ID NO: 6279; WAN024BJT_at; Start 128; Stop 152
taactgggcagtgtcttaaaaaatc

SEQ ID NO: 83050 - DNA, 25 bp, Artificial
  probe
  misc_feature (1)..(25): SEQ ID NO: 6279; WAN024BJT_at; Start 148; Stop 172
aaatcgacactgaatttgctcaaat

SEQ ID NO: 83051 - DNA, 25 bp, Artificial
  probe
  misc_feature (1)..(25): SEQ ID NO: 6279; WAN024BJT_at; Start 114; Stop 138
ttttaatttgcatgtaactgggcag

SEQ ID NO: 83052 - DNA, 25 bp, Artificial
  probe
  misc_feature (1)..(25): SEQ ID NO: 6279; WAN024BJT_at; Start 165; Stop 189
gctcaaatttttgtttgtagaatta

SEQ ID NO: 83053 - DNA, 25 bp, Artificial
  probe
  misc_feature (1)..(25): SEQ ID NO: 6279; WAN024BJT_at; Start 89; Stop 113
taggaactataaaaaatcatgaaaa

SEQ ID NO: 83054 - DNA, 25 bp, Artificial
  probe
  misc_feature (1)..(25): SEQ ID NO: 6279; WAN024BJT_at; Start 116; Stop 140
ttaatttgcatgtaactgggcagtg

SEQ ID NO: 83055 - DNA, 25 bp, Artificial
  probe
  misc_feature (1)..(25): SEQ ID NO: 6279; WAN024BJT_at; Start 117; Stop 141
taatttgcatgtaactgggcagtgt

SEQ ID NO: 83056 - DNA, 25 bp, Artificial
  probe
  misc_feature (1)..(25): SEQ ID NO: 6279; WAN024BJT_at; Start 131; Stop 155
ctgggcagtgtcttaaaaaatcgac

SEQ ID NO: 83057 - DNA, 25 bp, Artificial
  probe
  misc_feature (1)..(25): SEQ ID NO: 6279; WAN024BJT_at; Start 184; Stop 208
gaattagaatatatttatttggctc

SEQ ID NO: 83058 - DNA, 25 bp, Artificial
  probe
  misc_feature (1)..(25): SEQ ID NO: 6279; WAN024BJT_at; Start 126; Stop 150
tgtaactgggcagtgtcttaaaaaa

SEQ ID NO: 83059 - DNA, 25 bp, Artificial
  probe
  misc_feature (1)..(25): SEQ ID NO: 6279; WAN024BJT_at; Start 195; Stop 219
tatttatttggctcatatttgcttt

SEQ ID NO: 83060 - DNA, 25 bp, Artificial
  probe
  misc_feature (1)..(25): SEQ ID NO: 6279; WAN024BJT_at; Start 112; Stop 136
aattttaatttgcatgtaactgggc

SEQ ID NO: 83061 - DNA, 25 bp, Artificial
  probe
  misc_feature (1)..(25): SEQ ID NO: 6279; WAN024BJT_at; Start 134; Stop 158
ggcagtgtcttaaaaaatcgacact

SEQ ID NO: 83062 - DNA, 25 bp, Artificial
  probe
  misc_feature (1)..(25): SEQ ID NO: 6279; WAN024BJT_at; Start 38; Stop 62
tactaacgttatataaacattatac

SEQ ID NO: 83063 - DNA, 25 bp, Artificial
  probe
  misc_feature (1)..(25): SEQ ID NO: 6279; WAN024BJT_at; Start 211; Stop 235
atttgctttttaaaagcttctgtag

SEQ ID NO: 83064 - DNA, 25 bp, Artificial
  probe
  misc_feature (1)..(25): SEQ ID NO: 6279; WAN024BJT_at; Start 133; Stop 157
gggcagtgtcttaaaaaatcgacac

SEQ ID NO: 83065 - DNA, 25 bp, Artificial
  probe
  misc_feature (1)..(25): SEQ ID NO: 6279; WAN024BJT_at; Start 25; Stop 49
aaatgctttattatactaacgttat

SEQ ID NO: 83066 - DNA, 25 bp, Artificial
  probe
  misc_feature (1)..(25): SEQ ID NO: 6279; WAN024BJT_at; Start 199; Stop 223
tatttggctcatatttgctttttaa

SEQ ID NO: 83067 - DNA, 25 bp, Artificial
  probe
  misc_feature (1)..(25): SEQ ID NO: 6279; WAN024BJT_at; Start 8; Stop 32
tcaaaagtataatgttaaaatgctt

SEQ ID NO: 83068 - DNA, 25 bp, Artificial
  probe
  misc_feature (1)..(25): SEQ ID NO: 6279; WAN024BJT_at; Start 51; Stop 75
taaacattatactttcgttatacaa

SEQ ID NO: 83069 - DNA, 25 bp, Artificial
  probe
  misc_feature (1)..(25): SEQ ID NO: 6279; WAN024BJT_at; Start 84; Stop 108
cctgttaggaactataaaaaatcat

SEQ ID NO: 83070 - DNA, 25 bp, Artificial
  probe
  misc_feature (1)..(25): SEQ ID NO: 6279; WAN024BJT_at; Start 130; Stop 154
actgggcagtgtcttaaaaaatcga

SEQ ID NO: 83071 - DNA, 25 bp, Artificial
  probe
  misc_feature (1)..(25): SEQ ID NO: 6279; WAN024BJT_at; Start 138; Stop 162
gtgtcttaaaaaatcgacactgaat

SEQ ID NO: 83072 - DNA, 25 bp, Artificial
  probe
  misc_feature (1)..(25): SEQ ID NO: 6279; WAN024BJT_at; Start 129; Stop 153
aactgggcagtgtcttaaaaaatcg

SEQ ID NO: 83073 - DNA, 25 bp, Artificial
  probe
  misc_feature (1)..(25): SEQ ID NO: 6279; WAN024BJT_at; Start 144; Stop 168
taaaaaatcgacactgaatttgctc

SEQ ID NO: 83074 - DNA, 25 bp, Artificial
  probe
  misc_feature (1)..(25): SEQ ID NO: 6279; WAN024BJT_at; Start 121; Stop 145
ttgcatgtaactgggcagtgtctta

SEQ ID NO: 83075 - DNA, 25 bp, Artificial
  probe
  misc_feature (1)..(25): SEQ ID NO: 6279; WAN024BJT_at; Start 6; Stop 30
tatcaaaagtataatgttaaaatgc

SEQ ID NO: 83076 - DNA, 25 bp, Artificial
  probe
  misc_feature (1)..(25): SEQ ID NO: 6774; WAN024BJU_at; Start 18; Stop 42
ggttatgcataacaatcccagtgat

SEQ ID NO: 83077 - DNA, 25 bp, Artificial
  probe
  misc_feature (1)..(25): SEQ ID NO: 6774; WAN024BJU_at; Start 29; Stop 53
acaatcccagtgataagagtattta

SEQ ID NO: 83078 - DNA, 25 bp, Artificial
  probe
  misc_feature (1)..(25): SEQ ID NO: 6774; WAN024BJU_at; Start 33; Stop 57
tcccagtgataagagtatttatcac

SEQ ID NO: 83079 - DNA, 25 bp, Artificial
  probe
  misc_feature (1)..(25): SEQ ID NO: 6774; WAN024BJU_at; Start 40; Stop 64
gataagagtatttatcactgggatt

SEQ ID NO: 83080 - DNA, 25 bp, Artificial
  probe
  misc_feature (1)..(25): SEQ ID NO: 6774; WAN024BJU_at; Start 31; Stop 55
aatcccagtgataagagtatttatc

SEQ ID NO: 83081 - DNA, 25 bp, Artificial
  probe
  misc_feature (1)..(25): SEQ ID NO: 6774; WAN024BJU_at; Start 24; Stop 48
gcataacaatcccagtgataagagt

SEQ ID NO: 83082 - DNA, 25 bp, Artificial
  probe
  misc_feature (1)..(25): SEQ ID NO: 6774; WAN024BJU_at; Start 8; Stop 32
gtatgcctatggttatgcataacaa

SEQ ID NO: 83083 - DNA, 25 bp, Artificial
  probe
  misc_feature (1)..(25): SEQ ID NO: 6774; WAN024BJU_at; Start 27; Stop 51
taacaatcccagtgataagagtatt

SEQ ID NO: 83084 - DNA, 25 bp, Artificial
  probe
  misc_feature (1)..(25): SEQ ID NO: 6774; WAN024BJU_at; Start 28; Stop 52
aacaatcccagtgataagagtattt

SEQ ID NO: 83085 - DNA, 25 bp, Artificial
  probe
  misc_feature (1)..(25): SEQ ID NO: 6774; WAN024BJU_at; Start 17; Stop 41
tggttatgcataacaatcccagtga

SEQ ID NO: 83086 - DNA, 25 bp, Artificial
  probe
  misc_feature (1)..(25): SEQ ID NO: 6774; WAN024BJU_at; Start 13; Stop 37
cctatggttatgcataacaatccca

SEQ ID NO: 83087 - DNA, 25 bp, Artificial
  probe
  misc_feature (1)..(25): SEQ ID NO: 6774; WAN024BJU_at; Start 2; Stop 26
tgctttgtatgcctatggttatgca

SEQ ID NO: 83088 - DNA, 25 bp, Artificial
  probe
  misc_feature (1)..(25): SEQ ID NO: 6774; WAN024BJU_at; Start 15; Stop 39
tatggttatgcataacaatcccagt

SEQ ID NO: 83089 - DNA, 25 bp, Artificial
  probe
  misc_feature (1)..(25): SEQ ID NO: 6774; WAN024BJU_at; Start 54; Stop 78
tcactgggatttttatgcccttttg

SEQ ID NO: 83090 - DNA, 25 bp, Artificial
  probe
  misc_feature (1)..(25): SEQ ID NO: 6774; WAN024BJU_at; Start 42; Stop 66
taagagtatttatcactgggatttt

SEQ ID NO: 83091 - DNA, 25 bp, Artificial
  probe
  misc_feature (1)..(25): SEQ ID NO: 6774; WAN024BJU_at; Start 50; Stop 74
tttatcactgggatttttatgccct

SEQ ID NO: 83092 - DNA, 25 bp, Artificial
  probe
  misc_feature (1)..(25): SEQ ID NO: 6774; WAN024BJU_at; Start 3; Stop 27
gctttgtatgcctatggttatgcat

SEQ ID NO: 83093 - DNA, 25 bp, Artificial
  probe
  misc_feature (1)..(25): SEQ ID NO: 6774; WAN024BJU_at; Start 9; Stop 33
tatgcctatggttatgcataacaat

SEQ ID NO: 83094 - DNA, 25 bp, Artificial
  probe
  misc_feature (1)..(25): SEQ ID NO: 6774; WAN024BJU_at; Start 49; Stop 73
atttatcactgggatttttatgccc

SEQ ID NO: 83095 - DNA, 25 bp, Artificial
  probe
  misc_feature (1)..(25): SEQ ID NO: 6774; WAN024BJU_at; Start 25; Stop 49
cataacaatcccagtgataagagta

SEQ ID NO: 83096 - DNA, 25 bp, Artificial
  probe
  misc_feature (1)..(25): SEQ ID NO: 6774; WAN024BJU_at; Start 21; Stop 45
tatgcataacaatcccagtgataag

SEQ ID NO: 83097 - DNA, 25 bp, Artificial
  probe
  misc_feature (1)..(25): SEQ ID NO: 6774; WAN024BJU_at; Start 4; Stop 28
ctttgtatgcctatggttatgcata

SEQ ID NO: 83098 - DNA, 25 bp, Artificial
  probe
  misc_feature (1)..(25): SEQ ID NO: 6774; WAN024BJU_at; Start 39; Stop 63
tgataagagtatttatcactgggat

SEQ ID NO: 83099 - DNA, 25 bp, Artificial
  probe
  misc_feature (1)..(25): SEQ ID NO: 6774; WAN024BJU_at; Start 22; Stop 46
atgcataacaatcccagtgataaga

SEQ ID NO: 83100 - DNA, 25 bp, Artificial
  probe
  misc_feature (1)..(25): SEQ ID NO: 6774; WAN024BJU_at; Start 55; Stop 79
cactgggatttttatgcccttttgg

SEQ ID NO: 83101 - DNA, 25 bp, Artificial
  probe
  misc_feature (1)..(25): SEQ ID NO: 6774; WAN024BJU_at; Start 19; Stop 43
gttatgcataacaatcccagtgata

SEQ ID NO: 83102 - DNA, 25 bp, Artificial
  probe
  misc_feature (1)..(25): SEQ ID NO: 6774; WAN024BJU_at; Start 11; Stop 35
tgcctatggttatgcataacaatcc

SEQ ID NO: 83103 - DNA, 25 bp, Artificial
  probe
  misc_feature (1)..(25): SEQ ID NO: 6774; WAN024BJU_at; Start 44; Stop 68
agagtatttatcactgggattttta

SEQ ID NO: 83104 - DNA, 25 bp, Artificial
  probe
  misc_feature (1)..(25): SEQ ID NO: 6774; WAN024BJU_at; Start 12; Stop 36
gcctatggttatgcataacaatccc

SEQ ID NO: 83105 - DNA, 25 bp, Artificial
  probe
  misc_feature (1)..(25): SEQ ID NO: 6774; WAN024BJU_at; Start 52; Stop 76
tatcactgggatttttatgcccttt

SEQ ID NO: 83106 - DNA, 25 bp, Artificial
  probe
  misc_feature (1)..(25): SEQ ID NO: 6774; WAN024BJU_at; Start 14; Stop 38
ctatggttatgcataacaatcccag

SEQ ID NO: 83107 - DNA, 25 bp, Artificial
  probe
  misc_feature (1)..(25): SEQ ID NO: 6774; WAN024BJU_at; Start 30; Stop 54
caatcccagtgataagagtatttat

SEQ ID NO: 83108 - DNA, 25 bp, Artificial
  probe
  misc_feature (1)..(25): SEQ ID NO: 6774; WAN024BJU_at; Start 7; Stop 31
tgtatgcctatggttatgcataaca

SEQ ID NO: 83109 - DNA, 25 bp, Artificial
  probe
  misc_feature (1)..(25): SEQ ID NO: 6774; WAN024BJU_at; Start 6; Stop 30
ttgtatgcctatggttatgcataac

SEQ ID NO: 83110 - DNA, 25 bp, Artificial
  probe
  misc_feature (1)..(25): SEQ ID NO: 6614; WAN024BJV_at; Start 145; Stop 169
cactatacaatgtgtgcatatctca

SEQ ID NO: 83111 - DNA, 25 bp, Artificial
  probe
  misc_feature (1)..(25): SEQ ID NO: 6614; WAN024BJV_at; Start 49; Stop 73
gagcgcaccaataagttaagtttga

SEQ ID NO: 83112 - DNA, 25 bp, Artificial
  probe
  misc_feature (1)..(25): SEQ ID NO: 6614; WAN024BJV_at; Start 148; Stop 172
tatacaatgtgtgcatatctcaaga

SEQ ID NO: 83113 - DNA, 25 bp, Artificial
  probe
  misc_feature (1)..(25): SEQ ID NO: 6614; WAN024BJV_at; Start 174; Stop 198
ccttgaacagcgtgcagaaattgaa

SEQ ID NO: 83114 - DNA, 25 bp, Artificial
  probe
  misc_feature (1)..(25): SEQ ID NO: 6614; WAN024BJV_at; Start 136; Stop 160
gaaactcaacactatacaatgtgtg

SEQ ID NO: 83115 - DNA, 25 bp, Artificial
  probe
  misc_feature (1)..(25): SEQ ID NO: 6614; WAN024BJV_at; Start 34; Stop 58
tacaaacaattaaaagagcgcacca

SEQ ID NO: 83116 - DNA, 25 bp, Artificial
  probe
  misc_feature (1)..(25): SEQ ID NO: 6614; WAN024BJV_at; Start 181; Stop 205
cagcgtgcagaaattgaaaacattg

SEQ ID NO: 83117 - DNA, 25 bp, Artificial
  probe
  misc_feature (1)..(25): SEQ ID NO: 6614; WAN024BJV_at; Start 81; Stop 105
taactattacgtaggaacacttgat

SEQ ID NO: 83118 - DNA, 25 bp, Artificial
  probe
  misc_feature (1)..(25): SEQ ID NO: 6614; WAN024BJV_at; Start 178; Stop 202
gaacagcgtgcagaaattgaaaaca

SEQ ID NO: 83119 - DNA, 25 bp, Artificial
  probe
  misc_feature (1)..(25): SEQ ID NO: 6614; WAN024BJV_at; Start 167; Stop 191
tcaagatccttgaacagcgtgcaga

SEQ ID NO: 83120 - DNA, 25 bp, Artificial
  probe
  misc_feature (1)..(25): SEQ ID NO: 6614; WAN024BJV_at; Start 171; Stop 195
gatccttgaacagcgtgcagaaatt

SEQ ID NO: 83121 - DNA, 25 bp, Artificial
  probe
  misc_feature (1)..(25): SEQ ID NO: 6614; WAN024BJV_at; Start 79; Stop 103
agtaactattacgtaggaacacttg

SEQ ID NO: 83122 - DNA, 25 bp, Artificial
  probe
  misc_feature (1)..(25): SEQ ID NO: 6614; WAN024BJV_at; Start 36; Stop 60
caaacaattaaaagagcgcaccaat

SEQ ID NO: 83123 - DNA, 25 bp, Artificial
  probe
  misc_feature (1)..(25): SEQ ID NO: 6614; WAN024BJV_at; Start 31; Stop 55
gaatacaaacaattaaaagagcgca

SEQ ID NO: 83124 - DNA, 25 bp, Artificial
  probe
  misc_feature (1)..(25): SEQ ID NO: 6614; WAN024BJV_at; Start 85; Stop 109
tattacgtaggaacacttgatttta

SEQ ID NO: 83125 - DNA, 25 bp, Artificial
  probe
  misc_feature (1)..(25): SEQ ID NO: 6614; WAN024BJV_at; Start 127; Stop 151
gagttacttgaaactcaacactata

SEQ ID NO: 83126 - DNA, 25 bp, Artificial
  probe
  misc_feature (1)..(25): SEQ ID NO: 6614; WAN024BJV_at; Start 12; Stop 36
caaacaacggatgattgaagaatac

SEQ ID NO: 83127 - DNA, 25 bp, Artificial
  probe
  misc_feature (1)..(25): SEQ ID NO: 6614; WAN024BJV_at; Start 46; Stop 70
aaagagcgcaccaataagttaagtt

SEQ ID NO: 83128 - DNA, 25 bp, Artificial
  probe
  misc_feature (1)..(25): SEQ ID NO: 6614; WAN024BJV_at; Start 186; Stop 210
tgcagaaattgaaaacattgagttt

SEQ ID NO: 83129 - DNA, 25 bp, Artificial
  probe
  misc_feature (1)..(25): SEQ ID NO: 6614; WAN024BJV_at; Start 39; Stop 63
acaattaaaagagcgcaccaataag

SEQ ID NO: 83130 - DNA, 25 bp, Artificial
  probe
  misc_feature (1)..(25): SEQ ID NO: 6614; WAN024BJV_at; Start 72; Stop 96
gatgattagtaactattacgtagga

SEQ ID NO: 83131 - DNA, 25 bp, Artificial
  probe
  misc_feature (1)..(25): SEQ ID NO: 6614; WAN024BJV_at; Start 155; Stop 179
tgtgtgcatatctcaagatccttga

SEQ ID NO: 83132 - DNA, 25 bp, Artificial
  probe
  misc_feature (1)..(25): SEQ ID NO: 6614; WAN024BJV_at; Start 112; Stop 136
ctaaaatgtcctattgagttacttg

SEQ ID NO: 83133 - DNA, 25 bp, Artificial
  probe
  misc_feature (1)..(25): SEQ ID NO: 6614; WAN024BJV_at; Start 163; Stop 187
tatctcaagatccttgaacagcgtg

SEQ ID NO: 83134 - DNA, 25 bp, Artificial
  probe
  misc_feature (1)..(25): SEQ ID NO: 6614; WAN024BJV_at; Start 152; Stop 176
caatgtgtgcatatctcaagatcct

SEQ ID NO: 83135 - DNA, 25 bp, Artificial
  probe
  misc_feature (1)..(25): SEQ ID NO: 6614; WAN024BJV_at; Start 52; Stop 76
cgcaccaataagttaagtttgatga

SEQ ID NO: 83136 - DNA, 25 bp, Artificial
  probe
  misc_feature (1)..(25): SEQ ID NO: 6614; WAN024BJV_at; Start 116; Stop 140
aatgtcctattgagttacttgaaac

SEQ ID NO: 83137 - DNA, 25 bp, Artificial
  probe
  misc_feature (1)..(25): SEQ ID NO: 6614; WAN024BJV_at; Start 184; Stop 208
cgtgcagaaattgaaaacattgagt

SEQ ID NO: 83138 - DNA, 25 bp, Artificial
  probe
  misc_feature (1)..(25): SEQ ID NO: 6614; WAN024BJV_at; Start 56; Stop 80
ccaataagttaagtttgatgattag

SEQ ID NO: 83139 - DNA, 25 bp, Artificial
  probe
  misc_feature (1)..(25): SEQ ID NO: 6614; WAN024BJV_at; Start 44; Stop 68
taaaagagcgcaccaataagttaag

SEQ ID NO: 83140 - DNA, 25 bp, Artificial
  probe
  misc_feature (1)..(25): SEQ ID NO: 6614; WAN024BJV_at; Start 16; Stop 40
caacggatgattgaagaatacaaac

SEQ ID NO: 83141 - DNA, 25 bp, Artificial
  probe
  misc_feature (1)..(25): SEQ ID NO: 6614; WAN024BJV_at; Start 169; Stop 193
aagatccttgaacagcgtgcagaaa

SEQ ID NO: 83142 - DNA, 25 bp, Artificial
  probe
  misc_feature (1)..(25): SEQ ID NO: 6614; WAN024BJV_at; Start 2; Stop 26
tgagtgattacaaacaacggatgat

SEQ ID NO: 83143 - DNA, 25 bp, Artificial
  probe
  misc_feature (1)..(25): SEQ ID NO: 6614; WAN024BJV_at; Start 7; Stop 31
gattacaaacaacggatgattgaag

SEQ ID NO: 83144 - DNA, 25 bp, Artificial
  probe
  misc_feature (1)..(25): SEQ ID NO: 6287; WAN024BJW_at; Start 56; Stop 80
cttgcagtgagctgagatcgcgcca

SEQ ID NO: 83145 - DNA, 25 bp, Artificial
  probe
  misc_feature (1)..(25): SEQ ID NO: 6287; WAN024BJW_at; Start 2; Stop 26
gcaggagttatgaccggatgaggca

SEQ ID NO: 83146 - DNA, 25 bp, Artificial
  probe
  misc_feature (1)..(25): SEQ ID NO: 6287; WAN024BJW_at; Start 54; Stop 78
agcttgcagtgagctgagatcgcgc

SEQ ID NO: 83147 - DNA, 25 bp, Artificial
  probe
  misc_feature (1)..(25): SEQ ID NO: 6287; WAN024BJW_at; Start 9; Stop 33
ttatgaccggatgaggcaggagaat

SEQ ID NO: 83148 - DNA, 25 bp, Artificial
  probe
  misc_feature (1)..(25): SEQ ID NO: 6287; WAN024BJW_at; Start 62; Stop 86
gtgagctgagatcgcgccactgcac

SEQ ID NO: 83149 - DNA, 25 bp, Artificial
  probe
  misc_feature (1)..(25): SEQ ID NO: 6287; WAN024BJW_at; Start 93; Stop 117
ttgggtgacagagcgagactccgtc

SEQ ID NO: 83150 - DNA, 25 bp, Artificial
  probe
  misc_feature (1)..(25): SEQ ID NO: 6287; WAN024BJW_at; Start 14; Stop 38
accggatgaggcaggagaatggcgt

SEQ ID NO: 83151 - DNA, 25 bp, Artificial
  probe
  misc_feature (1)..(25): SEQ ID NO: 6287; WAN024BJW_at; Start 80; Stop 104
actgcactccagcttgggtgacaga

SEQ ID NO: 83152 - DNA, 25 bp, Artificial
  probe
  misc_feature (1)..(25): SEQ ID NO: 6287; WAN024BJW_at; Start 101; Stop 125
cagagcgagactccgtcttaaaaaa

SEQ ID NO: 83153 - DNA, 25 bp, Artificial
  probe
  misc_feature (1)..(25): SEQ ID NO: 6287; WAN024BJW_at; Start 82; Stop 106
tgcactccagcttgggtgacagagc

SEQ ID NO: 83154 - DNA, 25 bp, Artificial
  probe
  misc_feature (1)..(25): SEQ ID NO: 6287; WAN024BJW_at; Start 79; Stop 103
cactgcactccagcttgggtgacag

SEQ ID NO: 83155 - DNA, 25 bp, Artificial
  probe
  misc_feature (1)..(25): SEQ ID NO: 6287; WAN024BJW_at; Start 20; Stop 44
tgaggcaggagaatggcgtgaacct

SEQ ID NO: 83156 - DNA, 25 bp, Artificial
  probe
  misc_feature (1)..(25): SEQ ID NO: 6287; WAN024BJW_at; Start 95; Stop 119
gggtgacagagcgagactccgtctt

SEQ ID NO: 83157 - DNA, 25 bp, Artificial
  probe
  misc_feature (1)..(25): SEQ ID NO: 6287; WAN024BJW_at; Start 96; Stop 120
ggtgacagagcgagactccgtctta

SEQ ID NO: 83158 - DNA, 25 bp, Artificial
  probe
  misc_feature (1)..(25): SEQ ID NO: 6287; WAN024BJW_at; Start 83; Stop 107
gcactccagcttgggtgacagagcg

SEQ ID NO: 83159 - DNA, 25 bp, Artificial
  probe
  misc_feature (1)..(25): SEQ ID NO: 6287; WAN024BJW_at; Start 75; Stop 99
gcgccactgcactccagcttgggtg

SEQ ID NO: 83160 - DNA, 25 bp, Artificial
  probe
  misc_feature (1)..(25): SEQ ID NO: 6287; WAN024BJW_at; Start 90; Stop 114
agcttgggtgacagagcgagactcc

SEQ ID NO: 83161 - DNA, 25 bp, Artificial
  probe
  misc_feature (1)..(25): SEQ ID NO: 6287; WAN024BJW_at; Start 59; Stop 83
gcagtgagctgagatcgcgccactg

SEQ ID NO: 83162 - DNA, 25 bp, Artificial
  probe
  misc_feature (1)..(25): SEQ ID NO: 6287; WAN024BJW_at; Start 98; Stop 122
tgacagagcgagactccgtcttaaa

SEQ ID NO: 83163 - DNA, 25 bp, Artificial
  probe
  misc_feature (1)..(25): SEQ ID NO: 6287; WAN024BJW_at; Start 78; Stop 102
ccactgcactccagcttgggtgaca

SEQ ID NO: 83164 - DNA, 25 bp, Artificial
  probe
  misc_feature (1)..(25): SEQ ID NO: 6287; WAN024BJW_at; Start 58; Stop 82
tgcagtgagctgagatcgcgccact

SEQ ID NO: 83165 - DNA, 25 bp, Artificial
  probe
  misc_feature (1)..(25): SEQ ID NO: 6287; WAN024BJW_at; Start 88; Stop 112
ccagcttgggtgacagagcgagact

SEQ ID NO: 83166 - DNA, 25 bp, Artificial
  probe
  misc_feature (1)..(25): SEQ ID NO: 6287; WAN024BJW_at; Start 41; Stop 65
acctgggaggcggagcttgcagtga

SEQ ID NO: 83167 - DNA, 25 bp, Artificial
  probe
  misc_feature (1)..(25): SEQ ID NO: 6287; WAN024BJW_at; Start 37; Stop 61
gtgaacctgggaggcggagcttgca

SEQ ID NO: 83168 - DNA, 25 bp, Artificial
  probe
  misc_feature (1)..(25): SEQ ID NO: 6287; WAN024BJW_at; Start 61; Stop 85
agtgagctgagatcgcgccactgca

SEQ ID NO: 83169 - DNA, 25 bp, Artificial
  probe
  misc_feature (1)..(25): SEQ ID NO: 6287; WAN024BJW_at; Start 92; Stop 116
cttgggtgacagagcgagactccgt

SEQ ID NO: 83170 - DNA, 25 bp, Artificial
  probe
  misc_feature (1)..(25): SEQ ID NO: 6287; WAN024BJW_at; Start 27; Stop 51
ggagaatggcgtgaacctgggaggc

SEQ ID NO: 83171 - DNA, 25 bp, Artificial
  probe
  misc_feature (1)..(25): SEQ ID NO: 6287; WAN024BJW_at; Start 31; Stop 55
aatggcgtgaacctgggaggcggag

SEQ ID NO: 83172 - DNA, 25 bp, Artificial
  probe
  misc_feature (1)..(25): SEQ ID NO: 6287; WAN024BJW_at; Start 77; Stop 101
gccactgcactccagcttgggtgac

SEQ ID NO: 83173 - DNA, 25 bp, Artificial
  probe
  misc_feature (1)..(25): SEQ ID NO: 6287; WAN024BJW_at; Start 85; Stop 109
actccagcttgggtgacagagcgag

SEQ ID NO: 83174 - DNA, 25 bp, Artificial
  probe
  misc_feature (1)..(25): SEQ ID NO: 6287; WAN024BJW_at; Start 99; Stop 123
gacagagcgagactccgtcttaaaa

SEQ ID NO: 83175 - DNA, 25 bp, Artificial
  probe
  misc_feature (1)..(25): SEQ ID NO: 6287; WAN024BJW_at; Start 87; Stop 111
tccagcttgggtgacagagcgagac

SEQ ID NO: 83176 - DNA, 25 bp, Artificial
  probe
  misc_feature (1)..(25): SEQ ID NO: 6287; WAN024BJW_at; Start 57; Stop 81
ttgcagtgagctgagatcgcgccac

SEQ ID NO: 83177 - DNA, 25 bp, Artificial
  probe
  misc_feature (1)..(25): SEQ ID NO: 6287; WAN024BJW_at; Start 86; Stop 110
ctccagcttgggtgacagagcgaga

SEQ ID NO: 83178 - DNA, 25 bp, Artificial
  probe
  misc_feature (1)..(25): SEQ ID NO: 7667; WAN024BJX_at; Start 23; Stop 47
gaaaaaccagagcttacgccctgat

SEQ ID NO: 83179 - DNA, 25 bp, Artificial
  probe
  misc_feature (1)..(25): SEQ ID NO: 7667; WAN024BJX_at; Start 72; Stop 96
acaacttttacaagattttctacag

SEQ ID NO: 83180 - DNA, 25 bp, Artificial
  probe
  misc_feature (1)..(25): SEQ ID NO: 7667; WAN024BJX_at; Start 21; Stop 45
aagaaaaaccagagcttacgccctg

SEQ ID NO: 83181 - DNA, 25 bp, Artificial
  probe
  misc_feature (1)..(25): SEQ ID NO: 7667; WAN024BJX_at; Start 22; Stop 46
agaaaaaccagagcttacgccctga

SEQ ID NO: 83182 - DNA, 25 bp, Artificial
  probe
  misc_feature (1)..(25): SEQ ID NO: 7667; WAN024BJX_at; Start 34; Stop 58
gcttacgccctgatttttaggatta

SEQ ID NO: 83183 - DNA, 25 bp, Artificial
  probe
  misc_feature (1)..(25): SEQ ID NO: 7667; WAN024BJX_at; Start 15; Stop 39
tctggtaagaaaaaccagagcttac

SEQ ID NO: 83184 - DNA, 25 bp, Artificial
  probe
  misc_feature (1)..(25): SEQ ID NO: 7667; WAN024BJX_at; Start 28; Stop 52
accagagcttacgccctgattttta

SEQ ID NO: 83185 - DNA, 25 bp, Artificial
  probe
  misc_feature (1)..(25): SEQ ID NO: 7667; WAN024BJX_at; Start 26; Stop 50
aaaccagagcttacgccctgatttt

SEQ ID NO: 83186 - DNA, 25 bp, Artificial
  probe
  misc_feature (1)..(25): SEQ ID NO: 7667; WAN024BJX_at; Start 27; Stop 51
aaccagagcttacgccctgattttt

SEQ ID NO: 83187 - DNA, 25 bp, Artificial
  probe
  misc_feature (1)..(25): SEQ ID NO: 7667; WAN024BJX_at; Start 17; Stop 41
tggtaagaaaaaccagagcttacgc

SEQ ID NO: 83188 - DNA, 25 bp, Artificial
  probe
  misc_feature (1)..(25): SEQ ID NO: 7667; WAN024BJX_at; Start 24; Stop 48
aaaaaccagagcttacgccctgatt

SEQ ID NO: 83189 - DNA, 25 bp, Artificial
  probe
  misc_feature (1)..(25): SEQ ID NO: 7667; WAN024BJX_at; Start 16; Stop 40
ctggtaagaaaaaccagagcttacg

SEQ ID NO: 83190 - DNA, 25 bp, Artificial
  probe
  misc_feature (1)..(25): SEQ ID NO: 7667; WAN024BJX_at; Start 50; Stop 74
ttaggattatttcaagtttcgaaca

SEQ ID NO: 83191 - DNA, 25 bp, Artificial
  probe
  misc_feature (1)..(25): SEQ ID NO: 7667; WAN024BJX_at; Start 14; Stop 38
ttctggtaagaaaaaccagagctta

SEQ ID NO: 83192 - DNA, 25 bp, Artificial
  probe
  misc_feature (1)..(25): SEQ ID NO: 7667; WAN024BJX_at; Start 32; Stop 56
gagcttacgccctgatttttaggat

SEQ ID NO: 83193 - DNA, 25 bp, Artificial
  probe
  misc_feature (1)..(25): SEQ ID NO: 7667; WAN024BJX_at; Start 30; Stop 54
cagagcttacgccctgatttttagg

SEQ ID NO: 83194 - DNA, 25 bp, Artificial
  probe
  misc_feature (1)..(25): SEQ ID NO: 7667; WAN024BJX_at; Start 25; Stop 49
aaaaccagagcttacgccctgattt

SEQ ID NO: 83195 - DNA, 25 bp, Artificial
  probe
  misc_feature (1)..(25): SEQ ID NO: 7667; WAN024BJX_at; Start 33; Stop 57
agcttacgccctgatttttaggatt

SEQ ID NO: 83196 - DNA, 25 bp, Artificial
  probe
  misc_feature (1)..(25): SEQ ID NO: 7667; WAN024BJX_at; Start 31; Stop 55
agagcttacgccctgatttttagga

SEQ ID NO: 83197 - DNA, 25 bp, Artificial
  probe
  misc_feature (1)..(25): SEQ ID NO: 7667; WAN024BJX_at; Start 29; Stop 53
ccagagcttacgccctgatttttag

SEQ ID NO: 83198 - DNA, 25 bp, Artificial
  probe
  misc_feature (1)..(25): SEQ ID NO: 7667; WAN024BJX_at; Start 51; Stop 75
taggattatttcaagtttcgaacaa

SEQ ID NO: 83199 - DNA, 25 bp, Artificial
  probe
  misc_feature (1)..(25): SEQ ID NO: 7160; WAN024BJY_at; Start 20; Stop 44
caccttcaggtttggaaagcggaga

SEQ ID NO: 83200 - DNA, 25 bp, Artificial
  probe
  misc_feature (1)..(25): SEQ ID NO: 7160; WAN024BJY_at; Start 15; Stop 39
atctccaccttcaggtttggaaagc

SEQ ID NO: 83201 - DNA, 25 bp, Artificial
  probe
  misc_feature (1)..(25): SEQ ID NO: 7160; WAN024BJY_at; Start 23; Stop 47
cttcaggtttggaaagcggagattg

SEQ ID NO: 83202 - DNA, 25 bp, Artificial
  probe
  misc_feature (1)..(25): SEQ ID NO: 7160; WAN024BJY_at; Start 19; Stop 43
ccaccttcaggtttggaaagcggag

SEQ ID NO: 83203 - DNA, 25 bp, Artificial
  probe
  misc_feature (1)..(25): SEQ ID NO: 7160; WAN024BJY_at; Start 5; Stop 29
atagagcaaaatctccaccttcagg

SEQ ID NO: 83204 - DNA, 25 bp, Artificial
  probe
  misc_feature (1)..(25): SEQ ID NO: 7160; WAN024BJY_at; Start 9; Stop 33
agcaaaatctccaccttcaggtttg

SEQ ID NO: 83205 - DNA, 25 bp, Artificial
  probe
  misc_feature (1)..(25): SEQ ID NO: 7160; WAN024BJY_at; Start 7; Stop 31
agagcaaaatctccaccttcaggtt

SEQ ID NO: 83206 - DNA, 25 bp, Artificial
  probe
  misc_feature (1)..(25): SEQ ID NO: 7160; WAN024BJY_at; Start 17; Stop 41
ctccaccttcaggtttggaaagcgg

SEQ ID NO: 83207 - DNA, 25 bp, Artificial
  probe
  misc_feature (1)..(25): SEQ ID NO: 7160; WAN024BJY_at; Start 18; Stop 42
tccaccttcaggtttggaaagcgga

SEQ ID NO: 83208 - DNA, 25 bp, Artificial
  probe
  misc_feature (1)..(25): SEQ ID NO: 7160; WAN024BJY_at; Start 3; Stop 27
gtatagagcaaaatctccaccttca

SEQ ID NO: 83209 - DNA, 25 bp, Artificial
  probe
  misc_feature (1)..(25): SEQ ID NO: 7160; WAN024BJY_at; Start 24; Stop 48
ttcaggtttggaaagcggagattgt

SEQ ID NO: 83210 - DNA, 25 bp, Artificial
  probe
  misc_feature (1)..(25): SEQ ID NO: 7160; WAN024BJY_at; Start 25; Stop 49
tcaggtttggaaagcggagattgtt

SEQ ID NO: 83211 - DNA, 25 bp, Artificial
  probe
  misc_feature (1)..(25): SEQ ID NO: 7160; WAN024BJY_at; Start 16; Stop 40
tctccaccttcaggtttggaaagcg

SEQ ID NO: 83212 - DNA, 25 bp, Artificial
  probe
  misc_feature (1)..(25): SEQ ID NO: 7160; WAN024BJY_at; Start 4; Stop 28
tatagagcaaaatctccaccttcag

SEQ ID NO: 83213 - DNA, 25 bp, Artificial
  probe
  misc_feature (1)..(25): SEQ ID NO: 7160; WAN024BJY_at; Start 14; Stop 38
aatctccaccttcaggtttggaaag

SEQ ID NO: 83214 - DNA, 25 bp, Artificial
  probe
  misc_feature (1)..(25): SEQ ID NO: 7160; WAN024BJY_at; Start 8; Stop 32
gagcaaaatctccaccttcaggttt

SEQ ID NO: 83215 - DNA, 25 bp, Artificial
  probe
  misc_feature (1)..(25): SEQ ID NO: 7160; WAN024BJY_at; Start 26; Stop 50
caggtttggaaagcggagattgttt

SEQ ID NO: 83216 - DNA, 25 bp, Artificial
  probe
  misc_feature (1)..(25): SEQ ID NO: 7160; WAN024BJY_at; Start 6; Stop 30
tagagcaaaatctccaccttcaggt

SEQ ID NO: 83217 - DNA, 25 bp, Artificial
  probe
  misc_feature (1)..(25): SEQ ID NO: 7160; WAN024BJY_at; Start 60; Stop 84
tccagggtttgtagtcgtgggacta

SEQ ID NO: 83218 - DNA, 25 bp, Artificial
  probe
  misc_feature (1)..(25): SEQ ID NO: 7160; WAN024BJY_at; Start 21; Stop 45
accttcaggtttggaaagcggagat

SEQ ID NO: 83219 - DNA, 25 bp, Artificial
  probe
  misc_feature (1)..(25): SEQ ID NO: 7160; WAN024BJY_at; Start 11; Stop 35
caaaatctccaccttcaggtttgga

SEQ ID NO: 83220 - DNA, 25 bp, Artificial
  probe
  misc_feature (1)..(25): SEQ ID NO: 7160; WAN024BJY_at; Start 10; Stop 34
gcaaaatctccaccttcaggtttgg

SEQ ID NO: 83221 - DNA, 25 bp, Artificial
  probe
  misc_feature (1)..(25): SEQ ID NO: 7160; WAN024BJY_at; Start 1; Stop 25
ctgtatagagcaaaatctccacctt

SEQ ID NO: 83222 - DNA, 25 bp, Artificial
  probe
  misc_feature (1)..(25): SEQ ID NO: 7160; WAN024BJY_at; Start 22; Stop 46
ccttcaggtttggaaagcggagatt

SEQ ID NO: 83223 - DNA, 25 bp, Artificial
  probe
  misc_feature (1)..(25): SEQ ID NO: 7160; WAN024BJY_at; Start 2; Stop 26
tgtatagagcaaaatctccaccttc

SEQ ID NO: 83224 - DNA, 25 bp, Artificial
  probe
  misc_feature (1)..(25): SEQ ID NO: 7565; WAN024BJZ_at; Start 67; Stop 91
caagaacatctaagcaacatatctc

SEQ ID NO: 83225 - DNA, 25 bp, Artificial
  probe
  misc_feature (1)..(25): SEQ ID NO: 7565; WAN024BJZ_at; Start 81; Stop 105
caacatatctcctacaatccctgta

SEQ ID NO: 83226 - DNA, 25 bp, Artificial
  probe
  misc_feature (1)..(25): SEQ ID NO: 7565; WAN024BJZ_at; Start 59; Stop 83
cagaaaatcaagaacatctaagcaa

SEQ ID NO: 83227 - DNA, 25 bp, Artificial
  probe
  misc_feature (1)..(25): SEQ ID NO: 7565; WAN024BJZ_at; Start 46; Stop 70
cgttacaaaacaccagaaaatcaag

SEQ ID NO: 83228 - DNA, 25 bp, Artificial
  probe
  misc_feature (1)..(25): SEQ ID NO: 7565; WAN024BJZ_at; Start 54; Stop 78
aacaccagaaaatcaagaacatcta

SEQ ID NO: 83229 - DNA, 25 bp, Artificial
  probe
  misc_feature (1)..(25): SEQ ID NO: 7565; WAN024BJZ_at; Start 83; Stop 107
acatatctcctacaatccctgtagg

SEQ ID NO: 83230 - DNA, 25 bp, Artificial
  probe
  misc_feature (1)..(25): SEQ ID NO: 7565; WAN024BJZ_at; Start 49; Stop 73
tacaaaacaccagaaaatcaagaac

SEQ ID NO: 83231 - DNA, 25 bp, Artificial
  probe
  misc_feature (1)..(25): SEQ ID NO: 7565; WAN024BJZ_at; Start 51; Stop 75
caaaacaccagaaaatcaagaacat

SEQ ID NO: 83232 - DNA, 25 bp, Artificial
  probe
  misc_feature (1)..(25): SEQ ID NO: 7565; WAN024BJZ_at; Start 72; Stop 96
acatctaagcaacatatctcctaca

SEQ ID NO: 83233 - DNA, 25 bp, Artificial
  probe
  misc_feature (1)..(25): SEQ ID NO: 7565; WAN024BJZ_at; Start 84; Stop 108
catatctcctacaatccctgtaggg

SEQ ID NO: 83234 - DNA, 25 bp, Artificial
  probe
  misc_feature (1)..(25): SEQ ID NO: 7565; WAN024BJZ_at; Start 58; Stop 82
ccagaaaatcaagaacatctaagca

SEQ ID NO: 83235 - DNA, 25 bp, Artificial
  probe
  misc_feature (1)..(25): SEQ ID NO: 7565; WAN024BJZ_at; Start 79; Stop 103
agcaacatatctcctacaatccctg

SEQ ID NO: 83236 - DNA, 25 bp, Artificial
  probe
  misc_feature (1)..(25): SEQ ID NO: 7565; WAN024BJZ_at; Start 47; Stop 71
gttacaaaacaccagaaaatcaaga

SEQ ID NO: 83237 - DNA, 25 bp, Artificial
  probe
  misc_feature (1)..(25): SEQ ID NO: 7565; WAN024BJZ_at; Start 73; Stop 97
catctaagcaacatatctcctacaa

SEQ ID NO: 83238 - DNA, 25 bp, Artificial
  probe
  misc_feature (1)..(25): SEQ ID NO: 7565; WAN024BJZ_at; Start 16; Stop 40
ccaccaacaaactcaaaaaactcat

SEQ ID NO: 83239 - DNA, 25 bp, Artificial
  probe
  misc_feature (1)..(25): SEQ ID NO: 7565; WAN024BJZ_at; Start 70; Stop 94
gaacatctaagcaacatatctccta

SEQ ID NO: 83240 - DNA, 25 bp, Artificial
  probe
  misc_feature (1)..(25): SEQ ID NO: 7565; WAN024BJZ_at; Start 57; Stop 81
accagaaaatcaagaacatctaagc

SEQ ID NO: 83241 - DNA, 25 bp, Artificial
  probe
  misc_feature (1)..(25): SEQ ID NO: 7565; WAN024BJZ_at; Start 56; Stop 80
caccagaaaatcaagaacatctaag

SEQ ID NO: 83242 - DNA, 25 bp, Artificial
  probe
  misc_feature (1)..(25): SEQ ID NO: 7565; WAN024BJZ_at; Start 68; Stop 92
aagaacatctaagcaacatatctcc

SEQ ID NO: 83243 - DNA, 25 bp, Artificial
  probe
  misc_feature (1)..(25): SEQ ID NO: 7565; WAN024BJZ_at; Start 78; Stop 102
aagcaacatatctcctacaatccct

SEQ ID NO: 83244 - DNA, 25 bp, Artificial
  probe
  misc_feature (1)..(25): SEQ ID NO: 7565; WAN024BJZ_at; Start 62; Stop 86
aaaatcaagaacatctaagcaacat

SEQ ID NO: 83245 - DNA, 25 bp, Artificial
  probe
  misc_feature (1)..(25): SEQ ID NO: 7565; WAN024BJZ_at; Start 53; Stop 77
aaacaccagaaaatcaagaacatct

SEQ ID NO: 83246 - DNA, 25 bp, Artificial
  probe
  misc_feature (1)..(25): SEQ ID NO: 7565; WAN024BJZ_at; Start 17; Stop 41
caccaacaaactcaaaaaactcatt

SEQ ID NO: 83247 - DNA, 25 bp, Artificial
  probe
  misc_feature (1)..(25): SEQ ID NO: 7565; WAN024BJZ_at; Start 66; Stop 90
tcaagaacatctaagcaacatatct

SEQ ID NO: 83248 - DNA, 25 bp, Artificial
  probe
  misc_feature (1)..(25): SEQ ID NO: 7565; WAN024BJZ_at; Start 86; Stop 110
tatctcctacaatccctgtaggggg

SEQ ID NO: 83249 - DNA, 25 bp, Artificial
  probe
  misc_feature (1)..(25): SEQ ID NO: 7565; WAN024BJZ_at; Start 71; Stop 95
aacatctaagcaacatatctcctac

SEQ ID NO: 83250 - DNA, 25 bp, Artificial
  probe
  misc_feature (1)..(25): SEQ ID NO: 7565; WAN024BJZ_at; Start 52; Stop 76
aaaacaccagaaaatcaagaacatc

SEQ ID NO: 83251 - DNA, 25 bp, Artificial
  probe
  misc_feature (1)..(25): SEQ ID NO: 7565; WAN024BJZ_at; Start 63; Stop 87
aaatcaagaacatctaagcaacata

SEQ ID NO: 83252 - DNA, 25 bp, Artificial
  probe
  misc_feature (1)..(25): SEQ ID NO: 7565; WAN024BJZ_at; Start 80; Stop 104
gcaacatatctcctacaatccctgt

SEQ ID NO: 83253 - DNA, 25 bp, Artificial
  probe
  misc_feature (1)..(25): SEQ ID NO: 7565; WAN024BJZ_at; Start 75; Stop 99
tctaagcaacatatctcctacaatc

SEQ ID NO: 83254 - DNA, 25 bp, Artificial
  probe
  misc_feature (1)..(25): SEQ ID NO: 7565; WAN024BJZ_at; Start 61; Stop 85
gaaaatcaagaacatctaagcaaca

SEQ ID NO: 83255 - DNA, 25 bp, Artificial
  probe
  misc_feature (1)..(25): SEQ ID NO: 7565; WAN024BJZ_at; Start 77; Stop 101
taagcaacatatctcctacaatccc

SEQ ID NO: 83256 - DNA, 25 bp, Artificial
  probe
  misc_feature (1)..(25): SEQ ID NO: 7565; WAN024BJZ_at; Start 82; Stop 106
aacatatctcctacaatccctgtag

SEQ ID NO: 83257 - DNA, 25 bp, Artificial
  probe
  misc_feature (1)..(25): SEQ ID NO: 7565; WAN024BJZ_at; Start 6; Stop 30
gggcaacgccccaccaacaaactca

SEQ ID NO: 83258 - DNA, 25 bp, Artificial
  probe
  misc_feature (1)..(25): SEQ ID NO: 7616; WAN024BK2_at; Start 51; Stop 75
ggttagtattgacaatattggtcat

SEQ ID NO: 83259 - DNA, 25 bp, Artificial
  probe
  misc_feature (1)..(25): SEQ ID NO: 7616; WAN024BK2_at; Start 34; Stop 58
aatgaattgattgaaagggttagta

SEQ ID NO: 83260 - DNA, 25 bp, Artificial
  probe
  misc_feature (1)..(25): SEQ ID NO: 7616; WAN024BK2_at; Start 43; Stop 67
attgaaagggttagtattgacaata

SEQ ID NO: 83261 - DNA, 25 bp, Artificial
  probe
  misc_feature (1)..(25): SEQ ID NO: 7616; WAN024BK2_at; Start 44; Stop 68
ttgaaagggttagtattgacaatat

SEQ ID NO: 83262 - DNA, 25 bp, Artificial
  probe
  misc_feature (1)..(25): SEQ ID NO: 7616; WAN024BK2_at; Start 28; Stop 52
ataactaatgaattgattgaaaggg

SEQ ID NO: 83263 - DNA, 25 bp, Artificial
  probe
  misc_feature (1)..(25): SEQ ID NO: 7616; WAN024BK2_at; Start 33; Stop 57
taatgaattgattgaaagggttagt

SEQ ID NO: 83264 - DNA, 25 bp, Artificial
  probe
  misc_feature (1)..(25): SEQ ID NO: 7616; WAN024BK2_at; Start 42; Stop 66
gattgaaagggttagtattgacaat

SEQ ID NO: 83265 - DNA, 25 bp, Artificial
  probe
  misc_feature (1)..(25): SEQ ID NO: 7616; WAN024BK2_at; Start 38; Stop 62
aattgattgaaagggttagtattga

SEQ ID NO: 83266 - DNA, 25 bp, Artificial
  probe
  misc_feature (1)..(25): SEQ ID NO: 7616; WAN024BK2_at; Start 32; Stop 56
ctaatgaattgattgaaagggttag

SEQ ID NO: 83267 - DNA, 25 bp, Artificial
  probe
  misc_feature (1)..(25): SEQ ID NO: 7616; WAN024BK2_at; Start 29; Stop 53
taactaatgaattgattgaaagggt

SEQ ID NO: 83268 - DNA, 25 bp, Artificial
  probe
  misc_feature (1)..(25): SEQ ID NO: 7616; WAN024BK2_at; Start 2; Stop 26
tggagttattaatggacttagttta

SEQ ID NO: 83269 - DNA, 25 bp, Artificial
  probe
  misc_feature (1)..(25): SEQ ID NO: 7616; WAN024BK2_at; Start 11; Stop 35
taatggacttagtttatataactaa

SEQ ID NO: 83270 - DNA, 25 bp, Artificial
  probe
  misc_feature (1)..(25): SEQ ID NO: 7616; WAN024BK2_at; Start 27; Stop 51
tataactaatgaattgattgaaagg

SEQ ID NO: 83271 - DNA, 25 bp, Artificial
  probe
  misc_feature (1)..(25): SEQ ID NO: 7616; WAN024BK2_at; Start 37; Stop 61
gaattgattgaaagggttagtattg

SEQ ID NO: 83272 - DNA, 25 bp, Artificial
  probe
  misc_feature (1)..(25): SEQ ID NO: 7616; WAN024BK2_at; Start 31; Stop 55
actaatgaattgattgaaagggtta

SEQ ID NO: 83273 - DNA, 25 bp, Artificial
  probe
  misc_feature (1)..(25): SEQ ID NO: 7616; WAN024BK2_at; Start 36; Stop 60
tgaattgattgaaagggttagtatt

SEQ ID NO: 83274 - DNA, 25 bp, Artificial
  probe
  misc_feature (1)..(25): SEQ ID NO: 7616; WAN024BK2_at; Start 30; Stop 54
aactaatgaattgattgaaagggtt

SEQ ID NO: 83275 - DNA, 25 bp, Artificial
  probe
  misc_feature (1)..(25): SEQ ID NO: 7616; WAN024BK2_at; Start 53; Stop 77
ttagtattgacaatattggtcatat

SEQ ID NO: 83276 - DNA, 25 bp, Artificial
  probe
  misc_feature (1)..(25): SEQ ID NO: 7616; WAN024BK2_at; Start 45; Stop 69
tgaaagggttagtattgacaatatt

SEQ ID NO: 83277 - DNA, 25 bp, Artificial
  probe
  misc_feature (1)..(25): SEQ ID NO: 7616; WAN024BK2_at; Start 41; Stop 65
tgattgaaagggttagtattgacaa

SEQ ID NO: 83278 - DNA, 25 bp, Artificial
  probe
  misc_feature (1)..(25): SEQ ID NO: 7616; WAN024BK2_at; Start 14; Stop 38
tggacttagtttatataactaatga

SEQ ID NO: 83279 - DNA, 25 bp, Artificial
  probe
  misc_feature (1)..(25): SEQ ID NO: 7616; WAN024BK2_at; Start 48; Stop 72
aagggttagtattgacaatattggt

SEQ ID NO: 83280 - DNA, 25 bp, Artificial
  probe
  misc_feature (1)..(25): SEQ ID NO: 7616; WAN024BK2_at; Start 15; Stop 39
ggacttagtttatataactaatgaa

SEQ ID NO: 83281 - DNA, 25 bp, Artificial
  probe
  misc_feature (1)..(25): SEQ ID NO: 7616; WAN024BK2_at; Start 46; Stop 70
gaaagggttagtattgacaatattg

SEQ ID NO: 83282 - DNA, 25 bp, Artificial
  probe
  misc_feature (1)..(25): SEQ ID NO: 7616; WAN024BK2_at; Start 40; Stop 64
ttgattgaaagggttagtattgaca

SEQ ID NO: 83283 - DNA, 25 bp, Artificial
  probe
  misc_feature (1)..(25): SEQ ID NO: 7616; WAN024BK2_at; Start 49; Stop 73
agggttagtattgacaatattggtc

SEQ ID NO: 83284 - DNA, 25 bp, Artificial
  probe
  misc_feature (1)..(25): SEQ ID NO: 7616; WAN024BK2_at; Start 57; Stop 81
tattgacaatattggtcatattgac

SEQ ID NO: 83285 - DNA, 25 bp, Artificial
  probe
  misc_feature (1)..(25): SEQ ID NO: 7616; WAN024BK2_at; Start 47; Stop 71
aaagggttagtattgacaatattgg

SEQ ID NO: 83286 - DNA, 25 bp, Artificial
  probe
  misc_feature (1)..(25): SEQ ID NO: 7616; WAN024BK2_at; Start 54; Stop 78
tagtattgacaatattggtcatatt

SEQ ID NO: 83287 - DNA, 25 bp, Artificial
  probe
  misc_feature (1)..(25): SEQ ID NO: 7616; WAN024BK2_at; Start 8; Stop 32
tattaatggacttagtttatataac

SEQ ID NO: 83288 - DNA, 25 bp, Artificial
  probe
  misc_feature (1)..(25): SEQ ID NO: 7616; WAN024BK2_at; Start 52; Stop 76
gttagtattgacaatattggtcata

SEQ ID NO: 83289 - DNA, 25 bp, Artificial
  probe
  misc_feature (1)..(25): SEQ ID NO: 7616; WAN024BK2_at; Start 4; Stop 28
gagttattaatggacttagtttata

SEQ ID NO: 83290 - DNA, 25 bp, Artificial
  probe
  misc_feature (1)..(25): SEQ ID NO: 7616; WAN024BK2_at; Start 50; Stop 74
gggttagtattgacaatattggtca

SEQ ID NO: 83291 - DNA, 25 bp, Artificial
  probe
  misc_feature (1)..(25): SEQ ID NO: 7616; WAN024BK2_at; Start 35; Stop 59
atgaattgattgaaagggttagtat

SEQ ID NO: 83292 - DNA, 25 bp, Artificial
  probe
  misc_feature (1)..(25): SEQ ID NO: 7083; WAN024BK3_at; Start 9; Stop 33
cgagaactctagtcaccgtgcagtg

SEQ ID NO: 83293 - DNA, 25 bp, Artificial
  probe
  misc_feature (1)..(25): SEQ ID NO: 7083; WAN024BK3_at; Start 66; Stop 90
atatcaaatcgtcgcgcttgtcaaa

SEQ ID NO: 83294 - DNA, 25 bp, Artificial
  probe
  misc_feature (1)..(25): SEQ ID NO: 7083; WAN024BK3_at; Start 60; Stop 84
cattttatatcaaatcgtcgcgctt

SEQ ID NO: 83295 - DNA, 25 bp, Artificial
  probe
  misc_feature (1)..(25): SEQ ID NO: 7083; WAN024BK3_at; Start 99; Stop 123
tggcaaggtcaaccaaacgctcgat

SEQ ID NO: 83296 - DNA, 25 bp, Artificial
  probe
  misc_feature (1)..(25): SEQ ID NO: 7083; WAN024BK3_at; Start 95; Stop 119
tccttggcaaggtcaaccaaacgct

SEQ ID NO: 83297 - DNA, 25 bp, Artificial
  probe
  misc_feature (1)..(25): SEQ ID NO: 7083; WAN024BK3_at; Start 97; Stop 121
cttggcaaggtcaaccaaacgctcg

SEQ ID NO: 83298 - DNA, 25 bp, Artificial
  probe
  misc_feature (1)..(25): SEQ ID NO: 7083; WAN024BK3_at; Start 7; Stop 31
tccgagaactctagtcaccgtgcag

SEQ ID NO: 83299 - DNA, 25 bp, Artificial
  probe
  misc_feature (1)..(25): SEQ ID NO: 7083; WAN024BK3_at; Start 25; Stop 49
cgtgcagtgatggttctggcttcta

SEQ ID NO: 83300 - DNA, 25 bp, Artificial
  probe
  misc_feature (1)..(25): SEQ ID NO: 7083; WAN024BK3_at; Start 63; Stop 87
tttatatcaaatcgtcgcgcttgtc

SEQ ID NO: 83301 - DNA, 25 bp, Artificial
  probe
  misc_feature (1)..(25): SEQ ID NO: 7083; WAN024BK3_at; Start 72; Stop 96
aatcgtcgcgcttgtcaaaactttc

SEQ ID NO: 83302 - DNA, 25 bp, Artificial
  probe
  misc_feature (1)..(25): SEQ ID NO: 7083; WAN024BK3_at; Start 23; Stop 47
accgtgcagtgatggttctggcttc

SEQ ID NO: 83303 - DNA, 25 bp, Artificial
  probe
  misc_feature (1)..(25): SEQ ID NO: 7083; WAN024BK3_at; Start 30; Stop 54
agtgatggttctggcttctaccctc

SEQ ID NO: 83304 - DNA, 25 bp, Artificial
  probe
  misc_feature (1)..(25): SEQ ID NO: 7083; WAN024BK3_at; Start 18; Stop 42
tagtcaccgtgcagtgatggttctg

SEQ ID NO: 83305 - DNA, 25 bp, Artificial
  probe
  misc_feature (1)..(25): SEQ ID NO: 7083; WAN024BK3_at; Start 84; Stop 108
tgtcaaaactttccttggcaaggtc

SEQ ID NO: 83306 - DNA, 25 bp, Artificial
  probe
  misc_feature (1)..(25): SEQ ID NO: 7083; WAN024BK3_at; Start 86; Stop 110
tcaaaactttccttggcaaggtcaa

SEQ ID NO: 83307 - DNA, 25 bp, Artificial
  probe
  misc_feature (1)..(25): SEQ ID NO: 7083; WAN024BK3_at; Start 28; Stop 52
gcagtgatggttctggcttctaccc

SEQ ID NO: 83308 - DNA, 25 bp, Artificial
  probe
  misc_feature (1)..(25): SEQ ID NO: 7083; WAN024BK3_at; Start 65; Stop 89
tatatcaaatcgtcgcgcttgtcaa

SEQ ID NO: 83309 - DNA, 25 bp, Artificial
  probe
  misc_feature (1)..(25): SEQ ID NO: 7083; WAN024BK3_at; Start 5; Stop 29
agtccgagaactctagtcaccgtgc

SEQ ID NO: 83310 - DNA, 25 bp, Artificial
  probe
  misc_feature (1)..(25): SEQ ID NO: 7083; WAN024BK3_at; Start 42; Stop 66
ggcttctaccctctctttcatttta

SEQ ID NO: 83311 - DNA, 25 bp, Artificial
  probe
  misc_feature (1)..(25): SEQ ID NO: 7083; WAN024BK3_at; Start 3; Stop 27
gaagtccgagaactctagtcaccgt

SEQ ID NO: 83312 - DNA, 25 bp, Artificial
  probe
  misc_feature (1)..(25): SEQ ID NO: 7083; WAN024BK3_at; Start 4; Stop 28
aagtccgagaactctagtcaccgtg

SEQ ID NO: 83313 - DNA, 25 bp, Artificial
  probe
  misc_feature (1)..(25): SEQ ID NO: 7083; WAN024BK3_at; Start 79; Stop 103
gcgcttgtcaaaactttccttggca

SEQ ID NO: 83314 - DNA, 25 bp, Artificial
  probe
  misc_feature (1)..(25): SEQ ID NO: 7083; WAN024BK3_at; Start 2; Stop 26
tgaagtccgagaactctagtcaccg

SEQ ID NO: 83315 - DNA, 25 bp, Artificial
  probe
  misc_feature (1)..(25): SEQ ID NO: 7083; WAN024BK3_at; Start 21; Stop 45
tcaccgtgcagtgatggttctggct

SEQ ID NO: 83316 - DNA, 25 bp, Artificial
  probe
  misc_feature (1)..(25): SEQ ID NO: 7083; WAN024BK3_at; Start 10; Stop 34
gagaactctagtcaccgtgcagtga

SEQ ID NO: 83317 - DNA, 25 bp, Artificial
  probe
  misc_feature (1)..(25): SEQ ID NO: 7083; WAN024BK3_at; Start 94; Stop 118
ttccttggcaaggtcaaccaaacgc

SEQ ID NO: 83318 - DNA, 25 bp, Artificial
  probe
  misc_feature (1)..(25): SEQ ID NO: 7083; WAN024BK3_at; Start 58; Stop 82
ttcattttatatcaaatcgtcgcgc

SEQ ID NO: 83319 - DNA, 25 bp, Artificial
  probe
  misc_feature (1)..(25): SEQ ID NO: 7083; WAN024BK3_at; Start 37; Stop 61
gttctggcttctaccctctctttca

SEQ ID NO: 83320 - DNA, 25 bp, Artificial
  probe
  misc_feature (1)..(25): SEQ ID NO: 7083; WAN024BK3_at; Start 16; Stop 40
tctagtcaccgtgcagtgatggttc

SEQ ID NO: 83321 - DNA, 25 bp, Artificial
  probe
  misc_feature (1)..(25): SEQ ID NO: 7083; WAN024BK3_at; Start 33; Stop 57
gatggttctggcttctaccctctct

SEQ ID NO: 83322 - DNA, 25 bp, Artificial
  probe
  misc_feature (1)..(25): SEQ ID NO: 7083; WAN024BK3_at; Start 76; Stop 100
gtcgcgcttgtcaaaactttccttg

SEQ ID NO: 83323 - DNA, 25 bp, Artificial
  probe
  misc_feature (1)..(25): SEQ ID NO: 7083; WAN024BK3_at; Start 12; Stop 36
gaactctagtcaccgtgcagtgatg

SEQ ID NO: 83324 - DNA, 25 bp, Artificial
  probe
  misc_feature (1)..(25): SEQ ID NO: 7083; WAN024BK3_at; Start 74; Stop 98
tcgtcgcgcttgtcaaaactttcct

SEQ ID NO: 83325 - DNA, 25 bp, Artificial
  probe
  misc_feature (1)..(25): SEQ ID NO: 7083; WAN024BK3_at; Start 70; Stop 94
caaatcgtcgcgcttgtcaaaactt

SEQ ID NO: 83326 - DNA, 25 bp, Artificial
  probe
  misc_feature (1)..(25): SEQ ID NO: 7502; WAN024BK4_at; Start 33; Stop 57
gacctttttagcttcttgccctgaa

SEQ ID NO: 83327 - DNA, 25 bp, Artificial
  probe
  misc_feature (1)..(25): SEQ ID NO: 7502; WAN024BK4_at; Start 63; Stop 87
aaagcaagaaaaacctccactggag

SEQ ID NO: 83328 - DNA, 25 bp, Artificial
  probe
  misc_feature (1)..(25): SEQ ID NO: 7502; WAN024BK4_at; Start 78; Stop 102
tccactggaggttttcagcctctca

SEQ ID NO: 83329 - DNA, 25 bp, Artificial
  probe
  misc_feature (1)..(25): SEQ ID NO: 7502; WAN024BK4_at; Start 32; Stop 56
ggacctttttagcttcttgccctga

SEQ ID NO: 83330 - DNA, 25 bp, Artificial
  probe
  misc_feature (1)..(25): SEQ ID NO: 7502; WAN024BK4_at; Start 41; Stop 65
tagcttcttgccctgaaattaaaaa

SEQ ID NO: 83331 - DNA, 25 bp, Artificial
  probe
  misc_feature (1)..(25): SEQ ID NO: 7502; WAN024BK4_at; Start 75; Stop 99
acctccactggaggttttcagcctc

SEQ ID NO: 83332 - DNA, 25 bp, Artificial
  probe
  misc_feature (1)..(25): SEQ ID NO: 7502; WAN024BK4_at; Start 76; Stop 100
cctccactggaggttttcagcctct

SEQ ID NO: 83333 - DNA, 25 bp, Artificial
  probe
  misc_feature (1)..(25): SEQ ID NO: 7502; WAN024BK4_at; Start 47; Stop 71
cttgccctgaaattaaaaagcaaga

SEQ ID NO: 83334 - DNA, 25 bp, Artificial
  probe
  misc_feature (1)..(25): SEQ ID NO: 7502; WAN024BK4_at; Start 37; Stop 61
tttttagcttcttgccctgaaatta

SEQ ID NO: 83335 - DNA, 25 bp, Artificial
  probe
  misc_feature (1)..(25): SEQ ID NO: 7502; WAN024BK4_at; Start 38; Stop 62
ttttagcttcttgccctgaaattaa

SEQ ID NO: 83336 - DNA, 25 bp, Artificial
  probe
  misc_feature (1)..(25): SEQ ID NO: 7502; WAN024BK4_at; Start 36; Stop 60
ctttttagcttcttgccctgaaatt

SEQ ID NO: 83337 - DNA, 25 bp, Artificial
  probe
  misc_feature (1)..(25): SEQ ID NO: 7502; WAN024BK4_at; Start 48; Stop 72
ttgccctgaaattaaaaagcaagaa

SEQ ID NO: 83338 - DNA, 25 bp, Artificial
  probe
  misc_feature (1)..(25): SEQ ID NO: 7502; WAN024BK4_at; Start 39; Stop 63
tttagcttcttgccctgaaattaaa

SEQ ID NO: 83339 - DNA, 25 bp, Artificial
  probe
  misc_feature (1)..(25): SEQ ID NO: 7502; WAN024BK4_at; Start 43; Stop 67
gcttcttgccctgaaattaaaaagc

SEQ ID NO: 83340 - DNA, 25 bp, Artificial
  probe
  misc_feature (1)..(25): SEQ ID NO: 7502; WAN024BK4_at; Start 74; Stop 98
aacctccactggaggttttcagcct

SEQ ID NO: 83341 - DNA, 25 bp, Artificial
  probe
  misc_feature (1)..(25): SEQ ID NO: 7502; WAN024BK4_at; Start 46; Stop 70
tcttgccctgaaattaaaaagcaag

SEQ ID NO: 83342 - DNA, 25 bp, Artificial
  probe
  misc_feature (1)..(25): SEQ ID NO: 7502; WAN024BK4_at; Start 79; Stop 103
ccactggaggttttcagcctctcat

SEQ ID NO: 83343 - DNA, 25 bp, Artificial
  probe
  misc_feature (1)..(25): SEQ ID NO: 7502; WAN024BK4_at; Start 42; Stop 66
agcttcttgccctgaaattaaaaag

SEQ ID NO: 83344 - DNA, 25 bp, Artificial
  probe
  misc_feature (1)..(25): SEQ ID NO: 7502; WAN024BK4_at; Start 65; Stop 89
agcaagaaaaacctccactggaggt

SEQ ID NO: 83345 - DNA, 25 bp, Artificial
  probe
  misc_feature (1)..(25): SEQ ID NO: 7502; WAN024BK4_at; Start 64; Stop 88
aagcaagaaaaacctccactggagg

SEQ ID NO: 83346 - DNA, 25 bp, Artificial
  probe
  misc_feature (1)..(25): SEQ ID NO: 7502; WAN024BK4_at; Start 80; Stop 104
cactggaggttttcagcctctcatc

SEQ ID NO: 83347 - DNA, 25 bp, Artificial
  probe
  misc_feature (1)..(25): SEQ ID NO: 7502; WAN024BK4_at; Start 35; Stop 59
cctttttagcttcttgccctgaaat

SEQ ID NO: 83348 - DNA, 25 bp, Artificial
  probe
  misc_feature (1)..(25): SEQ ID NO: 7502; WAN024BK4_at; Start 45; Stop 69
ttcttgccctgaaattaaaaagcaa

SEQ ID NO: 83349 - DNA, 25 bp, Artificial
  probe
  misc_feature (1)..(25): SEQ ID NO: 7502; WAN024BK4_at; Start 40; Stop 64
ttagcttcttgccctgaaattaaaa

SEQ ID NO: 83350 - DNA, 25 bp, Artificial
  probe
  misc_feature (1)..(25): SEQ ID NO: 7502; WAN024BK4_at; Start 77; Stop 101
ctccactggaggttttcagcctctc

SEQ ID NO: 83351 - DNA, 25 bp, Artificial
  probe
  misc_feature (1)..(25): SEQ ID NO: 7502; WAN024BK4_at; Start 81; Stop 105
actggaggttttcagcctctcatct

SEQ ID NO: 83352 - DNA, 25 bp, Artificial
  probe
  misc_feature (1)..(25): SEQ ID NO: 7502; WAN024BK4_at; Start 44; Stop 68
cttcttgccctgaaattaaaaagca

SEQ ID NO: 83353 - DNA, 25 bp, Artificial
  probe
  misc_feature (1)..(25): SEQ ID NO: 6759; WAN024BK5_at; Start 54; Stop 78
ccctgattattacaaaaccattgaa

SEQ ID NO: 83354 - DNA, 25 bp, Artificial
  probe
  misc_feature (1)..(25): SEQ ID NO: 6759; WAN024BK5_at; Start 56; Stop 80
ctgattattacaaaaccattgaaat

SEQ ID NO: 83355 - DNA, 25 bp, Artificial
  probe
  misc_feature (1)..(25): SEQ ID NO: 6759; WAN024BK5_at; Start 51; Stop 75
actccctgattattacaaaaccatt

SEQ ID NO: 83356 - DNA, 25 bp, Artificial
  probe
  misc_feature (1)..(25): SEQ ID NO: 6759; WAN024BK5_at; Start 36; Stop 60
aaaagattctatctcactccctgat

SEQ ID NO: 83357 - DNA, 25 bp, Artificial
  probe
  misc_feature (1)..(25): SEQ ID NO: 6759; WAN024BK5_at; Start 26; Stop 50
taaatagtaaaaaagattctatctc

SEQ ID NO: 83358 - DNA, 25 bp, Artificial
  probe
  misc_feature (1)..(25): SEQ ID NO: 6759; WAN024BK5_at; Start 12; Stop 36
tctcctcattaaattaaatagtaaa

SEQ ID NO: 83359 - DNA, 25 bp, Artificial
  probe
  misc_feature (1)..(25): SEQ ID NO: 6759; WAN024BK5_at; Start 64; Stop 88
tacaaaaccattgaaatatcacaac

SEQ ID NO: 83360 - DNA, 25 bp, Artificial
  probe
  misc_feature (1)..(25): SEQ ID NO: 6759; WAN024BK5_at; Start 67; Stop 91
aaaaccattgaaatatcacaactaa

SEQ ID NO: 83361 - DNA, 25 bp, Artificial
  probe
  misc_feature (1)..(25): SEQ ID NO: 6759; WAN024BK5_at; Start 61; Stop 85
tattacaaaaccattgaaatatcac

SEQ ID NO: 83362 - DNA, 25 bp, Artificial
  probe
  misc_feature (1)..(25): SEQ ID NO: 6759; WAN024BK5_at; Start 42; Stop 66
ttctatctcactccctgattattac

SEQ ID NO: 83363 - DNA, 25 bp, Artificial
  probe
  misc_feature (1)..(25): SEQ ID NO: 6759; WAN024BK5_at; Start 34; Stop 58
aaaaaagattctatctcactccctg

SEQ ID NO: 83364 - DNA, 25 bp, Artificial
  probe
  misc_feature (1)..(25): SEQ ID NO: 6759; WAN024BK5_at; Start 50; Stop 74
cactccctgattattacaaaaccat

SEQ ID NO: 83365 - DNA, 25 bp, Artificial
  probe
  misc_feature (1)..(25): SEQ ID NO: 6759; WAN024BK5_at; Start 47; Stop 71
tctcactccctgattattacaaaac

SEQ ID NO: 83366 - DNA, 25 bp, Artificial
  probe
  misc_feature (1)..(25): SEQ ID NO: 6759; WAN024BK5_at; Start 32; Stop 56
gtaaaaaagattctatctcactccc

SEQ ID NO: 83367 - DNA, 25 bp, Artificial
  probe
  misc_feature (1)..(25): SEQ ID NO: 6759; WAN024BK5_at; Start 35; Stop 59
aaaaagattctatctcactccctga

SEQ ID NO: 83368 - DNA, 25 bp, Artificial
  probe
  misc_feature (1)..(25): SEQ ID NO: 6759; WAN024BK5_at; Start 48; Stop 72
ctcactccctgattattacaaaacc

SEQ ID NO: 83369 - DNA, 25 bp, Artificial
  probe
  misc_feature (1)..(25): SEQ ID NO: 6759; WAN024BK5_at; Start 33; Stop 57
taaaaaagattctatctcactccct

SEQ ID NO: 83370 - DNA, 25 bp, Artificial
  probe
  misc_feature (1)..(25): SEQ ID NO: 6759; WAN024BK5_at; Start 49; Stop 73
tcactccctgattattacaaaacca

SEQ ID NO: 83371 - DNA, 25 bp, Artificial
  probe
  misc_feature (1)..(25): SEQ ID NO: 6759; WAN024BK5_at; Start 44; Stop 68
ctatctcactccctgattattacaa

SEQ ID NO: 83372 - DNA, 25 bp, Artificial
  probe
  misc_feature (1)..(25): SEQ ID NO: 6759; WAN024BK5_at; Start 66; Stop 90
caaaaccattgaaatatcacaacta

SEQ ID NO: 83373 - DNA, 25 bp, Artificial
  probe
  misc_feature (1)..(25): SEQ ID NO: 6759; WAN024BK5_at; Start 30; Stop 54
tagtaaaaaagattctatctcactc

SEQ ID NO: 83374 - DNA, 25 bp, Artificial
  probe
  misc_feature (1)..(25): SEQ ID NO: 6759; WAN024BK5_at; Start 28; Stop 52
aatagtaaaaaagattctatctcac

SEQ ID NO: 83375 - DNA, 25 bp, Artificial
  probe
  misc_feature (1)..(25): SEQ ID NO: 6759; WAN024BK5_at; Start 38; Stop 62
aagattctatctcactccctgatta

SEQ ID NO: 83376 - DNA, 25 bp, Artificial
  probe
  misc_feature (1)..(25): SEQ ID NO: 6759; WAN024BK5_at; Start 45; Stop 69
tatctcactccctgattattacaaa

SEQ ID NO: 83377 - DNA, 25 bp, Artificial
  probe
  misc_feature (1)..(25): SEQ ID NO: 6759; WAN024BK5_at; Start 72; Stop 96
cattgaaatatcacaactaataggc

SEQ ID NO: 83378 - DNA, 25 bp, Artificial
  probe
  misc_feature (1)..(25): SEQ ID NO: 6759; WAN024BK5_at; Start 52; Stop 76
ctccctgattattacaaaaccattg

SEQ ID NO: 83379 - DNA, 25 bp, Artificial
  probe
  misc_feature (1)..(25): SEQ ID NO: 6759; WAN024BK5_at; Start 31; Stop 55
agtaaaaaagattctatctcactcc

SEQ ID NO: 83380 - DNA, 25 bp, Artificial
  probe
  misc_feature (1)..(25): SEQ ID NO: 6759; WAN024BK5_at; Start 71; Stop 95
ccattgaaatatcacaactaatagg

SEQ ID NO: 83381 - DNA, 25 bp, Artificial
  probe
  misc_feature (1)..(25): SEQ ID NO: 6759; WAN024BK5_at; Start 10; Stop 34
cctctcctcattaaattaaatagta

SEQ ID NO: 83382 - DNA, 25 bp, Artificial
  probe
  misc_feature (1)..(25): SEQ ID NO: 6759; WAN024BK5_at; Start 53; Stop 77
tccctgattattacaaaaccattga

SEQ ID NO: 83383 - DNA, 25 bp, Artificial
  probe
  misc_feature (1)..(25): SEQ ID NO: 6759; WAN024BK5_at; Start 39; Stop 63
agattctatctcactccctgattat

SEQ ID NO: 83384 - DNA, 25 bp, Artificial
  probe
  misc_feature (1)..(25): SEQ ID NO: 6759; WAN024BK5_at; Start 37; Stop 61
aaagattctatctcactccctgatt

SEQ ID NO: 83385 - DNA, 25 bp, Artificial
  probe
  misc_feature (1)..(25): SEQ ID NO: 6759; WAN024BK5_at; Start 40; Stop 64
gattctatctcactccctgattatt

SEQ ID NO: 83386 - DNA, 25 bp, Artificial
  probe
  misc_feature (1)..(25): SEQ ID NO: 6759; WAN024BK5_at; Start 55; Stop 79
cctgattattacaaaaccattgaaa

SEQ ID NO: 83387 - DNA, 25 bp, Artificial
  probe
  misc_feature (1)..(25): SEQ ID NO: 6826; WAN024BK6_x_at; Start 14; Stop 38
tatggagaagtaacctttcgtgtta

SEQ ID NO: 83388 - DNA, 25 bp, Artificial
  probe
  misc_feature (1)..(25): SEQ ID NO: 6826; WAN024BK6_x_at; Start 4; Stop 28
gagcatattttatggagaagtaacc

SEQ ID NO: 83389 - DNA, 25 bp, Artificial
  probe
  misc_feature (1)..(25): SEQ ID NO: 6826; WAN024BK6_x_at; Start 7; Stop 31
catattttatggagaagtaaccttt

SEQ ID NO: 83390 - DNA, 25 bp, Artificial
  probe
  misc_feature (1)..(25): SEQ ID NO: 6826; WAN024BK6_x_at; Start 6; Stop 30
gcatattttatggagaagtaacctt

SEQ ID NO: 83391 - DNA, 25 bp, Artificial
  probe
  misc_feature (1)..(25): SEQ ID NO: 6826; WAN024BK6_x_at; Start 2; Stop 26
tggagcatattttatggagaagtaa

SEQ ID NO: 83392 - DNA, 25 bp, Artificial
  probe
  misc_feature (1)..(25): SEQ ID NO: 6826; WAN024BK6_x_at; Start 5; Stop 29
agcatattttatggagaagtaacct

SEQ ID NO: 83393 - DNA, 25 bp, Artificial
  probe
  misc_feature (1)..(25): SEQ ID NO: 6826; WAN024BK6_x_at; Start 1; Stop 25
atggagcatattttatggagaagta

SEQ ID NO: 83394 - DNA, 25 bp, Artificial
  probe
  misc_feature (1)..(25): SEQ ID NO: 6826; WAN024BK6_x_at; Start 3; Stop 27
ggagcatattttatggagaagtaac

SEQ ID NO: 83395 - DNA, 25 bp, Artificial
  probe
  misc_feature (1)..(25): SEQ ID NO: 7159; WAN024BK7_at; Start 51; Stop 75
accgatttgctcattagaaaaagcc

SEQ ID NO: 83396 - DNA, 25 bp, Artificial
  probe
  misc_feature (1)..(25): SEQ ID NO: 7159; WAN024BK7_at; Start 43; Stop 67
tacaagcaaccgatttgctcattag

SEQ ID NO: 83397 - DNA, 25 bp, Artificial
  probe
  misc_feature (1)..(25): SEQ ID NO: 7159; WAN024BK7_at; Start 45; Stop 69
caagcaaccgatttgctcattagaa

SEQ ID NO: 83398 - DNA, 25 bp, Artificial
  probe
  misc_feature (1)..(25): SEQ ID NO: 7159; WAN024BK7_at; Start 32; Stop 56
cgaatcttgagtacaagcaaccgat

SEQ ID NO: 83399 - DNA, 25 bp, Artificial
  probe
  misc_feature (1)..(25): SEQ ID NO: 7159; WAN024BK7_at; Start 18; Stop 42
aaattattctaacacgaatcttgag

SEQ ID NO: 83400 - DNA, 25 bp, Artificial
  probe
  misc_feature (1)..(25): SEQ ID NO: 7159; WAN024BK7_at; Start 50; Stop 74
aaccgatttgctcattagaaaaagc

SEQ ID NO: 83401 - DNA, 25 bp, Artificial
  probe
  misc_feature (1)..(25): SEQ ID NO: 7159; WAN024BK7_at; Start 25; Stop 49
tctaacacgaatcttgagtacaagc

SEQ ID NO: 83402 - DNA, 25 bp, Artificial
  probe
  misc_feature (1)..(25): SEQ ID NO: 7159; WAN024BK7_at; Start 19; Stop 43
aattattctaacacgaatcttgagt

SEQ ID NO: 83403 - DNA, 25 bp, Artificial
  probe
  misc_feature (1)..(25): SEQ ID NO: 7159; WAN024BK7_at; Start 37; Stop 61
cttgagtacaagcaaccgatttgct

SEQ ID NO: 83404 - DNA, 25 bp, Artificial
  probe
  misc_feature (1)..(25): SEQ ID NO: 7159; WAN024BK7_at; Start 42; Stop 66
gtacaagcaaccgatttgctcatta

SEQ ID NO: 83405 - DNA, 25 bp, Artificial
  probe
  misc_feature (1)..(25): SEQ ID NO: 7159; WAN024BK7_at; Start 30; Stop 54
cacgaatcttgagtacaagcaaccg

SEQ ID NO: 83406 - DNA, 25 bp, Artificial
  probe
  misc_feature (1)..(25): SEQ ID NO: 7159; WAN024BK7_at; Start 26; Stop 50
ctaacacgaatcttgagtacaagca

SEQ ID NO: 83407 - DNA, 25 bp, Artificial
  probe
  misc_feature (1)..(25): SEQ ID NO: 7159; WAN024BK7_at; Start 48; Stop 72
gcaaccgatttgctcattagaaaaa

SEQ ID NO: 83408 - DNA, 25 bp, Artificial
  probe
  misc_feature (1)..(25): SEQ ID NO: 7159; WAN024BK7_at; Start 31; Stop 55
acgaatcttgagtacaagcaaccga

SEQ ID NO: 83409 - DNA, 25 bp, Artificial
  probe
  misc_feature (1)..(25): SEQ ID NO: 7159; WAN024BK7_at; Start 14; Stop 38
tgaaaaattattctaacacgaatct

SEQ ID NO: 83410 - DNA, 25 bp, Artificial
  probe
  misc_feature (1)..(25): SEQ ID NO: 7159; WAN024BK7_at; Start 28; Stop 52
aacacgaatcttgagtacaagcaac

SEQ ID NO: 83411 - DNA, 25 bp, Artificial
  probe
  misc_feature (1)..(25): SEQ ID NO: 7159; WAN024BK7_at; Start 24; Stop 48
ttctaacacgaatcttgagtacaag

SEQ ID NO: 83412 - DNA, 25 bp, Artificial
  probe
  misc_feature (1)..(25): SEQ ID NO: 7159; WAN024BK7_at; Start 40; Stop 64
gagtacaagcaaccgatttgctcat

SEQ ID NO: 83413 - DNA, 25 bp, Artificial
  probe
  misc_feature (1)..(25): SEQ ID NO: 7159; WAN024BK7_at; Start 16; Stop 40
aaaaattattctaacacgaatcttg

SEQ ID NO: 83414 - DNA, 25 bp, Artificial
  probe
  misc_feature (1)..(25): SEQ ID NO: 7159; WAN024BK7_at; Start 46; Stop 70
aagcaaccgatttgctcattagaaa

SEQ ID NO: 83415 - DNA, 25 bp, Artificial
  probe
  misc_feature (1)..(25): SEQ ID NO: 7159; WAN024BK7_at; Start 39; Stop 63
tgagtacaagcaaccgatttgctca

SEQ ID NO: 83416 - DNA, 25 bp, Artificial
  probe
  misc_feature (1)..(25): SEQ ID NO: 7159; WAN024BK7_at; Start 21; Stop 45
ttattctaacacgaatcttgagtac

SEQ ID NO: 83417 - DNA, 25 bp, Artificial
  probe
  misc_feature (1)..(25): SEQ ID NO: 7159; WAN024BK7_at; Start 33; Stop 57
gaatcttgagtacaagcaaccgatt

SEQ ID NO: 83418 - DNA, 25 bp, Artificial
  probe
  misc_feature (1)..(25): SEQ ID NO: 7159; WAN024BK7_at; Start 17; Stop 41
aaaattattctaacacgaatcttga

SEQ ID NO: 83419 - DNA, 25 bp, Artificial
  probe
  misc_feature (1)..(25): SEQ ID NO: 7159; WAN024BK7_at; Start 22; Stop 46
tattctaacacgaatcttgagtaca

SEQ ID NO: 83420 - DNA, 25 bp, Artificial
  probe
  misc_feature (1)..(25): SEQ ID NO: 7159; WAN024BK7_at; Start 34; Stop 58
aatcttgagtacaagcaaccgattt

SEQ ID NO: 83421 - DNA, 25 bp, Artificial
  probe
  misc_feature (1)..(25): SEQ ID NO: 7159; WAN024BK7_at; Start 49; Stop 73
caaccgatttgctcattagaaaaag

SEQ ID NO: 83422 - DNA, 25 bp, Artificial
  probe
  misc_feature (1)..(25): SEQ ID NO: 7159; WAN024BK7_at; Start 36; Stop 60
tcttgagtacaagcaaccgatttgc

SEQ ID NO: 83423 - DNA, 25 bp, Artificial
  probe
  misc_feature (1)..(25): SEQ ID NO: 7159; WAN024BK7_at; Start 27; Stop 51
taacacgaatcttgagtacaagcaa

SEQ ID NO: 83424 - DNA, 25 bp, Artificial
  probe
  misc_feature (1)..(25): SEQ ID NO: 7159; WAN024BK7_at; Start 44; Stop 68
acaagcaaccgatttgctcattaga

SEQ ID NO: 83425 - DNA, 25 bp, Artificial
  probe
  misc_feature (1)..(25): SEQ ID NO: 7159; WAN024BK7_at; Start 29; Stop 53
acacgaatcttgagtacaagcaacc

SEQ ID NO: 83426 - DNA, 25 bp, Artificial
  probe
  misc_feature (1)..(25): SEQ ID NO: 7159; WAN024BK7_at; Start 35; Stop 59
atcttgagtacaagcaaccgatttg

SEQ ID NO: 83427 - DNA, 25 bp, Artificial
  probe
  misc_feature (1)..(25): SEQ ID NO: 7159; WAN024BK7_at; Start 47; Stop 71
agcaaccgatttgctcattagaaaa

SEQ ID NO: 83428 - DNA, 25 bp, Artificial
  probe
  misc_feature (1)..(25): SEQ ID NO: 7159; WAN024BK7_at; Start 38; Stop 62
ttgagtacaagcaaccgatttgctc

SEQ ID NO: 83429 - DNA, 25 bp, Artificial
  probe
  misc_feature (1)..(25): SEQ ID NO: 7656; WAN024BK8_at; Start 23; Stop 47
tggtcgataaagtgggaagccacga

SEQ ID NO: 83430 - DNA, 25 bp, Artificial
  probe
  misc_feature (1)..(25): SEQ ID NO: 7656; WAN024BK8_at; Start 3; Stop 27
ggttaagattgctgagatactggtc

SEQ ID NO: 83431 - DNA, 25 bp, Artificial
  probe
  misc_feature (1)..(25): SEQ ID NO: 7656; WAN024BK8_at; Start 22; Stop 46
ctggtcgataaagtgggaagccacg

SEQ ID NO: 83432 - DNA, 25 bp, Artificial
  probe
  misc_feature (1)..(25): SEQ ID NO: 7656; WAN024BK8_at; Start 7; Stop 31
aagattgctgagatactggtcgata

SEQ ID NO: 83433 - DNA, 25 bp, Artificial
  probe
  misc_feature (1)..(25): SEQ ID NO: 7656; WAN024BK8_at; Start 12; Stop 36
tgctgagatactggtcgataaagtg

SEQ ID NO: 83434 - DNA, 25 bp, Artificial
  probe
  misc_feature (1)..(25): SEQ ID NO: 7656; WAN024BK8_at; Start 4; Stop 28
gttaagattgctgagatactggtcg

SEQ ID NO: 83435 - DNA, 25 bp, Artificial
  probe
  misc_feature (1)..(25): SEQ ID NO: 7656; WAN024BK8_at; Start 16; Stop 40
gagatactggtcgataaagtgggaa

SEQ ID NO: 83436 - DNA, 25 bp, Artificial
  probe
  misc_feature (1)..(25): SEQ ID NO: 7656; WAN024BK8_at; Start 2; Stop 26
tggttaagattgctgagatactggt

SEQ ID NO: 83437 - DNA, 25 bp, Artificial
  probe
  misc_feature (1)..(25): SEQ ID NO: 7656; WAN024BK8_at; Start 19; Stop 43
atactggtcgataaagtgggaagcc

SEQ ID NO: 83438 - DNA, 25 bp, Artificial
  probe
  misc_feature (1)..(25): SEQ ID NO: 7656; WAN024BK8_at; Start 17; Stop 41
agatactggtcgataaagtgggaag

SEQ ID NO: 83439 - DNA, 25 bp, Artificial
  probe
  misc_feature (1)..(25): SEQ ID NO: 7656; WAN024BK8_at; Start 49; Stop 73
gggtatgacacttttaatgaccgtc

SEQ ID NO: 83440 - DNA, 25 bp, Artificial
  probe
  misc_feature (1)..(25): SEQ ID NO: 7656; WAN024BK8_at; Start 1; Stop 25
ttggttaagattgctgagatactgg

SEQ ID NO: 83441 - DNA, 25 bp, Artificial
  probe
  misc_feature (1)..(25): SEQ ID NO: 7656; WAN024BK8_at; Start 39; Stop 63
aagccacgaggggtatgacactttt

SEQ ID NO: 83442 - DNA, 25 bp, Artificial
  probe
  misc_feature (1)..(25): SEQ ID NO: 7656; WAN024BK8_at; Start 11; Stop 35
ttgctgagatactggtcgataaagt

SEQ ID NO: 83443 - DNA, 25 bp, Artificial
  probe
  misc_feature (1)..(25): SEQ ID NO: 7656; WAN024BK8_at; Start 54; Stop 78
tgacacttttaatgaccgtcgtcgc

SEQ ID NO: 83444 - DNA, 25 bp, Artificial
  probe
  misc_feature (1)..(25): SEQ ID NO: 7656; WAN024BK8_at; Start 20; Stop 44
tactggtcgataaagtgggaagcca

SEQ ID NO: 83445 - DNA, 25 bp, Artificial
  probe
  misc_feature (1)..(25): SEQ ID NO: 7656; WAN024BK8_at; Start 13; Stop 37
gctgagatactggtcgataaagtgg

SEQ ID NO: 83446 - DNA, 25 bp, Artificial
  probe
  misc_feature (1)..(25): SEQ ID NO: 7656; WAN024BK8_at; Start 5; Stop 29
ttaagattgctgagatactggtcga

SEQ ID NO: 83447 - DNA, 25 bp, Artificial
  probe
  misc_feature (1)..(25): SEQ ID NO: 7656; WAN024BK8_at; Start 53; Stop 77
atgacacttttaatgaccgtcgtcg

SEQ ID NO: 83448 - DNA, 25 bp, Artificial
  probe
  misc_feature (1)..(25): SEQ ID NO: 7656; WAN024BK8_at; Start 42; Stop 66
ccacgaggggtatgacacttttaat

SEQ ID NO: 83449 - DNA, 25 bp, Artificial
  probe
  misc_feature (1)..(25): SEQ ID NO: 7656; WAN024BK8_at; Start 41; Stop 65
gccacgaggggtatgacacttttaa

SEQ ID NO: 83450 - DNA, 25 bp, Artificial
  probe
  misc_feature (1)..(25): SEQ ID NO: 7656; WAN024BK8_at; Start 50; Stop 74
ggtatgacacttttaatgaccgtcg

SEQ ID NO: 83451 - DNA, 25 bp, Artificial
  probe
  misc_feature (1)..(25): SEQ ID NO: 7656; WAN024BK8_at; Start 10; Stop 34
attgctgagatactggtcgataaag

SEQ ID NO: 83452 - DNA, 25 bp, Artificial
  probe
  misc_feature (1)..(25): SEQ ID NO: 7656; WAN024BK8_at; Start 24; Stop 48
ggtcgataaagtgggaagccacgag

SEQ ID NO: 83453 - DNA, 25 bp, Artificial
  probe
  misc_feature (1)..(25): SEQ ID NO: 7656; WAN024BK8_at; Start 18; Stop 42
gatactggtcgataaagtgggaagc

SEQ ID NO: 83454 - DNA, 25 bp, Artificial
  probe
  misc_feature (1)..(25): SEQ ID NO: 7656; WAN024BK8_at; Start 43; Stop 67
cacgaggggtatgacacttttaatg

SEQ ID NO: 83455 - DNA, 25 bp, Artificial
  probe
  misc_feature (1)..(25): SEQ ID NO: 7656; WAN024BK8_at; Start 52; Stop 76
tatgacacttttaatgaccgtcgtc

SEQ ID NO: 83456 - DNA, 25 bp, Artificial
  probe
  misc_feature (1)..(25): SEQ ID NO: 7656; WAN024BK8_at; Start 9; Stop 33
gattgctgagatactggtcgataaa

SEQ ID NO: 83457 - DNA, 25 bp, Artificial
  probe
  misc_feature (1)..(25): SEQ ID NO: 7656; WAN024BK8_at; Start 14; Stop 38
ctgagatactggtcgataaagtggg

SEQ ID NO: 83458 - DNA, 25 bp, Artificial
  probe
  misc_feature (1)..(25): SEQ ID NO: 7656; WAN024BK8_at; Start 8; Stop 32
agattgctgagatactggtcgataa

SEQ ID NO: 83459 - DNA, 25 bp, Artificial
  probe
  misc_feature (1)..(25): SEQ ID NO: 7656; WAN024BK8_at; Start 51; Stop 75
gtatgacacttttaatgaccgtcgt

SEQ ID NO: 83460 - DNA, 25 bp, Artificial
  probe
  misc_feature (1)..(25): SEQ ID NO: 7656; WAN024BK8_at; Start 21; Stop 45
actggtcgataaagtgggaagccac

SEQ ID NO: 83461 - DNA, 25 bp, Artificial
  probe
  misc_feature (1)..(25): SEQ ID NO: 7656; WAN024BK8_at; Start 26; Stop 50
tcgataaagtgggaagccacgaggg

SEQ ID NO: 83462 - DNA, 25 bp, Artificial
  probe
  misc_feature (1)..(25): SEQ ID NO: 7656; WAN024BK8_at; Start 6; Stop 30
taagattgctgagatactggtcgat

SEQ ID NO: 83463 - DNA, 25 bp, Artificial
  probe
  misc_feature (1)..(25): SEQ ID NO: 6732; WAN024BK9_at; Start 3; Stop 27
gcgcaaatcgattaaggaatttaat

SEQ ID NO: 83464 - DNA, 25 bp, Artificial
  probe
  misc_feature (1)..(25): SEQ ID NO: 6732; WAN024BK9_at; Start 2; Stop 26
tgcgcaaatcgattaaggaatttaa

SEQ ID NO: 83465 - DNA, 25 bp, Artificial
  probe
  misc_feature (1)..(25): SEQ ID NO: 6732; WAN024BK9_at; Start 5; Stop 29
gcaaatcgattaaggaatttaatct

SEQ ID NO: 83466 - DNA, 25 bp, Artificial
  probe
  misc_feature (1)..(25): SEQ ID NO: 6732; WAN024BK9_at; Start 4; Stop 28
cgcaaatcgattaaggaatttaatc

SEQ ID NO: 83467 - DNA, 25 bp, Artificial
  probe
  misc_feature (1)..(25): SEQ ID NO: 6732; WAN024BK9_at; Start 1; Stop 25
atgcgcaaatcgattaaggaattta

SEQ ID NO: 83468 - DNA, 25 bp, Artificial
  probe
  misc_feature (1)..(25): SEQ ID NO: 6732; WAN024BK9_at; Start 6; Stop 30
caaatcgattaaggaatttaatcta

SEQ ID NO: 83469 - DNA, 25 bp, Artificial
  probe
  misc_feature (1)..(25): SEQ ID NO: 6732; WAN024BK9_at; Start 8; Stop 32
aatcgattaaggaatttaatctaat

SEQ ID NO: 83470 - DNA, 25 bp, Artificial
  probe
  misc_feature (1)..(25): SEQ ID NO: 7569; WAN024BKA_at; Start 5; Stop 29
cttgcagtctgtatcttactgacca

SEQ ID NO: 83471 - DNA, 25 bp, Artificial
  probe
  misc_feature (1)..(25): SEQ ID NO: 7569; WAN024BKA_at; Start 1; Stop 25
ttgccttgcagtctgtatcttactg

SEQ ID NO: 83472 - DNA, 25 bp, Artificial
  probe
  misc_feature (1)..(25): SEQ ID NO: 7569; WAN024BKA_at; Start 45; Stop 69
tagaataggtgatttggagcgtcct

SEQ ID NO: 83473 - DNA, 25 bp, Artificial
  probe
  misc_feature (1)..(25): SEQ ID NO: 7569; WAN024BKA_at; Start 3; Stop 27
gccttgcagtctgtatcttactgac

SEQ ID NO: 83474 - DNA, 25 bp, Artificial
  probe
  misc_feature (1)..(25): SEQ ID NO: 7569; WAN024BKA_at; Start 14; Stop 38
tgtatcttactgaccaagctagtga

SEQ ID NO: 83475 - DNA, 25 bp, Artificial
  probe
  misc_feature (1)..(25): SEQ ID NO: 7569; WAN024BKA_at; Start 32; Stop 56
ctagtgatggatttagaataggtga

SEQ ID NO: 83476 - DNA, 25 bp, Artificial
  probe
  misc_feature (1)..(25): SEQ ID NO: 7569; WAN024BKA_at; Start 47; Stop 71
gaataggtgatttggagcgtcctat

SEQ ID NO: 83477 - DNA, 25 bp, Artificial
  probe
  misc_feature (1)..(25): SEQ ID NO: 7569; WAN024BKA_at; Start 17; Stop 41
atcttactgaccaagctagtgatgg

SEQ ID NO: 83478 - DNA, 25 bp, Artificial
  probe
  misc_feature (1)..(25): SEQ ID NO: 7569; WAN024BKA_at; Start 9; Stop 33
cagtctgtatcttactgaccaagct

SEQ ID NO: 83479 - DNA, 25 bp, Artificial
  probe
  misc_feature (1)..(25): SEQ ID NO: 7569; WAN024BKA_at; Start 21; Stop 45
tactgaccaagctagtgatggattt

SEQ ID NO: 83480 - DNA, 25 bp, Artificial
  probe
  misc_feature (1)..(25): SEQ ID NO: 7569; WAN024BKA_at; Start 19; Stop 43
cttactgaccaagctagtgatggat

SEQ ID NO: 83481 - DNA, 25 bp, Artificial
  probe
  misc_feature (1)..(25): SEQ ID NO: 7569; WAN024BKA_at; Start 8; Stop 32
gcagtctgtatcttactgaccaagc

SEQ ID NO: 83482 - DNA, 25 bp, Artificial
  probe
  misc_feature (1)..(25): SEQ ID NO: 7569; WAN024BKA_at; Start 29; Stop 53
aagctagtgatggatttagaatagg

SEQ ID NO: 83483 - DNA, 25 bp, Artificial
  probe
  misc_feature (1)..(25): SEQ ID NO: 7569; WAN024BKA_at; Start 18; Stop 42
tcttactgaccaagctagtgatgga

SEQ ID NO: 83484 - DNA, 25 bp, Artificial
  probe
  misc_feature (1)..(25): SEQ ID NO: 7569; WAN024BKA_at; Start 12; Stop 36
tctgtatcttactgaccaagctagt

SEQ ID NO: 83485 - DNA, 25 bp, Artificial
  probe
  misc_feature (1)..(25): SEQ ID NO: 7569; WAN024BKA_at; Start 27; Stop 51
ccaagctagtgatggatttagaata

SEQ ID NO: 83486 - DNA, 25 bp, Artificial
  probe
  misc_feature (1)..(25): SEQ ID NO: 7569; WAN024BKA_at; Start 7; Stop 31
tgcagtctgtatcttactgaccaag

SEQ ID NO: 83487 - DNA, 25 bp, Artificial
  probe
  misc_feature (1)..(25): SEQ ID NO: 7569; WAN024BKA_at; Start 16; Stop 40
tatcttactgaccaagctagtgatg

SEQ ID NO: 83488 - DNA, 25 bp, Artificial
  probe
  misc_feature (1)..(25): SEQ ID NO: 7569; WAN024BKA_at; Start 15; Stop 39
gtatcttactgaccaagctagtgat

SEQ ID NO: 83489 - DNA, 25 bp, Artificial
  probe
  misc_feature (1)..(25): SEQ ID NO: 7569; WAN024BKA_at; Start 10; Stop 34
agtctgtatcttactgaccaagcta

SEQ ID NO: 83490 - DNA, 25 bp, Artificial
  probe
  misc_feature (1)..(25): SEQ ID NO: 7569; WAN024BKA_at; Start 23; Stop 47
ctgaccaagctagtgatggatttag

SEQ ID NO: 83491 - DNA, 25 bp, Artificial
  probe
  misc_feature (1)..(25): SEQ ID NO: 7569; WAN024BKA_at; Start 44; Stop 68
ttagaataggtgatttggagcgtcc

SEQ ID NO: 83492 - DNA, 25 bp, Artificial
  probe
  misc_feature (1)..(25): SEQ ID NO: 7569; WAN024BKA_at; Start 24; Stop 48
tgaccaagctagtgatggatttaga

SEQ ID NO: 83493 - DNA, 25 bp, Artificial
  probe
  misc_feature (1)..(25): SEQ ID NO: 7569; WAN024BKA_at; Start 46; Stop 70
agaataggtgatttggagcgtccta

SEQ ID NO: 83494 - DNA, 25 bp, Artificial
  probe
  misc_feature (1)..(25): SEQ ID NO: 7569; WAN024BKA_at; Start 25; Stop 49
gaccaagctagtgatggatttagaa

SEQ ID NO: 83495 - DNA, 25 bp, Artificial
  probe
  misc_feature (1)..(25): SEQ ID NO: 7569; WAN024BKA_at; Start 11; Stop 35
gtctgtatcttactgaccaagctag

SEQ ID NO: 83496 - DNA, 25 bp, Artificial
  probe
  misc_feature (1)..(25): SEQ ID NO: 7569; WAN024BKA_at; Start 4; Stop 28
ccttgcagtctgtatcttactgacc

SEQ ID NO: 83497 - DNA, 25 bp, Artificial
  probe
  misc_feature (1)..(25): SEQ ID NO: 7569; WAN024BKA_at; Start 2; Stop 26
tgccttgcagtctgtatcttactga

SEQ ID NO: 83498 - DNA, 25 bp, Artificial
  probe
  misc_feature (1)..(25): SEQ ID NO: 7569; WAN024BKA_at; Start 13; Stop 37
ctgtatcttactgaccaagctagtg

SEQ ID NO: 83499 - DNA, 25 bp, Artificial
  probe
  misc_feature (1)..(25): SEQ ID NO: 7569; WAN024BKA_at; Start 28; Stop 52
caagctagtgatggatttagaatag

SEQ ID NO: 83500 - DNA, 25 bp, Artificial
  probe
  misc_feature (1)..(25): SEQ ID NO: 7569; WAN024BKA_at; Start 50; Stop 74
taggtgatttggagcgtcctattag

SEQ ID NO: 83501 - DNA, 25 bp, Artificial
  probe
  misc_feature (1)..(25): SEQ ID NO: 7569; WAN024BKA_at; Start 31; Stop 55
gctagtgatggatttagaataggtg

SEQ ID NO: 83502 - DNA, 25 bp, Artificial
  probe
  misc_feature (1)..(25): SEQ ID NO: 7569; WAN024BKA_at; Start 51; Stop 75
aggtgatttggagcgtcctattagc

SEQ ID NO: 83503 - DNA, 25 bp, Artificial
  probe
  misc_feature (1)..(25): SEQ ID NO: 7569; WAN024BKA_at; Start 22; Stop 46
actgaccaagctagtgatggattta

SEQ ID NO: 83504 - DNA, 25 bp, Artificial
  probe
  misc_feature (1)..(25): SEQ ID NO: 7606; WAN024BKB_at; Start 18; Stop 42
ttcgtttgttcttcatatccccgtc

SEQ ID NO: 83505 - DNA, 25 bp, Artificial
  probe
  misc_feature (1)..(25): SEQ ID NO: 7606; WAN024BKB_at; Start 14; Stop 38
aatattcgtttgttcttcatatccc

SEQ ID NO: 83506 - DNA, 25 bp, Artificial
  probe
  misc_feature (1)..(25): SEQ ID NO: 7606; WAN024BKB_at; Start 8; Stop 32
tctttaaatattcgtttgttcttca

SEQ ID NO: 83507 - DNA, 25 bp, Artificial
  probe
  misc_feature (1)..(25): SEQ ID NO: 7606; WAN024BKB_at; Start 17; Stop 41
attcgtttgttcttcatatccccgt

SEQ ID NO: 83508 - DNA, 25 bp, Artificial
  probe
  misc_feature (1)..(25): SEQ ID NO: 7606; WAN024BKB_at; Start 69; Stop 93
tatagcactttttaatagcaattca

SEQ ID NO: 83509 - DNA, 25 bp, Artificial
  probe
  misc_feature (1)..(25): SEQ ID NO: 7606; WAN024BKB_at; Start 16; Stop 40
tattcgtttgttcttcatatccccg

SEQ ID NO: 83510 - DNA, 25 bp, Artificial
  probe
  misc_feature (1)..(25): SEQ ID NO: 7606; WAN024BKB_at; Start 33; Stop 57
tatccccgtcctcttttcttctata

SEQ ID NO: 83511 - DNA, 25 bp, Artificial
  probe
  misc_feature (1)..(25): SEQ ID NO: 7606; WAN024BKB_at; Start 54; Stop 78
tatatatactattattatagcactt

SEQ ID NO: 83512 - DNA, 25 bp, Artificial
  probe
  misc_feature (1)..(25): SEQ ID NO: 7606; WAN024BKB_at; Start 70; Stop 94
atagcactttttaatagcaattcaa

SEQ ID NO: 83513 - DNA, 25 bp, Artificial
  probe
  misc_feature (1)..(25): SEQ ID NO: 7606; WAN024BKB_at; Start 22; Stop 46
tttgttcttcatatccccgtcctct

SEQ ID NO: 83514 - DNA, 25 bp, Artificial
  probe
  misc_feature (1)..(25): SEQ ID NO: 7606; WAN024BKB_at; Start 41; Stop 65
tcctcttttcttctatatatactat

SEQ ID NO: 83515 - DNA, 25 bp, Artificial
  probe
  misc_feature (1)..(25): SEQ ID NO: 7606; WAN024BKB_at; Start 24; Stop 48
tgttcttcatatccccgtcctcttt

SEQ ID NO: 83516 - DNA, 25 bp, Artificial
  probe
  misc_feature (1)..(25): SEQ ID NO: 7606; WAN024BKB_at; Start 78; Stop 102
ttttaatagcaattcaagaaagaaa

SEQ ID NO: 83517 - DNA, 25 bp, Artificial
  probe
  misc_feature (1)..(25): SEQ ID NO: 7606; WAN024BKB_at; Start 20; Stop 44
cgtttgttcttcatatccccgtcct

SEQ ID NO: 83518 - DNA, 25 bp, Artificial
  probe
  misc_feature (1)..(25): SEQ ID NO: 7606; WAN024BKB_at; Start 36; Stop 60
ccccgtcctcttttcttctatatat

SEQ ID NO: 83519 - DNA, 25 bp, Artificial
  probe
  misc_feature (1)..(25): SEQ ID NO: 7606; WAN024BKB_at; Start 21; Stop 45
gtttgttcttcatatccccgtcctc

SEQ ID NO: 83520 - DNA, 25 bp, Artificial
  probe
  misc_feature (1)..(25): SEQ ID NO: 7606; WAN024BKB_at; Start 40; Stop 64
gtcctcttttcttctatatatacta

SEQ ID NO: 83521 - DNA, 25 bp, Artificial
  probe
  misc_feature (1)..(25): SEQ ID NO: 7606; WAN024BKB_at; Start 38; Stop 62
ccgtcctcttttcttctatatatac

SEQ ID NO: 83522 - DNA, 25 bp, Artificial
  probe
  misc_feature (1)..(25): SEQ ID NO: 7606; WAN024BKB_at; Start 73; Stop 97
gcactttttaatagcaattcaagaa

SEQ ID NO: 83523 - DNA, 25 bp, Artificial
  probe
  misc_feature (1)..(25): SEQ ID NO: 7606; WAN024BKB_at; Start 13; Stop 37
aaatattcgtttgttcttcatatcc

SEQ ID NO: 83524 - DNA, 25 bp, Artificial
  probe
  misc_feature (1)..(25): SEQ ID NO: 7606; WAN024BKB_at; Start 76; Stop 100
ctttttaatagcaattcaagaaaga

SEQ ID NO: 83525 - DNA, 25 bp, Artificial
  probe
  misc_feature (1)..(25): SEQ ID NO: 7606; WAN024BKB_at; Start 75; Stop 99
actttttaatagcaattcaagaaag

SEQ ID NO: 83526 - DNA, 25 bp, Artificial
  probe
  misc_feature (1)..(25): SEQ ID NO: 7606; WAN024BKB_at; Start 35; Stop 59
tccccgtcctcttttcttctatata

SEQ ID NO: 83527 - DNA, 25 bp, Artificial
  probe
  misc_feature (1)..(25): SEQ ID NO: 7606; WAN024BKB_at; Start 68; Stop 92
ttatagcactttttaatagcaattc

SEQ ID NO: 83528 - DNA, 25 bp, Artificial
  probe
  misc_feature (1)..(25): SEQ ID NO: 7606; WAN024BKB_at; Start 12; Stop 36
taaatattcgtttgttcttcatatc

SEQ ID NO: 83529 - DNA, 25 bp, Artificial
  probe
  misc_feature (1)..(25): SEQ ID NO: 7606; WAN024BKB_at; Start 19; Stop 43
tcgtttgttcttcatatccccgtcc

SEQ ID NO: 83530 - DNA, 25 bp, Artificial
  probe
  misc_feature (1)..(25): SEQ ID NO: 7606; WAN024BKB_at; Start 74; Stop 98
cactttttaatagcaattcaagaaa

SEQ ID NO: 83531 - DNA, 25 bp, Artificial
  probe
  misc_feature (1)..(25): SEQ ID NO: 7606; WAN024BKB_at; Start 71; Stop 95
tagcactttttaatagcaattcaag

SEQ ID NO: 83532 - DNA, 25 bp, Artificial
  probe
  misc_feature (1)..(25): SEQ ID NO: 7606; WAN024BKB_at; Start 77; Stop 101
tttttaatagcaattcaagaaagaa

SEQ ID NO: 83533 - DNA, 25 bp, Artificial
  probe
  misc_feature (1)..(25): SEQ ID NO: 7606; WAN024BKB_at; Start 37; Stop 61
cccgtcctcttttcttctatatata

SEQ ID NO: 83534 - DNA, 25 bp, Artificial
  probe
  misc_feature (1)..(25): SEQ ID NO: 7606; WAN024BKB_at; Start 72; Stop 96
agcactttttaatagcaattcaaga

SEQ ID NO: 83535 - DNA, 25 bp, Artificial
  probe
  misc_feature (1)..(25): SEQ ID NO: 7606; WAN024BKB_at; Start 34; Stop 58
atccccgtcctcttttcttctatat

SEQ ID NO: 83536 - DNA, 25 bp, Artificial
  probe
  misc_feature (1)..(25): SEQ ID NO: 7606; WAN024BKB_at; Start 23; Stop 47
ttgttcttcatatccccgtcctctt

SEQ ID NO: 83537 - DNA, 25 bp, Artificial
  probe
  misc_feature (1)..(25): SEQ ID NO: 7606; WAN024BKB_at; Start 39; Stop 63
cgtcctcttttcttctatatatact

SEQ ID NO: 83538 - DNA, 25 bp, Artificial
  probe
  misc_feature (1)..(25): SEQ ID NO: 6763; WAN024BKC_at; Start 30; Stop 54
gggattgtattactctgaactttcg

SEQ ID NO: 83539 - DNA, 25 bp, Artificial
  probe
  misc_feature (1)..(25): SEQ ID NO: 6763; WAN024BKC_at; Start 32; Stop 56
gattgtattactctgaactttcgaa

SEQ ID NO: 83540 - DNA, 25 bp, Artificial
  probe
  misc_feature (1)..(25): SEQ ID NO: 6763; WAN024BKC_at; Start 66; Stop 90
tctcgtgattttgagctattctagg

SEQ ID NO: 83541 - DNA, 25 bp, Artificial
  probe
  misc_feature (1)..(25): SEQ ID NO: 6763; WAN024BKC_at; Start 23; Stop 47
tcctatggggattgtattactctga

SEQ ID NO: 83542 - DNA, 25 bp, Artificial
  probe
  misc_feature (1)..(25): SEQ ID NO: 6763; WAN024BKC_at; Start 78; Stop 102
gagctattctaggtttagaatcctt

SEQ ID NO: 83543 - DNA, 25 bp, Artificial
  probe
  misc_feature (1)..(25): SEQ ID NO: 6763; WAN024BKC_at; Start 54; Stop 78
gaataccttagttctcgtgattttg

SEQ ID NO: 83544 - DNA, 25 bp, Artificial
  probe
  misc_feature (1)..(25): SEQ ID NO: 6763; WAN024BKC_at; Start 43; Stop 67
tctgaactttcgaataccttagttc

SEQ ID NO: 83545 - DNA, 25 bp, Artificial
  probe
  misc_feature (1)..(25): SEQ ID NO: 6763; WAN024BKC_at; Start 2; Stop 26
tgcttaataagaatggagaattcct

SEQ ID NO: 83546 - DNA, 25 bp, Artificial
  probe
  misc_feature (1)..(25): SEQ ID NO: 6763; WAN024BKC_at; Start 93; Stop 117
tagaatccttcagaatgtaaaattt

SEQ ID NO: 83547 - DNA, 25 bp, Artificial
  probe
  misc_feature (1)..(25): SEQ ID NO: 6763; WAN024BKC_at; Start 48; Stop 72
actttcgaataccttagttctcgtg

SEQ ID NO: 83548 - DNA, 25 bp, Artificial
  probe
  misc_feature (1)..(25): SEQ ID NO: 6763; WAN024BKC_at; Start 59; Stop 83
ccttagttctcgtgattttgagcta

SEQ ID NO: 83549 - DNA, 25 bp, Artificial
  probe
  misc_feature (1)..(25): SEQ ID NO: 6763; WAN024BKC_at; Start 77; Stop 101
tgagctattctaggtttagaatcct

SEQ ID NO: 83550 - DNA, 25 bp, Artificial
  probe
  misc_feature (1)..(25): SEQ ID NO: 6763; WAN024BKC_at; Start 90; Stop 114
gtttagaatccttcagaatgtaaaa

SEQ ID NO: 83551 - DNA, 25 bp, Artificial
  probe
  misc_feature (1)..(25): SEQ ID NO: 6763; WAN024BKC_at; Start 68; Stop 92
tcgtgattttgagctattctaggtt

SEQ ID NO: 83552 - DNA, 25 bp, Artificial
  probe
  misc_feature (1)..(25): SEQ ID NO: 6763; WAN024BKC_at; Start 64; Stop 88
gttctcgtgattttgagctattcta

SEQ ID NO: 83553 - DNA, 25 bp, Artificial
  probe
  misc_feature (1)..(25): SEQ ID NO: 6763; WAN024BKC_at; Start 62; Stop 86
tagttctcgtgattttgagctattc

SEQ ID NO: 83554 - DNA, 25 bp, Artificial
  probe
  misc_feature (1)..(25): SEQ ID NO: 6763; WAN024BKC_at; Start 51; Stop 75
ttcgaataccttagttctcgtgatt

SEQ ID NO: 83555 - DNA, 25 bp, Artificial
  probe
  misc_feature (1)..(25): SEQ ID NO: 6763; WAN024BKC_at; Start 6; Stop 30
taataagaatggagaattcctatgg

SEQ ID NO: 83556 - DNA, 25 bp, Artificial
  probe
  misc_feature (1)..(25): SEQ ID NO: 6763; WAN024BKC_at; Start 52; Stop 76
tcgaataccttagttctcgtgattt

SEQ ID NO: 83557 - DNA, 25 bp, Artificial
  probe
  misc_feature (1)..(25): SEQ ID NO: 6763; WAN024BKC_at; Start 87; Stop 111
taggtttagaatccttcagaatgta

SEQ ID NO: 83558 - DNA, 25 bp, Artificial
  probe
  misc_feature (1)..(25): SEQ ID NO: 6763; WAN024BKC_at; Start 69; Stop 93
cgtgattttgagctattctaggttt

SEQ ID NO: 83559 - DNA, 25 bp, Artificial
  probe
  misc_feature (1)..(25): SEQ ID NO: 6763; WAN024BKC_at; Start 85; Stop 109
tctaggtttagaatccttcagaatg

SEQ ID NO: 83560 - DNA, 25 bp, Artificial
  probe
  misc_feature (1)..(25): SEQ ID NO: 6763; WAN024BKC_at; Start 57; Stop 81
taccttagttctcgtgattttgagc

SEQ ID NO: 83561 - DNA, 25 bp, Artificial
  probe
  misc_feature (1)..(25): SEQ ID NO: 6763; WAN024BKC_at; Start 89; Stop 113
ggtttagaatccttcagaatgtaaa

SEQ ID NO: 83562 - DNA, 25 bp, Artificial
  probe
  misc_feature (1)..(25): SEQ ID NO: 6763; WAN024BKC_at; Start 40; Stop 64
tactctgaactttcgaataccttag

SEQ ID NO: 83563 - DNA, 25 bp, Artificial
  probe
  misc_feature (1)..(25): SEQ ID NO: 6763; WAN024BKC_at; Start 45; Stop 69
tgaactttcgaataccttagttctc

SEQ ID NO: 83564 - DNA, 25 bp, Artificial
  probe
  misc_feature (1)..(25): SEQ ID NO: 6763; WAN024BKC_at; Start 31; Stop 55
ggattgtattactctgaactttcga

SEQ ID NO: 83565 - DNA, 25 bp, Artificial
  probe
  misc_feature (1)..(25): SEQ ID NO: 6763; WAN024BKC_at; Start 72; Stop 96
gattttgagctattctaggtttaga

SEQ ID NO: 83566 - DNA, 25 bp, Artificial
  probe
  misc_feature (1)..(25): SEQ ID NO: 6763; WAN024BKC_at; Start 49; Stop 73
ctttcgaataccttagttctcgtga

SEQ ID NO: 83567 - DNA, 25 bp, Artificial
  probe
  misc_feature (1)..(25): SEQ ID NO: 6763; WAN024BKC_at; Start 82; Stop 106
tattctaggtttagaatccttcaga

SEQ ID NO: 83568 - DNA, 25 bp, Artificial
  probe
  misc_feature (1)..(25): SEQ ID NO: 6763; WAN024BKC_at; Start 3; Stop 27
gcttaataagaatggagaattccta

SEQ ID NO: 83569 - DNA, 25 bp, Artificial
  probe
  misc_feature (1)..(25): SEQ ID NO: 6763; WAN024BKC_at; Start 7; Stop 31
aataagaatggagaattcctatggg

SEQ ID NO: 83570 - DNA, 25 bp, Artificial
  probe
  misc_feature (1)..(25): SEQ ID NO: 6763; WAN024BKC_at; Start 37; Stop 61
tattactctgaactttcgaatacct

SEQ ID NO: 83571 - DNA, 25 bp, Artificial
  probe
  misc_feature (1)..(25): SEQ ID NO: 6763; WAN024BKC_at; Start 41; Stop 65
actctgaactttcgaataccttagt

SEQ ID NO: 83572 - DNA, 25 bp, Artificial
  probe
  misc_feature (1)..(25): SEQ ID NO: 7033; WAN024BKD_at; Start 64; Stop 88
ttagttcatttcctctacatgatat

SEQ ID NO: 83573 - DNA, 25 bp, Artificial
  probe
  misc_feature (1)..(25): SEQ ID NO: 7033; WAN024BKD_at; Start 61; Stop 85
ggattagttcatttcctctacatga

SEQ ID NO: 83574 - DNA, 25 bp, Artificial
  probe
  misc_feature (1)..(25): SEQ ID NO: 7033; WAN024BKD_at; Start 60; Stop 84
tggattagttcatttcctctacatg

SEQ ID NO: 83575 - DNA, 25 bp, Artificial
  probe
  misc_feature (1)..(25): SEQ ID NO: 7033; WAN024BKD_at; Start 63; Stop 87
attagttcatttcctctacatgata

SEQ ID NO: 83576 - DNA, 25 bp, Artificial
  probe
  misc_feature (1)..(25): SEQ ID NO: 7033; WAN024BKD_at; Start 65; Stop 89
tagttcatttcctctacatgatatc

SEQ ID NO: 83577 - DNA, 25 bp, Artificial
  probe
  misc_feature (1)..(25): SEQ ID NO: 7033; WAN024BKD_at; Start 62; Stop 86
gattagttcatttcctctacatgat

SEQ ID NO: 83578 - DNA, 25 bp, Artificial
  probe
  misc_feature (1)..(25): SEQ ID NO: 7510; WAN024BKE_at; Start 74; Stop 98
cttcgtctgttgagatgaaacatcg

SEQ ID NO: 83579 - DNA, 25 bp, Artificial
  probe
  misc_feature (1)..(25): SEQ ID NO: 7510; WAN024BKE_at; Start 77; Stop 101
cgtctgttgagatgaaacatcgctt

SEQ ID NO: 83580 - DNA, 25 bp, Artificial
  probe
  misc_feature (1)..(25): SEQ ID NO: 7510; WAN024BKE_at; Start 31; Stop 55
caacagcaaaaaatggacatccgaa

SEQ ID NO: 83581 - DNA, 25 bp, Artificial
  probe
  misc_feature (1)..(25): SEQ ID NO: 7510; WAN024BKE_at; Start 47; Stop 71
acatccgaataaagaaaggctggct

SEQ ID NO: 83582 - DNA, 25 bp, Artificial
  probe
  misc_feature (1)..(25): SEQ ID NO: 7510; WAN024BKE_at; Start 68; Stop 92
ggctgacttcgtctgttgagatgaa

SEQ ID NO: 83583 - DNA, 25 bp, Artificial
  probe
  misc_feature (1)..(25): SEQ ID NO: 7510; WAN024BKE_at; Start 46; Stop 70
gacatccgaataaagaaaggctggc

SEQ ID NO: 83584 - DNA, 25 bp, Artificial
  probe
  misc_feature (1)..(25): SEQ ID NO: 7510; WAN024BKE_at; Start 29; Stop 53
cccaacagcaaaaaatggacatccg

SEQ ID NO: 83585 - DNA, 25 bp, Artificial
  probe
  misc_feature (1)..(25): SEQ ID NO: 7510; WAN024BKE_at; Start 65; Stop 89
gctggctgacttcgtctgttgagat

SEQ ID NO: 83586 - DNA, 25 bp, Artificial
  probe
  misc_feature (1)..(25): SEQ ID NO: 7510; WAN024BKE_at; Start 16; Stop 40
ttccaaaataaagcccaacagcaaa

SEQ ID NO: 83587 - DNA, 25 bp, Artificial
  probe
  misc_feature (1)..(25): SEQ ID NO: 7510; WAN024BKE_at; Start 34; Stop 58
cagcaaaaaatggacatccgaataa

SEQ ID NO: 83588 - DNA, 25 bp, Artificial
  probe
  misc_feature (1)..(25): SEQ ID NO: 7510; WAN024BKE_at; Start 26; Stop 50
aagcccaacagcaaaaaatggacat

SEQ ID NO: 83589 - DNA, 25 bp, Artificial
  probe
  misc_feature (1)..(25): SEQ ID NO: 7510; WAN024BKE_at; Start 45; Stop 69
ggacatccgaataaagaaaggctgg

SEQ ID NO: 83590 - DNA, 25 bp, Artificial
  probe
  misc_feature (1)..(25): SEQ ID NO: 7510; WAN024BKE_at; Start 13; Stop 37
tctttccaaaataaagcccaacagc

SEQ ID NO: 83591 - DNA, 25 bp, Artificial
  probe
  misc_feature (1)..(25): SEQ ID NO: 7510; WAN024BKE_at; Start 56; Stop 80
taaagaaaggctggctgacttcgtc

SEQ ID NO: 83592 - DNA, 25 bp, Artificial
  probe
  misc_feature (1)..(25): SEQ ID NO: 7510; WAN024BKE_at; Start 50; Stop 74
tccgaataaagaaaggctggctgac

SEQ ID NO: 83593 - DNA, 25 bp, Artificial
  probe
  misc_feature (1)..(25): SEQ ID NO: 7510; WAN024BKE_at; Start 58; Stop 82
aagaaaggctggctgacttcgtctg

SEQ ID NO: 83594 - DNA, 25 bp, Artificial
  probe
  misc_feature (1)..(25): SEQ ID NO: 7510; WAN024BKE_at; Start 72; Stop 96
gacttcgtctgttgagatgaaacat

SEQ ID NO: 83595 - DNA, 25 bp, Artificial
  probe
  misc_feature (1)..(25): SEQ ID NO: 7510; WAN024BKE_at; Start 76; Stop 100
tcgtctgttgagatgaaacatcgct

SEQ ID NO: 83596 - DNA, 25 bp, Artificial
  probe
  misc_feature (1)..(25): SEQ ID NO: 7510; WAN024BKE_at; Start 24; Stop 48
taaagcccaacagcaaaaaatggac

SEQ ID NO: 83597 - DNA, 25 bp, Artificial
  probe
  misc_feature (1)..(25): SEQ ID NO: 7510; WAN024BKE_at; Start 36; Stop 60
gcaaaaaatggacatccgaataaag

SEQ ID NO: 83598 - DNA, 25 bp, Artificial
  probe
  misc_feature (1)..(25): SEQ ID NO: 7510; WAN024BKE_at; Start 44; Stop 68
tggacatccgaataaagaaaggctg

SEQ ID NO: 83599 - DNA, 25 bp, Artificial
  probe
  misc_feature (1)..(25): SEQ ID NO: 7510; WAN024BKE_at; Start 60; Stop 84
gaaaggctggctgacttcgtctgtt

SEQ ID NO: 83600 - DNA, 25 bp, Artificial
  probe
  misc_feature (1)..(25): SEQ ID NO: 7510; WAN024BKE_at; Start 79; Stop 103
tctgttgagatgaaacatcgcttcc

SEQ ID NO: 83601 - DNA, 25 bp, Artificial
  probe
  misc_feature (1)..(25): SEQ ID NO: 7510; WAN024BKE_at; Start 64; Stop 88
ggctggctgacttcgtctgttgaga

SEQ ID NO: 83602 - DNA, 25 bp, Artificial
  probe
  misc_feature (1)..(25): SEQ ID NO: 7510; WAN024BKE_at; Start 81; Stop 105
tgttgagatgaaacatcgcttcctt

SEQ ID NO: 83603 - DNA, 25 bp, Artificial
  probe
  misc_feature (1)..(25): SEQ ID NO: 7510; WAN024BKE_at; Start 54; Stop 78
aataaagaaaggctggctgacttcg

SEQ ID NO: 83604 - DNA, 25 bp, Artificial
  probe
  misc_feature (1)..(25): SEQ ID NO: 7510; WAN024BKE_at; Start 42; Stop 66
aatggacatccgaataaagaaaggc

SEQ ID NO: 83605 - DNA, 25 bp, Artificial
  probe
  misc_feature (1)..(25): SEQ ID NO: 7510; WAN024BKE_at; Start 48; Stop 72
catccgaataaagaaaggctggctg

SEQ ID NO: 83606 - DNA, 25 bp, Artificial
  probe
  misc_feature (1)..(25): SEQ ID NO: 7510; WAN024BKE_at; Start 51; Stop 75
ccgaataaagaaaggctggctgact

SEQ ID NO: 83607 - DNA, 25 bp, Artificial
  probe
  misc_feature (1)..(25): SEQ ID NO: 7510; WAN024BKE_at; Start 70; Stop 94
ctgacttcgtctgttgagatgaaac

SEQ ID NO: 83608 - DNA, 25 bp, Artificial
  probe
  misc_feature (1)..(25): SEQ ID NO: 7510; WAN024BKE_at; Start 52; Stop 76
cgaataaagaaaggctggctgactt

SEQ ID NO: 83609 - DNA, 25 bp, Artificial
  probe
  misc_feature (1)..(25): SEQ ID NO: 7510; WAN024BKE_at; Start 28; Stop 52
gcccaacagcaaaaaatggacatcc

SEQ ID NO: 83610 - DNA, 25 bp, Artificial
  probe
  misc_feature (1)..(25): SEQ ID NO: 7510; WAN024BKE_at; Start 15; Stop 39
tttccaaaataaagcccaacagcaa

SEQ ID NO: 83611 - DNA, 25 bp, Artificial
  probe
  misc_feature (1)..(25): SEQ ID NO: 7510; WAN024BKE_at; Start 62; Stop 86
aaggctggctgacttcgtctgttga

SEQ ID NO: 83612 - DNA, 25 bp, Artificial
  probe
  misc_feature (1)..(25): SEQ ID NO: 6955; WAN024BKF_at; Start 9; Stop 33
ttacgagtcagtatcttgggatact

SEQ ID NO: 83613 - DNA, 25 bp, Artificial
  probe
  misc_feature (1)..(25): SEQ ID NO: 6955; WAN024BKF_at; Start 1; Stop 25
atgtatttttacgagtcagtatctt

SEQ ID NO: 83614 - DNA, 25 bp, Artificial
  probe
  misc_feature (1)..(25): SEQ ID NO: 6955; WAN024BKF_at; Start 15; Stop 39
gtcagtatcttgggatactggtttt

SEQ ID NO: 83615 - DNA, 25 bp, Artificial
  probe
  misc_feature (1)..(25): SEQ ID NO: 6955; WAN024BKF_at; Start 10; Stop 34
tacgagtcagtatcttgggatactg

SEQ ID NO: 83616 - DNA, 25 bp, Artificial
  probe
  misc_feature (1)..(25): SEQ ID NO: 6955; WAN024BKF_at; Start 12; Stop 36
cgagtcagtatcttgggatactggt

SEQ ID NO: 83617 - DNA, 25 bp, Artificial
  probe
  misc_feature (1)..(25): SEQ ID NO: 6955; WAN024BKF_at; Start 2; Stop 26
tgtatttttacgagtcagtatcttg

SEQ ID NO: 83618 - DNA, 25 bp, Artificial
  probe
  misc_feature (1)..(25): SEQ ID NO: 6955; WAN024BKF_at; Start 5; Stop 29
atttttacgagtcagtatcttggga

SEQ ID NO: 83619 - DNA, 25 bp, Artificial
  probe
  misc_feature (1)..(25): SEQ ID NO: 6955; WAN024BKF_at; Start 16; Stop 40
tcagtatcttgggatactggttttt

SEQ ID NO: 83620 - DNA, 25 bp, Artificial
  probe
  misc_feature (1)..(25): SEQ ID NO: 6955; WAN024BKF_at; Start 3; Stop 27
gtatttttacgagtcagtatcttgg

SEQ ID NO: 83621 - DNA, 25 bp, Artificial
  probe
  misc_feature (1)..(25): SEQ ID NO: 6955; WAN024BKF_at; Start 8; Stop 32
tttacgagtcagtatcttgggatac

SEQ ID NO: 83622 - DNA, 25 bp, Artificial
  probe
  misc_feature (1)..(25): SEQ ID NO: 6955; WAN024BKF_at; Start 13; Stop 37
gagtcagtatcttgggatactggtt

SEQ ID NO: 83623 - DNA, 25 bp, Artificial
  probe
  misc_feature (1)..(25): SEQ ID NO: 6955; WAN024BKF_at; Start 4; Stop 28
tatttttacgagtcagtatcttggg

SEQ ID NO: 83624 - DNA, 25 bp, Artificial
  probe
  misc_feature (1)..(25): SEQ ID NO: 6955; WAN024BKF_at; Start 7; Stop 31
ttttacgagtcagtatcttgggata

SEQ ID NO: 83625 - DNA, 25 bp, Artificial
  probe
  misc_feature (1)..(25): SEQ ID NO: 6955; WAN024BKF_at; Start 6; Stop 30
tttttacgagtcagtatcttgggat

SEQ ID NO: 83626 - DNA, 25 bp, Artificial
  probe
  misc_feature (1)..(25): SEQ ID NO: 6955; WAN024BKF_at; Start 14; Stop 38
agtcagtatcttgggatactggttt

SEQ ID NO: 83627 - DNA, 25 bp, Artificial
  probe
  misc_feature (1)..(25): SEQ ID NO: 6955; WAN024BKF_at; Start 11; Stop 35
acgagtcagtatcttgggatactgg

SEQ ID NO: 83628 - DNA, 25 bp, Artificial
  probe
  misc_feature (1)..(25): SEQ ID NO: 6955; WAN024BKF_at; Start 17; Stop 41
cagtatcttgggatactggttttta

SEQ ID NO: 83629 - DNA, 25 bp, Artificial
  probe
  misc_feature (1)..(25): SEQ ID NO: 6612; WAN024BKG_at; Start 56; Stop 80
tagataagatgtctgcaatccttta

SEQ ID NO: 83630 - DNA, 25 bp, Artificial
  probe
  misc_feature (1)..(25): SEQ ID NO: 6612; WAN024BKG_at; Start 9; Stop 33
aaattatcaagttggaatgtttgta

SEQ ID NO: 83631 - DNA, 25 bp, Artificial
  probe
  misc_feature (1)..(25): SEQ ID NO: 6612; WAN024BKG_at; Start 19; Stop 43
gttggaatgtttgtatctaaatata

SEQ ID NO: 83632 - DNA, 25 bp, Artificial
  probe
  misc_feature (1)..(25): SEQ ID NO: 6612; WAN024BKG_at; Start 58; Stop 82
gataagatgtctgcaatcctttata

SEQ ID NO: 83633 - DNA, 25 bp, Artificial
  probe
  misc_feature (1)..(25): SEQ ID NO: 6612; WAN024BKG_at; Start 47; Stop 71
gcatgtatttagataagatgtctgc

SEQ ID NO: 83634 - DNA, 25 bp, Artificial
  probe
  misc_feature (1)..(25): SEQ ID NO: 6612; WAN024BKG_at; Start 57; Stop 81
agataagatgtctgcaatcctttat

SEQ ID NO: 83635 - DNA, 25 bp, Artificial
  probe
  misc_feature (1)..(25): SEQ ID NO: 6612; WAN024BKG_at; Start 30; Stop 54
tgtatctaaatatattagcatgtat

SEQ ID NO: 83636 - DNA, 25 bp, Artificial
  probe
  misc_feature (1)..(25): SEQ ID NO: 6612; WAN024BKG_at; Start 15; Stop 39
tcaagttggaatgtttgtatctaaa

SEQ ID NO: 83637 - DNA, 25 bp, Artificial
  probe
  misc_feature (1)..(25): SEQ ID NO: 6612; WAN024BKG_at; Start 52; Stop 76
tatttagataagatgtctgcaatcc

SEQ ID NO: 83638 - DNA, 25 bp, Artificial
  probe
  misc_feature (1)..(25): SEQ ID NO: 6612; WAN024BKG_at; Start 48; Stop 72
catgtatttagataagatgtctgca

SEQ ID NO: 83639 - DNA, 25 bp, Artificial
  probe
  misc_feature (1)..(25): SEQ ID NO: 6612; WAN024BKG_at; Start 4; Stop 28
agtgaaaattatcaagttggaatgt

SEQ ID NO: 83640 - DNA, 25 bp, Artificial
  probe
  misc_feature (1)..(25): SEQ ID NO: 6612; WAN024BKG_at; Start 11; Stop 35
attatcaagttggaatgtttgtatc

SEQ ID NO: 83641 - DNA, 25 bp, Artificial
  probe
  misc_feature (1)..(25): SEQ ID NO: 6612; WAN024BKG_at; Start 7; Stop 31
gaaaattatcaagttggaatgtttg

SEQ ID NO: 83642 - DNA, 25 bp, Artificial
  probe
  misc_feature (1)..(25): SEQ ID NO: 6612; WAN024BKG_at; Start 45; Stop 69
tagcatgtatttagataagatgtct

SEQ ID NO: 83643 - DNA, 25 bp, Artificial
  probe
  misc_feature (1)..(25): SEQ ID NO: 6612; WAN024BKG_at; Start 53; Stop 77
atttagataagatgtctgcaatcct

SEQ ID NO: 83644 - DNA, 25 bp, Artificial
  probe
  misc_feature (1)..(25): SEQ ID NO: 6612; WAN024BKG_at; Start 49; Stop 73
atgtatttagataagatgtctgcaa

SEQ ID NO: 83645 - DNA, 25 bp, Artificial
  probe
  misc_feature (1)..(25): SEQ ID NO: 6612; WAN024BKG_at; Start 14; Stop 38
atcaagttggaatgtttgtatctaa

SEQ ID NO: 83646 - DNA, 25 bp, Artificial
  probe
  misc_feature (1)..(25): SEQ ID NO: 6612; WAN024BKG_at; Start 27; Stop 51
gtttgtatctaaatatattagcatg

SEQ ID NO: 83647 - DNA, 25 bp, Artificial
  probe
  misc_feature (1)..(25): SEQ ID NO: 6612; WAN024BKG_at; Start 3; Stop 27
gagtgaaaattatcaagttggaatg

SEQ ID NO: 83648 - DNA, 25 bp, Artificial
  probe
  misc_feature (1)..(25): SEQ ID NO: 6612; WAN024BKG_at; Start 40; Stop 64
tatattagcatgtatttagataaga

SEQ ID NO: 83649 - DNA, 25 bp, Artificial
  probe
  misc_feature (1)..(25): SEQ ID NO: 6612; WAN024BKG_at; Start 55; Stop 79
ttagataagatgtctgcaatccttt

SEQ ID NO: 83650 - DNA, 25 bp, Artificial
  probe
  misc_feature (1)..(25): SEQ ID NO: 6612; WAN024BKG_at; Start 51; Stop 75
gtatttagataagatgtctgcaatc

SEQ ID NO: 83651 - DNA, 25 bp, Artificial
  probe
  misc_feature (1)..(25): SEQ ID NO: 6612; WAN024BKG_at; Start 54; Stop 78
tttagataagatgtctgcaatcctt

SEQ ID NO: 83652 - DNA, 25 bp, Artificial
  probe
  misc_feature (1)..(25): SEQ ID NO: 6612; WAN024BKG_at; Start 12; Stop 36
ttatcaagttggaatgtttgtatct

SEQ ID NO: 83653 - DNA, 25 bp, Artificial
  probe
  misc_feature (1)..(25): SEQ ID NO: 6612; WAN024BKG_at; Start 46; Stop 70
agcatgtatttagataagatgtctg

SEQ ID NO: 83654 - DNA, 25 bp, Artificial
  probe
  misc_feature (1)..(25): SEQ ID NO: 6612; WAN024BKG_at; Start 13; Stop 37
tatcaagttggaatgtttgtatcta

SEQ ID NO: 83655 - DNA, 25 bp, Artificial
  probe
  misc_feature (1)..(25): SEQ ID NO: 6612; WAN024BKG_at; Start 42; Stop 66
tattagcatgtatttagataagatg

SEQ ID NO: 83656 - DNA, 25 bp, Artificial
  probe
  misc_feature (1)..(25): SEQ ID NO: 6612; WAN024BKG_at; Start 17; Stop 41
aagttggaatgtttgtatctaaata

SEQ ID NO: 83657 - DNA, 25 bp, Artificial
  probe
  misc_feature (1)..(25): SEQ ID NO: 6612; WAN024BKG_at; Start 60; Stop 84
taagatgtctgcaatcctttatata

SEQ ID NO: 83658 - DNA, 25 bp, Artificial
  probe
  misc_feature (1)..(25): SEQ ID NO: 6612; WAN024BKG_at; Start 2; Stop 26
tgagtgaaaattatcaagttggaat

SEQ ID NO: 83659 - DNA, 25 bp, Artificial
  probe
  misc_feature (1)..(25): SEQ ID NO: 6612; WAN024BKG_at; Start 44; Stop 68
ttagcatgtatttagataagatgtc

SEQ ID NO: 83660 - DNA, 25 bp, Artificial
  probe
  misc_feature (1)..(25): SEQ ID NO: 6612; WAN024BKG_at; Start 50; Stop 74
tgtatttagataagatgtctgcaat

SEQ ID NO: 83661 - DNA, 25 bp, Artificial
  probe
  misc_feature (1)..(25): SEQ ID NO: 6612; WAN024BKG_at; Start 16; Stop 40
caagttggaatgtttgtatctaaat

SEQ ID NO: 83662 - DNA, 25 bp, Artificial
  probe
  misc_feature (1)..(25): SEQ ID NO: 6612; WAN024BKG_at; Start 5; Stop 29
gtgaaaattatcaagttggaatgtt

SEQ ID NO: 83663 - DNA, 25 bp, Artificial
  probe
  misc_feature (1)..(25): SEQ ID NO: 6388; WAN024BKH_at; Start 652; Stop 676
ggactttctaattcttattcaccga

SEQ ID NO: 83664 - DNA, 25 bp, Artificial
  probe
  misc_feature (1)..(25): SEQ ID NO: 6388; WAN024BKH_at; Start 118; Stop 142
gatggctctacagataattcaggag

SEQ ID NO: 83665 - DNA, 25 bp, Artificial
  probe
  misc_feature (1)..(25): SEQ ID NO: 6388; WAN024BKH_at; Start 307; Stop 331
cttatagaaactttgaaggagcagc

SEQ ID NO: 83666 - DNA, 25 bp, Artificial
  probe
  misc_feature (1)..(25): SEQ ID NO: 6388; WAN024BKH_at; Start 664; Stop 688
tcttattcaccgaagatgatgcgtg

SEQ ID NO: 83667 - DNA, 25 bp, Artificial
  probe
  misc_feature (1)..(25): SEQ ID NO: 6388; WAN024BKH_at; Start 272; Stop 296
cagatgattgggttactgaagagta

SEQ ID NO: 83668 - DNA, 25 bp, Artificial
  probe
  misc_feature (1)..(25): SEQ ID NO: 6388; WAN024BKH_at; Start 258; Stop 282
tacttttgtagactcagatgattgg

SEQ ID NO: 83669 - DNA, 25 bp, Artificial
  probe
  misc_feature (1)..(25): SEQ ID NO: 6388; WAN024BKH_at; Start 228; Stop 252
tggaatcgagagatctaaaggagat

SEQ ID NO: 83670 - DNA, 25 bp, Artificial
  probe
  misc_feature (1)..(25): SEQ ID NO: 6388; WAN024BKH_at; Start 132; Stop 156
taattcaggagcaatatgtcgagag

SEQ ID NO: 83671 - DNA, 25 bp, Artificial
  probe
  misc_feature (1)..(25): SEQ ID NO: 6388; WAN024BKH_at; Start 207; Stop 231
ggtagcggatgcacgtaattttgga

SEQ ID NO: 83672 - DNA, 25 bp, Artificial
  probe
  misc_feature (1)..(25): SEQ ID NO: 6388; WAN024BKH_at; Start 183; Stop 207
ctatttcgaaaaagaaaatgctggg

SEQ ID NO: 83673 - DNA, 25 bp, Artificial
  probe
  misc_feature (1)..(25): SEQ ID NO: 6388; WAN024BKH_at; Start 433; Stop 457
tcaaaacttctaatggaagaacttc

SEQ ID NO: 83674 - DNA, 25 bp, Artificial
  probe
  misc_feature (1)..(25): SEQ ID NO: 6388; WAN024BKH_at; Start 373; Stop 397
tcagatggcttattctatattcacg

SEQ ID NO: 83675 - DNA, 25 bp, Artificial
  probe
  misc_feature (1)..(25): SEQ ID NO: 6388; WAN024BKH_at; Start 386; Stop 410
tctatattcacgtatttgactccga

SEQ ID NO: 83676 - DNA, 25 bp, Artificial
  probe
  misc_feature (1)..(25): SEQ ID NO: 6388; WAN024BKH_at; Start 519; Stop 543
attatttcaagaagttcagtttccg

SEQ ID NO: 83677 - DNA, 25 bp, Artificial
  probe
  misc_feature (1)..(25): SEQ ID NO: 6388; WAN024BKH_at; Start 727; Stop 751
gcgctaaaaggatatgatgtcagta

SEQ ID NO: 83678 - DNA, 25 bp, Artificial
  probe
  misc_feature (1)..(25): SEQ ID NO: 6388; WAN024BKH_at; Start 451; Stop 475
gaacttcctttattagagaggtatg

SEQ ID NO: 83679 - DNA, 25 bp, Artificial
  probe
  misc_feature (1)..(25): SEQ ID NO: 6388; WAN024BKH_at; Start 549; Stop 573
tcgggtgtgtgagtatataggaacc

SEQ ID NO: 83680 - DNA, 25 bp, Artificial
  probe
  misc_feature (1)..(25): SEQ ID NO: 6388; WAN024BKH_at; Start 475; Stop 499
gatatgagctttttaacttcttggg

SEQ ID NO: 83681 - DNA, 25 bp, Artificial
  probe
  misc_feature (1)..(25): SEQ ID NO: 6388; WAN024BKH_at; Start 805; Stop 829
caacgagaacttaaggagaatgtgg

SEQ ID NO: 83682 - DNA, 25 bp, Artificial
  probe
  misc_feature (1)..(25): SEQ ID NO: 6388; WAN024BKH_at; Start 790; Stop 814
catgatattgcaattcaacgagaac

SEQ ID NO: 83683 - DNA, 25 bp, Artificial
  probe
  misc_feature (1)..(25): SEQ ID NO: 6388; WAN024BKH_at; Start 825; Stop 849
tgtggaaacaagacatttagaaatg

SEQ ID NO: 83684 - DNA, 25 bp, Artificial
  probe
  misc_feature (1)..(25): SEQ ID NO: 6388; WAN024BKH_at; Start 750; Stop 774
taaatatttagaccagatgaagttc

SEQ ID NO: 83685 - DNA, 25 bp, Artificial
  probe
  misc_feature (1)..(25): SEQ ID NO: 6388; WAN024BKH_at; Start 151; Stop 175
cgagagtatgctgatcgtgatagtc

SEQ ID NO: 83686 - DNA, 25 bp, Artificial
  probe
  misc_feature (1)..(25): SEQ ID NO: 6388; WAN024BKH_at; Start 586; Stop 610
tttatgcaggttgagaaagtaacct

SEQ ID NO: 83687 - DNA, 25 bp, Artificial
  probe
  misc_feature (1)..(25): SEQ ID NO: 6388; WAN024BKH_at; Start 107; Stop 131
tattagtaaatgatggctctacaga

SEQ ID NO: 83688 - DNA, 25 bp, Artificial
  probe
  misc_feature (1)..(25): SEQ ID NO: 6388; WAN024BKH_at; Start 357; Stop 381
ttcaacctataatgagtcagatggc

SEQ ID NO: 83689 - DNA, 25 bp, Artificial
  probe
  misc_feature (1)..(25): SEQ ID NO: 6388; WAN024BKH_at; Start 713; Stop 737
gaattgccgtgctagcgctaaaagg

SEQ ID NO: 83690 - DNA, 25 bp, Artificial
  probe
  misc_feature (1)..(25): SEQ ID NO: 6388; WAN024BKH_at; Start 700; Stop 724
tttaggttagaacgaattgccgtgc

SEQ ID NO: 83691 - DNA, 25 bp, Artificial
  probe
  misc_feature (1)..(25): SEQ ID NO: 6388; WAN024BKH_at; Start 681; Stop 705
gatgcgtgatgattgtgattttagg

SEQ ID NO: 83692 - DNA, 25 bp, Artificial
  probe
  misc_feature (1)..(25): SEQ ID NO: 6388; WAN024BKH_at; Start 21; Stop 45
tatagtaccagtttataacgtagaa

SEQ ID NO: 83693 - DNA, 25 bp, Artificial
  probe
  misc_feature (1)..(25): SEQ ID NO: 6388; WAN024BKH_at; Start 320; Stop 344
tgaaggagcagcattctgaaattgt

SEQ ID NO: 83694 - DNA, 25 bp, Artificial
  probe
  misc_feature (1)..(25): SEQ ID NO: 6388; WAN024BKH_at; Start 43; Stop 67
gaaccatttatttctagctgcttag

SEQ ID NO: 83695 - DNA, 25 bp, Artificial
  probe
  misc_feature (1)..(25): SEQ ID NO: 6388; WAN024BKH_at; Start 59; Stop 83
gctgcttagacagtttatcgaaaca

SEQ ID NO: 83696 - DNA, 25 bp, Artificial
  probe
  misc_feature (1)..(25): SEQ ID NO: 6388; WAN024BKH_at; Start 218; Stop 242
cacgtaattttggaatcgagagatc

SEQ ID NO: 83697 - DNA, 25 bp, Artificial
  probe
  misc_feature (1)..(25): SEQ ID NO: 6571; WAN024BKI_at; Start 264; Stop 288
ggattacaaaagacttaagtcagat

SEQ ID NO: 83698 - DNA, 25 bp, Artificial
  probe
  misc_feature (1)..(25): SEQ ID NO: 6571; WAN024BKI_at; Start 190; Stop 214
gcatttgcacatacagatattgcct

SEQ ID NO: 83699 - DNA, 25 bp, Artificial
  probe
  misc_feature (1)..(25): SEQ ID NO: 6571; WAN024BKI_at; Start 195; Stop 219
tgcacatacagatattgcctttgaa

SEQ ID NO: 83700 - DNA, 25 bp, Artificial
  probe
  misc_feature (1)..(25): SEQ ID NO: 6571; WAN024BKI_at; Start 92; Stop 116
cggaagctggatataattcatttac

SEQ ID NO: 83701 - DNA, 25 bp, Artificial
  probe
  misc_feature (1)..(25): SEQ ID NO: 6571; WAN024BKI_at; Start 2; Stop 26
tgagaagaaaagatacaattgagtt

SEQ ID NO: 83702 - DNA, 25 bp, Artificial
  probe
  misc_feature (1)..(25): SEQ ID NO: 6571; WAN024BKI_at; Start 133; Stop 157
tgggtagagaaaactggagcaatcg

SEQ ID NO: 83703 - DNA, 25 bp, Artificial
  probe
  misc_feature (1)..(25): SEQ ID NO: 6571; WAN024BKI_at; Start 17; Stop 41
caattgagtttcttggtttatggaa

SEQ ID NO: 83704 - DNA, 25 bp, Artificial
  probe
  misc_feature (1)..(25): SEQ ID NO: 6571; WAN024BKI_at; Start 77; Stop 101
tcgaccgaattaaatcggaagctgg

SEQ ID NO: 83705 - DNA, 25 bp, Artificial
  probe
  misc_feature (1)..(25): SEQ ID NO: 6571; WAN024BKI_at; Start 112; Stop 136
tttacattgtctcctaagaaatggg

SEQ ID NO: 83706 - DNA, 25 bp, Artificial
  probe
  misc_feature (1)..(25): SEQ ID NO: 6571; WAN024BKI_at; Start 141; Stop 165
gaaaactggagcaatcggaattatc

SEQ ID NO: 83707 - DNA, 25 bp, Artificial
  probe
  misc_feature (1)..(25): SEQ ID NO: 6571; WAN024BKI_at; Start 260; Stop 284
ttcaggattacaaaagacttaagtc

SEQ ID NO: 83708 - DNA, 25 bp, Artificial
  probe
  misc_feature (1)..(25): SEQ ID NO: 6571; WAN024BKI_at; Start 21; Stop 45
tgagtttcttggtttatggaaaagc

SEQ ID NO: 83709 - DNA, 25 bp, Artificial
  probe
  misc_feature (1)..(25): SEQ ID NO: 6571; WAN024BKI_at; Start 164; Stop 188
tctcaaaaggtggaagatatggtgg

SEQ ID NO: 83710 - DNA, 25 bp, Artificial
  probe
  misc_feature (1)..(25): SEQ ID NO: 6571; WAN024BKI_at; Start 49; Stop 73
aataacatgaatttcaattcggtcg

SEQ ID NO: 83711 - DNA, 25 bp, Artificial
  probe
  misc_feature (1)..(25): SEQ ID NO: 6571; WAN024BKI_at; Start 176; Stop 200
gaagatatggtggtgcatttgcaca

SEQ ID NO: 83712 - DNA, 25 bp, Artificial
  probe
  misc_feature (1)..(25): SEQ ID NO: 6571; WAN024BKI_at; Start 144; Stop 168
aactggagcaatcggaattatctca

SEQ ID NO: 83713 - DNA, 25 bp, Artificial
  probe
  misc_feature (1)..(25): SEQ ID NO: 6571; WAN024BKI_at; Start 155; Stop 179
tcggaattatctcaaaaggtggaag

SEQ ID NO: 83714 - DNA, 25 bp, Artificial
  probe
  misc_feature (1)..(25): SEQ ID NO: 6571; WAN024BKI_at; Start 181; Stop 205
tatggtggtgcatttgcacatacag

SEQ ID NO: 83715 - DNA, 25 bp, Artificial
  probe
  misc_feature (1)..(25): SEQ ID NO: 6571; WAN024BKI_at; Start 137; Stop 161
tagagaaaactggagcaatcggaat

SEQ ID NO: 83716 - DNA, 25 bp, Artificial
  probe
  misc_feature (1)..(25): SEQ ID NO: 6571; WAN024BKI_at; Start 59; Stop 83
atttcaattcggtcgaattcgaccg

SEQ ID NO: 83717 - DNA, 25 bp, Artificial
  probe
  misc_feature (1)..(25): SEQ ID NO: 6571; WAN024BKI_at; Start 187; Stop 211
ggtgcatttgcacatacagatattg

SEQ ID NO: 83718 - DNA, 25 bp, Artificial
  probe
  misc_feature (1)..(25): SEQ ID NO: 6571; WAN024BKI_at; Start 235; Stop 259
tctgctgaatttaagatgtatgtaa

SEQ ID NO: 83719 - DNA, 25 bp, Artificial
  probe
  misc_feature (1)..(25): SEQ ID NO: 6571; WAN024BKI_at; Start 246; Stop 270
taagatgtatgtaattcaggattac

SEQ ID NO: 83720 - DNA, 25 bp, Artificial
  probe
  misc_feature (1)..(25): SEQ ID NO: 6571; WAN024BKI_at; Start 217; Stop 241
gaatttgctttatgtatttctgctg

SEQ ID NO: 83721 - DNA, 25 bp, Artificial
  probe
  misc_feature (1)..(25): SEQ ID NO: 6571; WAN024BKI_at; Start 35; Stop 59
tatggaaaagcttaaataacatgaa

SEQ ID NO: 83722 - DNA, 25 bp, Artificial
  probe
  misc_feature (1)..(25): SEQ ID NO: 6571; WAN024BKI_at; Start 129; Stop 153
gaaatgggtagagaaaactggagca

SEQ ID NO: 83723 - DNA, 25 bp, Artificial
  probe
  misc_feature (1)..(25): SEQ ID NO: 6571; WAN024BKI_at; Start 152; Stop 176
caatcggaattatctcaaaaggtgg

SEQ ID NO: 83724 - DNA, 25 bp, Artificial
  probe
  misc_feature (1)..(25): SEQ ID NO: 6571; WAN024BKI_at; Start 201; Stop 225
tacagatattgcctttgaatttgct

SEQ ID NO: 83725 - DNA, 25 bp, Artificial
  probe
  misc_feature (1)..(25): SEQ ID NO: 6571; WAN024BKI_at; Start 124; Stop 148
cctaagaaatgggtagagaaaactg

SEQ ID NO: 83726 - DNA, 25 bp, Artificial
  probe
  misc_feature (1)..(25): SEQ ID NO: 6571; WAN024BKI_at; Start 101; Stop 125
gatataattcatttacattgtctcc

SEQ ID NO: 83727 - DNA, 25 bp, Artificial
  probe
  misc_feature (1)..(25): SEQ ID NO: 6571; WAN024BKI_at; Start 71; Stop 95
tcgaattcgaccgaattaaatcgga

SEQ ID NO: 83728 - DNA, 25 bp, Artificial
  probe
  misc_feature (1)..(25): SEQ ID NO: 6571; WAN024BKI_at; Start 82; Stop 106
cgaattaaatcggaagctggatata

SEQ ID NO: 83729 - DNA, 25 bp, Artificial
  probe
  misc_feature (1)..(25): SEQ ID NO: 6571; WAN024BKI_at; Start 87; Stop 111
taaatcggaagctggatataattca

SEQ ID NO: 83730 - DNA, 25 bp, Artificial
  probe
  misc_feature (1)..(25): SEQ ID NO: 6571; WAN024BKI_at; Start 116; Stop 140
cattgtctcctaagaaatgggtaga

SEQ ID NO: 83731 - DNA, 25 bp, Artificial
  probe
  misc_feature (1)..(25): SEQ ID NO: 7428; WAN024BKJ_at; Start 8; Stop 32
gagaaatttctaagattaactacaa

SEQ ID NO: 83732 - DNA, 25 bp, Artificial
  probe
  misc_feature (1)..(25): SEQ ID NO: 7428; WAN024BKJ_at; Start 100; Stop 124
tatgtaagtgaagcagatatgatca

SEQ ID NO: 83733 - DNA, 25 bp, Artificial
  probe
  misc_feature (1)..(25): SEQ ID NO: 7428; WAN024BKJ_at; Start 104; Stop 128
taagtgaagcagatatgatcaatgt

SEQ ID NO: 83734 - DNA, 25 bp, Artificial
  probe
  misc_feature (1)..(25): SEQ ID NO: 7428; WAN024BKJ_at; Start 143; Stop 167
aaagagctaaacagtggcgtgaaga

SEQ ID NO: 83735 - DNA, 25 bp, Artificial
  probe
  misc_feature (1)..(25): SEQ ID NO: 7428; WAN024BKJ_at; Start 141; Stop 165
caaaagagctaaacagtggcgtgaa

SEQ ID NO: 83736 - DNA, 25 bp, Artificial
  probe
  misc_feature (1)..(25): SEQ ID NO: 7428; WAN024BKJ_at; Start 82; Stop 106
gaacagttgtcttacaagtatgtaa

SEQ ID NO: 83737 - DNA, 25 bp, Artificial
  probe
  misc_feature (1)..(25): SEQ ID NO: 7428; WAN024BKJ_at; Start 79; Stop 103
aacgaacagttgtcttacaagtatg

SEQ ID NO: 83738 - DNA, 25 bp, Artificial
  probe
  misc_feature (1)..(25): SEQ ID NO: 7428; WAN024BKJ_at; Start 72; Stop 96
tcttaccaacgaacagttgtcttac

SEQ ID NO: 83739 - DNA, 25 bp, Artificial
  probe
  misc_feature (1)..(25): SEQ ID NO: 7428; WAN024BKJ_at; Start 107; Stop 131
gtgaagcagatatgatcaatgttgt

SEQ ID NO: 83740 - DNA, 25 bp, Artificial
  probe
  misc_feature (1)..(25): SEQ ID NO: 7428; WAN024BKJ_at; Start 91; Stop 115
tcttacaagtatgtaagtgaagcag

SEQ ID NO: 83741 - DNA, 25 bp, Artificial
  probe
  misc_feature (1)..(25): SEQ ID NO: 7428; WAN024BKJ_at; Start 139; Stop 163
aacaaaagagctaaacagtggcgtg

SEQ ID NO: 83742 - DNA, 25 bp, Artificial
  probe
  misc_feature (1)..(25): SEQ ID NO: 7428; WAN024BKJ_at; Start 23; Stop 47
ttaactacaaaattcatacagatgc

SEQ ID NO: 83743 - DNA, 25 bp, Artificial
  probe
  misc_feature (1)..(25): SEQ ID NO: 7428; WAN024BKJ_at; Start 112; Stop 136
gcagatatgatcaatgttgttttat

SEQ ID NO: 83744 - DNA, 25 bp, Artificial
  probe
  misc_feature (1)..(25): SEQ ID NO: 7428; WAN024BKJ_at; Start 120; Stop 144
gatcaatgttgttttatttaacaaa

SEQ ID NO: 83745 - DNA, 25 bp, Artificial
  probe
  misc_feature (1)..(25): SEQ ID NO: 7428; WAN024BKJ_at; Start 77; Stop 101
ccaacgaacagttgtcttacaagta

SEQ ID NO: 83746 - DNA, 25 bp, Artificial
  probe
  misc_feature (1)..(25): SEQ ID NO: 7428; WAN024BKJ_at; Start 146; Stop 170
gagctaaacagtggcgtgaagaaaa

SEQ ID NO: 83747 - DNA, 25 bp, Artificial
  probe
  misc_feature (1)..(25): SEQ ID NO: 7428; WAN024BKJ_at; Start 144; Stop 168
aagagctaaacagtggcgtgaagaa

SEQ ID NO: 83748 - DNA, 25 bp, Artificial
  probe
  misc_feature (1)..(25): SEQ ID NO: 7428; WAN024BKJ_at; Start 32; Stop 56
aaattcatacagatgcaatcaaaga

SEQ ID NO: 83749 - DNA, 25 bp, Artificial
  probe
  misc_feature (1)..(25): SEQ ID NO: 7428; WAN024BKJ_at; Start 137; Stop 161
ttaacaaaagagctaaacagtggcg

SEQ ID NO: 83750 - DNA, 25 bp, Artificial
  probe
  misc_feature (1)..(25): SEQ ID NO: 7428; WAN024BKJ_at; Start 37; Stop 61
catacagatgcaatcaaagaatatc

SEQ ID NO: 83751 - DNA, 25 bp, Artificial
  probe
  misc_feature (1)..(25): SEQ ID NO: 7428; WAN024BKJ_at; Start 70; Stop 94
gatcttaccaacgaacagttgtctt

SEQ ID NO: 83752 - DNA, 25 bp, Artificial
  probe
  misc_feature (1)..(25): SEQ ID NO: 7428; WAN024BKJ_at; Start 68; Stop 92
aagatcttaccaacgaacagttgtc

SEQ ID NO: 83753 - DNA, 25 bp, Artificial
  probe
  misc_feature (1)..(25): SEQ ID NO: 7428; WAN024BKJ_at; Start 96; Stop 120
caagtatgtaagtgaagcagatatg

SEQ ID NO: 83754 - DNA, 25 bp, Artificial
  probe
  misc_feature (1)..(25): SEQ ID NO: 7428; WAN024BKJ_at; Start 58; Stop 82
tatctcttaaaagatcttaccaacg

SEQ ID NO: 83755 - DNA, 25 bp, Artificial
  probe
  misc_feature (1)..(25): SEQ ID NO: 7428; WAN024BKJ_at; Start 28; Stop 52
tacaaaattcatacagatgcaatca

SEQ ID NO: 83756 - DNA, 25 bp, Artificial
  probe
  misc_feature (1)..(25): SEQ ID NO: 7428; WAN024BKJ_at; Start 150; Stop 174
taaacagtggcgtgaagaaaatagg

SEQ ID NO: 83757 - DNA, 25 bp, Artificial
  probe
  misc_feature (1)..(25): SEQ ID NO: 7428; WAN024BKJ_at; Start 43; Stop 67
gatgcaatcaaagaatatctcttaa

SEQ ID NO: 83758 - DNA, 25 bp, Artificial
  probe
  misc_feature (1)..(25): SEQ ID NO: 7428; WAN024BKJ_at; Start 75; Stop 99
taccaacgaacagttgtcttacaag

SEQ ID NO: 83759 - DNA, 25 bp, Artificial
  probe
  misc_feature (1)..(25): SEQ ID NO: 7428; WAN024BKJ_at; Start 66; Stop 90
aaaagatcttaccaacgaacagttg

SEQ ID NO: 83760 - DNA, 25 bp, Artificial
  probe
  misc_feature (1)..(25): SEQ ID NO: 7428; WAN024BKJ_at; Start 138; Stop 162
taacaaaagagctaaacagtggcgt

SEQ ID NO: 83761 - DNA, 25 bp, Artificial
  probe
  misc_feature (1)..(25): SEQ ID NO: 7428; WAN024BKJ_at; Start 63; Stop 87
cttaaaagatcttaccaacgaacag

SEQ ID NO: 83762 - DNA, 25 bp, Artificial
  probe
  misc_feature (1)..(25): SEQ ID NO: 7428; WAN024BKJ_at; Start 39; Stop 63
tacagatgcaatcaaagaatatctc

SEQ ID NO: 83763 - DNA, 25 bp, Artificial
  probe
  misc_feature (1)..(25): SEQ ID NO: 7428; WAN024BKJ_at; Start 94; Stop 118
tacaagtatgtaagtgaagcagata

SEQ ID NO: 83764 - DNA, 25 bp, Artificial
  probe
  misc_feature (1)..(25): SEQ ID NO: 7428; WAN024BKJ_at; Start 151; Stop 175
aaacagtggcgtgaagaaaatagga

SEQ ID NO: 83765 - DNA, 25 bp, Artificial
  probe
  misc_feature (1)..(25): SEQ ID NO: 7229; WAN024BKK_at; Start 31; Stop 55
cttgtagtagttgcgggagtaagtg

SEQ ID NO: 83766 - DNA, 25 bp, Artificial
  probe
  misc_feature (1)..(25): SEQ ID NO: 7229; WAN024BKK_at; Start 26; Stop 50
caacacttgtagtagttgcgggagt

SEQ ID NO: 83767 - DNA, 25 bp, Artificial
  probe
  misc_feature (1)..(25): SEQ ID NO: 7229; WAN024BKK_at; Start 35; Stop 59
tagtagttgcgggagtaagtgcggg

SEQ ID NO: 83768 - DNA, 25 bp, Artificial
  probe
  misc_feature (1)..(25): SEQ ID NO: 7229; WAN024BKK_at; Start 61; Stop 85
gtgcttggaggaaaatttgacttta

SEQ ID NO: 83769 - DNA, 25 bp, Artificial
  probe
  misc_feature (1)..(25): SEQ ID NO: 7229; WAN024BKK_at; Start 13; Stop 37
ggaacaattagtacaacacttgtag

SEQ ID NO: 83770 - DNA, 25 bp, Artificial
  probe
  misc_feature (1)..(25): SEQ ID NO: 7229; WAN024BKK_at; Start 62; Stop 86
tgcttggaggaaaatttgactttaa

SEQ ID NO: 83771 - DNA, 25 bp, Artificial
  probe
  misc_feature (1)..(25): SEQ ID NO: 7229; WAN024BKK_at; Start 21; Stop 45
tagtacaacacttgtagtagttgcg

SEQ ID NO: 83772 - DNA, 25 bp, Artificial
  probe
  misc_feature (1)..(25): SEQ ID NO: 7229; WAN024BKK_at; Start 58; Stop 82
ggtgtgcttggaggaaaatttgact

SEQ ID NO: 83773 - DNA, 25 bp, Artificial
  probe
  misc_feature (1)..(25): SEQ ID NO: 7229; WAN024BKK_at; Start 14; Stop 38
gaacaattagtacaacacttgtagt

SEQ ID NO: 83774 - DNA, 25 bp, Artificial
  probe
  misc_feature (1)..(25): SEQ ID NO: 7229; WAN024BKK_at; Start 50; Stop 74
taagtgcgggtgtgcttggaggaaa

SEQ ID NO: 83775 - DNA, 25 bp, Artificial
  probe
  misc_feature (1)..(25): SEQ ID NO: 7229; WAN024BKK_at; Start 48; Stop 72
agtaagtgcgggtgtgcttggagga

SEQ ID NO: 83776 - DNA, 25 bp, Artificial
  probe
  misc_feature (1)..(25): SEQ ID NO: 7229; WAN024BKK_at; Start 17; Stop 41
caattagtacaacacttgtagtagt

SEQ ID NO: 83777 - DNA, 25 bp, Artificial
  probe
  misc_feature (1)..(25): SEQ ID NO: 7229; WAN024BKK_at; Start 30; Stop 54
acttgtagtagttgcgggagtaagt

SEQ ID NO: 83778 - DNA, 25 bp, Artificial
  probe
  misc_feature (1)..(25): SEQ ID NO: 7229; WAN024BKK_at; Start 24; Stop 48
tacaacacttgtagtagttgcggga

SEQ ID NO: 83779 - DNA, 25 bp, Artificial
  probe
  misc_feature (1)..(25): SEQ ID NO: 7229; WAN024BKK_at; Start 16; Stop 40
acaattagtacaacacttgtagtag

SEQ ID NO: 83780 - DNA, 25 bp, Artificial
  probe
  misc_feature (1)..(25): SEQ ID NO: 7229; WAN024BKK_at; Start 20; Stop 44
ttagtacaacacttgtagtagttgc

SEQ ID NO: 83781 - DNA, 25 bp, Artificial
  probe
  misc_feature (1)..(25): SEQ ID NO: 7229; WAN024BKK_at; Start 11; Stop 35
taggaacaattagtacaacacttgt

SEQ ID NO: 83782 - DNA, 25 bp, Artificial
  probe
  misc_feature (1)..(25): SEQ ID NO: 7229; WAN024BKK_at; Start 8; Stop 32
aaataggaacaattagtacaacact

SEQ ID NO: 83783 - DNA, 25 bp, Artificial
  probe
  misc_feature (1)..(25): SEQ ID NO: 7229; WAN024BKK_at; Start 22; Stop 46
agtacaacacttgtagtagttgcgg

SEQ ID NO: 83784 - DNA, 25 bp, Artificial
  probe
  misc_feature (1)..(25): SEQ ID NO: 7229; WAN024BKK_at; Start 38; Stop 62
tagttgcgggagtaagtgcgggtgt

SEQ ID NO: 83785 - DNA, 25 bp, Artificial
  probe
  misc_feature (1)..(25): SEQ ID NO: 7229; WAN024BKK_at; Start 27; Stop 51
aacacttgtagtagttgcgggagta

SEQ ID NO: 83786 - DNA, 25 bp, Artificial
  probe
  misc_feature (1)..(25): SEQ ID NO: 7229; WAN024BKK_at; Start 15; Stop 39
aacaattagtacaacacttgtagta

SEQ ID NO: 83787 - DNA, 25 bp, Artificial
  probe
  misc_feature (1)..(25): SEQ ID NO: 7229; WAN024BKK_at; Start 12; Stop 36
aggaacaattagtacaacacttgta

SEQ ID NO: 83788 - DNA, 25 bp, Artificial
  probe
  misc_feature (1)..(25): SEQ ID NO: 7229; WAN024BKK_at; Start 28; Stop 52
acacttgtagtagttgcgggagtaa

SEQ ID NO: 83789 - DNA, 25 bp, Artificial
  probe
  misc_feature (1)..(25): SEQ ID NO: 7229; WAN024BKK_at; Start 9; Stop 33
aataggaacaattagtacaacactt

SEQ ID NO: 83790 - DNA, 25 bp, Artificial
  probe
  misc_feature (1)..(25): SEQ ID NO: 7229; WAN024BKK_at; Start 60; Stop 84
tgtgcttggaggaaaatttgacttt

SEQ ID NO: 83791 - DNA, 25 bp, Artificial
  probe
  misc_feature (1)..(25): SEQ ID NO: 7229; WAN024BKK_at; Start 41; Stop 65
ttgcgggagtaagtgcgggtgtgct

SEQ ID NO: 83792 - DNA, 25 bp, Artificial
  probe
  misc_feature (1)..(25): SEQ ID NO: 7229; WAN024BKK_at; Start 29; Stop 53
cacttgtagtagttgcgggagtaag

SEQ ID NO: 83793 - DNA, 25 bp, Artificial
  probe
  misc_feature (1)..(25): SEQ ID NO: 7229; WAN024BKK_at; Start 59; Stop 83
gtgtgcttggaggaaaatttgactt

SEQ ID NO: 83794 - DNA, 25 bp, Artificial
  probe
  misc_feature (1)..(25): SEQ ID NO: 7229; WAN024BKK_at; Start 23; Stop 47
gtacaacacttgtagtagttgcggg

SEQ ID NO: 83795 - DNA, 25 bp, Artificial
  probe
  misc_feature (1)..(25): SEQ ID NO: 7229; WAN024BKK_at; Start 42; Stop 66
tgcgggagtaagtgcgggtgtgctt

SEQ ID NO: 83796 - DNA, 25 bp, Artificial
  probe
  misc_feature (1)..(25): SEQ ID NO: 7229; WAN024BKK_at; Start 6; Stop 30
gaaaataggaacaattagtacaaca

SEQ ID NO: 83797 - DNA, 25 bp, Artificial
  probe
  misc_feature (1)..(25): SEQ ID NO: 7229; WAN024BKK_at; Start 10; Stop 34
ataggaacaattagtacaacacttg

SEQ ID NO: 83798 - DNA, 25 bp, Artificial
  probe
  misc_feature (1)..(25): SEQ ID NO: 7229; WAN024BKK_at; Start 25; Stop 49
acaacacttgtagtagttgcgggag

SEQ ID NO: 83799 - DNA, 25 bp, Artificial
  probe
  misc_feature (1)..(25): SEQ ID NO: 6462; WAN024BKL_at; Start 375; Stop 399
cgttaatcaggctagaggtggagaa

SEQ ID NO: 83800 - DNA, 25 bp, Artificial
  probe
  misc_feature (1)..(25): SEQ ID NO: 6462; WAN024BKL_at; Start 520; Stop 544
tctggtgatgataattgtaaaaatg

SEQ ID NO: 83801 - DNA, 25 bp, Artificial
  probe
  misc_feature (1)..(25): SEQ ID NO: 6462; WAN024BKL_at; Start 622; Stop 646
tcagatttagagaacaatcaggttg

SEQ ID NO: 83802 - DNA, 25 bp, Artificial
  probe
  misc_feature (1)..(25): SEQ ID NO: 6462; WAN024BKL_at; Start 287; Stop 311
taaacgacagaataattttagatca

SEQ ID NO: 83803 - DNA, 25 bp, Artificial
  probe
  misc_feature (1)..(25): SEQ ID NO: 6462; WAN024BKL_at; Start 636; Stop 660
caatcaggttgtctttttagataaa

SEQ ID NO: 83804 - DNA, 25 bp, Artificial
  probe
  misc_feature (1)..(25): SEQ ID NO: 6462; WAN024BKL_at; Start 329; Stop 353
caataggtggacacattcttttccc

SEQ ID NO: 83805 - DNA, 25 bp, Artificial
  probe
  misc_feature (1)..(25): SEQ ID NO: 6462; WAN024BKL_at; Start 90; Stop 114
taaggcgttgtacgatgatttatgt

SEQ ID NO: 83806 - DNA, 25 bp, Artificial
  probe
  misc_feature (1)..(25): SEQ ID NO: 6462; WAN024BKL_at; Start 433; Stop 457
tatgctataaaagaatggtttgtgg

SEQ ID NO: 83807 - DNA, 25 bp, Artificial
  probe
  misc_feature (1)..(25): SEQ ID NO: 6462; WAN024BKL_at; Start 720; Stop 744
tatcattattctagaaagaaccaaa

SEQ ID NO: 83808 - DNA, 25 bp, Artificial
  probe
  misc_feature (1)..(25): SEQ ID NO: 6462; WAN024BKL_at; Start 675; Stop 699
tgctagcacagaagaagaatatata

SEQ ID NO: 83809 - DNA, 25 bp, Artificial
  probe
  misc_feature (1)..(25): SEQ ID NO: 6462; WAN024BKL_at; Start 160; Stop 184
tctgtatgtaataaatgccaaaact

SEQ ID NO: 83810 - DNA, 25 bp, Artificial
  probe
  misc_feature (1)..(25): SEQ ID NO: 6462; WAN024BKL_at; Start 549; Stop 573
tgagaactttgtcgagtttttcaag

SEQ ID NO: 83811 - DNA, 25 bp, Artificial
  probe
  misc_feature (1)..(25): SEQ ID NO: 6462; WAN024BKL_at; Start 73; Stop 97
gatcctgatgtatgtagtaaggcgt

SEQ ID NO: 83812 - DNA, 25 bp, Artificial
  probe
  misc_feature (1)..(25): SEQ ID NO: 6462; WAN024BKL_at; Start 338; Stop 362
gacacattcttttccctagaggtgg

SEQ ID NO: 83813 - DNA, 25 bp, Artificial
  probe
  misc_feature (1)..(25): SEQ ID NO: 6462; WAN024BKL_at; Start 506; Stop 530
ggtttgaactattttctggtgatga

SEQ ID NO: 83814 - DNA, 25 bp, Artificial
  probe
  misc_feature (1)..(25): SEQ ID NO: 6462; WAN024BKL_at; Start 272; Stop 296
cacaagaggcaggattaaacgacag

SEQ ID NO: 83815 - DNA, 25 bp, Artificial
  probe
  misc_feature (1)..(25): SEQ ID NO: 6462; WAN024BKL_at; Start 175; Stop 199
tgccaaaactatggaaatagagatt

SEQ ID NO: 83816 - DNA, 25 bp, Artificial
  probe
  misc_feature (1)..(25): SEQ ID NO: 6462; WAN024BKL_at; Start 44; Stop 68
ccaaaggtttttcattagataatag

SEQ ID NO: 83817 - DNA, 25 bp, Artificial
  probe
  misc_feature (1)..(25): SEQ ID NO: 6462; WAN024BKL_at; Start 318; Stop 342
tatttcaagaacaataggtggacac

SEQ ID NO: 83818 - DNA, 25 bp, Artificial
  probe
  misc_feature (1)..(25): SEQ ID NO: 6462; WAN024BKL_at; Start 236; Stop 260
tatcaagtgattatataggagcctc

SEQ ID NO: 83819 - DNA, 25 bp, Artificial
  probe
  misc_feature (1)..(25): SEQ ID NO: 6462; WAN024BKL_at; Start 661; Stop 685
gaagatattttgattgctagcacag

SEQ ID NO: 83820 - DNA, 25 bp, Artificial
  probe
  misc_feature (1)..(25): SEQ ID NO: 6462; WAN024BKL_at; Start 249; Stop 273
tataggagcctctatttattgggca

SEQ ID NO: 83821 - DNA, 25 bp, Artificial
  probe
  misc_feature (1)..(25): SEQ ID NO: 6462; WAN024BKL_at; Start 56; Stop 80
cattagataatagagaggatcctga

SEQ ID NO: 83822 - DNA, 25 bp, Artificial
  probe
  misc_feature (1)..(25): SEQ ID NO: 6462; WAN024BKL_at; Start 305; Stop 329
tagatcatttgagtatttcaagaac

SEQ ID NO: 83823 - DNA, 25 bp, Artificial
  probe
  misc_feature (1)..(25): SEQ ID NO: 6462; WAN024BKL_at; Start 490; Stop 514
gagaattaccatgaatggtttgaac

SEQ ID NO: 83824 - DNA, 25 bp, Artificial
  probe
  misc_feature (1)..(25): SEQ ID NO: 6462; WAN024BKL_at; Start 24; Stop 48
tgatttatatccttattttcccaaa

SEQ ID NO: 83825 - DNA, 25 bp, Artificial
  probe
  misc_feature (1)..(25): SEQ ID NO: 6462; WAN024BKL_at; Start 368; Stop 392
tagaaaccgttaatcaggctagagg

SEQ ID NO: 83826 - DNA, 25 bp, Artificial
  probe
  misc_feature (1)..(25): SEQ ID NO: 6462; WAN024BKL_at; Start 125; Stop 149
ttgatgatgattcaaaagaaaaact

SEQ ID NO: 83827 - DNA, 25 bp, Artificial
  probe
  misc_feature (1)..(25): SEQ ID NO: 6462; WAN024BKL_at; Start 540; Stop 564
aaatggatttgagaactttgtcgag

SEQ ID NO: 83828 - DNA, 25 bp, Artificial
  probe
  misc_feature (1)..(25): SEQ ID NO: 6462; WAN024BKL_at; Start 412; Stop 436
gatcgttttgatttaacactatatg

SEQ ID NO: 83829 - DNA, 25 bp, Artificial
  probe
  misc_feature (1)..(25): SEQ ID NO: 6462; WAN024BKL_at; Start 261; Stop 285
tatttattgggcacaagaggcagga

SEQ ID NO: 83830 - DNA, 25 bp, Artificial
  probe
  misc_feature (1)..(25): SEQ ID NO: 6462; WAN024BKL_at; Start 476; Stop 500
taggttatgctatagagaattacca

SEQ ID NO: 83831 - DNA, 25 bp, Artificial
  probe
  misc_feature (1)..(25): SEQ ID NO: 6462; WAN024BKL_at; Start 573; Stop 597
gttagaaggatttatatatgagcaa

SEQ ID NO: 83832 - DNA, 25 bp, Artificial
  probe
  misc_feature (1)..(25): SEQ ID NO: 6462; WAN024BKL_at; Start 385; Stop 409
gctagaggtggagaaaaaggatatt

SEQ ID NO: 83833 - DNA, 25 bp, Artificial
  probe
  misc_feature (1)..(25): SEQ ID NO: 7527; WAN024BKM_at; Start 15; Stop 39
ctgtttcatcaggaatttcttgaaa

SEQ ID NO: 83834 - DNA, 25 bp, Artificial
  probe
  misc_feature (1)..(25): SEQ ID NO: 7527; WAN024BKM_at; Start 66; Stop 90
gtcttttatttcattatctttcaca

SEQ ID NO: 83835 - DNA, 25 bp, Artificial
  probe
  misc_feature (1)..(25): SEQ ID NO: 7527; WAN024BKM_at; Start 71; Stop 95
ttatttcattatctttcacattttc

SEQ ID NO: 83836 - DNA, 25 bp, Artificial
  probe
  misc_feature (1)..(25): SEQ ID NO: 7527; WAN024BKM_at; Start 64; Stop 88
aagtcttttatttcattatctttca

SEQ ID NO: 83837 - DNA, 25 bp, Artificial
  probe
  misc_feature (1)..(25): SEQ ID NO: 7527; WAN024BKM_at; Start 16; Stop 40
tgtttcatcaggaatttcttgaaaa

SEQ ID NO: 83838 - DNA, 25 bp, Artificial
  probe
  misc_feature (1)..(25): SEQ ID NO: 7527; WAN024BKM_at; Start 17; Stop 41
gtttcatcaggaatttcttgaaaaa

SEQ ID NO: 83839 - DNA, 25 bp, Artificial
  probe
  misc_feature (1)..(25): SEQ ID NO: 7527; WAN024BKM_at; Start 2; Stop 26
tgattgtttttgactgtttcatcag

SEQ ID NO: 83840 - DNA, 25 bp, Artificial
  probe
  misc_feature (1)..(25): SEQ ID NO: 7527; WAN024BKM_at; Start 67; Stop 91
tcttttatttcattatctttcacat

SEQ ID NO: 83841 - DNA, 25 bp, Artificial
  probe
  misc_feature (1)..(25): SEQ ID NO: 7527; WAN024BKM_at; Start 18; Stop 42
tttcatcaggaatttcttgaaaaat

SEQ ID NO: 83842 - DNA, 25 bp, Artificial
  probe
  misc_feature (1)..(25): SEQ ID NO: 7527; WAN024BKM_at; Start 6; Stop 30
tgtttttgactgtttcatcaggaat

SEQ ID NO: 83843 - DNA, 25 bp, Artificial
  probe
  misc_feature (1)..(25): SEQ ID NO: 7527; WAN024BKM_at; Start 12; Stop 36
tgactgtttcatcaggaatttcttg

SEQ ID NO: 83844 - DNA, 25 bp, Artificial
  probe
  misc_feature (1)..(25): SEQ ID NO: 7527; WAN024BKM_at; Start 10; Stop 34
tttgactgtttcatcaggaatttct

SEQ ID NO: 83845 - DNA, 25 bp, Artificial
  probe
  misc_feature (1)..(25): SEQ ID NO: 7527; WAN024BKM_at; Start 72; Stop 96
tatttcattatctttcacattttcg

SEQ ID NO: 83846 - DNA, 25 bp, Artificial
  probe
  misc_feature (1)..(25): SEQ ID NO: 7527; WAN024BKM_at; Start 5; Stop 29
ttgtttttgactgtttcatcaggaa

SEQ ID NO: 83847 - DNA, 25 bp, Artificial
  probe
  misc_feature (1)..(25): SEQ ID NO: 7527; WAN024BKM_at; Start 13; Stop 37
gactgtttcatcaggaatttcttga

SEQ ID NO: 83848 - DNA, 25 bp, Artificial
  probe
  misc_feature (1)..(25): SEQ ID NO: 7527; WAN024BKM_at; Start 11; Stop 35
ttgactgtttcatcaggaatttctt

SEQ ID NO: 83849 - DNA, 25 bp, Artificial
  probe
  misc_feature (1)..(25): SEQ ID NO: 7527; WAN024BKM_at; Start 8; Stop 32
tttttgactgtttcatcaggaattt

SEQ ID NO: 83850 - DNA, 25 bp, Artificial
  probe
  misc_feature (1)..(25): SEQ ID NO: 7527; WAN024BKM_at; Start 1; Stop 25
ttgattgtttttgactgtttcatca

SEQ ID NO: 83851 - DNA, 25 bp, Artificial
  probe
  misc_feature (1)..(25): SEQ ID NO: 7527; WAN024BKM_at; Start 7; Stop 31
gtttttgactgtttcatcaggaatt

SEQ ID NO: 83852 - DNA, 25 bp, Artificial
  probe
  misc_feature (1)..(25): SEQ ID NO: 7527; WAN024BKM_at; Start 19; Stop 43
ttcatcaggaatttcttgaaaaata

SEQ ID NO: 83853 - DNA, 25 bp, Artificial
  probe
  misc_feature (1)..(25): SEQ ID NO: 7527; WAN024BKM_at; Start 14; Stop 38
actgtttcatcaggaatttcttgaa

SEQ ID NO: 83854 - DNA, 25 bp, Artificial
  probe
  misc_feature (1)..(25): SEQ ID NO: 7527; WAN024BKM_at; Start 65; Stop 89
agtcttttatttcattatctttcac

SEQ ID NO: 83855 - DNA, 25 bp, Artificial
  probe
  misc_feature (1)..(25): SEQ ID NO: 7527; WAN024BKM_at; Start 68; Stop 92
cttttatttcattatctttcacatt

SEQ ID NO: 83856 - DNA, 25 bp, Artificial
  probe
  misc_feature (1)..(25): SEQ ID NO: 7527; WAN024BKM_at; Start 4; Stop 28
attgtttttgactgtttcatcagga

SEQ ID NO: 83857 - DNA, 25 bp, Artificial
  probe
  misc_feature (1)..(25): SEQ ID NO: 7527; WAN024BKM_at; Start 9; Stop 33
ttttgactgtttcatcaggaatttc

SEQ ID NO: 83858 - DNA, 25 bp, Artificial
  probe
  misc_feature (1)..(25): SEQ ID NO: 7527; WAN024BKM_at; Start 3; Stop 27
gattgtttttgactgtttcatcagg

SEQ ID NO: 83859 - DNA, 25 bp, Artificial
  probe
  misc_feature (1)..(25): SEQ ID NO: 6598; WAN024BKN_at; Start 11; Stop 35
ttgcgacacccgattattctttaga

SEQ ID NO: 83860 - DNA, 25 bp, Artificial
  probe
  misc_feature (1)..(25): SEQ ID NO: 6598; WAN024BKN_at; Start 1; Stop 25
atgaggtatcttgcgacacccgatt

SEQ ID NO: 83861 - DNA, 25 bp, Artificial
  probe
  misc_feature (1)..(25): SEQ ID NO: 6598; WAN024BKN_at; Start 6; Stop 30
gtatcttgcgacacccgattattct

SEQ ID NO: 83862 - DNA, 25 bp, Artificial
  probe
  misc_feature (1)..(25): SEQ ID NO: 6598; WAN024BKN_at; Start 44; Stop 68
acggtcaattggcttcatttatctt

SEQ ID NO: 83863 - DNA, 25 bp, Artificial
  probe
  misc_feature (1)..(25): SEQ ID NO: 6598; WAN024BKN_at; Start 48; Stop 72
tcaattggcttcatttatctttcct

SEQ ID NO: 83864 - DNA, 25 bp, Artificial
  probe
  misc_feature (1)..(25): SEQ ID NO: 6598; WAN024BKN_at; Start 7; Stop 31
tatcttgcgacacccgattattctt

SEQ ID NO: 83865 - DNA, 25 bp, Artificial
  probe
  misc_feature (1)..(25): SEQ ID NO: 6598; WAN024BKN_at; Start 15; Stop 39
gacacccgattattctttagataag

SEQ ID NO: 83866 - DNA, 25 bp, Artificial
  probe
  misc_feature (1)..(25): SEQ ID NO: 6598; WAN024BKN_at; Start 33; Stop 57
agataagaaaaacggtcaattggct

SEQ ID NO: 83867 - DNA, 25 bp, Artificial
  probe
  misc_feature (1)..(25): SEQ ID NO: 6598; WAN024BKN_at; Start 4; Stop 28
aggtatcttgcgacacccgattatt

SEQ ID NO: 83868 - DNA, 25 bp, Artificial
  probe
  misc_feature (1)..(25): SEQ ID NO: 6598; WAN024BKN_at; Start 17; Stop 41
cacccgattattctttagataagaa

SEQ ID NO: 83869 - DNA, 25 bp, Artificial
  probe
  misc_feature (1)..(25): SEQ ID NO: 6598; WAN024BKN_at; Start 32; Stop 56
tagataagaaaaacggtcaattggc

SEQ ID NO: 83870 - DNA, 25 bp, Artificial
  probe
  misc_feature (1)..(25): SEQ ID NO: 6598; WAN024BKN_at; Start 9; Stop 33
tcttgcgacacccgattattcttta

SEQ ID NO: 83871 - DNA, 25 bp, Artificial
  probe
  misc_feature (1)..(25): SEQ ID NO: 6598; WAN024BKN_at; Start 47; Stop 71
gtcaattggcttcatttatctttcc

SEQ ID NO: 83872 - DNA, 25 bp, Artificial
  probe
  misc_feature (1)..(25): SEQ ID NO: 6598; WAN024BKN_at; Start 16; Stop 40
acacccgattattctttagataaga

SEQ ID NO: 83873 - DNA, 25 bp, Artificial
  probe
  misc_feature (1)..(25): SEQ ID NO: 6598; WAN024BKN_at; Start 41; Stop 65
aaaacggtcaattggcttcatttat

SEQ ID NO: 83874 - DNA, 25 bp, Artificial
  probe
  misc_feature (1)..(25): SEQ ID NO: 6598; WAN024BKN_at; Start 14; Stop 38
cgacacccgattattctttagataa

SEQ ID NO: 83875 - DNA, 25 bp, Artificial
  probe
  misc_feature (1)..(25): SEQ ID NO: 6598; WAN024BKN_at; Start 10; Stop 34
cttgcgacacccgattattctttag

SEQ ID NO: 83876 - DNA, 25 bp, Artificial
  probe
  misc_feature (1)..(25): SEQ ID NO: 6598; WAN024BKN_at; Start 37; Stop 61
aagaaaaacggtcaattggcttcat

SEQ ID NO: 83877 - DNA, 25 bp, Artificial
  probe
  misc_feature (1)..(25): SEQ ID NO: 6598; WAN024BKN_at; Start 12; Stop 36
tgcgacacccgattattctttagat

SEQ ID NO: 83878 - DNA, 25 bp, Artificial
  probe
  misc_feature (1)..(25): SEQ ID NO: 6598; WAN024BKN_at; Start 38; Stop 62
agaaaaacggtcaattggcttcatt

SEQ ID NO: 83879 - DNA, 25 bp, Artificial
  probe
  misc_feature (1)..(25): SEQ ID NO: 6598; WAN024BKN_at; Start 43; Stop 67
aacggtcaattggcttcatttatct

SEQ ID NO: 83880 - DNA, 25 bp, Artificial
  probe
  misc_feature (1)..(25): SEQ ID NO: 6598; WAN024BKN_at; Start 36; Stop 60
taagaaaaacggtcaattggcttca

SEQ ID NO: 83881 - DNA, 25 bp, Artificial
  probe
  misc_feature (1)..(25): SEQ ID NO: 6598; WAN024BKN_at; Start 53; Stop 77
tggcttcatttatctttcctttttc

SEQ ID NO: 83882 - DNA, 25 bp, Artificial
  probe
  misc_feature (1)..(25): SEQ ID NO: 6598; WAN024BKN_at; Start 51; Stop 75
attggcttcatttatctttcctttt

SEQ ID NO: 83883 - DNA, 25 bp, Artificial
  probe
  misc_feature (1)..(25): SEQ ID NO: 6598; WAN024BKN_at; Start 3; Stop 27
gaggtatcttgcgacacccgattat

SEQ ID NO: 83884 - DNA, 25 bp, Artificial
  probe
  misc_feature (1)..(25): SEQ ID NO: 6598; WAN024BKN_at; Start 13; Stop 37
gcgacacccgattattctttagata

SEQ ID NO: 83885 - DNA, 25 bp, Artificial
  probe
  misc_feature (1)..(25): SEQ ID NO: 6598; WAN024BKN_at; Start 42; Stop 66
aaacggtcaattggcttcatttatc

SEQ ID NO: 83886 - DNA, 25 bp, Artificial
  probe
  misc_feature (1)..(25): SEQ ID NO: 6598; WAN024BKN_at; Start 45; Stop 69
cggtcaattggcttcatttatcttt

SEQ ID NO: 83887 - DNA, 25 bp, Artificial
  probe
  misc_feature (1)..(25): SEQ ID NO: 6598; WAN024BKN_at; Start 5; Stop 29
ggtatcttgcgacacccgattattc

SEQ ID NO: 83888 - DNA, 25 bp, Artificial
  probe
  misc_feature (1)..(25): SEQ ID NO: 6598; WAN024BKN_at; Start 2; Stop 26
tgaggtatcttgcgacacccgatta

SEQ ID NO: 83889 - DNA, 25 bp, Artificial
  probe
  misc_feature (1)..(25): SEQ ID NO: 6598; WAN024BKN_at; Start 46; Stop 70
ggtcaattggcttcatttatctttc

SEQ ID NO: 83890 - DNA, 25 bp, Artificial
  probe
  misc_feature (1)..(25): SEQ ID NO: 6598; WAN024BKN_at; Start 8; Stop 32
atcttgcgacacccgattattcttt

SEQ ID NO: 83891 - DNA, 25 bp, Artificial
  probe
  misc_feature (1)..(25): SEQ ID NO: 6598; WAN024BKN_at; Start 50; Stop 74
aattggcttcatttatctttccttt

SEQ ID NO: 83892 - DNA, 25 bp, Artificial
  probe
  misc_feature (1)..(25): SEQ ID NO: 6598; WAN024BKN_at; Start 49; Stop 73
caattggcttcatttatctttcctt

SEQ ID NO: 83893 - DNA, 25 bp, Artificial
  probe
  misc_feature (1)..(25): SEQ ID NO: 7628; WAN024BKO_at; Start 14; Stop 38
ctttctacatctcgtttcaccaaaa

SEQ ID NO: 83894 - DNA, 25 bp, Artificial
  probe
  misc_feature (1)..(25): SEQ ID NO: 7628; WAN024BKO_at; Start 5; Stop 29
ctaaatctcctttctacatctcgtt

SEQ ID NO: 83895 - DNA, 25 bp, Artificial
  probe
  misc_feature (1)..(25): SEQ ID NO: 7628; WAN024BKO_at; Start 53; Stop 77
aatactctatatttcattctctaaa

SEQ ID NO: 83896 - DNA, 25 bp, Artificial
  probe
  misc_feature (1)..(25): SEQ ID NO: 7628; WAN024BKO_at; Start 12; Stop 36
tcctttctacatctcgtttcaccaa

SEQ ID NO: 83897 - DNA, 25 bp, Artificial
  probe
  misc_feature (1)..(25): SEQ ID NO: 7628; WAN024BKO_at; Start 10; Stop 34
tctcctttctacatctcgtttcacc

SEQ ID NO: 83898 - DNA, 25 bp, Artificial
  probe
  misc_feature (1)..(25): SEQ ID NO: 7628; WAN024BKO_at; Start 46; Stop 70
agagagaaatactctatatttcatt

SEQ ID NO: 83899 - DNA, 25 bp, Artificial
  probe
  misc_feature (1)..(25): SEQ ID NO: 7628; WAN024BKO_at; Start 9; Stop 33
atctcctttctacatctcgtttcac

SEQ ID NO: 83900 - DNA, 25 bp, Artificial
  probe
  misc_feature (1)..(25): SEQ ID NO: 7628; WAN024BKO_at; Start 44; Stop 68
taagagagaaatactctatatttca

SEQ ID NO: 83901 - DNA, 25 bp, Artificial
  probe
  misc_feature (1)..(25): SEQ ID NO: 7628; WAN024BKO_at; Start 2; Stop 26
tggctaaatctcctttctacatctc

SEQ ID NO: 83902 - DNA, 25 bp, Artificial
  probe
  misc_feature (1)..(25): SEQ ID NO: 7628; WAN024BKO_at; Start 3; Stop 27
ggctaaatctcctttctacatctcg

SEQ ID NO: 83903 - DNA, 25 bp, Artificial
  probe
  misc_feature (1)..(25): SEQ ID NO: 7628; WAN024BKO_at; Start 15; Stop 39
tttctacatctcgtttcaccaaaaa

SEQ ID NO: 83904 - DNA, 25 bp, Artificial
  probe
  misc_feature (1)..(25): SEQ ID NO: 7628; WAN024BKO_at; Start 41; Stop 65
ttttaagagagaaatactctatatt

SEQ ID NO: 83905 - DNA, 25 bp, Artificial
  probe
  misc_feature (1)..(25): SEQ ID NO: 7628; WAN024BKO_at; Start 16; Stop 40
ttctacatctcgtttcaccaaaaac

SEQ ID NO: 83906 - DNA, 25 bp, Artificial
  probe
  misc_feature (1)..(25): SEQ ID NO: 7628; WAN024BKO_at; Start 18; Stop 42
ctacatctcgtttcaccaaaaactt

SEQ ID NO: 83907 - DNA, 25 bp, Artificial
  probe
  misc_feature (1)..(25): SEQ ID NO: 7628; WAN024BKO_at; Start 8; Stop 32
aatctcctttctacatctcgtttca

SEQ ID NO: 83908 - DNA, 25 bp, Artificial
  probe
  misc_feature (1)..(25): SEQ ID NO: 7628; WAN024BKO_at; Start 7; Stop 31
aaatctcctttctacatctcgtttc

SEQ ID NO: 83909 - DNA, 25 bp, Artificial
  probe
  misc_feature (1)..(25): SEQ ID NO: 7628; WAN024BKO_at; Start 42; Stop 66
tttaagagagaaatactctatattt

SEQ ID NO: 83910 - DNA, 25 bp, Artificial
  probe
  misc_feature (1)..(25): SEQ ID NO: 7628; WAN024BKO_at; Start 43; Stop 67
ttaagagagaaatactctatatttc

SEQ ID NO: 83911 - DNA, 25 bp, Artificial
  probe
  misc_feature (1)..(25): SEQ ID NO: 7628; WAN024BKO_at; Start 17; Stop 41
tctacatctcgtttcaccaaaaact

SEQ ID NO: 83912 - DNA, 25 bp, Artificial
  probe
  misc_feature (1)..(25): SEQ ID NO: 7628; WAN024BKO_at; Start 47; Stop 71
gagagaaatactctatatttcattc

SEQ ID NO: 83913 - DNA, 25 bp, Artificial
  probe
  misc_feature (1)..(25): SEQ ID NO: 7628; WAN024BKO_at; Start 1; Stop 25
ttggctaaatctcctttctacatct

SEQ ID NO: 83914 - DNA, 25 bp, Artificial
  probe
  misc_feature (1)..(25): SEQ ID NO: 7628; WAN024BKO_at; Start 54; Stop 78
atactctatatttcattctctaaat

SEQ ID NO: 83915 - DNA, 25 bp, Artificial
  probe
  misc_feature (1)..(25): SEQ ID NO: 7628; WAN024BKO_at; Start 49; Stop 73
gagaaatactctatatttcattctc

SEQ ID NO: 83916 - DNA, 25 bp, Artificial
  probe
  misc_feature (1)..(25): SEQ ID NO: 7628; WAN024BKO_at; Start 39; Stop 63
acttttaagagagaaatactctata

SEQ ID NO: 83917 - DNA, 25 bp, Artificial
  probe
  misc_feature (1)..(25): SEQ ID NO: 7628; WAN024BKO_at; Start 51; Stop 75
gaaatactctatatttcattctcta

SEQ ID NO: 83918 - DNA, 25 bp, Artificial
  probe
  misc_feature (1)..(25): SEQ ID NO: 7628; WAN024BKO_at; Start 38; Stop 62
aacttttaagagagaaatactctat

SEQ ID NO: 83919 - DNA, 25 bp, Artificial
  probe
  misc_feature (1)..(25): SEQ ID NO: 7628; WAN024BKO_at; Start 52; Stop 76
aaatactctatatttcattctctaa

SEQ ID NO: 83920 - DNA, 25 bp, Artificial
  probe
  misc_feature (1)..(25): SEQ ID NO: 7628; WAN024BKO_at; Start 4; Stop 28
gctaaatctcctttctacatctcgt

SEQ ID NO: 83921 - DNA, 25 bp, Artificial
  probe
  misc_feature (1)..(25): SEQ ID NO: 7628; WAN024BKO_at; Start 6; Stop 30
taaatctcctttctacatctcgttt

SEQ ID NO: 83922 - DNA, 25 bp, Artificial
  probe
  misc_feature (1)..(25): SEQ ID NO: 7628; WAN024BKO_at; Start 11; Stop 35
ctcctttctacatctcgtttcacca

SEQ ID NO: 83923 - DNA, 25 bp, Artificial
  probe
  misc_feature (1)..(25): SEQ ID NO: 7628; WAN024BKO_at; Start 40; Stop 64
cttttaagagagaaatactctatat

SEQ ID NO: 83924 - DNA, 25 bp, Artificial
  probe
  misc_feature (1)..(25): SEQ ID NO: 7628; WAN024BKO_at; Start 50; Stop 74
agaaatactctatatttcattctct

SEQ ID NO: 83925 - DNA, 25 bp, Artificial
  probe
  misc_feature (1)..(25): SEQ ID NO: 7628; WAN024BKO_at; Start 45; Stop 69
aagagagaaatactctatatttcat

SEQ ID NO: 83926 - DNA, 25 bp, Artificial
  probe
  misc_feature (1)..(25): SEQ ID NO: 7628; WAN024BKO_at; Start 13; Stop 37
cctttctacatctcgtttcaccaaa

SEQ ID NO: 83927 - DNA, 25 bp, Artificial
  probe
  misc_feature (1)..(25): SEQ ID NO: 7710; WAN024BKP_at; Start 92; Stop 116
aaatccatccaaaaatcttagtcaa

SEQ ID NO: 83928 - DNA, 25 bp, Artificial
  probe
  misc_feature (1)..(25): SEQ ID NO: 7710; WAN024BKP_at; Start 48; Stop 72
ggcaaaattaccatatacatcagct

SEQ ID NO: 83929 - DNA, 25 bp, Artificial
  probe
  misc_feature (1)..(25): SEQ ID NO: 7710; WAN024BKP_at; Start 115; Stop 139
aataatcctactcttgctgccgcag

SEQ ID NO: 83930 - DNA, 25 bp, Artificial
  probe
  misc_feature (1)..(25): SEQ ID NO: 7710; WAN024BKP_at; Start 31; Stop 55
gctacagcaatattgttggcaaaat

SEQ ID NO: 83931 - DNA, 25 bp, Artificial
  probe
  misc_feature (1)..(25): SEQ ID NO: 7710; WAN024BKP_at; Start 70; Stop 94
gctgcgagcacagctattcgtaaaa

SEQ ID NO: 83932 - DNA, 25 bp, Artificial
  probe
  misc_feature (1)..(25): SEQ ID NO: 7710; WAN024BKP_at; Start 19; Stop 43
tgtgcatcccaagctacagcaatat

SEQ ID NO: 83933 - DNA, 25 bp, Artificial
  probe
  misc_feature (1)..(25): SEQ ID NO: 7710; WAN024BKP_at; Start 141; Stop 165
tgcagctgccctacttaagatcgag

SEQ ID NO: 83934 - DNA, 25 bp, Artificial
  probe
  misc_feature (1)..(25): SEQ ID NO: 7710; WAN024BKP_at; Start 118; Stop 142
aatcctactcttgctgccgcagttg

SEQ ID NO: 83935 - DNA, 25 bp, Artificial
  probe
  misc_feature (1)..(25): SEQ ID NO: 7710; WAN024BKP_at; Start 126; Stop 150
tcttgctgccgcagttgcagctgcc

SEQ ID NO: 83936 - DNA, 25 bp, Artificial
  probe
  misc_feature (1)..(25): SEQ ID NO: 7710; WAN024BKP_at; Start 14; Stop 38
tatcatgtgcatcccaagctacagc

SEQ ID NO: 83937 - DNA, 25 bp, Artificial
  probe
  misc_feature (1)..(25): SEQ ID NO: 7710; WAN024BKP_at; Start 145; Stop 169
gctgccctacttaagatcgagcgcg

SEQ ID NO: 83938 - DNA, 25 bp, Artificial
  probe
  misc_feature (1)..(25): SEQ ID NO: 7710; WAN024BKP_at; Start 152; Stop 176
tacttaagatcgagcgcgccatact

SEQ ID NO: 83939 - DNA, 25 bp, Artificial
  probe
  misc_feature (1)..(25): SEQ ID NO: 7710; WAN024BKP_at; Start 139; Stop 163
gttgcagctgccctacttaagatcg

SEQ ID NO: 83940 - DNA, 25 bp, Artificial
  probe
  misc_feature (1)..(25): SEQ ID NO: 7710; WAN024BKP_at; Start 163; Stop 187
gagcgcgccatactaataccatact

SEQ ID NO: 83941 - DNA, 25 bp, Artificial
  probe
  misc_feature (1)..(25): SEQ ID NO: 7710; WAN024BKP_at; Start 22; Stop 46
gcatcccaagctacagcaatattgt

SEQ ID NO: 83942 - DNA, 25 bp, Artificial
  probe
  misc_feature (1)..(25): SEQ ID NO: 7710; WAN024BKP_at; Start 101; Stop 125
caaaaatcttagtcaataatcctac

SEQ ID NO: 83943 - DNA, 25 bp, Artificial
  probe
  misc_feature (1)..(25): SEQ ID NO: 7710; WAN024BKP_at; Start 2; Stop 26
tgttagggattttatcatgtgcatc

SEQ ID NO: 83944 - DNA, 25 bp, Artificial
  probe
  misc_feature (1)..(25): SEQ ID NO: 7710; WAN024BKP_at; Start 67; Stop 91
tcagctgcgagcacagctattcgta

SEQ ID NO: 83945 - DNA, 25 bp, Artificial
  probe
  misc_feature (1)..(25): SEQ ID NO: 7710; WAN024BKP_at; Start 75; Stop 99
gagcacagctattcgtaaaatccat

SEQ ID NO: 83946 - DNA, 25 bp, Artificial
  probe
  misc_feature (1)..(25): SEQ ID NO: 7710; WAN024BKP_at; Start 136; Stop 160
gcagttgcagctgccctacttaaga

SEQ ID NO: 83947 - DNA, 25 bp, Artificial
  probe
  misc_feature (1)..(25): SEQ ID NO: 7710; WAN024BKP_at; Start 165; Stop 189
gcgcgccatactaataccatactta

SEQ ID NO: 83948 - DNA, 25 bp, Artificial
  probe
  misc_feature (1)..(25): SEQ ID NO: 7710; WAN024BKP_at; Start 80; Stop 104
cagctattcgtaaaatccatccaaa

SEQ ID NO: 83949 - DNA, 25 bp, Artificial
  probe
  misc_feature (1)..(25): SEQ ID NO: 7710; WAN024BKP_at; Start 132; Stop 156
tgccgcagttgcagctgccctactt

SEQ ID NO: 83950 - DNA, 25 bp, Artificial
  probe
  misc_feature (1)..(25): SEQ ID NO: 7710; WAN024BKP_at; Start 150; Stop 174
cctacttaagatcgagcgcgccata

SEQ ID NO: 83951 - DNA, 25 bp, Artificial
  probe
  misc_feature (1)..(25): SEQ ID NO: 7710; WAN024BKP_at; Start 159; Stop 183
gatcgagcgcgccatactaatacca

SEQ ID NO: 83952 - DNA, 25 bp, Artificial
  probe
  misc_feature (1)..(25): SEQ ID NO: 7710; WAN024BKP_at; Start 53; Stop 77
aattaccatatacatcagctgcgag

SEQ ID NO: 83953 - DNA, 25 bp, Artificial
  probe
  misc_feature (1)..(25): SEQ ID NO: 7710; WAN024BKP_at; Start 35; Stop 59
cagcaatattgttggcaaaattacc

SEQ ID NO: 83954 - DNA, 25 bp, Artificial
  probe
  misc_feature (1)..(25): SEQ ID NO: 7710; WAN024BKP_at; Start 58; Stop 82
ccatatacatcagctgcgagcacag

SEQ ID NO: 83955 - DNA, 25 bp, Artificial
  probe
  misc_feature (1)..(25): SEQ ID NO: 7710; WAN024BKP_at; Start 171; Stop 195
catactaataccatacttaactgca

SEQ ID NO: 83956 - DNA, 25 bp, Artificial
  probe
  misc_feature (1)..(25): SEQ ID NO: 7710; WAN024BKP_at; Start 28; Stop 52
caagctacagcaatattgttggcaa

SEQ ID NO: 83957 - DNA, 25 bp, Artificial
  probe
  misc_feature (1)..(25): SEQ ID NO: 7710; WAN024BKP_at; Start 61; Stop 85
tatacatcagctgcgagcacagcta

SEQ ID NO: 83958 - DNA, 25 bp, Artificial
  probe
  misc_feature (1)..(25): SEQ ID NO: 7710; WAN024BKP_at; Start 56; Stop 80
taccatatacatcagctgcgagcac

SEQ ID NO: 83959 - DNA, 25 bp, Artificial
  probe
  misc_feature (1)..(25): SEQ ID NO: 7710; WAN024BKP_at; Start 88; Stop 112
cgtaaaatccatccaaaaatcttag

SEQ ID NO: 83960 - DNA, 25 bp, Artificial
  probe
  misc_feature (1)..(25): SEQ ID NO: 7710; WAN024BKP_at; Start 9; Stop 33
gattttatcatgtgcatcccaagct

SEQ ID NO: 83961 - DNA, 25 bp, Artificial
  probe
  misc_feature (1)..(25): SEQ ID NO: 6780; WAN024BKQ_at; Start 55; Stop 79
tccatccctatattatatgttataa

SEQ ID NO: 83962 - DNA, 25 bp, Artificial
  probe
  misc_feature (1)..(25): SEQ ID NO: 6780; WAN024BKQ_at; Start 47; Stop 71
tttatttatccatccctatattata

SEQ ID NO: 83963 - DNA, 25 bp, Artificial
  probe
  misc_feature (1)..(25): SEQ ID NO: 6780; WAN024BKQ_at; Start 67; Stop 91
ttatatgttataatgaatgtaaaag

SEQ ID NO: 83964 - DNA, 25 bp, Artificial
  probe
  misc_feature (1)..(25): SEQ ID NO: 6780; WAN024BKQ_at; Start 54; Stop 78
atccatccctatattatatgttata

SEQ ID NO: 83965 - DNA, 25 bp, Artificial
  probe
  misc_feature (1)..(25): SEQ ID NO: 6780; WAN024BKQ_at; Start 70; Stop 94
tatgttataatgaatgtaaaagttc

SEQ ID NO: 83966 - DNA, 25 bp, Artificial
  probe
  misc_feature (1)..(25): SEQ ID NO: 6780; WAN024BKQ_at; Start 50; Stop 74
atttatccatccctatattatatgt

SEQ ID NO: 83967 - DNA, 25 bp, Artificial
  probe
  misc_feature (1)..(25): SEQ ID NO: 6780; WAN024BKQ_at; Start 49; Stop 73
tatttatccatccctatattatatg

SEQ ID NO: 83968 - DNA, 25 bp, Artificial
  probe
  misc_feature (1)..(25): SEQ ID NO: 6780; WAN024BKQ_at; Start 53; Stop 77
tatccatccctatattatatgttat

SEQ ID NO: 83969 - DNA, 25 bp, Artificial
  probe
  misc_feature (1)..(25): SEQ ID NO: 6780; WAN024BKQ_at; Start 68; Stop 92
tatatgttataatgaatgtaaaagt

SEQ ID NO: 83970 - DNA, 25 bp, Artificial
  probe
  misc_feature (1)..(25): SEQ ID NO: 6780; WAN024BKQ_at; Start 71; Stop 95
atgttataatgaatgtaaaagttca

SEQ ID NO: 83971 - DNA, 25 bp, Artificial
  probe
  misc_feature (1)..(25): SEQ ID NO: 6780; WAN024BKQ_at; Start 57; Stop 81
catccctatattatatgttataatg

SEQ ID NO: 83972 - DNA, 25 bp, Artificial
  probe
  misc_feature (1)..(25): SEQ ID NO: 6780; WAN024BKQ_at; Start 56; Stop 80
ccatccctatattatatgttataat

SEQ ID NO: 83973 - DNA, 25 bp, Artificial
  probe
  misc_feature (1)..(25): SEQ ID NO: 6780; WAN024BKQ_at; Start 51; Stop 75
tttatccatccctatattatatgtt

SEQ ID NO: 83974 - DNA, 25 bp, Artificial
  probe
  misc_feature (1)..(25): SEQ ID NO: 6780; WAN024BKQ_at; Start 36; Stop 60
taagatacgtttttatttatccatc

SEQ ID NO: 83975 - DNA, 25 bp, Artificial
  probe
  misc_feature (1)..(25): SEQ ID NO: 6780; WAN024BKQ_at; Start 72; Stop 96
tgttataatgaatgtaaaagttcaa

SEQ ID NO: 83976 - DNA, 25 bp, Artificial
  probe
  misc_feature (1)..(25): SEQ ID NO: 6780; WAN024BKQ_at; Start 52; Stop 76
ttatccatccctatattatatgtta

SEQ ID NO: 83977 - DNA, 25 bp, Artificial
  probe
  misc_feature (1)..(25): SEQ ID NO: 6780; WAN024BKQ_at; Start 48; Stop 72
ttatttatccatccctatattatat

SEQ ID NO: 83978 - DNA, 25 bp, Artificial
  probe
  misc_feature (1)..(25): SEQ ID NO: 6717; WAN024BKR_at; Start 33; Stop 57
tgacttgtcatttaaggtcatgaaa

SEQ ID NO: 83979 - DNA, 25 bp, Artificial
  probe
  misc_feature (1)..(25): SEQ ID NO: 6717; WAN024BKR_at; Start 5; Stop 29
caaaggttgccttgatgtcgtctgg

SEQ ID NO: 83980 - DNA, 25 bp, Artificial
  probe
  misc_feature (1)..(25): SEQ ID NO: 6717; WAN024BKR_at; Start 4; Stop 28
ccaaaggttgccttgatgtcgtctg

SEQ ID NO: 83981 - DNA, 25 bp, Artificial
  probe
  misc_feature (1)..(25): SEQ ID NO: 6717; WAN024BKR_at; Start 15; Stop 39
cttgatgtcgtctggagatgacttg

SEQ ID NO: 83982 - DNA, 25 bp, Artificial
  probe
  misc_feature (1)..(25): SEQ ID NO: 6717; WAN024BKR_at; Start 12; Stop 36
tgccttgatgtcgtctggagatgac

SEQ ID NO: 83983 - DNA, 25 bp, Artificial
  probe
  misc_feature (1)..(25): SEQ ID NO: 6717; WAN024BKR_at; Start 23; Stop 47
cgtctggagatgacttgtcatttaa

SEQ ID NO: 83984 - DNA, 25 bp, Artificial
  probe
  misc_feature (1)..(25): SEQ ID NO: 6717; WAN024BKR_at; Start 31; Stop 55
gatgacttgtcatttaaggtcatga

SEQ ID NO: 83985 - DNA, 25 bp, Artificial
  probe
  misc_feature (1)..(25): SEQ ID NO: 6717; WAN024BKR_at; Start 21; Stop 45
gtcgtctggagatgacttgtcattt

SEQ ID NO: 83986 - DNA, 25 bp, Artificial
  probe
  misc_feature (1)..(25): SEQ ID NO: 6717; WAN024BKR_at; Start 14; Stop 38
ccttgatgtcgtctggagatgactt

SEQ ID NO: 83987 - DNA, 25 bp, Artificial
  probe
  misc_feature (1)..(25): SEQ ID NO: 6717; WAN024BKR_at; Start 18; Stop 42
gatgtcgtctggagatgacttgtca

SEQ ID NO: 83988 - DNA, 25 bp, Artificial
  probe
  misc_feature (1)..(25): SEQ ID NO: 6717; WAN024BKR_at; Start 28; Stop 52
ggagatgacttgtcatttaaggtca

SEQ ID NO: 83989 - DNA, 25 bp, Artificial
  probe
  misc_feature (1)..(25): SEQ ID NO: 6717; WAN024BKR_at; Start 7; Stop 31
aaggttgccttgatgtcgtctggag

SEQ ID NO: 83990 - DNA, 25 bp, Artificial
  probe
  misc_feature (1)..(25): SEQ ID NO: 6717; WAN024BKR_at; Start 50; Stop 74
tcatgaaaccgccattgctttccaa

SEQ ID NO: 83991 - DNA, 25 bp, Artificial
  probe
  misc_feature (1)..(25): SEQ ID NO: 6717; WAN024BKR_at; Start 6; Stop 30
aaaggttgccttgatgtcgtctgga

SEQ ID NO: 83992 - DNA, 25 bp, Artificial
  probe
  misc_feature (1)..(25): SEQ ID NO: 6717; WAN024BKR_at; Start 9; Stop 33
ggttgccttgatgtcgtctggagat

SEQ ID NO: 83993 - DNA, 25 bp, Artificial
  probe
  misc_feature (1)..(25): SEQ ID NO: 6717; WAN024BKR_at; Start 19; Stop 43
atgtcgtctggagatgacttgtcat

SEQ ID NO: 83994 - DNA, 25 bp, Artificial
  probe
  misc_feature (1)..(25): SEQ ID NO: 6717; WAN024BKR_at; Start 8; Stop 32
aggttgccttgatgtcgtctggaga

SEQ ID NO: 83995 - DNA, 25 bp, Artificial
  probe
  misc_feature (1)..(25): SEQ ID NO: 6717; WAN024BKR_at; Start 30; Stop 54
agatgacttgtcatttaaggtcatg

SEQ ID NO: 83996 - DNA, 25 bp, Artificial
  probe
  misc_feature (1)..(25): SEQ ID NO: 6717; WAN024BKR_at; Start 51; Stop 75
catgaaaccgccattgctttccaaa

SEQ ID NO: 83997 - DNA, 25 bp, Artificial
  probe
  misc_feature (1)..(25): SEQ ID NO: 6717; WAN024BKR_at; Start 3; Stop 27
gccaaaggttgccttgatgtcgtct

SEQ ID NO: 83998 - DNA, 25 bp, Artificial
  probe
  misc_feature (1)..(25): SEQ ID NO: 6717; WAN024BKR_at; Start 10; Stop 34
gttgccttgatgtcgtctggagatg

SEQ ID NO: 83999 - DNA, 25 bp, Artificial
  probe
  misc_feature (1)..(25): SEQ ID NO: 6717; WAN024BKR_at; Start 29; Stop 53
gagatgacttgtcatttaaggtcat

SEQ ID NO: 84000 - DNA, 25 bp, Artificial
  probe
  misc_feature (1)..(25): SEQ ID NO: 6717; WAN024BKR_at; Start 17; Stop 41
tgatgtcgtctggagatgacttgtc

SEQ ID NO: 84001 - DNA, 25 bp, Artificial
  probe
  misc_feature (1)..(25): SEQ ID NO: 6717; WAN024BKR_at; Start 22; Stop 46
tcgtctggagatgacttgtcattta

SEQ ID NO: 84002 - DNA, 25 bp, Artificial
  probe
  misc_feature (1)..(25): SEQ ID NO: 6717; WAN024BKR_at; Start 11; Stop 35
ttgccttgatgtcgtctggagatga

SEQ ID NO: 84003 - DNA, 25 bp, Artificial
  probe
  misc_feature (1)..(25): SEQ ID NO: 6717; WAN024BKR_at; Start 27; Stop 51
tggagatgacttgtcatttaaggtc

SEQ ID NO: 84004 - DNA, 25 bp, Artificial
  probe
  misc_feature (1)..(25): SEQ ID NO: 6717; WAN024BKR_at; Start 1; Stop 25
atgccaaaggttgccttgatgtcgt

SEQ ID NO: 84005 - DNA, 25 bp, Artificial
  probe
  misc_feature (1)..(25): SEQ ID NO: 6717; WAN024BKR_at; Start 35; Stop 59
acttgtcatttaaggtcatgaaacc

SEQ ID NO: 84006 - DNA, 25 bp, Artificial
  probe
  misc_feature (1)..(25): SEQ ID NO: 6717; WAN024BKR_at; Start 25; Stop 49
tctggagatgacttgtcatttaagg

SEQ ID NO: 84007 - DNA, 25 bp, Artificial
  probe
  misc_feature (1)..(25): SEQ ID NO: 6717; WAN024BKR_at; Start 20; Stop 44
tgtcgtctggagatgacttgtcatt

SEQ ID NO: 84008 - DNA, 25 bp, Artificial
  probe
  misc_feature (1)..(25): SEQ ID NO: 6717; WAN024BKR_at; Start 36; Stop 60
cttgtcatttaaggtcatgaaaccg

SEQ ID NO: 84009 - DNA, 25 bp, Artificial
  probe
  misc_feature (1)..(25): SEQ ID NO: 6717; WAN024BKR_at; Start 16; Stop 40
ttgatgtcgtctggagatgacttgt

SEQ ID NO: 84010 - DNA, 25 bp, Artificial
  probe
  misc_feature (1)..(25): SEQ ID NO: 6717; WAN024BKR_at; Start 34; Stop 58
gacttgtcatttaaggtcatgaaac

SEQ ID NO: 84011 - DNA, 25 bp, Artificial
  probe
  misc_feature (1)..(25): SEQ ID NO: 6717; WAN024BKR_at; Start 13; Stop 37
gccttgatgtcgtctggagatgact

SEQ ID NO: 84012 - DNA, 25 bp, Artificial
  probe
  misc_feature (1)..(25): SEQ ID NO: 7496; WAN024BKS_at; Start 20; Stop 44
tcgagagtatttgcagagagctaac

SEQ ID NO: 84013 - DNA, 25 bp, Artificial
  probe
  misc_feature (1)..(25): SEQ ID NO: 7496; WAN024BKS_at; Start 11; Stop 35
taaaacacatcgagagtatttgcag

SEQ ID NO: 84014 - DNA, 25 bp, Artificial
  probe
  misc_feature (1)..(25): SEQ ID NO: 7496; WAN024BKS_at; Start 17; Stop 41
acatcgagagtatttgcagagagct

SEQ ID NO: 84015 - DNA, 25 bp, Artificial
  probe
  misc_feature (1)..(25): SEQ ID NO: 7496; WAN024BKS_at; Start 35; Stop 59
gagagctaactaaacaagcctatcc

SEQ ID NO: 84016 - DNA, 25 bp, Artificial
  probe
  misc_feature (1)..(25): SEQ ID NO: 7496; WAN024BKS_at; Start 88; Stop 112
caatcaagaattagagttgacttac

SEQ ID NO: 84017 - DNA, 25 bp, Artificial
  probe
  misc_feature (1)..(25): SEQ ID NO: 7496; WAN024BKS_at; Start 21; Stop 45
cgagagtatttgcagagagctaact

SEQ ID NO: 84018 - DNA, 25 bp, Artificial
  probe
  misc_feature (1)..(25): SEQ ID NO: 7496; WAN024BKS_at; Start 13; Stop 37
aaacacatcgagagtatttgcagag

SEQ ID NO: 84019 - DNA, 25 bp, Artificial
  probe
  misc_feature (1)..(25): SEQ ID NO: 7496; WAN024BKS_at; Start 5; Stop 29
tccttttaaaacacatcgagagtat

SEQ ID NO: 84020 - DNA, 25 bp, Artificial
  probe
  misc_feature (1)..(25): SEQ ID NO: 7496; WAN024BKS_at; Start 49; Stop 73
caagcctatccagtttatataaaca

SEQ ID NO: 84021 - DNA, 25 bp, Artificial
  probe
  misc_feature (1)..(25): SEQ ID NO: 7496; WAN024BKS_at; Start 24; Stop 48
gagtatttgcagagagctaactaaa

SEQ ID NO: 84022 - DNA, 25 bp, Artificial
  probe
  misc_feature (1)..(25): SEQ ID NO: 7496; WAN024BKS_at; Start 18; Stop 42
catcgagagtatttgcagagagcta

SEQ ID NO: 84023 - DNA, 25 bp, Artificial
  probe
  misc_feature (1)..(25): SEQ ID NO: 7496; WAN024BKS_at; Start 37; Stop 61
gagctaactaaacaagcctatccag

SEQ ID NO: 84024 - DNA, 25 bp, Artificial
  probe
  misc_feature (1)..(25): SEQ ID NO: 7496; WAN024BKS_at; Start 6; Stop 30
ccttttaaaacacatcgagagtatt

SEQ ID NO: 84025 - DNA, 25 bp, Artificial
  probe
  misc_feature (1)..(25): SEQ ID NO: 7496; WAN024BKS_at; Start 31; Stop 55
tgcagagagctaactaaacaagcct

SEQ ID NO: 84026 - DNA, 25 bp, Artificial
  probe
  misc_feature (1)..(25): SEQ ID NO: 7496; WAN024BKS_at; Start 15; Stop 39
acacatcgagagtatttgcagagag

SEQ ID NO: 84027 - DNA, 25 bp, Artificial
  probe
  misc_feature (1)..(25): SEQ ID NO: 7496; WAN024BKS_at; Start 29; Stop 53
tttgcagagagctaactaaacaagc

SEQ ID NO: 84028 - DNA, 25 bp, Artificial
  probe
  misc_feature (1)..(25): SEQ ID NO: 7496; WAN024BKS_at; Start 92; Stop 116
caagaattagagttgacttacaaga

SEQ ID NO: 84029 - DNA, 25 bp, Artificial
  probe
  misc_feature (1)..(25): SEQ ID NO: 7496; WAN024BKS_at; Start 52; Stop 76
gcctatccagtttatataaacaaaa

SEQ ID NO: 84030 - DNA, 25 bp, Artificial
  probe
  misc_feature (1)..(25): SEQ ID NO: 7496; WAN024BKS_at; Start 3; Stop 27
gatccttttaaaacacatcgagagt

SEQ ID NO: 84031 - DNA, 25 bp, Artificial
  probe
  misc_feature (1)..(25): SEQ ID NO: 7496; WAN024BKS_at; Start 33; Stop 57
cagagagctaactaaacaagcctat

SEQ ID NO: 84032 - DNA, 25 bp, Artificial
  probe
  misc_feature (1)..(25): SEQ ID NO: 7496; WAN024BKS_at; Start 27; Stop 51
tatttgcagagagctaactaaacaa

SEQ ID NO: 84033 - DNA, 25 bp, Artificial
  probe
  misc_feature (1)..(25): SEQ ID NO: 7496; WAN024BKS_at; Start 40; Stop 64
ctaactaaacaagcctatccagttt

SEQ ID NO: 84034 - DNA, 25 bp, Artificial
  probe
  misc_feature (1)..(25): SEQ ID NO: 7496; WAN024BKS_at; Start 32; Stop 56
gcagagagctaactaaacaagccta

SEQ ID NO: 84035 - DNA, 25 bp, Artificial
  probe
  misc_feature (1)..(25): SEQ ID NO: 7496; WAN024BKS_at; Start 93; Stop 117
aagaattagagttgacttacaagat

SEQ ID NO: 84036 - DNA, 25 bp, Artificial
  probe
  misc_feature (1)..(25): SEQ ID NO: 7496; WAN024BKS_at; Start 9; Stop 33
tttaaaacacatcgagagtatttgc

SEQ ID NO: 84037 - DNA, 25 bp, Artificial
  probe
  misc_feature (1)..(25): SEQ ID NO: 7496; WAN024BKS_at; Start 30; Stop 54
ttgcagagagctaactaaacaagcc

SEQ ID NO: 84038 - DNA, 25 bp, Artificial
  probe
  misc_feature (1)..(25): SEQ ID NO: 7496; WAN024BKS_at; Start 72; Stop 96
caaaaaactccaattacaatcaaga

SEQ ID NO: 84039 - DNA, 25 bp, Artificial
  probe
  misc_feature (1)..(25): SEQ ID NO: 7496; WAN024BKS_at; Start 80; Stop 104
tccaattacaatcaagaattagagt

SEQ ID NO: 84040 - DNA, 25 bp, Artificial
  probe
  misc_feature (1)..(25): SEQ ID NO: 7496; WAN024BKS_at; Start 16; Stop 40
cacatcgagagtatttgcagagagc

SEQ ID NO: 84041 - DNA, 25 bp, Artificial
  probe
  misc_feature (1)..(25): SEQ ID NO: 7496; WAN024BKS_at; Start 22; Stop 46
gagagtatttgcagagagctaacta

SEQ ID NO: 84042 - DNA, 25 bp, Artificial
  probe
  misc_feature (1)..(25): SEQ ID NO: 7496; WAN024BKS_at; Start 39; Stop 63
gctaactaaacaagcctatccagtt

SEQ ID NO: 84043 - DNA, 25 bp, Artificial
  probe
  misc_feature (1)..(25): SEQ ID NO: 7496; WAN024BKS_at; Start 14; Stop 38
aacacatcgagagtatttgcagaga

SEQ ID NO: 84044 - DNA, 25 bp, Artificial
  probe
  misc_feature (1)..(25): SEQ ID NO: 7496; WAN024BKS_at; Start 26; Stop 50
gtatttgcagagagctaactaaaca

SEQ ID NO: 84045 - DNA, 25 bp, Artificial
  probe
  misc_feature (1)..(25): SEQ ID NO: 7496; WAN024BKS_at; Start 2; Stop 26
tgatccttttaaaacacatcgagag

SEQ ID NO: 84046 - DNA, 25 bp, Artificial
  probe
  misc_feature (1)..(25): SEQ ID NO: 6507; WAN024BKT_at; Start 88; Stop 112
ttagctagtaaggtcgcaaagcgta

SEQ ID NO: 84047 - DNA, 25 bp, Artificial
  probe
  misc_feature (1)..(25): SEQ ID NO: 6507; WAN024BKT_at; Start 81; Stop 105
gattttcttagctagtaaggtcgca

SEQ ID NO: 84048 - DNA, 25 bp, Artificial
  probe
  misc_feature (1)..(25): SEQ ID NO: 6507; WAN024BKT_at; Start 3; Stop 27
gaattccctccttttctatatcatt

SEQ ID NO: 84049 - DNA, 25 bp, Artificial
  probe
  misc_feature (1)..(25): SEQ ID NO: 6507; WAN024BKT_at; Start 53; Stop 77
aattcctaatcttcatgtgtgttta

SEQ ID NO: 84050 - DNA, 25 bp, Artificial
  probe
  misc_feature (1)..(25): SEQ ID NO: 6507; WAN024BKT_at; Start 66; Stop 90
catgtgtgtttacttgattttctta

SEQ ID NO: 84051 - DNA, 25 bp, Artificial
  probe
  misc_feature (1)..(25): SEQ ID NO: 6507; WAN024BKT_at; Start 80; Stop 104
tgattttcttagctagtaaggtcgc

SEQ ID NO: 84052 - DNA, 25 bp, Artificial
  probe
  misc_feature (1)..(25): SEQ ID NO: 6507; WAN024BKT_at; Start 87; Stop 111
cttagctagtaaggtcgcaaagcgt

SEQ ID NO: 84053 - DNA, 25 bp, Artificial
  probe
  misc_feature (1)..(25): SEQ ID NO: 6507; WAN024BKT_at; Start 84; Stop 108
tttcttagctagtaaggtcgcaaag

SEQ ID NO: 84054 - DNA, 25 bp, Artificial
  probe
  misc_feature (1)..(25): SEQ ID NO: 6507; WAN024BKT_at; Start 44; Stop 68
gatcaggaaaattcctaatcttcat

SEQ ID NO: 84055 - DNA, 25 bp, Artificial
  probe
  misc_feature (1)..(25): SEQ ID NO: 6507; WAN024BKT_at; Start 57; Stop 81
cctaatcttcatgtgtgtttacttg

SEQ ID NO: 84056 - DNA, 25 bp, Artificial
  probe
  misc_feature (1)..(25): SEQ ID NO: 6507; WAN024BKT_at; Start 86; Stop 110
tcttagctagtaaggtcgcaaagcg

SEQ ID NO: 84057 - DNA, 25 bp, Artificial
  probe
  misc_feature (1)..(25): SEQ ID NO: 6507; WAN024BKT_at; Start 1; Stop 25
atgaattccctccttttctatatca

SEQ ID NO: 84058 - DNA, 25 bp, Artificial
  probe
  misc_feature (1)..(25): SEQ ID NO: 6507; WAN024BKT_at; Start 83; Stop 107
ttttcttagctagtaaggtcgcaaa

SEQ ID NO: 84059 - DNA, 25 bp, Artificial
  probe
  misc_feature (1)..(25): SEQ ID NO: 6507; WAN024BKT_at; Start 89; Stop 113
tagctagtaaggtcgcaaagcgtag

SEQ ID NO: 84060 - DNA, 25 bp, Artificial
  probe
  misc_feature (1)..(25): SEQ ID NO: 6507; WAN024BKT_at; Start 51; Stop 75
aaaattcctaatcttcatgtgtgtt

SEQ ID NO: 84061 - DNA, 25 bp, Artificial
  probe
  misc_feature (1)..(25): SEQ ID NO: 6507; WAN024BKT_at; Start 85; Stop 109
ttcttagctagtaaggtcgcaaagc

SEQ ID NO: 84062 - DNA, 25 bp, Artificial
  probe
  misc_feature (1)..(25): SEQ ID NO: 6507; WAN024BKT_at; Start 50; Stop 74
gaaaattcctaatcttcatgtgtgt

SEQ ID NO: 84063 - DNA, 25 bp, Artificial
  probe
  misc_feature (1)..(25): SEQ ID NO: 6507; WAN024BKT_at; Start 17; Stop 41
tctatatcattcgtaaaaaagaaaa

SEQ ID NO: 84064 - DNA, 25 bp, Artificial
  probe
  misc_feature (1)..(25): SEQ ID NO: 6507; WAN024BKT_at; Start 59; Stop 83
taatcttcatgtgtgtttacttgat

SEQ ID NO: 84065 - DNA, 25 bp, Artificial
  probe
  misc_feature (1)..(25): SEQ ID NO: 6507; WAN024BKT_at; Start 49; Stop 73
ggaaaattcctaatcttcatgtgtg

SEQ ID NO: 84066 - DNA, 25 bp, Artificial
  probe
  misc_feature (1)..(25): SEQ ID NO: 6507; WAN024BKT_at; Start 68; Stop 92
tgtgtgtttacttgattttcttagc

SEQ ID NO: 84067 - DNA, 25 bp, Artificial
  probe
  misc_feature (1)..(25): SEQ ID NO: 6507; WAN024BKT_at; Start 5; Stop 29
attccctccttttctatatcattcg

SEQ ID NO: 84068 - DNA, 25 bp, Artificial
  probe
  misc_feature (1)..(25): SEQ ID NO: 6507; WAN024BKT_at; Start 78; Stop 102
cttgattttcttagctagtaaggtc

SEQ ID NO: 84069 - DNA, 25 bp, Artificial
  probe
  misc_feature (1)..(25): SEQ ID NO: 6507; WAN024BKT_at; Start 90; Stop 114
agctagtaaggtcgcaaagcgtagt

SEQ ID NO: 84070 - DNA, 25 bp, Artificial
  probe
  misc_feature (1)..(25): SEQ ID NO: 6507; WAN024BKT_at; Start 9; Stop 33
cctccttttctatatcattcgtaaa

SEQ ID NO: 84071 - DNA, 25 bp, Artificial
  probe
  misc_feature (1)..(25): SEQ ID NO: 6507; WAN024BKT_at; Start 54; Stop 78
attcctaatcttcatgtgtgtttac

SEQ ID NO: 84072 - DNA, 25 bp, Artificial
  probe
  misc_feature (1)..(25): SEQ ID NO: 6507; WAN024BKT_at; Start 76; Stop 100
tacttgattttcttagctagtaagg

SEQ ID NO: 84073 - DNA, 25 bp, Artificial
  probe
  misc_feature (1)..(25): SEQ ID NO: 6507; WAN024BKT_at; Start 40; Stop 64
aaaagatcaggaaaattcctaatct

SEQ ID NO: 84074 - DNA, 25 bp, Artificial
  probe
  misc_feature (1)..(25): SEQ ID NO: 6507; WAN024BKT_at; Start 82; Stop 106
attttcttagctagtaaggtcgcaa

SEQ ID NO: 84075 - DNA, 25 bp, Artificial
  probe
  misc_feature (1)..(25): SEQ ID NO: 6507; WAN024BKT_at; Start 71; Stop 95
gtgtttacttgattttcttagctag

SEQ ID NO: 84076 - DNA, 25 bp, Artificial
  probe
  misc_feature (1)..(25): SEQ ID NO: 6507; WAN024BKT_at; Start 47; Stop 71
caggaaaattcctaatcttcatgtg

SEQ ID NO: 84077 - DNA, 25 bp, Artificial
  probe
  misc_feature (1)..(25): SEQ ID NO: 6507; WAN024BKT_at; Start 7; Stop 31
tccctccttttctatatcattcgta

SEQ ID NO: 84078 - DNA, 25 bp, Artificial
  probe
  misc_feature (1)..(25): SEQ ID NO: 6507; WAN024BKT_at; Start 63; Stop 87
cttcatgtgtgtttacttgattttc

SEQ ID NO: 84079 - DNA, 25 bp, Artificial
  probe
  misc_feature (1)..(25): SEQ ID NO: 6507; WAN024BKT_at; Start 8; Stop 32
ccctccttttctatatcattcgtaa

SEQ ID NO: 84080 - DNA, 25 bp, Artificial
  probe
  misc_feature (1)..(25): SEQ ID NO: 6831; WAN024BKU_at; Start 185; Stop 209
ccattattgatgtatgggaatatgg

SEQ ID NO: 84081 - DNA, 25 bp, Artificial
  probe
  misc_feature (1)..(25): SEQ ID NO: 6831; WAN024BKU_at; Start 348; Stop 372
aacaaaatcttggaacgatgttcgc

SEQ ID NO: 84082 - DNA, 25 bp, Artificial
  probe
  misc_feature (1)..(25): SEQ ID NO: 6831; WAN024BKU_at; Start 87; Stop 111
gaaagcatctgtttttctagttgca

SEQ ID NO: 84083 - DNA, 25 bp, Artificial
  probe
  misc_feature (1)..(25): SEQ ID NO: 6831; WAN024BKU_at; Start 128; Stop 152
gctttgctactacagctagtgtcgt

SEQ ID NO: 84084 - DNA, 25 bp, Artificial
  probe
  misc_feature (1)..(25): SEQ ID NO: 6831; WAN024BKU_at; Start 265; Stop 289
ggatcaaaatcttcagtaacgaatt

SEQ ID NO: 84085 - DNA, 25 bp, Artificial
  probe
  misc_feature (1)..(25): SEQ ID NO: 6831; WAN024BKU_at; Start 2; Stop 26
tggagggactaaaaagagactatta

SEQ ID NO: 84086 - DNA, 25 bp, Artificial
  probe
  misc_feature (1)..(25): SEQ ID NO: 6831; WAN024BKU_at; Start 216; Stop 240
tgataactatggttattcgaattac

SEQ ID NO: 84087 - DNA, 25 bp, Artificial
  probe
  misc_feature (1)..(25): SEQ ID NO: 6831; WAN024BKU_at; Start 261; Stop 285
tattggatcaaaatcttcagtaacg

SEQ ID NO: 84088 - DNA, 25 bp, Artificial
  probe
  misc_feature (1)..(25): SEQ ID NO: 6831; WAN024BKU_at; Start 333; Stop 357
ggcatattcaagtgcaacaaaatct

SEQ ID NO: 84089 - DNA, 25 bp, Artificial
  probe
  misc_feature (1)..(25): SEQ ID NO: 6831; WAN024BKU_at; Start 370; Stop 394
cgcttaaatgcatattgggattatt

SEQ ID NO: 84090 - DNA, 25 bp, Artificial
  probe
  misc_feature (1)..(25): SEQ ID NO: 6831; WAN024BKU_at; Start 119; Stop 143
tcagttttagctttgctactacagc

SEQ ID NO: 84091 - DNA, 25 bp, Artificial
  probe
  misc_feature (1)..(25): SEQ ID NO: 6831; WAN024BKU_at; Start 151; Stop 175
gttaacgcagtaacggcacaccctg

SEQ ID NO: 84092 - DNA, 25 bp, Artificial
  probe
  misc_feature (1)..(25): SEQ ID NO: 6831; WAN024BKU_at; Start 325; Stop 349
tatggatgggcatattcaagtgcaa

SEQ ID NO: 84093 - DNA, 25 bp, Artificial
  probe
  misc_feature (1)..(25): SEQ ID NO: 6831; WAN024BKU_at; Start 299; Stop 323
cagttaaagctcaggataaaaaaga

SEQ ID NO: 84094 - DNA, 25 bp, Artificial
  probe
  misc_feature (1)..(25): SEQ ID NO: 6831; WAN024BKU_at; Start 199; Stop 223
tgggaatatggtgtaaatgataact

SEQ ID NO: 84095 - DNA, 25 bp, Artificial
  probe
  misc_feature (1)..(25): SEQ ID NO: 6831; WAN024BKU_at; Start 99; Stop 123
ttttctagttgcaagtgttttcagt

SEQ ID NO: 84096 - DNA, 25 bp, Artificial
  probe
  misc_feature (1)..(25): SEQ ID NO: 6831; WAN024BKU_at; Start 246; Stop 270
tagttctccaagtaatattggatca

SEQ ID NO: 84097 - DNA, 25 bp, Artificial
  probe
  misc_feature (1)..(25): SEQ ID NO: 6831; WAN024BKU_at; Start 364; Stop 388
gatgttcgcttaaatgcatattggg

SEQ ID NO: 84098 - DNA, 25 bp, Artificial
  probe
  misc_feature (1)..(25): SEQ ID NO: 6831; WAN024BKU_at; Start 73; Stop 97
aaaagaattaataagaaagcatctg

SEQ ID NO: 84099 - DNA, 25 bp, Artificial
  probe
  misc_feature (1)..(25): SEQ ID NO: 6831; WAN024BKU_at; Start 178; Stop 202
ccaagtcccattattgatgtatggg

SEQ ID NO: 84100 - DNA, 25 bp, Artificial
  probe
  misc_feature (1)..(25): SEQ ID NO: 6831; WAN024BKU_at; Start 358; Stop 382
tggaacgatgttcgcttaaatgcat

SEQ ID NO: 84101 - DNA, 25 bp, Artificial
  probe
  misc_feature (1)..(25): SEQ ID NO: 6831; WAN024BKU_at; Start 294; Stop 318
gggaacagttaaagctcaggataaa

SEQ ID NO: 84102 - DNA, 25 bp, Artificial
  probe
  misc_feature (1)..(25): SEQ ID NO: 6831; WAN024BKU_at; Start 35; Stop 59
tcatcaaatatttaaattcaaggag

SEQ ID NO: 84103 - DNA, 25 bp, Artificial
  probe
  misc_feature (1)..(25): SEQ ID NO: 6831; WAN024BKU_at; Start 17; Stop 41
gagactattatttaatcttcatcaa

SEQ ID NO: 84104 - DNA, 25 bp, Artificial
  probe
  misc_feature (1)..(25): SEQ ID NO: 6831; WAN024BKU_at; Start 172; Stop 196
cctgctccaagtcccattattgatg

SEQ ID NO: 84105 - DNA, 25 bp, Artificial
  probe
  misc_feature (1)..(25): SEQ ID NO: 6831; WAN024BKU_at; Start 312; Stop 336
ggataaaaaagattatggatgggca

SEQ ID NO: 84106 - DNA, 25 bp, Artificial
  probe
  misc_feature (1)..(25): SEQ ID NO: 6831; WAN024BKU_at; Start 159; Stop 183
agtaacggcacaccctgctccaagt

SEQ ID NO: 84107 - DNA, 25 bp, Artificial
  probe
  misc_feature (1)..(25): SEQ ID NO: 6831; WAN024BKU_at; Start 340; Stop 364
tcaagtgcaacaaaatcttggaacg

SEQ ID NO: 84108 - DNA, 25 bp, Artificial
  probe
  misc_feature (1)..(25): SEQ ID NO: 6831; WAN024BKU_at; Start 233; Stop 257
cgaattactttgttagttctccaag

SEQ ID NO: 84109 - DNA, 25 bp, Artificial
  probe
  misc_feature (1)..(25): SEQ ID NO: 6831; WAN024BKU_at; Start 144; Stop 168
tagtgtcgttaacgcagtaacggca

SEQ ID NO: 84110 - DNA, 25 bp, Artificial
  probe
  misc_feature (1)..(25): SEQ ID NO: 6831; WAN024BKU_at; Start 138; Stop 162
tacagctagtgtcgttaacgcagta

SEQ ID NO: 84111 - DNA, 25 bp, Artificial
  probe
  misc_feature (1)..(25): SEQ ID NO: 6831; WAN024BKU_at; Start 135; Stop 159
tactacagctagtgtcgttaacgca

SEQ ID NO: 84112 - DNA, 25 bp, Artificial
  probe
  misc_feature (1)..(25): SEQ ID NO: 6831; WAN024BKU_at; Start 46; Stop 70
ttaaattcaaggagaagtaaaatga

SEQ ID NO: 84113 - DNA, 25 bp, Artificial
  probe
  misc_feature (1)..(25): SEQ ID NO: 6831; WAN024BKU_at; Start 328; Stop 352
ggatgggcatattcaagtgcaacaa

SEQ ID NO: 84114 - DNA, 25 bp, Artificial
  probe
  misc_feature (1)..(25): SEQ ID NO: 7596; WAN024BKV_at; Start 1045; Stop 1069
gaacggtcttcagcatatgttccag

SEQ ID NO: 84115 - DNA, 25 bp, Artificial
  probe
  misc_feature (1)..(25): SEQ ID NO: 7596; WAN024BKV_at; Start 333; Stop 357
tttgaaaccacttacgatgacggga

SEQ ID NO: 84116 - DNA, 25 bp, Artificial
  probe
  misc_feature (1)..(25): SEQ ID NO: 7596; WAN024BKV_at; Start 1426; Stop 1450
ccgctggcaaatgtagcagatagca

SEQ ID NO: 84117 - DNA, 25 bp, Artificial
  probe
  misc_feature (1)..(25): SEQ ID NO: 7596; WAN024BKV_at; Start 205; Stop 229
tacaagccaatcgttcagagttcgg

SEQ ID NO: 84118 - DNA, 25 bp, Artificial
  probe
  misc_feature (1)..(25): SEQ ID NO: 7596; WAN024BKV_at; Start 1117; Stop 1141
gaaaatgacgggataacgaatccag

SEQ ID NO: 84119 - DNA, 25 bp, Artificial
  probe
  misc_feature (1)..(25): SEQ ID NO: 7596; WAN024BKV_at; Start 363; Stop 387
aacagtctatatggcttatccttgg

SEQ ID NO: 84120 - DNA, 25 bp, Artificial
  probe
  misc_feature (1)..(25): SEQ ID NO: 7596; WAN024BKV_at; Start 1157; Stop 1181
taatttatatcaaccaaacaggtgc

SEQ ID NO: 84121 - DNA, 25 bp, Artificial
  probe
  misc_feature (1)..(25): SEQ ID NO: 7596; WAN024BKV_at; Start 1233; Stop 1257
gatagcaaccatctatattcctgag

SEQ ID NO: 84122 - DNA, 25 bp, Artificial
  probe
  misc_feature (1)..(25): SEQ ID NO: 7596; WAN024BKV_at; Start 494; Stop 518
tcaaagaaggagtgatacgacgttc

SEQ ID NO: 84123 - DNA, 25 bp, Artificial
  probe
  misc_feature (1)..(25): SEQ ID NO: 7596; WAN024BKV_at; Start 109; Stop 133
gatggagctttttctatccaaggaa

SEQ ID NO: 84124 - DNA, 25 bp, Artificial
  probe
  misc_feature (1)..(25): SEQ ID NO: 7596; WAN024BKV_at; Start 1631; Stop 1655
taaagattcaatccttagagcacca

SEQ ID NO: 84125 - DNA, 25 bp, Artificial
  probe
  misc_feature (1)..(25): SEQ ID NO: 7596; WAN024BKV_at; Start 472; Stop 496
tttgttgttaggacgaggcagatca

SEQ ID NO: 84126 - DNA, 25 bp, Artificial
  probe
  misc_feature (1)..(25): SEQ ID NO: 7596; WAN024BKV_at; Start 1324; Stop 1348
tatacaagagaacagcttgcagttc

SEQ ID NO: 84127 - DNA, 25 bp, Artificial
  probe
  misc_feature (1)..(25): SEQ ID NO: 7596; WAN024BKV_at; Start 1251; Stop 1275
tcctgagaagtggaaagaaaaccag

SEQ ID NO: 84128 - DNA, 25 bp, Artificial
  probe
  misc_feature (1)..(25): SEQ ID NO: 7596; WAN024BKV_at; Start 1531; Stop 1555
aaatctctttttagtcctgaagcgg

SEQ ID NO: 84129 - DNA, 25 bp, Artificial
  probe
  misc_feature (1)..(25): SEQ ID NO: 7596; WAN024BKV_at; Start 521; Stop 545
tgggcttgcctatatacgacttaag

SEQ ID NO: 84130 - DNA, 25 bp, Artificial
  probe
  misc_feature (1)..(25): SEQ ID NO: 7596; WAN024BKV_at; Start 982; Stop 1006
gattcagatggtcagtatctacaga

SEQ ID NO: 84131 - DNA, 25 bp, Artificial
  probe
  misc_feature (1)..(25): SEQ ID NO: 7596; WAN024BKV_at; Start 1891; Stop 1915
ggagcggcttctctgctagttttga

SEQ ID NO: 84132 - DNA, 25 bp, Artificial
  probe
  misc_feature (1)..(25): SEQ ID NO: 7596; WAN024BKV_at; Start 1874; Stop 1898
tagagttgctatatattggagcggc

SEQ ID NO: 84133 - DNA, 25 bp, Artificial
  probe
  misc_feature (1)..(25): SEQ ID NO: 7596; WAN024BKV_at; Start 1177; Stop 1201
ggtgctaacctacaaaataaagtga

SEQ ID NO: 84134 - DNA, 25 bp, Artificial
  probe
  misc_feature (1)..(25): SEQ ID NO: 7596; WAN024BKV_at; Start 535; Stop 559
tacgacttaagaagagagtatggca

SEQ ID NO: 84135 - DNA, 25 bp, Artificial
  probe
  misc_feature (1)..(25): SEQ ID NO: 7596; WAN024BKV_at; Start 1847; Stop 1871
tatttacatttcttatgacagggca

SEQ ID NO: 84136 - DNA, 25 bp, Artificial
  probe
  misc_feature (1)..(25): SEQ ID NO: 7596; WAN024BKV_at; Start 69; Stop 93
cactattagtgataccgaaatcccc

SEQ ID NO: 84137 - DNA, 25 bp, Artificial
  probe
  misc_feature (1)..(25): SEQ ID NO: 7596; WAN024BKV_at; Start 1410; Stop 1434
aatgaaagatattttaccgctggca

SEQ ID NO: 84138 - DNA, 25 bp, Artificial
  probe
  misc_feature (1)..(25): SEQ ID NO: 7596; WAN024BKV_at; Start 507; Stop 531
gatacgacgttctttgggcttgcct

SEQ ID NO: 84139 - DNA, 25 bp, Artificial
  probe
  misc_feature (1)..(25): SEQ ID NO: 7596; WAN024BKV_at; Start 274; Stop 298
ttaaagtcagcaccaatagtaggga

SEQ ID NO: 84140 - DNA, 25 bp, Artificial
  probe
  misc_feature (1)..(25): SEQ ID NO: 7596; WAN024BKV_at; Start 347; Stop 371
cgatgacgggactacaaacagtcta

SEQ ID NO: 84141 - DNA, 25 bp, Artificial
  probe
  misc_feature (1)..(25): SEQ ID NO: 7596; WAN024BKV_at; Start 308; Stop 332
cacttgggaaaatggatgtagacag

SEQ ID NO: 84142 - DNA, 25 bp, Artificial
  probe
  misc_feature (1)..(25): SEQ ID NO: 7596; WAN024BKV_at; Start 219; Stop 243
tcagagttcgggtcagttgaagtat

SEQ ID NO: 84143 - DNA, 25 bp, Artificial
  probe
  misc_feature (1)..(25): SEQ ID NO: 7596; WAN024BKV_at; Start 48; Stop 72
gattgctacaattggtctggtcact

SEQ ID NO: 84144 - DNA, 25 bp, Artificial
  probe
  misc_feature (1)..(25): SEQ ID NO: 7596; WAN024BKV_at; Start 1595; Stop 1619
caatgaatccagtagatgtttacca

SEQ ID NO: 84145 - DNA, 25 bp, Artificial
  probe
  misc_feature (1)..(25): SEQ ID NO: 7596; WAN024BKV_at; Start 916; Stop 940
aaagactggagaaggattgagttcc

SEQ ID NO: 84146 - DNA, 25 bp, Artificial
  probe
  misc_feature (1)..(25): SEQ ID NO: 7596; WAN024BKV_at; Start 938; Stop 962
tccttggaattgaaagtaactctac

SEQ ID NO: 84147 - DNA, 25 bp, Artificial
  probe
  misc_feature (1)..(25): SEQ ID NO: 7596; WAN024BKV_at; Start 899; Stop 923
taccatgggatacagtaaaagactg

SEQ ID NO: 84148 - DNA, 25 bp, Artificial
  probe
  misc_feature (1)..(25): SEQ ID NO: 6524; WAN024BKW_at; Start 509; Stop 533
tactattgaatgaaacagctgaaga

SEQ ID NO: 84149 - DNA, 25 bp, Artificial
  probe
  misc_feature (1)..(25): SEQ ID NO: 6524; WAN024BKW_at; Start 165; Stop 189
cagtgggaatgttttagttgataaa

SEQ ID NO: 84150 - DNA, 25 bp, Artificial
  probe
  misc_feature (1)..(25): SEQ ID NO: 6524; WAN024BKW_at; Start 179; Stop 203
tagttgataaacaagatatttggaa

SEQ ID NO: 84151 - DNA, 25 bp, Artificial
  probe
  misc_feature (1)..(25): SEQ ID NO: 6524; WAN024BKW_at; Start 320; Stop 344
caataactgacgtacttgaaaaagt

SEQ ID NO: 84152 - DNA, 25 bp, Artificial
  probe
  misc_feature (1)..(25): SEQ ID NO: 6524; WAN024BKW_at; Start 588; Stop 612
gataattgacatgaaagatataggg

SEQ ID NO: 84153 - DNA, 25 bp, Artificial
  probe
  misc_feature (1)..(25): SEQ ID NO: 6524; WAN024BKW_at; Start 71; Stop 95
tatttgaatctggaaaaagctatgc

SEQ ID NO: 84154 - DNA, 25 bp, Artificial
  probe
  misc_feature (1)..(25): SEQ ID NO: 6524; WAN024BKW_at; Start 274; Stop 298
aaaacagtgtatgataatctgagcc

SEQ ID NO: 84155 - DNA, 25 bp, Artificial
  probe
  misc_feature (1)..(25): SEQ ID NO: 6524; WAN024BKW_at; Start 3; Stop 27
gacaattgaccttttgaacgtttca

SEQ ID NO: 84156 - DNA, 25 bp, Artificial
  probe
  misc_feature (1)..(25): SEQ ID NO: 6524; WAN024BKW_at; Start 559; Stop 583
gatccagctgtctataacgaagttg

SEQ ID NO: 84157 - DNA, 25 bp, Artificial
  probe
  misc_feature (1)..(25): SEQ ID NO: 6524; WAN024BKW_at; Start 90; Stop 114
ctatgcattgattggaggttctggc

SEQ ID NO: 84158 - DNA, 25 bp, Artificial
  probe
  misc_feature (1)..(25): SEQ ID NO: 6524; WAN024BKW_at; Start 288; Stop 312
taatctgagccttatcactaaagac

SEQ ID NO: 84159 - DNA, 25 bp, Artificial
  probe
  misc_feature (1)..(25): SEQ ID NO: 6524; WAN024BKW_at; Start 373; Stop 397
aaaatatatgaattgtctggagggc

SEQ ID NO: 84160 - DNA, 25 bp, Artificial
  probe
  misc_feature (1)..(25): SEQ ID NO: 6524; WAN024BKW_at; Start 37; Stop 61
ggctcaaagaagatctttacagact

SEQ ID NO: 84161 - DNA, 25 bp, Artificial
  probe
  misc_feature (1)..(25): SEQ ID NO: 6524; WAN024BKW_at; Start 432; Stop 456
gaaaccacgtaaaattatcttagca

SEQ ID NO: 84162 - DNA, 25 bp, Artificial
  probe
  misc_feature (1)..(25): SEQ ID NO: 6524; WAN024BKW_at; Start 336; Stop 360
tgaaaaagtaggactgtcaagtgac

SEQ ID NO: 84163 - DNA, 25 bp, Artificial
  probe
  misc_feature (1)..(25): SEQ ID NO: 6524; WAN024BKW_at; Start 449; Stop 473
tcttagcagatgaacctacaggagc

SEQ ID NO: 84164 - DNA, 25 bp, Artificial
  probe
  misc_feature (1)..(25): SEQ ID NO: 6524; WAN024BKW_at; Start 350; Stop 374
tgtcaagtgactatttacaccaaaa

SEQ ID NO: 84165 - DNA, 25 bp, Artificial
  probe
  misc_feature (1)..(25): SEQ ID NO: 6524; WAN024BKW_at; Start 417; Stop 441
tgccagaatgttaatgaaaccacgt

SEQ ID NO: 84166 - DNA, 25 bp, Artificial
  probe
  misc_feature (1)..(25): SEQ ID NO: 6524; WAN024BKW_at; Start 99; Stop 123
gattggaggttctggctccggtaaa

SEQ ID NO: 84167 - DNA, 25 bp, Artificial
  probe
  misc_feature (1)..(25): SEQ ID NO: 6524; WAN024BKW_at; Start 397; Stop 421
caggctcaacgtgtagctattgcca

SEQ ID NO: 84168 - DNA, 25 bp, Artificial
  probe
  misc_feature (1)..(25): SEQ ID NO: 6524; WAN024BKW_at; Start 259; Stop 283
tctttaatagataacaaaacagtgt

SEQ ID NO: 84169 - DNA, 25 bp, Artificial
  probe
  misc_feature (1)..(25): SEQ ID NO: 6524; WAN024BKW_at; Start 382; Stop 406
gaattgtctggagggcaggctcaac

SEQ ID NO: 84170 - DNA, 25 bp, Artificial
  probe
  misc_feature (1)..(25): SEQ ID NO: 6524; WAN024BKW_at; Start 403; Stop 427
caacgtgtagctattgccagaatgt

SEQ ID NO: 84171 - DNA, 25 bp, Artificial
  probe
  misc_feature (1)..(25): SEQ ID NO: 6524; WAN024BKW_at; Start 532; Stop 556
gataaatatgtcattatagcgacac

SEQ ID NO: 84172 - DNA, 25 bp, Artificial
  probe
  misc_feature (1)..(25): SEQ ID NO: 6524; WAN024BKW_at; Start 463; Stop 487
cctacaggagctttagatggtgaga

SEQ ID NO: 84173 - DNA, 25 bp, Artificial
  probe
  misc_feature (1)..(25): SEQ ID NO: 6524; WAN024BKW_at; Start 28; Stop 52
aaaagtttcggctcaaagaagatct

SEQ ID NO: 84174 - DNA, 25 bp, Artificial
  probe
  misc_feature (1)..(25): SEQ ID NO: 6524; WAN024BKW_at; Start 76; Stop 100
gaatctggaaaaagctatgcattga

SEQ ID NO: 84175 - DNA, 25 bp, Artificial
  probe
  misc_feature (1)..(25): SEQ ID NO: 6524; WAN024BKW_at; Start 546; Stop 570
tatagcgacacatgatccagctgtc

SEQ ID NO: 84176 - DNA, 25 bp, Artificial
  probe
  misc_feature (1)..(25): SEQ ID NO: 6524; WAN024BKW_at; Start 573; Stop 597
taacgaagttgatgtgataattgac

SEQ ID NO: 84177 - DNA, 25 bp, Artificial
  probe
  misc_feature (1)..(25): SEQ ID NO: 6524; WAN024BKW_at; Start 146; Stop 170
gaagattagaaaaaattgacagtgg

SEQ ID NO: 84178 - DNA, 25 bp, Artificial
  probe
  misc_feature (1)..(25): SEQ ID NO: 6524; WAN024BKW_at; Start 126; Stop 150
tacccttcttaatattataggaaga

SEQ ID NO: 84179 - DNA, 25 bp, Artificial
  probe
  misc_feature (1)..(25): SEQ ID NO: 6524; WAN024BKW_at; Start 476; Stop 500
tagatggtgagattggaaaagaaat

SEQ ID NO: 84180 - DNA, 25 bp, Artificial
  probe
  misc_feature (1)..(25): SEQ ID NO: 6524; WAN024BKW_at; Start 519; Stop 543
tgaaacagctgaagataaatatgtc

SEQ ID NO: 84181 - DNA, 25 bp, Artificial
  probe
  misc_feature (1)..(25): SEQ ID NO: 6524; WAN024BKW_at; Start 231; Stop 255
tactgttggatatgtatttcagaat

SEQ ID NO: 84182 - DNA, 25 bp, Artificial
  probe
  misc_feature (1)..(25): SEQ ID NO: 6971; WAN024BKX_at; Start 18; Stop 42
tgctcctaagacaagagccaacaga

SEQ ID NO: 84183 - DNA, 25 bp, Artificial
  probe
  misc_feature (1)..(25): SEQ ID NO: 6971; WAN024BKX_at; Start 15; Stop 39
acatgctcctaagacaagagccaac

SEQ ID NO: 84184 - DNA, 25 bp, Artificial
  probe
  misc_feature (1)..(25): SEQ ID NO: 6971; WAN024BKX_at; Start 10; Stop 34
aaaccacatgctcctaagacaagag

SEQ ID NO: 84185 - DNA, 25 bp, Artificial
  probe
  misc_feature (1)..(25): SEQ ID NO: 6971; WAN024BKX_at; Start 13; Stop 37
ccacatgctcctaagacaagagcca

SEQ ID NO: 84186 - DNA, 25 bp, Artificial
  probe
  misc_feature (1)..(25): SEQ ID NO: 6971; WAN024BKX_at; Start 16; Stop 40
catgctcctaagacaagagccaaca

SEQ ID NO: 84187 - DNA, 25 bp, Artificial
  probe
  misc_feature (1)..(25): SEQ ID NO: 6971; WAN024BKX_at; Start 9; Stop 33
aaaaccacatgctcctaagacaaga

SEQ ID NO: 84188 - DNA, 25 bp, Artificial
  probe
  misc_feature (1)..(25): SEQ ID NO: 6971; WAN024BKX_at; Start 11; Stop 35
aaccacatgctcctaagacaagagc

SEQ ID NO: 84189 - DNA, 25 bp, Artificial
  probe
  misc_feature (1)..(25): SEQ ID NO: 6971; WAN024BKX_at; Start 14; Stop 38
cacatgctcctaagacaagagccaa

SEQ ID NO: 84190 - DNA, 25 bp, Artificial
  probe
  misc_feature (1)..(25): SEQ ID NO: 6971; WAN024BKX_at; Start 12; Stop 36
accacatgctcctaagacaagagcc

SEQ ID NO: 84191 - DNA, 25 bp, Artificial
  probe
  misc_feature (1)..(25): SEQ ID NO: 6971; WAN024BKX_at; Start 17; Stop 41
atgctcctaagacaagagccaacag

SEQ ID NO: 84192 - DNA, 25 bp, Artificial
  probe
  misc_feature (1)..(25): SEQ ID NO: 7594; WAN024BKY_s_at; Start 22; Stop 46
ctccaatttatttgtttatatctta

SEQ ID NO: 84193 - DNA, 25 bp, Artificial
  probe
  misc_feature (1)..(25): SEQ ID NO: 7594; WAN024BKY_s_at; Start 18; Stop 42
taagctccaatttatttgtttatat

SEQ ID NO: 84194 - DNA, 25 bp, Artificial
  probe
  misc_feature (1)..(25): SEQ ID NO: 7594; WAN024BKY_s_at; Start 11; Stop 35
tagatgttaagctccaatttatttg

SEQ ID NO: 84195 - DNA, 25 bp, Artificial
  probe
  misc_feature (1)..(25): SEQ ID NO: 7594; WAN024BKY_s_at; Start 12; Stop 36
agatgttaagctccaatttatttgt

SEQ ID NO: 84196 - DNA, 25 bp, Artificial
  probe
  misc_feature (1)..(25): SEQ ID NO: 7594; WAN024BKY_s_at; Start 20; Stop 44
agctccaatttatttgtttatatct

SEQ ID NO: 84197 - DNA, 25 bp, Artificial
  probe
  misc_feature (1)..(25): SEQ ID NO: 7594; WAN024BKY_s_at; Start 21; Stop 45
gctccaatttatttgtttatatctt

SEQ ID NO: 84198 - DNA, 25 bp, Artificial
  probe
  misc_feature (1)..(25): SEQ ID NO: 7594; WAN024BKY_s_at; Start 6; Stop 30
ggaaatagatgttaagctccaattt

SEQ ID NO: 84199 - DNA, 25 bp, Artificial
  probe
  misc_feature (1)..(25): SEQ ID NO: 7594; WAN024BKY_s_at; Start 19; Stop 43
aagctccaatttatttgtttatatc

SEQ ID NO: 84200 - DNA, 25 bp, Artificial
  probe
  misc_feature (1)..(25): SEQ ID NO: 7594; WAN024BKY_s_at; Start 8; Stop 32
aaatagatgttaagctccaatttat

SEQ ID NO: 84201 - DNA, 25 bp, Artificial
  probe
  misc_feature (1)..(25): SEQ ID NO: 7594; WAN024BKY_s_at; Start 10; Stop 34
atagatgttaagctccaatttattt

SEQ ID NO: 84202 - DNA, 25 bp, Artificial
  probe
  misc_feature (1)..(25): SEQ ID NO: 7594; WAN024BKY_s_at; Start 17; Stop 41
ttaagctccaatttatttgtttata

SEQ ID NO: 84203 - DNA, 25 bp, Artificial
  probe
  misc_feature (1)..(25): SEQ ID NO: 7594; WAN024BKY_s_at; Start 7; Stop 31
gaaatagatgttaagctccaattta

SEQ ID NO: 84204 - DNA, 25 bp, Artificial
  probe
  misc_feature (1)..(25): SEQ ID NO: 7594; WAN024BKY_s_at; Start 50; Stop 74
cagtttactatactagcttattatt

SEQ ID NO: 84205 - DNA, 25 bp, Artificial
  probe
  misc_feature (1)..(25): SEQ ID NO: 7594; WAN024BKY_s_at; Start 9; Stop 33
aatagatgttaagctccaatttatt

SEQ ID NO: 84206 - DNA, 25 bp, Artificial
  probe
  misc_feature (1)..(25): SEQ ID NO: 7594; WAN024BKY_s_at; Start 51; Stop 75
agtttactatactagcttattattc

SEQ ID NO: 84207 - DNA, 25 bp, Artificial
  probe
  misc_feature (1)..(25): SEQ ID NO: 7392; WAN024BKZ_at; Start 67; Stop 91
ttgaacacctttattgtatcgcgtt

SEQ ID NO: 84208 - DNA, 25 bp, Artificial
  probe
  misc_feature (1)..(25): SEQ ID NO: 7392; WAN024BKZ_at; Start 102; Stop 126
ttggtataaccttcgacgcgcaccc

SEQ ID NO: 84209 - DNA, 25 bp, Artificial
  probe
  misc_feature (1)..(25): SEQ ID NO: 7392; WAN024BKZ_at; Start 50; Stop 74
ttcgctttacaattggcttgaacac

SEQ ID NO: 84210 - DNA, 25 bp, Artificial
  probe
  misc_feature (1)..(25): SEQ ID NO: 7392; WAN024BKZ_at; Start 66; Stop 90
cttgaacacctttattgtatcgcgt

SEQ ID NO: 84211 - DNA, 25 bp, Artificial
  probe
  misc_feature (1)..(25): SEQ ID NO: 7392; WAN024BKZ_at; Start 44; Stop 68
tctcctttcgctttacaattggctt

SEQ ID NO: 84212 - DNA, 25 bp, Artificial
  probe
  misc_feature (1)..(25): SEQ ID NO: 7392; WAN024BKZ_at; Start 74; Stop 98
cctttattgtatcgcgtttggagtt

SEQ ID NO: 84213 - DNA, 25 bp, Artificial
  probe
  misc_feature (1)..(25): SEQ ID NO: 7392; WAN024BKZ_at; Start 103; Stop 127
tggtataaccttcgacgcgcacccg

SEQ ID NO: 84214 - DNA, 25 bp, Artificial
  probe
  misc_feature (1)..(25): SEQ ID NO: 7392; WAN024BKZ_at; Start 18; Stop 42
caaaagaaccttttgtgccatattt

SEQ ID NO: 84215 - DNA, 25 bp, Artificial
  probe
  misc_feature (1)..(25): SEQ ID NO: 7392; WAN024BKZ_at; Start 36; Stop 60
catatttttctcctttcgctttaca

SEQ ID NO: 84216 - DNA, 25 bp, Artificial
  probe
  misc_feature (1)..(25): SEQ ID NO: 7392; WAN024BKZ_at; Start 25; Stop 49
accttttgtgccatatttttctcct

SEQ ID NO: 84217 - DNA, 25 bp, Artificial
  probe
  misc_feature (1)..(25): SEQ ID NO: 7392; WAN024BKZ_at; Start 63; Stop 87
tggcttgaacacctttattgtatcg

SEQ ID NO: 84218 - DNA, 25 bp, Artificial
  probe
  misc_feature (1)..(25): SEQ ID NO: 7392; WAN024BKZ_at; Start 31; Stop 55
tgtgccatatttttctcctttcgct

SEQ ID NO: 84219 - DNA, 25 bp, Artificial
  probe
  misc_feature (1)..(25): SEQ ID NO: 7392; WAN024BKZ_at; Start 42; Stop 66
tttctcctttcgctttacaattggc

SEQ ID NO: 84220 - DNA, 25 bp, Artificial
  probe
  misc_feature (1)..(25): SEQ ID NO: 7392; WAN024BKZ_at; Start 72; Stop 96
cacctttattgtatcgcgtttggag

SEQ ID NO: 84221 - DNA, 25 bp, Artificial
  probe
  misc_feature (1)..(25): SEQ ID NO: 7392; WAN024BKZ_at; Start 46; Stop 70
tcctttcgctttacaattggcttga

SEQ ID NO: 84222 - DNA, 25 bp, Artificial
  probe
  misc_feature (1)..(25): SEQ ID NO: 7392; WAN024BKZ_at; Start 73; Stop 97
acctttattgtatcgcgtttggagt

SEQ ID NO: 84223 - DNA, 25 bp, Artificial
  probe
  misc_feature (1)..(25): SEQ ID NO: 7392; WAN024BKZ_at; Start 65; Stop 89
gcttgaacacctttattgtatcgcg

SEQ ID NO: 84224 - DNA, 25 bp, Artificial
  probe
  misc_feature (1)..(25): SEQ ID NO: 7392; WAN024BKZ_at; Start 52; Stop 76
cgctttacaattggcttgaacacct

SEQ ID NO: 84225 - DNA, 25 bp, Artificial
  probe
  misc_feature (1)..(25): SEQ ID NO: 7392; WAN024BKZ_at; Start 105; Stop 129
gtataaccttcgacgcgcacccgca

SEQ ID NO: 84226 - DNA, 25 bp, Artificial
  probe
  misc_feature (1)..(25): SEQ ID NO: 7392; WAN024BKZ_at; Start 13; Stop 37
caggacaaaagaaccttttgtgcca

SEQ ID NO: 84227 - DNA, 25 bp, Artificial
  probe
  misc_feature (1)..(25): SEQ ID NO: 7392; WAN024BKZ_at; Start 57; Stop 81
tacaattggcttgaacacctttatt

SEQ ID NO: 84228 - DNA, 25 bp, Artificial
  probe
  misc_feature (1)..(25): SEQ ID NO: 7392; WAN024BKZ_at; Start 34; Stop 58
gccatatttttctcctttcgcttta

SEQ ID NO: 84229 - DNA, 25 bp, Artificial
  probe
  misc_feature (1)..(25): SEQ ID NO: 7392; WAN024BKZ_at; Start 99; Stop 123
tttttggtataaccttcgacgcgca

SEQ ID NO: 84230 - DNA, 25 bp, Artificial
  probe
  misc_feature (1)..(25): SEQ ID NO: 7392; WAN024BKZ_at; Start 60; Stop 84
aattggcttgaacacctttattgta

SEQ ID NO: 84231 - DNA, 25 bp, Artificial
  probe
  misc_feature (1)..(25): SEQ ID NO: 7392; WAN024BKZ_at; Start 29; Stop 53
tttgtgccatatttttctcctttcg

SEQ ID NO: 84232 - DNA, 25 bp, Artificial
  probe
  misc_feature (1)..(25): SEQ ID NO: 7392; WAN024BKZ_at; Start 15; Stop 39
ggacaaaagaaccttttgtgccata

SEQ ID NO: 84233 - DNA, 25 bp, Artificial
  probe
  misc_feature (1)..(25): SEQ ID NO: 7392; WAN024BKZ_at; Start 70; Stop 94
aacacctttattgtatcgcgtttgg

SEQ ID NO: 84234 - DNA, 25 bp, Artificial
  probe
  misc_feature (1)..(25): SEQ ID NO: 7392; WAN024BKZ_at; Start 51; Stop 75
tcgctttacaattggcttgaacacc

SEQ ID NO: 84235 - DNA, 25 bp, Artificial
  probe
  misc_feature (1)..(25): SEQ ID NO: 7392; WAN024BKZ_at; Start 69; Stop 93
gaacacctttattgtatcgcgtttg

SEQ ID NO: 84236 - DNA, 25 bp, Artificial
  probe
  misc_feature (1)..(25): SEQ ID NO: 7392; WAN024BKZ_at; Start 47; Stop 71
cctttcgctttacaattggcttgaa

SEQ ID NO: 84237 - DNA, 25 bp, Artificial
  probe
  misc_feature (1)..(25): SEQ ID NO: 7392; WAN024BKZ_at; Start 48; Stop 72
ctttcgctttacaattggcttgaac

SEQ ID NO: 84238 - DNA, 25 bp, Artificial
  probe
  misc_feature (1)..(25): SEQ ID NO: 7392; WAN024BKZ_at; Start 101; Stop 125
tttggtataaccttcgacgcgcacc

SEQ ID NO: 84239 - DNA, 25 bp, Artificial
  probe
  misc_feature (1)..(25): SEQ ID NO: 7392; WAN024BKZ_at; Start 100; Stop 124
ttttggtataaccttcgacgcgcac

SEQ ID NO: 84240 - DNA, 25 bp, Artificial
  probe
  misc_feature (1)..(25): SEQ ID NO: 7392; WAN024BKZ_at; Start 54; Stop 78
ctttacaattggcttgaacaccttt

SEQ ID NO: 84241 - DNA, 25 bp, Artificial
  probe
  misc_feature (1)..(25): SEQ ID NO: 7331; WAN024BL2_at; Start 41; Stop 65
aagataatgacagcggtgtcattct

SEQ ID NO: 84242 - DNA, 25 bp, Artificial
  probe
  misc_feature (1)..(25): SEQ ID NO: 7331; WAN024BL2_at; Start 67; Stop 91
tctattttaagaaaagtaataatca

SEQ ID NO: 84243 - DNA, 25 bp, Artificial
  probe
  misc_feature (1)..(25): SEQ ID NO: 7331; WAN024BL2_at; Start 45; Stop 69
taatgacagcggtgtcattctatct

SEQ ID NO: 84244 - DNA, 25 bp, Artificial
  probe
  misc_feature (1)..(25): SEQ ID NO: 7331; WAN024BL2_at; Start 8; Stop 32
tccttgacaattcaatttggaaaat

SEQ ID NO: 84245 - DNA, 25 bp, Artificial
  probe
  misc_feature (1)..(25): SEQ ID NO: 7331; WAN024BL2_at; Start 47; Stop 71
atgacagcggtgtcattctatctat

SEQ ID NO: 84246 - DNA, 25 bp, Artificial
  probe
  misc_feature (1)..(25): SEQ ID NO: 7331; WAN024BL2_at; Start 13; Stop 37
gacaattcaatttggaaaatatatg

SEQ ID NO: 84247 - DNA, 25 bp, Artificial
  probe
  misc_feature (1)..(25): SEQ ID NO: 7331; WAN024BL2_at; Start 15; Stop 39
caattcaatttggaaaatatatgat

SEQ ID NO: 84248 - DNA, 25 bp, Artificial
  probe
  misc_feature (1)..(25): SEQ ID NO: 7331; WAN024BL2_at; Start 46; Stop 70
aatgacagcggtgtcattctatcta

SEQ ID NO: 84249 - DNA, 25 bp, Artificial
  probe
  misc_feature (1)..(25): SEQ ID NO: 7331; WAN024BL2_at; Start 19; Stop 43
tcaatttggaaaatatatgataaag

SEQ ID NO: 84250 - DNA, 25 bp, Artificial
  probe
  misc_feature (1)..(25): SEQ ID NO: 7331; WAN024BL2_at; Start 35; Stop 59
atgataaagataatgacagcggtgt

SEQ ID NO: 84251 - DNA, 25 bp, Artificial
  probe
  misc_feature (1)..(25): SEQ ID NO: 7331; WAN024BL2_at; Start 40; Stop 64
aaagataatgacagcggtgtcattc

SEQ ID NO: 84252 - DNA, 25 bp, Artificial
  probe
  misc_feature (1)..(25): SEQ ID NO: 7331; WAN024BL2_at; Start 52; Stop 76
agcggtgtcattctatctattttaa

SEQ ID NO: 84253 - DNA, 25 bp, Artificial
  probe
  misc_feature (1)..(25): SEQ ID NO: 7331; WAN024BL2_at; Start 33; Stop 57
atatgataaagataatgacagcggt

SEQ ID NO: 84254 - DNA, 25 bp, Artificial
  probe
  misc_feature (1)..(25): SEQ ID NO: 7331; WAN024BL2_at; Start 36; Stop 60
tgataaagataatgacagcggtgtc

SEQ ID NO: 84255 - DNA, 25 bp, Artificial
  probe
  misc_feature (1)..(25): SEQ ID NO: 7331; WAN024BL2_at; Start 51; Stop 75
cagcggtgtcattctatctatttta

SEQ ID NO: 84256 - DNA, 25 bp, Artificial
  probe
  misc_feature (1)..(25): SEQ ID NO: 7331; WAN024BL2_at; Start 48; Stop 72
tgacagcggtgtcattctatctatt

SEQ ID NO: 84257 - DNA, 25 bp, Artificial
  probe
  misc_feature (1)..(25): SEQ ID NO: 7331; WAN024BL2_at; Start 60; Stop 84
cattctatctattttaagaaaagta

SEQ ID NO: 84258 - DNA, 25 bp, Artificial
  probe
  misc_feature (1)..(25): SEQ ID NO: 7331; WAN024BL2_at; Start 10; Stop 34
cttgacaattcaatttggaaaatat

SEQ ID NO: 84259 - DNA, 25 bp, Artificial
  probe
  misc_feature (1)..(25): SEQ ID NO: 7331; WAN024BL2_at; Start 55; Stop 79
ggtgtcattctatctattttaagaa

SEQ ID NO: 84260 - DNA, 25 bp, Artificial
  probe
  misc_feature (1)..(25): SEQ ID NO: 7331; WAN024BL2_at; Start 54; Stop 78
cggtgtcattctatctattttaaga

SEQ ID NO: 84261 - DNA, 25 bp, Artificial
  probe
  misc_feature (1)..(25): SEQ ID NO: 7331; WAN024BL2_at; Start 4; Stop 28
ttattccttgacaattcaatttgga

SEQ ID NO: 84262 - DNA, 25 bp, Artificial
  probe
  misc_feature (1)..(25): SEQ ID NO: 7331; WAN024BL2_at; Start 50; Stop 74
acagcggtgtcattctatctatttt

SEQ ID NO: 84263 - DNA, 25 bp, Artificial
  probe
  misc_feature (1)..(25): SEQ ID NO: 7331; WAN024BL2_at; Start 34; Stop 58
tatgataaagataatgacagcggtg

SEQ ID NO: 84264 - DNA, 25 bp, Artificial
  probe
  misc_feature (1)..(25): SEQ ID NO: 7331; WAN024BL2_at; Start 38; Stop 62
ataaagataatgacagcggtgtcat

SEQ ID NO: 84265 - DNA, 25 bp, Artificial
  probe
  misc_feature (1)..(25): SEQ ID NO: 7331; WAN024BL2_at; Start 3; Stop 27
gttattccttgacaattcaatttgg

SEQ ID NO: 84266 - DNA, 25 bp, Artificial
  probe
  misc_feature (1)..(25): SEQ ID NO: 7331; WAN024BL2_at; Start 9; Stop 33
ccttgacaattcaatttggaaaata

SEQ ID NO: 84267 - DNA, 25 bp, Artificial
  probe
  misc_feature (1)..(25): SEQ ID NO: 7331; WAN024BL2_at; Start 2; Stop 26
tgttattccttgacaattcaatttg

SEQ ID NO: 84268 - DNA, 25 bp, Artificial
  probe
  misc_feature (1)..(25): SEQ ID NO: 7331; WAN024BL2_at; Start 58; Stop 82
gtcattctatctattttaagaaaag

SEQ ID NO: 84269 - DNA, 25 bp, Artificial
  probe
  misc_feature (1)..(25): SEQ ID NO: 7331; WAN024BL2_at; Start 49; Stop 73
gacagcggtgtcattctatctattt

SEQ ID NO: 84270 - DNA, 25 bp, Artificial
  probe
  misc_feature (1)..(25): SEQ ID NO: 7331; WAN024BL2_at; Start 37; Stop 61
gataaagataatgacagcggtgtca

SEQ ID NO: 84271 - DNA, 25 bp, Artificial
  probe
  misc_feature (1)..(25): SEQ ID NO: 7331; WAN024BL2_at; Start 5; Stop 29
tattccttgacaattcaatttggaa

SEQ ID NO: 84272 - DNA, 25 bp, Artificial
  probe
  misc_feature (1)..(25): SEQ ID NO: 7331; WAN024BL2_at; Start 53; Stop 77
gcggtgtcattctatctattttaag

SEQ ID NO: 84273 - DNA, 25 bp, Artificial
  probe
  misc_feature (1)..(25): SEQ ID NO: 7331; WAN024BL2_at; Start 39; Stop 63
taaagataatgacagcggtgtcatt

SEQ ID NO: 84274 - DNA, 25 bp, Artificial
  probe
  misc_feature (1)..(25): SEQ ID NO: 7331; WAN024BL2_at; Start 32; Stop 56
tatatgataaagataatgacagcgg

SEQ ID NO: 84275 - DNA, 25 bp, Artificial
  probe
  misc_feature (1)..(25): SEQ ID NO: 6457; WAN024BL3_at; Start 1136; Stop 1160
tatttacgaaactacatgctaccaa

SEQ ID NO: 84276 - DNA, 25 bp, Artificial
  probe
  misc_feature (1)..(25): SEQ ID NO: 6457; WAN024BL3_at; Start 1034; Stop 1058
tatggcaggaaactagacaaattat

SEQ ID NO: 84277 - DNA, 25 bp, Artificial
  probe
  misc_feature (1)..(25): SEQ ID NO: 6457; WAN024BL3_at; Start 475; Stop 499
caaccttttagtcatgaattagcaa

SEQ ID NO: 84278 - DNA, 25 bp, Artificial
  probe
  misc_feature (1)..(25): SEQ ID NO: 6457; WAN024BL3_at; Start 1002; Stop 1026
tcaggatagacaattagaagaaatc

SEQ ID NO: 84279 - DNA, 25 bp, Artificial
  probe
  misc_feature (1)..(25): SEQ ID NO: 6457; WAN024BL3_at; Start 614; Stop 638
catttactgaggttattgcagagaa

SEQ ID NO: 84280 - DNA, 25 bp, Artificial
  probe
  misc_feature (1)..(25): SEQ ID NO: 6457; WAN024BL3_at; Start 1018; Stop 1042
gaagaaatccaaagagtatggcagg

SEQ ID NO: 84281 - DNA, 25 bp, Artificial
  probe
  misc_feature (1)..(25): SEQ ID NO: 6457; WAN024BL3_at; Start 878; Stop 902
caacagatagttgggaatcatcaca

SEQ ID NO: 84282 - DNA, 25 bp, Artificial
  probe
  misc_feature (1)..(25): SEQ ID NO: 6457; WAN024BL3_at; Start 63; Stop 87
tagtgactcggaagctgactttgaa

SEQ ID NO: 84283 - DNA, 25 bp, Artificial
  probe
  misc_feature (1)..(25): SEQ ID NO: 6457; WAN024BL3_at; Start 340; Stop 364
gcagtcatccttgaagactatcaga

SEQ ID NO: 84284 - DNA, 25 bp, Artificial
  probe
  misc_feature (1)..(25): SEQ ID NO: 6457; WAN024BL3_at; Start 201; Stop 225
ggatttttactccactcatttatgg

SEQ ID NO: 84285 - DNA, 25 bp, Artificial
  probe
  misc_feature (1)..(25): SEQ ID NO: 6457; WAN024BL3_at; Start 126; Stop 150
aaacaaaaatgggacacttagtgca

SEQ ID NO: 84286 - DNA, 25 bp, Artificial
  probe
  misc_feature (1)..(25): SEQ ID NO: 6457; WAN024BL3_at; Start 1213; Stop 1237
gatacggatgaacttccagatggac

SEQ ID NO: 84287 - DNA, 25 bp, Artificial
  probe
  misc_feature (1)..(25): SEQ ID NO: 6457; WAN024BL3_at; Start 7; Stop 31
tcaaaagggcagtatggaaattata

SEQ ID NO: 84288 - DNA, 25 bp, Artificial
  probe
  misc_feature (1)..(25): SEQ ID NO: 6457; WAN024BL3_at; Start 703; Stop 727
gcaaaaggtaagaatagtactctga

SEQ ID NO: 84289 - DNA, 25 bp, Artificial
  probe
  misc_feature (1)..(25): SEQ ID NO: 6457; WAN024BL3_at; Start 632; Stop 656
cagagaagattctttcctacaaagg

SEQ ID NO: 84290 - DNA, 25 bp, Artificial
  probe
  misc_feature (1)..(25): SEQ ID NO: 6457; WAN024BL3_at; Start 407; Stop 431
cagaatcagatggaaactatttatc

SEQ ID NO: 84291 - DNA, 25 bp, Artificial
  probe
  misc_feature (1)..(25): SEQ ID NO: 6457; WAN024BL3_at; Start 167; Stop 191
taacaatactaaactatatggagga

SEQ ID NO: 84292 - DNA, 25 bp, Artificial
  probe
  misc_feature (1)..(25): SEQ ID NO: 6457; WAN024BL3_at; Start 569; Stop 593
cagatcaagaaagtgttctggctaa

SEQ ID NO: 84293 - DNA, 25 bp, Artificial
  probe
  misc_feature (1)..(25): SEQ ID NO: 6457; WAN024BL3_at; Start 373; Stop 397
gataaaatcaaaaatggaaaggcac

SEQ ID NO: 84294 - DNA, 25 bp, Artificial
  probe
  misc_feature (1)..(25): SEQ ID NO: 6457; WAN024BL3_at; Start 1228; Stop 1252
ccagatggacgtaggattacaaaac

SEQ ID NO: 84295 - DNA, 25 bp, Artificial
  probe
  misc_feature (1)..(25): SEQ ID NO: 6457; WAN024BL3_at; Start 325; Stop 349
tttgaggaagatatggcagtcatcc

SEQ ID NO: 84296 - DNA, 25 bp, Artificial
  probe
  misc_feature (1)..(25): SEQ ID NO: 6457; WAN024BL3_at; Start 388; Stop 412
ggaaaggcacatgaattatcagaat

SEQ ID NO: 84297 - DNA, 25 bp, Artificial
  probe
  misc_feature (1)..(25): SEQ ID NO: 6457; WAN024BL3_at; Start 648; Stop 672
ctacaaaggtttttctgaacaagag

SEQ ID NO: 84298 - DNA, 25 bp, Artificial
  probe
  misc_feature (1)..(25): SEQ ID NO: 6457; WAN024BL3_at; Start 1196; Stop 1220
ggaaaggttcattatctgatacgga

SEQ ID NO: 84299 - DNA, 25 bp, Artificial
  probe
  misc_feature (1)..(25): SEQ ID NO: 6457; WAN024BL3_at; Start 49; Stop 73
ggttatcagccaaatagtgactcgg

SEQ ID NO: 84300 - DNA, 25 bp, Artificial
  probe
  misc_feature (1)..(25): SEQ ID NO: 6457; WAN024BL3_at; Start 1248; Stop 1272
aaaacactccttttggatgcctaag

SEQ ID NO: 84301 - DNA, 25 bp, Artificial
  probe
  misc_feature (1)..(25): SEQ ID NO: 6457; WAN024BL3_at; Start 258; Stop 282
caatggcttaattcctaatcaaaca

SEQ ID NO: 84302 - DNA, 25 bp, Artificial
  probe
  misc_feature (1)..(25): SEQ ID NO: 6457; WAN024BL3_at; Start 140; Stop 164
cacttagtgcaaaagaacgacttgt

SEQ ID NO: 84303 - DNA, 25 bp, Artificial
  probe
  misc_feature (1)..(25): SEQ ID NO: 6457; WAN024BL3_at; Start 1049; Stop 1073
gacaaattatttctgacggagttaa

SEQ ID NO: 84304 - DNA, 25 bp, Artificial
  probe
  misc_feature (1)..(25): SEQ ID NO: 6457; WAN024BL3_at; Start 863; Stop 887
ttaaagaactagcagcaacagatag

SEQ ID NO: 84305 - DNA, 25 bp, Artificial
  probe
  misc_feature (1)..(25): SEQ ID NO: 6457; WAN024BL3_at; Start 822; Stop 846
taatttacctaaggaagactctcca

SEQ ID NO: 84306 - DNA, 25 bp, Artificial
  probe
  misc_feature (1)..(25): SEQ ID NO: 6457; WAN024BL3_at; Start 273; Stop 297
taatcaaacaatgaaggactatgtc

SEQ ID NO: 84307 - DNA, 25 bp, Artificial
  probe
  misc_feature (1)..(25): SEQ ID NO: 6457; WAN024BL3_at; Start 490; Stop 514
gaattagcaaaacaaagagcttggg

SEQ ID NO: 84308 - DNA, 25 bp, Artificial
  probe
  misc_feature (1)..(25): SEQ ID NO: 6457; WAN024BL3_at; Start 687; Stop 711
tgaagtgaattccaaagcaaaaggt

SEQ ID NO: 84309 - DNA, 25 bp, Artificial
  probe
  misc_feature (1)..(25): SEQ ID NO: 6400; WAN024BL4_at; Start 841; Stop 865
caagatgagtctgaagtacctgaaa

SEQ ID NO: 84310 - DNA, 25 bp, Artificial
  probe
  misc_feature (1)..(25): SEQ ID NO: 6400; WAN024BL4_at; Start 414; Stop 438
tgattttgcaatcatgctcacagct

SEQ ID NO: 84311 - DNA, 25 bp, Artificial
  probe
  misc_feature (1)..(25): SEQ ID NO: 6400; WAN024BL4_at; Start 136; Stop 160
tatgattatcacttccccaatagca

SEQ ID NO: 84312 - DNA, 25 bp, Artificial
  probe
  misc_feature (1)..(25): SEQ ID NO: 6400; WAN024BL4_at; Start 218; Stop 242
ccgatatgattgtcggtggttttcc

SEQ ID NO: 84313 - DNA, 25 bp, Artificial
  probe
  misc_feature (1)..(25): SEQ ID NO: 6400; WAN024BL4_at; Start 16; Stop 40
ctatttgctggagttggcgggtttc

SEQ ID NO: 84314 - DNA, 25 bp, Artificial
  probe
  misc_feature (1)..(25): SEQ ID NO: 6400; WAN024BL4_at; Start 627; Stop 651
caatcaaggtctatttgcaaaacaa

SEQ ID NO: 84315 - DNA, 25 bp, Artificial
  probe
  misc_feature (1)..(25): SEQ ID NO: 6400; WAN024BL4_at; Start 492; Stop 516
tggaagaagccaacgaagacgtcgt

SEQ ID NO: 84316 - DNA, 25 bp, Artificial
  probe
  misc_feature (1)..(25): SEQ ID NO: 6400; WAN024BL4_at; Start 313; Stop 337
ttttgggaaatcattagagcaacgg

SEQ ID NO: 84317 - DNA, 25 bp, Artificial
  probe
  misc_feature (1)..(25): SEQ ID NO: 6400; WAN024BL4_at; Start 199; Stop 223
caattttccaaaatggatgccgata

SEQ ID NO: 84318 - DNA, 25 bp, Artificial
  probe
  misc_feature (1)..(25): SEQ ID NO: 6400; WAN024BL4_at; Start 374; Stop 398
tagataggcttttaaaagcgccctc

SEQ ID NO: 84319 - DNA, 25 bp, Artificial
  probe
  misc_feature (1)..(25): SEQ ID NO: 6400; WAN024BL4_at; Start 926; Stop 950
aaattgaacgaacatcctctgacgg

SEQ ID NO: 84320 - DNA, 25 bp, Artificial
  probe
  misc_feature (1)..(25): SEQ ID NO: 6400; WAN024BL4_at; Start 121; Stop 145
gacgcatttgaggtctatgattatc

SEQ ID NO: 84321 - DNA, 25 bp, Artificial
  probe
  misc_feature (1)..(25): SEQ ID NO: 6400; WAN024BL4_at; Start 748; Stop 772
tggaatacaggaattatgaggcgtg

SEQ ID NO: 84322 - DNA, 25 bp, Artificial
  probe
  misc_feature (1)..(25): SEQ ID NO: 6400; WAN024BL4_at; Start 1104; Stop 1128
tgaacgacttcaggatttcccagat

SEQ ID NO: 84323 - DNA, 25 bp, Artificial
  probe
  misc_feature (1)..(25): SEQ ID NO: 6400; WAN024BL4_at; Start 50; Stop 74
tagaaaatgccgataagcaactctt

SEQ ID NO: 84324 - DNA, 25 bp, Artificial
  probe
  misc_feature (1)..(25): SEQ ID NO: 6400; WAN024BL4_at; Start 808; Stop 832
aatggtaatcctatcactctaggag

SEQ ID NO: 84325 - DNA, 25 bp, Artificial
  probe
  misc_feature (1)..(25): SEQ ID NO: 6400; WAN024BL4_at; Start 4; Stop 28
aaagttctcgaactatttgctggag

SEQ ID NO: 84326 - DNA, 25 bp, Artificial
  probe
  misc_feature (1)..(25): SEQ ID NO: 6400; WAN024BL4_at; Start 941; Stop 965
cctctgacggacatcaatacatcta

SEQ ID NO: 84327 - DNA, 25 bp, Artificial
  probe
  misc_feature (1)..(25): SEQ ID NO: 6400; WAN024BL4_at; Start 31; Stop 55
ggcgggtttcgcataggattagaaa

SEQ ID NO: 84328 - DNA, 25 bp, Artificial
  probe
  misc_feature (1)..(25): SEQ ID NO: 6400; WAN024BL4_at; Start 245; Stop 269
gccaagattactctgttgctcgtag

SEQ ID NO: 84329 - DNA, 25 bp, Artificial
  probe
  misc_feature (1)..(25): SEQ ID NO: 6400; WAN024BL4_at; Start 429; Stop 453
gctcacagcttttaataatctcgga

SEQ ID NO: 84330 - DNA, 25 bp, Artificial
  probe
  misc_feature (1)..(25): SEQ ID NO: 6400; WAN024BL4_at; Start 391; Stop 415
gcgccctcaaaacaaagaggacgtg

SEQ ID NO: 84331 - DNA, 25 bp, Artificial
  probe
  misc_feature (1)..(25): SEQ ID NO: 6400; WAN024BL4_at; Start 762; Stop 786
tatgaggcgtggaaagtactattct

SEQ ID NO: 84332 - DNA, 25 bp, Artificial
  probe
  misc_feature (1)..(25): SEQ ID NO: 6400; WAN024BL4_at; Start 98; Stop 122
gggaaccatctcgtaaatctcaaga

SEQ ID NO: 84333 - DNA, 25 bp, Artificial
  probe
  misc_feature (1)..(25): SEQ ID NO: 6400; WAN024BL4_at; Start 478; Stop 502
aatgctgctgagtatggaagaagcc

SEQ ID NO: 84334 - DNA, 25 bp, Artificial
  probe
  misc_feature (1)..(25): SEQ ID NO: 6400; WAN024BL4_at; Start 1121; Stop 1145
tcccagatgattggacagctaaaaa

SEQ ID NO: 84335 - DNA, 25 bp, Artificial
  probe
  misc_feature (1)..(25): SEQ ID NO: 6400; WAN024BL4_at; Start 85; Stop 109
tgggcaaaccaatgggaaccatctc

SEQ ID NO: 84336 - DNA, 25 bp, Artificial
  probe
  misc_feature (1)..(25): SEQ ID NO: 6400; WAN024BL4_at; Start 327; Stop 351
tagagcaacggaaatcattaaaccc

SEQ ID NO: 84337 - DNA, 25 bp, Artificial
  probe
  misc_feature (1)..(25): SEQ ID NO: 6400; WAN024BL4_at; Start 1200; Stop 1224
tatgggaaatgctttggttactgag

SEQ ID NO: 84338 - DNA, 25 bp, Artificial
  probe
  misc_feature (1)..(25): SEQ ID NO: 6400; WAN024BL4_at; Start 532; Stop 556
tatcgaaatgatacagtctttgccc

SEQ ID NO: 84339 - DNA, 25 bp, Artificial
  probe
  misc_feature (1)..(25): SEQ ID NO: 6400; WAN024BL4_at; Start 183; Stop 207
tgatataacagacgaacaattttcc

SEQ ID NO: 84340 - DNA, 25 bp, Artificial
  probe
  misc_feature (1)..(25): SEQ ID NO: 6400; WAN024BL4_at; Start 991; Stop 1015
gatgatttaaaccttcctggacgaa

SEQ ID NO: 84341 - DNA, 25 bp, Artificial
  probe
  misc_feature (1)..(25): SEQ ID NO: 6400; WAN024BL4_at; Start 664; Stop 688
cctatagcagttaaaaatcgtcatg

SEQ ID NO: 84342 - DNA, 25 bp, Artificial
  probe
  misc_feature (1)..(25): SEQ ID NO: 6400; WAN024BL4_at; Start 1010; Stop 1034
gacgaacaatgcttacatccgaagg

SEQ ID NO: 84343 - DNA, 25 bp, Artificial
  probe
  misc_feature (1)..(25): SEQ ID NO: 6358; WAN024BL5_at; Start 9; Stop 33
gctagtcaaatatcttattctatgt

SEQ ID NO: 84344 - DNA, 25 bp, Artificial
  probe
  misc_feature (1)..(25): SEQ ID NO: 6358; WAN024BL5_at; Start 31; Stop 55
tgttatagtgaaagtatggattttt

SEQ ID NO: 84345 - DNA, 25 bp, Artificial
  probe
  misc_feature (1)..(25): SEQ ID NO: 6358; WAN024BL5_at; Start 80; Stop 104
tgattgccattacatgtagttttac

SEQ ID NO: 84346 - DNA, 25 bp, Artificial
  probe
  misc_feature (1)..(25): SEQ ID NO: 6358; WAN024BL5_at; Start 54; Stop 78
ttttagtaggatgattcttgatatc

SEQ ID NO: 84347 - DNA, 25 bp, Artificial
  probe
  misc_feature (1)..(25): SEQ ID NO: 6358; WAN024BL5_at; Start 4; Stop 28
aaaatgctagtcaaatatcttattc

SEQ ID NO: 84348 - DNA, 25 bp, Artificial
  probe
  misc_feature (1)..(25): SEQ ID NO: 6358; WAN024BL5_at; Start 15; Stop 39
caaatatcttattctatgttatagt

SEQ ID NO: 84349 - DNA, 25 bp, Artificial
  probe
  misc_feature (1)..(25): SEQ ID NO: 6358; WAN024BL5_at; Start 70; Stop 94
cttgatatcttgattgccattacat

SEQ ID NO: 84350 - DNA, 25 bp, Artificial
  probe
  misc_feature (1)..(25): SEQ ID NO: 6358; WAN024BL5_at; Start 27; Stop 51
tctatgttatagtgaaagtatggat

SEQ ID NO: 84351 - DNA, 25 bp, Artificial
  probe
  misc_feature (1)..(25): SEQ ID NO: 6358; WAN024BL5_at; Start 85; Stop 109
gccattacatgtagttttactactc

SEQ ID NO: 84352 - DNA, 25 bp, Artificial
  probe
  misc_feature (1)..(25): SEQ ID NO: 6358; WAN024BL5_at; Start 42; Stop 66
aagtatggatttttttagtaggatg

SEQ ID NO: 84353 - DNA, 25 bp, Artificial
  probe
  misc_feature (1)..(25): SEQ ID NO: 6358; WAN024BL5_at; Start 68; Stop 92
ttcttgatatcttgattgccattac

SEQ ID NO: 84354 - DNA, 25 bp, Artificial
  probe
  misc_feature (1)..(25): SEQ ID NO: 6358; WAN024BL5_at; Start 87; Stop 111
cattacatgtagttttactactcaa

SEQ ID NO: 84355 - DNA, 25 bp, Artificial
  probe
  misc_feature (1)..(25): SEQ ID NO: 6358; WAN024BL5_at; Start 73; Stop 97
gatatcttgattgccattacatgta

SEQ ID NO: 84356 - DNA, 25 bp, Artificial
  probe
  misc_feature (1)..(25): SEQ ID NO: 6358; WAN024BL5_at; Start 62; Stop 86
ggatgattcttgatatcttgattgc

SEQ ID NO: 84357 - DNA, 25 bp, Artificial
  probe
  misc_feature (1)..(25): SEQ ID NO: 6358; WAN024BL5_at; Start 84; Stop 108
tgccattacatgtagttttactact

SEQ ID NO: 84358 - DNA, 25 bp, Artificial
  probe
  misc_feature (1)..(25): SEQ ID NO: 6358; WAN024BL5_at; Start 8; Stop 32
tgctagtcaaatatcttattctatg

SEQ ID NO: 84359 - DNA, 25 bp, Artificial
  probe
  misc_feature (1)..(25): SEQ ID NO: 6358; WAN024BL5_at; Start 64; Stop 88
atgattcttgatatcttgattgcca

SEQ ID NO: 84360 - DNA, 25 bp, Artificial
  probe
  misc_feature (1)..(25): SEQ ID NO: 6358; WAN024BL5_at; Start 65; Stop 89
tgattcttgatatcttgattgccat

SEQ ID NO: 84361 - DNA, 25 bp, Artificial
  probe
  misc_feature (1)..(25): SEQ ID NO: 6358; WAN024BL5_at; Start 75; Stop 99
tatcttgattgccattacatgtagt

SEQ ID NO: 84362 - DNA, 25 bp, Artificial
  probe
  misc_feature (1)..(25): SEQ ID NO: 6358; WAN024BL5_at; Start 83; Stop 107
ttgccattacatgtagttttactac

SEQ ID NO: 84363 - DNA, 25 bp, Artificial
  probe
  misc_feature (1)..(25): SEQ ID NO: 6358; WAN024BL5_at; Start 58; Stop 82
agtaggatgattcttgatatcttga

SEQ ID NO: 84364 - DNA, 25 bp, Artificial
  probe
  misc_feature (1)..(25): SEQ ID NO: 6358; WAN024BL5_at; Start 66; Stop 90
gattcttgatatcttgattgccatt

SEQ ID NO: 84365 - DNA, 25 bp, Artificial
  probe
  misc_feature (1)..(25): SEQ ID NO: 6358; WAN024BL5_at; Start 69; Stop 93
tcttgatatcttgattgccattaca

SEQ ID NO: 84366 - DNA, 25 bp, Artificial
  probe
  misc_feature (1)..(25): SEQ ID NO: 6358; WAN024BL5_at; Start 6; Stop 30
aatgctagtcaaatatcttattcta

SEQ ID NO: 84367 - DNA, 25 bp, Artificial
  probe
  misc_feature (1)..(25): SEQ ID NO: 6358; WAN024BL5_at; Start 81; Stop 105
gattgccattacatgtagttttact

SEQ ID NO: 84368 - DNA, 25 bp, Artificial
  probe
  misc_feature (1)..(25): SEQ ID NO: 6358; WAN024BL5_at; Start 77; Stop 101
tcttgattgccattacatgtagttt

SEQ ID NO: 84369 - DNA, 25 bp, Artificial
  probe
  misc_feature (1)..(25): SEQ ID NO: 6358; WAN024BL5_at; Start 2; Stop 26
tgaaaatgctagtcaaatatcttat

SEQ ID NO: 84370 - DNA, 25 bp, Artificial
  probe
  misc_feature (1)..(25): SEQ ID NO: 6358; WAN024BL5_at; Start 72; Stop 96
tgatatcttgattgccattacatgt

SEQ ID NO: 84371 - DNA, 25 bp, Artificial
  probe
  misc_feature (1)..(25): SEQ ID NO: 6358; WAN024BL5_at; Start 3; Stop 27
gaaaatgctagtcaaatatcttatt

SEQ ID NO: 84372 - DNA, 25 bp, Artificial
  probe
  misc_feature (1)..(25): SEQ ID NO: 6358; WAN024BL5_at; Start 57; Stop 81
tagtaggatgattcttgatatcttg

SEQ ID NO: 84373 - DNA, 25 bp, Artificial
  probe
  misc_feature (1)..(25): SEQ ID NO: 6358; WAN024BL5_at; Start 28; Stop 52
ctatgttatagtgaaagtatggatt

SEQ ID NO: 84374 - DNA, 25 bp, Artificial
  probe
  misc_feature (1)..(25): SEQ ID NO: 6358; WAN024BL5_at; Start 71; Stop 95
ttgatatcttgattgccattacatg

SEQ ID NO: 84375 - DNA, 25 bp, Artificial
  probe
  misc_feature (1)..(25): SEQ ID NO: 6358; WAN024BL5_at; Start 63; Stop 87
gatgattcttgatatcttgattgcc

SEQ ID NO: 84376 - DNA, 25 bp, Artificial
  probe
  misc_feature (1)..(25): SEQ ID NO: 6358; WAN024BL5_at; Start 78; Stop 102
cttgattgccattacatgtagtttt

SEQ ID NO: 84377 - DNA, 25 bp, Artificial
  probe
  misc_feature (1)..(25): SEQ ID NO: 6634; WAN024BL6_at; Start 60; Stop 84
agaaaatcagaaccataatacctat

SEQ ID NO: 84378 - DNA, 25 bp, Artificial
  probe
  misc_feature (1)..(25): SEQ ID NO: 6634; WAN024BL6_at; Start 24; Stop 48
ttctaagaagaattctagtttgaat

SEQ ID NO: 84379 - DNA, 25 bp, Artificial
  probe
  misc_feature (1)..(25): SEQ ID NO: 6634; WAN024BL6_at; Start 64; Stop 88
aatcagaaccataatacctatataa

SEQ ID NO: 84380 - DNA, 25 bp, Artificial
  probe
  misc_feature (1)..(25): SEQ ID NO: 6634; WAN024BL6_at; Start 53; Stop 77
ttatactagaaaatcagaaccataa

SEQ ID NO: 84381 - DNA, 25 bp, Artificial
  probe
  misc_feature (1)..(25): SEQ ID NO: 6634; WAN024BL6_at; Start 58; Stop 82
ctagaaaatcagaaccataatacct

SEQ ID NO: 84382 - DNA, 25 bp, Artificial
  probe
  misc_feature (1)..(25): SEQ ID NO: 6634; WAN024BL6_at; Start 44; Stop 68
tgaatttttttatactagaaaatca

SEQ ID NO: 84383 - DNA, 25 bp, Artificial
  probe
  misc_feature (1)..(25): SEQ ID NO: 6634; WAN024BL6_at; Start 23; Stop 47
tttctaagaagaattctagtttgaa

SEQ ID NO: 84384 - DNA, 25 bp, Artificial
  probe
  misc_feature (1)..(25): SEQ ID NO: 6634; WAN024BL6_at; Start 50; Stop 74
tttttatactagaaaatcagaacca

SEQ ID NO: 84385 - DNA, 25 bp, Artificial
  probe
  misc_feature (1)..(25): SEQ ID NO: 6634; WAN024BL6_at; Start 21; Stop 45
cttttctaagaagaattctagtttg

SEQ ID NO: 84386 - DNA, 25 bp, Artificial
  probe
  misc_feature (1)..(25): SEQ ID NO: 6634; WAN024BL6_at; Start 69; Stop 93
gaaccataatacctatataaaaata

SEQ ID NO: 84387 - DNA, 25 bp, Artificial
  probe
  misc_feature (1)..(25): SEQ ID NO: 6634; WAN024BL6_at; Start 52; Stop 76
tttatactagaaaatcagaaccata

SEQ ID NO: 84388 - DNA, 25 bp, Artificial
  probe
  misc_feature (1)..(25): SEQ ID NO: 6634; WAN024BL6_at; Start 62; Stop 86
aaaatcagaaccataatacctatat

SEQ ID NO: 84389 - DNA, 25 bp, Artificial
  probe
  misc_feature (1)..(25): SEQ ID NO: 6634; WAN024BL6_at; Start 67; Stop 91
cagaaccataatacctatataaaaa

SEQ ID NO: 84390 - DNA, 25 bp, Artificial
  probe
  misc_feature (1)..(25): SEQ ID NO: 6634; WAN024BL6_at; Start 26; Stop 50
ctaagaagaattctagtttgaattt

SEQ ID NO: 84391 - DNA, 25 bp, Artificial
  probe
  misc_feature (1)..(25): SEQ ID NO: 6634; WAN024BL6_at; Start 2; Stop 26
tgatagcacttaaaacggccttttc

SEQ ID NO: 84392 - DNA, 25 bp, Artificial
  probe
  misc_feature (1)..(25): SEQ ID NO: 6634; WAN024BL6_at; Start 51; Stop 75
ttttatactagaaaatcagaaccat

SEQ ID NO: 84393 - DNA, 25 bp, Artificial
  probe
  misc_feature (1)..(25): SEQ ID NO: 6634; WAN024BL6_at; Start 17; Stop 41
cggccttttctaagaagaattctag

SEQ ID NO: 84394 - DNA, 25 bp, Artificial
  probe
  misc_feature (1)..(25): SEQ ID NO: 6634; WAN024BL6_at; Start 22; Stop 46
ttttctaagaagaattctagtttga

SEQ ID NO: 84395 - DNA, 25 bp, Artificial
  probe
  misc_feature (1)..(25): SEQ ID NO: 6634; WAN024BL6_at; Start 1; Stop 25
atgatagcacttaaaacggcctttt

SEQ ID NO: 84396 - DNA, 25 bp, Artificial
  probe
  misc_feature (1)..(25): SEQ ID NO: 6634; WAN024BL6_at; Start 68; Stop 92
agaaccataatacctatataaaaat

SEQ ID NO: 84397 - DNA, 25 bp, Artificial
  probe
  misc_feature (1)..(25): SEQ ID NO: 6634; WAN024BL6_at; Start 54; Stop 78
tatactagaaaatcagaaccataat

SEQ ID NO: 84398 - DNA, 25 bp, Artificial
  probe
  misc_feature (1)..(25): SEQ ID NO: 6634; WAN024BL6_at; Start 70; Stop 94
aaccataatacctatataaaaatat

SEQ ID NO: 84399 - DNA, 25 bp, Artificial
  probe
  misc_feature (1)..(25): SEQ ID NO: 6634; WAN024BL6_at; Start 72; Stop 96
ccataatacctatataaaaatatta

SEQ ID NO: 84400 - DNA, 25 bp, Artificial
  probe
  misc_feature (1)..(25): SEQ ID NO: 6634; WAN024BL6_at; Start 56; Stop 80
tactagaaaatcagaaccataatac

SEQ ID NO: 84401 - DNA, 25 bp, Artificial
  probe
  misc_feature (1)..(25): SEQ ID NO: 6634; WAN024BL6_at; Start 55; Stop 79
atactagaaaatcagaaccataata

SEQ ID NO: 84402 - DNA, 25 bp, Artificial
  probe
  misc_feature (1)..(25): SEQ ID NO: 6634; WAN024BL6_at; Start 61; Stop 85
gaaaatcagaaccataatacctata

SEQ ID NO: 84403 - DNA, 25 bp, Artificial
  probe
  misc_feature (1)..(25): SEQ ID NO: 6634; WAN024BL6_at; Start 63; Stop 87
aaatcagaaccataatacctatata

SEQ ID NO: 84404 - DNA, 25 bp, Artificial
  probe
  misc_feature (1)..(25): SEQ ID NO: 6634; WAN024BL6_at; Start 66; Stop 90
tcagaaccataatacctatataaaa

SEQ ID NO: 84405 - DNA, 25 bp, Artificial
  probe
  misc_feature (1)..(25): SEQ ID NO: 6634; WAN024BL6_at; Start 71; Stop 95
accataatacctatataaaaatatt

SEQ ID NO: 84406 - DNA, 25 bp, Artificial
  probe
  misc_feature (1)..(25): SEQ ID NO: 6634; WAN024BL6_at; Start 59; Stop 83
tagaaaatcagaaccataataccta

SEQ ID NO: 84407 - DNA, 25 bp, Artificial
  probe
  misc_feature (1)..(25): SEQ ID NO: 6634; WAN024BL6_at; Start 25; Stop 49
tctaagaagaattctagtttgaatt

SEQ ID NO: 84408 - DNA, 25 bp, Artificial
  probe
  misc_feature (1)..(25): SEQ ID NO: 6634; WAN024BL6_at; Start 57; Stop 81
actagaaaatcagaaccataatacc

SEQ ID NO: 84409 - DNA, 25 bp, Artificial
  probe
  misc_feature (1)..(25): SEQ ID NO: 6634; WAN024BL6_at; Start 65; Stop 89
atcagaaccataatacctatataaa

SEQ ID NO: 84410 - DNA, 25 bp, Artificial
  probe
  misc_feature (1)..(25): SEQ ID NO: 6418; WAN024BL7_at; Start 628; Stop 652
gactcaaagaccacactagagattt

SEQ ID NO: 84411 - DNA, 25 bp, Artificial
  probe
  misc_feature (1)..(25): SEQ ID NO: 6418; WAN024BL7_at; Start 322; Stop 346
gagagaactacaccaaagacaatca

SEQ ID NO: 84412 - DNA, 25 bp, Artificial
  probe
  misc_feature (1)..(25): SEQ ID NO: 6418; WAN024BL7_at; Start 60; Stop 84
gcctagaaaagtaattacatccgac

SEQ ID NO: 84413 - DNA, 25 bp, Artificial
  probe
  misc_feature (1)..(25): SEQ ID NO: 6418; WAN024BL7_at; Start 274; Stop 298
tctaaaaagactattcacatcaagc

SEQ ID NO: 84414 - DNA, 25 bp, Artificial
  probe
  misc_feature (1)..(25): SEQ ID NO: 6418; WAN024BL7_at; Start 669; Stop 693
aaaaatggtatcagacatatctagc

SEQ ID NO: 84415 - DNA, 25 bp, Artificial
  probe
  misc_feature (1)..(25): SEQ ID NO: 6418; WAN024BL7_at; Start 137; Stop 161
tcatccaaaatttaaaagacgaggc

SEQ ID NO: 84416 - DNA, 25 bp, Artificial
  probe
  misc_feature (1)..(25): SEQ ID NO: 6418; WAN024BL7_at; Start 75; Stop 99
tacatccgacgaactcagaaagaaa

SEQ ID NO: 84417 - DNA, 25 bp, Artificial
  probe
  misc_feature (1)..(25): SEQ ID NO: 6418; WAN024BL7_at; Start 602; Stop 626
ccatcatggacagagtagggcatag

SEQ ID NO: 84418 - DNA, 25 bp, Artificial
  probe
  misc_feature (1)..(25): SEQ ID NO: 6418; WAN024BL7_at; Start 154; Stop 178
gacgaggccctatgtgattatcgaa

SEQ ID NO: 84419 - DNA, 25 bp, Artificial
  probe
  misc_feature (1)..(25): SEQ ID NO: 6418; WAN024BL7_at; Start 392; Stop 416
tcaaagagcaaataatagagaatgc

SEQ ID NO: 84420 - DNA, 25 bp, Artificial
  probe
  misc_feature (1)..(25): SEQ ID NO: 6418; WAN024BL7_at; Start 652; Stop 676
tattctcacgttactcaaaaaatgg

SEQ ID NO: 84421 - DNA, 25 bp, Artificial
  probe
  misc_feature (1)..(25): SEQ ID NO: 6418; WAN024BL7_at; Start 617; Stop 641
tagggcatagtgactcaaagaccac

SEQ ID NO: 84422 - DNA, 25 bp, Artificial
  probe
  misc_feature (1)..(25): SEQ ID NO: 6418; WAN024BL7_at; Start 214; Stop 238
cttactggcatgaggtatggagagc

SEQ ID NO: 84423 - DNA, 25 bp, Artificial
  probe
  misc_feature (1)..(25): SEQ ID NO: 6418; WAN024BL7_at; Start 446; Stop 470
tcatcaatactctaggagaaccaat

SEQ ID NO: 84424 - DNA, 25 bp, Artificial
  probe
  misc_feature (1)..(25): SEQ ID NO: 6418; WAN024BL7_at; Start 540; Stop 564
tacacatacatttagacattctcac

SEQ ID NO: 84425 - DNA, 25 bp, Artificial
  probe
  misc_feature (1)..(25): SEQ ID NO: 6418; WAN024BL7_at; Start 488; Stop 512
tttgtgcattgaaaagacatggtca

SEQ ID NO: 84426 - DNA, 25 bp, Artificial
  probe
  misc_feature (1)..(25): SEQ ID NO: 6418; WAN024BL7_at; Start 40; Stop 64
gaaatgctatttgttgaaacgccta

SEQ ID NO: 84427 - DNA, 25 bp, Artificial
  probe
  misc_feature (1)..(25): SEQ ID NO: 6418; WAN024BL7_at; Start 335; Stop 359
caaagacaatcaagtccgatagggt

SEQ ID NO: 84428 - DNA, 25 bp, Artificial
  probe
  misc_feature (1)..(25): SEQ ID NO: 6418; WAN024BL7_at; Start 182; Stop 206
caaagtatatccgaatagctaaagt

SEQ ID NO: 84429 - DNA, 25 bp, Artificial
  probe
  misc_feature (1)..(25): SEQ ID NO: 6418; WAN024BL7_at; Start 580; Stop 604
gagctgggcattcccttgactgcca

SEQ ID NO: 84430 - DNA, 25 bp, Artificial
  probe
  misc_feature (1)..(25): SEQ ID NO: 6418; WAN024BL7_at; Start 293; Stop 317
tcaagcatacatacgatttcagaca

SEQ ID NO: 84431 - DNA, 25 bp, Artificial
  probe
  misc_feature (1)..(25): SEQ ID NO: 6418; WAN024BL7_at; Start 478; Stop 502
gccagggttatttgtgcattgaaaa

SEQ ID NO: 84432 - DNA, 25 bp, Artificial
  probe
  misc_feature (1)..(25): SEQ ID NO: 6418; WAN024BL7_at; Start 311; Stop 335
tcagacaaaaagagagaactacacc

SEQ ID NO: 84433 - DNA, 25 bp, Artificial
  probe
  misc_feature (1)..(25): SEQ ID NO: 6418; WAN024BL7_at; Start 344; Stop 368
tcaagtccgatagggttataacagc

SEQ ID NO: 84434 - DNA, 25 bp, Artificial
  probe
  misc_feature (1)..(25): SEQ ID NO: 6418; WAN024BL7_at; Start 682; Stop 706
gacatatctagcaagttagacaaga

SEQ ID NO: 84435 - DNA, 25 bp, Artificial
  probe
  misc_feature (1)..(25): SEQ ID NO: 6418; WAN024BL7_at; Start 572; Stop 596
tacttgctgagctgggcattccctt

SEQ ID NO: 84436 - DNA, 25 bp, Artificial
  probe
  misc_feature (1)..(25): SEQ ID NO: 6418; WAN024BL7_at; Start 460; Stop 484
ggagaaccaataacaaatgccaggg

SEQ ID NO: 84437 - DNA, 25 bp, Artificial
  probe
  misc_feature (1)..(25): SEQ ID NO: 6418; WAN024BL7_at; Start 407; Stop 431
tagagaatgcgacaaatggatttga

SEQ ID NO: 84438 - DNA, 25 bp, Artificial
  probe
  misc_feature (1)..(25): SEQ ID NO: 6418; WAN024BL7_at; Start 503; Stop 527
gacatggtcaaaaaatcggcataga

SEQ ID NO: 84439 - DNA, 25 bp, Artificial
  probe
  misc_feature (1)..(25): SEQ ID NO: 6418; WAN024BL7_at; Start 357; Stop 381
ggttataacagcacctcaaaaagtg

SEQ ID NO: 84440 - DNA, 25 bp, Artificial
  probe
  misc_feature (1)..(25): SEQ ID NO: 6418; WAN024BL7_at; Start 562; Stop 586
cacatatccctacttgctgagctgg

SEQ ID NO: 84441 - DNA, 25 bp, Artificial
  probe
  misc_feature (1)..(25): SEQ ID NO: 6418; WAN024BL7_at; Start 240; Stop 264
ggcagccttaaactacaaggaagat

SEQ ID NO: 84442 - DNA, 25 bp, Artificial
  probe
  misc_feature (1)..(25): SEQ ID NO: 6418; WAN024BL7_at; Start 199; Stop 223
gctaaagttctttttcttactggca

SEQ ID NO: 84443 - DNA, 25 bp, Artificial
  probe
  misc_feature (1)..(25): SEQ ID NO: 6418; WAN024BL7_at; Start 227; Stop 251
ggtatggagagctggcagccttaaa

SEQ ID NO: 84444 - DNA, 25 bp, Artificial
  probe
  misc_feature (1)..(25): SEQ ID NO: 6991; WAN024BL8_at; Start 288; Stop 312
gattttaaagcagatagagggcgac

SEQ ID NO: 84445 - DNA, 25 bp, Artificial
  probe
  misc_feature (1)..(25): SEQ ID NO: 6991; WAN024BL8_at; Start 45; Stop 69
gagatacaaagatccatatactgag

SEQ ID NO: 84446 - DNA, 25 bp, Artificial
  probe
  misc_feature (1)..(25): SEQ ID NO: 6991; WAN024BL8_at; Start 127; Stop 151
gctgcgattttacttcaggaaaaga

SEQ ID NO: 84447 - DNA, 25 bp, Artificial
  probe
  misc_feature (1)..(25): SEQ ID NO: 6991; WAN024BL8_at; Start 161; Stop 185
agttaggagaaaaacaacattctgt

SEQ ID NO: 84448 - DNA, 25 bp, Artificial
  probe
  misc_feature (1)..(25): SEQ ID NO: 6991; WAN024BL8_at; Start 220; Stop 244
tttgaggagaattggaaacacggcg

SEQ ID NO: 84449 - DNA, 25 bp, Artificial
  probe
  misc_feature (1)..(25): SEQ ID NO: 6991; WAN024BL8_at; Start 2; Stop 26
tgtggatggaagaattgccaaacgg

SEQ ID NO: 84450 - DNA, 25 bp, Artificial
  probe
  misc_feature (1)..(25): SEQ ID NO: 6991; WAN024BL8_at; Start 294; Stop 318
aaagcagatagagggcgactaccta

SEQ ID NO: 84451 - DNA, 25 bp, Artificial
  probe
  misc_feature (1)..(25): SEQ ID NO: 6991; WAN024BL8_at; Start 260; Stop 284
tctacgcttcaaagaatgtaaaaaa

SEQ ID NO: 84452 - DNA, 25 bp, Artificial
  probe
  misc_feature (1)..(25): SEQ ID NO: 6991; WAN024BL8_at; Start 174; Stop 198
acaacattctgtttctaatataact

SEQ ID NO: 84453 - DNA, 25 bp, Artificial
  probe
  misc_feature (1)..(25): SEQ ID NO: 6991; WAN024BL8_at; Start 254; Stop 278
caaccgtctacgcttcaaagaatgt

SEQ ID NO: 84454 - DNA, 25 bp, Artificial
  probe
  misc_feature (1)..(25): SEQ ID NO: 6991; WAN024BL8_at; Start 223; Stop 247
gaggagaattggaaacacggcgtaa

SEQ ID NO: 84455 - DNA, 25 bp, Artificial
  probe
  misc_feature (1)..(25): SEQ ID NO: 6991; WAN024BL8_at; Start 121; Stop 145
aatcaagctgcgattttacttcagg

SEQ ID NO: 84456 - DNA, 25 bp, Artificial
  probe
  misc_feature (1)..(25): SEQ ID NO: 6991; WAN024BL8_at; Start 292; Stop 316
ttaaagcagatagagggcgactacc

SEQ ID NO: 84457 - DNA, 25 bp, Artificial
  probe
  misc_feature (1)..(25): SEQ ID NO: 6991; WAN024BL8_at; Start 307; Stop 331
ggcgactacctagttagaaatttga

SEQ ID NO: 84458 - DNA, 25 bp, Artificial
  probe
  misc_feature (1)..(25): SEQ ID NO: 6991; WAN024BL8_at; Start 313; Stop 337
tacctagttagaaatttgatagacg

SEQ ID NO: 84459 - DNA, 25 bp, Artificial
  probe
  misc_feature (1)..(25): SEQ ID NO: 6991; WAN024BL8_at; Start 194; Stop 218
taacttttgaaaaactatatgaaga

SEQ ID NO: 84460 - DNA, 25 bp, Artificial
  probe
  misc_feature (1)..(25): SEQ ID NO: 6991; WAN024BL8_at; Start 81; Stop 105
agtctcagtaacgatggagaaaaaa

SEQ ID NO: 84461 - DNA, 25 bp, Artificial
  probe
  misc_feature (1)..(25): SEQ ID NO: 6991; WAN024BL8_at; Start 6; Stop 30
gatggaagaattgccaaacggcaaa

SEQ ID NO: 84462 - DNA, 25 bp, Artificial
  probe
  misc_feature (1)..(25): SEQ ID NO: 6991; WAN024BL8_at; Start 249; Stop 273
aaactcaaccgtctacgcttcaaag

SEQ ID NO: 84463 - DNA, 25 bp, Artificial
  probe
  misc_feature (1)..(25): SEQ ID NO: 6991; WAN024BL8_at; Start 298; Stop 322
cagatagagggcgactacctagtta

SEQ ID NO: 84464 - DNA, 25 bp, Artificial
  probe
  misc_feature (1)..(25): SEQ ID NO: 6991; WAN024BL8_at; Start 300; Stop 324
gatagagggcgactacctagttaga

SEQ ID NO: 84465 - DNA, 25 bp, Artificial
  probe
  misc_feature (1)..(25): SEQ ID NO: 6991; WAN024BL8_at; Start 23; Stop 47
acggcaaatataaattttttgagag

SEQ ID NO: 84466 - DNA, 25 bp, Artificial
  probe
  misc_feature (1)..(25): SEQ ID NO: 6991; WAN024BL8_at; Start 124; Stop 148
caagctgcgattttacttcaggaaa

SEQ ID NO: 84467 - DNA, 25 bp, Artificial
  probe
  misc_feature (1)..(25): SEQ ID NO: 6991; WAN024BL8_at; Start 93; Stop 117
gatggagaaaaaaactccccaagca

SEQ ID NO: 84468 - DNA, 25 bp, Artificial
  probe
  misc_feature (1)..(25): SEQ ID NO: 6991; WAN024BL8_at; Start 323; Stop 347
gaaatttgatagacgtttattacaa

SEQ ID NO: 84469 - DNA, 25 bp, Artificial
  probe
  misc_feature (1)..(25): SEQ ID NO: 6991; WAN024BL8_at; Start 10; Stop 34
gaagaattgccaaacggcaaatata

SEQ ID NO: 84470 - DNA, 25 bp, Artificial
  probe
  misc_feature (1)..(25): SEQ ID NO: 6991; WAN024BL8_at; Start 206; Stop 230
aactatatgaagaatttgaggagaa

SEQ ID NO: 84471 - DNA, 25 bp, Artificial
  probe
  misc_feature (1)..(25): SEQ ID NO: 6991; WAN024BL8_at; Start 164; Stop 188
taggagaaaaacaacattctgtttc

SEQ ID NO: 84472 - DNA, 25 bp, Artificial
  probe
  misc_feature (1)..(25): SEQ ID NO: 6991; WAN024BL8_at; Start 130; Stop 154
gcgattttacttcaggaaaagataa

SEQ ID NO: 84473 - DNA, 25 bp, Artificial
  probe
  misc_feature (1)..(25): SEQ ID NO: 6991; WAN024BL8_at; Start 302; Stop 326
tagagggcgactacctagttagaaa

SEQ ID NO: 84474 - DNA, 25 bp, Artificial
  probe
  misc_feature (1)..(25): SEQ ID NO: 6991; WAN024BL8_at; Start 78; Stop 102
aaaagtctcagtaacgatggagaaa

SEQ ID NO: 84475 - DNA, 25 bp, Artificial
  probe
  misc_feature (1)..(25): SEQ ID NO: 6991; WAN024BL8_at; Start 257; Stop 281
ccgtctacgcttcaaagaatgtaaa

SEQ ID NO: 84476 - DNA, 25 bp, Artificial
  probe
  misc_feature (1)..(25): SEQ ID NO: 6991; WAN024BL8_at; Start 37; Stop 61
ttttttgagagatacaaagatccat

SEQ ID NO: 84477 - DNA, 25 bp, Artificial
  probe
  misc_feature (1)..(25): SEQ ID NO: 6991; WAN024BL8_at; Start 4; Stop 28
tggatggaagaattgccaaacggca

SEQ ID NO: 84478 - DNA, 25 bp, Artificial
  probe
  misc_feature (1)..(25): SEQ ID NO: 6788; WAN024BL9_at; Start 714; Stop 738
tacaagcgttgaaaccaaagtaaca

SEQ ID NO: 84479 - DNA, 25 bp, Artificial
  probe
  misc_feature (1)..(25): SEQ ID NO: 6788; WAN024BL9_at; Start 1018; Stop 1042
gaagtcgcaaattatgccaatgaaa

SEQ ID NO: 84480 - DNA, 25 bp, Artificial
  probe
  misc_feature (1)..(25): SEQ ID NO: 6788; WAN024BL9_at; Start 513; Stop 537
gaaatacctcaacaatcttaaagcg

SEQ ID NO: 84481 - DNA, 25 bp, Artificial
  probe
  misc_feature (1)..(25): SEQ ID NO: 6788; WAN024BL9_at; Start 371; Stop 395
tagatgagccaaataaaatggacac

SEQ ID NO: 84482 - DNA, 25 bp, Artificial
  probe
  misc_feature (1)..(25): SEQ ID NO: 6788; WAN024BL9_at; Start 873; Stop 897
tgtattttacagagataaccgtagc

SEQ ID NO: 84483 - DNA, 25 bp, Artificial
  probe
  misc_feature (1)..(25): SEQ ID NO: 6788; WAN024BL9_at; Start 499; Stop 523
tcagcttctgaattgaaatacctca

SEQ ID NO: 84484 - DNA, 25 bp, Artificial
  probe
  misc_feature (1)..(25): SEQ ID NO: 6788; WAN024BL9_at; Start 75; Stop 99
gaatgaagaacaaacaaagaatgcc

SEQ ID NO: 84485 - DNA, 25 bp, Artificial
  probe
  misc_feature (1)..(25): SEQ ID NO: 6788; WAN024BL9_at; Start 261; Stop 285
tacagaaaaccttactaagcacgac

SEQ ID NO: 84486 - DNA, 25 bp, Artificial
  probe
  misc_feature (1)..(25): SEQ ID NO: 6788; WAN024BL9_at; Start 59; Stop 83
tcagccaaagcattacgaatgaaga

SEQ ID NO: 84487 - DNA, 25 bp, Artificial
  probe
  misc_feature (1)..(25): SEQ ID NO: 6788; WAN024BL9_at; Start 987; Stop 1011
taaaggcatcttcccggtgtctacc

SEQ ID NO: 84488 - DNA, 25 bp, Artificial
  probe
  misc_feature (1)..(25): SEQ ID NO: 6788; WAN024BL9_at; Start 141; Stop 165
caatccacttgaatttgtcccggaa

SEQ ID NO: 84489 - DNA, 25 bp, Artificial
  probe
  misc_feature (1)..(25): SEQ ID NO: 6788; WAN024BL9_at; Start 160; Stop 184
ccggaatttactgccgacgtgggca

SEQ ID NO: 84490 - DNA, 25 bp, Artificial
  probe
  misc_feature (1)..(25): SEQ ID NO: 6788; WAN024BL9_at; Start 698; Stop 722
taagtgctgcacttaatacaagcgt

SEQ ID NO: 84491 - DNA, 25 bp, Artificial
  probe
  misc_feature (1)..(25): SEQ ID NO: 6788; WAN024BL9_at; Start 320; Stop 344
caaaattcggtatcttgacaaatgg

SEQ ID NO: 84492 - DNA, 25 bp, Artificial
  probe
  misc_feature (1)..(25): SEQ ID NO: 6788; WAN024BL9_at; Start 587; Stop 611
taacttctgaaatctatgaagggcg

SEQ ID NO: 84493 - DNA, 25 bp, Artificial
  probe
  misc_feature (1)..(25): SEQ ID NO: 6788; WAN024BL9_at; Start 757; Stop 781
gaagctgaagctgaagagattgtcg

SEQ ID NO: 84494 - DNA, 25 bp, Artificial
  probe
  misc_feature (1)..(25): SEQ ID NO: 6788; WAN024BL9_at; Start 848; Stop 872
ctagggatgtagtttctccagaacg

SEQ ID NO: 84495 - DNA, 25 bp, Artificial
  probe
  misc_feature (1)..(25): SEQ ID NO: 6788; WAN024BL9_at; Start 30; Stop 54
aaaacaagtcggcaaacgtgtagca

SEQ ID NO: 84496 - DNA, 25 bp, Artificial
  probe
  misc_feature (1)..(25): SEQ ID NO: 6788; WAN024BL9_at; Start 44; Stop 68
aacgtgtagcagacctcagccaaag

SEQ ID NO: 84497 - DNA, 25 bp, Artificial
  probe
  misc_feature (1)..(25): SEQ ID NO: 6788; WAN024BL9_at; Start 740; Stop 764
ccgatattccaaaagttgaagctga

SEQ ID NO: 84498 - DNA, 25 bp, Artificial
  probe
  misc_feature (1)..(25): SEQ ID NO: 6788; WAN024BL9_at; Start 1004; Stop 1028
tgtctacccctctcgaagtcgcaaa

SEQ ID NO: 84499 - DNA, 25 bp, Artificial
  probe
  misc_feature (1)..(25): SEQ ID NO: 6788; WAN024BL9_at; Start 661; Stop 685
tttaatcaattcatcacagagcgag

SEQ ID NO: 84500 - DNA, 25 bp, Artificial
  probe
  misc_feature (1)..(25): SEQ ID NO: 6788; WAN024BL9_at; Start 117; Stop 141
ccaagcgcttggatatgatatcttc

SEQ ID NO: 84501 - DNA, 25 bp, Artificial
  probe
  misc_feature (1)..(25): SEQ ID NO: 6788; WAN024BL9_at; Start 790; Stop 814
gacgaaattatcacaactcctgctg

SEQ ID NO: 84502 - DNA, 25 bp, Artificial
  probe
  misc_feature (1)..(25): SEQ ID NO: 6788; WAN024BL9_at; Start 225; Stop 249
tggcgagcctcaaatcctaattgaa

SEQ ID NO: 84503 - DNA, 25 bp, Artificial
  probe
  misc_feature (1)..(25): SEQ ID NO: 6788; WAN024BL9_at; Start 193; Stop 217
ggcgaaaaagtcgactatgcgatca

SEQ ID NO: 84504 - DNA, 25 bp, Artificial
  probe
  misc_feature (1)..(25): SEQ ID NO: 6788; WAN024BL9_at; Start 401; Stop 425
cattcttaacaatcgatgtgactga

SEQ ID NO: 84505 - DNA, 25 bp, Artificial
  probe
  misc_feature (1)..(25): SEQ ID NO: 6788; WAN024BL9_at; Start 101; Stop 125
tcattatgccgttcttccaagcgct

SEQ ID NO: 84506 - DNA, 25 bp, Artificial
  probe
  misc_feature (1)..(25): SEQ ID NO: 6788; WAN024BL9_at; Start 829; Stop 853
actgttgttaaaatgcttgctaggg

SEQ ID NO: 84507 - DNA, 25 bp, Artificial
  probe
  misc_feature (1)..(25): SEQ ID NO: 6788; WAN024BL9_at; Start 558; Stop 582
tacaccgtcagatagcttcctcaga

SEQ ID NO: 84508 - DNA, 25 bp, Artificial
  probe
  misc_feature (1)..(25): SEQ ID NO: 6788; WAN024BL9_at; Start 276; Stop 300
taagcacgactctcaactattcaga

SEQ ID NO: 84509 - DNA, 25 bp, Artificial
  probe
  misc_feature (1)..(25): SEQ ID NO: 6788; WAN024BL9_at; Start 972; Stop 996
tatcgaaatccgtgataaaggcatc

SEQ ID NO: 84510 - DNA, 25 bp, Artificial
  probe
  misc_feature (1)..(25): SEQ ID NO: 6788; WAN024BL9_at; Start 212; Stop 236
cgatcattttggatggcgagcctca

SEQ ID NO: 84511 - DNA, 25 bp, Artificial
  probe
  misc_feature (1)..(25): SEQ ID NO: 6788; WAN024BL9_at; Start 604; Stop 628
gaagggcgtgttactcaaaatatct

SEQ ID NO: 84512 - DNA, 25 bp, Artificial
  probe
  misc_feature (1)..(25): SEQ ID NO: 6949; WAN024BLA_at; Start 170; Stop 194
gagtagagaattaccgcatcatctg

SEQ ID NO: 84513 - DNA, 25 bp, Artificial
  probe
  misc_feature (1)..(25): SEQ ID NO: 6949; WAN024BLA_at; Start 108; Stop 132
gaccaatccacgacaacacggaaaa

SEQ ID NO: 84514 - DNA, 25 bp, Artificial
  probe
  misc_feature (1)..(25): SEQ ID NO: 6949; WAN024BLA_at; Start 181; Stop 205
taccgcatcatctgtgatatccaag

SEQ ID NO: 84515 - DNA, 25 bp, Artificial
  probe
  misc_feature (1)..(25): SEQ ID NO: 6949; WAN024BLA_at; Start 147; Stop 171
ccttgcaggttactggcgatacaga

SEQ ID NO: 84516 - DNA, 25 bp, Artificial
  probe
  misc_feature (1)..(25): SEQ ID NO: 6949; WAN024BLA_at; Start 77; Stop 101
tatcctggcttgctaaaaacattga

SEQ ID NO: 84517 - DNA, 25 bp, Artificial
  probe
  misc_feature (1)..(25): SEQ ID NO: 6949; WAN024BLA_at; Start 137; Stop 161
taaaagccaaccttgcaggttactg

SEQ ID NO: 84518 - DNA, 25 bp, Artificial
  probe
  misc_feature (1)..(25): SEQ ID NO: 6949; WAN024BLA_at; Start 133; Stop 157
gcactaaaagccaaccttgcaggtt

SEQ ID NO: 84519 - DNA, 25 bp, Artificial
  probe
  misc_feature (1)..(25): SEQ ID NO: 6949; WAN024BLA_at; Start 214; Stop 238
ctagtcgtcctagccgtggaaatcg

SEQ ID NO: 84520 - DNA, 25 bp, Artificial
  probe
  misc_feature (1)..(25): SEQ ID NO: 6949; WAN024BLA_at; Start 144; Stop 168
caaccttgcaggttactggcgatac

SEQ ID NO: 84521 - DNA, 25 bp, Artificial
  probe
  misc_feature (1)..(25): SEQ ID NO: 6949; WAN024BLA_at; Start 160; Stop 184
tggcgatacagagtagagaattacc

SEQ ID NO: 84522 - DNA, 25 bp, Artificial
  probe
  misc_feature (1)..(25): SEQ ID NO: 6949; WAN024BLA_at; Start 59; Stop 83
caaccagaaaacaaatcctatcctg

SEQ ID NO: 84523 - DNA, 25 bp, Artificial
  probe
  misc_feature (1)..(25): SEQ ID NO: 6949; WAN024BLA_at; Start 175; Stop 199
gagaattaccgcatcatctgtgata

SEQ ID NO: 84524 - DNA, 25 bp, Artificial
  probe
  misc_feature (1)..(25): SEQ ID NO: 6949; WAN024BLA_at; Start 208; Stop 232
gataaactagtcgtcctagccgtgg

SEQ ID NO: 84525 - DNA, 25 bp, Artificial
  probe
  misc_feature (1)..(25): SEQ ID NO: 6949; WAN024BLA_at; Start 6; Stop 30
tcggctagatattgataaaaaagct

SEQ ID NO: 84526 - DNA, 25 bp, Artificial
  probe
  misc_feature (1)..(25): SEQ ID NO: 6949; WAN024BLA_at; Start 234; Stop 258
aatcgcccaccgcagagatgtctat

SEQ ID NO: 84527 - DNA, 25 bp, Artificial
  probe
  misc_feature (1)..(25): SEQ ID NO: 6949; WAN024BLA_at; Start 185; Stop 209
gcatcatctgtgatatccaagacga

SEQ ID NO: 84528 - DNA, 25 bp, Artificial
  probe
  misc_feature (1)..(25): SEQ ID NO: 6949; WAN024BLA_at; Start 70; Stop 94
caaatcctatcctggcttgctaaaa

SEQ ID NO: 84529 - DNA, 25 bp, Artificial
  probe
  misc_feature (1)..(25): SEQ ID NO: 6949; WAN024BLA_at; Start 210; Stop 234
taaactagtcgtcctagccgtggaa

SEQ ID NO: 84530 - DNA, 25 bp, Artificial
  probe
  misc_feature (1)..(25): SEQ ID NO: 6949; WAN024BLA_at; Start 237; Stop 261
cgcccaccgcagagatgtctataaa

SEQ ID NO: 84531 - DNA, 25 bp, Artificial
  probe
  misc_feature (1)..(25): SEQ ID NO: 6949; WAN024BLA_at; Start 13; Stop 37
gatattgataaaaaagctctcaagc

SEQ ID NO: 84532 - DNA, 25 bp, Artificial
  probe
  misc_feature (1)..(25): SEQ ID NO: 6949; WAN024BLA_at; Start 163; Stop 187
cgatacagagtagagaattaccgca

SEQ ID NO: 84533 - DNA, 25 bp, Artificial
  probe
  misc_feature (1)..(25): SEQ ID NO: 6949; WAN024BLA_at; Start 87; Stop 111
tgctaaaaacattgaaaacacgacc

SEQ ID NO: 84534 - DNA, 25 bp, Artificial
  probe
  misc_feature (1)..(25): SEQ ID NO: 6949; WAN024BLA_at; Start 18; Stop 42
tgataaaaaagctctcaagcaactt

SEQ ID NO: 84535 - DNA, 25 bp, Artificial
  probe
  misc_feature (1)..(25): SEQ ID NO: 6949; WAN024BLA_at; Start 98; Stop 122
ttgaaaacacgaccaatccacgaca

SEQ ID NO: 84536 - DNA, 25 bp, Artificial
  probe
  misc_feature (1)..(25): SEQ ID NO: 6949; WAN024BLA_at; Start 229; Stop 253
gtggaaatcgcccaccgcagagatg

SEQ ID NO: 84537 - DNA, 25 bp, Artificial
  probe
  misc_feature (1)..(25): SEQ ID NO: 6949; WAN024BLA_at; Start 32; Stop 56
tcaagcaacttaaaaaactagatac

SEQ ID NO: 84538 - DNA, 25 bp, Artificial
  probe
  misc_feature (1)..(25): SEQ ID NO: 6949; WAN024BLA_at; Start 196; Stop 220
gatatccaagacgataaactagtcg

SEQ ID NO: 84539 - DNA, 25 bp, Artificial
  probe
  misc_feature (1)..(25): SEQ ID NO: 6949; WAN024BLA_at; Start 152; Stop 176
caggttactggcgatacagagtaga

SEQ ID NO: 84540 - DNA, 25 bp, Artificial
  probe
  misc_feature (1)..(25): SEQ ID NO: 6949; WAN024BLA_at; Start 28; Stop 52
gctctcaagcaacttaaaaaactag

SEQ ID NO: 84541 - DNA, 25 bp, Artificial
  probe
  misc_feature (1)..(25): SEQ ID NO: 6949; WAN024BLA_at; Start 128; Stop 152
gaaaagcactaaaagccaaccttgc

SEQ ID NO: 84542 - DNA, 25 bp, Artificial
  probe
  misc_feature (1)..(25): SEQ ID NO: 6949; WAN024BLA_at; Start 118; Stop 142
cgacaacacggaaaagcactaaaag

SEQ ID NO: 84543 - DNA, 25 bp, Artificial
  probe
  misc_feature (1)..(25): SEQ ID NO: 6949; WAN024BLA_at; Start 218; Stop 242
tcgtcctagccgtggaaatcgccca

SEQ ID NO: 84544 - DNA, 25 bp, Artificial
  probe
  misc_feature (1)..(25): SEQ ID NO: 6949; WAN024BLA_at; Start 114; Stop 138
tccacgacaacacggaaaagcacta

SEQ ID NO: 84545 - DNA, 25 bp, Artificial
  probe
  misc_feature (1)..(25): SEQ ID NO: 6949; WAN024BLA_at; Start 65; Stop 89
gaaaacaaatcctatcctggcttgc

SEQ ID NO: 84546 - DNA, 25 bp, Artificial
  probe
  misc_feature (1)..(25): SEQ ID NO: 6554; WAN024BLB_at; Start 116; Stop 140
atatcgaagacgcacgagcagccga

SEQ ID NO: 84547 - DNA, 25 bp, Artificial
  probe
  misc_feature (1)..(25): SEQ ID NO: 6554; WAN024BLB_at; Start 61; Stop 85
cacggtatcgacacaacgaccatgg

SEQ ID NO: 84548 - DNA, 25 bp, Artificial
  probe
  misc_feature (1)..(25): SEQ ID NO: 6554; WAN024BLB_at; Start 2; Stop 26
tgactatcactatcaacttcacaga

SEQ ID NO: 84549 - DNA, 25 bp, Artificial
  probe
  misc_feature (1)..(25): SEQ ID NO: 6554; WAN024BLB_at; Start 150; Stop 174
tatggagtatttagccgacccagct

SEQ ID NO: 84550 - DNA, 25 bp, Artificial
  probe
  misc_feature (1)..(25): SEQ ID NO: 6554; WAN024BLB_at; Start 206; Stop 230
taggactaactcgagaggatattgc

SEQ ID NO: 84551 - DNA, 25 bp, Artificial
  probe
  misc_feature (1)..(25): SEQ ID NO: 6554; WAN024BLB_at; Start 194; Stop 218
tcttggatgaactaggactaactcg

SEQ ID NO: 84552 - DNA, 25 bp, Artificial
  probe
  misc_feature (1)..(25): SEQ ID NO: 6554; WAN024BLB_at; Start 57; Stop 81
caaacacggtatcgacacaacgacc

SEQ ID NO: 84553 - DNA, 25 bp, Artificial
  probe
  misc_feature (1)..(25): SEQ ID NO: 6554; WAN024BLB_at; Start 70; Stop 94
gacacaacgaccatggattttgacg

SEQ ID NO: 84554 - DNA, 25 bp, Artificial
  probe
  misc_feature (1)..(25): SEQ ID NO: 6554; WAN024BLB_at; Start 104; Stop 128
cactcatggaagatatcgaagacgc

SEQ ID NO: 84555 - DNA, 25 bp, Artificial
  probe
  misc_feature (1)..(25): SEQ ID NO: 6554; WAN024BLB_at; Start 136; Stop 160
gccgaccaagcctatatggagtatt

SEQ ID NO: 84556 - DNA, 25 bp, Artificial
  probe
  misc_feature (1)..(25): SEQ ID NO: 6554; WAN024BLB_at; Start 85; Stop 109
gattttgacgacttcatggcactca

SEQ ID NO: 84557 - DNA, 25 bp, Artificial
  probe
  misc_feature (1)..(25): SEQ ID NO: 6554; WAN024BLB_at; Start 49; Stop 73
tacctaaacaaacacggtatcgaca

SEQ ID NO: 84558 - DNA, 25 bp, Artificial
  probe
  misc_feature (1)..(25): SEQ ID NO: 6554; WAN024BLB_at; Start 99; Stop 123
catggcactcatggaagatatcgaa

SEQ ID NO: 84559 - DNA, 25 bp, Artificial
  probe
  misc_feature (1)..(25): SEQ ID NO: 6554; WAN024BLB_at; Start 163; Stop 187
gccgacccagctacttataccatgg

SEQ ID NO: 84560 - DNA, 25 bp, Artificial
  probe
  misc_feature (1)..(25): SEQ ID NO: 6554; WAN024BLB_at; Start 34; Stop 58
tcctacattacggactacctaaaca

SEQ ID NO: 84561 - DNA, 25 bp, Artificial
  probe
  misc_feature (1)..(25): SEQ ID NO: 6554; WAN024BLB_at; Start 133; Stop 157
gcagccgaccaagcctatatggagt

SEQ ID NO: 84562 - DNA, 25 bp, Artificial
  probe
  misc_feature (1)..(25): SEQ ID NO: 6554; WAN024BLB_at; Start 6; Stop 30
tatcactatcaacttcacagaaaaa

SEQ ID NO: 84563 - DNA, 25 bp, Artificial
  probe
  misc_feature (1)..(25): SEQ ID NO: 6554; WAN024BLB_at; Start 199; Stop 223
gatgaactaggactaactcgagagg

SEQ ID NO: 84564 - DNA, 25 bp, Artificial
  probe
  misc_feature (1)..(25): SEQ ID NO: 6554; WAN024BLB_at; Start 174; Stop 198
tacttataccatggatgaggtcttg

SEQ ID NO: 84565 - DNA, 25 bp, Artificial
  probe
  misc_feature (1)..(25): SEQ ID NO: 6554; WAN024BLB_at; Start 64; Stop 88
ggtatcgacacaacgaccatggatt

SEQ ID NO: 84566 - DNA, 25 bp, Artificial
  probe
  misc_feature (1)..(25): SEQ ID NO: 6554; WAN024BLB_at; Start 141; Stop 165
ccaagcctatatggagtatttagcc

SEQ ID NO: 84567 - DNA, 25 bp, Artificial
  probe
  misc_feature (1)..(25): SEQ ID NO: 6554; WAN024BLB_at; Start 202; Stop 226
gaactaggactaactcgagaggata

SEQ ID NO: 84568 - DNA, 25 bp, Artificial
  probe
  misc_feature (1)..(25): SEQ ID NO: 6554; WAN024BLB_at; Start 112; Stop 136
gaagatatcgaagacgcacgagcag

SEQ ID NO: 84569 - DNA, 25 bp, Artificial
  probe
  misc_feature (1)..(25): SEQ ID NO: 6554; WAN024BLB_at; Start 81; Stop 105
catggattttgacgacttcatggca

SEQ ID NO: 84570 - DNA, 25 bp, Artificial
  probe
  misc_feature (1)..(25): SEQ ID NO: 6554; WAN024BLB_at; Start 148; Stop 172
tatatggagtatttagccgacccag

SEQ ID NO: 84571 - DNA, 25 bp, Artificial
  probe
  misc_feature (1)..(25): SEQ ID NO: 6554; WAN024BLB_at; Start 182; Stop 206
ccatggatgaggtcttggatgaact

SEQ ID NO: 84572 - DNA, 25 bp, Artificial
  probe
  misc_feature (1)..(25): SEQ ID NO: 6554; WAN024BLB_at; Start 130; Stop 154
cgagcagccgaccaagcctatatgg

SEQ ID NO: 84573 - DNA, 25 bp, Artificial
  probe
  misc_feature (1)..(25): SEQ ID NO: 6554; WAN024BLB_at; Start 53; Stop 77
taaacaaacacggtatcgacacaac

SEQ ID NO: 84574 - DNA, 25 bp, Artificial
  probe
  misc_feature (1)..(25): SEQ ID NO: 6554; WAN024BLB_at; Start 76; Stop 100
acgaccatggattttgacgacttca

SEQ ID NO: 84575 - DNA, 25 bp, Artificial
  probe
  misc_feature (1)..(25): SEQ ID NO: 6554; WAN024BLB_at; Start 154; Stop 178
gagtatttagccgacccagctactt

SEQ ID NO: 84576 - DNA, 25 bp, Artificial
  probe
  misc_feature (1)..(25): SEQ ID NO: 6554; WAN024BLB_at; Start 187; Stop 211
gatgaggtcttggatgaactaggac

SEQ ID NO: 84577 - DNA, 25 bp, Artificial
  probe
  misc_feature (1)..(25): SEQ ID NO: 6554; WAN024BLB_at; Start 90; Stop 114
tgacgacttcatggcactcatggaa

SEQ ID NO: 84578 - DNA, 25 bp, Artificial
  probe
  misc_feature (1)..(25): SEQ ID NO: 6554; WAN024BLB_at; Start 169; Stop 193
ccagctacttataccatggatgagg

SEQ ID NO: 84579 - DNA, 25 bp, Artificial
  probe
  misc_feature (1)..(25): SEQ ID NO: 6554; WAN024BLB_at; Start 107; Stop 131
tcatggaagatatcgaagacgcacg

SEQ ID NO: 84580 - DNA, 25 bp, Artificial
  probe
  misc_feature (1)..(25): SEQ ID NO: 7457; WAN024BLC_at; Start 22; Stop 46
tgtaaaatgttttttgtaagtgata

SEQ ID NO: 84581 - DNA, 25 bp, Artificial
  probe
  misc_feature (1)..(25): SEQ ID NO: 7457; WAN024BLC_at; Start 2; Stop 26
tgactaattatcccaaaaggtgtaa

SEQ ID NO: 84582 - DNA, 25 bp, Artificial
  probe
  misc_feature (1)..(25): SEQ ID NO: 7457; WAN024BLC_at; Start 1; Stop 25
ttgactaattatcccaaaaggtgta

SEQ ID NO: 84583 - DNA, 25 bp, Artificial
  probe
  misc_feature (1)..(25): SEQ ID NO: 6852; WAN024BLD_at; Start 122; Stop 146
ggctccctccgacatctgctaaagg

SEQ ID NO: 84584 - DNA, 25 bp, Artificial
  probe
  misc_feature (1)..(25): SEQ ID NO: 6852; WAN024BLD_at; Start 129; Stop 153
tccgacatctgctaaaggcaacggt

SEQ ID NO: 84585 - DNA, 25 bp, Artificial
  probe
  misc_feature (1)..(25): SEQ ID NO: 6852; WAN024BLD_at; Start 107; Stop 131
tcggaaaaggtgatcggctccctcc

SEQ ID NO: 84586 - DNA, 25 bp, Artificial
  probe
  misc_feature (1)..(25): SEQ ID NO: 6852; WAN024BLD_at; Start 125; Stop 149
tccctccgacatctgctaaaggcaa

SEQ ID NO: 84587 - DNA, 25 bp, Artificial
  probe
  misc_feature (1)..(25): SEQ ID NO: 6852; WAN024BLD_at; Start 112; Stop 136
aaaggtgatcggctccctccgacat

SEQ ID NO: 84588 - DNA, 25 bp, Artificial
  probe
  misc_feature (1)..(25): SEQ ID NO: 6852; WAN024BLD_at; Start 68; Stop 92
ctcgtggcggaaaagttactaatgg

SEQ ID NO: 84589 - DNA, 25 bp, Artificial
  probe
  misc_feature (1)..(25): SEQ ID NO: 6852; WAN024BLD_at; Start 132; Stop 156
gacatctgctaaaggcaacggttgg

SEQ ID NO: 84590 - DNA, 25 bp, Artificial
  probe
  misc_feature (1)..(25): SEQ ID NO: 6852; WAN024BLD_at; Start 109; Stop 133
ggaaaaggtgatcggctccctccga

SEQ ID NO: 84591 - DNA, 25 bp, Artificial
  probe
  misc_feature (1)..(25): SEQ ID NO: 6852; WAN024BLD_at; Start 9; Stop 33
tactccaataaaacctggaacagat

SEQ ID NO: 84592 - DNA, 25 bp, Artificial
  probe
  misc_feature (1)..(25): SEQ ID NO: 6852; WAN024BLD_at; Start 86; Stop 110
ctaatggtcataccgcaactatcgg

SEQ ID NO: 84593 - DNA, 25 bp, Artificial
  probe
  misc_feature (1)..(25): SEQ ID NO: 6852; WAN024BLD_at; Start 2; Stop 26
tggcaaatactccaataaaacctgg

SEQ ID NO: 84594 - DNA, 25 bp, Artificial
  probe
  misc_feature (1)..(25): SEQ ID NO: 6852; WAN024BLD_at; Start 22; Stop 46
cctggaacagataatcagaaacctg

SEQ ID NO: 84595 - DNA, 25 bp, Artificial
  probe
  misc_feature (1)..(25): SEQ ID NO: 6852; WAN024BLD_at; Start 34; Stop 58
aatcagaaacctggtcgctatgtag

SEQ ID NO: 84596 - DNA, 25 bp, Artificial
  probe
  misc_feature (1)..(25): SEQ ID NO: 6852; WAN024BLD_at; Start 37; Stop 61
cagaaacctggtcgctatgtagagg

SEQ ID NO: 84597 - DNA, 25 bp, Artificial
  probe
  misc_feature (1)..(25): SEQ ID NO: 6852; WAN024BLD_at; Start 67; Stop 91
cctcgtggcggaaaagttactaatg

SEQ ID NO: 84598 - DNA, 25 bp, Artificial
  probe
  misc_feature (1)..(25): SEQ ID NO: 6852; WAN024BLD_at; Start 31; Stop 55
gataatcagaaacctggtcgctatg

SEQ ID NO: 84599 - DNA, 25 bp, Artificial
  probe
  misc_feature (1)..(25): SEQ ID NO: 6852; WAN024BLD_at; Start 114; Stop 138
aggtgatcggctccctccgacatct

SEQ ID NO: 84600 - DNA, 25 bp, Artificial
  probe
  misc_feature (1)..(25): SEQ ID NO: 6852; WAN024BLD_at; Start 43; Stop 67
cctggtcgctatgtagaggtaggac

SEQ ID NO: 84601 - DNA, 25 bp, Artificial
  probe
  misc_feature (1)..(25): SEQ ID NO: 6852; WAN024BLD_at; Start 93; Stop 117
tcataccgcaactatcggaaaaggt

SEQ ID NO: 84602 - DNA, 25 bp, Artificial
  probe
  misc_feature (1)..(25): SEQ ID NO: 6852; WAN024BLD_at; Start 96; Stop 120
taccgcaactatcggaaaaggtgat

SEQ ID NO: 84603 - DNA, 25 bp, Artificial
  probe
  misc_feature (1)..(25): SEQ ID NO: 6852; WAN024BLD_at; Start 39; Stop 63
gaaacctggtcgctatgtagaggta

SEQ ID NO: 84604 - DNA, 25 bp, Artificial
  probe
  misc_feature (1)..(25): SEQ ID NO: 6852; WAN024BLD_at; Start 51; Stop 75
ctatgtagaggtaggacctcgtggc

SEQ ID NO: 84605 - DNA, 25 bp, Artificial
  probe
  misc_feature (1)..(25): SEQ ID NO: 6852; WAN024BLD_at; Start 48; Stop 72
tcgctatgtagaggtaggacctcgt

SEQ ID NO: 84606 - DNA, 25 bp, Artificial
  probe
  misc_feature (1)..(25): SEQ ID NO: 6852; WAN024BLD_at; Start 105; Stop 129
tatcggaaaaggtgatcggctccct

SEQ ID NO: 84607 - DNA, 25 bp, Artificial
  probe
  misc_feature (1)..(25): SEQ ID NO: 6852; WAN024BLD_at; Start 101; Stop 125
caactatcggaaaaggtgatcggct

SEQ ID NO: 84608 - DNA, 25 bp, Artificial
  probe
  misc_feature (1)..(25): SEQ ID NO: 6852; WAN024BLD_at; Start 77; Stop 101
gaaaagttactaatggtcataccgc

SEQ ID NO: 84609 - DNA, 25 bp, Artificial
  probe
  misc_feature (1)..(25): SEQ ID NO: 6852; WAN024BLD_at; Start 103; Stop 127
actatcggaaaaggtgatcggctcc

SEQ ID NO: 84610 - DNA, 25 bp, Artificial
  probe
  misc_feature (1)..(25): SEQ ID NO: 6852; WAN024BLD_at; Start 26; Stop 50
gaacagataatcagaaacctggtcg

SEQ ID NO: 84611 - DNA, 25 bp, Artificial
  probe
  misc_feature (1)..(25): SEQ ID NO: 6852; WAN024BLD_at; Start 29; Stop 53
cagataatcagaaacctggtcgcta

SEQ ID NO: 84612 - DNA, 25 bp, Artificial
  probe
  misc_feature (1)..(25): SEQ ID NO: 6852; WAN024BLD_at; Start 91; Stop 115
ggtcataccgcaactatcggaaaag

SEQ ID NO: 84613 - DNA, 25 bp, Artificial
  probe
  misc_feature (1)..(25): SEQ ID NO: 6852; WAN024BLD_at; Start 14; Stop 38
caataaaacctggaacagataatca

SEQ ID NO: 84614 - DNA, 25 bp, Artificial
  probe
  misc_feature (1)..(25): SEQ ID NO: 6852; WAN024BLD_at; Start 73; Stop 97
ggcggaaaagttactaatggtcata

SEQ ID NO: 84615 - DNA, 25 bp, Artificial
  probe
  misc_feature (1)..(25): SEQ ID NO: 6852; WAN024BLD_at; Start 80; Stop 104
aagttactaatggtcataccgcaac

SEQ ID NO: 84616 - DNA, 25 bp, Artificial
  probe
  misc_feature (1)..(25): SEQ ID NO: 6852; WAN024BLD_at; Start 136; Stop 160
tctgctaaaggcaacggttggaaaa

SEQ ID NO: 84617 - DNA, 25 bp, Artificial
  probe
  misc_feature (1)..(25): SEQ ID NO: 7111; WAN024BLE_at; Start 41; Stop 65
aggaatggcagggtattattgccaa

SEQ ID NO: 84618 - DNA, 25 bp, Artificial
  probe
  misc_feature (1)..(25): SEQ ID NO: 7111; WAN024BLE_at; Start 43; Stop 67
gaatggcagggtattattgccaaaa

SEQ ID NO: 84619 - DNA, 25 bp, Artificial
  probe
  misc_feature (1)..(25): SEQ ID NO: 7111; WAN024BLE_at; Start 1; Stop 25
ctgattcttcaaaaaagcgttttct

SEQ ID NO: 84620 - DNA, 25 bp, Artificial
  probe
  misc_feature (1)..(25): SEQ ID NO: 7111; WAN024BLE_at; Start 137; Stop 161
taaaaacagtgaccgaaatcactgc

SEQ ID NO: 84621 - DNA, 25 bp, Artificial
  probe
  misc_feature (1)..(25): SEQ ID NO: 7111; WAN024BLE_at; Start 15; Stop 39
aagcgttttcttgaagaatagggag

SEQ ID NO: 84622 - DNA, 25 bp, Artificial
  probe
  misc_feature (1)..(25): SEQ ID NO: 7111; WAN024BLE_at; Start 139; Stop 163
aaaacagtgaccgaaatcactgctt

SEQ ID NO: 84623 - DNA, 25 bp, Artificial
  probe
  misc_feature (1)..(25): SEQ ID NO: 7111; WAN024BLE_at; Start 55; Stop 79
attattgccaaaaacgccattttgt

SEQ ID NO: 84624 - DNA, 25 bp, Artificial
  probe
  misc_feature (1)..(25): SEQ ID NO: 7111; WAN024BLE_at; Start 18; Stop 42
cgttttcttgaagaatagggaggag

SEQ ID NO: 84625 - DNA, 25 bp, Artificial
  probe
  misc_feature (1)..(25): SEQ ID NO: 7111; WAN024BLE_at; Start 142; Stop 166
acagtgaccgaaatcactgcttatc

SEQ ID NO: 84626 - DNA, 25 bp, Artificial
  probe
  misc_feature (1)..(25): SEQ ID NO: 7111; WAN024BLE_at; Start 44; Stop 68
aatggcagggtattattgccaaaaa

SEQ ID NO: 84627 - DNA, 25 bp, Artificial
  probe
  misc_feature (1)..(25): SEQ ID NO: 7111; WAN024BLE_at; Start 20; Stop 44
ttttcttgaagaatagggaggagga

SEQ ID NO: 84628 - DNA, 25 bp, Artificial
  probe
  misc_feature (1)..(25): SEQ ID NO: 7111; WAN024BLE_at; Start 26; Stop 50
tgaagaatagggaggaggaatggca

SEQ ID NO: 84629 - DNA, 25 bp, Artificial
  probe
  misc_feature (1)..(25): SEQ ID NO: 7111; WAN024BLE_at; Start 140; Stop 164
aaacagtgaccgaaatcactgctta

SEQ ID NO: 84630 - DNA, 25 bp, Artificial
  probe
  misc_feature (1)..(25): SEQ ID NO: 7111; WAN024BLE_at; Start 22; Stop 46
ttcttgaagaatagggaggaggaat

SEQ ID NO: 84631 - DNA, 25 bp, Artificial
  probe
  misc_feature (1)..(25): SEQ ID NO: 7111; WAN024BLE_at; Start 143; Stop 167
cagtgaccgaaatcactgcttatca

SEQ ID NO: 84632 - DNA, 25 bp, Artificial
  probe
  misc_feature (1)..(25): SEQ ID NO: 7111; WAN024BLE_at; Start 145; Stop 169
gtgaccgaaatcactgcttatcagt

SEQ ID NO: 84633 - DNA, 25 bp, Artificial
  probe
  misc_feature (1)..(25): SEQ ID NO: 7111; WAN024BLE_at; Start 60; Stop 84
tgccaaaaacgccattttgttaata

SEQ ID NO: 84634 - DNA, 25 bp, Artificial
  probe
  misc_feature (1)..(25): SEQ ID NO: 7111; WAN024BLE_at; Start 108; Stop 132
tattgtcaaaaacggtgttttgtca

SEQ ID NO: 84635 - DNA, 25 bp, Artificial
  probe
  misc_feature (1)..(25): SEQ ID NO: 7111; WAN024BLE_at; Start 49; Stop 73
cagggtattattgccaaaaacgcca

SEQ ID NO: 84636 - DNA, 25 bp, Artificial
  probe
  misc_feature (1)..(25): SEQ ID NO: 7111; WAN024BLE_at; Start 144; Stop 168
agtgaccgaaatcactgcttatcag

SEQ ID NO: 84637 - DNA, 25 bp, Artificial
  probe
  misc_feature (1)..(25): SEQ ID NO: 7111; WAN024BLE_at; Start 72; Stop 96
cattttgttaataatagctcctttt

SEQ ID NO: 84638 - DNA, 25 bp, Artificial
  probe
  misc_feature (1)..(25): SEQ ID NO: 7111; WAN024BLE_at; Start 54; Stop 78
tattattgccaaaaacgccattttg

SEQ ID NO: 84639 - DNA, 25 bp, Artificial
  probe
  misc_feature (1)..(25): SEQ ID NO: 7111; WAN024BLE_at; Start 47; Stop 71
ggcagggtattattgccaaaaacgc

SEQ ID NO: 84640 - DNA, 25 bp, Artificial
  probe
  misc_feature (1)..(25): SEQ ID NO: 7111; WAN024BLE_at; Start 70; Stop 94
gccattttgttaataatagctcctt

SEQ ID NO: 84641 - DNA, 25 bp, Artificial
  probe
  misc_feature (1)..(25): SEQ ID NO: 7111; WAN024BLE_at; Start 42; Stop 66
ggaatggcagggtattattgccaaa

SEQ ID NO: 84642 - DNA, 25 bp, Artificial
  probe
  misc_feature (1)..(25): SEQ ID NO: 7111; WAN024BLE_at; Start 46; Stop 70
tggcagggtattattgccaaaaacg

SEQ ID NO: 84643 - DNA, 25 bp, Artificial
  probe
  misc_feature (1)..(25): SEQ ID NO: 7111; WAN024BLE_at; Start 147; Stop 171
gaccgaaatcactgcttatcagttg

SEQ ID NO: 84644 - DNA, 25 bp, Artificial
  probe
  misc_feature (1)..(25): SEQ ID NO: 7111; WAN024BLE_at; Start 30; Stop 54
gaatagggaggaggaatggcagggt

SEQ ID NO: 84645 - DNA, 25 bp, Artificial
  probe
  misc_feature (1)..(25): SEQ ID NO: 7111; WAN024BLE_at; Start 69; Stop 93
cgccattttgttaataatagctcct

SEQ ID NO: 84646 - DNA, 25 bp, Artificial
  probe
  misc_feature (1)..(25): SEQ ID NO: 7111; WAN024BLE_at; Start 57; Stop 81
tattgccaaaaacgccattttgtta

SEQ ID NO: 84647 - DNA, 25 bp, Artificial
  probe
  misc_feature (1)..(25): SEQ ID NO: 7111; WAN024BLE_at; Start 17; Stop 41
gcgttttcttgaagaatagggagga

SEQ ID NO: 84648 - DNA, 25 bp, Artificial
  probe
  misc_feature (1)..(25): SEQ ID NO: 7111; WAN024BLE_at; Start 128; Stop 152
tgtcaaaaataaaaacagtgaccga

SEQ ID NO: 84649 - DNA, 25 bp, Artificial
  probe
  misc_feature (1)..(25): SEQ ID NO: 7111; WAN024BLE_at; Start 67; Stop 91
aacgccattttgttaataatagctc

SEQ ID NO: 84650 - DNA, 25 bp, Artificial
  probe
  misc_feature (1)..(25): SEQ ID NO: 7111; WAN024BLE_at; Start 48; Stop 72
gcagggtattattgccaaaaacgcc

SEQ ID NO: 84651 - DNA, 25 bp, Artificial
  probe
  misc_feature (1)..(25): SEQ ID NO: 7535; WAN024BLF_at; Start 79; Stop 103
atcaaatcgcttgactttcacggtt

SEQ ID NO: 84652 - DNA, 25 bp, Artificial
  probe
  misc_feature (1)..(25): SEQ ID NO: 7535; WAN024BLF_at; Start 84; Stop 108
atcgcttgactttcacggtttaccg

SEQ ID NO: 84653 - DNA, 25 bp, Artificial
  probe
  misc_feature (1)..(25): SEQ ID NO: 7535; WAN024BLF_at; Start 74; Stop 98
acttcatcaaatcgcttgactttca

SEQ ID NO: 84654 - DNA, 25 bp, Artificial
  probe
  misc_feature (1)..(25): SEQ ID NO: 7535; WAN024BLF_at; Start 78; Stop 102
catcaaatcgcttgactttcacggt

SEQ ID NO: 84655 - DNA, 25 bp, Artificial
  probe
  misc_feature (1)..(25): SEQ ID NO: 7535; WAN024BLF_at; Start 1; Stop 25
ttgattttttacatcgttttacaga

SEQ ID NO: 84656 - DNA, 25 bp, Artificial
  probe
  misc_feature (1)..(25): SEQ ID NO: 7535; WAN024BLF_at; Start 12; Stop 36
catcgttttacagaggtttacgaca

SEQ ID NO: 84657 - DNA, 25 bp, Artificial
  probe
  misc_feature (1)..(25): SEQ ID NO: 7535; WAN024BLF_at; Start 70; Stop 94
aaaaacttcatcaaatcgcttgact

SEQ ID NO: 84658 - DNA, 25 bp, Artificial
  probe
  misc_feature (1)..(25): SEQ ID NO: 7535; WAN024BLF_at; Start 20; Stop 44
tacagaggtttacgacacttttgcc

SEQ ID NO: 84659 - DNA, 25 bp, Artificial
  probe
  misc_feature (1)..(25): SEQ ID NO: 7535; WAN024BLF_at; Start 71; Stop 95
aaaacttcatcaaatcgcttgactt

SEQ ID NO: 84660 - DNA, 25 bp, Artificial
  probe
  misc_feature (1)..(25): SEQ ID NO: 7535; WAN024BLF_at; Start 75; Stop 99
cttcatcaaatcgcttgactttcac

SEQ ID NO: 84661 - DNA, 25 bp, Artificial
  probe
  misc_feature (1)..(25): SEQ ID NO: 7535; WAN024BLF_at; Start 2; Stop 26
tgattttttacatcgttttacagag

SEQ ID NO: 84662 - DNA, 25 bp, Artificial
  probe
  misc_feature (1)..(25): SEQ ID NO: 7535; WAN024BLF_at; Start 19; Stop 43
ttacagaggtttacgacacttttgc

SEQ ID NO: 84663 - DNA, 25 bp, Artificial
  probe
  misc_feature (1)..(25): SEQ ID NO: 7535; WAN024BLF_at; Start 73; Stop 97
aacttcatcaaatcgcttgactttc

SEQ ID NO: 84664 - DNA, 25 bp, Artificial
  probe
  misc_feature (1)..(25): SEQ ID NO: 7535; WAN024BLF_at; Start 69; Stop 93
aaaaaacttcatcaaatcgcttgac

SEQ ID NO: 84665 - DNA, 25 bp, Artificial
  probe
  misc_feature (1)..(25): SEQ ID NO: 7535; WAN024BLF_at; Start 67; Stop 91
caaaaaaacttcatcaaatcgcttg

SEQ ID NO: 84666 - DNA, 25 bp, Artificial
  probe
  misc_feature (1)..(25): SEQ ID NO: 7535; WAN024BLF_at; Start 10; Stop 34
tacatcgttttacagaggtttacga

SEQ ID NO: 84667 - DNA, 25 bp, Artificial
  probe
  misc_feature (1)..(25): SEQ ID NO: 7535; WAN024BLF_at; Start 65; Stop 89
ttcaaaaaaacttcatcaaatcgct

SEQ ID NO: 84668 - DNA, 25 bp, Artificial
  probe
  misc_feature (1)..(25): SEQ ID NO: 7535; WAN024BLF_at; Start 68; Stop 92
aaaaaaacttcatcaaatcgcttga

SEQ ID NO: 84669 - DNA, 25 bp, Artificial
  probe
  misc_feature (1)..(25): SEQ ID NO: 7535; WAN024BLF_at; Start 72; Stop 96
aaacttcatcaaatcgcttgacttt

SEQ ID NO: 84670 - DNA, 25 bp, Artificial
  probe
  misc_feature (1)..(25): SEQ ID NO: 7535; WAN024BLF_at; Start 77; Stop 101
tcatcaaatcgcttgactttcacgg

SEQ ID NO: 84671 - DNA, 25 bp, Artificial
  probe
  misc_feature (1)..(25): SEQ ID NO: 7535; WAN024BLF_at; Start 81; Stop 105
caaatcgcttgactttcacggttta

SEQ ID NO: 84672 - DNA, 25 bp, Artificial
  probe
  misc_feature (1)..(25): SEQ ID NO: 7535; WAN024BLF_at; Start 64; Stop 88
tttcaaaaaaacttcatcaaatcgc

SEQ ID NO: 84673 - DNA, 25 bp, Artificial
  probe
  misc_feature (1)..(25): SEQ ID NO: 7535; WAN024BLF_at; Start 80; Stop 104
tcaaatcgcttgactttcacggttt

SEQ ID NO: 84674 - DNA, 25 bp, Artificial
  probe
  misc_feature (1)..(25): SEQ ID NO: 7535; WAN024BLF_at; Start 66; Stop 90
tcaaaaaaacttcatcaaatcgctt

SEQ ID NO: 84675 - DNA, 25 bp, Artificial
  probe
  misc_feature (1)..(25): SEQ ID NO: 7535; WAN024BLF_at; Start 76; Stop 100
ttcatcaaatcgcttgactttcacg

SEQ ID NO: 84676 - DNA, 25 bp, Artificial
  probe
  misc_feature (1)..(25): SEQ ID NO: 7218; WAN024BLG_at; Start 12; Stop 36
gcgatttgatgaagtttttttgaaa

SEQ ID NO: 84677 - DNA, 25 bp, Artificial
  probe
  misc_feature (1)..(25): SEQ ID NO: 7218; WAN024BLG_at; Start 7; Stop 31
gtcaagcgatttgatgaagtttttt

SEQ ID NO: 84678 - DNA, 25 bp, Artificial
  probe
  misc_feature (1)..(25): SEQ ID NO: 7218; WAN024BLG_at; Start 11; Stop 35
agcgatttgatgaagtttttttgaa

SEQ ID NO: 84679 - DNA, 25 bp, Artificial
  probe
  misc_feature (1)..(25): SEQ ID NO: 7218; WAN024BLG_at; Start 1; Stop 25
gtgaaagtcaagcgatttgatgaag

SEQ ID NO: 84680 - DNA, 25 bp, Artificial
  probe
  misc_feature (1)..(25): SEQ ID NO: 7218; WAN024BLG_at; Start 3; Stop 27
gaaagtcaagcgatttgatgaagtt

SEQ ID NO: 84681 - DNA, 25 bp, Artificial
  probe
  misc_feature (1)..(25): SEQ ID NO: 7218; WAN024BLG_at; Start 4; Stop 28
aaagtcaagcgatttgatgaagttt

SEQ ID NO: 84682 - DNA, 25 bp, Artificial
  probe
  misc_feature (1)..(25): SEQ ID NO: 7218; WAN024BLG_at; Start 8; Stop 32
tcaagcgatttgatgaagttttttt

SEQ ID NO: 84683 - DNA, 25 bp, Artificial
  probe
  misc_feature (1)..(25): SEQ ID NO: 7218; WAN024BLG_at; Start 6; Stop 30
agtcaagcgatttgatgaagttttt

SEQ ID NO: 84684 - DNA, 25 bp, Artificial
  probe
  misc_feature (1)..(25): SEQ ID NO: 7218; WAN024BLG_at; Start 5; Stop 29
aagtcaagcgatttgatgaagtttt

SEQ ID NO: 84685 - DNA, 25 bp, Artificial
  probe
  misc_feature (1)..(25): SEQ ID NO: 7218; WAN024BLG_at; Start 2; Stop 26
tgaaagtcaagcgatttgatgaagt

SEQ ID NO: 84686 - DNA, 25 bp, Artificial
  probe
  misc_feature (1)..(25): SEQ ID NO: 6426; WAN024BLH_at; Start 2142; Stop 2166
tgccgagctaacaacagatccttta

SEQ ID NO: 84687 - DNA, 25 bp, Artificial
  probe
  misc_feature (1)..(25): SEQ ID NO: 6426; WAN024BLH_at; Start 715; Stop 739
tatttttcaataagagattccgcag

SEQ ID NO: 84688 - DNA, 25 bp, Artificial
  probe
  misc_feature (1)..(25): SEQ ID NO: 6426; WAN024BLH_at; Start 949; Stop 973
tgtactcaatcagtatcagaagatg

SEQ ID NO: 84689 - DNA, 25 bp, Artificial
  probe
  misc_feature (1)..(25): SEQ ID NO: 6426; WAN024BLH_at; Start 555; Stop 579
tttgaaaggagtaggcaactgggcc

SEQ ID NO: 84690 - DNA, 25 bp, Artificial
  probe
  misc_feature (1)..(25): SEQ ID NO: 6426; WAN024BLH_at; Start 1024; Stop 1048
gaagaacaccaatccgcattgagag

SEQ ID NO: 84691 - DNA, 25 bp, Artificial
  probe
  misc_feature (1)..(25): SEQ ID NO: 6426; WAN024BLH_at; Start 1916; Stop 1940
cctgtaaagaagaggaaggtggaca

SEQ ID NO: 84692 - DNA, 25 bp, Artificial
  probe
  misc_feature (1)..(25): SEQ ID NO: 6426; WAN024BLH_at; Start 147; Stop 171
tccagtacaaaacgatagggcaagt

SEQ ID NO: 84693 - DNA, 25 bp, Artificial
  probe
  misc_feature (1)..(25): SEQ ID NO: 6426; WAN024BLH_at; Start 334; Stop 358
gaacactatgttgatcagaaagtca

SEQ ID NO: 84694 - DNA, 25 bp, Artificial
  probe
  misc_feature (1)..(25): SEQ ID NO: 6426; WAN024BLH_at; Start 1692; Stop 1716
tcaacagagagagttagcagatgct

SEQ ID NO: 84695 - DNA, 25 bp, Artificial
  probe
  misc_feature (1)..(25): SEQ ID NO: 6426; WAN024BLH_at; Start 2043; Stop 2067
tgcattgggaaatagtacacctact

SEQ ID NO: 84696 - DNA, 25 bp, Artificial
  probe
  misc_feature (1)..(25): SEQ ID NO: 6426; WAN024BLH_at; Start 2394; Stop 2418
tgcggaaaatagacttgaacaatgg

SEQ ID NO: 84697 - DNA, 25 bp, Artificial
  probe
  misc_feature (1)..(25): SEQ ID NO: 6426; WAN024BLH_at; Start 972; Stop 996
tgttaaagttgaactcacgaatggc

SEQ ID NO: 84698 - DNA, 25 bp, Artificial
  probe
  misc_feature (1)..(25): SEQ ID NO: 6426; WAN024BLH_at; Start 868; Stop 892
tctgattccacaaaaggtgaacgtc

SEQ ID NO: 84699 - DNA, 25 bp, Artificial
  probe
  misc_feature (1)..(25): SEQ ID NO: 6426; WAN024BLH_at; Start 360; Stop 384
aattgctcaagaagggttagataca

SEQ ID NO: 84700 - DNA, 25 bp, Artificial
  probe
  misc_feature (1)..(25): SEQ ID NO: 6426; WAN024BLH_at; Start 1984; Stop 2008
caagaattcaaaactagtactcacg

SEQ ID NO: 84701 - DNA, 25 bp, Artificial
  probe
  misc_feature (1)..(25): SEQ ID NO: 6426; WAN024BLH_at; Start 2028; Stop 2052
aatagtcttcggttatgcattggga

SEQ ID NO: 84702 - DNA, 25 bp, Artificial
  probe
  misc_feature (1)..(25): SEQ ID NO: 6426; WAN024BLH_at; Start 2127; Stop 2151
ttataagaagggaattgccgagcta

SEQ ID NO: 84703 - DNA, 25 bp, Artificial
  probe
  misc_feature (1)..(25): SEQ ID NO: 6426; WAN024BLH_at; Start 987; Stop 1011
cacgaatggcataactaaactacta

SEQ ID NO: 84704 - DNA, 25 bp, Artificial
  probe
  misc_feature (1)..(25): SEQ ID NO: 6426; WAN024BLH_at; Start 1606; Stop 1630
tcaagaggtaagtctgtggtcccca

SEQ ID NO: 84705 - DNA, 25 bp, Artificial
  probe
  misc_feature (1)..(25): SEQ ID NO: 6426; WAN024BLH_at; Start 1010; Stop 1034
tatcaagagcagtcgaagaacacca

SEQ ID NO: 84706 - DNA, 25 bp, Artificial
  probe
  misc_feature (1)..(25): SEQ ID NO: 6426; WAN024BLH_at; Start 193; Stop 217
tcagggaaaagtaccattgctcgag

SEQ ID NO: 84707 - DNA, 25 bp, Artificial
  probe
  misc_feature (1)..(25): SEQ ID NO: 6426; WAN024BLH_at; Start 434; Stop 458
taagaacgcagttatcagaatcaca

SEQ ID NO: 84708 - DNA, 25 bp, Artificial
  probe
  misc_feature (1)..(25): SEQ ID NO: 6426; WAN024BLH_at; Start 596; Stop 620
taaaaggaaatcgagctgcatctcc

SEQ ID NO: 84709 - DNA, 25 bp, Artificial
  probe
  misc_feature (1)..(25): SEQ ID NO: 6426; WAN024BLH_at; Start 1287; Stop 1311
caaacataattcagaaatctcgggt

SEQ ID NO: 84710 - DNA, 25 bp, Artificial
  probe
  misc_feature (1)..(25): SEQ ID NO: 6426; WAN024BLH_at; Start 2378; Stop 2402
tagagggtgtatcaaatgcggaaaa

SEQ ID NO: 84711 - DNA, 25 bp, Artificial
  probe
  misc_feature (1)..(25): SEQ ID NO: 6426; WAN024BLH_at; Start 418; Stop 442
gaggaactggatagattaagaacgc

SEQ ID NO: 84712 - DNA, 25 bp, Artificial
  probe
  misc_feature (1)..(25): SEQ ID NO: 6426; WAN024BLH_at; Start 295; Stop 319
cttagtgatactgaacgaaaatcga

SEQ ID NO: 84713 - DNA, 25 bp, Artificial
  probe
  misc_feature (1)..(25): SEQ ID NO: 6426; WAN024BLH_at; Start 2068; Stop 2092
tcggaaagttttgttgggaatgcaa

SEQ ID NO: 84714 - DNA, 25 bp, Artificial
  probe
  misc_feature (1)..(25): SEQ ID NO: 6426; WAN024BLH_at; Start 2287; Stop 2311
gataccatttctgatgaagaacgaa

SEQ ID NO: 84715 - DNA, 25 bp, Artificial
  probe
  misc_feature (1)..(25): SEQ ID NO: 6426; WAN024BLH_at; Start 610; Stop 634
gctgcatctcccgttcataataata

SEQ ID NO: 84716 - DNA, 25 bp, Artificial
  probe
  misc_feature (1)..(25): SEQ ID NO: 6426; WAN024BLH_at; Start 400; Stop 424
gaacaggttgatatcgatgaggaac

SEQ ID NO: 84717 - DNA, 25 bp, Artificial
  probe
  misc_feature (1)..(25): SEQ ID NO: 6426; WAN024BLH_at; Start 1565; Stop 1589
ggttagctatacagaatcaaaacgg

SEQ ID NO: 84718 - DNA, 25 bp, Artificial
  probe
  misc_feature (1)..(25): SEQ ID NO: 6426; WAN024BLH_at; Start 1233; Stop 1257
tcaagaattaagtcaagcagagcat

SEQ ID NO: 84719 - DNA, 25 bp, Artificial
  probe
  misc_feature (1)..(25): SEQ ID NO: 6426; WAN024BLH_at; Start 808; Stop 832
tctgaaaaaatcgaagaacctgagt

SEQ ID NO: 84720 - DNA, 25 bp, Artificial
  probe
  misc_feature (1)..(25): SEQ ID NO: 7292; WAN024BLI_at; Start 104; Stop 128
cttattatagttttttgtcatctcc

SEQ ID NO: 84721 - DNA, 25 bp, Artificial
  probe
  misc_feature (1)..(25): SEQ ID NO: 7292; WAN024BLI_at; Start 61; Stop 85
gaccaatctgaaatcttaagtttaa

SEQ ID NO: 84722 - DNA, 25 bp, Artificial
  probe
  misc_feature (1)..(25): SEQ ID NO: 7292; WAN024BLI_at; Start 20; Stop 44
tagaaccaaaaattatactagatat

SEQ ID NO: 84723 - DNA, 25 bp, Artificial
  probe
  misc_feature (1)..(25): SEQ ID NO: 7292; WAN024BLI_at; Start 49; Stop 73
atgtattttttcgaccaatctgaaa

SEQ ID NO: 84724 - DNA, 25 bp, Artificial
  probe
  misc_feature (1)..(25): SEQ ID NO: 7292; WAN024BLI_at; Start 25; Stop 49
ccaaaaattatactagatatatata

SEQ ID NO: 84725 - DNA, 25 bp, Artificial
  probe
  misc_feature (1)..(25): SEQ ID NO: 7292; WAN024BLI_at; Start 56; Stop 80
ttttcgaccaatctgaaatcttaag

SEQ ID NO: 84726 - DNA, 25 bp, Artificial
  probe
  misc_feature (1)..(25): SEQ ID NO: 7292; WAN024BLI_at; Start 46; Stop 70
tatatgtattttttcgaccaatctg

SEQ ID NO: 84727 - DNA, 25 bp, Artificial
  probe
  misc_feature (1)..(25): SEQ ID NO: 7292; WAN024BLI_at; Start 4; Stop 28
gaatattttatagaaatagaaccaa

SEQ ID NO: 84728 - DNA, 25 bp, Artificial
  probe
  misc_feature (1)..(25): SEQ ID NO: 7292; WAN024BLI_at; Start 22; Stop 46
gaaccaaaaattatactagatatat

SEQ ID NO: 84729 - DNA, 25 bp, Artificial
  probe
  misc_feature (1)..(25): SEQ ID NO: 7292; WAN024BLI_at; Start 111; Stop 135
tagttttttgtcatctcctcttgac

SEQ ID NO: 84730 - DNA, 25 bp, Artificial
  probe
  misc_feature (1)..(25): SEQ ID NO: 7292; WAN024BLI_at; Start 116; Stop 140
ttttgtcatctcctcttgactctcg

SEQ ID NO: 84731 - DNA, 25 bp, Artificial
  probe
  misc_feature (1)..(25): SEQ ID NO: 7292; WAN024BLI_at; Start 47; Stop 71
atatgtattttttcgaccaatctga

SEQ ID NO: 84732 - DNA, 25 bp, Artificial
  probe
  misc_feature (1)..(25): SEQ ID NO: 7292; WAN024BLI_at; Start 51; Stop 75
gtattttttcgaccaatctgaaatc

SEQ ID NO: 84733 - DNA, 25 bp, Artificial
  probe
  misc_feature (1)..(25): SEQ ID NO: 7292; WAN024BLI_at; Start 117; Stop 141
tttgtcatctcctcttgactctcgt

SEQ ID NO: 84734 - DNA, 25 bp, Artificial
  probe
  misc_feature (1)..(25): SEQ ID NO: 7292; WAN024BLI_at; Start 63; Stop 87
ccaatctgaaatcttaagtttaaat

SEQ ID NO: 84735 - DNA, 25 bp, Artificial
  probe
  misc_feature (1)..(25): SEQ ID NO: 7292; WAN024BLI_at; Start 109; Stop 133
tatagttttttgtcatctcctcttg

SEQ ID NO: 84736 - DNA, 25 bp, Artificial
  probe
  misc_feature (1)..(25): SEQ ID NO: 7292; WAN024BLI_at; Start 42; Stop 66
tatatatatgtattttttcgaccaa

SEQ ID NO: 84737 - DNA, 25 bp, Artificial
  probe
  misc_feature (1)..(25): SEQ ID NO: 7292; WAN024BLI_at; Start 64; Stop 88
caatctgaaatcttaagtttaaatt

SEQ ID NO: 84738 - DNA, 25 bp, Artificial
  probe
  misc_feature (1)..(25): SEQ ID NO: 7292; WAN024BLI_at; Start 54; Stop 78
ttttttcgaccaatctgaaatctta

SEQ ID NO: 84739 - DNA, 25 bp, Artificial
  probe
  misc_feature (1)..(25): SEQ ID NO: 7292; WAN024BLI_at; Start 48; Stop 72
tatgtattttttcgaccaatctgaa

SEQ ID NO: 84740 - DNA, 25 bp, Artificial
  probe
  misc_feature (1)..(25): SEQ ID NO: 7292; WAN024BLI_at; Start 18; Stop 42
aatagaaccaaaaattatactagat

SEQ ID NO: 84741 - DNA, 25 bp, Artificial
  probe
  misc_feature (1)..(25): SEQ ID NO: 7292; WAN024BLI_at; Start 110; Stop 134
atagttttttgtcatctcctcttga

SEQ ID NO: 84742 - DNA, 25 bp, Artificial
  probe
  misc_feature (1)..(25): SEQ ID NO: 7292; WAN024BLI_at; Start 2; Stop 26
tggaatattttatagaaatagaacc

SEQ ID NO: 84743 - DNA, 25 bp, Artificial
  probe
  misc_feature (1)..(25): SEQ ID NO: 7292; WAN024BLI_at; Start 60; Stop 84
cgaccaatctgaaatcttaagttta

SEQ ID NO: 84744 - DNA, 25 bp, Artificial
  probe
  misc_feature (1)..(25): SEQ ID NO: 7292; WAN024BLI_at; Start 44; Stop 68
tatatatgtattttttcgaccaatc

SEQ ID NO: 84745 - DNA, 25 bp, Artificial
  probe
  misc_feature (1)..(25): SEQ ID NO: 7292; WAN024BLI_at; Start 59; Stop 83
tcgaccaatctgaaatcttaagttt

SEQ ID NO: 84746 - DNA, 25 bp, Artificial
  probe
  misc_feature (1)..(25): SEQ ID NO: 7292; WAN024BLI_at; Start 113; Stop 137
gttttttgtcatctcctcttgactc

SEQ ID NO: 84747 - DNA, 25 bp, Artificial
  probe
  misc_feature (1)..(25): SEQ ID NO: 7292; WAN024BLI_at; Start 57; Stop 81
tttcgaccaatctgaaatcttaagt

SEQ ID NO: 84748 - DNA, 25 bp, Artificial
  probe
  misc_feature (1)..(25): SEQ ID NO: 7292; WAN024BLI_at; Start 112; Stop 136
agttttttgtcatctcctcttgact

SEQ ID NO: 84749 - DNA, 25 bp, Artificial
  probe
  misc_feature (1)..(25): SEQ ID NO: 7292; WAN024BLI_at; Start 50; Stop 74
tgtattttttcgaccaatctgaaat

SEQ ID NO: 84750 - DNA, 25 bp, Artificial
  probe
  misc_feature (1)..(25): SEQ ID NO: 7292; WAN024BLI_at; Start 52; Stop 76
tattttttcgaccaatctgaaatct

SEQ ID NO: 84751 - DNA, 25 bp, Artificial
  probe
  misc_feature (1)..(25): SEQ ID NO: 7292; WAN024BLI_at; Start 40; Stop 64
gatatatatatgtattttttcgacc

SEQ ID NO: 84752 - DNA, 25 bp, Artificial
  probe
  misc_feature (1)..(25): SEQ ID NO: 7292; WAN024BLI_at; Start 106; Stop 130
tattatagttttttgtcatctcctc

SEQ ID NO: 84753 - DNA, 25 bp, Artificial
  probe
  misc_feature (1)..(25): SEQ ID NO: 7292; WAN024BLI_at; Start 58; Stop 82
ttcgaccaatctgaaatcttaagtt

SEQ ID NO: 84754 - DNA, 25 bp, Artificial
  probe
  misc_feature (1)..(25): SEQ ID NO: 6757; WAN024BLJ_at; Start 3; Stop 27
gctctattcgatgggatttctaaga

SEQ ID NO: 84755 - DNA, 25 bp, Artificial
  probe
  misc_feature (1)..(25): SEQ ID NO: 6757; WAN024BLJ_at; Start 51; Stop 75
aattatcctatgtttgcaggtgcca

SEQ ID NO: 84756 - DNA, 25 bp, Artificial
  probe
  misc_feature (1)..(25): SEQ ID NO: 6757; WAN024BLJ_at; Start 60; Stop 84
atgtttgcaggtgccaaatggccct

SEQ ID NO: 84757 - DNA, 25 bp, Artificial
  probe
  misc_feature (1)..(25): SEQ ID NO: 6757; WAN024BLJ_at; Start 49; Stop 73
aaaattatcctatgtttgcaggtgc

SEQ ID NO: 84758 - DNA, 25 bp, Artificial
  probe
  misc_feature (1)..(25): SEQ ID NO: 6757; WAN024BLJ_at; Start 36; Stop 60
gttcttgagtttgaaaattatccta

SEQ ID NO: 84759 - DNA, 25 bp, Artificial
  probe
  misc_feature (1)..(25): SEQ ID NO: 6757; WAN024BLJ_at; Start 54; Stop 78
tatcctatgtttgcaggtgccaaat

SEQ ID NO: 84760 - DNA, 25 bp, Artificial
  probe
  misc_feature (1)..(25): SEQ ID NO: 6757; WAN024BLJ_at; Start 52; Stop 76
attatcctatgtttgcaggtgccaa

SEQ ID NO: 84761 - DNA, 25 bp, Artificial
  probe
  misc_feature (1)..(25): SEQ ID NO: 6757; WAN024BLJ_at; Start 64; Stop 88
ttgcaggtgccaaatggcccttttt

SEQ ID NO: 84762 - DNA, 25 bp, Artificial
  probe
  misc_feature (1)..(25): SEQ ID NO: 6757; WAN024BLJ_at; Start 5; Stop 29
tctattcgatgggatttctaagaaa

SEQ ID NO: 84763 - DNA, 25 bp, Artificial
  probe
  misc_feature (1)..(25): SEQ ID NO: 6757; WAN024BLJ_at; Start 38; Stop 62
tcttgagtttgaaaattatcctatg

SEQ ID NO: 84764 - DNA, 25 bp, Artificial
  probe
  misc_feature (1)..(25): SEQ ID NO: 6757; WAN024BLJ_at; Start 56; Stop 80
tcctatgtttgcaggtgccaaatgg

SEQ ID NO: 84765 - DNA, 25 bp, Artificial
  probe
  misc_feature (1)..(25): SEQ ID NO: 6757; WAN024BLJ_at; Start 46; Stop 70
ttgaaaattatcctatgtttgcagg

SEQ ID NO: 84766 - DNA, 25 bp, Artificial
  probe
  misc_feature (1)..(25): SEQ ID NO: 6757; WAN024BLJ_at; Start 50; Stop 74
aaattatcctatgtttgcaggtgcc

SEQ ID NO: 84767 - DNA, 25 bp, Artificial
  probe
  misc_feature (1)..(25): SEQ ID NO: 6757; WAN024BLJ_at; Start 67; Stop 91
caggtgccaaatggccctttttttg

SEQ ID NO: 84768 - DNA, 25 bp, Artificial
  probe
  misc_feature (1)..(25): SEQ ID NO: 6757; WAN024BLJ_at; Start 42; Stop 66
gagtttgaaaattatcctatgtttg

SEQ ID NO: 84769 - DNA, 25 bp, Artificial
  probe
  misc_feature (1)..(25): SEQ ID NO: 6757; WAN024BLJ_at; Start 65; Stop 89
tgcaggtgccaaatggccctttttt

SEQ ID NO: 84770 - DNA, 25 bp, Artificial
  probe
  misc_feature (1)..(25): SEQ ID NO: 6757; WAN024BLJ_at; Start 57; Stop 81
cctatgtttgcaggtgccaaatggc

SEQ ID NO: 84771 - DNA, 25 bp, Artificial
  probe
  misc_feature (1)..(25): SEQ ID NO: 6757; WAN024BLJ_at; Start 26; Stop 50
gaaaagtagtgttcttgagtttgaa

SEQ ID NO: 84772 - DNA, 25 bp, Artificial
  probe
  misc_feature (1)..(25): SEQ ID NO: 6757; WAN024BLJ_at; Start 59; Stop 83
tatgtttgcaggtgccaaatggccc

SEQ ID NO: 84773 - DNA, 25 bp, Artificial
  probe
  misc_feature (1)..(25): SEQ ID NO: 6757; WAN024BLJ_at; Start 58; Stop 82
ctatgtttgcaggtgccaaatggcc

SEQ ID NO: 84774 - DNA, 25 bp, Artificial
  probe
  misc_feature (1)..(25): SEQ ID NO: 6757; WAN024BLJ_at; Start 63; Stop 87
tttgcaggtgccaaatggccctttt

SEQ ID NO: 84775 - DNA, 25 bp, Artificial
  probe
  misc_feature (1)..(25): SEQ ID NO: 6757; WAN024BLJ_at; Start 6; Stop 30
ctattcgatgggatttctaagaaaa

SEQ ID NO: 84776 - DNA, 25 bp, Artificial
  probe
  misc_feature (1)..(25): SEQ ID NO: 6757; WAN024BLJ_at; Start 53; Stop 77
ttatcctatgtttgcaggtgccaaa

SEQ ID NO: 84777 - DNA, 25 bp, Artificial
  probe
  misc_feature (1)..(25): SEQ ID NO: 6757; WAN024BLJ_at; Start 44; Stop 68
gtttgaaaattatcctatgtttgca

SEQ ID NO: 84778 - DNA, 25 bp, Artificial
  probe
  misc_feature (1)..(25): SEQ ID NO: 6757; WAN024BLJ_at; Start 7; Stop 31
tattcgatgggatttctaagaaaag

SEQ ID NO: 84779 - DNA, 25 bp, Artificial
  probe
  misc_feature (1)..(25): SEQ ID NO: 6757; WAN024BLJ_at; Start 48; Stop 72
gaaaattatcctatgtttgcaggtg

SEQ ID NO: 84780 - DNA, 25 bp, Artificial
  probe
  misc_feature (1)..(25): SEQ ID NO: 6757; WAN024BLJ_at; Start 62; Stop 86
gtttgcaggtgccaaatggcccttt

SEQ ID NO: 84781 - DNA, 25 bp, Artificial
  probe
  misc_feature (1)..(25): SEQ ID NO: 6757; WAN024BLJ_at; Start 34; Stop 58
gtgttcttgagtttgaaaattatcc

SEQ ID NO: 84782 - DNA, 25 bp, Artificial
  probe
  misc_feature (1)..(25): SEQ ID NO: 6757; WAN024BLJ_at; Start 2; Stop 26
tgctctattcgatgggatttctaag

SEQ ID NO: 84783 - DNA, 25 bp, Artificial
  probe
  misc_feature (1)..(25): SEQ ID NO: 6757; WAN024BLJ_at; Start 12; Stop 36
gatgggatttctaagaaaagtagtg

SEQ ID NO: 84784 - DNA, 25 bp, Artificial
  probe
  misc_feature (1)..(25): SEQ ID NO: 6757; WAN024BLJ_at; Start 10; Stop 34
tcgatgggatttctaagaaaagtag

SEQ ID NO: 84785 - DNA, 25 bp, Artificial
  probe
  misc_feature (1)..(25): SEQ ID NO: 6757; WAN024BLJ_at; Start 21; Stop 45
tctaagaaaagtagtgttcttgagt

SEQ ID NO: 84786 - DNA, 25 bp, Artificial
  probe
  misc_feature (1)..(25): SEQ ID NO: 6757; WAN024BLJ_at; Start 55; Stop 79
atcctatgtttgcaggtgccaaatg

SEQ ID NO: 84787 - DNA, 25 bp, Artificial
  probe
  misc_feature (1)..(25): SEQ ID NO: 6757; WAN024BLJ_at; Start 1; Stop 25
atgctctattcgatgggatttctaa

SEQ ID NO: 84788 - DNA, 25 bp, Artificial
  probe
  misc_feature (1)..(25): SEQ ID NO: 6722; WAN024BLK_s_at; Start 27; Stop 51
aaagtgttttgatagggaggatatc

SEQ ID NO: 84789 - DNA, 25 bp, Artificial
  probe
  misc_feature (1)..(25): SEQ ID NO: 6722; WAN024BLK_s_at; Start 4; Stop 28
ccagaaaatggtataataggacgaa

SEQ ID NO: 84790 - DNA, 25 bp, Artificial
  probe
  misc_feature (1)..(25): SEQ ID NO: 6722; WAN024BLK_s_at; Start 23; Stop 47
gacgaaagtgttttgatagggagga

SEQ ID NO: 84791 - DNA, 25 bp, Artificial
  probe
  misc_feature (1)..(25): SEQ ID NO: 6722; WAN024BLK_s_at; Start 15; Stop 39
tataataggacgaaagtgttttgat

SEQ ID NO: 84792 - DNA, 25 bp, Artificial
  probe
  misc_feature (1)..(25): SEQ ID NO: 6722; WAN024BLK_s_at; Start 26; Stop 50
gaaagtgttttgatagggaggatat

SEQ ID NO: 84793 - DNA, 25 bp, Artificial
  probe
  misc_feature (1)..(25): SEQ ID NO: 6722; WAN024BLK_s_at; Start 1; Stop 25
atgccagaaaatggtataataggac

SEQ ID NO: 84794 - DNA, 25 bp, Artificial
  probe
  misc_feature (1)..(25): SEQ ID NO: 6722; WAN024BLK_s_at; Start 2; Stop 26
tgccagaaaatggtataataggacg

SEQ ID NO: 84795 - DNA, 25 bp, Artificial
  probe
  misc_feature (1)..(25): SEQ ID NO: 6722; WAN024BLK_s_at; Start 17; Stop 41
taataggacgaaagtgttttgatag

SEQ ID NO: 84796 - DNA, 25 bp, Artificial
  probe
  misc_feature (1)..(25): SEQ ID NO: 6722; WAN024BLK_s_at; Start 14; Stop 38
gtataataggacgaaagtgttttga

SEQ ID NO: 84797 - DNA, 25 bp, Artificial
  probe
  misc_feature (1)..(25): SEQ ID NO: 6722; WAN024BLK_s_at; Start 16; Stop 40
ataataggacgaaagtgttttgata

SEQ ID NO: 84798 - DNA, 25 bp, Artificial
  probe
  misc_feature (1)..(25): SEQ ID NO: 6722; WAN024BLK_s_at; Start 10; Stop 34
aatggtataataggacgaaagtgtt

SEQ ID NO: 84799 - DNA, 25 bp, Artificial
  probe
  misc_feature (1)..(25): SEQ ID NO: 6722; WAN024BLK_s_at; Start 20; Stop 44
taggacgaaagtgttttgataggga

SEQ ID NO: 84800 - DNA, 25 bp, Artificial
  probe
  misc_feature (1)..(25): SEQ ID NO: 6722; WAN024BLK_s_at; Start 19; Stop 43
ataggacgaaagtgttttgataggg

SEQ ID NO: 84801 - DNA, 25 bp, Artificial
  probe
  misc_feature (1)..(25): SEQ ID NO: 6722; WAN024BLK_s_at; Start 18; Stop 42
aataggacgaaagtgttttgatagg

SEQ ID NO: 84802 - DNA, 25 bp, Artificial
  probe
  misc_feature (1)..(25): SEQ ID NO: 6722; WAN024BLK_s_at; Start 6; Stop 30
agaaaatggtataataggacgaaag

SEQ ID NO: 84803 - DNA, 25 bp, Artificial
  probe
  misc_feature (1)..(25): SEQ ID NO: 6722; WAN024BLK_s_at; Start 11; Stop 35
atggtataataggacgaaagtgttt

SEQ ID NO: 84804 - DNA, 25 bp, Artificial
  probe
  misc_feature (1)..(25): SEQ ID NO: 6722; WAN024BLK_s_at; Start 9; Stop 33
aaatggtataataggacgaaagtgt

SEQ ID NO: 84805 - DNA, 25 bp, Artificial
  probe
  misc_feature (1)..(25): SEQ ID NO: 6722; WAN024BLK_s_at; Start 8; Stop 32
aaaatggtataataggacgaaagtg

SEQ ID NO: 84806 - DNA, 25 bp, Artificial
  probe
  misc_feature (1)..(25): SEQ ID NO: 6722; WAN024BLK_s_at; Start 5; Stop 29
cagaaaatggtataataggacgaaa

SEQ ID NO: 84807 - DNA, 25 bp, Artificial
  probe
  misc_feature (1)..(25): SEQ ID NO: 6722; WAN024BLK_s_at; Start 25; Stop 49
cgaaagtgttttgatagggaggata

SEQ ID NO: 84808 - DNA, 25 bp, Artificial
  probe
  misc_feature (1)..(25): SEQ ID NO: 6722; WAN024BLK_s_at; Start 24; Stop 48
acgaaagtgttttgatagggaggat

SEQ ID NO: 84809 - DNA, 25 bp, Artificial
  probe
  misc_feature (1)..(25): SEQ ID NO: 6722; WAN024BLK_s_at; Start 21; Stop 45
aggacgaaagtgttttgatagggag

SEQ ID NO: 84810 - DNA, 25 bp, Artificial
  probe
  misc_feature (1)..(25): SEQ ID NO: 6722; WAN024BLK_s_at; Start 3; Stop 27
gccagaaaatggtataataggacga

SEQ ID NO: 84811 - DNA, 25 bp, Artificial
  probe
  misc_feature (1)..(25): SEQ ID NO: 7677; WAN024BLL_at; Start 23; Stop 47
gtttgtcttggcatccacattttcc

SEQ ID NO: 84812 - DNA, 25 bp, Artificial
  probe
  misc_feature (1)..(25): SEQ ID NO: 7677; WAN024BLL_at; Start 18; Stop 42
tactggtttgtcttggcatccacat

SEQ ID NO: 84813 - DNA, 25 bp, Artificial
  probe
  misc_feature (1)..(25): SEQ ID NO: 7677; WAN024BLL_at; Start 16; Stop 40
gttactggtttgtcttggcatccac

SEQ ID NO: 84814 - DNA, 25 bp, Artificial
  probe
  misc_feature (1)..(25): SEQ ID NO: 7677; WAN024BLL_at; Start 86; Stop 110
catctggattagtgattgtaacaac

SEQ ID NO: 84815 - DNA, 25 bp, Artificial
  probe
  misc_feature (1)..(25): SEQ ID NO: 7677; WAN024BLL_at; Start 5; Stop 29
catttgatggtgttactggtttgtc

SEQ ID NO: 84816 - DNA, 25 bp, Artificial
  probe
  misc_feature (1)..(25): SEQ ID NO: 7677; WAN024BLL_at; Start 53; Stop 77
taccgtctttaatcaccatttctgt

SEQ ID NO: 84817 - DNA, 25 bp, Artificial
  probe
  misc_feature (1)..(25): SEQ ID NO: 7677; WAN024BLL_at; Start 13; Stop 37
ggtgttactggtttgtcttggcatc

SEQ ID NO: 84818 - DNA, 25 bp, Artificial
  probe
  misc_feature (1)..(25): SEQ ID NO: 7677; WAN024BLL_at; Start 19; Stop 43
actggtttgtcttggcatccacatt

SEQ ID NO: 84819 - DNA, 25 bp, Artificial
  probe
  misc_feature (1)..(25): SEQ ID NO: 7677; WAN024BLL_at; Start 71; Stop 95
tttctgtcttacttccatctggatt

SEQ ID NO: 84820 - DNA, 25 bp, Artificial
  probe
  misc_feature (1)..(25): SEQ ID NO: 7677; WAN024BLL_at; Start 52; Stop 76
ttaccgtctttaatcaccatttctg

SEQ ID NO: 84821 - DNA, 25 bp, Artificial
  probe
  misc_feature (1)..(25): SEQ ID NO: 7677; WAN024BLL_at; Start 57; Stop 81
gtctttaatcaccatttctgtctta

SEQ ID NO: 84822 - DNA, 25 bp, Artificial
  probe
  misc_feature (1)..(25): SEQ ID NO: 7677; WAN024BLL_at; Start 10; Stop 34
gatggtgttactggtttgtcttggc

SEQ ID NO: 84823 - DNA, 25 bp, Artificial
  probe
  misc_feature (1)..(25): SEQ ID NO: 7677; WAN024BLL_at; Start 62; Stop 86
taatcaccatttctgtcttacttcc

SEQ ID NO: 84824 - DNA, 25 bp, Artificial
  probe
  misc_feature (1)..(25): SEQ ID NO: 7677; WAN024BLL_at; Start 46; Stop 70
ccatctttaccgtctttaatcacca

SEQ ID NO: 84825 - DNA, 25 bp, Artificial
  probe
  misc_feature (1)..(25): SEQ ID NO: 7677; WAN024BLL_at; Start 73; Stop 97
tctgtcttacttccatctggattag

SEQ ID NO: 84826 - DNA, 25 bp, Artificial
  probe
  misc_feature (1)..(25): SEQ ID NO: 7677; WAN024BLL_at; Start 87; Stop 111
atctggattagtgattgtaacaacg

SEQ ID NO: 84827 - DNA, 25 bp, Artificial
  probe
  misc_feature (1)..(25): SEQ ID NO: 7677; WAN024BLL_at; Start 28; Stop 52
tcttggcatccacattttccatctt

SEQ ID NO: 84828 - DNA, 25 bp, Artificial
  probe
  misc_feature (1)..(25): SEQ ID NO: 7677; WAN024BLL_at; Start 26; Stop 50
tgtcttggcatccacattttccatc

SEQ ID NO: 84829 - DNA, 25 bp, Artificial
  probe
  misc_feature (1)..(25): SEQ ID NO: 7677; WAN024BLL_at; Start 20; Stop 44
ctggtttgtcttggcatccacattt

SEQ ID NO: 84830 - DNA, 25 bp, Artificial
  probe
  misc_feature (1)..(25): SEQ ID NO: 7677; WAN024BLL_at; Start 17; Stop 41
ttactggtttgtcttggcatccaca

SEQ ID NO: 84831 - DNA, 25 bp, Artificial
  probe
  misc_feature (1)..(25): SEQ ID NO: 7677; WAN024BLL_at; Start 69; Stop 93
catttctgtcttacttccatctgga

SEQ ID NO: 84832 - DNA, 25 bp, Artificial
  probe
  misc_feature (1)..(25): SEQ ID NO: 7677; WAN024BLL_at; Start 85; Stop 109
ccatctggattagtgattgtaacaa

SEQ ID NO: 84833 - DNA, 25 bp, Artificial
  probe
  misc_feature (1)..(25): SEQ ID NO: 7677; WAN024BLL_at; Start 15; Stop 39
tgttactggtttgtcttggcatcca

SEQ ID NO: 84834 - DNA, 25 bp, Artificial
  probe
  misc_feature (1)..(25): SEQ ID NO: 7677; WAN024BLL_at; Start 55; Stop 79
ccgtctttaatcaccatttctgtct

SEQ ID NO: 84835 - DNA, 25 bp, Artificial
  probe
  misc_feature (1)..(25): SEQ ID NO: 7677; WAN024BLL_at; Start 24; Stop 48
tttgtcttggcatccacattttcca

SEQ ID NO: 84836 - DNA, 25 bp, Artificial
  probe
  misc_feature (1)..(25): SEQ ID NO: 7677; WAN024BLL_at; Start 84; Stop 108
tccatctggattagtgattgtaaca

SEQ ID NO: 84837 - DNA, 25 bp, Artificial
  probe
  misc_feature (1)..(25): SEQ ID NO: 7677; WAN024BLL_at; Start 22; Stop 46
ggtttgtcttggcatccacattttc

SEQ ID NO: 84838 - DNA, 25 bp, Artificial
  probe
  misc_feature (1)..(25): SEQ ID NO: 7677; WAN024BLL_at; Start 77; Stop 101
tcttacttccatctggattagtgat

SEQ ID NO: 84839 - DNA, 25 bp, Artificial
  probe
  misc_feature (1)..(25): SEQ ID NO: 7677; WAN024BLL_at; Start 75; Stop 99
tgtcttacttccatctggattagtg

SEQ ID NO: 84840 - DNA, 25 bp, Artificial
  probe
  misc_feature (1)..(25): SEQ ID NO: 7677; WAN024BLL_at; Start 14; Stop 38
gtgttactggtttgtcttggcatcc

SEQ ID NO: 84841 - DNA, 25 bp, Artificial
  probe
  misc_feature (1)..(25): SEQ ID NO: 7677; WAN024BLL_at; Start 2; Stop 26
tgtcatttgatggtgttactggttt

SEQ ID NO: 84842 - DNA, 25 bp, Artificial
  probe
  misc_feature (1)..(25): SEQ ID NO: 7677; WAN024BLL_at; Start 11; Stop 35
atggtgttactggtttgtcttggca

SEQ ID NO: 84843 - DNA, 25 bp, Artificial
  probe
  misc_feature (1)..(25): SEQ ID NO: 7677; WAN024BLL_at; Start 31; Stop 55
tggcatccacattttccatctttac

SEQ ID NO: 84844 - DNA, 25 bp, Artificial
  probe
  misc_feature (1)..(25): SEQ ID NO: 7677; WAN024BLL_at; Start 81; Stop 105
acttccatctggattagtgattgta

SEQ ID NO: 84845 - DNA, 25 bp, Artificial
  probe
  misc_feature (1)..(25): SEQ ID NO: 7308; WAN024BLM_at; Start 24; Stop 48
gattttcagacaaacatcagccatc

SEQ ID NO: 84846 - DNA, 25 bp, Artificial
  probe
  misc_feature (1)..(25): SEQ ID NO: 7308; WAN024BLM_at; Start 83; Stop 107
tagcagtcttttccatcataggaaa

SEQ ID NO: 84847 - DNA, 25 bp, Artificial
  probe
  misc_feature (1)..(25): SEQ ID NO: 7308; WAN024BLM_at; Start 53; Stop 77
aaaaccttgagcgttaccactcaag

SEQ ID NO: 84848 - DNA, 25 bp, Artificial
  probe
  misc_feature (1)..(25): SEQ ID NO: 7308; WAN024BLM_at; Start 17; Stop 41
caatcaagattttcagacaaacatc

SEQ ID NO: 84849 - DNA, 25 bp, Artificial
  probe
  misc_feature (1)..(25): SEQ ID NO: 7308; WAN024BLM_at; Start 67; Stop 91
taccactcaaggtttttagcagtct

SEQ ID NO: 84850 - DNA, 25 bp, Artificial
  probe
  misc_feature (1)..(25): SEQ ID NO: 7308; WAN024BLM_at; Start 21; Stop 45
caagattttcagacaaacatcagcc

SEQ ID NO: 84851 - DNA, 25 bp, Artificial
  probe
  misc_feature (1)..(25): SEQ ID NO: 7308; WAN024BLM_at; Start 80; Stop 104
ttttagcagtcttttccatcatagg

SEQ ID NO: 84852 - DNA, 25 bp, Artificial
  probe
  misc_feature (1)..(25): SEQ ID NO: 7308; WAN024BLM_at; Start 10; Stop 34
tatttctcaatcaagattttcagac

SEQ ID NO: 84853 - DNA, 25 bp, Artificial
  probe
  misc_feature (1)..(25): SEQ ID NO: 7308; WAN024BLM_at; Start 76; Stop 100
aggtttttagcagtcttttccatca

SEQ ID NO: 84854 - DNA, 25 bp, Artificial
  probe
  misc_feature (1)..(25): SEQ ID NO: 7308; WAN024BLM_at; Start 31; Stop 55
agacaaacatcagccatccaaaaaa

SEQ ID NO: 84855 - DNA, 25 bp, Artificial
  probe
  misc_feature (1)..(25): SEQ ID NO: 7308; WAN024BLM_at; Start 77; Stop 101
ggtttttagcagtcttttccatcat

SEQ ID NO: 84856 - DNA, 25 bp, Artificial
  probe
  misc_feature (1)..(25): SEQ ID NO: 7308; WAN024BLM_at; Start 1; Stop 25
gtggctttttatttctcaatcaaga

SEQ ID NO: 84857 - DNA, 25 bp, Artificial
  probe
  misc_feature (1)..(25): SEQ ID NO: 7308; WAN024BLM_at; Start 26; Stop 50
ttttcagacaaacatcagccatcca

SEQ ID NO: 84858 - DNA, 25 bp, Artificial
  probe
  misc_feature (1)..(25): SEQ ID NO: 7308; WAN024BLM_at; Start 73; Stop 97
tcaaggtttttagcagtcttttcca

SEQ ID NO: 84859 - DNA, 25 bp, Artificial
  probe
  misc_feature (1)..(25): SEQ ID NO: 7308; WAN024BLM_at; Start 86; Stop 110
cagtcttttccatcataggaaaatc

SEQ ID NO: 84860 - DNA, 25 bp, Artificial
  probe
  misc_feature (1)..(25): SEQ ID NO: 7308; WAN024BLM_at; Start 30; Stop 54
cagacaaacatcagccatccaaaaa

SEQ ID NO: 84861 - DNA, 25 bp, Artificial
  probe
  misc_feature (1)..(25): SEQ ID NO: 7308; WAN024BLM_at; Start 54; Stop 78
aaaccttgagcgttaccactcaagg

SEQ ID NO: 84862 - DNA, 25 bp, Artificial
  probe
  misc_feature (1)..(25): SEQ ID NO: 7308; WAN024BLM_at; Start 15; Stop 39
ctcaatcaagattttcagacaaaca

SEQ ID NO: 84863 - DNA, 25 bp, Artificial
  probe
  misc_feature (1)..(25): SEQ ID NO: 7308; WAN024BLM_at; Start 29; Stop 53
tcagacaaacatcagccatccaaaa

SEQ ID NO: 84864 - DNA, 25 bp, Artificial
  probe
  misc_feature (1)..(25): SEQ ID NO: 7308; WAN024BLM_at; Start 74; Stop 98
caaggtttttagcagtcttttccat

SEQ ID NO: 84865 - DNA, 25 bp, Artificial
  probe
  misc_feature (1)..(25): SEQ ID NO: 7308; WAN024BLM_at; Start 60; Stop 84
tgagcgttaccactcaaggttttta

SEQ ID NO: 84866 - DNA, 25 bp, Artificial
  probe
  misc_feature (1)..(25): SEQ ID NO: 7308; WAN024BLM_at; Start 69; Stop 93
ccactcaaggtttttagcagtcttt

SEQ ID NO: 84867 - DNA, 25 bp, Artificial
  probe
  misc_feature (1)..(25): SEQ ID NO: 7308; WAN024BLM_at; Start 81; Stop 105
tttagcagtcttttccatcatagga

SEQ ID NO: 84868 - DNA, 25 bp, Artificial
  probe
  misc_feature (1)..(25): SEQ ID NO: 7308; WAN024BLM_at; Start 64; Stop 88
cgttaccactcaaggtttttagcag

SEQ ID NO: 84869 - DNA, 25 bp, Artificial
  probe
  misc_feature (1)..(25): SEQ ID NO: 7308; WAN024BLM_at; Start 27; Stop 51
tttcagacaaacatcagccatccaa

SEQ ID NO: 84870 - DNA, 25 bp, Artificial
  probe
  misc_feature (1)..(25): SEQ ID NO: 7308; WAN024BLM_at; Start 3; Stop 27
ggctttttatttctcaatcaagatt

SEQ ID NO: 84871 - DNA, 25 bp, Artificial
  probe
  misc_feature (1)..(25): SEQ ID NO: 7308; WAN024BLM_at; Start 20; Stop 44
tcaagattttcagacaaacatcagc

SEQ ID NO: 84872 - DNA, 25 bp, Artificial
  probe
  misc_feature (1)..(25): SEQ ID NO: 7308; WAN024BLM_at; Start 66; Stop 90
ttaccactcaaggtttttagcagtc

SEQ ID NO: 84873 - DNA, 25 bp, Artificial
  probe
  misc_feature (1)..(25): SEQ ID NO: 7308; WAN024BLM_at; Start 90; Stop 114
cttttccatcataggaaaatcattc

SEQ ID NO: 84874 - DNA, 25 bp, Artificial
  probe
  misc_feature (1)..(25): SEQ ID NO: 7308; WAN024BLM_at; Start 28; Stop 52
ttcagacaaacatcagccatccaaa

SEQ ID NO: 84875 - DNA, 25 bp, Artificial
  probe
  misc_feature (1)..(25): SEQ ID NO: 7308; WAN024BLM_at; Start 70; Stop 94
cactcaaggtttttagcagtctttt

SEQ ID NO: 84876 - DNA, 25 bp, Artificial
  probe
  misc_feature (1)..(25): SEQ ID NO: 7308; WAN024BLM_at; Start 22; Stop 46
aagattttcagacaaacatcagcca

SEQ ID NO: 84877 - DNA, 25 bp, Artificial
  probe
  misc_feature (1)..(25): SEQ ID NO: 7308; WAN024BLM_at; Start 40; Stop 64
tcagccatccaaaaaaaccttgagc

SEQ ID NO: 84878 - DNA, 25 bp, Artificial
  probe
  misc_feature (1)..(25): SEQ ID NO: 7308; WAN024BLM_at; Start 63; Stop 87
gcgttaccactcaaggtttttagca

SEQ ID NO: 84879 - DNA, 25 bp, Artificial
  probe
  misc_feature (1)..(25): SEQ ID NO: 7441; WAN024BLN_at; Start 100; Stop 124
ttagaaaggttttcatccacaatta

SEQ ID NO: 84880 - DNA, 25 bp, Artificial
  probe
  misc_feature (1)..(25): SEQ ID NO: 7441; WAN024BLN_at; Start 97; Stop 121
gtattagaaaggttttcatccacaa

SEQ ID NO: 84881 - DNA, 25 bp, Artificial
  probe
  misc_feature (1)..(25): SEQ ID NO: 7441; WAN024BLN_at; Start 72; Stop 96
agatactatttttatgctatttgag

SEQ ID NO: 84882 - DNA, 25 bp, Artificial
  probe
  misc_feature (1)..(25): SEQ ID NO: 7441; WAN024BLN_at; Start 120; Stop 144
aattaaagccaagcccctcattctt

SEQ ID NO: 84883 - DNA, 25 bp, Artificial
  probe
  misc_feature (1)..(25): SEQ ID NO: 7441; WAN024BLN_at; Start 119; Stop 143
caattaaagccaagcccctcattct

SEQ ID NO: 84884 - DNA, 25 bp, Artificial
  probe
  misc_feature (1)..(25): SEQ ID NO: 7441; WAN024BLN_at; Start 113; Stop 137
catccacaattaaagccaagcccct

SEQ ID NO: 84885 - DNA, 25 bp, Artificial
  probe
  misc_feature (1)..(25): SEQ ID NO: 7441; WAN024BLN_at; Start 107; Stop 131
ggttttcatccacaattaaagccaa

SEQ ID NO: 84886 - DNA, 25 bp, Artificial
  probe
  misc_feature (1)..(25): SEQ ID NO: 7441; WAN024BLN_at; Start 112; Stop 136
tcatccacaattaaagccaagcccc

SEQ ID NO: 84887 - DNA, 25 bp, Artificial
  probe
  misc_feature (1)..(25): SEQ ID NO: 7441; WAN024BLN_at; Start 74; Stop 98
atactatttttatgctatttgaggt

SEQ ID NO: 84888 - DNA, 25 bp, Artificial
  probe
  misc_feature (1)..(25): SEQ ID NO: 7441; WAN024BLN_at; Start 118; Stop 142
acaattaaagccaagcccctcattc

SEQ ID NO: 84889 - DNA, 25 bp, Artificial
  probe
  misc_feature (1)..(25): SEQ ID NO: 7441; WAN024BLN_at; Start 2; Stop 26
tgacacttttatgtagaaatattac

SEQ ID NO: 84890 - DNA, 25 bp, Artificial
  probe
  misc_feature (1)..(25): SEQ ID NO: 7441; WAN024BLN_at; Start 4; Stop 28
acacttttatgtagaaatattacaa

SEQ ID NO: 84891 - DNA, 25 bp, Artificial
  probe
  misc_feature (1)..(25): SEQ ID NO: 7441; WAN024BLN_at; Start 109; Stop 133
ttttcatccacaattaaagccaagc

SEQ ID NO: 84892 - DNA, 25 bp, Artificial
  probe
  misc_feature (1)..(25): SEQ ID NO: 7441; WAN024BLN_at; Start 111; Stop 135
ttcatccacaattaaagccaagccc

SEQ ID NO: 84893 - DNA, 25 bp, Artificial
  probe
  misc_feature (1)..(25): SEQ ID NO: 7441; WAN024BLN_at; Start 108; Stop 132
gttttcatccacaattaaagccaag

SEQ ID NO: 84894 - DNA, 25 bp, Artificial
  probe
  misc_feature (1)..(25): SEQ ID NO: 7441; WAN024BLN_at; Start 85; Stop 109
atgctatttgaggtattagaaaggt

SEQ ID NO: 84895 - DNA, 25 bp, Artificial
  probe
  misc_feature (1)..(25): SEQ ID NO: 7441; WAN024BLN_at; Start 117; Stop 141
cacaattaaagccaagcccctcatt

SEQ ID NO: 84896 - DNA, 25 bp, Artificial
  probe
  misc_feature (1)..(25): SEQ ID NO: 7441; WAN024BLN_at; Start 99; Stop 123
attagaaaggttttcatccacaatt

SEQ ID NO: 84897 - DNA, 25 bp, Artificial
  probe
  misc_feature (1)..(25): SEQ ID NO: 7441; WAN024BLN_at; Start 92; Stop 116
ttgaggtattagaaaggttttcatc

SEQ ID NO: 84898 - DNA, 25 bp, Artificial
  probe
  misc_feature (1)..(25): SEQ ID NO: 7441; WAN024BLN_at; Start 3; Stop 27
gacacttttatgtagaaatattaca

SEQ ID NO: 84899 - DNA, 25 bp, Artificial
  probe
  misc_feature (1)..(25): SEQ ID NO: 7441; WAN024BLN_at; Start 98; Stop 122
tattagaaaggttttcatccacaat

SEQ ID NO: 84900 - DNA, 25 bp, Artificial
  probe
  misc_feature (1)..(25): SEQ ID NO: 7441; WAN024BLN_at; Start 101; Stop 125
tagaaaggttttcatccacaattaa

SEQ ID NO: 84901 - DNA, 25 bp, Artificial
  probe
  misc_feature (1)..(25): SEQ ID NO: 7441; WAN024BLN_at; Start 5; Stop 29
cacttttatgtagaaatattacaaa

SEQ ID NO: 84902 - DNA, 25 bp, Artificial
  probe
  misc_feature (1)..(25): SEQ ID NO: 7441; WAN024BLN_at; Start 110; Stop 134
tttcatccacaattaaagccaagcc

SEQ ID NO: 84903 - DNA, 25 bp, Artificial
  probe
  misc_feature (1)..(25): SEQ ID NO: 7441; WAN024BLN_at; Start 94; Stop 118
gaggtattagaaaggttttcatcca

SEQ ID NO: 84904 - DNA, 25 bp, Artificial
  probe
  misc_feature (1)..(25): SEQ ID NO: 7441; WAN024BLN_at; Start 55; Stop 79
gtgttttttgtcataaaagatacta

SEQ ID NO: 84905 - DNA, 25 bp, Artificial
  probe
  misc_feature (1)..(25): SEQ ID NO: 7441; WAN024BLN_at; Start 84; Stop 108
tatgctatttgaggtattagaaagg

SEQ ID NO: 84906 - DNA, 25 bp, Artificial
  probe
  misc_feature (1)..(25): SEQ ID NO: 7441; WAN024BLN_at; Start 86; Stop 110
tgctatttgaggtattagaaaggtt

SEQ ID NO: 84907 - DNA, 25 bp, Artificial
  probe
  misc_feature (1)..(25): SEQ ID NO: 7441; WAN024BLN_at; Start 76; Stop 100
actatttttatgctatttgaggtat

SEQ ID NO: 84908 - DNA, 25 bp, Artificial
  probe
  misc_feature (1)..(25): SEQ ID NO: 7441; WAN024BLN_at; Start 56; Stop 80
tgttttttgtcataaaagatactat

SEQ ID NO: 84909 - DNA, 25 bp, Artificial
  probe
  misc_feature (1)..(25): SEQ ID NO: 7441; WAN024BLN_at; Start 106; Stop 130
aggttttcatccacaattaaagcca

SEQ ID NO: 84910 - DNA, 25 bp, Artificial
  probe
  misc_feature (1)..(25): SEQ ID NO: 7441; WAN024BLN_at; Start 96; Stop 120
ggtattagaaaggttttcatccaca

SEQ ID NO: 84911 - DNA, 25 bp, Artificial
  probe
  misc_feature (1)..(25): SEQ ID NO: 7441; WAN024BLN_at; Start 75; Stop 99
tactatttttatgctatttgaggta

SEQ ID NO: 84912 - DNA, 25 bp, Artificial
  probe
  misc_feature (1)..(25): SEQ ID NO: 7441; WAN024BLN_at; Start 93; Stop 117
tgaggtattagaaaggttttcatcc

SEQ ID NO: 84913 - DNA, 25 bp, Artificial
  probe
  misc_feature (1)..(25): SEQ ID NO: 7053; WAN024BLO_at; Start 65; Stop 89
ggagaaaaacatggctaagtcaaac

SEQ ID NO: 84914 - DNA, 25 bp, Artificial
  probe
  misc_feature (1)..(25): SEQ ID NO: 7053; WAN024BLO_at; Start 61; Stop 85
aataggagaaaaacatggctaagtc

SEQ ID NO: 84915 - DNA, 25 bp, Artificial
  probe
  misc_feature (1)..(25): SEQ ID NO: 7053; WAN024BLO_at; Start 32; Stop 56
cgtatacaattaaatattataaaga

SEQ ID NO: 84916 - DNA, 25 bp, Artificial
  probe
  misc_feature (1)..(25): SEQ ID NO: 7053; WAN024BLO_at; Start 55; Stop 79
gaagaaaataggagaaaaacatggc

SEQ ID NO: 84917 - DNA, 25 bp, Artificial
  probe
  misc_feature (1)..(25): SEQ ID NO: 7053; WAN024BLO_at; Start 46; Stop 70
tattataaagaagaaaataggagaa

SEQ ID NO: 84918 - DNA, 25 bp, Artificial
  probe
  misc_feature (1)..(25): SEQ ID NO: 7053; WAN024BLO_at; Start 64; Stop 88
aggagaaaaacatggctaagtcaaa

SEQ ID NO: 84919 - DNA, 25 bp, Artificial
  probe
  misc_feature (1)..(25): SEQ ID NO: 7053; WAN024BLO_at; Start 59; Stop 83
aaaataggagaaaaacatggctaag

SEQ ID NO: 84920 - DNA, 25 bp, Artificial
  probe
  misc_feature (1)..(25): SEQ ID NO: 7053; WAN024BLO_at; Start 63; Stop 87
taggagaaaaacatggctaagtcaa

SEQ ID NO: 84921 - DNA, 25 bp, Artificial
  probe
  misc_feature (1)..(25): SEQ ID NO: 7053; WAN024BLO_at; Start 60; Stop 84
aaataggagaaaaacatggctaagt

SEQ ID NO: 84922 - DNA, 25 bp, Artificial
  probe
  misc_feature (1)..(25): SEQ ID NO: 7053; WAN024BLO_at; Start 53; Stop 77
aagaagaaaataggagaaaaacatg

SEQ ID NO: 84923 - DNA, 25 bp, Artificial
  probe
  misc_feature (1)..(25): SEQ ID NO: 7053; WAN024BLO_at; Start 54; Stop 78
agaagaaaataggagaaaaacatgg

SEQ ID NO: 84924 - DNA, 25 bp, Artificial
  probe
  misc_feature (1)..(25): SEQ ID NO: 7053; WAN024BLO_at; Start 56; Stop 80
aagaaaataggagaaaaacatggct

SEQ ID NO: 84925 - DNA, 25 bp, Artificial
  probe
  misc_feature (1)..(25): SEQ ID NO: 7053; WAN024BLO_at; Start 58; Stop 82
gaaaataggagaaaaacatggctaa

SEQ ID NO: 84926 - DNA, 25 bp, Artificial
  probe
  misc_feature (1)..(25): SEQ ID NO: 7053; WAN024BLO_at; Start 57; Stop 81
agaaaataggagaaaaacatggcta

SEQ ID NO: 84927 - DNA, 25 bp, Artificial
  probe
  misc_feature (1)..(25): SEQ ID NO: 7053; WAN024BLO_at; Start 62; Stop 86
ataggagaaaaacatggctaagtca

SEQ ID NO: 84928 - DNA, 25 bp, Artificial
  probe
  misc_feature (1)..(25): SEQ ID NO: 7421; WAN024BLP_at; Start 30; Stop 54
tattatttattgccttttaagctgg

SEQ ID NO: 84929 - DNA, 25 bp, Artificial
  probe
  misc_feature (1)..(25): SEQ ID NO: 7421; WAN024BLP_at; Start 29; Stop 53
ctattatttattgccttttaagctg

SEQ ID NO: 84930 - DNA, 25 bp, Artificial
  probe
  misc_feature (1)..(25): SEQ ID NO: 7421; WAN024BLP_at; Start 8; Stop 32
gtcatagcttttctctcttttctat

SEQ ID NO: 84931 - DNA, 25 bp, Artificial
  probe
  misc_feature (1)..(25): SEQ ID NO: 7421; WAN024BLP_at; Start 27; Stop 51
ttctattatttattgccttttaagc

SEQ ID NO: 84932 - DNA, 25 bp, Artificial
  probe
  misc_feature (1)..(25): SEQ ID NO: 7421; WAN024BLP_at; Start 11; Stop 35
atagcttttctctcttttctattat

SEQ ID NO: 84933 - DNA, 25 bp, Artificial
  probe
  misc_feature (1)..(25): SEQ ID NO: 7421; WAN024BLP_at; Start 28; Stop 52
tctattatttattgccttttaagct

SEQ ID NO: 84934 - DNA, 25 bp, Artificial
  probe
  misc_feature (1)..(25): SEQ ID NO: 7421; WAN024BLP_at; Start 9; Stop 33
tcatagcttttctctcttttctatt

SEQ ID NO: 84935 - DNA, 25 bp, Artificial
  probe
  misc_feature (1)..(25): SEQ ID NO: 7421; WAN024BLP_at; Start 31; Stop 55
attatttattgccttttaagctggt

SEQ ID NO: 84936 - DNA, 25 bp, Artificial
  probe
  misc_feature (1)..(25): SEQ ID NO: 7421; WAN024BLP_at; Start 10; Stop 34
catagcttttctctcttttctatta

SEQ ID NO: 84937 - DNA, 25 bp, Artificial
  probe
  misc_feature (1)..(25): SEQ ID NO: 7421; WAN024BLP_at; Start 7; Stop 31
tgtcatagcttttctctcttttcta

SEQ ID NO: 84938 - DNA, 25 bp, Artificial
  probe
  misc_feature (1)..(25): SEQ ID NO: 7421; WAN024BLP_at; Start 37; Stop 61
tattgccttttaagctggtttaaca

SEQ ID NO: 84939 - DNA, 25 bp, Artificial
  probe
  misc_feature (1)..(25): SEQ ID NO: 7421; WAN024BLP_at; Start 4; Stop 28
aactgtcatagcttttctctctttt

SEQ ID NO: 84940 - DNA, 25 bp, Artificial
  probe
  misc_feature (1)..(25): SEQ ID NO: 7421; WAN024BLP_at; Start 5; Stop 29
actgtcatagcttttctctcttttc

SEQ ID NO: 84941 - DNA, 25 bp, Artificial
  probe
  misc_feature (1)..(25): SEQ ID NO: 7421; WAN024BLP_at; Start 12; Stop 36
tagcttttctctcttttctattatt

SEQ ID NO: 84942 - DNA, 25 bp, Artificial
  probe
  misc_feature (1)..(25): SEQ ID NO: 7421; WAN024BLP_at; Start 1; Stop 25
ttgaactgtcatagcttttctctct

SEQ ID NO: 84943 - DNA, 25 bp, Artificial
  probe
  misc_feature (1)..(25): SEQ ID NO: 7421; WAN024BLP_at; Start 6; Stop 30
ctgtcatagcttttctctcttttct

SEQ ID NO: 84944 - DNA, 25 bp, Artificial
  probe
  misc_feature (1)..(25): SEQ ID NO: 7421; WAN024BLP_at; Start 14; Stop 38
gcttttctctcttttctattattta

SEQ ID NO: 84945 - DNA, 25 bp, Artificial
  probe
  misc_feature (1)..(25): SEQ ID NO: 7421; WAN024BLP_at; Start 2; Stop 26
tgaactgtcatagcttttctctctt

SEQ ID NO: 84946 - DNA, 25 bp, Artificial
  probe
  misc_feature (1)..(25): SEQ ID NO: 7421; WAN024BLP_at; Start 13; Stop 37
agcttttctctcttttctattattt

SEQ ID NO: 84947 - DNA, 25 bp, Artificial
  probe
  misc_feature (1)..(25): SEQ ID NO: 7421; WAN024BLP_at; Start 3; Stop 27
gaactgtcatagcttttctctcttt

SEQ ID NO: 84948 - DNA, 25 bp, Artificial
  probe
  misc_feature (1)..(25): SEQ ID NO: 7089; WAN024BLQ_at; Start 75; Stop 99
ctataattatagaatagggaaccca

SEQ ID NO: 84949 - DNA, 25 bp, Artificial
  probe
  misc_feature (1)..(25): SEQ ID NO: 7089; WAN024BLQ_at; Start 71; Stop 95
catactataattatagaatagggaa

SEQ ID NO: 84950 - DNA, 25 bp, Artificial
  probe
  misc_feature (1)..(25): SEQ ID NO: 7089; WAN024BLQ_at; Start 63; Stop 87
taaattaccatactataattataga

SEQ ID NO: 84951 - DNA, 25 bp, Artificial
  probe
  misc_feature (1)..(25): SEQ ID NO: 7089; WAN024BLQ_at; Start 38; Stop 62
tattattttcatgtatggatataaa

SEQ ID NO: 84952 - DNA, 25 bp, Artificial
  probe
  misc_feature (1)..(25): SEQ ID NO: 7089; WAN024BLQ_at; Start 50; Stop 74
gtatggatataaataaattaccata

SEQ ID NO: 84953 - DNA, 25 bp, Artificial
  probe
  misc_feature (1)..(25): SEQ ID NO: 7089; WAN024BLQ_at; Start 54; Stop 78
ggatataaataaattaccatactat

SEQ ID NO: 84954 - DNA, 25 bp, Artificial
  probe
  misc_feature (1)..(25): SEQ ID NO: 7089; WAN024BLQ_at; Start 47; Stop 71
catgtatggatataaataaattacc

SEQ ID NO: 84955 - DNA, 25 bp, Artificial
  probe
  misc_feature (1)..(25): SEQ ID NO: 7089; WAN024BLQ_at; Start 70; Stop 94
ccatactataattatagaataggga

SEQ ID NO: 84956 - DNA, 25 bp, Artificial
  probe
  misc_feature (1)..(25): SEQ ID NO: 7089; WAN024BLQ_at; Start 72; Stop 96
atactataattatagaatagggaac

SEQ ID NO: 84957 - DNA, 25 bp, Artificial
  probe
  misc_feature (1)..(25): SEQ ID NO: 7089; WAN024BLQ_at; Start 67; Stop 91
ttaccatactataattatagaatag

SEQ ID NO: 84958 - DNA, 25 bp, Artificial
  probe
  misc_feature (1)..(25): SEQ ID NO: 7089; WAN024BLQ_at; Start 32; Stop 56
ttcgagtattattttcatgtatgga

SEQ ID NO: 84959 - DNA, 25 bp, Artificial
  probe
  misc_feature (1)..(25): SEQ ID NO: 7089; WAN024BLQ_at; Start 28; Stop 52
tcctttcgagtattattttcatgta

SEQ ID NO: 84960 - DNA, 25 bp, Artificial
  probe
  misc_feature (1)..(25): SEQ ID NO: 7089; WAN024BLQ_at; Start 49; Stop 73
tgtatggatataaataaattaccat

SEQ ID NO: 84961 - DNA, 25 bp, Artificial
  probe
  misc_feature (1)..(25): SEQ ID NO: 7089; WAN024BLQ_at; Start 34; Stop 58
cgagtattattttcatgtatggata

SEQ ID NO: 84962 - DNA, 25 bp, Artificial
  probe
  misc_feature (1)..(25): SEQ ID NO: 7089; WAN024BLQ_at; Start 30; Stop 54
ctttcgagtattattttcatgtatg

SEQ ID NO: 84963 - DNA, 25 bp, Artificial
  probe
  misc_feature (1)..(25): SEQ ID NO: 7089; WAN024BLQ_at; Start 73; Stop 97
tactataattatagaatagggaacc

SEQ ID NO: 84964 - DNA, 25 bp, Artificial
  probe
  misc_feature (1)..(25): SEQ ID NO: 7089; WAN024BLQ_at; Start 64; Stop 88
aaattaccatactataattatagaa

SEQ ID NO: 84965 - DNA, 25 bp, Artificial
  probe
  misc_feature (1)..(25): SEQ ID NO: 7089; WAN024BLQ_at; Start 26; Stop 50
tttcctttcgagtattattttcatg

SEQ ID NO: 84966 - DNA, 25 bp, Artificial
  probe
  misc_feature (1)..(25): SEQ ID NO: 7089; WAN024BLQ_at; Start 48; Stop 72
atgtatggatataaataaattacca

SEQ ID NO: 84967 - DNA, 25 bp, Artificial
  probe
  misc_feature (1)..(25): SEQ ID NO: 7089; WAN024BLQ_at; Start 69; Stop 93
accatactataattatagaataggg

SEQ ID NO: 84968 - DNA, 25 bp, Artificial
  probe
  misc_feature (1)..(25): SEQ ID NO: 7089; WAN024BLQ_at; Start 36; Stop 60
agtattattttcatgtatggatata

SEQ ID NO: 84969 - DNA, 25 bp, Artificial
  probe
  misc_feature (1)..(25): SEQ ID NO: 7089; WAN024BLQ_at; Start 35; Stop 59
gagtattattttcatgtatggatat

SEQ ID NO: 84970 - DNA, 25 bp, Artificial
  probe
  misc_feature (1)..(25): SEQ ID NO: 7089; WAN024BLQ_at; Start 27; Stop 51
ttcctttcgagtattattttcatgt

SEQ ID NO: 84971 - DNA, 25 bp, Artificial
  probe
  misc_feature (1)..(25): SEQ ID NO: 7089; WAN024BLQ_at; Start 37; Stop 61
gtattattttcatgtatggatataa

SEQ ID NO: 84972 - DNA, 25 bp, Artificial
  probe
  misc_feature (1)..(25): SEQ ID NO: 7089; WAN024BLQ_at; Start 51; Stop 75
tatggatataaataaattaccatac

SEQ ID NO: 84973 - DNA, 25 bp, Artificial
  probe
  misc_feature (1)..(25): SEQ ID NO: 7089; WAN024BLQ_at; Start 76; Stop 100
tataattatagaatagggaacccaa

SEQ ID NO: 84974 - DNA, 25 bp, Artificial
  probe
  misc_feature (1)..(25): SEQ ID NO: 7089; WAN024BLQ_at; Start 53; Stop 77
tggatataaataaattaccatacta

SEQ ID NO: 84975 - DNA, 25 bp, Artificial
  probe
  misc_feature (1)..(25): SEQ ID NO: 7089; WAN024BLQ_at; Start 55; Stop 79
gatataaataaattaccatactata

SEQ ID NO: 84976 - DNA, 25 bp, Artificial
  probe
  misc_feature (1)..(25): SEQ ID NO: 7089; WAN024BLQ_at; Start 29; Stop 53
cctttcgagtattattttcatgtat

SEQ ID NO: 84977 - DNA, 25 bp, Artificial
  probe
  misc_feature (1)..(25): SEQ ID NO: 7089; WAN024BLQ_at; Start 52; Stop 76
atggatataaataaattaccatact

SEQ ID NO: 84978 - DNA, 25 bp, Artificial
  probe
  misc_feature (1)..(25): SEQ ID NO: 7089; WAN024BLQ_at; Start 68; Stop 92
taccatactataattatagaatagg

SEQ ID NO: 84979 - DNA, 25 bp, Artificial
  probe
  misc_feature (1)..(25): SEQ ID NO: 7089; WAN024BLQ_at; Start 33; Stop 57
tcgagtattattttcatgtatggat

SEQ ID NO: 84980 - DNA, 25 bp, Artificial
  probe
  misc_feature (1)..(25): SEQ ID NO: 7089; WAN024BLQ_at; Start 57; Stop 81
tataaataaattaccatactataat

SEQ ID NO: 84981 - DNA, 25 bp, Artificial
  probe
  misc_feature (1)..(25): SEQ ID NO: 7089; WAN024BLQ_at; Start 31; Stop 55
tttcgagtattattttcatgtatgg

SEQ ID NO: 84982 - DNA, 25 bp, Artificial
  probe
  misc_feature (1)..(25): SEQ ID NO: 6825; WAN024BLR_at; Start 43; Stop 67
aatcgaaaatatatcagatcgaatc

SEQ ID NO: 84983 - DNA, 25 bp, Artificial
  probe
  misc_feature (1)..(25): SEQ ID NO: 6825; WAN024BLR_at; Start 67; Stop 91
ctagacaagtacattacgattgcta

SEQ ID NO: 84984 - DNA, 25 bp, Artificial
  probe
  misc_feature (1)..(25): SEQ ID NO: 6825; WAN024BLR_at; Start 35; Stop 59
tatcattaaatcgaaaatatatcag

SEQ ID NO: 84985 - DNA, 25 bp, Artificial
  probe
  misc_feature (1)..(25): SEQ ID NO: 6825; WAN024BLR_at; Start 66; Stop 90
tctagacaagtacattacgattgct

SEQ ID NO: 84986 - DNA, 25 bp, Artificial
  probe
  misc_feature (1)..(25): SEQ ID NO: 6825; WAN024BLR_at; Start 19; Stop 43
gaggttttaaataccatatcattaa

SEQ ID NO: 84987 - DNA, 25 bp, Artificial
  probe
  misc_feature (1)..(25): SEQ ID NO: 6825; WAN024BLR_at; Start 46; Stop 70
cgaaaatatatcagatcgaatctag

SEQ ID NO: 84988 - DNA, 25 bp, Artificial
  probe
  misc_feature (1)..(25): SEQ ID NO: 6825; WAN024BLR_at; Start 61; Stop 85
tcgaatctagacaagtacattacga

SEQ ID NO: 84989 - DNA, 25 bp, Artificial
  probe
  misc_feature (1)..(25): SEQ ID NO: 6825; WAN024BLR_at; Start 1; Stop 25
atggagcaagctactttggaggttt

SEQ ID NO: 84990 - DNA, 25 bp, Artificial
  probe
  misc_feature (1)..(25): SEQ ID NO: 6825; WAN024BLR_at; Start 3; Stop 27
ggagcaagctactttggaggtttta

SEQ ID NO: 84991 - DNA, 25 bp, Artificial
  probe
  misc_feature (1)..(25): SEQ ID NO: 6825; WAN024BLR_at; Start 57; Stop 81
cagatcgaatctagacaagtacatt

SEQ ID NO: 84992 - DNA, 25 bp, Artificial
  probe
  misc_feature (1)..(25): SEQ ID NO: 6825; WAN024BLR_at; Start 49; Stop 73
aaatatatcagatcgaatctagaca

SEQ ID NO: 84993 - DNA, 25 bp, Artificial
  probe
  misc_feature (1)..(25): SEQ ID NO: 6825; WAN024BLR_at; Start 4; Stop 28
gagcaagctactttggaggttttaa

SEQ ID NO: 84994 - DNA, 25 bp, Artificial
  probe
  misc_feature (1)..(25): SEQ ID NO: 6825; WAN024BLR_at; Start 59; Stop 83
gatcgaatctagacaagtacattac

SEQ ID NO: 84995 - DNA, 25 bp, Artificial
  probe
  misc_feature (1)..(25): SEQ ID NO: 6825; WAN024BLR_at; Start 65; Stop 89
atctagacaagtacattacgattgc

SEQ ID NO: 84996 - DNA, 25 bp, Artificial
  probe
  misc_feature (1)..(25): SEQ ID NO: 6825; WAN024BLR_at; Start 26; Stop 50
taaataccatatcattaaatcgaaa

SEQ ID NO: 84997 - DNA, 25 bp, Artificial
  probe
  misc_feature (1)..(25): SEQ ID NO: 6825; WAN024BLR_at; Start 74; Stop 98
agtacattacgattgctaaaacatt

SEQ ID NO: 84998 - DNA, 25 bp, Artificial
  probe
  misc_feature (1)..(25): SEQ ID NO: 6825; WAN024BLR_at; Start 63; Stop 87
gaatctagacaagtacattacgatt

SEQ ID NO: 84999 - DNA, 25 bp, Artificial
  probe
  misc_feature (1)..(25): SEQ ID NO: 6825; WAN024BLR_at; Start 60; Stop 84
atcgaatctagacaagtacattacg

SEQ ID NO: 85000 - DNA, 25 bp, Artificial
  probe
  misc_feature (1)..(25): SEQ ID NO: 6825; WAN024BLR_at; Start 2; Stop 26
tggagcaagctactttggaggtttt

SEQ ID NO: 85001 - DNA, 25 bp, Artificial
  probe
  misc_feature (1)..(25): SEQ ID NO: 6825; WAN024BLR_at; Start 78; Stop 102
cattacgattgctaaaacatttgta

SEQ ID NO: 85002 - DNA, 25 bp, Artificial
  probe
  misc_feature (1)..(25): SEQ ID NO: 6825; WAN024BLR_at; Start 18; Stop 42
ggaggttttaaataccatatcatta

SEQ ID NO: 85003 - DNA, 25 bp, Artificial
  probe
  misc_feature (1)..(25): SEQ ID NO: 6825; WAN024BLR_at; Start 52; Stop 76
tatatcagatcgaatctagacaagt

SEQ ID NO: 85004 - DNA, 25 bp, Artificial
  probe
  misc_feature (1)..(25): SEQ ID NO: 6825; WAN024BLR_at; Start 72; Stop 96
caagtacattacgattgctaaaaca

SEQ ID NO: 85005 - DNA, 25 bp, Artificial
  probe
  misc_feature (1)..(25): SEQ ID NO: 6825; WAN024BLR_at; Start 15; Stop 39
tttggaggttttaaataccatatca

SEQ ID NO: 85006 - DNA, 25 bp, Artificial
  probe
  misc_feature (1)..(25): SEQ ID NO: 6825; WAN024BLR_at; Start 70; Stop 94
gacaagtacattacgattgctaaaa

SEQ ID NO: 85007 - DNA, 25 bp, Artificial
  probe
  misc_feature (1)..(25): SEQ ID NO: 6825; WAN024BLR_at; Start 56; Stop 80
tcagatcgaatctagacaagtacat

SEQ ID NO: 85008 - DNA, 25 bp, Artificial
  probe
  misc_feature (1)..(25): SEQ ID NO: 6825; WAN024BLR_at; Start 38; Stop 62
cattaaatcgaaaatatatcagatc

SEQ ID NO: 85009 - DNA, 25 bp, Artificial
  probe
  misc_feature (1)..(25): SEQ ID NO: 6825; WAN024BLR_at; Start 76; Stop 100
tacattacgattgctaaaacatttg

SEQ ID NO: 85010 - DNA, 25 bp, Artificial
  probe
  misc_feature (1)..(25): SEQ ID NO: 6825; WAN024BLR_at; Start 81; Stop 105
tacgattgctaaaacatttgtagaa

SEQ ID NO: 85011 - DNA, 25 bp, Artificial
  probe
  misc_feature (1)..(25): SEQ ID NO: 6825; WAN024BLR_at; Start 80; Stop 104
ttacgattgctaaaacatttgtaga

SEQ ID NO: 85012 - DNA, 25 bp, Artificial
  probe
  misc_feature (1)..(25): SEQ ID NO: 6825; WAN024BLR_at; Start 47; Stop 71
gaaaatatatcagatcgaatctaga

SEQ ID NO: 85013 - DNA, 25 bp, Artificial
  probe
  misc_feature (1)..(25): SEQ ID NO: 6825; WAN024BLR_at; Start 54; Stop 78
tatcagatcgaatctagacaagtac

SEQ ID NO: 85014 - DNA, 25 bp, Artificial
  probe
  misc_feature (1)..(25): SEQ ID NO: 6825; WAN024BLR_at; Start 62; Stop 86
cgaatctagacaagtacattacgat

SEQ ID NO: 85015 - DNA, 25 bp, Artificial
  probe
  misc_feature (1)..(25): SEQ ID NO: 6825; WAN024BLR_at; Start 68; Stop 92
tagacaagtacattacgattgctaa

SEQ ID NO: 85016 - DNA, 25 bp, Artificial
  probe
  misc_feature (1)..(25): SEQ ID NO: 6756; WAN024BLS_at; Start 26; Stop 50
tcttgattatatcacatttgatttt

SEQ ID NO: 85017 - DNA, 25 bp, Artificial
  probe
  misc_feature (1)..(25): SEQ ID NO: 6756; WAN024BLS_at; Start 20; Stop 44
cattcttcttgattatatcacattt

SEQ ID NO: 85018 - DNA, 25 bp, Artificial
  probe
  misc_feature (1)..(25): SEQ ID NO: 6756; WAN024BLS_at; Start 35; Stop 59
tatcacatttgattttaaaattctt

SEQ ID NO: 85019 - DNA, 25 bp, Artificial
  probe
  misc_feature (1)..(25): SEQ ID NO: 6756; WAN024BLS_at; Start 33; Stop 57
tatatcacatttgattttaaaattc

SEQ ID NO: 85020 - DNA, 25 bp, Artificial
  probe
  misc_feature (1)..(25): SEQ ID NO: 6756; WAN024BLS_at; Start 18; Stop 42
aacattcttcttgattatatcacat

SEQ ID NO: 85021 - DNA, 25 bp, Artificial
  probe
  misc_feature (1)..(25): SEQ ID NO: 6756; WAN024BLS_at; Start 25; Stop 49
ttcttgattatatcacatttgattt

SEQ ID NO: 85022 - DNA, 25 bp, Artificial
  probe
  misc_feature (1)..(25): SEQ ID NO: 6756; WAN024BLS_at; Start 22; Stop 46
ttcttcttgattatatcacatttga

SEQ ID NO: 85023 - DNA, 25 bp, Artificial
  probe
  misc_feature (1)..(25): SEQ ID NO: 6756; WAN024BLS_at; Start 24; Stop 48
cttcttgattatatcacatttgatt

SEQ ID NO: 85024 - DNA, 25 bp, Artificial
  probe
  misc_feature (1)..(25): SEQ ID NO: 6756; WAN024BLS_at; Start 21; Stop 45
attcttcttgattatatcacatttg

SEQ ID NO: 85025 - DNA, 25 bp, Artificial
  probe
  misc_feature (1)..(25): SEQ ID NO: 6756; WAN024BLS_at; Start 34; Stop 58
atatcacatttgattttaaaattct

SEQ ID NO: 85026 - DNA, 25 bp, Artificial
  probe
  misc_feature (1)..(25): SEQ ID NO: 6756; WAN024BLS_at; Start 16; Stop 40
ttaacattcttcttgattatatcac

SEQ ID NO: 85027 - DNA, 25 bp, Artificial
  probe
  misc_feature (1)..(25): SEQ ID NO: 6756; WAN024BLS_at; Start 19; Stop 43
acattcttcttgattatatcacatt

SEQ ID NO: 85028 - DNA, 25 bp, Artificial
  probe
  misc_feature (1)..(25): SEQ ID NO: 6756; WAN024BLS_at; Start 39; Stop 63
acatttgattttaaaattcttctat

SEQ ID NO: 85029 - DNA, 25 bp, Artificial
  probe
  misc_feature (1)..(25): SEQ ID NO: 6756; WAN024BLS_at; Start 36; Stop 60
atcacatttgattttaaaattcttc

SEQ ID NO: 85030 - DNA, 25 bp, Artificial
  probe
  misc_feature (1)..(25): SEQ ID NO: 6756; WAN024BLS_at; Start 40; Stop 64
catttgattttaaaattcttctatt

SEQ ID NO: 85031 - DNA, 25 bp, Artificial
  probe
  misc_feature (1)..(25): SEQ ID NO: 6756; WAN024BLS_at; Start 17; Stop 41
taacattcttcttgattatatcaca

SEQ ID NO: 85032 - DNA, 25 bp, Artificial
  probe
  misc_feature (1)..(25): SEQ ID NO: 6756; WAN024BLS_at; Start 23; Stop 47
tcttcttgattatatcacatttgat

SEQ ID NO: 85033 - DNA, 25 bp, Artificial
  probe
  misc_feature (1)..(25): SEQ ID NO: 6756; WAN024BLS_at; Start 37; Stop 61
tcacatttgattttaaaattcttct

SEQ ID NO: 85034 - DNA, 25 bp, Artificial
  probe
  misc_feature (1)..(25): SEQ ID NO: 6756; WAN024BLS_at; Start 38; Stop 62
cacatttgattttaaaattcttcta

SEQ ID NO: 85035 - DNA, 25 bp, Artificial
  probe
  misc_feature (1)..(25): SEQ ID NO: 6756; WAN024BLS_at; Start 27; Stop 51
cttgattatatcacatttgatttta

SEQ ID NO: 85036 - DNA, 25 bp, Artificial
  probe
  misc_feature (1)..(25): SEQ ID NO: 7483; WAN024BLT_at; Start 28; Stop 52
accacgatgtttgttgatcgagtta

SEQ ID NO: 85037 - DNA, 25 bp, Artificial
  probe
  misc_feature (1)..(25): SEQ ID NO: 7483; WAN024BLT_at; Start 45; Stop 69
tcgagttattaacaaaagagctact

SEQ ID NO: 85038 - DNA, 25 bp, Artificial
  probe
  misc_feature (1)..(25): SEQ ID NO: 7483; WAN024BLT_at; Start 49; Stop 73
gttattaacaaaagagctactttga

SEQ ID NO: 85039 - DNA, 25 bp, Artificial
  probe
  misc_feature (1)..(25): SEQ ID NO: 7483; WAN024BLT_at; Start 12; Stop 36
caaagtagatacttgtaccacgatg

SEQ ID NO: 85040 - DNA, 25 bp, Artificial
  probe
  misc_feature (1)..(25): SEQ ID NO: 7483; WAN024BLT_at; Start 11; Stop 35
tcaaagtagatacttgtaccacgat

SEQ ID NO: 85041 - DNA, 25 bp, Artificial
  probe
  misc_feature (1)..(25): SEQ ID NO: 7483; WAN024BLT_at; Start 33; Stop 57
gatgtttgttgatcgagttattaac

SEQ ID NO: 85042 - DNA, 25 bp, Artificial
  probe
  misc_feature (1)..(25): SEQ ID NO: 7483; WAN024BLT_at; Start 57; Stop 81
caaaagagctactttgattttaaag

SEQ ID NO: 85043 - DNA, 25 bp, Artificial
  probe
  misc_feature (1)..(25): SEQ ID NO: 7483; WAN024BLT_at; Start 29; Stop 53
ccacgatgtttgttgatcgagttat

SEQ ID NO: 85044 - DNA, 25 bp, Artificial
  probe
  misc_feature (1)..(25): SEQ ID NO: 7483; WAN024BLT_at; Start 23; Stop 47
cttgtaccacgatgtttgttgatcg

SEQ ID NO: 85045 - DNA, 25 bp, Artificial
  probe
  misc_feature (1)..(25): SEQ ID NO: 7483; WAN024BLT_at; Start 46; Stop 70
cgagttattaacaaaagagctactt

SEQ ID NO: 85046 - DNA, 25 bp, Artificial
  probe
  misc_feature (1)..(25): SEQ ID NO: 7483; WAN024BLT_at; Start 51; Stop 75
tattaacaaaagagctactttgatt

SEQ ID NO: 85047 - DNA, 25 bp, Artificial
  probe
  misc_feature (1)..(25): SEQ ID NO: 7483; WAN024BLT_at; Start 14; Stop 38
aagtagatacttgtaccacgatgtt

SEQ ID NO: 85048 - DNA, 25 bp, Artificial
  probe
  misc_feature (1)..(25): SEQ ID NO: 7483; WAN024BLT_at; Start 30; Stop 54
cacgatgtttgttgatcgagttatt

SEQ ID NO: 85049 - DNA, 25 bp, Artificial
  probe
  misc_feature (1)..(25): SEQ ID NO: 7483; WAN024BLT_at; Start 21; Stop 45
tacttgtaccacgatgtttgttgat

SEQ ID NO: 85050 - DNA, 25 bp, Artificial
  probe
  misc_feature (1)..(25): SEQ ID NO: 7483; WAN024BLT_at; Start 13; Stop 37
aaagtagatacttgtaccacgatgt

SEQ ID NO: 85051 - DNA, 25 bp, Artificial
  probe
  misc_feature (1)..(25): SEQ ID NO: 7483; WAN024BLT_at; Start 20; Stop 44
atacttgtaccacgatgtttgttga

SEQ ID NO: 85052 - DNA, 25 bp, Artificial
  probe
  misc_feature (1)..(25): SEQ ID NO: 7483; WAN024BLT_at; Start 10; Stop 34
ttcaaagtagatacttgtaccacga

SEQ ID NO: 85053 - DNA, 25 bp, Artificial
  probe
  misc_feature (1)..(25): SEQ ID NO: 7483; WAN024BLT_at; Start 24; Stop 48
ttgtaccacgatgtttgttgatcga

SEQ ID NO: 85054 - DNA, 25 bp, Artificial
  probe
  misc_feature (1)..(25): SEQ ID NO: 7483; WAN024BLT_at; Start 2; Stop 26
tgataaatttcaaagtagatacttg

SEQ ID NO: 85055 - DNA, 25 bp, Artificial
  probe
  misc_feature (1)..(25): SEQ ID NO: 7483; WAN024BLT_at; Start 3; Stop 27
gataaatttcaaagtagatacttgt

SEQ ID NO: 85056 - DNA, 25 bp, Artificial
  probe
  misc_feature (1)..(25): SEQ ID NO: 7483; WAN024BLT_at; Start 42; Stop 66
tgatcgagttattaacaaaagagct

SEQ ID NO: 85057 - DNA, 25 bp, Artificial
  probe
  misc_feature (1)..(25): SEQ ID NO: 7483; WAN024BLT_at; Start 43; Stop 67
gatcgagttattaacaaaagagcta

SEQ ID NO: 85058 - DNA, 25 bp, Artificial
  probe
  misc_feature (1)..(25): SEQ ID NO: 7483; WAN024BLT_at; Start 19; Stop 43
gatacttgtaccacgatgtttgttg

SEQ ID NO: 85059 - DNA, 25 bp, Artificial
  probe
  misc_feature (1)..(25): SEQ ID NO: 7483; WAN024BLT_at; Start 16; Stop 40
gtagatacttgtaccacgatgtttg

SEQ ID NO: 85060 - DNA, 25 bp, Artificial
  probe
  misc_feature (1)..(25): SEQ ID NO: 7483; WAN024BLT_at; Start 9; Stop 33
tttcaaagtagatacttgtaccacg

SEQ ID NO: 85061 - DNA, 25 bp, Artificial
  probe
  misc_feature (1)..(25): SEQ ID NO: 7483; WAN024BLT_at; Start 27; Stop 51
taccacgatgtttgttgatcgagtt

SEQ ID NO: 85062 - DNA, 25 bp, Artificial
  probe
  misc_feature (1)..(25): SEQ ID NO: 7483; WAN024BLT_at; Start 22; Stop 46
acttgtaccacgatgtttgttgatc

SEQ ID NO: 85063 - DNA, 25 bp, Artificial
  probe
  misc_feature (1)..(25): SEQ ID NO: 7483; WAN024BLT_at; Start 15; Stop 39
agtagatacttgtaccacgatgttt

SEQ ID NO: 85064 - DNA, 25 bp, Artificial
  probe
  misc_feature (1)..(25): SEQ ID NO: 7483; WAN024BLT_at; Start 26; Stop 50
gtaccacgatgtttgttgatcgagt

SEQ ID NO: 85065 - DNA, 25 bp, Artificial
  probe
  misc_feature (1)..(25): SEQ ID NO: 7483; WAN024BLT_at; Start 18; Stop 42
agatacttgtaccacgatgtttgtt

SEQ ID NO: 85066 - DNA, 25 bp, Artificial
  probe
  misc_feature (1)..(25): SEQ ID NO: 7483; WAN024BLT_at; Start 48; Stop 72
agttattaacaaaagagctactttg

SEQ ID NO: 85067 - DNA, 25 bp, Artificial
  probe
  misc_feature (1)..(25): SEQ ID NO: 7483; WAN024BLT_at; Start 41; Stop 65
ttgatcgagttattaacaaaagagc

SEQ ID NO: 85068 - DNA, 25 bp, Artificial
  probe
  misc_feature (1)..(25): SEQ ID NO: 7483; WAN024BLT_at; Start 17; Stop 41
tagatacttgtaccacgatgtttgt

SEQ ID NO: 85069 - DNA, 25 bp, Artificial
  probe
  misc_feature (1)..(25): SEQ ID NO: 7483; WAN024BLT_at; Start 25; Stop 49
tgtaccacgatgtttgttgatcgag

SEQ ID NO: 85070 - DNA, 25 bp, Artificial
  probe
  misc_feature (1)..(25): SEQ ID NO: 7145; WAN024BLU_at; Start 56; Stop 80
aagccgttctccaaatagtagaggc

SEQ ID NO: 85071 - DNA, 25 bp, Artificial
  probe
  misc_feature (1)..(25): SEQ ID NO: 7145; WAN024BLU_at; Start 58; Stop 82
gccgttctccaaatagtagaggccg

SEQ ID NO: 85072 - DNA, 25 bp, Artificial
  probe
  misc_feature (1)..(25): SEQ ID NO: 7145; WAN024BLU_at; Start 60; Stop 84
cgttctccaaatagtagaggccgat

SEQ ID NO: 85073 - DNA, 25 bp, Artificial
  probe
  misc_feature (1)..(25): SEQ ID NO: 7145; WAN024BLU_at; Start 4; Stop 28
gctgatactcgtatgcttacgatcg

SEQ ID NO: 85074 - DNA, 25 bp, Artificial
  probe
  misc_feature (1)..(25): SEQ ID NO: 7145; WAN024BLU_at; Start 9; Stop 33
tactcgtatgcttacgatcgtagaa

SEQ ID NO: 85075 - DNA, 25 bp, Artificial
  probe
  misc_feature (1)..(25): SEQ ID NO: 7145; WAN024BLU_at; Start 75; Stop 99
agaggccgattcgatcgccaagccg

SEQ ID NO: 85076 - DNA, 25 bp, Artificial
  probe
  misc_feature (1)..(25): SEQ ID NO: 7145; WAN024BLU_at; Start 54; Stop 78
caaagccgttctccaaatagtagag

SEQ ID NO: 85077 - DNA, 25 bp, Artificial
  probe
  misc_feature (1)..(25): SEQ ID NO: 7145; WAN024BLU_at; Start 43; Stop 67
ttgacgacaaccaaagccgttctcc

SEQ ID NO: 85078 - DNA, 25 bp, Artificial
  probe
  misc_feature (1)..(25): SEQ ID NO: 7145; WAN024BLU_at; Start 7; Stop 31
gatactcgtatgcttacgatcgtag

SEQ ID NO: 85079 - DNA, 25 bp, Artificial
  probe
  misc_feature (1)..(25): SEQ ID NO: 7145; WAN024BLU_at; Start 59; Stop 83
ccgttctccaaatagtagaggccga

SEQ ID NO: 85080 - DNA, 25 bp, Artificial
  probe
  misc_feature (1)..(25): SEQ ID NO: 7145; WAN024BLU_at; Start 52; Stop 76
accaaagccgttctccaaatagtag

SEQ ID NO: 85081 - DNA, 25 bp, Artificial
  probe
  misc_feature (1)..(25): SEQ ID NO: 7145; WAN024BLU_at; Start 37; Stop 61
ttcactttgacgacaaccaaagccg

SEQ ID NO: 85082 - DNA, 25 bp, Artificial
  probe
  misc_feature (1)..(25): SEQ ID NO: 7145; WAN024BLU_at; Start 65; Stop 89
tccaaatagtagaggccgattcgat

SEQ ID NO: 85083 - DNA, 25 bp, Artificial
  probe
  misc_feature (1)..(25): SEQ ID NO: 7145; WAN024BLU_at; Start 63; Stop 87
tctccaaatagtagaggccgattcg

SEQ ID NO: 85084 - DNA, 25 bp, Artificial
  probe
  misc_feature (1)..(25): SEQ ID NO: 7145; WAN024BLU_at; Start 27; Stop 51
cgtagaaaacttcactttgacgaca

SEQ ID NO: 85085 - DNA, 25 bp, Artificial
  probe
  misc_feature (1)..(25): SEQ ID NO: 7145; WAN024BLU_at; Start 39; Stop 63
cactttgacgacaaccaaagccgtt

SEQ ID NO: 85086 - DNA, 25 bp, Artificial
  probe
  misc_feature (1)..(25): SEQ ID NO: 7145; WAN024BLU_at; Start 31; Stop 55
gaaaacttcactttgacgacaacca

SEQ ID NO: 85087 - DNA, 25 bp, Artificial
  probe
  misc_feature (1)..(25): SEQ ID NO: 7145; WAN024BLU_at; Start 77; Stop 101
aggccgattcgatcgccaagccgac

SEQ ID NO: 85088 - DNA, 25 bp, Artificial
  probe
  misc_feature (1)..(25): SEQ ID NO: 7145; WAN024BLU_at; Start 66; Stop 90
ccaaatagtagaggccgattcgatc

SEQ ID NO: 85089 - DNA, 25 bp, Artificial
  probe
  misc_feature (1)..(25): SEQ ID NO: 7145; WAN024BLU_at; Start 41; Stop 65
ctttgacgacaaccaaagccgttct

SEQ ID NO: 85090 - DNA, 25 bp, Artificial
  probe
  misc_feature (1)..(25): SEQ ID NO: 7145; WAN024BLU_at; Start 61; Stop 85
gttctccaaatagtagaggccgatt

SEQ ID NO: 85091 - DNA, 25 bp, Artificial
  probe
  misc_feature (1)..(25): SEQ ID NO: 7145; WAN024BLU_at; Start 1; Stop 25
ctggctgatactcgtatgcttacga

SEQ ID NO: 85092 - DNA, 25 bp, Artificial
  probe
  misc_feature (1)..(25): SEQ ID NO: 7145; WAN024BLU_at; Start 24; Stop 48
gatcgtagaaaacttcactttgacg

SEQ ID NO: 85093 - DNA, 25 bp, Artificial
  probe
  misc_feature (1)..(25): SEQ ID NO: 7145; WAN024BLU_at; Start 12; Stop 36
tcgtatgcttacgatcgtagaaaac

SEQ ID NO: 85094 - DNA, 25 bp, Artificial
  probe
  misc_feature (1)..(25): SEQ ID NO: 7145; WAN024BLU_at; Start 21; Stop 45
tacgatcgtagaaaacttcactttg

SEQ ID NO: 85095 - DNA, 25 bp, Artificial
  probe
  misc_feature (1)..(25): SEQ ID NO: 7145; WAN024BLU_at; Start 18; Stop 42
gcttacgatcgtagaaaacttcact

SEQ ID NO: 85096 - DNA, 25 bp, Artificial
  probe
  misc_feature (1)..(25): SEQ ID NO: 7145; WAN024BLU_at; Start 70; Stop 94
atagtagaggccgattcgatcgcca

SEQ ID NO: 85097 - DNA, 25 bp, Artificial
  probe
  misc_feature (1)..(25): SEQ ID NO: 7145; WAN024BLU_at; Start 71; Stop 95
tagtagaggccgattcgatcgccaa

SEQ ID NO: 85098 - DNA, 25 bp, Artificial
  probe
  misc_feature (1)..(25): SEQ ID NO: 7145; WAN024BLU_at; Start 50; Stop 74
caaccaaagccgttctccaaatagt

SEQ ID NO: 85099 - DNA, 25 bp, Artificial
  probe
  misc_feature (1)..(25): SEQ ID NO: 7145; WAN024BLU_at; Start 45; Stop 69
gacgacaaccaaagccgttctccaa

SEQ ID NO: 85100 - DNA, 25 bp, Artificial
  probe
  misc_feature (1)..(25): SEQ ID NO: 7145; WAN024BLU_at; Start 81; Stop 105
cgattcgatcgccaagccgacagat

SEQ ID NO: 85101 - DNA, 25 bp, Artificial
  probe
  misc_feature (1)..(25): SEQ ID NO: 7145; WAN024BLU_at; Start 15; Stop 39
tatgcttacgatcgtagaaaacttc

SEQ ID NO: 85102 - DNA, 25 bp, Artificial
  probe
  misc_feature (1)..(25): SEQ ID NO: 7145; WAN024BLU_at; Start 29; Stop 53
tagaaaacttcactttgacgacaac

SEQ ID NO: 85103 - DNA, 25 bp, Artificial
  probe
  misc_feature (1)..(25): SEQ ID NO: 7145; WAN024BLU_at; Start 73; Stop 97
gtagaggccgattcgatcgccaagc

SEQ ID NO: 85104 - DNA, 25 bp, Artificial
  probe
  misc_feature (1)..(25): SEQ ID NO: 7307; WAN024BLV_at; Start 47; Stop 71
caataagattgagacgtgctcttga

SEQ ID NO: 85105 - DNA, 25 bp, Artificial
  probe
  misc_feature (1)..(25): SEQ ID NO: 7307; WAN024BLV_at; Start 74; Stop 98
cacttgatgattttctcttgcgaca

SEQ ID NO: 85106 - DNA, 25 bp, Artificial
  probe
  misc_feature (1)..(25): SEQ ID NO: 7307; WAN024BLV_at; Start 1; Stop 25
gtggctgtacttgattcacttctgc

SEQ ID NO: 85107 - DNA, 25 bp, Artificial
  probe
  misc_feature (1)..(25): SEQ ID NO: 7307; WAN024BLV_at; Start 76; Stop 100
cttgatgattttctcttgcgacaac

SEQ ID NO: 85108 - DNA, 25 bp, Artificial
  probe
  misc_feature (1)..(25): SEQ ID NO: 7307; WAN024BLV_at; Start 61; Stop 85
cgtgctcttgagtcacttgatgatt

SEQ ID NO: 85109 - DNA, 25 bp, Artificial
  probe
  misc_feature (1)..(25): SEQ ID NO: 7307; WAN024BLV_at; Start 84; Stop 108
ttttctcttgcgacaaccagaactt

SEQ ID NO: 85110 - DNA, 25 bp, Artificial
  probe
  misc_feature (1)..(25): SEQ ID NO: 7307; WAN024BLV_at; Start 13; Stop 37
gattcacttctgcaatcaattcttg

SEQ ID NO: 85111 - DNA, 25 bp, Artificial
  probe
  misc_feature (1)..(25): SEQ ID NO: 7307; WAN024BLV_at; Start 64; Stop 88
gctcttgagtcacttgatgattttc

SEQ ID NO: 85112 - DNA, 25 bp, Artificial
  probe
  misc_feature (1)..(25): SEQ ID NO: 7307; WAN024BLV_at; Start 89; Stop 113
tcttgcgacaaccagaacttcatac

SEQ ID NO: 85113 - DNA, 25 bp, Artificial
  probe
  misc_feature (1)..(25): SEQ ID NO: 7307; WAN024BLV_at; Start 23; Stop 47
tgcaatcaattcttgaacgcaagtc

SEQ ID NO: 85114 - DNA, 25 bp, Artificial
  probe
  misc_feature (1)..(25): SEQ ID NO: 7307; WAN024BLV_at; Start 17; Stop 41
cacttctgcaatcaattcttgaacg

SEQ ID NO: 85115 - DNA, 25 bp, Artificial
  probe
  misc_feature (1)..(25): SEQ ID NO: 7307; WAN024BLV_at; Start 93; Stop 117
gcgacaaccagaacttcatacacat

SEQ ID NO: 85116 - DNA, 25 bp, Artificial
  probe
  misc_feature (1)..(25): SEQ ID NO: 7307; WAN024BLV_at; Start 99; Stop 123
accagaacttcatacacatctcgac

SEQ ID NO: 85117 - DNA, 25 bp, Artificial
  probe
  misc_feature (1)..(25): SEQ ID NO: 7307; WAN024BLV_at; Start 42; Stop 66
caagtcaataagattgagacgtgct

SEQ ID NO: 85118 - DNA, 25 bp, Artificial
  probe
  misc_feature (1)..(25): SEQ ID NO: 7307; WAN024BLV_at; Start 59; Stop 83
gacgtgctcttgagtcacttgatga

SEQ ID NO: 85119 - DNA, 25 bp, Artificial
  probe
  misc_feature (1)..(25): SEQ ID NO: 7307; WAN024BLV_at; Start 33; Stop 57
tcttgaacgcaagtcaataagattg

SEQ ID NO: 85120 - DNA, 25 bp, Artificial
  probe
  misc_feature (1)..(25): SEQ ID NO: 7307; WAN024BLV_at; Start 50; Stop 74
taagattgagacgtgctcttgagtc

SEQ ID NO: 85121 - DNA, 25 bp, Artificial
  probe
  misc_feature (1)..(25): SEQ ID NO: 7307; WAN024BLV_at; Start 3; Stop 27
ggctgtacttgattcacttctgcaa

SEQ ID NO: 85122 - DNA, 25 bp, Artificial
  probe
  misc_feature (1)..(25): SEQ ID NO: 7307; WAN024BLV_at; Start 53; Stop 77
gattgagacgtgctcttgagtcact

SEQ ID NO: 85123 - DNA, 25 bp, Artificial
  probe
  misc_feature (1)..(25): SEQ ID NO: 7307; WAN024BLV_at; Start 21; Stop 45
tctgcaatcaattcttgaacgcaag

SEQ ID NO: 85124 - DNA, 25 bp, Artificial
  probe
  misc_feature (1)..(25): SEQ ID NO: 7307; WAN024BLV_at; Start 45; Stop 69
gtcaataagattgagacgtgctctt

SEQ ID NO: 85125 - DNA, 25 bp, Artificial
  probe
  misc_feature (1)..(25): SEQ ID NO: 7307; WAN024BLV_at; Start 6; Stop 30
tgtacttgattcacttctgcaatca

SEQ ID NO: 85126 - DNA, 25 bp, Artificial
  probe
  misc_feature (1)..(25): SEQ ID NO: 7307; WAN024BLV_at; Start 30; Stop 54
aattcttgaacgcaagtcaataaga

SEQ ID NO: 85127 - DNA, 25 bp, Artificial
  probe
  misc_feature (1)..(25): SEQ ID NO: 7307; WAN024BLV_at; Start 25; Stop 49
caatcaattcttgaacgcaagtcaa

SEQ ID NO: 85128 - DNA, 25 bp, Artificial
  probe
  misc_feature (1)..(25): SEQ ID NO: 7307; WAN024BLV_at; Start 95; Stop 119
gacaaccagaacttcatacacatct

SEQ ID NO: 85129 - DNA, 25 bp, Artificial
  probe
  misc_feature (1)..(25): SEQ ID NO: 7307; WAN024BLV_at; Start 37; Stop 61
gaacgcaagtcaataagattgagac

SEQ ID NO: 85130 - DNA, 25 bp, Artificial
  probe
  misc_feature (1)..(25): SEQ ID NO: 7307; WAN024BLV_at; Start 57; Stop 81
gagacgtgctcttgagtcacttgat

SEQ ID NO: 85131 - DNA, 25 bp, Artificial
  probe
  misc_feature (1)..(25): SEQ ID NO: 7307; WAN024BLV_at; Start 91; Stop 115
ttgcgacaaccagaacttcatacac

SEQ ID NO: 85132 - DNA, 25 bp, Artificial
  probe
  misc_feature (1)..(25): SEQ ID NO: 7307; WAN024BLV_at; Start 79; Stop 103
gatgattttctcttgcgacaaccag

SEQ ID NO: 85133 - DNA, 25 bp, Artificial
  probe
  misc_feature (1)..(25): SEQ ID NO: 7307; WAN024BLV_at; Start 70; Stop 94
gagtcacttgatgattttctcttgc

SEQ ID NO: 85134 - DNA, 25 bp, Artificial
  probe
  misc_feature (1)..(25): SEQ ID NO: 7307; WAN024BLV_at; Start 40; Stop 64
cgcaagtcaataagattgagacgtg

SEQ ID NO: 85135 - DNA, 25 bp, Artificial
  probe
  misc_feature (1)..(25): SEQ ID NO: 7307; WAN024BLV_at; Start 55; Stop 79
ttgagacgtgctcttgagtcacttg

SEQ ID NO: 85136 - DNA, 25 bp, Artificial
  probe
  misc_feature (1)..(25): SEQ ID NO: 7307; WAN024BLV_at; Start 87; Stop 111
tctcttgcgacaaccagaacttcat

SEQ ID NO: 85137 - DNA, 25 bp, Artificial
  probe
  misc_feature (1)..(25): SEQ ID NO: 7307; WAN024BLV_at; Start 81; Stop 105
tgattttctcttgcgacaaccagaa

SEQ ID NO: 85138 - DNA, 25 bp, Artificial
  probe
  misc_feature (1)..(25): SEQ ID NO: 6969; WAN024BLW_at; Start 485; Stop 509
ctcgaaaacaagatgatagattact

SEQ ID NO: 85139 - DNA, 25 bp, Artificial
  probe
  misc_feature (1)..(25): SEQ ID NO: 6969; WAN024BLW_at; Start 316; Stop 340
cttgatgcaatattgaaagatgaag

SEQ ID NO: 85140 - DNA, 25 bp, Artificial
  probe
  misc_feature (1)..(25): SEQ ID NO: 6969; WAN024BLW_at; Start 279; Stop 303
gaatttatgtcacggttctgtaggt

SEQ ID NO: 85141 - DNA, 25 bp, Artificial
  probe
  misc_feature (1)..(25): SEQ ID NO: 6969; WAN024BLW_at; Start 157; Stop 181
tgttatggagctccgggcattttat

SEQ ID NO: 85142 - DNA, 25 bp, Artificial
  probe
  misc_feature (1)..(25): SEQ ID NO: 6969; WAN024BLW_at; Start 269; Stop 293
taagagaattgaatttatgtcacgg

SEQ ID NO: 85143 - DNA, 25 bp, Artificial
  probe
  misc_feature (1)..(25): SEQ ID NO: 6969; WAN024BLW_at; Start 330; Stop 354
gaaagatgaagaaaacctattaata

SEQ ID NO: 85144 - DNA, 25 bp, Artificial
  probe
  misc_feature (1)..(25): SEQ ID NO: 6969; WAN024BLW_at; Start 522; Stop 546
actggagttaagaggacatgatgac

SEQ ID NO: 85145 - DNA, 25 bp, Artificial
  probe
  misc_feature (1)..(25): SEQ ID NO: 6969; WAN024BLW_at; Start 251; Stop 275
taactaatgtagaaaaaataagaga

SEQ ID NO: 85146 - DNA, 25 bp, Artificial
  probe
  misc_feature (1)..(25): SEQ ID NO: 6969; WAN024BLW_at; Start 301; Stop 325
ggtactatcagttgtcttgatgcaa

SEQ ID NO: 85147 - DNA, 25 bp, Artificial
  probe
  misc_feature (1)..(25): SEQ ID NO: 6969; WAN024BLW_at; Start 200; Stop 224
tcgataaaactaatattgggaataa

SEQ ID NO: 85148 - DNA, 25 bp, Artificial
  probe
  misc_feature (1)..(25): SEQ ID NO: 6969; WAN024BLW_at; Start 309; Stop 333
cagttgtcttgatgcaatattgaaa

SEQ ID NO: 85149 - DNA, 25 bp, Artificial
  probe
  misc_feature (1)..(25): SEQ ID NO: 6969; WAN024BLW_at; Start 518; Stop 542
tattactggagttaagaggacatga

SEQ ID NO: 85150 - DNA, 25 bp, Artificial
  probe
  misc_feature (1)..(25): SEQ ID NO: 6969; WAN024BLW_at; Start 16; Stop 40
tattatgaaattaatcctagtacag

SEQ ID NO: 85151 - DNA, 25 bp, Artificial
  probe
  misc_feature (1)..(25): SEQ ID NO: 6969; WAN024BLW_at; Start 134; Stop 158
atgattcctttcctaatttttggtg

SEQ ID NO: 85152 - DNA, 25 bp, Artificial
  probe
  misc_feature (1)..(25): SEQ ID NO: 6969; WAN024BLW_at; Start 385; Stop 409
gtcgtttctcaggtcatcaaaccag

SEQ ID NO: 85153 - DNA, 25 bp, Artificial
  probe
  misc_feature (1)..(25): SEQ ID NO: 6969; WAN024BLW_at; Start 445; Stop 469
tcttttatgctaggagtatctggag

SEQ ID NO: 85154 - DNA, 25 bp, Artificial
  probe
  misc_feature (1)..(25): SEQ ID NO: 6969; WAN024BLW_at; Start 472; Stop 496
gtctatgaaatatctcgaaaacaag

SEQ ID NO: 85155 - DNA, 25 bp, Artificial
  probe
  misc_feature (1)..(25): SEQ ID NO: 6969; WAN024BLW_at; Start 417; Stop 441
tacggatttgaatactatgaataca

SEQ ID NO: 85156 - DNA, 25 bp, Artificial
  probe
  misc_feature (1)..(25): SEQ ID NO: 6969; WAN024BLW_at; Start 288; Stop 312
tcacggttctgtaggtactatcagt

SEQ ID NO: 85157 - DNA, 25 bp, Artificial
  probe
  misc_feature (1)..(25): SEQ ID NO: 6969; WAN024BLW_at; Start 125; Stop 149
gaaatcataatgattcctttcctaa

SEQ ID NO: 85158 - DNA, 25 bp, Artificial
  probe
  misc_feature (1)..(25): SEQ ID NO: 6969; WAN024BLW_at; Start 450; Stop 474
tatgctaggagtatctggagttgtc

SEQ ID NO: 85159 - DNA, 25 bp, Artificial
  probe
  misc_feature (1)..(25): SEQ ID NO: 6969; WAN024BLW_at; Start 108; Stop 132
ttggaaagacataagaagaaatcat

SEQ ID NO: 85160 - DNA, 25 bp, Artificial
  probe
  misc_feature (1)..(25): SEQ ID NO: 6969; WAN024BLW_at; Start 179; Stop 203
tattagctagaaaagaaattttcga

SEQ ID NO: 85161 - DNA, 25 bp, Artificial
  probe
  misc_feature (1)..(25): SEQ ID NO: 6969; WAN024BLW_at; Start 436; Stop 460
aatacattttcttttatgctaggag

SEQ ID NO: 85162 - DNA, 25 bp, Artificial
  probe
  misc_feature (1)..(25): SEQ ID NO: 6969; WAN024BLW_at; Start 147; Stop 171
taatttttggtgttatggagctccg

SEQ ID NO: 85163 - DNA, 25 bp, Artificial
  probe
  misc_feature (1)..(25): SEQ ID NO: 6969; WAN024BLW_at; Start 379; Stop 403
gataatgtcgtttctcaggtcatca

SEQ ID NO: 85164 - DNA, 25 bp, Artificial
  probe
  misc_feature (1)..(25): SEQ ID NO: 6969; WAN024BLW_at; Start 56; Stop 80
tagaggaattactatataaagaaga

SEQ ID NO: 85165 - DNA, 25 bp, Artificial
  probe
  misc_feature (1)..(25): SEQ ID NO: 6969; WAN024BLW_at; Start 457; Stop 481
ggagtatctggagttgtctatgaaa

SEQ ID NO: 85166 - DNA, 25 bp, Artificial
  probe
  misc_feature (1)..(25): SEQ ID NO: 6969; WAN024BLW_at; Start 166; Stop 190
gctccgggcattttattagctagaa

SEQ ID NO: 85167 - DNA, 25 bp, Artificial
  probe
  misc_feature (1)..(25): SEQ ID NO: 6969; WAN024BLW_at; Start 30; Stop 54
tcctagtacagatatattaaaatgt

SEQ ID NO: 85168 - DNA, 25 bp, Artificial
  probe
  misc_feature (1)..(25): SEQ ID NO: 6969; WAN024BLW_at; Start 503; Stop 527
gattacttaatgttttattactgga

SEQ ID NO: 85169 - DNA, 25 bp, Artificial
  probe
  misc_feature (1)..(25): SEQ ID NO: 6969; WAN024BLW_at; Start 396; Stop 420
ggtcatcaaaccagaattaagtacg

SEQ ID NO: 85170 - DNA, 25 bp, Artificial
  probe
  misc_feature (1)..(25): SEQ ID NO: 6969; WAN024BLW_at; Start 406; Stop 430
ccagaattaagtacggatttgaata

SEQ ID NO: 85171 - DNA, 25 bp, Artificial
  probe
  misc_feature (1)..(25): SEQ ID NO: 6969; WAN024BLW_at; Start 151; Stop 175
ttttggtgttatggagctccgggca

SEQ ID NO: 85172 - DNA, 25 bp, Artificial
  probe
  misc_feature (1)..(25): SEQ ID NO: 6647; WAN024BLX_at; Start 1245; Stop 1269
ggttgtcgcatttcaaaccatggca

SEQ ID NO: 85173 - DNA, 25 bp, Artificial
  probe
  misc_feature (1)..(25): SEQ ID NO: 6647; WAN024BLX_at; Start 1230; Stop 1254
aattttattgggtgaggttgtcgca

SEQ ID NO: 85174 - DNA, 25 bp, Artificial
  probe
  misc_feature (1)..(25): SEQ ID NO: 6647; WAN024BLX_at; Start 644; Stop 668
tcttggctaggagtatgggaattct

SEQ ID NO: 85175 - DNA, 25 bp, Artificial
  probe
  misc_feature (1)..(25): SEQ ID NO: 6647; WAN024BLX_at; Start 56; Stop 80
tatgttgctgcttgtccatactaca

SEQ ID NO: 85176 - DNA, 25 bp, Artificial
  probe
  misc_feature (1)..(25): SEQ ID NO: 6647; WAN024BLX_at; Start 405; Stop 429
aaattatcaatctttgaagtcgcag

SEQ ID NO: 85177 - DNA, 25 bp, Artificial
  probe
  misc_feature (1)..(25): SEQ ID NO: 6647; WAN024BLX_at; Start 232; Stop 256
gaacttccgttaccattaatagcat

SEQ ID NO: 85178 - DNA, 25 bp, Artificial
  probe
  misc_feature (1)..(25): SEQ ID NO: 6647; WAN024BLX_at; Start 381; Stop 405
agtactgctatcatttcctaacgaa

SEQ ID NO: 85179 - DNA, 25 bp, Artificial
  probe
  misc_feature (1)..(25): SEQ ID NO: 6647; WAN024BLX_at; Start 1508; Stop 1532
gaattgcactagtcggtcaatcggg

SEQ ID NO: 85180 - DNA, 25 bp, Artificial
  probe
  misc_feature (1)..(25): SEQ ID NO: 6647; WAN024BLX_at; Start 1456; Stop 1480
gactcagctcctgtaatagaaaatt

SEQ ID NO: 85181 - DNA, 25 bp, Artificial
  probe
  misc_feature (1)..(25): SEQ ID NO: 6647; WAN024BLX_at; Start 784; Stop 808
tctagtcttagtggttttagggagc

SEQ ID NO: 85182 - DNA, 25 bp, Artificial
  probe
  misc_feature (1)..(25): SEQ ID NO: 6647; WAN024BLX_at; Start 82; Stop 106
ttctataaaagcaaagagacattac

SEQ ID NO: 85183 - DNA, 25 bp, Artificial
  probe
  misc_feature (1)..(25): SEQ ID NO: 6647; WAN024BLX_at; Start 11; Stop 35
gaaaagtacctaatattgagcaaat

SEQ ID NO: 85184 - DNA, 25 bp, Artificial
  probe
  misc_feature (1)..(25): SEQ ID NO: 6647; WAN024BLX_at; Start 248; Stop 272
taatagcattctgggataatcaaca

SEQ ID NO: 85185 - DNA, 25 bp, Artificial
  probe
  misc_feature (1)..(25): SEQ ID NO: 6647; WAN024BLX_at; Start 805; Stop 829
gagctatttactaaccaagttgttg

SEQ ID NO: 85186 - DNA, 25 bp, Artificial
  probe
  misc_feature (1)..(25): SEQ ID NO: 6647; WAN024BLX_at; Start 97; Stop 121
gagacattactagatttaagacgtg

SEQ ID NO: 85187 - DNA, 25 bp, Artificial
  probe
  misc_feature (1)..(25): SEQ ID NO: 6647; WAN024BLX_at; Start 1002; Stop 1026
gatttactcagtagaaacagaagca

SEQ ID NO: 85188 - DNA, 25 bp, Artificial
  probe
  misc_feature (1)..(25): SEQ ID NO: 6647; WAN024BLX_at; Start 1162; Stop 1186
aatgtatttcaattgttcgctccta

SEQ ID NO: 85189 - DNA, 25 bp, Artificial
  probe
  misc_feature (1)..(25): SEQ ID NO: 6647; WAN024BLX_at; Start 436; Stop 460
tctccatggataagagtattctcta

SEQ ID NO: 85190 - DNA, 25 bp, Artificial
  probe
  misc_feature (1)..(25): SEQ ID NO: 6647; WAN024BLX_at; Start 300; Stop 324
gaataaggtctatataatggatcct

SEQ ID NO: 85191 - DNA, 25 bp, Artificial
  probe
  misc_feature (1)..(25): SEQ ID NO: 6647; WAN024BLX_at; Start 1480; Stop 1504
ttaaatttgactattgagccaggac

SEQ ID NO: 85192 - DNA, 25 bp, Artificial
  probe
  misc_feature (1)..(25): SEQ ID NO: 6647; WAN024BLX_at; Start 177; Stop 201
taaacgaaattttgatactggctca

SEQ ID NO: 85193 - DNA, 25 bp, Artificial
  probe
  misc_feature (1)..(25): SEQ ID NO: 6647; WAN024BLX_at; Start 1354; Stop 1378
gatatctggcttgaaaatgaagaga

SEQ ID NO: 85194 - DNA, 25 bp, Artificial
  probe
  misc_feature (1)..(25): SEQ ID NO: 6647; WAN024BLX_at; Start 116; Stop 140
gacgtgatatagaaaaagggagaga

SEQ ID NO: 85195 - DNA, 25 bp, Artificial
  probe
  misc_feature (1)..(25): SEQ ID NO: 6647; WAN024BLX_at; Start 1444; Stop 1468
tcttattccaaagactcagctcctg

SEQ ID NO: 85196 - DNA, 25 bp, Artificial
  probe
  misc_feature (1)..(25): SEQ ID NO: 6647; WAN024BLX_at; Start 190; Stop 214
gatactggctcatatcaagttaaag

SEQ ID NO: 85197 - DNA, 25 bp, Artificial
  probe
  misc_feature (1)..(25): SEQ ID NO: 6647; WAN024BLX_at; Start 30; Stop 54
gcaaatgtctcaaatagaatgtggt

SEQ ID NO: 85198 - DNA, 25 bp, Artificial
  probe
  misc_feature (1)..(25): SEQ ID NO: 6647; WAN024BLX_at; Start 1309; Stop 1333
tatacgcagtatattttggcagcag

SEQ ID NO: 85199 - DNA, 25 bp, Artificial
  probe
  misc_feature (1)..(25): SEQ ID NO: 6647; WAN024BLX_at; Start 1324; Stop 1348
ttggcagcaggatacttaaatagag

SEQ ID NO: 85200 - DNA, 25 bp, Artificial
  probe
  misc_feature (1)..(25): SEQ ID NO: 6647; WAN024BLX_at; Start 532; Stop 556
tccgtaccagtaatgacttcaaagt

SEQ ID NO: 85201 - DNA, 25 bp, Artificial
  probe
  misc_feature (1)..(25): SEQ ID NO: 6647; WAN024BLX_at; Start 841; Stop 865
gatatcgggactattctaagtgttg

SEQ ID NO: 85202 - DNA, 25 bp, Artificial
  probe
  misc_feature (1)..(25): SEQ ID NO: 6647; WAN024BLX_at; Start 1493; Stop 1517
ttgagccaggacagagaattgcact

SEQ ID NO: 85203 - DNA, 25 bp, Artificial
  probe
  misc_feature (1)..(25): SEQ ID NO: 6647; WAN024BLX_at; Start 1645; Stop 1669
caaaatttaggagtagttccacagg

SEQ ID NO: 85204 - DNA, 25 bp, Artificial
  probe
  misc_feature (1)..(25): SEQ ID NO: 6647; WAN024BLX_at; Start 421; Stop 445
aagtcgcagtttccttctccatgga

SEQ ID NO: 85205 - DNA, 25 bp, Artificial
  probe
  misc_feature (1)..(25): SEQ ID NO: 6647; WAN024BLX_at; Start 747; Stop 771
tgaactcagggcaaaaggagatatt

SEQ ID NO: 85206 - DNA, 25 bp, Artificial
  probe
  misc_feature (1)..(25): SEQ ID NO: 6881; WAN024BLY_at; Start 579; Stop 603
tgaactggataaagtgatatctgat

SEQ ID NO: 85207 - DNA, 25 bp, Artificial
  probe
  misc_feature (1)..(25): SEQ ID NO: 6881; WAN024BLY_at; Start 528; Stop 552
tctacaggagaaaaaaggtattaca

SEQ ID NO: 85208 - DNA, 25 bp, Artificial
  probe
  misc_feature (1)..(25): SEQ ID NO: 6881; WAN024BLY_at; Start 92; Stop 116
tatatggttttgttggaccaaatgg

SEQ ID NO: 85209 - DNA, 25 bp, Artificial
  probe
  misc_feature (1)..(25): SEQ ID NO: 6881; WAN024BLY_at; Start 163; Stop 187
ccagattctgggaaaataactattt

SEQ ID NO: 85210 - DNA, 25 bp, Artificial
  probe
  misc_feature (1)..(25): SEQ ID NO: 6881; WAN024BLY_at; Start 630; Stop 654
tgaattttttggttcttgccactac

SEQ ID NO: 85211 - DNA, 25 bp, Artificial
  probe
  misc_feature (1)..(25): SEQ ID NO: 6881; WAN024BLY_at; Start 563; Stop 587
caagtcatattcttagtgaactgga

SEQ ID NO: 85212 - DNA, 25 bp, Artificial
  probe
  misc_feature (1)..(25): SEQ ID NO: 6881; WAN024BLY_at; Start 463; Stop 487
tgggatgaaccaatcaatggacttg

SEQ ID NO: 85213 - DNA, 25 bp, Artificial
  probe
  misc_feature (1)..(25): SEQ ID NO: 6881; WAN024BLY_at; Start 688; Stop 712
gaagcctacttagcttgtttagctg

SEQ ID NO: 85214 - DNA, 25 bp, Artificial
  probe
  misc_feature (1)..(25): SEQ ID NO: 6881; WAN024BLY_at; Start 398; Stop 422
caatgggcatgaaacaacgtctaag

SEQ ID NO: 85215 - DNA, 25 bp, Artificial
  probe
  misc_feature (1)..(25): SEQ ID NO: 6881; WAN024BLY_at; Start 265; Stop 289
catcttgatgcttataaaaatttga

SEQ ID NO: 85216 - DNA, 25 bp, Artificial
  probe
  misc_feature (1)..(25): SEQ ID NO: 6881; WAN024BLY_at; Start 336; Stop 360
taatgaatatctatcaatggtagga

SEQ ID NO: 85217 - DNA, 25 bp, Artificial
  probe
  misc_feature (1)..(25): SEQ ID NO: 6881; WAN024BLY_at; Start 148; Stop 172
ctagggattttaaaaccagattctg

SEQ ID NO: 85218 - DNA, 25 bp, Artificial
  probe
  misc_feature (1)..(25): SEQ ID NO: 6881; WAN024BLY_at; Start 29; Stop 53
caaaaagctttaaagatattgaagt

SEQ ID NO: 85219 - DNA, 25 bp, Artificial
  probe
  misc_feature (1)..(25): SEQ ID NO: 6881; WAN024BLY_at; Start 197; Stop 221
ccgtagaacagaattccgaaaatat

SEQ ID NO: 85220 - DNA, 25 bp, Artificial
  probe
  misc_feature (1)..(25): SEQ ID NO: 6881; WAN024BLY_at; Start 306; Stop 330
gaaagggcttagtttagatactgaa

SEQ ID NO: 85221 - DNA, 25 bp, Artificial
  probe
  misc_feature (1)..(25): SEQ ID NO: 6881; WAN024BLY_at; Start 350; Stop 374
caatggtaggattaaaagatgttaa

SEQ ID NO: 85222 - DNA, 25 bp, Artificial
  probe
  misc_feature (1)..(25): SEQ ID NO: 6881; WAN024BLY_at; Start 386; Stop 410
tgaaaaatttttcaatgggcatgaa

SEQ ID NO: 85223 - DNA, 25 bp, Artificial
  probe
  misc_feature (1)..(25): SEQ ID NO: 6881; WAN024BLY_at; Start 700; Stop 724
gcttgtttagctggaggtgaatatg

SEQ ID NO: 85224 - DNA, 25 bp, Artificial
  probe
  misc_feature (1)..(25): SEQ ID NO: 6881; WAN024BLY_at; Start 189; Stop 213
taatcaaaccgtagaacagaattcc

SEQ ID NO: 85225 - DNA, 25 bp, Artificial
  probe
  misc_feature (1)..(25): SEQ ID NO: 6881; WAN024BLY_at; Start 293; Stop 317
taatagcaaatatgaaagggcttag

SEQ ID NO: 85226 - DNA, 25 bp, Artificial
  probe
  misc_feature (1)..(25): SEQ ID NO: 6881; WAN024BLY_at; Start 408; Stop 432
gaaacaacgtctaagtatagctgca

SEQ ID NO: 85227 - DNA, 25 bp, Artificial
  probe
  misc_feature (1)..(25): SEQ ID NO: 6881; WAN024BLY_at; Start 477; Stop 501
caatggacttgatccacagggtgta

SEQ ID NO: 85228 - DNA, 25 bp, Artificial
  probe
  misc_feature (1)..(25): SEQ ID NO: 6881; WAN024BLY_at; Start 489; Stop 513
tccacagggtgtaattgaaattaga

SEQ ID NO: 85229 - DNA, 25 bp, Artificial
  probe
  misc_feature (1)..(25): SEQ ID NO: 6881; WAN024BLY_at; Start 212; Stop 236
ccgaaaatatattatctaggatagg

SEQ ID NO: 85230 - DNA, 25 bp, Artificial
  probe
  misc_feature (1)..(25): SEQ ID NO: 6881; WAN024BLY_at; Start 673; Stop 697
tgtcgaaatctggaagaagcctact

SEQ ID NO: 85231 - DNA, 25 bp, Artificial
  probe
  misc_feature (1)..(25): SEQ ID NO: 6881; WAN024BLY_at; Start 231; Stop 255
gataggattagttttgggaccttca

SEQ ID NO: 85232 - DNA, 25 bp, Artificial
  probe
  misc_feature (1)..(25): SEQ ID NO: 6881; WAN024BLY_at; Start 248; Stop 272
gaccttcattttatggtcatcttga

SEQ ID NO: 85233 - DNA, 25 bp, Artificial
  probe
  misc_feature (1)..(25): SEQ ID NO: 6881; WAN024BLY_at; Start 425; Stop 449
tagctgcatcattgttaggtagtcc

SEQ ID NO: 85234 - DNA, 25 bp, Artificial
  probe
  misc_feature (1)..(25): SEQ ID NO: 6881; WAN024BLY_at; Start 116; Stop 140
gggctggaaaaactacaattatcaa

SEQ ID NO: 85235 - DNA, 25 bp, Artificial
  probe
  misc_feature (1)..(25): SEQ ID NO: 6881; WAN024BLY_at; Start 639; Stop 663
tggttcttgccactaccttttacaa

SEQ ID NO: 85236 - DNA, 25 bp, Artificial
  probe
  misc_feature (1)..(25): SEQ ID NO: 6881; WAN024BLY_at; Start 448; Stop 472
ccagaaatattaatttgggatgaac

SEQ ID NO: 85237 - DNA, 25 bp, Artificial
  probe
  misc_feature (1)..(25): SEQ ID NO: 6881; WAN024BLY_at; Start 131; Stop 155
caattatcaaaatgattctagggat

SEQ ID NO: 85238 - DNA, 25 bp, Artificial
  probe
  misc_feature (1)..(25): SEQ ID NO: 6881; WAN024BLY_at; Start 430; Stop 454
gcatcattgttaggtagtccagaaa

SEQ ID NO: 85239 - DNA, 25 bp, Artificial
  probe
  misc_feature (1)..(25): SEQ ID NO: 6881; WAN024BLY_at; Start 661; Stop 685
caaaagtataattgtcgaaatctgg

SEQ ID NO: 85240 - DNA, 25 bp, Artificial
  probe
  misc_feature (1)..(25): SEQ ID NO: 7134; WAN024BLZ_at; Start 608; Stop 632
taccatttacttatctttctcatgc

SEQ ID NO: 85241 - DNA, 25 bp, Artificial
  probe
  misc_feature (1)..(25): SEQ ID NO: 7134; WAN024BLZ_at; Start 243; Stop 267
cgaagtgtttgcagtagaatttaaa

SEQ ID NO: 85242 - DNA, 25 bp, Artificial
  probe
  misc_feature (1)..(25): SEQ ID NO: 7134; WAN024BLZ_at; Start 335; Stop 359
tcattacagtggtttacacatttac

SEQ ID NO: 85243 - DNA, 25 bp, Artificial
  probe
  misc_feature (1)..(25): SEQ ID NO: 7134; WAN024BLZ_at; Start 562; Stop 586
ttaacaattagcatatactacaacg

SEQ ID NO: 85244 - DNA, 25 bp, Artificial
  probe
  misc_feature (1)..(25): SEQ ID NO: 7134; WAN024BLZ_at; Start 3; Stop 27
ggaggtgaatatgattaaattagag

SEQ ID NO: 85245 - DNA, 25 bp, Artificial
  probe
  misc_feature (1)..(25): SEQ ID NO: 7134; WAN024BLZ_at; Start 399; Stop 423
gaaggctattgataacagtttagag

SEQ ID NO: 85246 - DNA, 25 bp, Artificial
  probe
  misc_feature (1)..(25): SEQ ID NO: 7134; WAN024BLZ_at; Start 275; Stop 299
catggttaaccgtaatttcattgcc

SEQ ID NO: 85247 - DNA, 25 bp, Artificial
  probe
  misc_feature (1)..(25): SEQ ID NO: 7134; WAN024BLZ_at; Start 468; Stop 492
ttcctcgttgatgataatgttatta

SEQ ID NO: 85248 - DNA, 25 bp, Artificial
  probe
  misc_feature (1)..(25): SEQ ID NO: 7134; WAN024BLZ_at; Start 147; Stop 171
tgaacttgctttatctaattggcag

SEQ ID NO: 85249 - DNA, 25 bp, Artificial
  probe
  misc_feature (1)..(25): SEQ ID NO: 7134; WAN024BLZ_at; Start 642; Stop 666
gactgaaagtcaattttatatgatt

SEQ ID NO: 85250 - DNA, 25 bp, Artificial
  probe
  misc_feature (1)..(25): SEQ ID NO: 7134; WAN024BLZ_at; Start 670; Stop 694
ctatctaatataataatcatcgtac

SEQ ID NO: 85251 - DNA, 25 bp, Artificial
  probe
  misc_feature (1)..(25): SEQ ID NO: 7134; WAN024BLZ_at; Start 116; Stop 140
ggtatcgaggttatttattggtgca

SEQ ID NO: 85252 - DNA, 25 bp, Artificial
  probe
  misc_feature (1)..(25): SEQ ID NO: 7134; WAN024BLZ_at; Start 264; Stop 288
taaaaatgatgcatggttaaccgta

SEQ ID NO: 85253 - DNA, 25 bp, Artificial
  probe
  misc_feature (1)..(25): SEQ ID NO: 7134; WAN024BLZ_at; Start 536; Stop 560
taccaattggtattataatgatgat

SEQ ID NO: 85254 - DNA, 25 bp, Artificial
  probe
  misc_feature (1)..(25): SEQ ID NO: 7134; WAN024BLZ_at; Start 521; Stop 545
aaatttctggaataataccaattgg

SEQ ID NO: 85255 - DNA, 25 bp, Artificial
  probe
  misc_feature (1)..(25): SEQ ID NO: 7134; WAN024BLZ_at; Start 322; Stop 346
aattctaaattactcattacagtgg

SEQ ID NO: 85256 - DNA, 25 bp, Artificial
  probe
  misc_feature (1)..(25): SEQ ID NO: 7134; WAN024BLZ_at; Start 100; Stop 124
atagacttaacttttaggtatcgag

SEQ ID NO: 85257 - DNA, 25 bp, Artificial
  probe
  misc_feature (1)..(25): SEQ ID NO: 7134; WAN024BLZ_at; Start 233; Stop 257
taataatttacgaagtgtttgcagt

SEQ ID NO: 85258 - DNA, 25 bp, Artificial
  probe
  misc_feature (1)..(25): SEQ ID NO: 7134; WAN024BLZ_at; Start 453; Stop 477
taccattcaattaatttcctcgttg

SEQ ID NO: 85259 - DNA, 25 bp, Artificial
  probe
  misc_feature (1)..(25): SEQ ID NO: 7134; WAN024BLZ_at; Start 131; Stop 155
tattggtgcatcaaaatgaacttgc

SEQ ID NO: 85260 - DNA, 25 bp, Artificial
  probe
  misc_feature (1)..(25): SEQ ID NO: 7134; WAN024BLZ_at; Start 305; Stop 329
gaaacaagtacacaataaattctaa

SEQ ID NO: 85261 - DNA, 25 bp, Artificial
  probe
  misc_feature (1)..(25): SEQ ID NO: 7134; WAN024BLZ_at; Start 621; Stop 645
tctttctcatgcttttagagtgact

SEQ ID NO: 85262 - DNA, 25 bp, Artificial
  probe
  misc_feature (1)..(25): SEQ ID NO: 7134; WAN024BLZ_at; Start 43; Stop 67
aaaagcatcttatggtttgttctta

SEQ ID NO: 85263 - DNA, 25 bp, Artificial
  probe
  misc_feature (1)..(25): SEQ ID NO: 7134; WAN024BLZ_at; Start 720; Stop 744
gaacgaaagaagttttgagatgaaa

SEQ ID NO: 85264 - DNA, 25 bp, Artificial
  probe
  misc_feature (1)..(25): SEQ ID NO: 7134; WAN024BLZ_at; Start 414; Stop 438
cagtttagagattggtttgattttc

SEQ ID NO: 85265 - DNA, 25 bp, Artificial
  probe
  misc_feature (1)..(25): SEQ ID NO: 7134; WAN024BLZ_at; Start 350; Stop 374
acacatttactttttggttgtctga

SEQ ID NO: 85266 - DNA, 25 bp, Artificial
  probe
  misc_feature (1)..(25): SEQ ID NO: 7134; WAN024BLZ_at; Start 281; Stop 305
taaccgtaatttcattgccatttag

SEQ ID NO: 85267 - DNA, 25 bp, Artificial
  probe
  misc_feature (1)..(25): SEQ ID NO: 7134; WAN024BLZ_at; Start 364; Stop 388
tggttgtctgattatattagcttat

SEQ ID NO: 85268 - DNA, 25 bp, Artificial
  probe
  misc_feature (1)..(25): SEQ ID NO: 7134; WAN024BLZ_at; Start 293; Stop 317
cattgccatttagaaacaagtacac

SEQ ID NO: 85269 - DNA, 25 bp, Artificial
  probe
  misc_feature (1)..(25): SEQ ID NO: 7134; WAN024BLZ_at; Start 380; Stop 404
ttagcttatacgttattgggaaggc

SEQ ID NO: 85270 - DNA, 25 bp, Artificial
  probe
  misc_feature (1)..(25): SEQ ID NO: 7134; WAN024BLZ_at; Start 700; Stop 724
tatatattaattcgtaaattgaacg

SEQ ID NO: 85271 - DNA, 25 bp, Artificial
  probe
  misc_feature (1)..(25): SEQ ID NO: 7134; WAN024BLZ_at; Start 18; Stop 42
taaattagagtttctaaagcagaaa

SEQ ID NO: 85272 - DNA, 25 bp, Artificial
  probe
  misc_feature (1)..(25): SEQ ID NO: 7134; WAN024BLZ_at; Start 628; Stop 652
catgcttttagagtgactgaaagtc

SEQ ID NO: 85273 - DNA, 25 bp, Artificial
  probe
  misc_feature (1)..(25): SEQ ID NO: 7134; WAN024BLZ_at; Start 393; Stop 417
tattgggaaggctattgataacagt

SEQ ID NO: 85274 - DNA, 25 bp, Artificial
  probe
  misc_feature (1)..(25): SEQ ID NO: 6460; WAN024BM2_at; Start 177; Stop 201
tatgctaatgatttttcctatacaa

SEQ ID NO: 85275 - DNA, 25 bp, Artificial
  probe
  misc_feature (1)..(25): SEQ ID NO: 6460; WAN024BM2_at; Start 243; Stop 267
taataatggttggaatatcatggtg

SEQ ID NO: 85276 - DNA, 25 bp, Artificial
  probe
  misc_feature (1)..(25): SEQ ID NO: 6460; WAN024BM2_at; Start 48; Stop 72
tattattgttgacatctgtattcag

SEQ ID NO: 85277 - DNA, 25 bp, Artificial
  probe
  misc_feature (1)..(25): SEQ ID NO: 6460; WAN024BM2_at; Start 468; Stop 492
aatttgctgtataagatttgattcc

SEQ ID NO: 85278 - DNA, 25 bp, Artificial
  probe
  misc_feature (1)..(25): SEQ ID NO: 6460; WAN024BM2_at; Start 288; Stop 312
gaaaatcatctatataaaagtaacg

SEQ ID NO: 85279 - DNA, 25 bp, Artificial
  probe
  misc_feature (1)..(25): SEQ ID NO: 6460; WAN024BM2_at; Start 600; Stop 624
tcagtcaactacaaacttaggtatt

SEQ ID NO: 85280 - DNA, 25 bp, Artificial
  probe
  misc_feature (1)..(25): SEQ ID NO: 6460; WAN024BM2_at; Start 502; Stop 526
aaggccttacctaatattttgctga

SEQ ID NO: 85281 - DNA, 25 bp, Artificial
  probe
  misc_feature (1)..(25): SEQ ID NO: 6460; WAN024BM2_at; Start 273; Stop 297
cactaataatctcgtgaaaatcatc

SEQ ID NO: 85282 - DNA, 25 bp, Artificial
  probe
  misc_feature (1)..(25): SEQ ID NO: 6460; WAN024BM2_at; Start 629; Stop 653
tattagtttgtatctggattatggg

SEQ ID NO: 85283 - DNA, 25 bp, Artificial
  probe
  misc_feature (1)..(25): SEQ ID NO: 6460; WAN024BM2_at; Start 124; Stop 148
tactcagagcttgattataataagt

SEQ ID NO: 85284 - DNA, 25 bp, Artificial
  probe
  misc_feature (1)..(25): SEQ ID NO: 6460; WAN024BM2_at; Start 543; Stop 567
cacgtttcagagtgattggaatata

SEQ ID NO: 85285 - DNA, 25 bp, Artificial
  probe
  misc_feature (1)..(25): SEQ ID NO: 6460; WAN024BM2_at; Start 64; Stop 88
tgtattcagattctagtcattctag

SEQ ID NO: 85286 - DNA, 25 bp, Artificial
  probe
  misc_feature (1)..(25): SEQ ID NO: 6460; WAN024BM2_at; Start 413; Stop 437
tatttcccaatataatgtcatttct

SEQ ID NO: 85287 - DNA, 25 bp, Artificial
  probe
  misc_feature (1)..(25): SEQ ID NO: 6460; WAN024BM2_at; Start 254; Stop 278
ggaatatcatggtgattaacactaa

SEQ ID NO: 85288 - DNA, 25 bp, Artificial
  probe
  misc_feature (1)..(25): SEQ ID NO: 6460; WAN024BM2_at; Start 365; Stop 389
taattcaattaggtggtatgggaac

SEQ ID NO: 85289 - DNA, 25 bp, Artificial
  probe
  misc_feature (1)..(25): SEQ ID NO: 6460; WAN024BM2_at; Start 574; Stop 598
cctgcaacttattattatacagaaa

SEQ ID NO: 85290 - DNA, 25 bp, Artificial
  probe
  misc_feature (1)..(25): SEQ ID NO: 6460; WAN024BM2_at; Start 203; Stop 227
ttttgtatcaaaatctaagagaggc

SEQ ID NO: 85291 - DNA, 25 bp, Artificial
  probe
  misc_feature (1)..(25): SEQ ID NO: 6460; WAN024BM2_at; Start 591; Stop 615
tacagaaattcagtcaactacaaac

SEQ ID NO: 85292 - DNA, 25 bp, Artificial
  probe
  misc_feature (1)..(25): SEQ ID NO: 6460; WAN024BM2_at; Start 109; Stop 133
gatatttcggcactatactcagagc

SEQ ID NO: 85293 - DNA, 25 bp, Artificial
  probe
  misc_feature (1)..(25): SEQ ID NO: 6460; WAN024BM2_at; Start 76; Stop 100
ctagtcattctagctataaaaacat

SEQ ID NO: 85294 - DNA, 25 bp, Artificial
  probe
  misc_feature (1)..(25): SEQ ID NO: 6460; WAN024BM2_at; Start 560; Stop 584
ggaatatatttatacctgcaactta

SEQ ID NO: 85295 - DNA, 25 bp, Artificial
  probe
  misc_feature (1)..(25): SEQ ID NO: 6460; WAN024BM2_at; Start 522; Stop 546
gctgatacttattgttttaatcacg

SEQ ID NO: 85296 - DNA, 25 bp, Artificial
  probe
  misc_feature (1)..(25): SEQ ID NO: 6460; WAN024BM2_at; Start 531; Stop 555
tattgttttaatcacgtttcagagt

SEQ ID NO: 85297 - DNA, 25 bp, Artificial
  probe
  misc_feature (1)..(25): SEQ ID NO: 6460; WAN024BM2_at; Start 163; Stop 187
cacactttaatatatatgctaatga

SEQ ID NO: 85298 - DNA, 25 bp, Artificial
  probe
  misc_feature (1)..(25): SEQ ID NO: 6460; WAN024BM2_at; Start 370; Stop 394
caattaggtggtatgggaactgata

SEQ ID NO: 85299 - DNA, 25 bp, Artificial
  probe
  misc_feature (1)..(25): SEQ ID NO: 6460; WAN024BM2_at; Start 487; Stop 511
gattccattttagcaaaggccttac

SEQ ID NO: 85300 - DNA, 25 bp, Artificial
  probe
  misc_feature (1)..(25): SEQ ID NO: 6460; WAN024BM2_at; Start 113; Stop 137
tttcggcactatactcagagcttga

SEQ ID NO: 85301 - DNA, 25 bp, Artificial
  probe
  misc_feature (1)..(25): SEQ ID NO: 6460; WAN024BM2_at; Start 302; Stop 326
taaaagtaacgataaatatcgtgag

SEQ ID NO: 85302 - DNA, 25 bp, Artificial
  probe
  misc_feature (1)..(25): SEQ ID NO: 6460; WAN024BM2_at; Start 144; Stop 168
taagtattggtatattttacacact

SEQ ID NO: 85303 - DNA, 25 bp, Artificial
  probe
  misc_feature (1)..(25): SEQ ID NO: 6460; WAN024BM2_at; Start 264; Stop 288
ggtgattaacactaataatctcgtg

SEQ ID NO: 85304 - DNA, 25 bp, Artificial
  probe
  misc_feature (1)..(25): SEQ ID NO: 6460; WAN024BM2_at; Start 384; Stop 408
gggaactgatatgttattaaccaat

SEQ ID NO: 85305 - DNA, 25 bp, Artificial
  probe
  misc_feature (1)..(25): SEQ ID NO: 6460; WAN024BM2_at; Start 643; Stop 667
tggattatgggatttgaatttttcc

SEQ ID NO: 85306 - DNA, 25 bp, Artificial
  probe
  misc_feature (1)..(25): SEQ ID NO: 6460; WAN024BM2_at; Start 218; Stop 242
taagagaggcattgattgaagataa

SEQ ID NO: 85307 - DNA, 25 bp, Artificial
  probe
  misc_feature (1)..(25): SEQ ID NO: 6460; WAN024BM2_at; Start 450; Stop 474
tatagctatctttatgcaaatttgc

SEQ ID NO: 85308 - DNA, 25 bp, Artificial
  probe
  misc_feature (1)..(25): SEQ ID NO: 6893; WAN024BM3_at; Start 39; Stop 63
tatctcagacttcttcaacacacct

SEQ ID NO: 85309 - DNA, 25 bp, Artificial
  probe
  misc_feature (1)..(25): SEQ ID NO: 6893; WAN024BM3_at; Start 55; Stop 79
aacacaccttattattgggcactta

SEQ ID NO: 85310 - DNA, 25 bp, Artificial
  probe
  misc_feature (1)..(25): SEQ ID NO: 6893; WAN024BM3_at; Start 51; Stop 75
cttcaacacaccttattattgggca

SEQ ID NO: 85311 - DNA, 25 bp, Artificial
  probe
  misc_feature (1)..(25): SEQ ID NO: 6893; WAN024BM3_at; Start 46; Stop 70
gacttcttcaacacaccttattatt

SEQ ID NO: 85312 - DNA, 25 bp, Artificial
  probe
  misc_feature (1)..(25): SEQ ID NO: 6893; WAN024BM3_at; Start 43; Stop 67
tcagacttcttcaacacaccttatt

SEQ ID NO: 85313 - DNA, 25 bp, Artificial
  probe
  misc_feature (1)..(25): SEQ ID NO: 6893; WAN024BM3_at; Start 3; Stop 27
gggaatctatagcttttttgtgact

SEQ ID NO: 85314 - DNA, 25 bp, Artificial
  probe
  misc_feature (1)..(25): SEQ ID NO: 6893; WAN024BM3_at; Start 50; Stop 74
tcttcaacacaccttattattgggc

SEQ ID NO: 85315 - DNA, 25 bp, Artificial
  probe
  misc_feature (1)..(25): SEQ ID NO: 6893; WAN024BM3_at; Start 61; Stop 85
ccttattattgggcacttacggaag

SEQ ID NO: 85316 - DNA, 25 bp, Artificial
  probe
  misc_feature (1)..(25): SEQ ID NO: 6893; WAN024BM3_at; Start 58; Stop 82
acaccttattattgggcacttacgg

SEQ ID NO: 85317 - DNA, 25 bp, Artificial
  probe
  misc_feature (1)..(25): SEQ ID NO: 6893; WAN024BM3_at; Start 57; Stop 81
cacaccttattattgggcacttacg

SEQ ID NO: 85318 - DNA, 25 bp, Artificial
  probe
  misc_feature (1)..(25): SEQ ID NO: 6893; WAN024BM3_at; Start 41; Stop 65
tctcagacttcttcaacacacctta

SEQ ID NO: 85319 - DNA, 25 bp, Artificial
  probe
  misc_feature (1)..(25): SEQ ID NO: 6893; WAN024BM3_at; Start 28; Stop 52
gagaactattttatctcagacttct

SEQ ID NO: 85320 - DNA, 25 bp, Artificial
  probe
  misc_feature (1)..(25): SEQ ID NO: 6893; WAN024BM3_at; Start 54; Stop 78
caacacaccttattattgggcactt

SEQ ID NO: 85321 - DNA, 25 bp, Artificial
  probe
  misc_feature (1)..(25): SEQ ID NO: 6893; WAN024BM3_at; Start 45; Stop 69
agacttcttcaacacaccttattat

SEQ ID NO: 85322 - DNA, 25 bp, Artificial
  probe
  misc_feature (1)..(25): SEQ ID NO: 6893; WAN024BM3_at; Start 56; Stop 80
acacaccttattattgggcacttac

SEQ ID NO: 85323 - DNA, 25 bp, Artificial
  probe
  misc_feature (1)..(25): SEQ ID NO: 6893; WAN024BM3_at; Start 32; Stop 56
actattttatctcagacttcttcaa

SEQ ID NO: 85324 - DNA, 25 bp, Artificial
  probe
  misc_feature (1)..(25): SEQ ID NO: 6893; WAN024BM3_at; Start 62; Stop 86
cttattattgggcacttacggaagg

SEQ ID NO: 85325 - DNA, 25 bp, Artificial
  probe
  misc_feature (1)..(25): SEQ ID NO: 6893; WAN024BM3_at; Start 44; Stop 68
cagacttcttcaacacaccttatta

SEQ ID NO: 85326 - DNA, 25 bp, Artificial
  probe
  misc_feature (1)..(25): SEQ ID NO: 6893; WAN024BM3_at; Start 59; Stop 83
caccttattattgggcacttacgga

SEQ ID NO: 85327 - DNA, 25 bp, Artificial
  probe
  misc_feature (1)..(25): SEQ ID NO: 6893; WAN024BM3_at; Start 2; Stop 26
tgggaatctatagcttttttgtgac

SEQ ID NO: 85328 - DNA, 25 bp, Artificial
  probe
  misc_feature (1)..(25): SEQ ID NO: 6893; WAN024BM3_at; Start 42; Stop 66
ctcagacttcttcaacacaccttat

SEQ ID NO: 85329 - DNA, 25 bp, Artificial
  probe
  misc_feature (1)..(25): SEQ ID NO: 6893; WAN024BM3_at; Start 30; Stop 54
gaactattttatctcagacttcttc

SEQ ID NO: 85330 - DNA, 25 bp, Artificial
  probe
  misc_feature (1)..(25): SEQ ID NO: 6893; WAN024BM3_at; Start 5; Stop 29
gaatctatagcttttttgtgactga

SEQ ID NO: 85331 - DNA, 25 bp, Artificial
  probe
  misc_feature (1)..(25): SEQ ID NO: 6893; WAN024BM3_at; Start 38; Stop 62
ttatctcagacttcttcaacacacc

SEQ ID NO: 85332 - DNA, 25 bp, Artificial
  probe
  misc_feature (1)..(25): SEQ ID NO: 6893; WAN024BM3_at; Start 49; Stop 73
ttcttcaacacaccttattattggg

SEQ ID NO: 85333 - DNA, 25 bp, Artificial
  probe
  misc_feature (1)..(25): SEQ ID NO: 6893; WAN024BM3_at; Start 24; Stop 48
gactgagaactattttatctcagac

SEQ ID NO: 85334 - DNA, 25 bp, Artificial
  probe
  misc_feature (1)..(25): SEQ ID NO: 6893; WAN024BM3_at; Start 53; Stop 77
tcaacacaccttattattgggcact

SEQ ID NO: 85335 - DNA, 25 bp, Artificial
  probe
  misc_feature (1)..(25): SEQ ID NO: 6893; WAN024BM3_at; Start 37; Stop 61
tttatctcagacttcttcaacacac

SEQ ID NO: 85336 - DNA, 25 bp, Artificial
  probe
  misc_feature (1)..(25): SEQ ID NO: 6893; WAN024BM3_at; Start 19; Stop 43
tttgtgactgagaactattttatct

SEQ ID NO: 85337 - DNA, 25 bp, Artificial
  probe
  misc_feature (1)..(25): SEQ ID NO: 6893; WAN024BM3_at; Start 4; Stop 28
ggaatctatagcttttttgtgactg

SEQ ID NO: 85338 - DNA, 25 bp, Artificial
  probe
  misc_feature (1)..(25): SEQ ID NO: 6893; WAN024BM3_at; Start 52; Stop 76
ttcaacacaccttattattgggcac

SEQ ID NO: 85339 - DNA, 25 bp, Artificial
  probe
  misc_feature (1)..(25): SEQ ID NO: 6893; WAN024BM3_at; Start 21; Stop 45
tgtgactgagaactattttatctca

SEQ ID NO: 85340 - DNA, 25 bp, Artificial
  probe
  misc_feature (1)..(25): SEQ ID NO: 6893; WAN024BM3_at; Start 34; Stop 58
tattttatctcagacttcttcaaca

SEQ ID NO: 85341 - DNA, 25 bp, Artificial
  probe
  misc_feature (1)..(25): SEQ ID NO: 6893; WAN024BM3_at; Start 27; Stop 51
tgagaactattttatctcagacttc

SEQ ID NO: 85342 - DNA, 25 bp, Artificial
  probe
  misc_feature (1)..(25): SEQ ID NO: 6313; WAN024BM4_at; Start 848; Stop 872
gaacgtcattggcatttagtgaccc

SEQ ID NO: 85343 - DNA, 25 bp, Artificial
  probe
  misc_feature (1)..(25): SEQ ID NO: 6313; WAN024BM4_at; Start 668; Stop 692
tcgatgccataattgactttgaccg

SEQ ID NO: 85344 - DNA, 25 bp, Artificial
  probe
  misc_feature (1)..(25): SEQ ID NO: 6313; WAN024BM4_at; Start 266; Stop 290
taaacgctgtcaatcatcatattgg

SEQ ID NO: 85345 - DNA, 25 bp, Artificial
  probe
  misc_feature (1)..(25): SEQ ID NO: 6313; WAN024BM4_at; Start 416; Stop 440
tagggcaaacagtcaaaaacttagc

SEQ ID NO: 85346 - DNA, 25 bp, Artificial
  probe
  misc_feature (1)..(25): SEQ ID NO: 6313; WAN024BM4_at; Start 37; Stop 61
cattatgagggcagagagacagaat

SEQ ID NO: 85347 - DNA, 25 bp, Artificial
  probe
  misc_feature (1)..(25): SEQ ID NO: 6313; WAN024BM4_at; Start 993; Stop 1017
tatttctaagagtagtgtatcacga

SEQ ID NO: 85348 - DNA, 25 bp, Artificial
  probe
  misc_feature (1)..(25): SEQ ID NO: 6313; WAN024BM4_at; Start 143; Stop 167
tgtctcaaagtgatagattcatgcc

SEQ ID NO: 85349 - DNA, 25 bp, Artificial
  probe
  misc_feature (1)..(25): SEQ ID NO: 6313; WAN024BM4_at; Start 593; Stop 617
ggctgtcaccagaaattgtattaat

SEQ ID NO: 85350 - DNA, 25 bp, Artificial
  probe
  misc_feature (1)..(25): SEQ ID NO: 6313; WAN024BM4_at; Start 305; Stop 329
tatttgtgggatctccaggtactgg

SEQ ID NO: 85351 - DNA, 25 bp, Artificial
  probe
  misc_feature (1)..(25): SEQ ID NO: 6313; WAN024BM4_at; Start 798; Stop 822
caatagtgccaatgtaataccgaat

SEQ ID NO: 85352 - DNA, 25 bp, Artificial
  probe
  misc_feature (1)..(25): SEQ ID NO: 6313; WAN024BM4_at; Start 209; Stop 233
tagatattggtcctctcccattgcc

SEQ ID NO: 85353 - DNA, 25 bp, Artificial
  probe
  misc_feature (1)..(25): SEQ ID NO: 6313; WAN024BM4_at; Start 347; Stop 371
agcaggtggctagacttattggcaa

SEQ ID NO: 85354 - DNA, 25 bp, Artificial
  probe
  misc_feature (1)..(25): SEQ ID NO: 6313; WAN024BM4_at; Start 161; Stop 185
tcatgccacaaatagaaaatcctag

SEQ ID NO: 85355 - DNA, 25 bp, Artificial
  probe
  misc_feature (1)..(25): SEQ ID NO: 6313; WAN024BM4_at; Start 66; Stop 90
aaatcaatccatagcaattgctcgg

SEQ ID NO: 85356 - DNA, 25 bp, Artificial
  probe
  misc_feature (1)..(25): SEQ ID NO: 6313; WAN024BM4_at; Start 557; Stop 581
gacgagtgacttctgcctttttaaa

SEQ ID NO: 85357 - DNA, 25 bp, Artificial
  probe
  misc_feature (1)..(25): SEQ ID NO: 6313; WAN024BM4_at; Start 653; Stop 677
cagttacgagaagattcgatgccat

SEQ ID NO: 85358 - DNA, 25 bp, Artificial
  probe
  misc_feature (1)..(25): SEQ ID NO: 6313; WAN024BM4_at; Start 512; Stop 536
ccatagtgttggatagggttaatca

SEQ ID NO: 85359 - DNA, 25 bp, Artificial
  probe
  misc_feature (1)..(25): SEQ ID NO: 6313; WAN024BM4_at; Start 833; Stop 857
tgagaaactcaataagaacgtcatt

SEQ ID NO: 85360 - DNA, 25 bp, Artificial
  probe
  misc_feature (1)..(25): SEQ ID NO: 6313; WAN024BM4_at; Start 401; Stop 425
tagtagatagtaagctagggcaaac

SEQ ID NO: 85361 - DNA, 25 bp, Artificial
  probe
  misc_feature (1)..(25): SEQ ID NO: 6313; WAN024BM4_at; Start 543; Stop 567
tttaagagaaatgggacgagtgact

SEQ ID NO: 85362 - DNA, 25 bp, Artificial
  probe
  misc_feature (1)..(25): SEQ ID NO: 6313; WAN024BM4_at; Start 101; Stop 125
aacatggtgatacacaaatagcaca

SEQ ID NO: 85363 - DNA, 25 bp, Artificial
  probe
  misc_feature (1)..(25): SEQ ID NO: 6313; WAN024BM4_at; Start 682; Stop 706
gactttgaccgttatactgatgaag

SEQ ID NO: 85364 - DNA, 25 bp, Artificial
  probe
  misc_feature (1)..(25): SEQ ID NO: 6313; WAN024BM4_at; Start 85; Stop 109
gctcggaacttcaataaacatggtg

SEQ ID NO: 85365 - DNA, 25 bp, Artificial
  probe
  misc_feature (1)..(25): SEQ ID NO: 6313; WAN024BM4_at; Start 877; Stop 901
gatccgcatgattaccaaaaacgcc

SEQ ID NO: 85366 - DNA, 25 bp, Artificial
  probe
  misc_feature (1)..(25): SEQ ID NO: 6313; WAN024BM4_at; Start 818; Stop 842
cgaatcctggtgatttgagaaactc

SEQ ID NO: 85367 - DNA, 25 bp, Artificial
  probe
  misc_feature (1)..(25): SEQ ID NO: 6313; WAN024BM4_at; Start 332; Stop 356
aaactgaaagtgtaaagcaggtggc

SEQ ID NO: 85368 - DNA, 25 bp, Artificial
  probe
  misc_feature (1)..(25): SEQ ID NO: 6313; WAN024BM4_at; Start 950; Stop 974
cgaagctaggttttactgttagaga

SEQ ID NO: 85369 - DNA, 25 bp, Artificial
  probe
  misc_feature (1)..(25): SEQ ID NO: 6313; WAN024BM4_at; Start 319; Stop 343
ccaggtactggaaaaactgaaagtg

SEQ ID NO: 85370 - DNA, 25 bp, Artificial
  probe
  misc_feature (1)..(25): SEQ ID NO: 6313; WAN024BM4_at; Start 187; Stop 211
gagtatttgactcctgctaaactag

SEQ ID NO: 85371 - DNA, 25 bp, Artificial
  probe
  misc_feature (1)..(25): SEQ ID NO: 6313; WAN024BM4_at; Start 1008; Stop 1032
tgtatcacgagagttaagcgaggat

SEQ ID NO: 85372 - DNA, 25 bp, Artificial
  probe
  misc_feature (1)..(25): SEQ ID NO: 6313; WAN024BM4_at; Start 578; Stop 602
taaaggagttggataggctgtcacc

SEQ ID NO: 85373 - DNA, 25 bp, Artificial
  probe
  misc_feature (1)..(25): SEQ ID NO: 6313; WAN024BM4_at; Start 892; Stop 916
caaaaacgcctgctaagaagtttgc

SEQ ID NO: 85374 - DNA, 25 bp, Artificial
  probe
  misc_feature (1)..(25): SEQ ID NO: 6313; WAN024BM4_at; Start 862; Stop 886
tttagtgacccatcagatccgcatg

SEQ ID NO: 85375 - DNA, 25 bp, Artificial
  probe
  misc_feature (1)..(25): SEQ ID NO: 6313; WAN024BM4_at; Start 638; Stop 662
aaaatcttgataaagcagttacgag

SEQ ID NO: 85376 - DNA, 25 bp, Artificial
  probe
  misc_feature (1)..(25): SEQ ID NO: 7491; WAN024BM5_at; Start 42; Stop 66
caaaaaatcaatttctttgattaat

SEQ ID NO: 85377 - DNA, 25 bp, Artificial
  probe
  misc_feature (1)..(25): SEQ ID NO: 7491; WAN024BM5_at; Start 50; Stop 74
caatttctttgattaatactattat

SEQ ID NO: 85378 - DNA, 25 bp, Artificial
  probe
  misc_feature (1)..(25): SEQ ID NO: 7491; WAN024BM5_at; Start 36; Stop 60
taatatcaaaaaatcaatttctttg

SEQ ID NO: 85379 - DNA, 25 bp, Artificial
  probe
  misc_feature (1)..(25): SEQ ID NO: 7491; WAN024BM5_at; Start 6; Stop 30
cacaacactgcctaccctccttttt

SEQ ID NO: 85380 - DNA, 25 bp, Artificial
  probe
  misc_feature (1)..(25): SEQ ID NO: 7491; WAN024BM5_at; Start 3; Stop 27
gatcacaacactgcctaccctcctt

SEQ ID NO: 85381 - DNA, 25 bp, Artificial
  probe
  misc_feature (1)..(25): SEQ ID NO: 7491; WAN024BM5_at; Start 37; Stop 61
aatatcaaaaaatcaatttctttga

SEQ ID NO: 85382 - DNA, 25 bp, Artificial
  probe
  misc_feature (1)..(25): SEQ ID NO: 7491; WAN024BM5_at; Start 49; Stop 73
tcaatttctttgattaatactatta

SEQ ID NO: 85383 - DNA, 25 bp, Artificial
  probe
  misc_feature (1)..(25): SEQ ID NO: 7491; WAN024BM5_at; Start 1; Stop 25
ttgatcacaacactgcctaccctcc

SEQ ID NO: 85384 - DNA, 25 bp, Artificial
  probe
  misc_feature (1)..(25): SEQ ID NO: 7491; WAN024BM5_at; Start 5; Stop 29
tcacaacactgcctaccctcctttt

SEQ ID NO: 85385 - DNA, 25 bp, Artificial
  probe
  misc_feature (1)..(25): SEQ ID NO: 7491; WAN024BM5_at; Start 4; Stop 28
atcacaacactgcctaccctccttt

SEQ ID NO: 85386 - DNA, 25 bp, Artificial
  probe
  misc_feature (1)..(25): SEQ ID NO: 7491; WAN024BM5_at; Start 2; Stop 26
tgatcacaacactgcctaccctcct

SEQ ID NO: 85387 - DNA, 25 bp, Artificial
  probe
  misc_feature (1)..(25): SEQ ID NO: 7491; WAN024BM5_at; Start 46; Stop 70
aaatcaatttctttgattaatacta

SEQ ID NO: 85388 - DNA, 25 bp, Artificial
  probe
  misc_feature (1)..(25): SEQ ID NO: 6930; WAN024BM6_at; Start 39; Stop 63
tgtagatcaaatgagagcagacgcc

SEQ ID NO: 85389 - DNA, 25 bp, Artificial
  probe
  misc_feature (1)..(25): SEQ ID NO: 6930; WAN024BM6_at; Start 700; Stop 724
caatttctcgatttgcatatcggga

SEQ ID NO: 85390 - DNA, 25 bp, Artificial
  probe
  misc_feature (1)..(25): SEQ ID NO: 6930; WAN024BM6_at; Start 53; Stop 77
gagcagacgccttatccttgaatag

SEQ ID NO: 85391 - DNA, 25 bp, Artificial
  probe
  misc_feature (1)..(25): SEQ ID NO: 6930; WAN024BM6_at; Start 1210; Stop 1234
caatatattttgacagaccagtgga

SEQ ID NO: 85392 - DNA, 25 bp, Artificial
  probe
  misc_feature (1)..(25): SEQ ID NO: 6930; WAN024BM6_at; Start 861; Stop 885
gactgccctaaaagaatttcgtcat

SEQ ID NO: 85393 - DNA, 25 bp, Artificial
  probe
  misc_feature (1)..(25): SEQ ID NO: 6930; WAN024BM6_at; Start 916; Stop 940
gatcatggagatcagcttggtgaac

SEQ ID NO: 85394 - DNA, 25 bp, Artificial
  probe
  misc_feature (1)..(25): SEQ ID NO: 6930; WAN024BM6_at; Start 969; Stop 993
tcagggaagtatccacattccttcg

SEQ ID NO: 85395 - DNA, 25 bp, Artificial
  probe
  misc_feature (1)..(25): SEQ ID NO: 6930; WAN024BM6_at; Start 676; Stop 700
gatatatatatggaacgcttgcctc

SEQ ID NO: 85396 - DNA, 25 bp, Artificial
  probe
  misc_feature (1)..(25): SEQ ID NO: 6930; WAN024BM6_at; Start 1162; Stop 1186
tggcgaacagaatttcatggtgaac

SEQ ID NO: 85397 - DNA, 25 bp, Artificial
  probe
  misc_feature (1)..(25): SEQ ID NO: 6930; WAN024BM6_at; Start 138; Stop 162
tgaaaatgcctattctccagttcct

SEQ ID NO: 85398 - DNA, 25 bp, Artificial
  probe
  misc_feature (1)..(25): SEQ ID NO: 6930; WAN024BM6_at; Start 1060; Stop 1084
caagatatttttccttcactcgtgg

SEQ ID NO: 85399 - DNA, 25 bp, Artificial
  probe
  misc_feature (1)..(25): SEQ ID NO: 6930; WAN024BM6_at; Start 3; Stop 27
ggttcagacaaaacagccaaatatt

SEQ ID NO: 85400 - DNA, 25 bp, Artificial
  probe
  misc_feature (1)..(25): SEQ ID NO: 6930; WAN024BM6_at; Start 315; Stop 339
gatgcatgtttttccttccagacag

SEQ ID NO: 85401 - DNA, 25 bp, Artificial
  probe
  misc_feature (1)..(25): SEQ ID NO: 6930; WAN024BM6_at; Start 221; Stop 245
gagttggttatcaagatgaggtgcc

SEQ ID NO: 85402 - DNA, 25 bp, Artificial
  probe
  misc_feature (1)..(25): SEQ ID NO: 6930; WAN024BM6_at; Start 1091; Stop 1115
caggaggaactactacagatgaact

SEQ ID NO: 85403 - DNA, 25 bp, Artificial
  probe
  misc_feature (1)..(25): SEQ ID NO: 6930; WAN024BM6_at; Start 844; Stop 868
caaattagtcgctttttgactgccc

SEQ ID NO: 85404 - DNA, 25 bp, Artificial
  probe
  misc_feature (1)..(25): SEQ ID NO: 6930; WAN024BM6_at; Start 1177; Stop 1201
catggtgaacatgctttaggaaaag

SEQ ID NO: 85405 - DNA, 25 bp, Artificial
  probe
  misc_feature (1)..(25): SEQ ID NO: 6930; WAN024BM6_at; Start 295; Stop 319
caaacagagtgtattggtaagatgc

SEQ ID NO: 85406 - DNA, 25 bp, Artificial
  probe
  misc_feature (1)..(25): SEQ ID NO: 6930; WAN024BM6_at; Start 954; Stop 978
aaagggatatccttatcagggaagt

SEQ ID NO: 85407 - DNA, 25 bp, Artificial
  probe
  misc_feature (1)..(25): SEQ ID NO: 6930; WAN024BM6_at; Start 587; Stop 611
tacaaagaagagatccaacggttcc

SEQ ID NO: 85408 - DNA, 25 bp, Artificial
  probe
  misc_feature (1)..(25): SEQ ID NO: 6930; WAN024BM6_at; Start 82; Stop 106
gataagctagttagcactccaacat

SEQ ID NO: 85409 - DNA, 25 bp, Artificial
  probe
  misc_feature (1)..(25): SEQ ID NO: 6930; WAN024BM6_at; Start 182; Stop 206
cagctttattgactggcttagacca

SEQ ID NO: 85410 - DNA, 25 bp, Artificial
  probe
  misc_feature (1)..(25): SEQ ID NO: 6930; WAN024BM6_at; Start 537; Stop 561
tgagaagttacatccaacaaactgg

SEQ ID NO: 85411 - DNA, 25 bp, Artificial
  probe
  misc_feature (1)..(25): SEQ ID NO: 6930; WAN024BM6_at; Start 351; Stop 375
tgatcatgtcttacttcacgatggg

SEQ ID NO: 85412 - DNA, 25 bp, Artificial
  probe
  misc_feature (1)..(25): SEQ ID NO: 6930; WAN024BM6_at; Start 160; Stop 184
ccttcttgcgttcctgctagggcag

SEQ ID NO: 85413 - DNA, 25 bp, Artificial
  probe
  misc_feature (1)..(25): SEQ ID NO: 6930; WAN024BM6_at; Start 992; Stop 1016
cgtttatttacgatccggctggatt

SEQ ID NO: 85414 - DNA, 25 bp, Artificial
  probe
  misc_feature (1)..(25): SEQ ID NO: 6930; WAN024BM6_at; Start 1330; Stop 1354
caacctattgttcgtcagatgaaga

SEQ ID NO: 85415 - DNA, 25 bp, Artificial
  probe
  misc_feature (1)..(25): SEQ ID NO: 6930; WAN024BM6_at; Start 1106; Stop 1130
cagatgaactagatggacggagtgt

SEQ ID NO: 85416 - DNA, 25 bp, Artificial
  probe
  misc_feature (1)..(25): SEQ ID NO: 6930; WAN024BM6_at; Start 517; Stop 541
gctagaccttgggataaagatgaga

SEQ ID NO: 85417 - DNA, 25 bp, Artificial
  probe
  misc_feature (1)..(25): SEQ ID NO: 6930; WAN024BM6_at; Start 504; Stop 528
taattcttgggaagctagaccttgg

SEQ ID NO: 85418 - DNA, 25 bp, Artificial
  probe
  misc_feature (1)..(25): SEQ ID NO: 6930; WAN024BM6_at; Start 197; Stop 221
gcttagaccaagataaaagtggacg

SEQ ID NO: 85419 - DNA, 25 bp, Artificial
  probe
  misc_feature (1)..(25): SEQ ID NO: 6930; WAN024BM6_at; Start 332; Stop 356
ccagacagagacttgggtttgatca

SEQ ID NO: 85420 - DNA, 25 bp, Artificial
  probe
  misc_feature (1)..(25): SEQ ID NO: 6930; WAN024BM6_at; Start 554; Stop 578
caaactgggttgtgagtgagtccat

SEQ ID NO: 85421 - DNA, 25 bp, Artificial
  probe
  misc_feature (1)..(25): SEQ ID NO: 6930; WAN024BM6_at; Start 1076; Stop 1100
cactcgtggatttggcaggaggaac

SEQ ID NO: 85422 - DNA, 25 bp, Artificial
  probe
  misc_feature (1)..(25): SEQ ID NO: 7279; WAN024BM7_at; Start 53; Stop 77
tccttttacaaatacattcactact

SEQ ID NO: 85423 - DNA, 25 bp, Artificial
  probe
  misc_feature (1)..(25): SEQ ID NO: 7279; WAN024BM7_at; Start 32; Stop 56
agcatcaagggaaaattctcctcct

SEQ ID NO: 85424 - DNA, 25 bp, Artificial
  probe
  misc_feature (1)..(25): SEQ ID NO: 7279; WAN024BM7_at; Start 18; Stop 42
agaacacgatgtacagcatcaaggg

SEQ ID NO: 85425 - DNA, 25 bp, Artificial
  probe
  misc_feature (1)..(25): SEQ ID NO: 7279; WAN024BM7_at; Start 31; Stop 55
cagcatcaagggaaaattctcctcc

SEQ ID NO: 85426 - DNA, 25 bp, Artificial
  probe
  misc_feature (1)..(25): SEQ ID NO: 7279; WAN024BM7_at; Start 28; Stop 52
gtacagcatcaagggaaaattctcc

SEQ ID NO: 85427 - DNA, 25 bp, Artificial
  probe
  misc_feature (1)..(25): SEQ ID NO: 7279; WAN024BM7_at; Start 33; Stop 57
gcatcaagggaaaattctcctcctt

SEQ ID NO: 85428 - DNA, 25 bp, Artificial
  probe
  misc_feature (1)..(25): SEQ ID NO: 7279; WAN024BM7_at; Start 48; Stop 72
tctcctccttttacaaatacattca

SEQ ID NO: 85429 - DNA, 25 bp, Artificial
  probe
  misc_feature (1)..(25): SEQ ID NO: 7279; WAN024BM7_at; Start 59; Stop 83
tacaaatacattcactactagatca

SEQ ID NO: 85430 - DNA, 25 bp, Artificial
  probe
  misc_feature (1)..(25): SEQ ID NO: 7279; WAN024BM7_at; Start 27; Stop 51
tgtacagcatcaagggaaaattctc

SEQ ID NO: 85431 - DNA, 25 bp, Artificial
  probe
  misc_feature (1)..(25): SEQ ID NO: 7279; WAN024BM7_at; Start 30; Stop 54
acagcatcaagggaaaattctcctc

SEQ ID NO: 85432 - DNA, 25 bp, Artificial
  probe
  misc_feature (1)..(25): SEQ ID NO: 7279; WAN024BM7_at; Start 4; Stop 28
ccctctgagattttagaacacgatg

SEQ ID NO: 85433 - DNA, 25 bp, Artificial
  probe
  misc_feature (1)..(25): SEQ ID NO: 7279; WAN024BM7_at; Start 17; Stop 41
tagaacacgatgtacagcatcaagg

SEQ ID NO: 85434 - DNA, 25 bp, Artificial
  probe
  misc_feature (1)..(25): SEQ ID NO: 7279; WAN024BM7_at; Start 22; Stop 46
cacgatgtacagcatcaagggaaaa

SEQ ID NO: 85435 - DNA, 25 bp, Artificial
  probe
  misc_feature (1)..(25): SEQ ID NO: 7279; WAN024BM7_at; Start 14; Stop 38
ttttagaacacgatgtacagcatca

SEQ ID NO: 85436 - DNA, 25 bp, Artificial
  probe
  misc_feature (1)..(25): SEQ ID NO: 7279; WAN024BM7_at; Start 3; Stop 27
gccctctgagattttagaacacgat

SEQ ID NO: 85437 - DNA, 25 bp, Artificial
  probe
  misc_feature (1)..(25): SEQ ID NO: 7279; WAN024BM7_at; Start 34; Stop 58
catcaagggaaaattctcctccttt

SEQ ID NO: 85438 - DNA, 25 bp, Artificial
  probe
  misc_feature (1)..(25): SEQ ID NO: 7279; WAN024BM7_at; Start 67; Stop 91
cattcactactagatcaaagtttgg

SEQ ID NO: 85439 - DNA, 25 bp, Artificial
  probe
  misc_feature (1)..(25): SEQ ID NO: 7279; WAN024BM7_at; Start 5; Stop 29
cctctgagattttagaacacgatgt

SEQ ID NO: 85440 - DNA, 25 bp, Artificial
  probe
  misc_feature (1)..(25): SEQ ID NO: 7279; WAN024BM7_at; Start 69; Stop 93
ttcactactagatcaaagtttggat

SEQ ID NO: 85441 - DNA, 25 bp, Artificial
  probe
  misc_feature (1)..(25): SEQ ID NO: 7279; WAN024BM7_at; Start 19; Stop 43
gaacacgatgtacagcatcaaggga

SEQ ID NO: 85442 - DNA, 25 bp, Artificial
  probe
  misc_feature (1)..(25): SEQ ID NO: 7279; WAN024BM7_at; Start 12; Stop 36
gattttagaacacgatgtacagcat

SEQ ID NO: 85443 - DNA, 25 bp, Artificial
  probe
  misc_feature (1)..(25): SEQ ID NO: 7279; WAN024BM7_at; Start 10; Stop 34
gagattttagaacacgatgtacagc

SEQ ID NO: 85444 - DNA, 25 bp, Artificial
  probe
  misc_feature (1)..(25): SEQ ID NO: 7279; WAN024BM7_at; Start 11; Stop 35
agattttagaacacgatgtacagca

SEQ ID NO: 85445 - DNA, 25 bp, Artificial
  probe
  misc_feature (1)..(25): SEQ ID NO: 7279; WAN024BM7_at; Start 2; Stop 26
tgccctctgagattttagaacacga

SEQ ID NO: 85446 - DNA, 25 bp, Artificial
  probe
  misc_feature (1)..(25): SEQ ID NO: 7279; WAN024BM7_at; Start 16; Stop 40
ttagaacacgatgtacagcatcaag

SEQ ID NO: 85447 - DNA, 25 bp, Artificial
  probe
  misc_feature (1)..(25): SEQ ID NO: 7279; WAN024BM7_at; Start 62; Stop 86
aaatacattcactactagatcaaag

SEQ ID NO: 85448 - DNA, 25 bp, Artificial
  probe
  misc_feature (1)..(25): SEQ ID NO: 7279; WAN024BM7_at; Start 7; Stop 31
tctgagattttagaacacgatgtac

SEQ ID NO: 85449 - DNA, 25 bp, Artificial
  probe
  misc_feature (1)..(25): SEQ ID NO: 7279; WAN024BM7_at; Start 24; Stop 48
cgatgtacagcatcaagggaaaatt

SEQ ID NO: 85450 - DNA, 25 bp, Artificial
  probe
  misc_feature (1)..(25): SEQ ID NO: 7279; WAN024BM7_at; Start 72; Stop 96
actactagatcaaagtttggataaa

SEQ ID NO: 85451 - DNA, 25 bp, Artificial
  probe
  misc_feature (1)..(25): SEQ ID NO: 7279; WAN024BM7_at; Start 70; Stop 94
tcactactagatcaaagtttggata

SEQ ID NO: 85452 - DNA, 25 bp, Artificial
  probe
  misc_feature (1)..(25): SEQ ID NO: 7279; WAN024BM7_at; Start 8; Stop 32
ctgagattttagaacacgatgtaca

SEQ ID NO: 85453 - DNA, 25 bp, Artificial
  probe
  misc_feature (1)..(25): SEQ ID NO: 7279; WAN024BM7_at; Start 20; Stop 44
aacacgatgtacagcatcaagggaa

SEQ ID NO: 85454 - DNA, 25 bp, Artificial
  probe
  misc_feature (1)..(25): SEQ ID NO: 7279; WAN024BM7_at; Start 1; Stop 25
gtgccctctgagattttagaacacg

SEQ ID NO: 85455 - DNA, 25 bp, Artificial
  probe
  misc_feature (1)..(25): SEQ ID NO: 7279; WAN024BM7_at; Start 25; Stop 49
gatgtacagcatcaagggaaaattc

SEQ ID NO: 85456 - DNA, 25 bp, Artificial
  probe
  misc_feature (1)..(25): SEQ ID NO: 7692; WAN024BM8_at; Start 71; Stop 95
aaaagttctgtgcaacttgcacaaa

SEQ ID NO: 85457 - DNA, 25 bp, Artificial
  probe
  misc_feature (1)..(25): SEQ ID NO: 7692; WAN024BM8_at; Start 27; Stop 51
tgaaaacgctttatatttctatggc

SEQ ID NO: 85458 - DNA, 25 bp, Artificial
  probe
  misc_feature (1)..(25): SEQ ID NO: 7692; WAN024BM8_at; Start 37; Stop 61
ttatatttctatggcaagatgacca

SEQ ID NO: 85459 - DNA, 25 bp, Artificial
  probe
  misc_feature (1)..(25): SEQ ID NO: 7692; WAN024BM8_at; Start 32; Stop 56
acgctttatatttctatggcaagat

SEQ ID NO: 85460 - DNA, 25 bp, Artificial
  probe
  misc_feature (1)..(25): SEQ ID NO: 7692; WAN024BM8_at; Start 75; Stop 99
gttctgtgcaacttgcacaaaactt

SEQ ID NO: 85461 - DNA, 25 bp, Artificial
  probe
  misc_feature (1)..(25): SEQ ID NO: 7692; WAN024BM8_at; Start 18; Stop 42
tattatagatgaaaacgctttatat

SEQ ID NO: 85462 - DNA, 25 bp, Artificial
  probe
  misc_feature (1)..(25): SEQ ID NO: 7692; WAN024BM8_at; Start 73; Stop 97
aagttctgtgcaacttgcacaaaac

SEQ ID NO: 85463 - DNA, 25 bp, Artificial
  probe
  misc_feature (1)..(25): SEQ ID NO: 7692; WAN024BM8_at; Start 12; Stop 36
taattatattatagatgaaaacgct

SEQ ID NO: 85464 - DNA, 25 bp, Artificial
  probe
  misc_feature (1)..(25): SEQ ID NO: 7692; WAN024BM8_at; Start 42; Stop 66
tttctatggcaagatgaccaaaaaa

SEQ ID NO: 85465 - DNA, 25 bp, Artificial
  probe
  misc_feature (1)..(25): SEQ ID NO: 7692; WAN024BM8_at; Start 36; Stop 60
tttatatttctatggcaagatgacc

SEQ ID NO: 85466 - DNA, 25 bp, Artificial
  probe
  misc_feature (1)..(25): SEQ ID NO: 7692; WAN024BM8_at; Start 40; Stop 64
tatttctatggcaagatgaccaaaa

SEQ ID NO: 85467 - DNA, 25 bp, Artificial
  probe
  misc_feature (1)..(25): SEQ ID NO: 7692; WAN024BM8_at; Start 31; Stop 55
aacgctttatatttctatggcaaga

SEQ ID NO: 85468 - DNA, 25 bp, Artificial
  probe
  misc_feature (1)..(25): SEQ ID NO: 7692; WAN024BM8_at; Start 69; Stop 93
aaaaaagttctgtgcaacttgcaca

SEQ ID NO: 85469 - DNA, 25 bp, Artificial
  probe
  misc_feature (1)..(25): SEQ ID NO: 7692; WAN024BM8_at; Start 34; Stop 58
gctttatatttctatggcaagatga

SEQ ID NO: 85470 - DNA, 25 bp, Artificial
  probe
  misc_feature (1)..(25): SEQ ID NO: 7692; WAN024BM8_at; Start 48; Stop 72
tggcaagatgaccaaaaaaataaaa

SEQ ID NO: 85471 - DNA, 25 bp, Artificial
  probe
  misc_feature (1)..(25): SEQ ID NO: 7692; WAN024BM8_at; Start 30; Stop 54
aaacgctttatatttctatggcaag

SEQ ID NO: 85472 - DNA, 25 bp, Artificial
  probe
  misc_feature (1)..(25): SEQ ID NO: 7692; WAN024BM8_at; Start 13; Stop 37
aattatattatagatgaaaacgctt

SEQ ID NO: 85473 - DNA, 25 bp, Artificial
  probe
  misc_feature (1)..(25): SEQ ID NO: 7692; WAN024BM8_at; Start 25; Stop 49
gatgaaaacgctttatatttctatg

SEQ ID NO: 85474 - DNA, 25 bp, Artificial
  probe
  misc_feature (1)..(25): SEQ ID NO: 7692; WAN024BM8_at; Start 68; Stop 92
taaaaaagttctgtgcaacttgcac

SEQ ID NO: 85475 - DNA, 25 bp, Artificial
  probe
  misc_feature (1)..(25): SEQ ID NO: 7692; WAN024BM8_at; Start 28; Stop 52
gaaaacgctttatatttctatggca

SEQ ID NO: 85476 - DNA, 25 bp, Artificial
  probe
  misc_feature (1)..(25): SEQ ID NO: 7692; WAN024BM8_at; Start 16; Stop 40
tatattatagatgaaaacgctttat

SEQ ID NO: 85477 - DNA, 25 bp, Artificial
  probe
  misc_feature (1)..(25): SEQ ID NO: 7692; WAN024BM8_at; Start 44; Stop 68
tctatggcaagatgaccaaaaaaat

SEQ ID NO: 85478 - DNA, 25 bp, Artificial
  probe
  misc_feature (1)..(25): SEQ ID NO: 7692; WAN024BM8_at; Start 35; Stop 59
ctttatatttctatggcaagatgac

SEQ ID NO: 85479 - DNA, 25 bp, Artificial
  probe
  misc_feature (1)..(25): SEQ ID NO: 7692; WAN024BM8_at; Start 70; Stop 94
aaaaagttctgtgcaacttgcacaa

SEQ ID NO: 85480 - DNA, 25 bp, Artificial
  probe
  misc_feature (1)..(25): SEQ ID NO: 7692; WAN024BM8_at; Start 66; Stop 90
aataaaaaagttctgtgcaacttgc

SEQ ID NO: 85481 - DNA, 25 bp, Artificial
  probe
  misc_feature (1)..(25): SEQ ID NO: 7692; WAN024BM8_at; Start 74; Stop 98
agttctgtgcaacttgcacaaaact

SEQ ID NO: 85482 - DNA, 25 bp, Artificial
  probe
  misc_feature (1)..(25): SEQ ID NO: 7692; WAN024BM8_at; Start 67; Stop 91
ataaaaaagttctgtgcaacttgca

SEQ ID NO: 85483 - DNA, 25 bp, Artificial
  probe
  misc_feature (1)..(25): SEQ ID NO: 7692; WAN024BM8_at; Start 21; Stop 45
tatagatgaaaacgctttatatttc

SEQ ID NO: 85484 - DNA, 25 bp, Artificial
  probe
  misc_feature (1)..(25): SEQ ID NO: 7692; WAN024BM8_at; Start 39; Stop 63
atatttctatggcaagatgaccaaa

SEQ ID NO: 85485 - DNA, 25 bp, Artificial
  probe
  misc_feature (1)..(25): SEQ ID NO: 7692; WAN024BM8_at; Start 72; Stop 96
aaagttctgtgcaacttgcacaaaa

SEQ ID NO: 85486 - DNA, 25 bp, Artificial
  probe
  misc_feature (1)..(25): SEQ ID NO: 7692; WAN024BM8_at; Start 15; Stop 39
ttatattatagatgaaaacgcttta

SEQ ID NO: 85487 - DNA, 25 bp, Artificial
  probe
  misc_feature (1)..(25): SEQ ID NO: 7692; WAN024BM8_at; Start 29; Stop 53
aaaacgctttatatttctatggcaa

SEQ ID NO: 85488 - DNA, 25 bp, Artificial
  probe
  misc_feature (1)..(25): SEQ ID NO: 7692; WAN024BM8_at; Start 33; Stop 57
cgctttatatttctatggcaagatg

SEQ ID NO: 85489 - DNA, 25 bp, Artificial
  probe
  misc_feature (1)..(25): SEQ ID NO: 7692; WAN024BM8_at; Start 41; Stop 65
atttctatggcaagatgaccaaaaa

SEQ ID NO: 85490 - DNA, 25 bp, Artificial
  probe
  misc_feature (1)..(25): SEQ ID NO: 7476; WAN024BM9_at; Start 18; Stop 42
agcacaaatagggacggaagactgc

SEQ ID NO: 85491 - DNA, 25 bp, Artificial
  probe
  misc_feature (1)..(25): SEQ ID NO: 7476; WAN024BM9_at; Start 44; Stop 68
tcctcccttttatcagaaaaggaga

SEQ ID NO: 85492 - DNA, 25 bp, Artificial
  probe
  misc_feature (1)..(25): SEQ ID NO: 7476; WAN024BM9_at; Start 52; Stop 76
tttatcagaaaaggagaaacagatg

SEQ ID NO: 85493 - DNA, 25 bp, Artificial
  probe
  misc_feature (1)..(25): SEQ ID NO: 7476; WAN024BM9_at; Start 33; Stop 57
ggaagactgcttcctcccttttatc

SEQ ID NO: 85494 - DNA, 25 bp, Artificial
  probe
  misc_feature (1)..(25): SEQ ID NO: 7476; WAN024BM9_at; Start 38; Stop 62
actgcttcctcccttttatcagaaa

SEQ ID NO: 85495 - DNA, 25 bp, Artificial
  probe
  misc_feature (1)..(25): SEQ ID NO: 7476; WAN024BM9_at; Start 16; Stop 40
atagcacaaatagggacggaagact

SEQ ID NO: 85496 - DNA, 25 bp, Artificial
  probe
  misc_feature (1)..(25): SEQ ID NO: 7476; WAN024BM9_at; Start 57; Stop 81
cagaaaaggagaaacagatgacact

SEQ ID NO: 85497 - DNA, 25 bp, Artificial
  probe
  misc_feature (1)..(25): SEQ ID NO: 7476; WAN024BM9_at; Start 19; Stop 43
gcacaaatagggacggaagactgct

SEQ ID NO: 85498 - DNA, 25 bp, Artificial
  probe
  misc_feature (1)..(25): SEQ ID NO: 7476; WAN024BM9_at; Start 22; Stop 46
caaatagggacggaagactgcttcc

SEQ ID NO: 85499 - DNA, 25 bp, Artificial
  probe
  misc_feature (1)..(25): SEQ ID NO: 7476; WAN024BM9_at; Start 24; Stop 48
aatagggacggaagactgcttcctc

SEQ ID NO: 85500 - DNA, 25 bp, Artificial
  probe
  misc_feature (1)..(25): SEQ ID NO: 7476; WAN024BM9_at; Start 34; Stop 58
gaagactgcttcctcccttttatca

SEQ ID NO: 85501 - DNA, 25 bp, Artificial
  probe
  misc_feature (1)..(25): SEQ ID NO: 7476; WAN024BM9_at; Start 14; Stop 38
aaatagcacaaatagggacggaaga

SEQ ID NO: 85502 - DNA, 25 bp, Artificial
  probe
  misc_feature (1)..(25): SEQ ID NO: 7476; WAN024BM9_at; Start 35; Stop 59
aagactgcttcctcccttttatcag

SEQ ID NO: 85503 - DNA, 25 bp, Artificial
  probe
  misc_feature (1)..(25): SEQ ID NO: 7476; WAN024BM9_at; Start 6; Stop 30
tataattgaaatagcacaaataggg

SEQ ID NO: 85504 - DNA, 25 bp, Artificial
  probe
  misc_feature (1)..(25): SEQ ID NO: 7476; WAN024BM9_at; Start 25; Stop 49
atagggacggaagactgcttcctcc

SEQ ID NO: 85505 - DNA, 25 bp, Artificial
  probe
  misc_feature (1)..(25): SEQ ID NO: 7476; WAN024BM9_at; Start 51; Stop 75
ttttatcagaaaaggagaaacagat

SEQ ID NO: 85506 - DNA, 25 bp, Artificial
  probe
  misc_feature (1)..(25): SEQ ID NO: 7476; WAN024BM9_at; Start 40; Stop 64
tgcttcctcccttttatcagaaaag

SEQ ID NO: 85507 - DNA, 25 bp, Artificial
  probe
  misc_feature (1)..(25): SEQ ID NO: 7476; WAN024BM9_at; Start 13; Stop 37
gaaatagcacaaatagggacggaag

SEQ ID NO: 85508 - DNA, 25 bp, Artificial
  probe
  misc_feature (1)..(25): SEQ ID NO: 7476; WAN024BM9_at; Start 2; Stop 26
tgagtataattgaaatagcacaaat

SEQ ID NO: 85509 - DNA, 25 bp, Artificial
  probe
  misc_feature (1)..(25): SEQ ID NO: 7476; WAN024BM9_at; Start 11; Stop 35
ttgaaatagcacaaatagggacgga

SEQ ID NO: 85510 - DNA, 25 bp, Artificial
  probe
  misc_feature (1)..(25): SEQ ID NO: 7476; WAN024BM9_at; Start 12; Stop 36
tgaaatagcacaaatagggacggaa

SEQ ID NO: 85511 - DNA, 25 bp, Artificial
  probe
  misc_feature (1)..(25): SEQ ID NO: 7476; WAN024BM9_at; Start 36; Stop 60
agactgcttcctcccttttatcaga

SEQ ID NO: 85512 - DNA, 25 bp, Artificial
  probe
  misc_feature (1)..(25): SEQ ID NO: 7476; WAN024BM9_at; Start 56; Stop 80
tcagaaaaggagaaacagatgacac

SEQ ID NO: 85513 - DNA, 25 bp, Artificial
  probe
  misc_feature (1)..(25): SEQ ID NO: 7476; WAN024BM9_at; Start 27; Stop 51
agggacggaagactgcttcctccct

SEQ ID NO: 85514 - DNA, 25 bp, Artificial
  probe
  misc_feature (1)..(25): SEQ ID NO: 7476; WAN024BM9_at; Start 26; Stop 50
tagggacggaagactgcttcctccc

SEQ ID NO: 85515 - DNA, 25 bp, Artificial
  probe
  misc_feature (1)..(25): SEQ ID NO: 7476; WAN024BM9_at; Start 15; Stop 39
aatagcacaaatagggacggaagac

SEQ ID NO: 85516 - DNA, 25 bp, Artificial
  probe
  misc_feature (1)..(25): SEQ ID NO: 7476; WAN024BM9_at; Start 10; Stop 34
attgaaatagcacaaatagggacgg

SEQ ID NO: 85517 - DNA, 25 bp, Artificial
  probe
  misc_feature (1)..(25): SEQ ID NO: 7476; WAN024BM9_at; Start 9; Stop 33
aattgaaatagcacaaatagggacg

SEQ ID NO: 85518 - DNA, 25 bp, Artificial
  probe
  misc_feature (1)..(25): SEQ ID NO: 7476; WAN024BM9_at; Start 8; Stop 32
taattgaaatagcacaaatagggac

SEQ ID NO: 85519 - DNA, 25 bp, Artificial
  probe
  misc_feature (1)..(25): SEQ ID NO: 7476; WAN024BM9_at; Start 49; Stop 73
ccttttatcagaaaaggagaaacag

SEQ ID NO: 85520 - DNA, 25 bp, Artificial
  probe
  misc_feature (1)..(25): SEQ ID NO: 7476; WAN024BM9_at; Start 32; Stop 56
cggaagactgcttcctcccttttat

SEQ ID NO: 85521 - DNA, 25 bp, Artificial
  probe
  misc_feature (1)..(25): SEQ ID NO: 7476; WAN024BM9_at; Start 54; Stop 78
tatcagaaaaggagaaacagatgac

SEQ ID NO: 85522 - DNA, 25 bp, Artificial
  probe
  misc_feature (1)..(25): SEQ ID NO: 7476; WAN024BM9_at; Start 20; Stop 44
cacaaatagggacggaagactgctt

SEQ ID NO: 85523 - DNA, 25 bp, Artificial
  probe
  misc_feature (1)..(25): SEQ ID NO: 7476; WAN024BM9_at; Start 23; Stop 47
aaatagggacggaagactgcttcct

SEQ ID NO: 85524 - DNA, 25 bp, Artificial
  probe
  misc_feature (1)..(25): SEQ ID NO: 6846; WAN024BMA_at; Start 25; Stop 49
agtaagatgtttggaattattttat

SEQ ID NO: 85525 - DNA, 25 bp, Artificial
  probe
  misc_feature (1)..(25): SEQ ID NO: 6846; WAN024BMA_at; Start 27; Stop 51
taagatgtttggaattattttattg

SEQ ID NO: 85526 - DNA, 25 bp, Artificial
  probe
  misc_feature (1)..(25): SEQ ID NO: 6846; WAN024BMA_at; Start 28; Stop 52
aagatgtttggaattattttattgg

SEQ ID NO: 85527 - DNA, 25 bp, Artificial
  probe
  misc_feature (1)..(25): SEQ ID NO: 6846; WAN024BMA_at; Start 24; Stop 48
tagtaagatgtttggaattatttta

SEQ ID NO: 85528 - DNA, 25 bp, Artificial
  probe
  misc_feature (1)..(25): SEQ ID NO: 6846; WAN024BMA_at; Start 20; Stop 44
attttagtaagatgtttggaattat

SEQ ID NO: 85529 - DNA, 25 bp, Artificial
  probe
  misc_feature (1)..(25): SEQ ID NO: 6521; WAN024BMB_at; Start 577; Stop 601
ttgacgcaaaagattgtggagcacc

SEQ ID NO: 85530 - DNA, 25 bp, Artificial
  probe
  misc_feature (1)..(25): SEQ ID NO: 6521; WAN024BMB_at; Start 701; Stop 725
tcaagggagaagagaaaaagcatct

SEQ ID NO: 85531 - DNA, 25 bp, Artificial
  probe
  misc_feature (1)..(25): SEQ ID NO: 6521; WAN024BMB_at; Start 547; Stop 571
gacccgaaaaccagtcaaatggtga

SEQ ID NO: 85532 - DNA, 25 bp, Artificial
  probe
  misc_feature (1)..(25): SEQ ID NO: 6521; WAN024BMB_at; Start 743; Stop 767
tgcatctcttccagaaaaatagtgg

SEQ ID NO: 85533 - DNA, 25 bp, Artificial
  probe
  misc_feature (1)..(25): SEQ ID NO: 6521; WAN024BMB_at; Start 272; Stop 296
atcctaagatgggaacagcttctcg

SEQ ID NO: 85534 - DNA, 25 bp, Artificial
  probe
  misc_feature (1)..(25): SEQ ID NO: 6521; WAN024BMB_at; Start 61; Stop 85
gagaaccatgtcctcaaaggattag

SEQ ID NO: 85535 - DNA, 25 bp, Artificial
  probe
  misc_feature (1)..(25): SEQ ID NO: 6521; WAN024BMB_at; Start 679; Stop 703
caaggcaagatagtggtggatgtca

SEQ ID NO: 85536 - DNA, 25 bp, Artificial
  probe
  misc_feature (1)..(25): SEQ ID NO: 6521; WAN024BMB_at; Start 225; Stop 249
tctgagtgtcagaaagagagccaag

SEQ ID NO: 85537 - DNA, 25 bp, Artificial
  probe
  misc_feature (1)..(25): SEQ ID NO: 6521; WAN024BMB_at; Start 240; Stop 264
gagagccaaggatattgcccgtgtt

SEQ ID NO: 85538 - DNA, 25 bp, Artificial
  probe
  misc_feature (1)..(25): SEQ ID NO: 6521; WAN024BMB_at; Start 303; Stop 327
gattgaggagaatatggctattgcc

SEQ ID NO: 85539 - DNA, 25 bp, Artificial
  probe
  misc_feature (1)..(25): SEQ ID NO: 6521; WAN024BMB_at; Start 378; Stop 402
tagaatccagttccaagaggccttg

SEQ ID NO: 85540 - DNA, 25 bp, Artificial
  probe
  misc_feature (1)..(25): SEQ ID NO: 6521; WAN024BMB_at; Start 591; Stop 615
tgtggagcaccatcagtggacgact

SEQ ID NO: 85541 - DNA, 25 bp, Artificial
  probe
  misc_feature (1)..(25): SEQ ID NO: 6521; WAN024BMB_at; Start 518; Stop 542
tacttttggatgaacatactgcggc

SEQ ID NO: 85542 - DNA, 25 bp, Artificial
  probe
  misc_feature (1)..(25): SEQ ID NO: 6521; WAN024BMB_at; Start 147; Stop 171
cactttgatgaatatcttggctggc

SEQ ID NO: 85543 - DNA, 25 bp, Artificial
  probe
  misc_feature (1)..(25): SEQ ID NO: 6521; WAN024BMB_at; Start 470; Stop 494
gacaggctttgactctagtcatgac

SEQ ID NO: 85544 - DNA, 25 bp, Artificial
  probe
  misc_feature (1)..(25): SEQ ID NO: 6521; WAN024BMB_at; Start 604; Stop 628
cagtggacgactttgatgattaccc

SEQ ID NO: 85545 - DNA, 25 bp, Artificial
  probe
  misc_feature (1)..(25): SEQ ID NO: 6521; WAN024BMB_at; Start 162; Stop 186
cttggctggcaatctatcggtggac

SEQ ID NO: 85546 - DNA, 25 bp, Artificial
  probe
  misc_feature (1)..(25): SEQ ID NO: 6521; WAN024BMB_at; Start 362; Stop 386
gcgtgaaggagaaggatagaatcca

SEQ ID NO: 85547 - DNA, 25 bp, Artificial
  probe
  misc_feature (1)..(25): SEQ ID NO: 6521; WAN024BMB_at; Start 721; Stop 745
catctgacagttgaagaccttatgc

SEQ ID NO: 85548 - DNA, 25 bp, Artificial
  probe
  misc_feature (1)..(25): SEQ ID NO: 6521; WAN024BMB_at; Start 453; Stop 477
tctctcaggaggacaaagacaggct

SEQ ID NO: 85549 - DNA, 25 bp, Artificial
  probe
  misc_feature (1)..(25): SEQ ID NO: 6521; WAN024BMB_at; Start 411; Stop 435
gaatattggtcttgaaaaccgctta

SEQ ID NO: 85550 - DNA, 25 bp, Artificial
  probe
  misc_feature (1)..(25): SEQ ID NO: 6521; WAN024BMB_at; Start 44; Stop 68
aagcagggacggtcaatgagaacca

SEQ ID NO: 85551 - DNA, 25 bp, Artificial
  probe
  misc_feature (1)..(25): SEQ ID NO: 6521; WAN024BMB_at; Start 532; Stop 556
catactgcggcacttgacccgaaaa

SEQ ID NO: 85552 - DNA, 25 bp, Artificial
  probe
  misc_feature (1)..(25): SEQ ID NO: 6521; WAN024BMB_at; Start 758; Stop 782
aaaatagtggccaaagtctggtcag

SEQ ID NO: 85553 - DNA, 25 bp, Artificial
  probe
  misc_feature (1)..(25): SEQ ID NO: 6521; WAN024BMB_at; Start 195; Stop 219
ccttctactggcagggaaatccatt

SEQ ID NO: 85554 - DNA, 25 bp, Artificial
  probe
  misc_feature (1)..(25): SEQ ID NO: 6521; WAN024BMB_at; Start 491; Stop 515
tgacagatctgatgaaaccaaaact

SEQ ID NO: 85555 - DNA, 25 bp, Artificial
  probe
  misc_feature (1)..(25): SEQ ID NO: 6521; WAN024BMB_at; Start 30; Stop 54
tcacaagacatttgaagcagggacg

SEQ ID NO: 85556 - DNA, 25 bp, Artificial
  probe
  misc_feature (1)..(25): SEQ ID NO: 6521; WAN024BMB_at; Start 319; Stop 343
gctattgccttgagacgcgggcaga

SEQ ID NO: 85557 - DNA, 25 bp, Artificial
  probe
  misc_feature (1)..(25): SEQ ID NO: 6521; WAN024BMB_at; Start 649; Stop 673
gagtacggcaatcgtctcattatgc

SEQ ID NO: 85558 - DNA, 25 bp, Artificial
  probe
  misc_feature (1)..(25): SEQ ID NO: 6521; WAN024BMB_at; Start 562; Stop 586
caaatggtgatggacttgacgcaaa

SEQ ID NO: 85559 - DNA, 25 bp, Artificial
  probe
  misc_feature (1)..(25): SEQ ID NO: 6521; WAN024BMB_at; Start 633; Stop 657
tatgaatcatgcgattgagtacggc

SEQ ID NO: 85560 - DNA, 25 bp, Artificial
  probe
  misc_feature (1)..(25): SEQ ID NO: 6521; WAN024BMB_at; Start 123; Stop 147
tggtggaaatggagcaggaaaatcc

SEQ ID NO: 85561 - DNA, 25 bp, Artificial
  probe
  misc_feature (1)..(25): SEQ ID NO: 6521; WAN024BMB_at; Start 255; Stop 279
tgcccgtgtttttcaagatcctaag

SEQ ID NO: 85562 - DNA, 25 bp, Artificial
  probe
  misc_feature (1)..(25): SEQ ID NO: 6521; WAN024BMB_at; Start 287; Stop 311
cagcttctcgtttgacgattgagga

SEQ ID NO: 85563 - DNA, 25 bp, Artificial
  probe
  misc_feature (1)..(25): SEQ ID NO: 6510; WAN024BMC_at; Start 223; Stop 247
ggaatgctccacaccaagatgaaaa

SEQ ID NO: 85564 - DNA, 25 bp, Artificial
  probe
  misc_feature (1)..(25): SEQ ID NO: 6510; WAN024BMC_at; Start 437; Stop 461
tggtcttgacccttttgatgaaaac

SEQ ID NO: 85565 - DNA, 25 bp, Artificial
  probe
  misc_feature (1)..(25): SEQ ID NO: 6510; WAN024BMC_at; Start 467; Stop 491
ttggcttggtcttgcgttcgactgg

SEQ ID NO: 85566 - DNA, 25 bp, Artificial
  probe
  misc_feature (1)..(25): SEQ ID NO: 6510; WAN024BMC_at; Start 96; Stop 120
tatgactgctgagggagcctttcct

SEQ ID NO: 85567 - DNA, 25 bp, Artificial
  probe
  misc_feature (1)..(25): SEQ ID NO: 6510; WAN024BMC_at; Start 209; Stop 233
caggtcttgtatcaggaatgctcca

SEQ ID NO: 85568 - DNA, 25 bp, Artificial
  probe
  misc_feature (1)..(25): SEQ ID NO: 6510; WAN024BMC_at; Start 583; Stop 607
tgtggttccttgtttgcccaaaatg

SEQ ID NO: 85569 - DNA, 25 bp, Artificial
  probe
  misc_feature (1)..(25): SEQ ID NO: 6510; WAN024BMC_at; Start 795; Stop 819
ggtacgtctctttaatgcaatcttg

SEQ ID NO: 85570 - DNA, 25 bp, Artificial
  probe
  misc_feature (1)..(25): SEQ ID NO: 6510; WAN024BMC_at; Start 780; Stop 804
tctagatcaaaacttggtacgtctc

SEQ ID NO: 85571 - DNA, 25 bp, Artificial
  probe
  misc_feature (1)..(25): SEQ ID NO: 6510; WAN024BMC_at; Start 850; Stop 874
caaaagagattaaagattcgtggtc

SEQ ID NO: 85572 - DNA, 25 bp, Artificial
  probe
  misc_feature (1)..(25): SEQ ID NO: 6510; WAN024BMC_at; Start 453; Stop 477
gatgaaaacagagattggcttggtc

SEQ ID NO: 85573 - DNA, 25 bp, Artificial
  probe
  misc_feature (1)..(25): SEQ ID NO: 6510; WAN024BMC_at; Start 654; Stop 678
tttgagctcggtgattattgcggaa

SEQ ID NO: 85574 - DNA, 25 bp, Artificial
  probe
  misc_feature (1)..(25): SEQ ID NO: 6510; WAN024BMC_at; Start 161; Stop 185
caaatccttggcttgcgactttact

SEQ ID NO: 85575 - DNA, 25 bp, Artificial
  probe
  misc_feature (1)..(25): SEQ ID NO: 6510; WAN024BMC_at; Start 526; Stop 550
aatgtagacaccatgaagattgttg

SEQ ID NO: 85576 - DNA, 25 bp, Artificial
  probe
  misc_feature (1)..(25): SEQ ID NO: 6510; WAN024BMC_at; Start 703; Stop 727
ggaggccgcttattatccatcggaa

SEQ ID NO: 85577 - DNA, 25 bp, Artificial
  probe
  misc_feature (1)..(25): SEQ ID NO: 6510; WAN024BMC_at; Start 493; Stop 517
gataatatcccgatgagtgaggcca

SEQ ID NO: 85578 - DNA, 25 bp, Artificial
  probe
  misc_feature (1)..(25): SEQ ID NO: 6510; WAN024BMC_at; Start 347; Stop 371
caaccgtctttaaacagttggcgag

SEQ ID NO: 85579 - DNA, 25 bp, Artificial
  probe
  misc_feature (1)..(25): SEQ ID NO: 6510; WAN024BMC_at; Start 684; Stop 708
gatacacgacttgaccattggaggc

SEQ ID NO: 85580 - DNA, 25 bp, Artificial
  probe
  misc_feature (1)..(25): SEQ ID NO: 6510; WAN024BMC_at; Start 275; Stop 299
ccttgacagggctctattcaatcaa

SEQ ID NO: 85581 - DNA, 25 bp, Artificial
  probe
  misc_feature (1)..(25): SEQ ID NO: 6510; WAN024BMC_at; Start 563; Stop 587
caaacggtttgattgctctatgtgg

SEQ ID NO: 85582 - DNA, 25 bp, Artificial
  probe
  misc_feature (1)..(25): SEQ ID NO: 6510; WAN024BMC_at; Start 376; Stop 400
ggtctgacaaatgaaggagctgttt

SEQ ID NO: 85583 - DNA, 25 bp, Artificial
  probe
  misc_feature (1)..(25): SEQ ID NO: 6510; WAN024BMC_at; Start 361; Stop 385
cagttggcgagcttgggtctgacaa

SEQ ID NO: 85584 - DNA, 25 bp, Artificial
  probe
  misc_feature (1)..(25): SEQ ID NO: 6510; WAN024BMC_at; Start 619; Stop 643
gatgtgacttctgggacaggaacca

SEQ ID NO: 85585 - DNA, 25 bp, Artificial
  probe
  misc_feature (1)..(25): SEQ ID NO: 6510; WAN024BMC_at; Start 85; Stop 109
gatattgcggatatgactgctgagg

SEQ ID NO: 85586 - DNA, 25 bp, Artificial
  probe
  misc_feature (1)..(25): SEQ ID NO: 6510; WAN024BMC_at; Start 125; Stop 149
gggcagcagtcgttgtatcacagat

SEQ ID NO: 85587 - DNA, 25 bp, Artificial
  probe
  misc_feature (1)..(25): SEQ ID NO: 6510; WAN024BMC_at; Start 720; Stop 744
catcggaatcggtgctattgtttac

SEQ ID NO: 85588 - DNA, 25 bp, Artificial
  probe
  misc_feature (1)..(25): SEQ ID NO: 6510; WAN024BMC_at; Start 316; Stop 340
agtgtacccaatctttccttgggag

SEQ ID NO: 85589 - DNA, 25 bp, Artificial
  probe
  misc_feature (1)..(25): SEQ ID NO: 6510; WAN024BMC_at; Start 262; Stop 286
acagggattgtgaccttgacagggc

SEQ ID NO: 85590 - DNA, 25 bp, Artificial
  probe
  misc_feature (1)..(25): SEQ ID NO: 6510; WAN024BMC_at; Start 300; Stop 324
tattaaaatcatgggcagtgtaccc

SEQ ID NO: 85591 - DNA, 25 bp, Artificial
  probe
  misc_feature (1)..(25): SEQ ID NO: 6510; WAN024BMC_at; Start 243; Stop 267
gaaaatcccagctctcttgacaggg

SEQ ID NO: 85592 - DNA, 25 bp, Artificial
  probe
  misc_feature (1)..(25): SEQ ID NO: 6510; WAN024BMC_at; Start 196; Stop 220
gcaggtatggtagcaggtcttgtat

SEQ ID NO: 85593 - DNA, 25 bp, Artificial
  probe
  misc_feature (1)..(25): SEQ ID NO: 6510; WAN024BMC_at; Start 510; Stop 534
tgaggccaatggagtcaatgtagac

SEQ ID NO: 85594 - DNA, 25 bp, Artificial
  probe
  misc_feature (1)..(25): SEQ ID NO: 6510; WAN024BMC_at; Start 331; Stop 355
tccttgggagattctgcaaccgtct

SEQ ID NO: 85595 - DNA, 25 bp, Artificial
  probe
  misc_feature (1)..(25): SEQ ID NO: 6510; WAN024BMC_at; Start 669; Stop 693
tattgcggaagtcttgatacacgac

SEQ ID NO: 85596 - DNA, 25 bp, Artificial
  probe
  misc_feature (1)..(25): SEQ ID NO: 6510; WAN024BMC_at; Start 176; Stop 200
cgactttacttgctttgctggcagg

SEQ ID NO: 85597 - DNA, 25 bp, Artificial
  probe
  misc_feature (1)..(25): SEQ ID NO: 6938; WAN024BMD_at; Start 225; Stop 249
gcctgaaaaactggaattgcatacc

SEQ ID NO: 85598 - DNA, 25 bp, Artificial
  probe
  misc_feature (1)..(25): SEQ ID NO: 6938; WAN024BMD_at; Start 246; Stop 270
taccaatcaagaaatggcagatgca

SEQ ID NO: 85599 - DNA, 25 bp, Artificial
  probe
  misc_feature (1)..(25): SEQ ID NO: 6938; WAN024BMD_at; Start 238; Stop 262
gaattgcataccaatcaagaaatgg

SEQ ID NO: 85600 - DNA, 25 bp, Artificial
  probe
  misc_feature (1)..(25): SEQ ID NO: 6938; WAN024BMD_at; Start 38; Stop 62
ccatggaaacagttaagcaggtttc

SEQ ID NO: 85601 - DNA, 25 bp, Artificial
  probe
  misc_feature (1)..(25): SEQ ID NO: 6938; WAN024BMD_at; Start 220; Stop 244
gagttgcctgaaaaactggaattgc

SEQ ID NO: 85602 - DNA, 25 bp, Artificial
  probe
  misc_feature (1)..(25): SEQ ID NO: 6938; WAN024BMD_at; Start 170; Stop 194
gcatgctgattcgtgttttaaaagg

SEQ ID NO: 85603 - DNA, 25 bp, Artificial
  probe
  misc_feature (1)..(25): SEQ ID NO: 6938; WAN024BMD_at; Start 52; Stop 76
aagcaggtttctattaaacacaagg

SEQ ID NO: 85604 - DNA, 25 bp, Artificial
  probe
  misc_feature (1)..(25): SEQ ID NO: 6938; WAN024BMD_at; Start 260; Stop 284
tggcagatgcattgggaattgatat

SEQ ID NO: 85605 - DNA, 25 bp, Artificial
  probe
  misc_feature (1)..(25): SEQ ID NO: 6938; WAN024BMD_at; Start 203; Stop 227
cagaaaatatagcagttgagttgcc

SEQ ID NO: 85606 - DNA, 25 bp, Artificial
  probe
  misc_feature (1)..(25): SEQ ID NO: 6938; WAN024BMD_at; Start 151; Stop 175
ttgggaagacagacagctcgcatgc

SEQ ID NO: 85607 - DNA, 25 bp, Artificial
  probe
  misc_feature (1)..(25): SEQ ID NO: 6938; WAN024BMD_at; Start 140; Stop 164
attatgaagaattgggaagacagac

SEQ ID NO: 85608 - DNA, 25 bp, Artificial
  probe
  misc_feature (1)..(25): SEQ ID NO: 6938; WAN024BMD_at; Start 21; Stop 45
taatatcattttgtcaaccatggaa

SEQ ID NO: 85609 - DNA, 25 bp, Artificial
  probe
  misc_feature (1)..(25): SEQ ID NO: 6938; WAN024BMD_at; Start 193; Stop 217
ggtgaggaaccagaaaatatagcag

SEQ ID NO: 85610 - DNA, 25 bp, Artificial
  probe
  misc_feature (1)..(25): SEQ ID NO: 6938; WAN024BMD_at; Start 282; Stop 306
tattagtaagttagaaggcaaggaa

SEQ ID NO: 85611 - DNA, 25 bp, Artificial
  probe
  misc_feature (1)..(25): SEQ ID NO: 6938; WAN024BMD_at; Start 126; Stop 150
taactacggaaccaattatgaagaa

SEQ ID NO: 85612 - DNA, 25 bp, Artificial
  probe
  misc_feature (1)..(25): SEQ ID NO: 6938; WAN024BMD_at; Start 253; Stop 277
caagaaatggcagatgcattgggaa

SEQ ID NO: 85613 - DNA, 25 bp, Artificial
  probe
  misc_feature (1)..(25): SEQ ID NO: 6938; WAN024BMD_at; Start 72; Stop 96
caaggttccagtattcggtggttca

SEQ ID NO: 85614 - DNA, 25 bp, Artificial
  probe
  misc_feature (1)..(25): SEQ ID NO: 6938; WAN024BMD_at; Start 78; Stop 102
tccagtattcggtggttcaacagaa

SEQ ID NO: 85615 - DNA, 25 bp, Artificial
  probe
  misc_feature (1)..(25): SEQ ID NO: 6938; WAN024BMD_at; Start 154; Stop 178
ggaagacagacagctcgcatgctga

SEQ ID NO: 85616 - DNA, 25 bp, Artificial
  probe
  misc_feature (1)..(25): SEQ ID NO: 6938; WAN024BMD_at; Start 26; Stop 50
tcattttgtcaaccatggaaacagt

SEQ ID NO: 85617 - DNA, 25 bp, Artificial
  probe
  misc_feature (1)..(25): SEQ ID NO: 6938; WAN024BMD_at; Start 147; Stop 171
agaattgggaagacagacagctcgc

SEQ ID NO: 85618 - DNA, 25 bp, Artificial
  probe
  misc_feature (1)..(25): SEQ ID NO: 6938; WAN024BMD_at; Start 34; Stop 58
tcaaccatggaaacagttaagcagg

SEQ ID NO: 85619 - DNA, 25 bp, Artificial
  probe
  misc_feature (1)..(25): SEQ ID NO: 6938; WAN024BMD_at; Start 160; Stop 184
cagacagctcgcatgctgattcgtg

SEQ ID NO: 85620 - DNA, 25 bp, Artificial
  probe
  misc_feature (1)..(25): SEQ ID NO: 6938; WAN024BMD_at; Start 114; Stop 138
tggtggcttgtataactacggaacc

SEQ ID NO: 85621 - DNA, 25 bp, Artificial
  probe
  misc_feature (1)..(25): SEQ ID NO: 6938; WAN024BMD_at; Start 267; Stop 291
tgcattgggaattgatattagtaag

SEQ ID NO: 85622 - DNA, 25 bp, Artificial
  probe
  misc_feature (1)..(25): SEQ ID NO: 6938; WAN024BMD_at; Start 166; Stop 190
gctcgcatgctgattcgtgttttaa

SEQ ID NO: 85623 - DNA, 25 bp, Artificial
  probe
  misc_feature (1)..(25): SEQ ID NO: 6938; WAN024BMD_at; Start 105; Stop 129
gattgctgttggtggcttgtataac

SEQ ID NO: 85624 - DNA, 25 bp, Artificial
  probe
  misc_feature (1)..(25): SEQ ID NO: 6938; WAN024BMD_at; Start 3; Stop 27
ggtttttgtcccaactgataatatc

SEQ ID NO: 85625 - DNA, 25 bp, Artificial
  probe
  misc_feature (1)..(25): SEQ ID NO: 6938; WAN024BMD_at; Start 86; Stop 110
tcggtggttcaacagaaatgattgc

SEQ ID NO: 85626 - DNA, 25 bp, Artificial
  probe
  misc_feature (1)..(25): SEQ ID NO: 6938; WAN024BMD_at; Start 67; Stop 91
aaacacaaggttccagtattcggtg

SEQ ID NO: 85627 - DNA, 25 bp, Artificial
  probe
  misc_feature (1)..(25): SEQ ID NO: 6938; WAN024BMD_at; Start 119; Stop 143
gcttgtataactacggaaccaatta

SEQ ID NO: 85628 - DNA, 25 bp, Artificial
  probe
  misc_feature (1)..(25): SEQ ID NO: 6938; WAN024BMD_at; Start 212; Stop 236
tagcagttgagttgcctgaaaaact

SEQ ID NO: 85629 - DNA, 25 bp, Artificial
  probe
  misc_feature (1)..(25): SEQ ID NO: 6938; WAN024BMD_at; Start 176; Stop 200
tgattcgtgttttaaaaggtgagga

SEQ ID NO: 85630 - DNA, 25 bp, Artificial
  probe
  misc_feature (1)..(25): SEQ ID NO: 6938; WAN024BMD_at; Start 98; Stop 122
cagaaatgattgctgttggtggctt

SEQ ID NO: 85631 - DNA, 25 bp, Artificial
  probe
  misc_feature (1)..(25): SEQ ID NO: 7299; WAN024BME_at; Start 154; Stop 178
cagagcttggccaatacgacgcaaa

SEQ ID NO: 85632 - DNA, 25 bp, Artificial
  probe
  misc_feature (1)..(25): SEQ ID NO: 7299; WAN024BME_at; Start 10; Stop 34
ctggccaaacaaggctatgttgagg

SEQ ID NO: 85633 - DNA, 25 bp, Artificial
  probe
  misc_feature (1)..(25): SEQ ID NO: 7299; WAN024BME_at; Start 168; Stop 192
tacgacgcaaacgacaccagttatc

SEQ ID NO: 85634 - DNA, 25 bp, Artificial
  probe
  misc_feature (1)..(25): SEQ ID NO: 7299; WAN024BME_at; Start 314; Stop 338
taaagaaagtgttgctaaaggctaa

SEQ ID NO: 85635 - DNA, 25 bp, Artificial
  probe
  misc_feature (1)..(25): SEQ ID NO: 7299; WAN024BME_at; Start 64; Stop 88
gcacagggagaacaaagaaatctaa

SEQ ID NO: 85636 - DNA, 25 bp, Artificial
  probe
  misc_feature (1)..(25): SEQ ID NO: 7299; WAN024BME_at; Start 216; Stop 240
cagtgccaagttggttgagtcaaga

SEQ ID NO: 85637 - DNA, 25 bp, Artificial
  probe
  misc_feature (1)..(25): SEQ ID NO: 7299; WAN024BME_at; Start 327; Stop 351
gctaaaggctaaaacgattggaatc

SEQ ID NO: 85638 - DNA, 25 bp, Artificial
  probe
  misc_feature (1)..(25): SEQ ID NO: 7299; WAN024BME_at; Start 305; Stop 329
tcaatttgataaagaaagtgttgct

SEQ ID NO: 85639 - DNA, 25 bp, Artificial
  probe
  misc_feature (1)..(25): SEQ ID NO: 7299; WAN024BME_at; Start 201; Stop 225
tgtaacagacccagtcagtgccaag

SEQ ID NO: 85640 - DNA, 25 bp, Artificial
  probe
  misc_feature (1)..(25): SEQ ID NO: 7299; WAN024BME_at; Start 345; Stop 369
tggaatcctctatactcagagcgag

SEQ ID NO: 85641 - DNA, 25 bp, Artificial
  probe
  misc_feature (1)..(25): SEQ ID NO: 7299; WAN024BME_at; Start 355; Stop 379
tatactcagagcgagcccaattcgg

SEQ ID NO: 85642 - DNA, 25 bp, Artificial
  probe
  misc_feature (1)..(25): SEQ ID NO: 7299; WAN024BME_at; Start 289; Stop 313
gccatttcaacccaaatcaatttga

SEQ ID NO: 85643 - DNA, 25 bp, Artificial
  probe
  misc_feature (1)..(25): SEQ ID NO: 7299; WAN024BME_at; Start 180; Stop 204
gacaccagttatcttttcagctgta

SEQ ID NO: 85644 - DNA, 25 bp, Artificial
  probe
  misc_feature (1)..(25): SEQ ID NO: 7299; WAN024BME_at; Start 135; Stop 159
catcgcaaggccttctgctcagagc

SEQ ID NO: 85645 - DNA, 25 bp, Artificial
  probe
  misc_feature (1)..(25): SEQ ID NO: 7299; WAN024BME_at; Start 86; Stop 110
taaaaacgatttcccagcaactagc

SEQ ID NO: 85646 - DNA, 25 bp, Artificial
  probe
  misc_feature (1)..(25): SEQ ID NO: 7299; WAN024BME_at; Start 46; Stop 70
gagattgatttgcaaaatgcacagg

SEQ ID NO: 85647 - DNA, 25 bp, Artificial
  probe
  misc_feature (1)..(25): SEQ ID NO: 7299; WAN024BME_at; Start 121; Stop 145
gatgtcgttctagccatcgcaaggc

SEQ ID NO: 85648 - DNA, 25 bp, Artificial
  probe
  misc_feature (1)..(25): SEQ ID NO: 7299; WAN024BME_at; Start 280; Stop 304
tcatcagatgccatttcaacccaaa

SEQ ID NO: 85649 - DNA, 25 bp, Artificial
  probe
  misc_feature (1)..(25): SEQ ID NO: 7299; WAN024BME_at; Start 252; Stop 276
gggcaatgtaactgggacaagcgat

SEQ ID NO: 85650 - DNA, 25 bp, Artificial
  probe
  misc_feature (1)..(25): SEQ ID NO: 7299; WAN024BME_at; Start 360; Stop 384
tcagagcgagcccaattcggttgtt

SEQ ID NO: 85651 - DNA, 25 bp, Artificial
  probe
  misc_feature (1)..(25): SEQ ID NO: 7299; WAN024BME_at; Start 260; Stop 284
taactgggacaagcgatcagtcatc

SEQ ID NO: 85652 - DNA, 25 bp, Artificial
  probe
  misc_feature (1)..(25): SEQ ID NO: 7299; WAN024BME_at; Start 112; Stop 136
gaatccagcgatgtcgttctagcca

SEQ ID NO: 85653 - DNA, 25 bp, Artificial
  probe
  misc_feature (1)..(25): SEQ ID NO: 7299; WAN024BME_at; Start 194; Stop 218
tttcagctgtaacagacccagtcag

SEQ ID NO: 85654 - DNA, 25 bp, Artificial
  probe
  misc_feature (1)..(25): SEQ ID NO: 7299; WAN024BME_at; Start 148; Stop 172
tctgctcagagcttggccaatacga

SEQ ID NO: 85655 - DNA, 25 bp, Artificial
  probe
  misc_feature (1)..(25): SEQ ID NO: 7299; WAN024BME_at; Start 95; Stop 119
tttcccagcaactagcagaatccag

SEQ ID NO: 85656 - DNA, 25 bp, Artificial
  probe
  misc_feature (1)..(25): SEQ ID NO: 7299; WAN024BME_at; Start 103; Stop 127
caactagcagaatccagcgatgtcg

SEQ ID NO: 85657 - DNA, 25 bp, Artificial
  probe
  misc_feature (1)..(25): SEQ ID NO: 7299; WAN024BME_at; Start 128; Stop 152
ttctagccatcgcaaggccttctgc

SEQ ID NO: 85658 - DNA, 25 bp, Artificial
  probe
  misc_feature (1)..(25): SEQ ID NO: 7299; WAN024BME_at; Start 208; Stop 232
gacccagtcagtgccaagttggttg

SEQ ID NO: 85659 - DNA, 25 bp, Artificial
  probe
  misc_feature (1)..(25): SEQ ID NO: 7299; WAN024BME_at; Start 228; Stop 252
ggttgagtcaagagaacatcctggg

SEQ ID NO: 85660 - DNA, 25 bp, Artificial
  probe
  misc_feature (1)..(25): SEQ ID NO: 7299; WAN024BME_at; Start 160; Stop 184
ttggccaatacgacgcaaacgacac

SEQ ID NO: 85661 - DNA, 25 bp, Artificial
  probe
  misc_feature (1)..(25): SEQ ID NO: 7299; WAN024BME_at; Start 269; Stop 293
caagcgatcagtcatcagatgccat

SEQ ID NO: 85662 - DNA, 25 bp, Artificial
  probe
  misc_feature (1)..(25): SEQ ID NO: 7299; WAN024BME_at; Start 333; Stop 357
ggctaaaacgattggaatcctctat

SEQ ID NO: 85663 - DNA, 25 bp, Artificial
  probe
  misc_feature (1)..(25): SEQ ID NO: 7299; WAN024BME_at; Start 4; Stop 28
gatgagctggccaaacaaggctatg

SEQ ID NO: 85664 - DNA, 25 bp, Artificial
  probe
  misc_feature (1)..(25): SEQ ID NO: 7299; WAN024BME_at; Start 56; Stop 80
tgcaaaatgcacagggagaacaaag

SEQ ID NO: 85665 - DNA, 25 bp, Artificial
  probe
  misc_feature (1)..(25): SEQ ID NO: 7126; WAN024BMF_at; Start 105; Stop 129
caaagtttttcaaatcagtccaaca

SEQ ID NO: 85666 - DNA, 25 bp, Artificial
  probe
  misc_feature (1)..(25): SEQ ID NO: 7126; WAN024BMF_at; Start 32; Stop 56
cacctttttcatcacctgtcaataa

SEQ ID NO: 85667 - DNA, 25 bp, Artificial
  probe
  misc_feature (1)..(25): SEQ ID NO: 7126; WAN024BMF_at; Start 81; Stop 105
tcgaaaattctttcaggaagctttc

SEQ ID NO: 85668 - DNA, 25 bp, Artificial
  probe
  misc_feature (1)..(25): SEQ ID NO: 7126; WAN024BMF_at; Start 104; Stop 128
tcaaagtttttcaaatcagtccaac

SEQ ID NO: 85669 - DNA, 25 bp, Artificial
  probe
  misc_feature (1)..(25): SEQ ID NO: 7126; WAN024BMF_at; Start 3; Stop 27
gctttcttttttgatgcttcctatc

SEQ ID NO: 85670 - DNA, 25 bp, Artificial
  probe
  misc_feature (1)..(25): SEQ ID NO: 7126; WAN024BMF_at; Start 82; Stop 106
cgaaaattctttcaggaagctttca

SEQ ID NO: 85671 - DNA, 25 bp, Artificial
  probe
  misc_feature (1)..(25): SEQ ID NO: 7126; WAN024BMF_at; Start 41; Stop 65
catcacctgtcaataatatttcaga

SEQ ID NO: 85672 - DNA, 25 bp, Artificial
  probe
  misc_feature (1)..(25): SEQ ID NO: 7126; WAN024BMF_at; Start 98; Stop 122
aagctttcaaagtttttcaaatcag

SEQ ID NO: 85673 - DNA, 25 bp, Artificial
  probe
  misc_feature (1)..(25): SEQ ID NO: 7126; WAN024BMF_at; Start 44; Stop 68
cacctgtcaataatatttcagaatt

SEQ ID NO: 85674 - DNA, 25 bp, Artificial
  probe
  misc_feature (1)..(25): SEQ ID NO: 7126; WAN024BMF_at; Start 12; Stop 36
tttgatgcttcctatcctatcacct

SEQ ID NO: 85675 - DNA, 25 bp, Artificial
  probe
  misc_feature (1)..(25): SEQ ID NO: 7126; WAN024BMF_at; Start 18; Stop 42
gcttcctatcctatcacctttttca

SEQ ID NO: 85676 - DNA, 25 bp, Artificial
  probe
  misc_feature (1)..(25): SEQ ID NO: 7126; WAN024BMF_at; Start 102; Stop 126
tttcaaagtttttcaaatcagtcca

SEQ ID NO: 85677 - DNA, 25 bp, Artificial
  probe
  misc_feature (1)..(25): SEQ ID NO: 7126; WAN024BMF_at; Start 86; Stop 110
aattctttcaggaagctttcaaagt

SEQ ID NO: 85678 - DNA, 25 bp, Artificial
  probe
  misc_feature (1)..(25): SEQ ID NO: 7126; WAN024BMF_at; Start 103; Stop 127
ttcaaagtttttcaaatcagtccaa

SEQ ID NO: 85679 - DNA, 25 bp, Artificial
  probe
  misc_feature (1)..(25): SEQ ID NO: 7126; WAN024BMF_at; Start 100; Stop 124
gctttcaaagtttttcaaatcagtc

SEQ ID NO: 85680 - DNA, 25 bp, Artificial
  probe
  misc_feature (1)..(25): SEQ ID NO: 7126; WAN024BMF_at; Start 97; Stop 121
gaagctttcaaagtttttcaaatca

SEQ ID NO: 85681 - DNA, 25 bp, Artificial
  probe
  misc_feature (1)..(25): SEQ ID NO: 7126; WAN024BMF_at; Start 11; Stop 35
ttttgatgcttcctatcctatcacc

SEQ ID NO: 85682 - DNA, 25 bp, Artificial
  probe
  misc_feature (1)..(25): SEQ ID NO: 7126; WAN024BMF_at; Start 43; Stop 67
tcacctgtcaataatatttcagaat

SEQ ID NO: 85683 - DNA, 25 bp, Artificial
  probe
  misc_feature (1)..(25): SEQ ID NO: 7126; WAN024BMF_at; Start 1; Stop 25
ctgctttcttttttgatgcttccta

SEQ ID NO: 85684 - DNA, 25 bp, Artificial
  probe
  misc_feature (1)..(25): SEQ ID NO: 7126; WAN024BMF_at; Start 31; Stop 55
tcacctttttcatcacctgtcaata

SEQ ID NO: 85685 - DNA, 25 bp, Artificial
  probe
  misc_feature (1)..(25): SEQ ID NO: 7126; WAN024BMF_at; Start 24; Stop 48
tatcctatcacctttttcatcacct

SEQ ID NO: 85686 - DNA, 25 bp, Artificial
  probe
  misc_feature (1)..(25): SEQ ID NO: 7126; WAN024BMF_at; Start 40; Stop 64
tcatcacctgtcaataatatttcag

SEQ ID NO: 85687 - DNA, 25 bp, Artificial
  probe
  misc_feature (1)..(25): SEQ ID NO: 7126; WAN024BMF_at; Start 87; Stop 111
attctttcaggaagctttcaaagtt

SEQ ID NO: 85688 - DNA, 25 bp, Artificial
  probe
  misc_feature (1)..(25): SEQ ID NO: 7126; WAN024BMF_at; Start 85; Stop 109
aaattctttcaggaagctttcaaag

SEQ ID NO: 85689 - DNA, 25 bp, Artificial
  probe
  misc_feature (1)..(25): SEQ ID NO: 7126; WAN024BMF_at; Start 15; Stop 39
gatgcttcctatcctatcacctttt

SEQ ID NO: 85690 - DNA, 25 bp, Artificial
  probe
  misc_feature (1)..(25): SEQ ID NO: 7126; WAN024BMF_at; Start 46; Stop 70
cctgtcaataatatttcagaatttt

SEQ ID NO: 85691 - DNA, 25 bp, Artificial
  probe
  misc_feature (1)..(25): SEQ ID NO: 7126; WAN024BMF_at; Start 29; Stop 53
tatcacctttttcatcacctgtcaa

SEQ ID NO: 85692 - DNA, 25 bp, Artificial
  probe
  misc_feature (1)..(25): SEQ ID NO: 7126; WAN024BMF_at; Start 26; Stop 50
tcctatcacctttttcatcacctgt

SEQ ID NO: 85693 - DNA, 25 bp, Artificial
  probe
  misc_feature (1)..(25): SEQ ID NO: 7126; WAN024BMF_at; Start 7; Stop 31
tcttttttgatgcttcctatcctat

SEQ ID NO: 85694 - DNA, 25 bp, Artificial
  probe
  misc_feature (1)..(25): SEQ ID NO: 7126; WAN024BMF_at; Start 21; Stop 45
tcctatcctatcacctttttcatca

SEQ ID NO: 85695 - DNA, 25 bp, Artificial
  probe
  misc_feature (1)..(25): SEQ ID NO: 7126; WAN024BMF_at; Start 83; Stop 107
gaaaattctttcaggaagctttcaa

SEQ ID NO: 85696 - DNA, 25 bp, Artificial
  probe
  misc_feature (1)..(25): SEQ ID NO: 7126; WAN024BMF_at; Start 92; Stop 116
ttcaggaagctttcaaagtttttca

SEQ ID NO: 85697 - DNA, 25 bp, Artificial
  probe
  misc_feature (1)..(25): SEQ ID NO: 7126; WAN024BMF_at; Start 34; Stop 58
cctttttcatcacctgtcaataata

SEQ ID NO: 85698 - DNA, 25 bp, Artificial
  probe
  misc_feature (1)..(25): SEQ ID NO: 7126; WAN024BMF_at; Start 93; Stop 117
tcaggaagctttcaaagtttttcaa

SEQ ID NO: 85699 - DNA, 25 bp, Artificial
  probe
  misc_feature (1)..(25): SEQ ID NO: 7654; WAN024BMG_at; Start 10; Stop 34
gaaaataggttgaatttgaaatgga

SEQ ID NO: 85700 - DNA, 25 bp, Artificial
  probe
  misc_feature (1)..(25): SEQ ID NO: 7654; WAN024BMG_at; Start 8; Stop 32
aggaaaataggttgaatttgaaatg

SEQ ID NO: 85701 - DNA, 25 bp, Artificial
  probe
  misc_feature (1)..(25): SEQ ID NO: 7654; WAN024BMG_at; Start 4; Stop 28
gtggaggaaaataggttgaatttga

SEQ ID NO: 85702 - DNA, 25 bp, Artificial
  probe
  misc_feature (1)..(25): SEQ ID NO: 7654; WAN024BMG_at; Start 20; Stop 44
tgaatttgaaatggaaaaatattct

SEQ ID NO: 85703 - DNA, 25 bp, Artificial
  probe
  misc_feature (1)..(25): SEQ ID NO: 7654; WAN024BMG_at; Start 5; Stop 29
tggaggaaaataggttgaatttgaa

SEQ ID NO: 85704 - DNA, 25 bp, Artificial
  probe
  misc_feature (1)..(25): SEQ ID NO: 7654; WAN024BMG_at; Start 19; Stop 43
ttgaatttgaaatggaaaaatattc

SEQ ID NO: 85705 - DNA, 25 bp, Artificial
  probe
  misc_feature (1)..(25): SEQ ID NO: 7005; WAN024BMH_at; Start 63; Stop 87
tttatcgaaaaacatagtggataac

SEQ ID NO: 85706 - DNA, 25 bp, Artificial
  probe
  misc_feature (1)..(25): SEQ ID NO: 7005; WAN024BMH_at; Start 1; Stop 25
atgttaccaaactttatccacaggt

SEQ ID NO: 85707 - DNA, 25 bp, Artificial
  probe
  misc_feature (1)..(25): SEQ ID NO: 7005; WAN024BMH_at; Start 8; Stop 32
caaactttatccacaggttggggat

SEQ ID NO: 85708 - DNA, 25 bp, Artificial
  probe
  misc_feature (1)..(25): SEQ ID NO: 7005; WAN024BMH_at; Start 36; Stop 60
agaagaaattattgatttattaagc

SEQ ID NO: 85709 - DNA, 25 bp, Artificial
  probe
  misc_feature (1)..(25): SEQ ID NO: 7005; WAN024BMH_at; Start 45; Stop 69
tattgatttattaagctttttatcg

SEQ ID NO: 85710 - DNA, 25 bp, Artificial
  probe
  misc_feature (1)..(25): SEQ ID NO: 7005; WAN024BMH_at; Start 72; Stop 96
aaacatagtggataaccttgtgaga

SEQ ID NO: 85711 - DNA, 25 bp, Artificial
  probe
  misc_feature (1)..(25): SEQ ID NO: 7005; WAN024BMH_at; Start 69; Stop 93
gaaaaacatagtggataaccttgtg

SEQ ID NO: 85712 - DNA, 25 bp, Artificial
  probe
  misc_feature (1)..(25): SEQ ID NO: 7005; WAN024BMH_at; Start 65; Stop 89
tatcgaaaaacatagtggataacct

SEQ ID NO: 85713 - DNA, 25 bp, Artificial
  probe
  misc_feature (1)..(25): SEQ ID NO: 7005; WAN024BMH_at; Start 68; Stop 92
cgaaaaacatagtggataaccttgt

SEQ ID NO: 85714 - DNA, 25 bp, Artificial
  probe
  misc_feature (1)..(25): SEQ ID NO: 7005; WAN024BMH_at; Start 37; Stop 61
gaagaaattattgatttattaagct

SEQ ID NO: 85715 - DNA, 25 bp, Artificial
  probe
  misc_feature (1)..(25): SEQ ID NO: 7005; WAN024BMH_at; Start 17; Stop 41
tccacaggttggggataaaagaaga

SEQ ID NO: 85716 - DNA, 25 bp, Artificial
  probe
  misc_feature (1)..(25): SEQ ID NO: 7005; WAN024BMH_at; Start 67; Stop 91
tcgaaaaacatagtggataaccttg

SEQ ID NO: 85717 - DNA, 25 bp, Artificial
  probe
  misc_feature (1)..(25): SEQ ID NO: 7005; WAN024BMH_at; Start 70; Stop 94
aaaaacatagtggataaccttgtga

SEQ ID NO: 85718 - DNA, 25 bp, Artificial
  probe
  misc_feature (1)..(25): SEQ ID NO: 7005; WAN024BMH_at; Start 66; Stop 90
atcgaaaaacatagtggataacctt

SEQ ID NO: 85719 - DNA, 25 bp, Artificial
  probe
  misc_feature (1)..(25): SEQ ID NO: 7005; WAN024BMH_at; Start 38; Stop 62
aagaaattattgatttattaagctt

SEQ ID NO: 85720 - DNA, 25 bp, Artificial
  probe
  misc_feature (1)..(25): SEQ ID NO: 7005; WAN024BMH_at; Start 48; Stop 72
tgatttattaagctttttatcgaaa

SEQ ID NO: 85721 - DNA, 25 bp, Artificial
  probe
  misc_feature (1)..(25): SEQ ID NO: 7005; WAN024BMH_at; Start 64; Stop 88
ttatcgaaaaacatagtggataacc

SEQ ID NO: 85722 - DNA, 25 bp, Artificial
  probe
  misc_feature (1)..(25): SEQ ID NO: 7005; WAN024BMH_at; Start 71; Stop 95
aaaacatagtggataaccttgtgag

SEQ ID NO: 85723 - DNA, 25 bp, Artificial
  probe
  misc_feature (1)..(25): SEQ ID NO: 7005; WAN024BMH_at; Start 14; Stop 38
ttatccacaggttggggataaaaga

SEQ ID NO: 85724 - DNA, 25 bp, Artificial
  probe
  misc_feature (1)..(25): SEQ ID NO: 7005; WAN024BMH_at; Start 15; Stop 39
tatccacaggttggggataaaagaa

SEQ ID NO: 85725 - DNA, 25 bp, Artificial
  probe
  misc_feature (1)..(25): SEQ ID NO: 7005; WAN024BMH_at; Start 62; Stop 86
ttttatcgaaaaacatagtggataa

SEQ ID NO: 85726 - DNA, 25 bp, Artificial
  probe
  misc_feature (1)..(25): SEQ ID NO: 7005; WAN024BMH_at; Start 47; Stop 71
ttgatttattaagctttttatcgaa

SEQ ID NO: 85727 - DNA, 25 bp, Artificial
  probe
  misc_feature (1)..(25): SEQ ID NO: 7005; WAN024BMH_at; Start 46; Stop 70
attgatttattaagctttttatcga

SEQ ID NO: 85728 - DNA, 25 bp, Artificial
  probe
  misc_feature (1)..(25): SEQ ID NO: 7005; WAN024BMH_at; Start 16; Stop 40
atccacaggttggggataaaagaag

SEQ ID NO: 85729 - DNA, 25 bp, Artificial
  probe
  misc_feature (1)..(25): SEQ ID NO: 6760; WAN024BMI_at; Start 1; Stop 25
atgctgatttcctggtccattatcc

SEQ ID NO: 85730 - DNA, 25 bp, Artificial
  probe
  misc_feature (1)..(25): SEQ ID NO: 6760; WAN024BMI_at; Start 7; Stop 31
atttcctggtccattatcctgaaaa

SEQ ID NO: 85731 - DNA, 25 bp, Artificial
  probe
  misc_feature (1)..(25): SEQ ID NO: 6760; WAN024BMI_at; Start 11; Stop 35
cctggtccattatcctgaaaatcag

SEQ ID NO: 85732 - DNA, 25 bp, Artificial
  probe
  misc_feature (1)..(25): SEQ ID NO: 6760; WAN024BMI_at; Start 20; Stop 44
ttatcctgaaaatcagtaaacacac

SEQ ID NO: 85733 - DNA, 25 bp, Artificial
  probe
  misc_feature (1)..(25): SEQ ID NO: 6760; WAN024BMI_at; Start 24; Stop 48
cctgaaaatcagtaaacacacggct

SEQ ID NO: 85734 - DNA, 25 bp, Artificial
  probe
  misc_feature (1)..(25): SEQ ID NO: 6760; WAN024BMI_at; Start 14; Stop 38
ggtccattatcctgaaaatcagtaa

SEQ ID NO: 85735 - DNA, 25 bp, Artificial
  probe
  misc_feature (1)..(25): SEQ ID NO: 6760; WAN024BMI_at; Start 2; Stop 26
tgctgatttcctggtccattatcct

SEQ ID NO: 85736 - DNA, 25 bp, Artificial
  probe
  misc_feature (1)..(25): SEQ ID NO: 6760; WAN024BMI_at; Start 18; Stop 42
cattatcctgaaaatcagtaaacac

SEQ ID NO: 85737 - DNA, 25 bp, Artificial
  probe
  misc_feature (1)..(25): SEQ ID NO: 6760; WAN024BMI_at; Start 13; Stop 37
tggtccattatcctgaaaatcagta

SEQ ID NO: 85738 - DNA, 25 bp, Artificial
  probe
  misc_feature (1)..(25): SEQ ID NO: 6760; WAN024BMI_at; Start 22; Stop 46
atcctgaaaatcagtaaacacacgg

SEQ ID NO: 85739 - DNA, 25 bp, Artificial
  probe
  misc_feature (1)..(25): SEQ ID NO: 6760; WAN024BMI_at; Start 15; Stop 39
gtccattatcctgaaaatcagtaaa

SEQ ID NO: 85740 - DNA, 25 bp, Artificial
  probe
  misc_feature (1)..(25): SEQ ID NO: 6760; WAN024BMI_at; Start 23; Stop 47
tcctgaaaatcagtaaacacacggc

SEQ ID NO: 85741 - DNA, 25 bp, Artificial
  probe
  misc_feature (1)..(25): SEQ ID NO: 6760; WAN024BMI_at; Start 26; Stop 50
tgaaaatcagtaaacacacggctcc

SEQ ID NO: 85742 - DNA, 25 bp, Artificial
  probe
  misc_feature (1)..(25): SEQ ID NO: 6760; WAN024BMI_at; Start 10; Stop 34
tcctggtccattatcctgaaaatca

SEQ ID NO: 85743 - DNA, 25 bp, Artificial
  probe
  misc_feature (1)..(25): SEQ ID NO: 6760; WAN024BMI_at; Start 46; Stop 70
gctccccctttgggcatttttatgc

SEQ ID NO: 85744 - DNA, 25 bp, Artificial
  probe
  misc_feature (1)..(25): SEQ ID NO: 6760; WAN024BMI_at; Start 47; Stop 71
ctccccctttgggcatttttatgct

SEQ ID NO: 85745 - DNA, 25 bp, Artificial
  probe
  misc_feature (1)..(25): SEQ ID NO: 6760; WAN024BMI_at; Start 16; Stop 40
tccattatcctgaaaatcagtaaac

SEQ ID NO: 85746 - DNA, 25 bp, Artificial
  probe
  misc_feature (1)..(25): SEQ ID NO: 6760; WAN024BMI_at; Start 6; Stop 30
gatttcctggtccattatcctgaaa

SEQ ID NO: 85747 - DNA, 25 bp, Artificial
  probe
  misc_feature (1)..(25): SEQ ID NO: 6760; WAN024BMI_at; Start 8; Stop 32
tttcctggtccattatcctgaaaat

SEQ ID NO: 85748 - DNA, 25 bp, Artificial
  probe
  misc_feature (1)..(25): SEQ ID NO: 6760; WAN024BMI_at; Start 27; Stop 51
gaaaatcagtaaacacacggctccc

SEQ ID NO: 85749 - DNA, 25 bp, Artificial
  probe
  misc_feature (1)..(25): SEQ ID NO: 6760; WAN024BMI_at; Start 30; Stop 54
aatcagtaaacacacggctccccct

SEQ ID NO: 85750 - DNA, 25 bp, Artificial
  probe
  misc_feature (1)..(25): SEQ ID NO: 6760; WAN024BMI_at; Start 4; Stop 28
ctgatttcctggtccattatcctga

SEQ ID NO: 85751 - DNA, 25 bp, Artificial
  probe
  misc_feature (1)..(25): SEQ ID NO: 6760; WAN024BMI_at; Start 31; Stop 55
atcagtaaacacacggctccccctt

SEQ ID NO: 85752 - DNA, 25 bp, Artificial
  probe
  misc_feature (1)..(25): SEQ ID NO: 6760; WAN024BMI_at; Start 19; Stop 43
attatcctgaaaatcagtaaacaca

SEQ ID NO: 85753 - DNA, 25 bp, Artificial
  probe
  misc_feature (1)..(25): SEQ ID NO: 6760; WAN024BMI_at; Start 48; Stop 72
tccccctttgggcatttttatgcta

SEQ ID NO: 85754 - DNA, 25 bp, Artificial
  probe
  misc_feature (1)..(25): SEQ ID NO: 6760; WAN024BMI_at; Start 9; Stop 33
ttcctggtccattatcctgaaaatc

SEQ ID NO: 85755 - DNA, 25 bp, Artificial
  probe
  misc_feature (1)..(25): SEQ ID NO: 6760; WAN024BMI_at; Start 25; Stop 49
ctgaaaatcagtaaacacacggctc

SEQ ID NO: 85756 - DNA, 25 bp, Artificial
  probe
  misc_feature (1)..(25): SEQ ID NO: 6760; WAN024BMI_at; Start 39; Stop 63
acacacggctccccctttgggcatt

SEQ ID NO: 85757 - DNA, 25 bp, Artificial
  probe
  misc_feature (1)..(25): SEQ ID NO: 6760; WAN024BMI_at; Start 5; Stop 29
tgatttcctggtccattatcctgaa

SEQ ID NO: 85758 - DNA, 25 bp, Artificial
  probe
  misc_feature (1)..(25): SEQ ID NO: 6760; WAN024BMI_at; Start 12; Stop 36
ctggtccattatcctgaaaatcagt

SEQ ID NO: 85759 - DNA, 25 bp, Artificial
  probe
  misc_feature (1)..(25): SEQ ID NO: 6760; WAN024BMI_at; Start 21; Stop 45
tatcctgaaaatcagtaaacacacg

SEQ ID NO: 85760 - DNA, 25 bp, Artificial
  probe
  misc_feature (1)..(25): SEQ ID NO: 6760; WAN024BMI_at; Start 17; Stop 41
ccattatcctgaaaatcagtaaaca

SEQ ID NO: 85761 - DNA, 25 bp, Artificial
  probe
  misc_feature (1)..(25): SEQ ID NO: 6760; WAN024BMI_at; Start 3; Stop 27
gctgatttcctggtccattatcctg

SEQ ID NO: 85762 - DNA, 25 bp, Artificial
  probe
  misc_feature (1)..(25): SEQ ID NO: 6760; WAN024BMI_at; Start 33; Stop 57
cagtaaacacacggctccccctttg

SEQ ID NO: 85763 - DNA, 25 bp, Artificial
  probe
  misc_feature (1)..(25): SEQ ID NO: 7385; WAN024BMJ_at; Start 26; Stop 50
ccttccttcacttctttcctgctat

SEQ ID NO: 85764 - DNA, 25 bp, Artificial
  probe
  misc_feature (1)..(25): SEQ ID NO: 7385; WAN024BMJ_at; Start 33; Stop 57
tcacttctttcctgctatcctttct

SEQ ID NO: 85765 - DNA, 25 bp, Artificial
  probe
  misc_feature (1)..(25): SEQ ID NO: 7385; WAN024BMJ_at; Start 42; Stop 66
tcctgctatcctttcttttatttta

SEQ ID NO: 85766 - DNA, 25 bp, Artificial
  probe
  misc_feature (1)..(25): SEQ ID NO: 7385; WAN024BMJ_at; Start 28; Stop 52
ttccttcacttctttcctgctatcc

SEQ ID NO: 85767 - DNA, 25 bp, Artificial
  probe
  misc_feature (1)..(25): SEQ ID NO: 7385; WAN024BMJ_at; Start 46; Stop 70
gctatcctttcttttattttatcat

SEQ ID NO: 85768 - DNA, 25 bp, Artificial
  probe
  misc_feature (1)..(25): SEQ ID NO: 7385; WAN024BMJ_at; Start 68; Stop 92
catatatttatatagattttaagcc

SEQ ID NO: 85769 - DNA, 25 bp, Artificial
  probe
  misc_feature (1)..(25): SEQ ID NO: 7385; WAN024BMJ_at; Start 13; Stop 37
tttcatcattctcccttccttcact

SEQ ID NO: 85770 - DNA, 25 bp, Artificial
  probe
  misc_feature (1)..(25): SEQ ID NO: 7385; WAN024BMJ_at; Start 19; Stop 43
cattctcccttccttcacttctttc

SEQ ID NO: 85771 - DNA, 25 bp, Artificial
  probe
  misc_feature (1)..(25): SEQ ID NO: 7385; WAN024BMJ_at; Start 35; Stop 59
acttctttcctgctatcctttcttt

SEQ ID NO: 85772 - DNA, 25 bp, Artificial
  probe
  misc_feature (1)..(25): SEQ ID NO: 7385; WAN024BMJ_at; Start 8; Stop 32
gagtttttcatcattctcccttcct

SEQ ID NO: 85773 - DNA, 25 bp, Artificial
  probe
  misc_feature (1)..(25): SEQ ID NO: 7385; WAN024BMJ_at; Start 36; Stop 60
cttctttcctgctatcctttctttt

SEQ ID NO: 85774 - DNA, 25 bp, Artificial
  probe
  misc_feature (1)..(25): SEQ ID NO: 7385; WAN024BMJ_at; Start 6; Stop 30
aagagtttttcatcattctcccttc

SEQ ID NO: 85775 - DNA, 25 bp, Artificial
  probe
  misc_feature (1)..(25): SEQ ID NO: 7385; WAN024BMJ_at; Start 5; Stop 29
aaagagtttttcatcattctccctt

SEQ ID NO: 85776 - DNA, 25 bp, Artificial
  probe
  misc_feature (1)..(25): SEQ ID NO: 7385; WAN024BMJ_at; Start 9; Stop 33
agtttttcatcattctcccttcctt

SEQ ID NO: 85777 - DNA, 25 bp, Artificial
  probe
  misc_feature (1)..(25): SEQ ID NO: 7385; WAN024BMJ_at; Start 37; Stop 61
ttctttcctgctatcctttctttta

SEQ ID NO: 85778 - DNA, 25 bp, Artificial
  probe
  misc_feature (1)..(25): SEQ ID NO: 7385; WAN024BMJ_at; Start 7; Stop 31
agagtttttcatcattctcccttcc

SEQ ID NO: 85779 - DNA, 25 bp, Artificial
  probe
  misc_feature (1)..(25): SEQ ID NO: 7385; WAN024BMJ_at; Start 3; Stop 27
gaaaagagtttttcatcattctccc

SEQ ID NO: 85780 - DNA, 25 bp, Artificial
  probe
  misc_feature (1)..(25): SEQ ID NO: 7385; WAN024BMJ_at; Start 16; Stop 40
catcattctcccttccttcacttct

SEQ ID NO: 85781 - DNA, 25 bp, Artificial
  probe
  misc_feature (1)..(25): SEQ ID NO: 7385; WAN024BMJ_at; Start 25; Stop 49
cccttccttcacttctttcctgcta

SEQ ID NO: 85782 - DNA, 25 bp, Artificial
  probe
  misc_feature (1)..(25): SEQ ID NO: 7385; WAN024BMJ_at; Start 32; Stop 56
ttcacttctttcctgctatcctttc

SEQ ID NO: 85783 - DNA, 25 bp, Artificial
  probe
  misc_feature (1)..(25): SEQ ID NO: 7385; WAN024BMJ_at; Start 18; Stop 42
tcattctcccttccttcacttcttt

SEQ ID NO: 85784 - DNA, 25 bp, Artificial
  probe
  misc_feature (1)..(25): SEQ ID NO: 7385; WAN024BMJ_at; Start 39; Stop 63
ctttcctgctatcctttcttttatt

SEQ ID NO: 85785 - DNA, 25 bp, Artificial
  probe
  misc_feature (1)..(25): SEQ ID NO: 7385; WAN024BMJ_at; Start 43; Stop 67
cctgctatcctttcttttattttat

SEQ ID NO: 85786 - DNA, 25 bp, Artificial
  probe
  misc_feature (1)..(25): SEQ ID NO: 7385; WAN024BMJ_at; Start 38; Stop 62
tctttcctgctatcctttcttttat

SEQ ID NO: 85787 - DNA, 25 bp, Artificial
  probe
  misc_feature (1)..(25): SEQ ID NO: 7385; WAN024BMJ_at; Start 10; Stop 34
gtttttcatcattctcccttccttc

SEQ ID NO: 85788 - DNA, 25 bp, Artificial
  probe
  misc_feature (1)..(25): SEQ ID NO: 7385; WAN024BMJ_at; Start 15; Stop 39
tcatcattctcccttccttcacttc

SEQ ID NO: 85789 - DNA, 25 bp, Artificial
  probe
  misc_feature (1)..(25): SEQ ID NO: 7385; WAN024BMJ_at; Start 12; Stop 36
ttttcatcattctcccttccttcac

SEQ ID NO: 85790 - DNA, 25 bp, Artificial
  probe
  misc_feature (1)..(25): SEQ ID NO: 7385; WAN024BMJ_at; Start 31; Stop 55
cttcacttctttcctgctatccttt

SEQ ID NO: 85791 - DNA, 25 bp, Artificial
  probe
  misc_feature (1)..(25): SEQ ID NO: 7385; WAN024BMJ_at; Start 22; Stop 46
tctcccttccttcacttctttcctg

SEQ ID NO: 85792 - DNA, 25 bp, Artificial
  probe
  misc_feature (1)..(25): SEQ ID NO: 7385; WAN024BMJ_at; Start 11; Stop 35
tttttcatcattctcccttccttca

SEQ ID NO: 85793 - DNA, 25 bp, Artificial
  probe
  misc_feature (1)..(25): SEQ ID NO: 7385; WAN024BMJ_at; Start 69; Stop 93
atatatttatatagattttaagccc

SEQ ID NO: 85794 - DNA, 25 bp, Artificial
  probe
  misc_feature (1)..(25): SEQ ID NO: 7385; WAN024BMJ_at; Start 4; Stop 28
aaaagagtttttcatcattctccct

SEQ ID NO: 85795 - DNA, 25 bp, Artificial
  probe
  misc_feature (1)..(25): SEQ ID NO: 7385; WAN024BMJ_at; Start 24; Stop 48
tcccttccttcacttctttcctgct

SEQ ID NO: 85796 - DNA, 25 bp, Artificial
  probe
  misc_feature (1)..(25): SEQ ID NO: 7385; WAN024BMJ_at; Start 45; Stop 69
tgctatcctttcttttattttatca

SEQ ID NO: 85797 - DNA, 25 bp, Artificial
  probe
  misc_feature (1)..(25): SEQ ID NO: 6600; WAN024BMK_at; Start 25; Stop 49
attttgaaaggaagtgaacttatga

SEQ ID NO: 85798 - DNA, 25 bp, Artificial
  probe
  misc_feature (1)..(25): SEQ ID NO: 6600; WAN024BMK_at; Start 91; Stop 115
aagaccatcaaacattcattcagcc

SEQ ID NO: 85799 - DNA, 25 bp, Artificial
  probe
  misc_feature (1)..(25): SEQ ID NO: 6600; WAN024BMK_at; Start 78; Stop 102
ttccccactctttaagaccatcaaa

SEQ ID NO: 85800 - DNA, 25 bp, Artificial
  probe
  misc_feature (1)..(25): SEQ ID NO: 6600; WAN024BMK_at; Start 93; Stop 117
gaccatcaaacattcattcagccaa

SEQ ID NO: 85801 - DNA, 25 bp, Artificial
  probe
  misc_feature (1)..(25): SEQ ID NO: 6600; WAN024BMK_at; Start 89; Stop 113
ttaagaccatcaaacattcattcag

SEQ ID NO: 85802 - DNA, 25 bp, Artificial
  probe
  misc_feature (1)..(25): SEQ ID NO: 6600; WAN024BMK_at; Start 39; Stop 63
tgaacttatgaaaacaaaaaatcaa

SEQ ID NO: 85803 - DNA, 25 bp, Artificial
  probe
  misc_feature (1)..(25): SEQ ID NO: 6600; WAN024BMK_at; Start 82; Stop 106
ccactctttaagaccatcaaacatt

SEQ ID NO: 85804 - DNA, 25 bp, Artificial
  probe
  misc_feature (1)..(25): SEQ ID NO: 6600; WAN024BMK_at; Start 77; Stop 101
gttccccactctttaagaccatcaa

SEQ ID NO: 85805 - DNA, 25 bp, Artificial
  probe
  misc_feature (1)..(25): SEQ ID NO: 6600; WAN024BMK_at; Start 60; Stop 84
tcaagaatcaaaaggtcgttcccca

SEQ ID NO: 85806 - DNA, 25 bp, Artificial
  probe
  misc_feature (1)..(25): SEQ ID NO: 6600; WAN024BMK_at; Start 87; Stop 111
ctttaagaccatcaaacattcattc

SEQ ID NO: 85807 - DNA, 25 bp, Artificial
  probe
  misc_feature (1)..(25): SEQ ID NO: 6600; WAN024BMK_at; Start 29; Stop 53
tgaaaggaagtgaacttatgaaaac

SEQ ID NO: 85808 - DNA, 25 bp, Artificial
  probe
  misc_feature (1)..(25): SEQ ID NO: 6600; WAN024BMK_at; Start 28; Stop 52
ttgaaaggaagtgaacttatgaaaa

SEQ ID NO: 85809 - DNA, 25 bp, Artificial
  probe
  misc_feature (1)..(25): SEQ ID NO: 6600; WAN024BMK_at; Start 27; Stop 51
tttgaaaggaagtgaacttatgaaa

SEQ ID NO: 85810 - DNA, 25 bp, Artificial
  probe
  misc_feature (1)..(25): SEQ ID NO: 6600; WAN024BMK_at; Start 43; Stop 67
cttatgaaaacaaaaaatcaagaat

SEQ ID NO: 85811 - DNA, 25 bp, Artificial
  probe
  misc_feature (1)..(25): SEQ ID NO: 6600; WAN024BMK_at; Start 79; Stop 103
tccccactctttaagaccatcaaac

SEQ ID NO: 85812 - DNA, 25 bp, Artificial
  probe
  misc_feature (1)..(25): SEQ ID NO: 6600; WAN024BMK_at; Start 24; Stop 48
gattttgaaaggaagtgaacttatg

SEQ ID NO: 85813 - DNA, 25 bp, Artificial
  probe
  misc_feature (1)..(25): SEQ ID NO: 6600; WAN024BMK_at; Start 47; Stop 71
tgaaaacaaaaaatcaagaatcaaa

SEQ ID NO: 85814 - DNA, 25 bp, Artificial
  probe
  misc_feature (1)..(25): SEQ ID NO: 6600; WAN024BMK_at; Start 26; Stop 50
ttttgaaaggaagtgaacttatgaa

SEQ ID NO: 85815 - DNA, 25 bp, Artificial
  probe
  misc_feature (1)..(25): SEQ ID NO: 6600; WAN024BMK_at; Start 80; Stop 104
ccccactctttaagaccatcaaaca

SEQ ID NO: 85816 - DNA, 25 bp, Artificial
  probe
  misc_feature (1)..(25): SEQ ID NO: 6600; WAN024BMK_at; Start 44; Stop 68
ttatgaaaacaaaaaatcaagaatc

SEQ ID NO: 85817 - DNA, 25 bp, Artificial
  probe
  misc_feature (1)..(25): SEQ ID NO: 6600; WAN024BMK_at; Start 92; Stop 116
agaccatcaaacattcattcagcca

SEQ ID NO: 85818 - DNA, 25 bp, Artificial
  probe
  misc_feature (1)..(25): SEQ ID NO: 6600; WAN024BMK_at; Start 53; Stop 77
caaaaaatcaagaatcaaaaggtcg

SEQ ID NO: 85819 - DNA, 25 bp, Artificial
  probe
  misc_feature (1)..(25): SEQ ID NO: 6600; WAN024BMK_at; Start 45; Stop 69
tatgaaaacaaaaaatcaagaatca

SEQ ID NO: 85820 - DNA, 25 bp, Artificial
  probe
  misc_feature (1)..(25): SEQ ID NO: 6600; WAN024BMK_at; Start 84; Stop 108
actctttaagaccatcaaacattca

SEQ ID NO: 85821 - DNA, 25 bp, Artificial
  probe
  misc_feature (1)..(25): SEQ ID NO: 6600; WAN024BMK_at; Start 81; Stop 105
cccactctttaagaccatcaaacat

SEQ ID NO: 85822 - DNA, 25 bp, Artificial
  probe
  misc_feature (1)..(25): SEQ ID NO: 6600; WAN024BMK_at; Start 86; Stop 110
tctttaagaccatcaaacattcatt

SEQ ID NO: 85823 - DNA, 25 bp, Artificial
  probe
  misc_feature (1)..(25): SEQ ID NO: 6600; WAN024BMK_at; Start 30; Stop 54
gaaaggaagtgaacttatgaaaaca

SEQ ID NO: 85824 - DNA, 25 bp, Artificial
  probe
  misc_feature (1)..(25): SEQ ID NO: 6600; WAN024BMK_at; Start 88; Stop 112
tttaagaccatcaaacattcattca

SEQ ID NO: 85825 - DNA, 25 bp, Artificial
  probe
  misc_feature (1)..(25): SEQ ID NO: 6600; WAN024BMK_at; Start 38; Stop 62
gtgaacttatgaaaacaaaaaatca

SEQ ID NO: 85826 - DNA, 25 bp, Artificial
  probe
  misc_feature (1)..(25): SEQ ID NO: 6600; WAN024BMK_at; Start 85; Stop 109
ctctttaagaccatcaaacattcat

SEQ ID NO: 85827 - DNA, 25 bp, Artificial
  probe
  misc_feature (1)..(25): SEQ ID NO: 6600; WAN024BMK_at; Start 90; Stop 114
taagaccatcaaacattcattcagc

SEQ ID NO: 85828 - DNA, 25 bp, Artificial
  probe
  misc_feature (1)..(25): SEQ ID NO: 6600; WAN024BMK_at; Start 23; Stop 47
cgattttgaaaggaagtgaacttat

SEQ ID NO: 85829 - DNA, 25 bp, Artificial
  probe
  misc_feature (1)..(25): SEQ ID NO: 6600; WAN024BMK_at; Start 83; Stop 107
cactctttaagaccatcaaacattc

SEQ ID NO: 85830 - DNA, 25 bp, Artificial
  probe
  misc_feature (1)..(25): SEQ ID NO: 6600; WAN024BMK_at; Start 46; Stop 70
atgaaaacaaaaaatcaagaatcaa

SEQ ID NO: 85831 - DNA, 25 bp, Artificial
  probe
  misc_feature (1)..(25): SEQ ID NO: 6569; WAN024BML_at; Start 273; Stop 297
gaatgggaagctacgtccactaggt

SEQ ID NO: 85832 - DNA, 25 bp, Artificial
  probe
  misc_feature (1)..(25): SEQ ID NO: 6569; WAN024BML_at; Start 393; Stop 417
tcgtccgaataaaagttgccataca

SEQ ID NO: 85833 - DNA, 25 bp, Artificial
  probe
  misc_feature (1)..(25): SEQ ID NO: 6569; WAN024BML_at; Start 1256; Stop 1280
caacggcccgttatttcatgaaaga

SEQ ID NO: 85834 - DNA, 25 bp, Artificial
  probe
  misc_feature (1)..(25): SEQ ID NO: 6569; WAN024BML_at; Start 219; Stop 243
gaaagatgaatcctatcagccacac

SEQ ID NO: 85835 - DNA, 25 bp, Artificial
  probe
  misc_feature (1)..(25): SEQ ID NO: 6569; WAN024BML_at; Start 731; Stop 755
ggaaacgtaccccagaatatcgcca

SEQ ID NO: 85836 - DNA, 25 bp, Artificial
  probe
  misc_feature (1)..(25): SEQ ID NO: 6569; WAN024BML_at; Start 1621; Stop 1645
gatagattaaaagcaagccgttgtg

SEQ ID NO: 85837 - DNA, 25 bp, Artificial
  probe
  misc_feature (1)..(25): SEQ ID NO: 6569; WAN024BML_at; Start 1231; Stop 1255
catagaggctacgaagtttggaaac

SEQ ID NO: 85838 - DNA, 25 bp, Artificial
  probe
  misc_feature (1)..(25): SEQ ID NO: 6569; WAN024BML_at; Start 435; Stop 459
gaagacctacactggaacaaaatgg

SEQ ID NO: 85839 - DNA, 25 bp, Artificial
  probe
  misc_feature (1)..(25): SEQ ID NO: 6569; WAN024BML_at; Start 1648; Stop 1672
tattgtcaagcgaccgacagttccc

SEQ ID NO: 85840 - DNA, 25 bp, Artificial
  probe
  misc_feature (1)..(25): SEQ ID NO: 6569; WAN024BML_at; Start 123; Stop 147
gatttacgctaacccaggacacttg

SEQ ID NO: 85841 - DNA, 25 bp, Artificial
  probe
  misc_feature (1)..(25): SEQ ID NO: 6569; WAN024BML_at; Start 573; Stop 597
cctcaatgcgggatacgtggaagat

SEQ ID NO: 85842 - DNA, 25 bp, Artificial
  probe
  misc_feature (1)..(25): SEQ ID NO: 6569; WAN024BML_at; Start 509; Stop 533
tgatgattcacattctccgagaaag

SEQ ID NO: 85843 - DNA, 25 bp, Artificial
  probe
  misc_feature (1)..(25): SEQ ID NO: 6569; WAN024BML_at; Start 813; Stop 837
tcaacgacaagaagttatccagcgt

SEQ ID NO: 85844 - DNA, 25 bp, Artificial
  probe
  misc_feature (1)..(25): SEQ ID NO: 6569; WAN024BML_at; Start 524; Stop 548
tccgagaaagaattactgatgagcg

SEQ ID NO: 85845 - DNA, 25 bp, Artificial
  probe
  misc_feature (1)..(25): SEQ ID NO: 6569; WAN024BML_at; Start 961; Stop 985
gaggacgctcatcgcattaaagcag

SEQ ID NO: 85846 - DNA, 25 bp, Artificial
  probe
  misc_feature (1)..(25): SEQ ID NO: 6569; WAN024BML_at; Start 1192; Stop 1216
gacagattactgtcttacggagcta

SEQ ID NO: 85847 - DNA, 25 bp, Artificial
  probe
  misc_feature (1)..(25): SEQ ID NO: 6569; WAN024BML_at; Start 908; Stop 932
taacctatacccgatacgcagatga

SEQ ID NO: 85848 - DNA, 25 bp, Artificial
  probe
  misc_feature (1)..(25): SEQ ID NO: 6569; WAN024BML_at; Start 344; Stop 368
ttttggaagctatctacgagggaca

SEQ ID NO: 85849 - DNA, 25 bp, Artificial
  probe
  misc_feature (1)..(25): SEQ ID NO: 6569; WAN024BML_at; Start 945; Stop 969
tgtgattggcagtaaagaggacgct

SEQ ID NO: 85850 - DNA, 25 bp, Artificial
  probe
  misc_feature (1)..(25): SEQ ID NO: 6569; WAN024BML_at; Start 199; Stop 223
gaccaattgattgattccctgaaag

SEQ ID NO: 85851 - DNA, 25 bp, Artificial
  probe
  misc_feature (1)..(25): SEQ ID NO: 6569; WAN024BML_at; Start 990; Stop 1014
taaggactatttggaagcggttctc

SEQ ID NO: 85852 - DNA, 25 bp, Artificial
  probe
  misc_feature (1)..(25): SEQ ID NO: 6569; WAN024BML_at; Start 107; Stop 131
tagttgcctatcaaacgatttacgc

SEQ ID NO: 85853 - DNA, 25 bp, Artificial
  probe
  misc_feature (1)..(25): SEQ ID NO: 6569; WAN024BML_at; Start 748; Stop 772
tatcgccaaaatgagatagcgttgg

SEQ ID NO: 85854 - DNA, 25 bp, Artificial
  probe
  misc_feature (1)..(25): SEQ ID NO: 6569; WAN024BML_at; Start 1047; Stop 1071
taccaatgcgagagataaagctaag

SEQ ID NO: 85855 - DNA, 25 bp, Artificial
  probe
  misc_feature (1)..(25): SEQ ID NO: 6569; WAN024BML_at; Start 764; Stop 788
tagcgttgggaaaagcaagaagagc

SEQ ID NO: 85856 - DNA, 25 bp, Artificial
  probe
  misc_feature (1)..(25): SEQ ID NO: 6569; WAN024BML_at; Start 560; Stop 584
tgattcgtaaattcctcaatgcggg

SEQ ID NO: 85857 - DNA, 25 bp, Artificial
  probe
  misc_feature (1)..(25): SEQ ID NO: 6569; WAN024BML_at; Start 1021; Stop 1045
gaactctctgtggagaaaaccttga

SEQ ID NO: 85858 - DNA, 25 bp, Artificial
  probe
  misc_feature (1)..(25): SEQ ID NO: 6569; WAN024BML_at; Start 1108; Stop 1132
ttagctaagcgtgattcggcaggac

SEQ ID NO: 85859 - DNA, 25 bp, Artificial
  probe
  misc_feature (1)..(25): SEQ ID NO: 6569; WAN024BML_at; Start 1663; Stop 1687
gacagttccctagaaatccatcatg

SEQ ID NO: 85860 - DNA, 25 bp, Artificial
  probe
  misc_feature (1)..(25): SEQ ID NO: 6569; WAN024BML_at; Start 616; Stop 640
tactcaggaactccacaaggaggga

SEQ ID NO: 85861 - DNA, 25 bp, Artificial
  probe
  misc_feature (1)..(25): SEQ ID NO: 6569; WAN024BML_at; Start 707; Stop 731
agaacttctgccaagggaaataccg

SEQ ID NO: 85862 - DNA, 25 bp, Artificial
  probe
  misc_feature (1)..(25): SEQ ID NO: 6569; WAN024BML_at; Start 600; Stop 624
gaaattctacaaaacctactcagga

SEQ ID NO: 85863 - DNA, 25 bp, Artificial
  probe
  misc_feature (1)..(25): SEQ ID NO: 6569; WAN024BML_at; Start 146; Stop 170
tgacacctggagtagacgagttgac

SEQ ID NO: 85864 - DNA, 25 bp, Artificial
  probe
  misc_feature (1)..(25): SEQ ID NO: 6569; WAN024BML_at; Start 1743; Stop 1767
tagacaacggaaaacaatagcactg

SEQ ID NO: 85865 - DNA, 25 bp, Artificial
  probe
  misc_feature (1)..(25): SEQ ID NO: 6536; WAN024BMM_at; Start 106; Stop 130
gaacgtggcaactatatgcctgccg

SEQ ID NO: 85866 - DNA, 25 bp, Artificial
  probe
  misc_feature (1)..(25): SEQ ID NO: 6536; WAN024BMM_at; Start 778; Stop 802
caggctcgtgatatctgtaaaatat

SEQ ID NO: 85867 - DNA, 25 bp, Artificial
  probe
  misc_feature (1)..(25): SEQ ID NO: 6536; WAN024BMM_at; Start 215; Stop 239
taacaccgtttaagaaattagcaga

SEQ ID NO: 85868 - DNA, 25 bp, Artificial
  probe
  misc_feature (1)..(25): SEQ ID NO: 6536; WAN024BMM_at; Start 813; Stop 837
gctcatgatggctaaaattgaccat

SEQ ID NO: 85869 - DNA, 25 bp, Artificial
  probe
  misc_feature (1)..(25): SEQ ID NO: 6536; WAN024BMM_at; Start 631; Stop 655
gaattagaagccgtccaagaagcct

SEQ ID NO: 85870 - DNA, 25 bp, Artificial
  probe
  misc_feature (1)..(25): SEQ ID NO: 6536; WAN024BMM_at; Start 199; Stop 223
gaaatgacttccaatataacaccgt

SEQ ID NO: 85871 - DNA, 25 bp, Artificial
  probe
  misc_feature (1)..(25): SEQ ID NO: 6536; WAN024BMM_at; Start 604; Stop 628
gcctattatttacactctaaaggga

SEQ ID NO: 85872 - DNA, 25 bp, Artificial
  probe
  misc_feature (1)..(25): SEQ ID NO: 6536; WAN024BMM_at; Start 710; Stop 734
ttttaactatcgttgcgaatgccgg

SEQ ID NO: 85873 - DNA, 25 bp, Artificial
  probe
  misc_feature (1)..(25): SEQ ID NO: 6536; WAN024BMM_at; Start 499; Stop 523
gcagaatacgaagaaaataactcac

SEQ ID NO: 85874 - DNA, 25 bp, Artificial
  probe
  misc_feature (1)..(25): SEQ ID NO: 6536; WAN024BMM_at; Start 521; Stop 545
cacttcttatcagtttgtatcagga

SEQ ID NO: 85875 - DNA, 25 bp, Artificial
  probe
  misc_feature (1)..(25): SEQ ID NO: 6536; WAN024BMM_at; Start 690; Stop 714
cagctatcagctggctcctctttta

SEQ ID NO: 85876 - DNA, 25 bp, Artificial
  probe
  misc_feature (1)..(25): SEQ ID NO: 6536; WAN024BMM_at; Start 744; Stop 768
tttaaagcacgatgaaattcttgac

SEQ ID NO: 85877 - DNA, 25 bp, Artificial
  probe
  misc_feature (1)..(25): SEQ ID NO: 6536; WAN024BMM_at; Start 416; Stop 440
tgccaaagctttcggtcagctcatc

SEQ ID NO: 85878 - DNA, 25 bp, Artificial
  probe
  misc_feature (1)..(25): SEQ ID NO: 6536; WAN024BMM_at; Start 800; Stop 824
tatacgaacacaagctcatgatggc

SEQ ID NO: 85879 - DNA, 25 bp, Artificial
  probe
  misc_feature (1)..(25): SEQ ID NO: 6536; WAN024BMM_at; Start 646; Stop 670
caagaagccttagaaaccattgact

SEQ ID NO: 85880 - DNA, 25 bp, Artificial
  probe
  misc_feature (1)..(25): SEQ ID NO: 6536; WAN024BMM_at; Start 723; Stop 747
tgcgaatgccggaaaagatttttta

SEQ ID NO: 85881 - DNA, 25 bp, Artificial
  probe
  misc_feature (1)..(25): SEQ ID NO: 6536; WAN024BMM_at; Start 185; Stop 209
tcgatgaacagattgaaatgacttc

SEQ ID NO: 85882 - DNA, 25 bp, Artificial
  probe
  misc_feature (1)..(25): SEQ ID NO: 6536; WAN024BMM_at; Start 393; Stop 417
tatcgccagtctagaaaacgctttg

SEQ ID NO: 85883 - DNA, 25 bp, Artificial
  probe
  misc_feature (1)..(25): SEQ ID NO: 6536; WAN024BMM_at; Start 47; Stop 71
gattctcacaaaaaacactttccga

SEQ ID NO: 85884 - DNA, 25 bp, Artificial
  probe
  misc_feature (1)..(25): SEQ ID NO: 6536; WAN024BMM_at; Start 763; Stop 787
cttgactattatttacaggctcgtg

SEQ ID NO: 85885 - DNA, 25 bp, Artificial
  probe
  misc_feature (1)..(25): SEQ ID NO: 6536; WAN024BMM_at; Start 122; Stop 146
tgcctgccgctgatttactctataa

SEQ ID NO: 85886 - DNA, 25 bp, Artificial
  probe
  misc_feature (1)..(25): SEQ ID NO: 6536; WAN024BMM_at; Start 62; Stop 86
cactttccgaaggaatttgtgagca

SEQ ID NO: 85887 - DNA, 25 bp, Artificial
  probe
  misc_feature (1)..(25): SEQ ID NO: 6536; WAN024BMM_at; Start 245; Stop 269
tacttgaagatcgtaattacgagga

SEQ ID NO: 85888 - DNA, 25 bp, Artificial
  probe
  misc_feature (1)..(25): SEQ ID NO: 6536; WAN024BMM_at; Start 11; Stop 35
tatctgataaactaaaagccaagag

SEQ ID NO: 85889 - DNA, 25 bp, Artificial
  probe
  misc_feature (1)..(25): SEQ ID NO: 6536; WAN024BMM_at; Start 151; Stop 175
gcaaatcggcttcaagttcccttag

SEQ ID NO: 85890 - DNA, 25 bp, Artificial
  probe
  misc_feature (1)..(25): SEQ ID NO: 6536; WAN024BMM_at; Start 377; Stop 401
gttccaaagatgaagctatcgccag

SEQ ID NO: 85891 - DNA, 25 bp, Artificial
  probe
  misc_feature (1)..(25): SEQ ID NO: 6536; WAN024BMM_at; Start 582; Stop 606
tattcgagttaaacataatttcgcc

SEQ ID NO: 85892 - DNA, 25 bp, Artificial
  probe
  misc_feature (1)..(25): SEQ ID NO: 6536; WAN024BMM_at; Start 484; Stop 508
tctgtagggcgtgatgcagaatacg

SEQ ID NO: 85893 - DNA, 25 bp, Artificial
  probe
  misc_feature (1)..(25): SEQ ID NO: 6536; WAN024BMM_at; Start 137; Stop 161
tactctataaacttgcaaatcggct

SEQ ID NO: 85894 - DNA, 25 bp, Artificial
  probe
  misc_feature (1)..(25): SEQ ID NO: 6536; WAN024BMM_at; Start 673; Stop 697
tgtaaacaaaaagagaccagctatc

SEQ ID NO: 85895 - DNA, 25 bp, Artificial
  probe
  misc_feature (1)..(25): SEQ ID NO: 6536; WAN024BMM_at; Start 77; Stop 101
tttgtgagcaaagccaaataagcaa

SEQ ID NO: 85896 - DNA, 25 bp, Artificial
  probe
  misc_feature (1)..(25): SEQ ID NO: 6536; WAN024BMM_at; Start 28; Stop 52
gccaagagaaaagaagaaggattct

SEQ ID NO: 85897 - DNA, 25 bp, Artificial
  probe
  misc_feature (1)..(25): SEQ ID NO: 6536; WAN024BMM_at; Start 91; Stop 115
caaataagcaaaatagaacgtggca

SEQ ID NO: 85898 - DNA, 25 bp, Artificial
  probe
  misc_feature (1)..(25): SEQ ID NO: 6536; WAN024BMM_at; Start 434; Stop 458
gctcatctgtgtatcttaaactcct

SEQ ID NO: 85899 - DNA, 25 bp, Artificial
  probe
  misc_feature (1)..(25): SEQ ID NO: 7319; WAN024BMN_at; Start 121; Stop 145
gaatcgagaattatacaacaagctg

SEQ ID NO: 85900 - DNA, 25 bp, Artificial
  probe
  misc_feature (1)..(25): SEQ ID NO: 7319; WAN024BMN_at; Start 98; Stop 122
taaatcaatcacaatatacctggga

SEQ ID NO: 85901 - DNA, 25 bp, Artificial
  probe
  misc_feature (1)..(25): SEQ ID NO: 7319; WAN024BMN_at; Start 80; Stop 104
tctttttcaaggaacctgtaaatca

SEQ ID NO: 85902 - DNA, 25 bp, Artificial
  probe
  misc_feature (1)..(25): SEQ ID NO: 7319; WAN024BMN_at; Start 107; Stop 131
cacaatatacctgggaatcgagaat

SEQ ID NO: 85903 - DNA, 25 bp, Artificial
  probe
  misc_feature (1)..(25): SEQ ID NO: 7319; WAN024BMN_at; Start 85; Stop 109
ttcaaggaacctgtaaatcaatcac

SEQ ID NO: 85904 - DNA, 25 bp, Artificial
  probe
  misc_feature (1)..(25): SEQ ID NO: 7319; WAN024BMN_at; Start 106; Stop 130
tcacaatatacctgggaatcgagaa

SEQ ID NO: 85905 - DNA, 25 bp, Artificial
  probe
  misc_feature (1)..(25): SEQ ID NO: 7319; WAN024BMN_at; Start 149; Stop 173
caactaatgaagttgatctgggact

SEQ ID NO: 85906 - DNA, 25 bp, Artificial
  probe
  misc_feature (1)..(25): SEQ ID NO: 7319; WAN024BMN_at; Start 11; Stop 35
tgagtattttagcaaagtttcgtaa

SEQ ID NO: 85907 - DNA, 25 bp, Artificial
  probe
  misc_feature (1)..(25): SEQ ID NO: 7319; WAN024BMN_at; Start 90; Stop 114
ggaacctgtaaatcaatcacaatat

SEQ ID NO: 85908 - DNA, 25 bp, Artificial
  probe
  misc_feature (1)..(25): SEQ ID NO: 7319; WAN024BMN_at; Start 109; Stop 133
caatatacctgggaatcgagaatta

SEQ ID NO: 85909 - DNA, 25 bp, Artificial
  probe
  misc_feature (1)..(25): SEQ ID NO: 7319; WAN024BMN_at; Start 87; Stop 111
caaggaacctgtaaatcaatcacaa

SEQ ID NO: 85910 - DNA, 25 bp, Artificial
  probe
  misc_feature (1)..(25): SEQ ID NO: 7319; WAN024BMN_at; Start 46; Stop 70
atgttgtcctttttaggattgtttg

SEQ ID NO: 85911 - DNA, 25 bp, Artificial
  probe
  misc_feature (1)..(25): SEQ ID NO: 7319; WAN024BMN_at; Start 128; Stop 152
gaattatacaacaagctgtaacaac

SEQ ID NO: 85912 - DNA, 25 bp, Artificial
  probe
  misc_feature (1)..(25): SEQ ID NO: 7319; WAN024BMN_at; Start 132; Stop 156
tatacaacaagctgtaacaactaat

SEQ ID NO: 85913 - DNA, 25 bp, Artificial
  probe
  misc_feature (1)..(25): SEQ ID NO: 7319; WAN024BMN_at; Start 152; Stop 176
ctaatgaagttgatctgggactggc

SEQ ID NO: 85914 - DNA, 25 bp, Artificial
  probe
  misc_feature (1)..(25): SEQ ID NO: 7319; WAN024BMN_at; Start 30; Stop 54
tcgtaaaatcatttttatgttgtcc

SEQ ID NO: 85915 - DNA, 25 bp, Artificial
  probe
  misc_feature (1)..(25): SEQ ID NO: 7319; WAN024BMN_at; Start 156; Stop 180
tgaagttgatctgggactggcggat

SEQ ID NO: 85916 - DNA, 25 bp, Artificial
  probe
  misc_feature (1)..(25): SEQ ID NO: 7319; WAN024BMN_at; Start 136; Stop 160
caacaagctgtaacaactaatgaag

SEQ ID NO: 85917 - DNA, 25 bp, Artificial
  probe
  misc_feature (1)..(25): SEQ ID NO: 7319; WAN024BMN_at; Start 119; Stop 143
gggaatcgagaattatacaacaagc

SEQ ID NO: 85918 - DNA, 25 bp, Artificial
  probe
  misc_feature (1)..(25): SEQ ID NO: 7319; WAN024BMN_at; Start 104; Stop 128
aatcacaatatacctgggaatcgag

SEQ ID NO: 85919 - DNA, 25 bp, Artificial
  probe
  misc_feature (1)..(25): SEQ ID NO: 7319; WAN024BMN_at; Start 9; Stop 33
tatgagtattttagcaaagtttcgt

SEQ ID NO: 85920 - DNA, 25 bp, Artificial
  probe
  misc_feature (1)..(25): SEQ ID NO: 7319; WAN024BMN_at; Start 146; Stop 170
taacaactaatgaagttgatctggg

SEQ ID NO: 85921 - DNA, 25 bp, Artificial
  probe
  misc_feature (1)..(25): SEQ ID NO: 7319; WAN024BMN_at; Start 112; Stop 136
tatacctgggaatcgagaattatac

SEQ ID NO: 85922 - DNA, 25 bp, Artificial
  probe
  misc_feature (1)..(25): SEQ ID NO: 7319; WAN024BMN_at; Start 139; Stop 163
caagctgtaacaactaatgaagttg

SEQ ID NO: 85923 - DNA, 25 bp, Artificial
  probe
  misc_feature (1)..(25): SEQ ID NO: 7319; WAN024BMN_at; Start 102; Stop 126
tcaatcacaatatacctgggaatcg

SEQ ID NO: 85924 - DNA, 25 bp, Artificial
  probe
  misc_feature (1)..(25): SEQ ID NO: 7319; WAN024BMN_at; Start 142; Stop 166
gctgtaacaactaatgaagttgatc

SEQ ID NO: 85925 - DNA, 25 bp, Artificial
  probe
  misc_feature (1)..(25): SEQ ID NO: 7319; WAN024BMN_at; Start 125; Stop 149
cgagaattatacaacaagctgtaac

SEQ ID NO: 85926 - DNA, 25 bp, Artificial
  probe
  misc_feature (1)..(25): SEQ ID NO: 7319; WAN024BMN_at; Start 96; Stop 120
tgtaaatcaatcacaatatacctgg

SEQ ID NO: 85927 - DNA, 25 bp, Artificial
  probe
  misc_feature (1)..(25): SEQ ID NO: 7319; WAN024BMN_at; Start 116; Stop 140
cctgggaatcgagaattatacaaca

SEQ ID NO: 85928 - DNA, 25 bp, Artificial
  probe
  misc_feature (1)..(25): SEQ ID NO: 7319; WAN024BMN_at; Start 153; Stop 177
taatgaagttgatctgggactggcg

SEQ ID NO: 85929 - DNA, 25 bp, Artificial
  probe
  misc_feature (1)..(25): SEQ ID NO: 7319; WAN024BMN_at; Start 99; Stop 123
aaatcaatcacaatatacctgggaa

SEQ ID NO: 85930 - DNA, 25 bp, Artificial
  probe
  misc_feature (1)..(25): SEQ ID NO: 7319; WAN024BMN_at; Start 114; Stop 138
tacctgggaatcgagaattatacaa

SEQ ID NO: 85931 - DNA, 25 bp, Artificial
  probe
  misc_feature (1)..(25): SEQ ID NO: 7319; WAN024BMN_at; Start 3; Stop 27
ggttaatatgagtattttagcaaag

SEQ ID NO: 85932 - DNA, 25 bp, Artificial
  probe
  misc_feature (1)..(25): SEQ ID NO: 7319; WAN024BMN_at; Start 122; Stop 146
aatcgagaattatacaacaagctgt

SEQ ID NO: 85933 - DNA, 25 bp, Artificial
  probe
  misc_feature (1)..(25): SEQ ID NO: 6568; WAN024BMO_at; Start 796; Stop 820
gaatcacctacttttgacattgcag

SEQ ID NO: 85934 - DNA, 25 bp, Artificial
  probe
  misc_feature (1)..(25): SEQ ID NO: 6568; WAN024BMO_at; Start 811; Stop 835
gacattgcagtcgtatctaactcct

SEQ ID NO: 85935 - DNA, 25 bp, Artificial
  probe
  misc_feature (1)..(25): SEQ ID NO: 6568; WAN024BMO_at; Start 228; Stop 252
tttgctatctcaaatcggtgtggta

SEQ ID NO: 85936 - DNA, 25 bp, Artificial
  probe
  misc_feature (1)..(25): SEQ ID NO: 6568; WAN024BMO_at; Start 513; Stop 537
aatgcgccgttatctaaaggaactc

SEQ ID NO: 85937 - DNA, 25 bp, Artificial
  probe
  misc_feature (1)..(25): SEQ ID NO: 6568; WAN024BMO_at; Start 242; Stop 266
tcggtgtggtattggacagtgcttc

SEQ ID NO: 85938 - DNA, 25 bp, Artificial
  probe
  misc_feature (1)..(25): SEQ ID NO: 6568; WAN024BMO_at; Start 281; Stop 305
taacgggacctgaaaatctctctat

SEQ ID NO: 85939 - DNA, 25 bp, Artificial
  probe
  misc_feature (1)..(25): SEQ ID NO: 6568; WAN024BMO_at; Start 71; Stop 95
tagattttacattaagacagggaga

SEQ ID NO: 85940 - DNA, 25 bp, Artificial
  probe
  misc_feature (1)..(25): SEQ ID NO: 6568; WAN024BMO_at; Start 323; Stop 347
ggatttcgctaaaacaggtggagca

SEQ ID NO: 85941 - DNA, 25 bp, Artificial
  probe
  misc_feature (1)..(25): SEQ ID NO: 6568; WAN024BMO_at; Start 711; Stop 735
tcctcaagctaaggaagtgctttgc

SEQ ID NO: 85942 - DNA, 25 bp, Artificial
  probe
  misc_feature (1)..(25): SEQ ID NO: 6568; WAN024BMO_at; Start 307; Stop 331
tttgcaagattgagagggatttcgc

SEQ ID NO: 85943 - DNA, 25 bp, Artificial
  probe
  misc_feature (1)..(25): SEQ ID NO: 6568; WAN024BMO_at; Start 669; Stop 693
tggtgcagataaaaggaaaatccac

SEQ ID NO: 85944 - DNA, 25 bp, Artificial
  probe
  misc_feature (1)..(25): SEQ ID NO: 6568; WAN024BMO_at; Start 636; Stop 660
tatggctgaaaagactatgaaggaa

SEQ ID NO: 85945 - DNA, 25 bp, Artificial
  probe
  misc_feature (1)..(25): SEQ ID NO: 6568; WAN024BMO_at; Start 403; Stop 427
tctctgggaatgaagcaaaggttag

SEQ ID NO: 85946 - DNA, 25 bp, Artificial
  probe
  misc_feature (1)..(25): SEQ ID NO: 6568; WAN024BMO_at; Start 86; Stop 110
gacagggagaaatctatggcttact

SEQ ID NO: 85947 - DNA, 25 bp, Artificial
  probe
  misc_feature (1)..(25): SEQ ID NO: 6568; WAN024BMO_at; Start 342; Stop 366
ggagcaagctttacaagtagtagga

SEQ ID NO: 85948 - DNA, 25 bp, Artificial
  probe
  misc_feature (1)..(25): SEQ ID NO: 6568; WAN024BMO_at; Start 386; Stop 410
aactattcaagcagtattctctggg

SEQ ID NO: 85949 - DNA, 25 bp, Artificial
  probe
  misc_feature (1)..(25): SEQ ID NO: 6568; WAN024BMO_at; Start 144; Stop 168
caaggctattttaggcttgacagct

SEQ ID NO: 85950 - DNA, 25 bp, Artificial
  probe
  misc_feature (1)..(25): SEQ ID NO: 6568; WAN024BMO_at; Start 529; Stop 553
aaggaactcagtaccaatcatggca

SEQ ID NO: 85951 - DNA, 25 bp, Artificial
  probe
  misc_feature (1)..(25): SEQ ID NO: 6568; WAN024BMO_at; Start 498; Stop 522
tattggtatccttgaaatgcgccgt

SEQ ID NO: 85952 - DNA, 25 bp, Artificial
  probe
  misc_feature (1)..(25): SEQ ID NO: 6568; WAN024BMO_at; Start 783; Stop 807
tgaacttcagggagaatcacctact

SEQ ID NO: 85953 - DNA, 25 bp, Artificial
  probe
  misc_feature (1)..(25): SEQ ID NO: 6568; WAN024BMO_at; Start 606; Stop 630
tagagttgggatactgcatgatgcc

SEQ ID NO: 85954 - DNA, 25 bp, Artificial
  probe
  misc_feature (1)..(25): SEQ ID NO: 6568; WAN024BMO_at; Start 447; Stop 471
gcaccagccgaaaattctgatatta

SEQ ID NO: 85955 - DNA, 25 bp, Artificial
  probe
  misc_feature (1)..(25): SEQ ID NO: 6568; WAN024BMO_at; Start 569; Stop 593
ccagccacattatttcagaacttga

SEQ ID NO: 85956 - DNA, 25 bp, Artificial
  probe
  misc_feature (1)..(25): SEQ ID NO: 6568; WAN024BMO_at; Start 104; Stop 128
gcttactaggaagaaatggtactgg

SEQ ID NO: 85957 - DNA, 25 bp, Artificial
  probe
  misc_feature (1)..(25): SEQ ID NO: 6568; WAN024BMO_at; Start 192; Stop 216
tctatctgaaaaactgttaggcgaa

SEQ ID NO: 85958 - DNA, 25 bp, Artificial
  probe
  misc_feature (1)..(25): SEQ ID NO: 6568; WAN024BMO_at; Start 621; Stop 645
gcatgatgcccaccttatggctgaa

SEQ ID NO: 85959 - DNA, 25 bp, Artificial
  probe
  misc_feature (1)..(25): SEQ ID NO: 6568; WAN024BMO_at; Start 432; Stop 456
tgctaacgctattatgcaccagccg

SEQ ID NO: 85960 - DNA, 25 bp, Artificial
  probe
  misc_feature (1)..(25): SEQ ID NO: 6568; WAN024BMO_at; Start 898; Stop 922
tactttaagcggataacaggaggtg

SEQ ID NO: 85961 - DNA, 25 bp, Artificial
  probe
  misc_feature (1)..(25): SEQ ID NO: 6568; WAN024BMO_at; Start 769; Stop 793
tcggatatagaacttgaacttcagg

SEQ ID NO: 85962 - DNA, 25 bp, Artificial
  probe
  misc_feature (1)..(25): SEQ ID NO: 6568; WAN024BMO_at; Start 464; Stop 488
tgatattagatgaaccaacaaatgg

SEQ ID NO: 85963 - DNA, 25 bp, Artificial
  probe
  misc_feature (1)..(25): SEQ ID NO: 6568; WAN024BMO_at; Start 126; Stop 150
tggaaagacaacctttatcaaggct

SEQ ID NO: 85964 - DNA, 25 bp, Artificial
  probe
  misc_feature (1)..(25): SEQ ID NO: 6568; WAN024BMO_at; Start 734; Stop 758
gcaggataaatctgcaagaacagat

SEQ ID NO: 85965 - DNA, 25 bp, Artificial
  probe
  misc_feature (1)..(25): SEQ ID NO: 6568; WAN024BMO_at; Start 2; Stop 26
tgagaaatccagtaatacagacatt

SEQ ID NO: 85966 - DNA, 25 bp, Artificial
  probe
  misc_feature (1)..(25): SEQ ID NO: 6568; WAN024BMO_at; Start 695; Stop 719
taattgtttcggatgctcctcaagc

SEQ ID NO: 85967 - DNA, 25 bp, Artificial
  probe
  misc_feature (1)..(25): SEQ ID NO: 7244; WAN024BMP_at; Start 464; Stop 488
ccatgggagtatttcctttagttgc

SEQ ID NO: 85968 - DNA, 25 bp, Artificial
  probe
  misc_feature (1)..(25): SEQ ID NO: 7244; WAN024BMP_at; Start 478; Stop 502
cctttagttgctttggtcatgataa

SEQ ID NO: 85969 - DNA, 25 bp, Artificial
  probe
  misc_feature (1)..(25): SEQ ID NO: 7244; WAN024BMP_at; Start 66; Stop 90
tgtcgtatatggtgttgtttccctc

SEQ ID NO: 85970 - DNA, 25 bp, Artificial
  probe
  misc_feature (1)..(25): SEQ ID NO: 7244; WAN024BMP_at; Start 528; Stop 552
gaatttggtcggtgtcatgtatgtt

SEQ ID NO: 85971 - DNA, 25 bp, Artificial
  probe
  misc_feature (1)..(25): SEQ ID NO: 7244; WAN024BMP_at; Start 222; Stop 246
acaggcatttggtttagaatatcgc

SEQ ID NO: 85972 - DNA, 25 bp, Artificial
  probe
  misc_feature (1)..(25): SEQ ID NO: 7244; WAN024BMP_at; Start 314; Stop 338
tgtatatagaaatcaacgctctgtg

SEQ ID NO: 85973 - DNA, 25 bp, Artificial
  probe
  misc_feature (1)..(25): SEQ ID NO: 7244; WAN024BMP_at; Start 602; Stop 626
caagtgctaacagtttaatctggga

SEQ ID NO: 85974 - DNA, 25 bp, Artificial
  probe
  misc_feature (1)..(25): SEQ ID NO: 7244; WAN024BMP_at; Start 252; Stop 276
catcatgaacaacttgaaactcgct

SEQ ID NO: 85975 - DNA, 25 bp, Artificial
  probe
  misc_feature (1)..(25): SEQ ID NO: 7244; WAN024BMP_at; Start 77; Stop 101
gtgttgtttccctctacctagctct

SEQ ID NO: 85976 - DNA, 25 bp, Artificial
  probe
  misc_feature (1)..(25): SEQ ID NO: 7244; WAN024BMP_at; Start 617; Stop 641
taatctgggaaggaaacagagaagg

SEQ ID NO: 85977 - DNA, 25 bp, Artificial
  probe
  misc_feature (1)..(25): SEQ ID NO: 7244; WAN024BMP_at; Start 441; Stop 465
tatgagtagtggtatcttaattccc

SEQ ID NO: 85978 - DNA, 25 bp, Artificial
  probe
  misc_feature (1)..(25): SEQ ID NO: 7244; WAN024BMP_at; Start 513; Stop 537
caaggagatagttgggaatttggtc

SEQ ID NO: 85979 - DNA, 25 bp, Artificial
  probe
  misc_feature (1)..(25): SEQ ID NO: 7244; WAN024BMP_at; Start 576; Stop 600
gacgagtccaaatatcagtccagta

SEQ ID NO: 85980 - DNA, 25 bp, Artificial
  probe
  misc_feature (1)..(25): SEQ ID NO: 7244; WAN024BMP_at; Start 287; Stop 311
taatgaagacattctgggctaagat

SEQ ID NO: 85981 - DNA, 25 bp, Artificial
  probe
  misc_feature (1)..(25): SEQ ID NO: 7244; WAN024BMP_at; Start 495; Stop 519
catgataaaagtcagaggcaaggag

SEQ ID NO: 85982 - DNA, 25 bp, Artificial
  probe
  misc_feature (1)..(25): SEQ ID NO: 7244; WAN024BMP_at; Start 450; Stop 474
tggtatcttaattcccatgggagta

SEQ ID NO: 85983 - DNA, 25 bp, Artificial
  probe
  misc_feature (1)..(25): SEQ ID NO: 7244; WAN024BMP_at; Start 91; Stop 115
tacctagctctcatctgttattatg

SEQ ID NO: 85984 - DNA, 25 bp, Artificial
  probe
  misc_feature (1)..(25): SEQ ID NO: 7244; WAN024BMP_at; Start 109; Stop 133
tattatgtaaatgatgcgagaggct

SEQ ID NO: 85985 - DNA, 25 bp, Artificial
  probe
  misc_feature (1)..(25): SEQ ID NO: 7244; WAN024BMP_at; Start 31; Stop 55
gaatttctcaaacaaaggcatcaaa

SEQ ID NO: 85986 - DNA, 25 bp, Artificial
  probe
  misc_feature (1)..(25): SEQ ID NO: 7244; WAN024BMP_at; Start 383; Stop 407
tatcccgcttttcttcgacagtcag

SEQ ID NO: 85987 - DNA, 25 bp, Artificial
  probe
  misc_feature (1)..(25): SEQ ID NO: 7244; WAN024BMP_at; Start 330; Stop 354
cgctctgtgtatcatgttattcacc

SEQ ID NO: 85988 - DNA, 25 bp, Artificial
  probe
  misc_feature (1)..(25): SEQ ID NO: 7244; WAN024BMP_at; Start 357; Stop 381
tatttcggtttccttattcgcacta

SEQ ID NO: 85989 - DNA, 25 bp, Artificial
  probe
  misc_feature (1)..(25): SEQ ID NO: 7244; WAN024BMP_at; Start 590; Stop 614
tcagtccagtaacaagtgctaacag

SEQ ID NO: 85990 - DNA, 25 bp, Artificial
  probe
  misc_feature (1)..(25): SEQ ID NO: 7244; WAN024BMP_at; Start 717; Stop 741
cattaaatcttggttaagaaaggtg

SEQ ID NO: 85991 - DNA, 25 bp, Artificial
  probe
  misc_feature (1)..(25): SEQ ID NO: 7244; WAN024BMP_at; Start 635; Stop 659
gagaaggagtggtgcttcaacagcc

SEQ ID NO: 85992 - DNA, 25 bp, Artificial
  probe
  misc_feature (1)..(25): SEQ ID NO: 7244; WAN024BMP_at; Start 47; Stop 71
ggcatcaaaaactgaattttgtcgt

SEQ ID NO: 85993 - DNA, 25 bp, Artificial
  probe
  misc_feature (1)..(25): SEQ ID NO: 7244; WAN024BMP_at; Start 126; Stop 150
gagaggcttgtttgactcctttccc

SEQ ID NO: 85994 - DNA, 25 bp, Artificial
  probe
  misc_feature (1)..(25): SEQ ID NO: 7244; WAN024BMP_at; Start 205; Stop 229
tgtgtttcctatacaatacaggcat

SEQ ID NO: 85995 - DNA, 25 bp, Artificial
  probe
  misc_feature (1)..(25): SEQ ID NO: 7244; WAN024BMP_at; Start 645; Stop 669
ggtgcttcaacagccagctatctta

SEQ ID NO: 85996 - DNA, 25 bp, Artificial
  probe
  misc_feature (1)..(25): SEQ ID NO: 7244; WAN024BMP_at; Start 189; Stop 213
gattctccctttgtattgtgtttcc

SEQ ID NO: 85997 - DNA, 25 bp, Artificial
  probe
  misc_feature (1)..(25): SEQ ID NO: 7244; WAN024BMP_at; Start 3; Stop 27
gagggaattgcttgatttagtgaag

SEQ ID NO: 85998 - DNA, 25 bp, Artificial
  probe
  misc_feature (1)..(25): SEQ ID NO: 7244; WAN024BMP_at; Start 267; Stop 291
gaaactcgcttcagcaaatctaatg

SEQ ID NO: 85999 - DNA, 25 bp, Artificial
  probe
  misc_feature (1)..(25): SEQ ID NO: 7244; WAN024BMP_at; Start 238; Stop 262
gaatatcgctatcgcatcatgaaca

SEQ ID NO: 86000 - DNA, 25 bp, Artificial
  probe
  misc_feature (1)..(25): SEQ ID NO: 7244; WAN024BMP_at; Start 658; Stop 682
ccagctatcttatcgattgttgtac

SEQ ID NO: 86001 - DNA, 25 bp, Artificial
  probe
  misc_feature (1)..(25): SEQ ID NO: 7020; WAN024BMQ_at; Start 337; Stop 361
gaattcacttttttggctatgctgg

SEQ ID NO: 86002 - DNA, 25 bp, Artificial
  probe
  misc_feature (1)..(25): SEQ ID NO: 7020; WAN024BMQ_at; Start 394; Stop 418
tctagtcttgcaatgttatcttggg

SEQ ID NO: 86003 - DNA, 25 bp, Artificial
  probe
  misc_feature (1)..(25): SEQ ID NO: 7020; WAN024BMQ_at; Start 490; Stop 514
tatcggaaggaacttatccttgccc

SEQ ID NO: 86004 - DNA, 25 bp, Artificial
  probe
  misc_feature (1)..(25): SEQ ID NO: 7020; WAN024BMQ_at; Start 63; Stop 87
agccatcctgctctttttgttggag

SEQ ID NO: 86005 - DNA, 25 bp, Artificial
  probe
  misc_feature (1)..(25): SEQ ID NO: 7020; WAN024BMQ_at; Start 474; Stop 498
cctcttcttaggaaaatatcggaag

SEQ ID NO: 86006 - DNA, 25 bp, Artificial
  probe
  misc_feature (1)..(25): SEQ ID NO: 7020; WAN024BMQ_at; Start 287; Stop 311
tactccaagcgaaatttatgcttgc

SEQ ID NO: 86007 - DNA, 25 bp, Artificial
  probe
  misc_feature (1)..(25): SEQ ID NO: 7020; WAN024BMQ_at; Start 434; Stop 458
caattgcttttgcttatacactgtc

SEQ ID NO: 86008 - DNA, 25 bp, Artificial
  probe
  misc_feature (1)..(25): SEQ ID NO: 7020; WAN024BMQ_at; Start 613; Stop 637
caatttacggctttaacagtttctg

SEQ ID NO: 86009 - DNA, 25 bp, Artificial
  probe
  misc_feature (1)..(25): SEQ ID NO: 7020; WAN024BMQ_at; Start 666; Stop 690
ggcatgtctcctttatttgttggca

SEQ ID NO: 86010 - DNA, 25 bp, Artificial
  probe
  misc_feature (1)..(25): SEQ ID NO: 7020; WAN024BMQ_at; Start 371; Stop 395
taatggatggtgattttgctttctc

SEQ ID NO: 86011 - DNA, 25 bp, Artificial
  probe
  misc_feature (1)..(25): SEQ ID NO: 7020; WAN024BMQ_at; Start 452; Stop 476
cactgtctgctggtattattgtcct

SEQ ID NO: 86012 - DNA, 25 bp, Artificial
  probe
  misc_feature (1)..(25): SEQ ID NO: 7020; WAN024BMQ_at; Start 229; Stop 253
gaacaagtgtctaaaacgatttcaa

SEQ ID NO: 86013 - DNA, 25 bp, Artificial
  probe
  misc_feature (1)..(25): SEQ ID NO: 7020; WAN024BMQ_at; Start 645; Stop 669
catttggttggttaccttggtggca

SEQ ID NO: 86014 - DNA, 25 bp, Artificial
  probe
  misc_feature (1)..(25): SEQ ID NO: 7020; WAN024BMQ_at; Start 599; Stop 623
taatcatcatggagcaatttacggc

SEQ ID NO: 86015 - DNA, 25 bp, Artificial
  probe
  misc_feature (1)..(25): SEQ ID NO: 7020; WAN024BMQ_at; Start 33; Stop 57
gcgaaagatactgtatatgattccc

SEQ ID NO: 86016 - DNA, 25 bp, Artificial
  probe
  misc_feature (1)..(25): SEQ ID NO: 7020; WAN024BMQ_at; Start 627; Stop 651
aacagtttctgtatatgccatttgg

SEQ ID NO: 86017 - DNA, 25 bp, Artificial
  probe
  misc_feature (1)..(25): SEQ ID NO: 7020; WAN024BMQ_at; Start 589; Stop 613
aatttactactaatcatcatggagc

SEQ ID NO: 86018 - DNA, 25 bp, Artificial
  probe
  misc_feature (1)..(25): SEQ ID NO: 7020; WAN024BMQ_at; Start 48; Stop 72
tatgattccctttgtagccatcctg

SEQ ID NO: 86019 - DNA, 25 bp, Artificial
  probe
  misc_feature (1)..(25): SEQ ID NO: 7020; WAN024BMQ_at; Start 510; Stop 534
tgccctaccacttgcctttttattg

SEQ ID NO: 86020 - DNA, 25 bp, Artificial
  probe
  misc_feature (1)..(25): SEQ ID NO: 7020; WAN024BMQ_at; Start 138; Stop 162
tggctggtatgtagaaaatggtttc

SEQ ID NO: 86021 - DNA, 25 bp, Artificial
  probe
  misc_feature (1)..(25): SEQ ID NO: 7020; WAN024BMQ_at; Start 274; Stop 298
gatttgaaacaattactccaagcga

SEQ ID NO: 86022 - DNA, 25 bp, Artificial
  probe
  misc_feature (1)..(25): SEQ ID NO: 7020; WAN024BMQ_at; Start 245; Stop 269
cgatttcaaatctcagactgattcc

SEQ ID NO: 86023 - DNA, 25 bp, Artificial
  probe
  misc_feature (1)..(25): SEQ ID NO: 7020; WAN024BMQ_at; Start 540; Stop 564
tgcaggtttgtttgctttaacaacg

SEQ ID NO: 86024 - DNA, 25 bp, Artificial
  probe
  misc_feature (1)..(25): SEQ ID NO: 7020; WAN024BMQ_at; Start 109; Stop 133
tatcaagggcattcgtacggtagtg

SEQ ID NO: 86025 - DNA, 25 bp, Artificial
  probe
  misc_feature (1)..(25): SEQ ID NO: 7020; WAN024BMQ_at; Start 352; Stop 376
gctatgctggtcctagagttaatgg

SEQ ID NO: 86026 - DNA, 25 bp, Artificial
  probe
  misc_feature (1)..(25): SEQ ID NO: 7020; WAN024BMQ_at; Start 191; Stop 215
cttttgcgagcatgattttagtgga

SEQ ID NO: 86027 - DNA, 25 bp, Artificial
  probe
  misc_feature (1)..(25): SEQ ID NO: 7020; WAN024BMQ_at; Start 95; Stop 119
ttggtcatcagatttatcaagggca

SEQ ID NO: 86028 - DNA, 25 bp, Artificial
  probe
  misc_feature (1)..(25): SEQ ID NO: 7020; WAN024BMQ_at; Start 570; Stop 594
tgggcggtattatctggcaaattta

SEQ ID NO: 86029 - DNA, 25 bp, Artificial
  probe
  misc_feature (1)..(25): SEQ ID NO: 7020; WAN024BMQ_at; Start 685; Stop 709
ttggcagataaacgcatgatgaaca

SEQ ID NO: 86030 - DNA, 25 bp, Artificial
  probe
  misc_feature (1)..(25): SEQ ID NO: 7020; WAN024BMQ_at; Start 314; Stop 338
tgttgattaatctactagtcagtga

SEQ ID NO: 86031 - DNA, 25 bp, Artificial
  probe
  misc_feature (1)..(25): SEQ ID NO: 7020; WAN024BMQ_at; Start 260; Stop 284
gactgattcctgtcgatttgaaaca

SEQ ID NO: 86032 - DNA, 25 bp, Artificial
  probe
  misc_feature (1)..(25): SEQ ID NO: 7020; WAN024BMQ_at; Start 20; Stop 44
ctaaactaagaaggcgaaagatact

SEQ ID NO: 86033 - DNA, 25 bp, Artificial
  probe
  misc_feature (1)..(25): SEQ ID NO: 7020; WAN024BMQ_at; Start 175; Stop 199
tactattttctcctcccttttgcga

SEQ ID NO: 86034 - DNA, 25 bp, Artificial
  probe
  misc_feature (1)..(25): SEQ ID NO: 7020; WAN024BMQ_at; Start 417; Stop 441
gggagttgtttatggagcaattgct

SEQ ID NO: 86035 - DNA, 25 bp, Artificial
  probe
  misc_feature (1)..(25): SEQ ID NO: 6295; WAN024BMR-3_at; Start 1514; Stop 1538
cggtcttccgtataagaattctcca

SEQ ID NO: 86036 - DNA, 25 bp, Artificial
  probe
  misc_feature (1)..(25): SEQ ID NO: 6295; WAN024BMR-3_at; Start 1155; Stop 1179
aattggtcggattatagagaaaccg

SEQ ID NO: 86037 - DNA, 25 bp, Artificial
  probe
  misc_feature (1)..(25): SEQ ID NO: 6295; WAN024BMR-3_at; Start 428; Stop 452
tagtggtacttcaggagatatatgc

SEQ ID NO: 86038 - DNA, 25 bp, Artificial
  probe
  misc_feature (1)..(25): SEQ ID NO: 6295; WAN024BMR-3_at; Start 645; Stop 669
aagcaatttgctactcactctcagg

SEQ ID NO: 86039 - DNA, 25 bp, Artificial
  probe
  misc_feature (1)..(25): SEQ ID NO: 6295; WAN024BMR-3_at; Start 733; Stop 757
ggatgcctgaacactttaattctga

SEQ ID NO: 86040 - DNA, 25 bp, Artificial
  probe
  misc_feature (1)..(25): SEQ ID NO: 6295; WAN024BMR-3_at; Start 313; Stop 337
taaaaccatctgtaaaagtgatacg

SEQ ID NO: 86041 - DNA, 25 bp, Artificial
  probe
  misc_feature (1)..(25): SEQ ID NO: 6295; WAN024BMR-3_at; Start 979; Stop 1003
gagcatggaaaggaacgatggcttc

SEQ ID NO: 86042 - DNA, 25 bp, Artificial
  probe
  misc_feature (1)..(25): SEQ ID NO: 6295; WAN024BMR-3_at; Start 838; Stop 862
taggttctgctggtgcgattataca

SEQ ID NO: 86043 - DNA, 25 bp, Artificial
  probe
  misc_feature (1)..(25): SEQ ID NO: 6295; WAN024BMR-3_at; Start 493; Stop 517
ggaatatggttccaatcggatgcga

SEQ ID NO: 86044 - DNA, 25 bp, Artificial
  probe
  misc_feature (1)..(25): SEQ ID NO: 6295; WAN024BMR-3_at; Start 688; Stop 712
ctggagagacccctattatatatgt

SEQ ID NO: 86045 - DNA, 25 bp, Artificial
  probe
  misc_feature (1)..(25): SEQ ID NO: 6295; WAN024BMR-3_at; Start 1140; Stop 1164
gatactgaaaaatctaattggtcgg

SEQ ID NO: 86046 - DNA, 25 bp, Artificial
  probe
  misc_feature (1)..(25): SEQ ID NO: 6295; WAN024BMR-3_at; Start 995; Stop 1019
gatggcttccaatcctttagcgggt

SEQ ID NO: 86047 - DNA, 25 bp, Artificial
  probe
  misc_feature (1)..(25): SEQ ID NO: 6295; WAN024BMR-3_at; Start 1012; Stop 1036
tagcgggttttgcacacggagtctc

SEQ ID NO: 86048 - DNA, 25 bp, Artificial
  probe
  misc_feature (1)..(25): SEQ ID NO: 6295; WAN024BMR-3_at; Start 602; Stop 626
gaaaaaatgttaccgatctctcaag

SEQ ID NO: 86049 - DNA, 25 bp, Artificial
  probe
  misc_feature (1)..(25): SEQ ID NO: 6295; WAN024BMR-3_at; Start 660; Stop 684
cactctcaggtactgtttggaggtt

SEQ ID NO: 86050 - DNA, 25 bp, Artificial
  probe
  misc_feature (1)..(25): SEQ ID NO: 6295; WAN024BMR-3_at; Start 1366; Stop 1390
aaagccactgtctatgtcatggaga

SEQ ID NO: 86051 - DNA, 25 bp, Artificial
  probe
  misc_feature (1)..(25): SEQ ID NO: 6295; WAN024BMR-3_at; Start 1210; Stop 1234
aaaatatccctgtttcgtggtgcca

SEQ ID NO: 86052 - DNA, 25 bp, Artificial
  probe
  misc_feature (1)..(25): SEQ ID NO: 6295; WAN024BMR-3_at; Start 1529; Stop 1553
gaattctccaagtctaatgagtggg

SEQ ID NO: 86053 - DNA, 25 bp, Artificial
  probe
  misc_feature (1)..(25): SEQ ID NO: 6295; WAN024BMR-3_at; Start 878; Stop 902
tgaagttactagagacgaagaactc

SEQ ID NO: 86054 - DNA, 25 bp, Artificial
  probe
  misc_feature (1)..(25): SEQ ID NO: 6295; WAN024BMR-3_at; Start 1227; Stop 1251
tggtgccatggtgctccaggtatac

SEQ ID NO: 86055 - DNA, 25 bp, Artificial
  probe
  misc_feature (1)..(25): SEQ ID NO: 6295; WAN024BMR-3_at; Start 1045; Stop 1069
tgtgggcactgtcaaaacttagtag

SEQ ID NO: 86056 - DNA, 25 bp, Artificial
  probe
  misc_feature (1)..(25): SEQ ID NO: 6295; WAN024BMR-3_at; Start 1030; Stop 1054
gagtctcaggaattgtgtgggcact

SEQ ID NO: 86057 - DNA, 25 bp, Artificial
  probe
  misc_feature (1)..(25): SEQ ID NO: 6295; WAN024BMR-3_at; Start 718; Stop 742
tgttactgaagacaaggatgcctga

SEQ ID NO: 86058 - DNA, 25 bp, Artificial
  probe
  misc_feature (1)..(25): SEQ ID NO: 6295; WAN024BMR-3_at; Start 1557; Stop 1581
gctggaataggattaggcttactaa

SEQ ID NO: 86059 - DNA, 25 bp, Artificial
  probe
  misc_feature (1)..(25): SEQ ID NO: 6295; WAN024BMR-3_at; Start 381; Stop 405
gtacctctaacagaaaaaattgctg

SEQ ID NO: 86060 - DNA, 25 bp, Artificial
  probe
  misc_feature (1)..(25): SEQ ID NO: 6295; WAN024BMR-3_at; Start 894; Stop 918
gaagaactcttgatattagcgcatg

SEQ ID NO: 86061 - DNA, 25 bp, Artificial
  probe
  misc_feature (1)..(25): SEQ ID NO: 6295; WAN024BMR-3_at; Start 1497; Stop 1521
tcagaaaattggaaatgcggtcttc

SEQ ID NO: 86062 - DNA, 25 bp, Artificial
  probe
  misc_feature (1)..(25): SEQ ID NO: 6295; WAN024BMR-3_at; Start 1285; Stop 1309
cattgaatgtagagtttcgaagaac

SEQ ID NO: 86063 - DNA, 25 bp, Artificial
  probe
  misc_feature (1)..(25): SEQ ID NO: 6295; WAN024BMR-3_at; Start 1353; Stop 1377
tatggttttggaaaaagccactgtc

SEQ ID NO: 86064 - DNA, 25 bp, Artificial
  probe
  misc_feature (1)..(25): SEQ ID NO: 6295; WAN024BMR-3_at; Start 1416; Stop 1440
tatgttgctaagaaaatgtcctctg

SEQ ID NO: 86065 - DNA, 25 bp, Artificial
  probe
  misc_feature (1)..(25): SEQ ID NO: 6295; WAN024BMR-3_at; Start 469; Stop 493
tactgggagagaaaacgaatgattg

SEQ ID NO: 86066 - DNA, 25 bp, Artificial
  probe
  misc_feature (1)..(25): SEQ ID NO: 6295; WAN024BMR-3_at; Start 509; Stop 533
cggatgcgatctgtataatggtata

SEQ ID NO: 86067 - DNA, 25 bp, Artificial
  probe
  misc_feature (1)..(25): SEQ ID NO: 6295; WAN024BMR-3_at; Start 450; Stop 474
tgctgggtagacatgaacatactgg

SEQ ID NO: 86068 - DNA, 25 bp, Artificial
  probe
  misc_feature (1)..(25): SEQ ID NO: 6295; WAN024BMR-3_at; Start 949; Stop 973
caaaaattactgttgaagggcaaga

SEQ ID NO: 86069 - DNA, 25 bp, Artificial
  probe
  misc_feature (1)..(25): SEQ ID NO: 7391; WAN024BMR-5_at; Start 1543; Stop 1567
tctagacaaataatgaggcccacac

SEQ ID NO: 86070 - DNA, 25 bp, Artificial
  probe
  misc_feature (1)..(25): SEQ ID NO: 7391; WAN024BMR-5_at; Start 1005; Stop 1029
tcagttttatacacatctaggatac

SEQ ID NO: 86071 - DNA, 25 bp, Artificial
  probe
  misc_feature (1)..(25): SEQ ID NO: 7391; WAN024BMR-5_at; Start 755; Stop 779
caaagattgaatctggtgtgtcaga

SEQ ID NO: 86072 - DNA, 25 bp, Artificial
  probe
  misc_feature (1)..(25): SEQ ID NO: 7391; WAN024BMR-5_at; Start 1432; Stop 1456
tataaaaattacgtttctgctggct

SEQ ID NO: 86073 - DNA, 25 bp, Artificial
  probe
  misc_feature (1)..(25): SEQ ID NO: 7391; WAN024BMR-5_at; Start 800; Stop 824
cagtatatctcctttggtttggaac

SEQ ID NO: 86074 - DNA, 25 bp, Artificial
  probe
  misc_feature (1)..(25): SEQ ID NO: 7391; WAN024BMR-5_at; Start 410; Stop 434
tgagtagtcagaatttgaaagtcac

SEQ ID NO: 86075 - DNA, 25 bp, Artificial
  probe
  misc_feature (1)..(25): SEQ ID NO: 7391; WAN024BMR-5_at; Start 242; Stop 266
tagattcattttcacatatggacga

SEQ ID NO: 86076 - DNA, 25 bp, Artificial
  probe
  misc_feature (1)..(25): SEQ ID NO: 7391; WAN024BMR-5_at; Start 1159; Stop 1183
tacgaaacggcagataaactaatat

SEQ ID NO: 86077 - DNA, 25 bp, Artificial
  probe
  misc_feature (1)..(25): SEQ ID NO: 7391; WAN024BMR-5_at; Start 379; Stop 403
aaatttgccgcctataaacttgaag

SEQ ID NO: 86078 - DNA, 25 bp, Artificial
  probe
  misc_feature (1)..(25): SEQ ID NO: 7391; WAN024BMR-5_at; Start 1308; Stop 1332
tgaacgtgcaagtatcatgcatagt

SEQ ID NO: 86079 - DNA, 25 bp, Artificial
  probe
  misc_feature (1)..(25): SEQ ID NO: 7391; WAN024BMR-5_at; Start 1389; Stop 1413
tcagccttttattcaatcgggcaag

SEQ ID NO: 86080 - DNA, 25 bp, Artificial
  probe
  misc_feature (1)..(25): SEQ ID NO: 7391; WAN024BMR-5_at; Start 1266; Stop 1290
tattagcggtctaagttcaagcgca

SEQ ID NO: 86081 - DNA, 25 bp, Artificial
  probe
  misc_feature (1)..(25): SEQ ID NO: 7391; WAN024BMR-5_at; Start 1147; Stop 1171
tacagaaaggaatacgaaacggcag

SEQ ID NO: 86082 - DNA, 25 bp, Artificial
  probe
  misc_feature (1)..(25): SEQ ID NO: 7391; WAN024BMR-5_at; Start 1347; Stop 1371
gaaaattggttatgaacaatccgca

SEQ ID NO: 86083 - DNA, 25 bp, Artificial
  probe
  misc_feature (1)..(25): SEQ ID NO: 7391; WAN024BMR-5_at; Start 587; Stop 611
tatacttatcagaccatttttggga

SEQ ID NO: 86084 - DNA, 25 bp, Artificial
  probe
  misc_feature (1)..(25): SEQ ID NO: 7391; WAN024BMR-5_at; Start 1323; Stop 1347
catgcatagtatgacggatgaaatg

SEQ ID NO: 86085 - DNA, 25 bp, Artificial
  probe
  misc_feature (1)..(25): SEQ ID NO: 7391; WAN024BMR-5_at; Start 425; Stop 449
tgaaagtcactagagacgtcttgaa

SEQ ID NO: 86086 - DNA, 25 bp, Artificial
  probe
  misc_feature (1)..(25): SEQ ID NO: 7391; WAN024BMR-5_at; Start 1294; Stop 1318
gagatgattccgattgaacgtgcaa

SEQ ID NO: 86087 - DNA, 25 bp, Artificial
  probe
  misc_feature (1)..(25): SEQ ID NO: 7391; WAN024BMR-5_at; Start 1100; Stop 1124
gaccagttcttgtcgatattgaaac

SEQ ID NO: 86088 - DNA, 25 bp, Artificial
  probe
  misc_feature (1)..(25): SEQ ID NO: 7391; WAN024BMR-5_at; Start 953; Stop 977
gatgggtagagtacatagaacactt

SEQ ID NO: 86089 - DNA, 25 bp, Artificial
  probe
  misc_feature (1)..(25): SEQ ID NO: 7391; WAN024BMR-5_at; Start 1082; Stop 1106
tcatagctaagggtaatagaccagt

SEQ ID NO: 86090 - DNA, 25 bp, Artificial
  probe
  misc_feature (1)..(25): SEQ ID NO: 7391; WAN024BMR-5_at; Start 874; Stop 898
caaaacttgcttagctggtacaacc

SEQ ID NO: 86091 - DNA, 25 bp, Artificial
  probe
  misc_feature (1)..(25): SEQ ID NO: 7391; WAN024BMR-5_at; Start 1132; Stop 1156
cataatacaacggaatacagaaagg

SEQ ID NO: 86092 - DNA, 25 bp, Artificial
  probe
  misc_feature (1)..(25): SEQ ID NO: 7391; WAN024BMR-5_at; Start 318; Stop 342
tatagttgacagtgagggaaaacga

SEQ ID NO: 86093 - DNA, 25 bp, Artificial
  probe
  misc_feature (1)..(25): SEQ ID NO: 7391; WAN024BMR-5_at; Start 38; Stop 62
aagatgcttcttatttctctgaaag

SEQ ID NO: 86094 - DNA, 25 bp, Artificial
  probe
  misc_feature (1)..(25): SEQ ID NO: 7391; WAN024BMR-5_at; Start 968; Stop 992
tagaacacttaccatgcacatatga

SEQ ID NO: 86095 - DNA, 25 bp, Artificial
  probe
  misc_feature (1)..(25): SEQ ID NO: 7391; WAN024BMR-5_at; Start 706; Stop 730
gaagataaagcattattacaggaac

SEQ ID NO: 86096 - DNA, 25 bp, Artificial
  probe
  misc_feature (1)..(25): SEQ ID NO: 7391; WAN024BMR-5_at; Start 1447; Stop 1471
tctgctggctttaaagaagcttatg

SEQ ID NO: 86097 - DNA, 25 bp, Artificial
  probe
  misc_feature (1)..(25): SEQ ID NO: 7391; WAN024BMR-5_at; Start 1557; Stop 1581
gaggcccacacaattttattctaat

SEQ ID NO: 86098 - DNA, 25 bp, Artificial
  probe
  misc_feature (1)..(25): SEQ ID NO: 7391; WAN024BMR-5_at; Start 256; Stop 280
catatggacgaatttatagagttct

SEQ ID NO: 86099 - DNA, 25 bp, Artificial
  probe
  misc_feature (1)..(25): SEQ ID NO: 7391; WAN024BMR-5_at; Start 1281; Stop 1305
ttcaagcgcaggagagatgattccg

SEQ ID NO: 86100 - DNA, 25 bp, Artificial
  probe
  misc_feature (1)..(25): SEQ ID NO: 7391; WAN024BMR-5_at; Start 1402; Stop 1426
caatcgggcaaggatgttgatttga

SEQ ID NO: 86101 - DNA, 25 bp, Artificial
  probe
  misc_feature (1)..(25): SEQ ID NO: 7391; WAN024BMR-5_at; Start 1370; Stop 1394
cattgcaaagtaaagataatcagcc

SEQ ID NO: 86102 - DNA, 25 bp, Artificial
  probe
  misc_feature (1)..(25): SEQ ID NO: 7391; WAN024BMR-5_at; Start 887; Stop 911
gctggtacaacctgaaattcaataa

SEQ ID NO: 86103 - DNA, 25 bp, Artificial
  probe
  misc_feature (1)..(25): SEQ ID NO: 7381; WAN024BMS_at; Start 757; Stop 781
tcaggtgaaattgtaactcgaatca

SEQ ID NO: 86104 - DNA, 25 bp, Artificial
  probe
  misc_feature (1)..(25): SEQ ID NO: 7381; WAN024BMS_at; Start 319; Stop 343
gatccagaacgaggtagaattacag

SEQ ID NO: 86105 - DNA, 25 bp, Artificial
  probe
  misc_feature (1)..(25): SEQ ID NO: 7381; WAN024BMS_at; Start 1198; Stop 1222
ttgggaggactagaagtacagcagc

SEQ ID NO: 86106 - DNA, 25 bp, Artificial
  probe
  misc_feature (1)..(25): SEQ ID NO: 7381; WAN024BMS_at; Start 39; Stop 63
cagttgtggtttagcatgcatggca

SEQ ID NO: 86107 - DNA, 25 bp, Artificial
  probe
  misc_feature (1)..(25): SEQ ID NO: 7381; WAN024BMS_at; Start 1523; Stop 1547
caggttgcggaaaaactacacttat

SEQ ID NO: 86108 - DNA, 25 bp, Artificial
  probe
  misc_feature (1)..(25): SEQ ID NO: 7381; WAN024BMS_at; Start 1826; Stop 1850
tatcaggtgggcaaaggcaacgctt

SEQ ID NO: 86109 - DNA, 25 bp, Artificial
  probe
  misc_feature (1)..(25): SEQ ID NO: 7381; WAN024BMS_at; Start 1896; Stop 1920
tgatgaaggtactggtcaattggac

SEQ ID NO: 86110 - DNA, 25 bp, Artificial
  probe
  misc_feature (1)..(25): SEQ ID NO: 7381; WAN024BMS_at; Start 497; Stop 521
tatcaattttggtacagagtctcac

SEQ ID NO: 86111 - DNA, 25 bp, Artificial
  probe
  misc_feature (1)..(25): SEQ ID NO: 7381; WAN024BMS_at; Start 1725; Stop 1749
ggaggatgtcatttctgcagcaagt

SEQ ID NO: 86112 - DNA, 25 bp, Artificial
  probe
  misc_feature (1)..(25): SEQ ID NO: 7381; WAN024BMS_at; Start 268; Stop 292
gctcattatattgtggtggaaaaac

SEQ ID NO: 86113 - DNA, 25 bp, Artificial
  probe
  misc_feature (1)..(25): SEQ ID NO: 7381; WAN024BMS_at; Start 1911; Stop 1935
tcaattggacactataacagagaag

SEQ ID NO: 86114 - DNA, 25 bp, Artificial
  probe
  misc_feature (1)..(25): SEQ ID NO: 7381; WAN024BMS_at; Start 1813; Stop 1837
aatggtaacaatttatcaggtgggc

SEQ ID NO: 86115 - DNA, 25 bp, Artificial
  probe
  misc_feature (1)..(25): SEQ ID NO: 7381; WAN024BMS_at; Start 855; Stop 879
tatcgcttttatagctatggcaatg

SEQ ID NO: 86116 - DNA, 25 bp, Artificial
  probe
  misc_feature (1)..(25): SEQ ID NO: 7381; WAN024BMS_at; Start 1165; Stop 1189
tatagactcgtaccaaacttactaa

SEQ ID NO: 86117 - DNA, 25 bp, Artificial
  probe
  misc_feature (1)..(25): SEQ ID NO: 7381; WAN024BMS_at; Start 308; Stop 332
tagtattcattgatccagaacgagg

SEQ ID NO: 86118 - DNA, 25 bp, Artificial
  probe
  misc_feature (1)..(25): SEQ ID NO: 7381; WAN024BMS_at; Start 712; Stop 736
ggcaaaattttcactctacctatga

SEQ ID NO: 86119 - DNA, 25 bp, Artificial
  probe
  misc_feature (1)..(25): SEQ ID NO: 7381; WAN024BMS_at; Start 178; Stop 202
ggattggattcaaaggcgactgaga

SEQ ID NO: 86120 - DNA, 25 bp, Artificial
  probe
  misc_feature (1)..(25): SEQ ID NO: 7381; WAN024BMS_at; Start 1779; Stop 1803
tatgcctatgggatactatactagt

SEQ ID NO: 86121 - DNA, 25 bp, Artificial
  probe
  misc_feature (1)..(25): SEQ ID NO: 7381; WAN024BMS_at; Start 1042; Stop 1066
ttgaaagtctcagcaaaaggagatg

SEQ ID NO: 86122 - DNA, 25 bp, Artificial
  probe
  misc_feature (1)..(25): SEQ ID NO: 7381; WAN024BMS_at; Start 1991; Stop 2015
gactatctaacgctcaggaatacga

SEQ ID NO: 86123 - DNA, 25 bp, Artificial
  probe
  misc_feature (1)..(25): SEQ ID NO: 7381; WAN024BMS_at; Start 1666; Stop 1690
gatgtaatgtttaacgacactgtga

SEQ ID NO: 86124 - DNA, 25 bp, Artificial
  probe
  misc_feature (1)..(25): SEQ ID NO: 7381; WAN024BMS_at; Start 121; Stop 145
gagaattcaagggatggattatcca

SEQ ID NO: 86125 - DNA, 25 bp, Artificial
  probe
  misc_feature (1)..(25): SEQ ID NO: 7381; WAN024BMS_at; Start 1484; Stop 1508
ctattaagaaaggtgaacgtattgc

SEQ ID NO: 86126 - DNA, 25 bp, Artificial
  probe
  misc_feature (1)..(25): SEQ ID NO: 7381; WAN024BMS_at; Start 1557; Stop 1581
gctacggctgtatgatgtagagaaa

SEQ ID NO: 86127 - DNA, 25 bp, Artificial
  probe
  misc_feature (1)..(25): SEQ ID NO: 7381; WAN024BMS_at; Start 1441; Stop 1465
gcttatagtagtgcctgtaaagtta

SEQ ID NO: 86128 - DNA, 25 bp, Artificial
  probe
  misc_feature (1)..(25): SEQ ID NO: 7381; WAN024BMS_at; Start 1856; Stop 1880
tagctcgagccattttgcaaaatcc

SEQ ID NO: 86129 - DNA, 25 bp, Artificial
  probe
  misc_feature (1)..(25): SEQ ID NO: 7381; WAN024BMS_at; Start 563; Stop 587
taattagcaaaggagaaatgtatcg

SEQ ID NO: 86130 - DNA, 25 bp, Artificial
  probe
  misc_feature (1)..(25): SEQ ID NO: 7381; WAN024BMS_at; Start 18; Stop 42
catacaacaattatctgagaccagt

SEQ ID NO: 86131 - DNA, 25 bp, Artificial
  probe
  misc_feature (1)..(25): SEQ ID NO: 7381; WAN024BMS_at; Start 1841; Stop 1865
ggcaacgcttagcaatagctcgagc

SEQ ID NO: 86132 - DNA, 25 bp, Artificial
  probe
  misc_feature (1)..(25): SEQ ID NO: 7381; WAN024BMS_at; Start 2034; Stop 2058
taacggtaaaatcatagatagcgga

SEQ ID NO: 86133 - DNA, 25 bp, Artificial
  probe
  misc_feature (1)..(25): SEQ ID NO: 7381; WAN024BMS_at; Start 76; Stop 100
tattatgggcatgaggcaaacttat

SEQ ID NO: 86134 - DNA, 25 bp, Artificial
  probe
  misc_feature (1)..(25): SEQ ID NO: 7381; WAN024BMS_at; Start 1214; Stop 1238
tacagcagcatatgatgtctctggg

SEQ ID NO: 86135 - DNA, 25 bp, Artificial
  probe
  misc_feature (1)..(25): SEQ ID NO: 7381; WAN024BMS_at; Start 382; Stop 406
gtaattttcttctcaccaaatagga

SEQ ID NO: 86136 - DNA, 25 bp, Artificial
  probe
  misc_feature (1)..(25): SEQ ID NO: 7381; WAN024BMS_at; Start 1710; Stop 1734
tcatagccattctatggaggatgtc

SEQ ID NO: 86137 - DNA, 25 bp, Artificial
  probe
  misc_feature (1)..(25): SEQ ID NO: 6552; WAN024BMT_at; Start 5; Stop 29
ctacaactaaaaatccctggaatca

SEQ ID NO: 86138 - DNA, 25 bp, Artificial
  probe
  misc_feature (1)..(25): SEQ ID NO: 6552; WAN024BMT_at; Start 84; Stop 108
tgaactaatcaaaaaatacacctct

SEQ ID NO: 86139 - DNA, 25 bp, Artificial
  probe
  misc_feature (1)..(25): SEQ ID NO: 6552; WAN024BMT_at; Start 69; Stop 93
tgctaccgaagatgttgaactaatc

SEQ ID NO: 86140 - DNA, 25 bp, Artificial
  probe
  misc_feature (1)..(25): SEQ ID NO: 6552; WAN024BMT_at; Start 464; Stop 488
catattactctactaagtacgatga

SEQ ID NO: 86141 - DNA, 25 bp, Artificial
  probe
  misc_feature (1)..(25): SEQ ID NO: 6552; WAN024BMT_at; Start 557; Stop 581
gagaacgtgttttggatgacaatga

SEQ ID NO: 86142 - DNA, 25 bp, Artificial
  probe
  misc_feature (1)..(25): SEQ ID NO: 6552; WAN024BMT_at; Start 722; Stop 746
gatattctgctaaaaaagaggttga

SEQ ID NO: 86143 - DNA, 25 bp, Artificial
  probe
  misc_feature (1)..(25): SEQ ID NO: 6552; WAN024BMT_at; Start 341; Stop 365
cgaatgaatttggttactgggctaa

SEQ ID NO: 86144 - DNA, 25 bp, Artificial
  probe
  misc_feature (1)..(25): SEQ ID NO: 6552; WAN024BMT_at; Start 494; Stop 518
taaatgattttataagcaaagaagg

SEQ ID NO: 86145 - DNA, 25 bp, Artificial
  probe
  misc_feature (1)..(25): SEQ ID NO: 6552; WAN024BMT_at; Start 216; Stop 240
taaaaatcctggctacacccctgaa

SEQ ID NO: 86146 - DNA, 25 bp, Artificial
  probe
  misc_feature (1)..(25): SEQ ID NO: 6552; WAN024BMT_at; Start 34; Stop 58
tctaacgtcgatataaatggagagc

SEQ ID NO: 86147 - DNA, 25 bp, Artificial
  probe
  misc_feature (1)..(25): SEQ ID NO: 6552; WAN024BMT_at; Start 441; Stop 465
cgttgctttagctgaatattttcca

SEQ ID NO: 86148 - DNA, 25 bp, Artificial
  probe
  misc_feature (1)..(25): SEQ ID NO: 6552; WAN024BMT_at; Start 242; Stop 266
ttaaaacactttatgaccacgataa

SEQ ID NO: 86149 - DNA, 25 bp, Artificial
  probe
  misc_feature (1)..(25): SEQ ID NO: 6552; WAN024BMT_at; Start 625; Stop 649
gatgcaattcctcaattaaaagagt

SEQ ID NO: 86150 - DNA, 25 bp, Artificial
  probe
  misc_feature (1)..(25): SEQ ID NO: 6552; WAN024BMT_at; Start 253; Stop 277
tatgaccacgataaaaactaccaaa

SEQ ID NO: 86151 - DNA, 25 bp, Artificial
  probe
  misc_feature (1)..(25): SEQ ID NO: 6552; WAN024BMT_at; Start 20; Stop 44
cctggaatcaattatctaacgtcga

SEQ ID NO: 86152 - DNA, 25 bp, Artificial
  probe
  misc_feature (1)..(25): SEQ ID NO: 6552; WAN024BMT_at; Start 58; Stop 82
caagctattcttgctaccgaagatg

SEQ ID NO: 86153 - DNA, 25 bp, Artificial
  probe
  misc_feature (1)..(25): SEQ ID NO: 6552; WAN024BMT_at; Start 707; Stop 731
tattaaaagtcaaacgatattctgc

SEQ ID NO: 86154 - DNA, 25 bp, Artificial
  probe
  misc_feature (1)..(25): SEQ ID NO: 6552; WAN024BMT_at; Start 597; Stop 621
catcacacgatcttacaataagtgg

SEQ ID NO: 86155 - DNA, 25 bp, Artificial
  probe
  misc_feature (1)..(25): SEQ ID NO: 6552; WAN024BMT_at; Start 225; Stop 249
tggctacacccctgaatttaaaaca

SEQ ID NO: 86156 - DNA, 25 bp, Artificial
  probe
  misc_feature (1)..(25): SEQ ID NO: 6552; WAN024BMT_at; Start 307; Stop 331
ggaaacctctattttcatgcttttg

SEQ ID NO: 86157 - DNA, 25 bp, Artificial
  probe
  misc_feature (1)..(25): SEQ ID NO: 6552; WAN024BMT_at; Start 760; Stop 784
gattcattgaaaaagctagagcata

SEQ ID NO: 86158 - DNA, 25 bp, Artificial
  probe
  misc_feature (1)..(25): SEQ ID NO: 6552; WAN024BMT_at; Start 430; Stop 454
ttttcaaaacacgttgctttagctg

SEQ ID NO: 86159 - DNA, 25 bp, Artificial
  probe
  misc_feature (1)..(25): SEQ ID NO: 6552; WAN024BMT_at; Start 612; Stop 636
caataagtggtacgatgcaattcct

SEQ ID NO: 86160 - DNA, 25 bp, Artificial
  probe
  misc_feature (1)..(25): SEQ ID NO: 6552; WAN024BMT_at; Start 663; Stop 687
tgaaacgagtaatcctagtaatcct

SEQ ID NO: 86161 - DNA, 25 bp, Artificial
  probe
  misc_feature (1)..(25): SEQ ID NO: 6552; WAN024BMT_at; Start 388; Stop 412
gatgtagacaatttacaggatttaa

SEQ ID NO: 86162 - DNA, 25 bp, Artificial
  probe
  misc_feature (1)..(25): SEQ ID NO: 6552; WAN024BMT_at; Start 100; Stop 124
tacacctctacaaaacactacaaaa

SEQ ID NO: 86163 - DNA, 25 bp, Artificial
  probe
  misc_feature (1)..(25): SEQ ID NO: 6552; WAN024BMT_at; Start 291; Stop 315
taatctacagctaaaaggaaacctc

SEQ ID NO: 86164 - DNA, 25 bp, Artificial
  probe
  misc_feature (1)..(25): SEQ ID NO: 6552; WAN024BMT_at; Start 580; Stop 604
gatcctgtaatcattatcatcacac

SEQ ID NO: 86165 - DNA, 25 bp, Artificial
  probe
  misc_feature (1)..(25): SEQ ID NO: 6552; WAN024BMT_at; Start 149; Stop 173
tacaattaggtttttgtccgcaaca

SEQ ID NO: 86166 - DNA, 25 bp, Artificial
  probe
  misc_feature (1)..(25): SEQ ID NO: 6552; WAN024BMT_at; Start 372; Stop 396
taaagtatggtttgatgatgtagac

SEQ ID NO: 86167 - DNA, 25 bp, Artificial
  probe
  misc_feature (1)..(25): SEQ ID NO: 6552; WAN024BMT_at; Start 324; Stop 348
tgcttttgacctagatacgaatgaa

SEQ ID NO: 86168 - DNA, 25 bp, Artificial
  probe
  misc_feature (1)..(25): SEQ ID NO: 6552; WAN024BMT_at; Start 509; Stop 533
gcaaagaaggttatttcccaacaca

SEQ ID NO: 86169 - DNA, 25 bp, Artificial
  probe
  misc_feature (1)..(25): SEQ ID NO: 6552; WAN024BMT_at; Start 135; Stop 159
tgatatctaccgtttacaattaggt

SEQ ID NO: 86170 - DNA, 25 bp, Artificial
  probe
  misc_feature (1)..(25): SEQ ID NO: 6552; WAN024BMT_at; Start 43; Stop 67
gatataaatggagagcaagctattc

SEQ ID NO: 86171 - DNA, 25 bp, Artificial
  probe
  misc_feature (1)..(25): SEQ ID NO: 6884; WAN024BMU_at; Start 138; Stop 162
tgagaactttattgataactatgcc

SEQ ID NO: 86172 - DNA, 25 bp, Artificial
  probe
  misc_feature (1)..(25): SEQ ID NO: 6884; WAN024BMU_at; Start 691; Stop 715
caagcatctgttatctataatgatc

SEQ ID NO: 86173 - DNA, 25 bp, Artificial
  probe
  misc_feature (1)..(25): SEQ ID NO: 6884; WAN024BMU_at; Start 323; Stop 347
ccttataccgtggtgtttgtgttgg

SEQ ID NO: 86174 - DNA, 25 bp, Artificial
  probe
  misc_feature (1)..(25): SEQ ID NO: 6884; WAN024BMU_at; Start 300; Stop 324
aaaagacttagagtatgctcttgcc

SEQ ID NO: 86175 - DNA, 25 bp, Artificial
  probe
  misc_feature (1)..(25): SEQ ID NO: 6884; WAN024BMU_at; Start 579; Stop 603
caactgggatggatcagatgtacct

SEQ ID NO: 86176 - DNA, 25 bp, Artificial
  probe
  misc_feature (1)..(25): SEQ ID NO: 6884; WAN024BMU_at; Start 504; Stop 528
taaacgcagtttctctaattcagaa

SEQ ID NO: 86177 - DNA, 25 bp, Artificial
  probe
  misc_feature (1)..(25): SEQ ID NO: 6884; WAN024BMU_at; Start 91; Stop 115
gaaaaagcaacaatctccaaagatg

SEQ ID NO: 86178 - DNA, 25 bp, Artificial
  probe
  misc_feature (1)..(25): SEQ ID NO: 6884; WAN024BMU_at; Start 259; Stop 283
cacaatgtacgtggtgtttggaata

SEQ ID NO: 86179 - DNA, 25 bp, Artificial
  probe
  misc_feature (1)..(25): SEQ ID NO: 6884; WAN024BMU_at; Start 532; Stop 556
ccccagaaatctttagataaatgga

SEQ ID NO: 86180 - DNA, 25 bp, Artificial
  probe
  misc_feature (1)..(25): SEQ ID NO: 6884; WAN024BMU_at; Start 59; Stop 83
caaatttagttagtggacatgcgtc

SEQ ID NO: 86181 - DNA, 25 bp, Artificial
  probe
  misc_feature (1)..(25): SEQ ID NO: 6884; WAN024BMU_at; Start 623; Stop 647
taaataagcgaattattaacatccc

SEQ ID NO: 86182 - DNA, 25 bp, Artificial
  probe
  misc_feature (1)..(25): SEQ ID NO: 6884; WAN024BMU_at; Start 563; Stop 587
gaagtttcttttatggcaactggga

SEQ ID NO: 86183 - DNA, 25 bp, Artificial
  probe
  misc_feature (1)..(25): SEQ ID NO: 6884; WAN024BMU_at; Start 250; Stop 274
gatatttatcacaatgtacgtggtg

SEQ ID NO: 86184 - DNA, 25 bp, Artificial
  probe
  misc_feature (1)..(25): SEQ ID NO: 6884; WAN024BMU_at; Start 391; Stop 415
tcagagtatcctttcccaacaagga

SEQ ID NO: 86185 - DNA, 25 bp, Artificial
  probe
  misc_feature (1)..(25): SEQ ID NO: 6884; WAN024BMU_at; Start 597; Stop 621
tgtacctcaacaccttgctcaatgt

SEQ ID NO: 86186 - DNA, 25 bp, Artificial
  probe
  misc_feature (1)..(25): SEQ ID NO: 6884; WAN024BMU_at; Start 120; Stop 144
gattcaggctagatcaattgagaac

SEQ ID NO: 86187 - DNA, 25 bp, Artificial
  probe
  misc_feature (1)..(25): SEQ ID NO: 6884; WAN024BMU_at; Start 274; Stop 298
gtttggaatatttctgaatcacgta

SEQ ID NO: 86188 - DNA, 25 bp, Artificial
  probe
  misc_feature (1)..(25): SEQ ID NO: 6884; WAN024BMU_at; Start 313; Stop 337
tatgctcttgccttataccgtggtg

SEQ ID NO: 86189 - DNA, 25 bp, Artificial
  probe
  misc_feature (1)..(25): SEQ ID NO: 6884; WAN024BMU_at; Start 517; Stop 541
tctaattcagaatttccccagaaat

SEQ ID NO: 86190 - DNA, 25 bp, Artificial
  probe
  misc_feature (1)..(25): SEQ ID NO: 6884; WAN024BMU_at; Start 288; Stop 312
tgaatcacgtaaaaaagacttagag

SEQ ID NO: 86191 - DNA, 25 bp, Artificial
  probe
  misc_feature (1)..(25): SEQ ID NO: 6884; WAN024BMU_at; Start 105; Stop 129
ctccaaagatggactgattcaggct

SEQ ID NO: 86192 - DNA, 25 bp, Artificial
  probe
  misc_feature (1)..(25): SEQ ID NO: 6884; WAN024BMU_at; Start 358; Stop 382
attcaaggttggaagaaagcttacg

SEQ ID NO: 86193 - DNA, 25 bp, Artificial
  probe
  misc_feature (1)..(25): SEQ ID NO: 6884; WAN024BMU_at; Start 609; Stop 633
ccttgctcaatgtctaaataagcga

SEQ ID NO: 86194 - DNA, 25 bp, Artificial
  probe
  misc_feature (1)..(25): SEQ ID NO: 6884; WAN024BMU_at; Start 222; Stop 246
tagctttcaagctgatgacactaca

SEQ ID NO: 86195 - DNA, 25 bp, Artificial
  probe
  misc_feature (1)..(25): SEQ ID NO: 6884; WAN024BMU_at; Start 232; Stop 256
gctgatgacactacagaagatattt

SEQ ID NO: 86196 - DNA, 25 bp, Artificial
  probe
  misc_feature (1)..(25): SEQ ID NO: 6884; WAN024BMU_at; Start 182; Stop 206
caacgattaaagaaaaatgtgtatt

SEQ ID NO: 86197 - DNA, 25 bp, Artificial
  probe
  misc_feature (1)..(25): SEQ ID NO: 6884; WAN024BMU_at; Start 74; Stop 98
gacatgcgtcaaaaagagaaaaagc

SEQ ID NO: 86198 - DNA, 25 bp, Artificial
  probe
  misc_feature (1)..(25): SEQ ID NO: 6884; WAN024BMU_at; Start 2; Stop 26
tggctgaatcggcattaattaatct

SEQ ID NO: 86199 - DNA, 25 bp, Artificial
  probe
  misc_feature (1)..(25): SEQ ID NO: 6884; WAN024BMU_at; Start 640; Stop 664
aacatccctaaattcactaaatctg

SEQ ID NO: 86200 - DNA, 25 bp, Artificial
  probe
  misc_feature (1)..(25): SEQ ID NO: 6884; WAN024BMU_at; Start 372; Stop 396
gaaagcttacgaacattcctcagag

SEQ ID NO: 86201 - DNA, 25 bp, Artificial
  probe
  misc_feature (1)..(25): SEQ ID NO: 6884; WAN024BMU_at; Start 589; Stop 613
ggatcagatgtacctcaacaccttg

SEQ ID NO: 86202 - DNA, 25 bp, Artificial
  probe
  misc_feature (1)..(25): SEQ ID NO: 6884; WAN024BMU_at; Start 153; Stop 177
taactatgccttatctgattttgat

SEQ ID NO: 86203 - DNA, 25 bp, Artificial
  probe
  misc_feature (1)..(25): SEQ ID NO: 6884; WAN024BMU_at; Start 490; Stop 514
tatccagaattatataaacgcagtt

SEQ ID NO: 86204 - DNA, 25 bp, Artificial
  probe
  misc_feature (1)..(25): SEQ ID NO: 6884; WAN024BMU_at; Start 433; Stop 457
gaaactagtgaagaaactattgtga

SEQ ID NO: 86205 - DNA, 25 bp, Artificial
  probe
  misc_feature (1)..(25): SEQ ID NO: 6853; WAN024BMV_at; Start 572; Stop 596
taaaacataaagatggaattgtccc

SEQ ID NO: 86206 - DNA, 25 bp, Artificial
  probe
  misc_feature (1)..(25): SEQ ID NO: 6853; WAN024BMV_at; Start 378; Stop 402
taaggaacaagaagcaacaattaca

SEQ ID NO: 86207 - DNA, 25 bp, Artificial
  probe
  misc_feature (1)..(25): SEQ ID NO: 6853; WAN024BMV_at; Start 266; Stop 290
tatttcaagatacagatgatgttct

SEQ ID NO: 86208 - DNA, 25 bp, Artificial
  probe
  misc_feature (1)..(25): SEQ ID NO: 6853; WAN024BMV_at; Start 25; Stop 49
ggcagagtttacattaaagcatcaa

SEQ ID NO: 86209 - DNA, 25 bp, Artificial
  probe
  misc_feature (1)..(25): SEQ ID NO: 6853; WAN024BMV_at; Start 81; Stop 105
tcaagaagaaagaaataagtatgtt

SEQ ID NO: 86210 - DNA, 25 bp, Artificial
  probe
  misc_feature (1)..(25): SEQ ID NO: 6853; WAN024BMV_at; Start 587; Stop 611
gaattgtccctattttagaaaggca

SEQ ID NO: 86211 - DNA, 25 bp, Artificial
  probe
  misc_feature (1)..(25): SEQ ID NO: 6853; WAN024BMV_at; Start 195; Stop 219
caacatgtggtttactgctgagggt

SEQ ID NO: 86212 - DNA, 25 bp, Artificial
  probe
  misc_feature (1)..(25): SEQ ID NO: 6853; WAN024BMV_at; Start 64; Stop 88
gaggattttctgttaattcaagaag

SEQ ID NO: 86213 - DNA, 25 bp, Artificial
  probe
  misc_feature (1)..(25): SEQ ID NO: 6853; WAN024BMV_at; Start 283; Stop 307
gatgttcttataagacaaatgaagg

SEQ ID NO: 86214 - DNA, 25 bp, Artificial
  probe
  misc_feature (1)..(25): SEQ ID NO: 6853; WAN024BMV_at; Start 298; Stop 322
caaatgaaggaatatgtttgtagtc

SEQ ID NO: 86215 - DNA, 25 bp, Artificial
  probe
  misc_feature (1)..(25): SEQ ID NO: 6853; WAN024BMV_at; Start 446; Stop 470
taaaggacctaccttacacagcaga

SEQ ID NO: 86216 - DNA, 25 bp, Artificial
  probe
  misc_feature (1)..(25): SEQ ID NO: 6853; WAN024BMV_at; Start 113; Stop 137
caactgatattatagatagccaatc

SEQ ID NO: 86217 - DNA, 25 bp, Artificial
  probe
  misc_feature (1)..(25): SEQ ID NO: 6853; WAN024BMV_at; Start 240; Stop 264
tatagatgacttttttgattgtact

SEQ ID NO: 86218 - DNA, 25 bp, Artificial
  probe
  misc_feature (1)..(25): SEQ ID NO: 6853; WAN024BMV_at; Start 481; Stop 505
gtttatggatactatgaatgtgatg

SEQ ID NO: 86219 - DNA, 25 bp, Artificial
  probe
  misc_feature (1)..(25): SEQ ID NO: 6853; WAN024BMV_at; Start 361; Stop 385
gctagtcagaattttgttaaggaac

SEQ ID NO: 86220 - DNA, 25 bp, Artificial
  probe
  misc_feature (1)..(25): SEQ ID NO: 6853; WAN024BMV_at; Start 97; Stop 121
aagtatgtttattatccaactgata

SEQ ID NO: 86221 - DNA, 25 bp, Artificial
  probe
  misc_feature (1)..(25): SEQ ID NO: 6853; WAN024BMV_at; Start 225; Stop 249
gtgttttgagaataatatagatgac

SEQ ID NO: 86222 - DNA, 25 bp, Artificial
  probe
  misc_feature (1)..(25): SEQ ID NO: 6853; WAN024BMV_at; Start 13; Stop 37
tcagaagcacatggcagagtttaca

SEQ ID NO: 86223 - DNA, 25 bp, Artificial
  probe
  misc_feature (1)..(25): SEQ ID NO: 6853; WAN024BMV_at; Start 457; Stop 481
ccttacacagcagaaaacctaatag

SEQ ID NO: 86224 - DNA, 25 bp, Artificial
  probe
  misc_feature (1)..(25): SEQ ID NO: 6853; WAN024BMV_at; Start 315; Stop 339
ttgtagtcaagatattcaaatcaaa

SEQ ID NO: 86225 - DNA, 25 bp, Artificial
  probe
  misc_feature (1)..(25): SEQ ID NO: 6853; WAN024BMV_at; Start 336; Stop 360
caaatttgagtatgtagatgctgaa

SEQ ID NO: 86226 - DNA, 25 bp, Artificial
  probe
  misc_feature (1)..(25): SEQ ID NO: 6853; WAN024BMV_at; Start 520; Stop 544
caatttttgcttgattactatgatg

SEQ ID NO: 86227 - DNA, 25 bp, Artificial
  probe
  misc_feature (1)..(25): SEQ ID NO: 6853; WAN024BMV_at; Start 127; Stop 151
gatagccaatctaacatatcagata

SEQ ID NO: 86228 - DNA, 25 bp, Artificial
  probe
  misc_feature (1)..(25): SEQ ID NO: 6853; WAN024BMV_at; Start 429; Stop 453
tatagatgttaaaaccataaaggac

SEQ ID NO: 86229 - DNA, 25 bp, Artificial
  probe
  misc_feature (1)..(25): SEQ ID NO: 6853; WAN024BMV_at; Start 152; Stop 176
tagtctcctcaagaacaactcaaga

SEQ ID NO: 86230 - DNA, 25 bp, Artificial
  probe
  misc_feature (1)..(25): SEQ ID NO: 6853; WAN024BMV_at; Start 181; Stop 205
ggttattatatatgcaacatgtggt

SEQ ID NO: 86231 - DNA, 25 bp, Artificial
  probe
  misc_feature (1)..(25): SEQ ID NO: 6853; WAN024BMV_at; Start 141; Stop 165
catatcagatatagtctcctcaaga

SEQ ID NO: 86232 - DNA, 25 bp, Artificial
  probe
  misc_feature (1)..(25): SEQ ID NO: 6853; WAN024BMV_at; Start 207; Stop 231
tactgctgagggtagatggtgtttt

SEQ ID NO: 86233 - DNA, 25 bp, Artificial
  probe
  misc_feature (1)..(25): SEQ ID NO: 6853; WAN024BMV_at; Start 493; Stop 517
tatgaatgtgatgaaattgtttccg

SEQ ID NO: 86234 - DNA, 25 bp, Artificial
  probe
  misc_feature (1)..(25): SEQ ID NO: 6853; WAN024BMV_at; Start 3; Stop 27
ggcaaattcatcagaagcacatggc

SEQ ID NO: 86235 - DNA, 25 bp, Artificial
  probe
  misc_feature (1)..(25): SEQ ID NO: 6853; WAN024BMV_at; Start 159; Stop 183
ctcaagaacaactcaagaaaatggt

SEQ ID NO: 86236 - DNA, 25 bp, Artificial
  probe
  misc_feature (1)..(25): SEQ ID NO: 6853; WAN024BMV_at; Start 43; Stop 67
gcatcaaatcttaaaactattgagg

SEQ ID NO: 86237 - DNA, 25 bp, Artificial
  probe
  misc_feature (1)..(25): SEQ ID NO: 6853; WAN024BMV_at; Start 466; Stop 490
gcagaaaacctaatagtttatggat

SEQ ID NO: 86238 - DNA, 25 bp, Artificial
  probe
  misc_feature (1)..(25): SEQ ID NO: 6853; WAN024BMV_at; Start 346; Stop 370
tatgtagatgctgaagctagtcaga

SEQ ID NO: 86239 - DNA, 25 bp, Artificial
  probe
  misc_feature (1)..(25): SEQ ID NO: 7403; WAN024BMW_at; Start 72; Stop 96
taggaaagtagttcatgtaccagct

SEQ ID NO: 86240 - DNA, 25 bp, Artificial
  probe
  misc_feature (1)..(25): SEQ ID NO: 7403; WAN024BMW_at; Start 141; Stop 165
caatgaacttcatttatctaaaaag

SEQ ID NO: 86241 - DNA, 25 bp, Artificial
  probe
  misc_feature (1)..(25): SEQ ID NO: 7403; WAN024BMW_at; Start 75; Stop 99
gaaagtagttcatgtaccagcttat

SEQ ID NO: 86242 - DNA, 25 bp, Artificial
  probe
  misc_feature (1)..(25): SEQ ID NO: 7403; WAN024BMW_at; Start 88; Stop 112
gtaccagcttatgcttataaagaag

SEQ ID NO: 86243 - DNA, 25 bp, Artificial
  probe
  misc_feature (1)..(25): SEQ ID NO: 7403; WAN024BMW_at; Start 91; Stop 115
ccagcttatgcttataaagaagatg

SEQ ID NO: 86244 - DNA, 25 bp, Artificial
  probe
  misc_feature (1)..(25): SEQ ID NO: 7403; WAN024BMW_at; Start 171; Stop 195
tgaatttctagtaaatcaaggttta

SEQ ID NO: 86245 - DNA, 25 bp, Artificial
  probe
  misc_feature (1)..(25): SEQ ID NO: 7403; WAN024BMW_at; Start 78; Stop 102
agtagttcatgtaccagcttatgct

SEQ ID NO: 86246 - DNA, 25 bp, Artificial
  probe
  misc_feature (1)..(25): SEQ ID NO: 7403; WAN024BMW_at; Start 144; Stop 168
tgaacttcatttatctaaaaagatg

SEQ ID NO: 86247 - DNA, 25 bp, Artificial
  probe
  misc_feature (1)..(25): SEQ ID NO: 7403; WAN024BMW_at; Start 112; Stop 136
gatgaaaatgaaaagatttatctcc

SEQ ID NO: 86248 - DNA, 25 bp, Artificial
  probe
  misc_feature (1)..(25): SEQ ID NO: 7403; WAN024BMW_at; Start 126; Stop 150
gatttatctccataacaatgaactt

SEQ ID NO: 86249 - DNA, 25 bp, Artificial
  probe
  misc_feature (1)..(25): SEQ ID NO: 7403; WAN024BMW_at; Start 71; Stop 95
gtaggaaagtagttcatgtaccagc

SEQ ID NO: 86250 - DNA, 25 bp, Artificial
  probe
  misc_feature (1)..(25): SEQ ID NO: 7403; WAN024BMW_at; Start 85; Stop 109
catgtaccagcttatgcttataaag

SEQ ID NO: 86251 - DNA, 25 bp, Artificial
  probe
  misc_feature (1)..(25): SEQ ID NO: 7403; WAN024BMW_at; Start 115; Stop 139
gaaaatgaaaagatttatctccata

SEQ ID NO: 86252 - DNA, 25 bp, Artificial
  probe
  misc_feature (1)..(25): SEQ ID NO: 7403; WAN024BMW_at; Start 89; Stop 113
taccagcttatgcttataaagaaga

SEQ ID NO: 86253 - DNA, 25 bp, Artificial
  probe
  misc_feature (1)..(25): SEQ ID NO: 7403; WAN024BMW_at; Start 167; Stop 191
tgtttgaatttctagtaaatcaagg

SEQ ID NO: 86254 - DNA, 25 bp, Artificial
  probe
  misc_feature (1)..(25): SEQ ID NO: 7403; WAN024BMW_at; Start 124; Stop 148
aagatttatctccataacaatgaac

SEQ ID NO: 86255 - DNA, 25 bp, Artificial
  probe
  misc_feature (1)..(25): SEQ ID NO: 7403; WAN024BMW_at; Start 130; Stop 154
tatctccataacaatgaacttcatt

SEQ ID NO: 86256 - DNA, 25 bp, Artificial
  probe
  misc_feature (1)..(25): SEQ ID NO: 7403; WAN024BMW_at; Start 1; Stop 25
ttgaaagctattgtaaaaaatccaa

SEQ ID NO: 86257 - DNA, 25 bp, Artificial
  probe
  misc_feature (1)..(25): SEQ ID NO: 7403; WAN024BMW_at; Start 121; Stop 145
gaaaagatttatctccataacaatg

SEQ ID NO: 86258 - DNA, 25 bp, Artificial
  probe
  misc_feature (1)..(25): SEQ ID NO: 7403; WAN024BMW_at; Start 82; Stop 106
gttcatgtaccagcttatgcttata

SEQ ID NO: 86259 - DNA, 25 bp, Artificial
  probe
  misc_feature (1)..(25): SEQ ID NO: 7403; WAN024BMW_at; Start 148; Stop 172
cttcatttatctaaaaagatgtttg

SEQ ID NO: 86260 - DNA, 25 bp, Artificial
  probe
  misc_feature (1)..(25): SEQ ID NO: 7403; WAN024BMW_at; Start 196; Stop 220
gatttagtagaatgtcttccagaag

SEQ ID NO: 86261 - DNA, 25 bp, Artificial
  probe
  misc_feature (1)..(25): SEQ ID NO: 7403; WAN024BMW_at; Start 37; Stop 61
gaacttttgagattatattttgttc

SEQ ID NO: 86262 - DNA, 25 bp, Artificial
  probe
  misc_feature (1)..(25): SEQ ID NO: 7403; WAN024BMW_at; Start 194; Stop 218
tagatttagtagaatgtcttccaga

SEQ ID NO: 86263 - DNA, 25 bp, Artificial
  probe
  misc_feature (1)..(25): SEQ ID NO: 7403; WAN024BMW_at; Start 77; Stop 101
aagtagttcatgtaccagcttatgc

SEQ ID NO: 86264 - DNA, 25 bp, Artificial
  probe
  misc_feature (1)..(25): SEQ ID NO: 7403; WAN024BMW_at; Start 29; Stop 53
gactatttgaacttttgagattata

SEQ ID NO: 86265 - DNA, 25 bp, Artificial
  probe
  misc_feature (1)..(25): SEQ ID NO: 7403; WAN024BMW_at; Start 198; Stop 222
tttagtagaatgtcttccagaagag

SEQ ID NO: 86266 - DNA, 25 bp, Artificial
  probe
  misc_feature (1)..(25): SEQ ID NO: 7403; WAN024BMW_at; Start 92; Stop 116
cagcttatgcttataaagaagatga

SEQ ID NO: 86267 - DNA, 25 bp, Artificial
  probe
  misc_feature (1)..(25): SEQ ID NO: 7403; WAN024BMW_at; Start 187; Stop 211
caaggtttagatttagtagaatgtc

SEQ ID NO: 86268 - DNA, 25 bp, Artificial
  probe
  misc_feature (1)..(25): SEQ ID NO: 7403; WAN024BMW_at; Start 80; Stop 104
tagttcatgtaccagcttatgctta

SEQ ID NO: 86269 - DNA, 25 bp, Artificial
  probe
  misc_feature (1)..(25): SEQ ID NO: 7403; WAN024BMW_at; Start 74; Stop 98
ggaaagtagttcatgtaccagctta

SEQ ID NO: 86270 - DNA, 25 bp, Artificial
  probe
  misc_feature (1)..(25): SEQ ID NO: 7403; WAN024BMW_at; Start 105; Stop 129
taaagaagatgaaaatgaaaagatt

SEQ ID NO: 86271 - DNA, 25 bp, Artificial
  probe
  misc_feature (1)..(25): SEQ ID NO: 7403; WAN024BMW_at; Start 128; Stop 152
tttatctccataacaatgaacttca

SEQ ID NO: 86272 - DNA, 25 bp, Artificial
  probe
  misc_feature (1)..(25): SEQ ID NO: 7403; WAN024BMW_at; Start 23; Stop 47
caaaaagactatttgaacttttgag

SEQ ID NO: 86273 - DNA, 25 bp, Artificial
  probe
  misc_feature (1)..(25): SEQ ID NO: 6517; WAN024BMX_at; Start 26; Stop 50
taactgctcacaaaaatcaaacaag

SEQ ID NO: 86274 - DNA, 25 bp, Artificial
  probe
  misc_feature (1)..(25): SEQ ID NO: 6517; WAN024BMX_at; Start 392; Stop 416
taataattggtggtttactatggga

SEQ ID NO: 86275 - DNA, 25 bp, Artificial
  probe
  misc_feature (1)..(25): SEQ ID NO: 6517; WAN024BMX_at; Start 284; Stop 308
aattggcaaaatttcgagaagcagc

SEQ ID NO: 86276 - DNA, 25 bp, Artificial
  probe
  misc_feature (1)..(25): SEQ ID NO: 6517; WAN024BMX_at; Start 341; Stop 365
taactttttctgataaattagcaaa

SEQ ID NO: 86277 - DNA, 25 bp, Artificial
  probe
  misc_feature (1)..(25): SEQ ID NO: 6517; WAN024BMX_at; Start 259; Stop 283
gattggcaaactcgtaaagagcttc

SEQ ID NO: 86278 - DNA, 25 bp, Artificial
  probe
  misc_feature (1)..(25): SEQ ID NO: 6517; WAN024BMX_at; Start 153; Stop 177
tgatactgttgaagataccgatgtc

SEQ ID NO: 86279 - DNA, 25 bp, Artificial
  probe
  misc_feature (1)..(25): SEQ ID NO: 6517; WAN024BMX_at; Start 428; Stop 452
caaaggatccgaaaaaacaacgatg

SEQ ID NO: 86280 - DNA, 25 bp, Artificial
  probe
  misc_feature (1)..(25): SEQ ID NO: 6517; WAN024BMX_at; Start 134; Stop 158
tagctaccggatggttacatgatac

SEQ ID NO: 86281 - DNA, 25 bp, Artificial
  probe
  misc_feature (1)..(25): SEQ ID NO: 6517; WAN024BMX_at; Start 361; Stop 385
gcaaatttaatggaactgtatcaag

SEQ ID NO: 86282 - DNA, 25 bp, Artificial
  probe
  misc_feature (1)..(25): SEQ ID NO: 6517; WAN024BMX_at; Start 308; Stop 332
cagaagatgagtcgctaagaaaagt

SEQ ID NO: 86283 - DNA, 25 bp, Artificial
  probe
  misc_feature (1)..(25): SEQ ID NO: 6517; WAN024BMX_at; Start 227; Stop 251
tgtctttggaatctgaagataaatc

SEQ ID NO: 86284 - DNA, 25 bp, Artificial
  probe
  misc_feature (1)..(25): SEQ ID NO: 6517; WAN024BMX_at; Start 12; Stop 36
caaagaattcgcattaactgctcac

SEQ ID NO: 86285 - DNA, 25 bp, Artificial
  probe
  misc_feature (1)..(25): SEQ ID NO: 6517; WAN024BMX_at; Start 158; Stop 182
ctgttgaagataccgatgtcagtct

SEQ ID NO: 86286 - DNA, 25 bp, Artificial
  probe
  misc_feature (1)..(25): SEQ ID NO: 6517; WAN024BMX_at; Start 55; Stop 79
gggaaaatcacaccttattcatttc

SEQ ID NO: 86287 - DNA, 25 bp, Artificial
  probe
  misc_feature (1)..(25): SEQ ID NO: 6517; WAN024BMX_at; Start 372; Stop 396
ggaactgtatcaagattacttaata

SEQ ID NO: 86288 - DNA, 25 bp, Artificial
  probe
  misc_feature (1)..(25): SEQ ID NO: 6517; WAN024BMX_at; Start 271; Stop 295
cgtaaagagcttcaattggcaaaat

SEQ ID NO: 86289 - DNA, 25 bp, Artificial
  probe
  misc_feature (1)..(25): SEQ ID NO: 6517; WAN024BMX_at; Start 166; Stop 190
gataccgatgtcagtcttgaagata

SEQ ID NO: 86290 - DNA, 25 bp, Artificial
  probe
  misc_feature (1)..(25): SEQ ID NO: 6517; WAN024BMX_at; Start 101; Stop 125
tattagaaaccctaacagaagatcc

SEQ ID NO: 86291 - DNA, 25 bp, Artificial
  probe
  misc_feature (1)..(25): SEQ ID NO: 6517; WAN024BMX_at; Start 301; Stop 325
gaagcagcagaagatgagtcgctaa

SEQ ID NO: 86292 - DNA, 25 bp, Artificial
  probe
  misc_feature (1)..(25): SEQ ID NO: 6517; WAN024BMX_at; Start 296; Stop 320
ttcgagaagcagcagaagatgagtc

SEQ ID NO: 86293 - DNA, 25 bp, Artificial
  probe
  misc_feature (1)..(25): SEQ ID NO: 6517; WAN024BMX_at; Start 220; Stop 244
tcatatatgtctttggaatctgaag

SEQ ID NO: 86294 - DNA, 25 bp, Artificial
  probe
  misc_feature (1)..(25): SEQ ID NO: 6517; WAN024BMX_at; Start 127; Stop 151
catattatagctaccggatggttac

SEQ ID NO: 86295 - DNA, 25 bp, Artificial
  probe
  misc_feature (1)..(25): SEQ ID NO: 6517; WAN024BMX_at; Start 140; Stop 164
ccggatggttacatgatactgttga

SEQ ID NO: 86296 - DNA, 25 bp, Artificial
  probe
  misc_feature (1)..(25): SEQ ID NO: 6517; WAN024BMX_at; Start 118; Stop 142
gaagatcctcatattatagctaccg

SEQ ID NO: 86297 - DNA, 25 bp, Artificial
  probe
  misc_feature (1)..(25): SEQ ID NO: 6517; WAN024BMX_at; Start 313; Stop 337
gatgagtcgctaagaaaagttttac

SEQ ID NO: 86298 - DNA, 25 bp, Artificial
  probe
  misc_feature (1)..(25): SEQ ID NO: 6517; WAN024BMX_at; Start 89; Stop 113
tggtcaataatatattagaaaccct

SEQ ID NO: 86299 - DNA, 25 bp, Artificial
  probe
  misc_feature (1)..(25): SEQ ID NO: 6517; WAN024BMX_at; Start 289; Stop 313
gcaaaatttcgagaagcagcagaag

SEQ ID NO: 86300 - DNA, 25 bp, Artificial
  probe
  misc_feature (1)..(25): SEQ ID NO: 6517; WAN024BMX_at; Start 256; Stop 280
aaagattggcaaactcgtaaagagc

SEQ ID NO: 86301 - DNA, 25 bp, Artificial
  probe
  misc_feature (1)..(25): SEQ ID NO: 6517; WAN024BMX_at; Start 175; Stop 199
gtcagtcttgaagatattaaacaag

SEQ ID NO: 86302 - DNA, 25 bp, Artificial
  probe
  misc_feature (1)..(25): SEQ ID NO: 6517; WAN024BMX_at; Start 241; Stop 265
gaagataaatcaattaaagattggc

SEQ ID NO: 86303 - DNA, 25 bp, Artificial
  probe
  misc_feature (1)..(25): SEQ ID NO: 6517; WAN024BMX_at; Start 106; Stop 130
gaaaccctaacagaagatcctcata

SEQ ID NO: 86304 - DNA, 25 bp, Artificial
  probe
  misc_feature (1)..(25): SEQ ID NO: 6517; WAN024BMX_at; Start 42; Stop 66
tcaaacaagaaaagggaaaatcaca

SEQ ID NO: 86305 - DNA, 25 bp, Artificial
  probe
  misc_feature (1)..(25): SEQ ID NO: 6517; WAN024BMX_at; Start 70; Stop 94
tattcatttcacttatttttggtca

SEQ ID NO: 86306 - DNA, 25 bp, Artificial
  probe
  misc_feature (1)..(25): SEQ ID NO: 6517; WAN024BMX_at; Start 2; Stop 26
tgacaaatgccaaagaattcgcatt

SEQ ID NO: 86307 - DNA, 25 bp, Artificial
  probe
  misc_feature (1)..(25): SEQ ID NO: 6466; WAN024BMY_at; Start 126; Stop 150
taaatttcacaaaaatgcttgggaa

SEQ ID NO: 86308 - DNA, 25 bp, Artificial
  probe
  misc_feature (1)..(25): SEQ ID NO: 6466; WAN024BMY_at; Start 393; Stop 417
cgcagatatctggtatgcaagcaat

SEQ ID NO: 86309 - DNA, 25 bp, Artificial
  probe
  misc_feature (1)..(25): SEQ ID NO: 6466; WAN024BMY_at; Start 409; Stop 433
gcaagcaattatcttcaacttgata

SEQ ID NO: 86310 - DNA, 25 bp, Artificial
  probe
  misc_feature (1)..(25): SEQ ID NO: 6466; WAN024BMY_at; Start 576; Stop 600
tccgacagcaataaatcccaataag

SEQ ID NO: 86311 - DNA, 25 bp, Artificial
  probe
  misc_feature (1)..(25): SEQ ID NO: 6466; WAN024BMY_at; Start 14; Stop 38
tagcagctatatttgatatcgacgg

SEQ ID NO: 86312 - DNA, 25 bp, Artificial
  probe
  misc_feature (1)..(25): SEQ ID NO: 6466; WAN024BMY_at; Start 435; Stop 459
taagtatactggagaagtgattcct

SEQ ID NO: 86313 - DNA, 25 bp, Artificial
  probe
  misc_feature (1)..(25): SEQ ID NO: 6466; WAN024BMY_at; Start 349; Stop 373
gggtctcctgatttcttagtctcaa

SEQ ID NO: 86314 - DNA, 25 bp, Artificial
  probe
  misc_feature (1)..(25): SEQ ID NO: 6466; WAN024BMY_at; Start 186; Stop 210
tgctgcaacactttatacaaaatat

SEQ ID NO: 86315 - DNA, 25 bp, Artificial
  probe
  misc_feature (1)..(25): SEQ ID NO: 6466; WAN024BMY_at; Start 28; Stop 52
gatatcgacggaacaatttttagag

SEQ ID NO: 86316 - DNA, 25 bp, Artificial
  probe
  misc_feature (1)..(25): SEQ ID NO: 6466; WAN024BMY_at; Start 208; Stop 232
tatattgcggataaagacatacttg

SEQ ID NO: 86317 - DNA, 25 bp, Artificial
  probe
  misc_feature (1)..(25): SEQ ID NO: 6466; WAN024BMY_at; Start 362; Stop 386
tcttagtctcaaaaatggccgaaaa

SEQ ID NO: 86318 - DNA, 25 bp, Artificial
  probe
  misc_feature (1)..(25): SEQ ID NO: 6466; WAN024BMY_at; Start 535; Stop 559
gatacaactggtgattttacaatgc

SEQ ID NO: 86319 - DNA, 25 bp, Artificial
  probe
  misc_feature (1)..(25): SEQ ID NO: 6466; WAN024BMY_at; Start 157; Stop 181
gaactagactatgatgactatctct

SEQ ID NO: 86320 - DNA, 25 bp, Artificial
  probe
  misc_feature (1)..(25): SEQ ID NO: 6466; WAN024BMY_at; Start 608; Stop 632
tggacaaaattacaatggagaaact

SEQ ID NO: 86321 - DNA, 25 bp, Artificial
  probe
  misc_feature (1)..(25): SEQ ID NO: 6466; WAN024BMY_at; Start 645; Stop 669
cattattgagagaaaagatgtgatt

SEQ ID NO: 86322 - DNA, 25 bp, Artificial
  probe
  misc_feature (1)..(25): SEQ ID NO: 6466; WAN024BMY_at; Start 424; Stop 448
caacttgatagtaagtatactggag

SEQ ID NO: 86323 - DNA, 25 bp, Artificial
  probe
  misc_feature (1)..(25): SEQ ID NO: 6466; WAN024BMY_at; Start 523; Stop 547
tacgcttatggagatacaactggtg

SEQ ID NO: 86324 - DNA, 25 bp, Artificial
  probe
  misc_feature (1)..(25): SEQ ID NO: 6466; WAN024BMY_at; Start 48; Stop 72
tagagattccttacttttaaagcat

SEQ ID NO: 86325 - DNA, 25 bp, Artificial
  probe
  misc_feature (1)..(25): SEQ ID NO: 6466; WAN024BMY_at; Start 448; Stop 472
gaagtgattcctatgtgggattcaa

SEQ ID NO: 86326 - DNA, 25 bp, Artificial
  probe
  misc_feature (1)..(25): SEQ ID NO: 6466; WAN024BMY_at; Start 172; Stop 196
gactatctctatattgctgcaacac

SEQ ID NO: 86327 - DNA, 25 bp, Artificial
  probe
  misc_feature (1)..(25): SEQ ID NO: 6466; WAN024BMY_at; Start 82; Stop 106
tgtgtttcctatgatgtatttccaa

SEQ ID NO: 86328 - DNA, 25 bp, Artificial
  probe
  misc_feature (1)..(25): SEQ ID NO: 6466; WAN024BMY_at; Start 289; Stop 313
tacactcgtgatcgaatcaaatggc

SEQ ID NO: 86329 - DNA, 25 bp, Artificial
  probe
  misc_feature (1)..(25): SEQ ID NO: 6466; WAN024BMY_at; Start 97; Stop 121
gtatttccaaatagtgtcaattctg

SEQ ID NO: 86330 - DNA, 25 bp, Artificial
  probe
  misc_feature (1)..(25): SEQ ID NO: 6466; WAN024BMY_at; Start 508; Stop 532
gatttcgaaaaatcctacgcttatg

SEQ ID NO: 86331 - DNA, 25 bp, Artificial
  probe
  misc_feature (1)..(25): SEQ ID NO: 6466; WAN024BMY_at; Start 302; Stop 326
gaatcaaatggcataaggaacaggg

SEQ ID NO: 86332 - DNA, 25 bp, Artificial
  probe
  misc_feature (1)..(25): SEQ ID NO: 6466; WAN024BMY_at; Start 668; Stop 692
tttataaactagatgaggtcacgca

SEQ ID NO: 86333 - DNA, 25 bp, Artificial
  probe
  misc_feature (1)..(25): SEQ ID NO: 6466; WAN024BMY_at; Start 274; Stop 298
aaaaaactttatcgatacactcgtg

SEQ ID NO: 86334 - DNA, 25 bp, Artificial
  probe
  misc_feature (1)..(25): SEQ ID NO: 6466; WAN024BMY_at; Start 378; Stop 402
ggccgaaaaattgggcgcagatatc

SEQ ID NO: 86335 - DNA, 25 bp, Artificial
  probe
  misc_feature (1)..(25): SEQ ID NO: 6466; WAN024BMY_at; Start 562; Stop 586
caatctgtaggatttccgacagcaa

SEQ ID NO: 86336 - DNA, 25 bp, Artificial
  probe
  misc_feature (1)..(25): SEQ ID NO: 6466; WAN024BMY_at; Start 65; Stop 89
taaagcatatggaaaagtgtgtttc

SEQ ID NO: 86337 - DNA, 25 bp, Artificial
  probe
  misc_feature (1)..(25): SEQ ID NO: 6466; WAN024BMY_at; Start 142; Stop 166
gcttgggaaaatagagaactagact

SEQ ID NO: 86338 - DNA, 25 bp, Artificial
  probe
  misc_feature (1)..(25): SEQ ID NO: 6466; WAN024BMY_at; Start 547; Stop 571
gattttacaatgcttcaatctgtag

SEQ ID NO: 86339 - DNA, 25 bp, Artificial
  probe
  misc_feature (1)..(25): SEQ ID NO: 6466; WAN024BMY_at; Start 463; Stop 487
tgggattcaacttcaaaattacaag

SEQ ID NO: 86340 - DNA, 25 bp, Artificial
  probe
  misc_feature (1)..(25): SEQ ID NO: 6466; WAN024BMY_at; Start 225; Stop 249
catacttgatattgattttgttgcc

SEQ ID NO: 86341 - DNA, 25 bp, Artificial
  probe
  misc_feature (1)..(25): SEQ ID NO: 6599; WAN024BMZ_at; Start 52; Stop 76
tactatccaagagaagatcttgacc

SEQ ID NO: 86342 - DNA, 25 bp, Artificial
  probe
  misc_feature (1)..(25): SEQ ID NO: 6599; WAN024BMZ_at; Start 86; Stop 110
gtatagagataggaataagggattc

SEQ ID NO: 86343 - DNA, 25 bp, Artificial
  probe
  misc_feature (1)..(25): SEQ ID NO: 6599; WAN024BMZ_at; Start 15; Stop 39
ggaatttattagagctgcgaatcaa

SEQ ID NO: 86344 - DNA, 25 bp, Artificial
  probe
  misc_feature (1)..(25): SEQ ID NO: 6599; WAN024BMZ_at; Start 104; Stop 128
gggattctgaaaattattctcgata

SEQ ID NO: 86345 - DNA, 25 bp, Artificial
  probe
  misc_feature (1)..(25): SEQ ID NO: 6599; WAN024BMZ_at; Start 24; Stop 48
tagagctgcgaatcaatttatagaa

SEQ ID NO: 86346 - DNA, 25 bp, Artificial
  probe
  misc_feature (1)..(25): SEQ ID NO: 6599; WAN024BMZ_at; Start 12; Stop 36
catggaatttattagagctgcgaat

SEQ ID NO: 86347 - DNA, 25 bp, Artificial
  probe
  misc_feature (1)..(25): SEQ ID NO: 6599; WAN024BMZ_at; Start 231; Stop 255
gattattaacttagagaatagttcc

SEQ ID NO: 86348 - DNA, 25 bp, Artificial
  probe
  misc_feature (1)..(25): SEQ ID NO: 6599; WAN024BMZ_at; Start 44; Stop 68
tagaaaattactatccaagagaaga

SEQ ID NO: 86349 - DNA, 25 bp, Artificial
  probe
  misc_feature (1)..(25): SEQ ID NO: 6599; WAN024BMZ_at; Start 191; Stop 215
tagattattatgtagtggatgattc

SEQ ID NO: 86350 - DNA, 25 bp, Artificial
  probe
  misc_feature (1)..(25): SEQ ID NO: 6599; WAN024BMZ_at; Start 70; Stop 94
cttgaccgtattgaaagtatagaga

SEQ ID NO: 86351 - DNA, 25 bp, Artificial
  probe
  misc_feature (1)..(25): SEQ ID NO: 6599; WAN024BMZ_at; Start 28; Stop 52
gctgcgaatcaatttatagaaaatt

SEQ ID NO: 86352 - DNA, 25 bp, Artificial
  probe
  misc_feature (1)..(25): SEQ ID NO: 6599; WAN024BMZ_at; Start 26; Stop 50
gagctgcgaatcaatttatagaaaa

SEQ ID NO: 86353 - DNA, 25 bp, Artificial
  probe
  misc_feature (1)..(25): SEQ ID NO: 6599; WAN024BMZ_at; Start 207; Stop 231
ggatgattctgttcattttaaacag

SEQ ID NO: 86354 - DNA, 25 bp, Artificial
  probe
  misc_feature (1)..(25): SEQ ID NO: 6599; WAN024BMZ_at; Start 121; Stop 145
tctcgatattttttagaaattcaaa

SEQ ID NO: 86355 - DNA, 25 bp, Artificial
  probe
  misc_feature (1)..(25): SEQ ID NO: 6599; WAN024BMZ_at; Start 58; Stop 82
ccaagagaagatcttgaccgtattg

SEQ ID NO: 86356 - DNA, 25 bp, Artificial
  probe
  misc_feature (1)..(25): SEQ ID NO: 6599; WAN024BMZ_at; Start 237; Stop 261
taacttagagaatagttcctatgtg

SEQ ID NO: 86357 - DNA, 25 bp, Artificial
  probe
  misc_feature (1)..(25): SEQ ID NO: 6599; WAN024BMZ_at; Start 101; Stop 125
taagggattctgaaaattattctcg

SEQ ID NO: 86358 - DNA, 25 bp, Artificial
  probe
  misc_feature (1)..(25): SEQ ID NO: 6599; WAN024BMZ_at; Start 148; Stop 172
caatctgaagagtttgagtgtgact

SEQ ID NO: 86359 - DNA, 25 bp, Artificial
  probe
  misc_feature (1)..(25): SEQ ID NO: 6599; WAN024BMZ_at; Start 55; Stop 79
tatccaagagaagatcttgaccgta

SEQ ID NO: 86360 - DNA, 25 bp, Artificial
  probe
  misc_feature (1)..(25): SEQ ID NO: 6599; WAN024BMZ_at; Start 9; Stop 33
acgcatggaatttattagagctgcg

SEQ ID NO: 86361 - DNA, 25 bp, Artificial
  probe
  misc_feature (1)..(25): SEQ ID NO: 6599; WAN024BMZ_at; Start 169; Stop 193
gacttctttaattttgataacatag

SEQ ID NO: 86362 - DNA, 25 bp, Artificial
  probe
  misc_feature (1)..(25): SEQ ID NO: 6599; WAN024BMZ_at; Start 89; Stop 113
tagagataggaataagggattctga

SEQ ID NO: 86363 - DNA, 25 bp, Artificial
  probe
  misc_feature (1)..(25): SEQ ID NO: 6599; WAN024BMZ_at; Start 75; Stop 99
ccgtattgaaagtatagagatagga

SEQ ID NO: 86364 - DNA, 25 bp, Artificial
  probe
  misc_feature (1)..(25): SEQ ID NO: 6599; WAN024BMZ_at; Start 62; Stop 86
gagaagatcttgaccgtattgaaag

SEQ ID NO: 86365 - DNA, 25 bp, Artificial
  probe
  misc_feature (1)..(25): SEQ ID NO: 6599; WAN024BMZ_at; Start 244; Stop 268
gagaatagttcctatgtgttttgga

SEQ ID NO: 86366 - DNA, 25 bp, Artificial
  probe
  misc_feature (1)..(25): SEQ ID NO: 6599; WAN024BMZ_at; Start 151; Stop 175
tctgaagagtttgagtgtgacttct

SEQ ID NO: 86367 - DNA, 25 bp, Artificial
  probe
  misc_feature (1)..(25): SEQ ID NO: 6599; WAN024BMZ_at; Start 163; Stop 187
gagtgtgacttctttaattttgata

SEQ ID NO: 86368 - DNA, 25 bp, Artificial
  probe
  misc_feature (1)..(25): SEQ ID NO: 6599; WAN024BMZ_at; Start 142; Stop 166
caaaaacaatctgaagagtttgagt

SEQ ID NO: 86369 - DNA, 25 bp, Artificial
  probe
  misc_feature (1)..(25): SEQ ID NO: 6599; WAN024BMZ_at; Start 251; Stop 275
gttcctatgtgttttggaaagatta

SEQ ID NO: 86370 - DNA, 25 bp, Artificial
  probe
  misc_feature (1)..(25): SEQ ID NO: 6599; WAN024BMZ_at; Start 67; Stop 91
gatcttgaccgtattgaaagtatag

SEQ ID NO: 86371 - DNA, 25 bp, Artificial
  probe
  misc_feature (1)..(25): SEQ ID NO: 6599; WAN024BMZ_at; Start 154; Stop 178
gaagagtttgagtgtgacttcttta

SEQ ID NO: 86372 - DNA, 25 bp, Artificial
  probe
  misc_feature (1)..(25): SEQ ID NO: 6599; WAN024BMZ_at; Start 225; Stop 249
taaacagattattaacttagagaat

SEQ ID NO: 86373 - DNA, 25 bp, Artificial
  probe
  misc_feature (1)..(25): SEQ ID NO: 6599; WAN024BMZ_at; Start 196; Stop 220
tattatgtagtggatgattctgttc

SEQ ID NO: 86374 - DNA, 25 bp, Artificial
  probe
  misc_feature (1)..(25): SEQ ID NO: 6599; WAN024BMZ_at; Start 136; Stop 160
gaaattcaaaaacaatctgaagagt

SEQ ID NO: 86375 - DNA, 25 bp, Artificial
  probe
  misc_feature (1)..(25): SEQ ID NO: 7267; WAN024BN2_at; Start 1173; Stop 1197
taattcattagtatcgcttcttgga

SEQ ID NO: 86376 - DNA, 25 bp, Artificial
  probe
  misc_feature (1)..(25): SEQ ID NO: 7267; WAN024BN2_at; Start 1090; Stop 1114
cccgaagatagcgatgatatagaat

SEQ ID NO: 86377 - DNA, 25 bp, Artificial
  probe
  misc_feature (1)..(25): SEQ ID NO: 7267; WAN024BN2_at; Start 570; Stop 594
tatttttattgacgatctggatcga

SEQ ID NO: 86378 - DNA, 25 bp, Artificial
  probe
  misc_feature (1)..(25): SEQ ID NO: 7267; WAN024BN2_at; Start 1377; Stop 1401
taagaaaaaacagaatcatgctcca

SEQ ID NO: 86379 - DNA, 25 bp, Artificial
  probe
  misc_feature (1)..(25): SEQ ID NO: 7267; WAN024BN2_at; Start 1498; Stop 1522
gaaacacgagaaaaacgagaagctc

SEQ ID NO: 86380 - DNA, 25 bp, Artificial
  probe
  misc_feature (1)..(25): SEQ ID NO: 7267; WAN024BN2_at; Start 464; Stop 488
taatcataggttttggcgagagaac

SEQ ID NO: 86381 - DNA, 25 bp, Artificial
  probe
  misc_feature (1)..(25): SEQ ID NO: 7267; WAN024BN2_at; Start 264; Stop 288
gcaatactcacagtttgatatggga

SEQ ID NO: 86382 - DNA, 25 bp, Artificial
  probe
  misc_feature (1)..(25): SEQ ID NO: 7267; WAN024BN2_at; Start 769; Stop 793
caagttccatttacagtaccagtag

SEQ ID NO: 86383 - DNA, 25 bp, Artificial
  probe
  misc_feature (1)..(25): SEQ ID NO: 7267; WAN024BN2_at; Start 1043; Stop 1067
gattcgaggaagcatacaactattt

SEQ ID NO: 86384 - DNA, 25 bp, Artificial
  probe
  misc_feature (1)..(25): SEQ ID NO: 7267; WAN024BN2_at; Start 1479; Stop 1503
gccagagttattcggtaaagaaaca

SEQ ID NO: 86385 - DNA, 25 bp, Artificial
  probe
  misc_feature (1)..(25): SEQ ID NO: 7267; WAN024BN2_at; Start 974; Stop 998
tcaataatggagacaaagtagatca

SEQ ID NO: 86386 - DNA, 25 bp, Artificial
  probe
  misc_feature (1)..(25): SEQ ID NO: 7267; WAN024BN2_at; Start 1351; Stop 1375
ggaaatacagatacaattacagcag

SEQ ID NO: 86387 - DNA, 25 bp, Artificial
  probe
  misc_feature (1)..(25): SEQ ID NO: 7267; WAN024BN2_at; Start 604; Stop 628
gaaaaggccatagaactcttagagg

SEQ ID NO: 86388 - DNA, 25 bp, Artificial
  probe
  misc_feature (1)..(25): SEQ ID NO: 7267; WAN024BN2_at; Start 373; Stop 397
gcaaaaggtgcgctatctaaaggct

SEQ ID NO: 86389 - DNA, 25 bp, Artificial
  probe
  misc_feature (1)..(25): SEQ ID NO: 7267; WAN024BN2_at; Start 1722; Stop 1746
taatattttagctagtgacttgcga

SEQ ID NO: 86390 - DNA, 25 bp, Artificial
  probe
  misc_feature (1)..(25): SEQ ID NO: 7267; WAN024BN2_at; Start 652; Stop 676
gaacattgcgtctttgtattggcta

SEQ ID NO: 86391 - DNA, 25 bp, Artificial
  probe
  misc_feature (1)..(25): SEQ ID NO: 7267; WAN024BN2_at; Start 55; Stop 79
tctgatagtcctacccatgatgaca

SEQ ID NO: 86392 - DNA, 25 bp, Artificial
  probe
  misc_feature (1)..(25): SEQ ID NO: 7267; WAN024BN2_at; Start 27; Stop 51
gaaaggattgcttatgagtggctca

SEQ ID NO: 86393 - DNA, 25 bp, Artificial
  probe
  misc_feature (1)..(25): SEQ ID NO: 7267; WAN024BN2_at; Start 1279; Stop 1303
gaacaaggattaaccatggaacaat

SEQ ID NO: 86394 - DNA, 25 bp, Artificial
  probe
  misc_feature (1)..(25): SEQ ID NO: 7267; WAN024BN2_at; Start 1738; Stop 1762
gacttgcgaagtgaagaactttatc

SEQ ID NO: 86395 - DNA, 25 bp, Artificial
  probe
  misc_feature (1)..(25): SEQ ID NO: 7267; WAN024BN2_at; Start 953; Stop 977
cagtcagcctcttaatgtatatcaa

SEQ ID NO: 86396 - DNA, 25 bp, Artificial
  probe
  misc_feature (1)..(25): SEQ ID NO: 7267; WAN024BN2_at; Start 1513; Stop 1537
cgagaagctcctttatctgaggaat

SEQ ID NO: 86397 - DNA, 25 bp, Artificial
  probe
  misc_feature (1)..(25): SEQ ID NO: 7267; WAN024BN2_at; Start 41; Stop 65
tgagtggctcattttctgatagtcc

SEQ ID NO: 86398 - DNA, 25 bp, Artificial
  probe
  misc_feature (1)..(25): SEQ ID NO: 7267; WAN024BN2_at; Start 1659; Stop 1683
tcgaatgcttaatgatggaatggca

SEQ ID NO: 86399 - DNA, 25 bp, Artificial
  probe
  misc_feature (1)..(25): SEQ ID NO: 7267; WAN024BN2_at; Start 123; Stop 147
tattgagtgtgaaacacccttaacg

SEQ ID NO: 86400 - DNA, 25 bp, Artificial
  probe
  misc_feature (1)..(25): SEQ ID NO: 7267; WAN024BN2_at; Start 1646; Stop 1670
gggatacgcacggtcgaatgcttaa

SEQ ID NO: 86401 - DNA, 25 bp, Artificial
  probe
  misc_feature (1)..(25): SEQ ID NO: 7267; WAN024BN2_at; Start 1392; Stop 1416
tcatgctccaaacgaagatgtgcag

SEQ ID NO: 86402 - DNA, 25 bp, Artificial
  probe
  misc_feature (1)..(25): SEQ ID NO: 7267; WAN024BN2_at; Start 143; Stop 167
taacggttgccattcaaggagactg

SEQ ID NO: 86403 - DNA, 25 bp, Artificial
  probe
  misc_feature (1)..(25): SEQ ID NO: 7267; WAN024BN2_at; Start 479; Stop 503
gcgagagaactgatgatattaagca

SEQ ID NO: 86404 - DNA, 25 bp, Artificial
  probe
  misc_feature (1)..(25): SEQ ID NO: 7267; WAN024BN2_at; Start 589; Stop 613
gatcgattagttcctgaaaaggcca

SEQ ID NO: 86405 - DNA, 25 bp, Artificial
  probe
  misc_feature (1)..(25): SEQ ID NO: 7267; WAN024BN2_at; Start 1026; Stop 1050
ggtatgtttccaattaagattcgag

SEQ ID NO: 86406 - DNA, 25 bp, Artificial
  probe
  misc_feature (1)..(25): SEQ ID NO: 7267; WAN024BN2_at; Start 413; Stop 437
tagactttggcatactaaatggaga

SEQ ID NO: 86407 - DNA, 25 bp, Artificial
  probe
  misc_feature (1)..(25): SEQ ID NO: 7267; WAN024BN2_at; Start 182; Stop 206
ccagtattatgtaccaagttgaaaa

SEQ ID NO: 86408 - DNA, 25 bp, Artificial
  probe
  misc_feature (1)..(25): SEQ ID NO: 7267; WAN024BN2_at; Start 1078; Stop 1102
tataataatagtcccgaagatagcg

SEQ ID NO: 86409 - DNA, 25 bp, Artificial
  probe
  misc_feature (1)..(25): SEQ ID NO: 6966; WAN024BN3_at; Start 214; Stop 238
gatttacctaaaagtacagatgttg

SEQ ID NO: 86410 - DNA, 25 bp, Artificial
  probe
  misc_feature (1)..(25): SEQ ID NO: 6966; WAN024BN3_at; Start 550; Stop 574
tactatctaggacattacttgccac

SEQ ID NO: 86411 - DNA, 25 bp, Artificial
  probe
  misc_feature (1)..(25): SEQ ID NO: 6966; WAN024BN3_at; Start 394; Stop 418
ggagacgactcattaaacatcttaa

SEQ ID NO: 86412 - DNA, 25 bp, Artificial
  probe
  misc_feature (1)..(25): SEQ ID NO: 6966; WAN024BN3_at; Start 799; Stop 823
gcaagagtgattatttggagaatcg

SEQ ID NO: 86413 - DNA, 25 bp, Artificial
  probe
  misc_feature (1)..(25): SEQ ID NO: 6966; WAN024BN3_at; Start 339; Stop 363
gaagaaggatgttggaattcacaca

SEQ ID NO: 86414 - DNA, 25 bp, Artificial
  probe
  misc_feature (1)..(25): SEQ ID NO: 6966; WAN024BN3_at; Start 674; Stop 698
tagctaatttagaggctttcccatt

SEQ ID NO: 86415 - DNA, 25 bp, Artificial
  probe
  misc_feature (1)..(25): SEQ ID NO: 6966; WAN024BN3_at; Start 512; Stop 536
tacaaattgtaaaacaaactcgctc

SEQ ID NO: 86416 - DNA, 25 bp, Artificial
  probe
  misc_feature (1)..(25): SEQ ID NO: 6966; WAN024BN3_at; Start 484; Stop 508
gaaacgagcagtattttatacaatg

SEQ ID NO: 86417 - DNA, 25 bp, Artificial
  probe
  misc_feature (1)..(25): SEQ ID NO: 6966; WAN024BN3_at; Start 685; Stop 709
gaggctttcccatttagaagccaaa

SEQ ID NO: 86418 - DNA, 25 bp, Artificial
  probe
  misc_feature (1)..(25): SEQ ID NO: 6966; WAN024BN3_at; Start 369; Stop 393
taaaaaagcaagagaaatggagagt

SEQ ID NO: 86419 - DNA, 25 bp, Artificial
  probe
  misc_feature (1)..(25): SEQ ID NO: 6966; WAN024BN3_at; Start 625; Stop 649
cacaatttgactgatgagtgggatg

SEQ ID NO: 86420 - DNA, 25 bp, Artificial
  probe
  misc_feature (1)..(25): SEQ ID NO: 6966; WAN024BN3_at; Start 699; Stop 723
tagaagccaaaatccaaattacact

SEQ ID NO: 86421 - DNA, 25 bp, Artificial
  probe
  misc_feature (1)..(25): SEQ ID NO: 6966; WAN024BN3_at; Start 1009; Stop 1033
ggtcaatcaggatattttgggcgaa

SEQ ID NO: 86422 - DNA, 25 bp, Artificial
  probe
  misc_feature (1)..(25): SEQ ID NO: 6966; WAN024BN3_at; Start 641; Stop 665
agtgggatgagttagaaaaaatgtc

SEQ ID NO: 86423 - DNA, 25 bp, Artificial
  probe
  misc_feature (1)..(25): SEQ ID NO: 6966; WAN024BN3_at; Start 468; Stop 492
tatcttggatgtaagagaaacgagc

SEQ ID NO: 86424 - DNA, 25 bp, Artificial
  probe
  misc_feature (1)..(25): SEQ ID NO: 6966; WAN024BN3_at; Start 816; Stop 840
gagaatcgttaagcatttagagtca

SEQ ID NO: 86425 - DNA, 25 bp, Artificial
  probe
  misc_feature (1)..(25): SEQ ID NO: 6966; WAN024BN3_at; Start 34; Stop 58
gaacctttaaaaacattgcttgatg

SEQ ID NO: 86426 - DNA, 25 bp, Artificial
  probe
  misc_feature (1)..(25): SEQ ID NO: 6966; WAN024BN3_at; Start 413; Stop 437
tcttaaatgataaaggcaaattgag

SEQ ID NO: 86427 - DNA, 25 bp, Artificial
  probe
  misc_feature (1)..(25): SEQ ID NO: 6966; WAN024BN3_at; Start 940; Stop 964
gaaataaatcaaatcataaacgcac

SEQ ID NO: 86428 - DNA, 25 bp, Artificial
  probe
  misc_feature (1)..(25): SEQ ID NO: 6966; WAN024BN3_at; Start 382; Stop 406
gaaatggagagtggagacgactcat

SEQ ID NO: 86429 - DNA, 25 bp, Artificial
  probe
  misc_feature (1)..(25): SEQ ID NO: 6966; WAN024BN3_at; Start 995; Stop 1019
aaaaagattataacggtcaatcagg

SEQ ID NO: 86430 - DNA, 25 bp, Artificial
  probe
  misc_feature (1)..(25): SEQ ID NO: 6966; WAN024BN3_at; Start 74; Stop 98
tgggaaaaattaacaactcttcaga

SEQ ID NO: 86431 - DNA, 25 bp, Artificial
  probe
  misc_feature (1)..(25): SEQ ID NO: 6966; WAN024BN3_at; Start 956; Stop 980
taaacgcactagatgaagaatactt

SEQ ID NO: 86432 - DNA, 25 bp, Artificial
  probe
  misc_feature (1)..(25): SEQ ID NO: 6966; WAN024BN3_at; Start 116; Stop 140
gcccgtggaataattttaatataga

SEQ ID NO: 86433 - DNA, 25 bp, Artificial
  probe
  misc_feature (1)..(25): SEQ ID NO: 6966; WAN024BN3_at; Start 266; Stop 290
taaaaggaaatattgatgaagcaac

SEQ ID NO: 86434 - DNA, 25 bp, Artificial
  probe
  misc_feature (1)..(25): SEQ ID NO: 6966; WAN024BN3_at; Start 249; Stop 273
tggattacctaatcacataaaagga

SEQ ID NO: 86435 - DNA, 25 bp, Artificial
  probe
  misc_feature (1)..(25): SEQ ID NO: 6966; WAN024BN3_at; Start 742; Stop 766
gcaacaaactttacaaatctactga

SEQ ID NO: 86436 - DNA, 25 bp, Artificial
  probe
  misc_feature (1)..(25): SEQ ID NO: 6966; WAN024BN3_at; Start 101; Stop 125
tattcgatatatatagcccgtggaa

SEQ ID NO: 86437 - DNA, 25 bp, Artificial
  probe
  misc_feature (1)..(25): SEQ ID NO: 6966; WAN024BN3_at; Start 833; Stop 857
tagagtcatctcaacataaacccgc

SEQ ID NO: 86438 - DNA, 25 bp, Artificial
  probe
  misc_feature (1)..(25): SEQ ID NO: 6966; WAN024BN3_at; Start 197; Stop 221
ggttagatattgaggaagatttacc

SEQ ID NO: 86439 - DNA, 25 bp, Artificial
  probe
  misc_feature (1)..(25): SEQ ID NO: 6966; WAN024BN3_at; Start 234; Stop 258
tgttgatatcaagtatggattacct

SEQ ID NO: 86440 - DNA, 25 bp, Artificial
  probe
  misc_feature (1)..(25): SEQ ID NO: 6966; WAN024BN3_at; Start 848; Stop 872
ataaacccgcctttatattgagaag

SEQ ID NO: 86441 - DNA, 25 bp, Artificial
  probe
  misc_feature (1)..(25): SEQ ID NO: 6966; WAN024BN3_at; Start 427; Stop 451
ggcaaattgagaatagatcctaaag

SEQ ID NO: 86442 - DNA, 25 bp, Artificial
  probe
  misc_feature (1)..(25): SEQ ID NO: 6966; WAN024BN3_at; Start 321; Stop 345
tgatgaagtaaaaaccgagaagaag

SEQ ID NO: 86443 - DNA, 25 bp, Artificial
  probe
  misc_feature (1)..(25): SEQ ID NO: 6377; WAN024BN4_at; Start 477; Stop 501
tccgttaaaagatatcaaaagccac

SEQ ID NO: 86444 - DNA, 25 bp, Artificial
  probe
  misc_feature (1)..(25): SEQ ID NO: 6377; WAN024BN4_at; Start 672; Stop 696
ggttcgaaatcaaaaagtagatgct

SEQ ID NO: 86445 - DNA, 25 bp, Artificial
  probe
  misc_feature (1)..(25): SEQ ID NO: 6377; WAN024BN4_at; Start 513; Stop 537
tgtttccctctattatgatgcccac

SEQ ID NO: 86446 - DNA, 25 bp, Artificial
  probe
  misc_feature (1)..(25): SEQ ID NO: 6377; WAN024BN4_at; Start 597; Stop 621
taggatggagagtctgagtgaatct

SEQ ID NO: 86447 - DNA, 25 bp, Artificial
  probe
  misc_feature (1)..(25): SEQ ID NO: 6377; WAN024BN4_at; Start 284; Stop 308
cagaactatattcattactcgaaga

SEQ ID NO: 86448 - DNA, 25 bp, Artificial
  probe
  misc_feature (1)..(25): SEQ ID NO: 6377; WAN024BN4_at; Start 381; Stop 405
taaatcactgactaatgacaaggac

SEQ ID NO: 86449 - DNA, 25 bp, Artificial
  probe
  misc_feature (1)..(25): SEQ ID NO: 6377; WAN024BN4_at; Start 630; Stop 654
gaaaccagaaatttcatatgggcgt

SEQ ID NO: 86450 - DNA, 25 bp, Artificial
  probe
  misc_feature (1)..(25): SEQ ID NO: 6377; WAN024BN4_at; Start 548; Stop 572
tagttgcttaccatttgaaacatga

SEQ ID NO: 86451 - DNA, 25 bp, Artificial
  probe
  misc_feature (1)..(25): SEQ ID NO: 6377; WAN024BN4_at; Start 751; Stop 775
gttttagatcagtttccagagcgtg

SEQ ID NO: 86452 - DNA, 25 bp, Artificial
  probe
  misc_feature (1)..(25): SEQ ID NO: 6377; WAN024BN4_at; Start 868; Stop 892
gcagtcactcttttatcaccttcaa

SEQ ID NO: 86453 - DNA, 25 bp, Artificial
  probe
  misc_feature (1)..(25): SEQ ID NO: 6377; WAN024BN4_at; Start 644; Stop 668
catatgggcgtaagtaccgagatgg

SEQ ID NO: 86454 - DNA, 25 bp, Artificial
  probe
  misc_feature (1)..(25): SEQ ID NO: 6377; WAN024BN4_at; Start 325; Stop 349
tcaagcgaagaacaaaaagagatag

SEQ ID NO: 86455 - DNA, 25 bp, Artificial
  probe
  misc_feature (1)..(25): SEQ ID NO: 6377; WAN024BN4_at; Start 399; Stop 423
caaggacaggattgatacaatttgg

SEQ ID NO: 86456 - DNA, 25 bp, Artificial
  probe
  misc_feature (1)..(25): SEQ ID NO: 6377; WAN024BN4_at; Start 128; Stop 152
taaaaaattttttgcaagagcagcg

SEQ ID NO: 86457 - DNA, 25 bp, Artificial
  probe
  misc_feature (1)..(25): SEQ ID NO: 6377; WAN024BN4_at; Start 255; Stop 279
tcttttggagaatcgtgcactaaac

SEQ ID NO: 86458 - DNA, 25 bp, Artificial
  probe
  misc_feature (1)..(25): SEQ ID NO: 6377; WAN024BN4_at; Start 142; Stop 166
caagagcagcgtatatcaaatacag

SEQ ID NO: 86459 - DNA, 25 bp, Artificial
  probe
  misc_feature (1)..(25): SEQ ID NO: 6377; WAN024BN4_at; Start 47; Stop 71
caggcgagaggctatcaaaagctca

SEQ ID NO: 86460 - DNA, 25 bp, Artificial
  probe
  misc_feature (1)..(25): SEQ ID NO: 6377; WAN024BN4_at; Start 423; Stop 447
gattttgtcggaagctattcgtagg

SEQ ID NO: 86461 - DNA, 25 bp, Artificial
  probe
  misc_feature (1)..(25): SEQ ID NO: 6377; WAN024BN4_at; Start 99; Stop 123
taggactgtacaaagatatatgagc

SEQ ID NO: 86462 - DNA, 25 bp, Artificial
  probe
  misc_feature (1)..(25): SEQ ID NO: 6377; WAN024BN4_at; Start 353; Stop 377
caattattggcagtgagcgttttaa

SEQ ID NO: 86463 - DNA, 25 bp, Artificial
  probe
  misc_feature (1)..(25): SEQ ID NO: 6377; WAN024BN4_at; Start 812; Stop 836
aaattaaaactcaagacacaccagg

SEQ ID NO: 86464 - DNA, 25 bp, Artificial
  probe
  misc_feature (1)..(25): SEQ ID NO: 6377; WAN024BN4_at; Start 436; Stop 460
gctattcgtagggagcaaatgctcg

SEQ ID NO: 86465 - DNA, 25 bp, Artificial
  probe
  misc_feature (1)..(25): SEQ ID NO: 6377; WAN024BN4_at; Start 62; Stop 86
caaaagctcaattaagcgatgaata

SEQ ID NO: 86466 - DNA, 25 bp, Artificial
  probe
  misc_feature (1)..(25): SEQ ID NO: 6377; WAN024BN4_at; Start 268; Stop 292
cgtgcactaaacaaatcagaactat

SEQ ID NO: 86467 - DNA, 25 bp, Artificial
  probe
  misc_feature (1)..(25): SEQ ID NO: 6377; WAN024BN4_at; Start 766; Stop 790
ccagagcgtgaaattctttctgaga

SEQ ID NO: 86468 - DNA, 25 bp, Artificial
  probe
  misc_feature (1)..(25): SEQ ID NO: 6377; WAN024BN4_at; Start 614; Stop 638
gtgaatctcatgtaaagaaaccaga

SEQ ID NO: 86469 - DNA, 25 bp, Artificial
  probe
  misc_feature (1)..(25): SEQ ID NO: 6377; WAN024BN4_at; Start 456; Stop 480
gctcgaaatagaatataaagctccg

SEQ ID NO: 86470 - DNA, 25 bp, Artificial
  probe
  misc_feature (1)..(25): SEQ ID NO: 6377; WAN024BN4_at; Start 581; Stop 605
caacgtatcgtgttgataggatgga

SEQ ID NO: 86471 - DNA, 25 bp, Artificial
  probe
  misc_feature (1)..(25): SEQ ID NO: 6377; WAN024BN4_at; Start 826; Stop 850
gacacaccaggtctcaaacgatgga

SEQ ID NO: 86472 - DNA, 25 bp, Artificial
  probe
  misc_feature (1)..(25): SEQ ID NO: 6377; WAN024BN4_at; Start 307; Stop 331
gatcttctatctttactctcaagcg

SEQ ID NO: 86473 - DNA, 25 bp, Artificial
  probe
  misc_feature (1)..(25): SEQ ID NO: 6377; WAN024BN4_at; Start 854; Stop 878
taggacaaggtgatgcagtcactct

SEQ ID NO: 86474 - DNA, 25 bp, Artificial
  probe
  misc_feature (1)..(25): SEQ ID NO: 6377; WAN024BN4_at; Start 32; Stop 56
ttttccgtttacaagcaggcgagag

SEQ ID NO: 86475 - DNA, 25 bp, Artificial
  probe
  misc_feature (1)..(25): SEQ ID NO: 6377; WAN024BN4_at; Start 187; Stop 211
gataatacctatcgtttgattgcta

SEQ ID NO: 86476 - DNA, 25 bp, Artificial
  probe
  misc_feature (1)..(25): SEQ ID NO: 6377; WAN024BN4_at; Start 840; Stop 864
caaacgatggattctaggacaaggt

SEQ ID NO: 86477 - DNA, 25 bp, Artificial
  probe
  misc_feature (1)..(25): SEQ ID NO: 6947; WAN024BN5_at; Start 208; Stop 232
gaaatgttattaagtgtagagagtc

SEQ ID NO: 86478 - DNA, 25 bp, Artificial
  probe
  misc_feature (1)..(25): SEQ ID NO: 6947; WAN024BN5_at; Start 4; Stop 28
tataaatgtgaaataagagaagatt

SEQ ID NO: 86479 - DNA, 25 bp, Artificial
  probe
  misc_feature (1)..(25): SEQ ID NO: 6947; WAN024BN5_at; Start 37; Stop 61
gcatggttagaaaatataatggaag

SEQ ID NO: 86480 - DNA, 25 bp, Artificial
  probe
  misc_feature (1)..(25): SEQ ID NO: 6947; WAN024BN5_at; Start 73; Stop 97
catgggaggtatgttacaggtgata

SEQ ID NO: 86481 - DNA, 25 bp, Artificial
  probe
  misc_feature (1)..(25): SEQ ID NO: 6947; WAN024BN5_at; Start 308; Stop 332
gaaagttgattgatgaatttcatgc

SEQ ID NO: 86482 - DNA, 25 bp, Artificial
  probe
  misc_feature (1)..(25): SEQ ID NO: 6947; WAN024BN5_at; Start 67; Stop 91
gagtttcatgggaggtatgttacag

SEQ ID NO: 86483 - DNA, 25 bp, Artificial
  probe
  misc_feature (1)..(25): SEQ ID NO: 6947; WAN024BN5_at; Start 190; Stop 214
cttgatgaagatgctaaggaaatgt

SEQ ID NO: 86484 - DNA, 25 bp, Artificial
  probe
  misc_feature (1)..(25): SEQ ID NO: 6947; WAN024BN5_at; Start 322; Stop 346
gaatttcatgcagttaaagcggcaa

SEQ ID NO: 86485 - DNA, 25 bp, Artificial
  probe
  misc_feature (1)..(25): SEQ ID NO: 6947; WAN024BN5_at; Start 196; Stop 220
gaagatgctaaggaaatgttattaa

SEQ ID NO: 86486 - DNA, 25 bp, Artificial
  probe
  misc_feature (1)..(25): SEQ ID NO: 6947; WAN024BN5_at; Start 257; Stop 281
cccaaaaaataatgtcaggaagatt

SEQ ID NO: 86487 - DNA, 25 bp, Artificial
  probe
  misc_feature (1)..(25): SEQ ID NO: 6947; WAN024BN5_at; Start 105; Stop 129
gctaactttatctgatctaagacac

SEQ ID NO: 86488 - DNA, 25 bp, Artificial
  probe
  misc_feature (1)..(25): SEQ ID NO: 6947; WAN024BN5_at; Start 161; Stop 185
tagaggatgtgtattcacaagtact

SEQ ID NO: 86489 - DNA, 25 bp, Artificial
  probe
  misc_feature (1)..(25): SEQ ID NO: 6947; WAN024BN5_at; Start 289; Stop 313
caaaactactatcttcttggaaagt

SEQ ID NO: 86490 - DNA, 25 bp, Artificial
  probe
  misc_feature (1)..(25): SEQ ID NO: 6947; WAN024BN5_at; Start 91; Stop 115
ggtgatatgatttcgctaactttat

SEQ ID NO: 86491 - DNA, 25 bp, Artificial
  probe
  misc_feature (1)..(25): SEQ ID NO: 6947; WAN024BN5_at; Start 116; Stop 140
ctgatctaagacacttagcagaggg

SEQ ID NO: 86492 - DNA, 25 bp, Artificial
  probe
  misc_feature (1)..(25): SEQ ID NO: 6947; WAN024BN5_at; Start 226; Stop 250
gagagtcatttatataatttccaag

SEQ ID NO: 86493 - DNA, 25 bp, Artificial
  probe
  misc_feature (1)..(25): SEQ ID NO: 6947; WAN024BN5_at; Start 344; Stop 368
caatgagagttattgaaacaaaacg

SEQ ID NO: 86494 - DNA, 25 bp, Artificial
  probe
  misc_feature (1)..(25): SEQ ID NO: 6947; WAN024BN5_at; Start 148; Stop 172
cttgcttggaatgtagaggatgtgt

SEQ ID NO: 86495 - DNA, 25 bp, Artificial
  probe
  misc_feature (1)..(25): SEQ ID NO: 6947; WAN024BN5_at; Start 300; Stop 324
tcttcttggaaagttgattgatgaa

SEQ ID NO: 86496 - DNA, 25 bp, Artificial
  probe
  misc_feature (1)..(25): SEQ ID NO: 6947; WAN024BN5_at; Start 275; Stop 299
gaagattaactcgacaaaactacta

SEQ ID NO: 86497 - DNA, 25 bp, Artificial
  probe
  misc_feature (1)..(25): SEQ ID NO: 6947; WAN024BN5_at; Start 176; Stop 200
cacaagtactatatcttgatgaaga

SEQ ID NO: 86498 - DNA, 25 bp, Artificial
  probe
  misc_feature (1)..(25): SEQ ID NO: 6947; WAN024BN5_at; Start 20; Stop 44
gagaagattttgaaacagcatggtt

SEQ ID NO: 86499 - DNA, 25 bp, Artificial
  probe
  misc_feature (1)..(25): SEQ ID NO: 6947; WAN024BN5_at; Start 82; Stop 106
tatgttacaggtgatatgatttcgc

SEQ ID NO: 86500 - DNA, 25 bp, Artificial
  probe
  misc_feature (1)..(25): SEQ ID NO: 6947; WAN024BN5_at; Start 328; Stop 352
catgcagttaaagcggcaatgagag

SEQ ID NO: 86501 - DNA, 25 bp, Artificial
  probe
  misc_feature (1)..(25): SEQ ID NO: 6947; WAN024BN5_at; Start 31; Stop 55
gaaacagcatggttagaaaatataa

SEQ ID NO: 86502 - DNA, 25 bp, Artificial
  probe
  misc_feature (1)..(25): SEQ ID NO: 6947; WAN024BN5_at; Start 125; Stop 149
gacacttagcagaggggaaatttct

SEQ ID NO: 86503 - DNA, 25 bp, Artificial
  probe
  misc_feature (1)..(25): SEQ ID NO: 6947; WAN024BN5_at; Start 266; Stop 290
taatgtcaggaagattaactcgaca

SEQ ID NO: 86504 - DNA, 25 bp, Artificial
  probe
  misc_feature (1)..(25): SEQ ID NO: 6947; WAN024BN5_at; Start 271; Stop 295
tcaggaagattaactcgacaaaact

SEQ ID NO: 86505 - DNA, 25 bp, Artificial
  probe
  misc_feature (1)..(25): SEQ ID NO: 6947; WAN024BN5_at; Start 141; Stop 165
gaaatttcttgcttggaatgtagag

SEQ ID NO: 86506 - DNA, 25 bp, Artificial
  probe
  misc_feature (1)..(25): SEQ ID NO: 6947; WAN024BN5_at; Start 53; Stop 77
taatggaagtaatagagtttcatgg

SEQ ID NO: 86507 - DNA, 25 bp, Artificial
  probe
  misc_feature (1)..(25): SEQ ID NO: 6947; WAN024BN5_at; Start 319; Stop 343
gatgaatttcatgcagttaaagcgg

SEQ ID NO: 86508 - DNA, 25 bp, Artificial
  probe
  misc_feature (1)..(25): SEQ ID NO: 6947; WAN024BN5_at; Start 87; Stop 111
tacaggtgatatgatttcgctaact

SEQ ID NO: 86509 - DNA, 25 bp, Artificial
  probe
  misc_feature (1)..(25): SEQ ID NO: 6947; WAN024BN5_at; Start 340; Stop 364
gcggcaatgagagttattgaaacaa

SEQ ID NO: 86510 - DNA, 25 bp, Artificial
  probe
  misc_feature (1)..(25): SEQ ID NO: 6947; WAN024BN5_at; Start 332; Stop 356
cagttaaagcggcaatgagagttat

SEQ ID NO: 86511 - DNA, 25 bp, Artificial
  probe
  misc_feature (1)..(25): SEQ ID NO: 7191; WAN024BN6-3_at; Start 566; Stop 590
tagttgcagttgaggtacctattca

SEQ ID NO: 86512 - DNA, 25 bp, Artificial
  probe
  misc_feature (1)..(25): SEQ ID NO: 7191; WAN024BN6-3_at; Start 535; Stop 559
tacaagaaatctggatacctcaaag

SEQ ID NO: 86513 - DNA, 25 bp, Artificial
  probe
  misc_feature (1)..(25): SEQ ID NO: 7191; WAN024BN6-3_at; Start 1806; Stop 1830
cactatacaagttacgaaagaggat

SEQ ID NO: 86514 - DNA, 25 bp, Artificial
  probe
  misc_feature (1)..(25): SEQ ID NO: 7191; WAN024BN6-3_at; Start 584; Stop 608
ctattcaaggtattcgactaggcga

SEQ ID NO: 86515 - DNA, 25 bp, Artificial
  probe
  misc_feature (1)..(25): SEQ ID NO: 7191; WAN024BN6-3_at; Start 550; Stop 574
tacctcaaagatggtgtagttgcag

SEQ ID NO: 86516 - DNA, 25 bp, Artificial
  probe
  misc_feature (1)..(25): SEQ ID NO: 7191; WAN024BN6-3_at; Start 125; Stop 149
tagacgtgacagaatcttttgagga

SEQ ID NO: 86517 - DNA, 25 bp, Artificial
  probe
  misc_feature (1)..(25): SEQ ID NO: 7191; WAN024BN6-3_at; Start 1348; Stop 1372
gaagatttacaattagaggacgcaa

SEQ ID NO: 86518 - DNA, 25 bp, Artificial
  probe
  misc_feature (1)..(25): SEQ ID NO: 7191; WAN024BN6-3_at; Start 110; Stop 134
aatttattgatgaggtagacgtgac

SEQ ID NO: 86519 - DNA, 25 bp, Artificial
  probe
  misc_feature (1)..(25): SEQ ID NO: 7191; WAN024BN6-3_at; Start 369; Stop 393
tgtagatggttcacaaagttcagaa

SEQ ID NO: 86520 - DNA, 25 bp, Artificial
  probe
  misc_feature (1)..(25): SEQ ID NO: 7191; WAN024BN6-3_at; Start 1048; Stop 1072
tgcgactactgtctccaagtatcag

SEQ ID NO: 86521 - DNA, 25 bp, Artificial
  probe
  misc_feature (1)..(25): SEQ ID NO: 7191; WAN024BN6-3_at; Start 1030; Stop 1054
gacagagataattacccatgcgact

SEQ ID NO: 86522 - DNA, 25 bp, Artificial
  probe
  misc_feature (1)..(25): SEQ ID NO: 7191; WAN024BN6-3_at; Start 614; Stop 638
taaataccaccgtagacctatcgga

SEQ ID NO: 86523 - DNA, 25 bp, Artificial
  probe
  misc_feature (1)..(25): SEQ ID NO: 7191; WAN024BN6-3_at; Start 815; Stop 839
tcctcttcaaaaatgccggtatcga

SEQ ID NO: 86524 - DNA, 25 bp, Artificial
  probe
  misc_feature (1)..(25): SEQ ID NO: 7191; WAN024BN6-3_at; Start 1293; Stop 1317
cacaggtcccgtatttgggactgca

SEQ ID NO: 86525 - DNA, 25 bp, Artificial
  probe
  misc_feature (1)..(25): SEQ ID NO: 7191; WAN024BN6-3_at; Start 1098; Stop 1122
tactgaagccttagaagttgcgact

SEQ ID NO: 86526 - DNA, 25 bp, Artificial
  probe
  misc_feature (1)..(25): SEQ ID NO: 7191; WAN024BN6-3_at; Start 47; Stop 71
aggtgctccatctctcttatgctaa

SEQ ID NO: 86527 - DNA, 25 bp, Artificial
  probe
  misc_feature (1)..(25): SEQ ID NO: 7191; WAN024BN6-3_at; Start 666; Stop 690
aattgataaaattgagtgcgacggc

SEQ ID NO: 86528 - DNA, 25 bp, Artificial
  probe
  misc_feature (1)..(25): SEQ ID NO: 7191; WAN024BN6-3_at; Start 1309; Stop 1333
gggactgcaattcatgaaacaatgg

SEQ ID NO: 86529 - DNA, 25 bp, Artificial
  probe
  misc_feature (1)..(25): SEQ ID NO: 7191; WAN024BN6-3_at; Start 32; Stop 56
tgactcgggcaaagaaggtgctcca

SEQ ID NO: 86530 - DNA, 25 bp, Artificial
  probe
  misc_feature (1)..(25): SEQ ID NO: 7191; WAN024BN6-3_at; Start 749; Stop 773
tagtagctccgagtgaaaaagaacc

SEQ ID NO: 86531 - DNA, 25 bp, Artificial
  probe
  misc_feature (1)..(25): SEQ ID NO: 7191; WAN024BN6-3_at; Start 17; Stop 41
tgttttatgttgctatgactcgggc

SEQ ID NO: 86532 - DNA, 25 bp, Artificial
  probe
  misc_feature (1)..(25): SEQ ID NO: 7191; WAN024BN6-3_at; Start 1163; Stop 1187
gcaaattgaatcgttacctgcgttg

SEQ ID NO: 86533 - DNA, 25 bp, Artificial
  probe
  misc_feature (1)..(25): SEQ ID NO: 7191; WAN024BN6-3_at; Start 328; Stop 352
ggtagcattattcacgaagtcttag

SEQ ID NO: 86534 - DNA, 25 bp, Artificial
  probe
  misc_feature (1)..(25): SEQ ID NO: 7191; WAN024BN6-3_at; Start 1215; Stop 1239
tttacagttatctcaagcagctgga

SEQ ID NO: 86535 - DNA, 25 bp, Artificial
  probe
  misc_feature (1)..(25): SEQ ID NO: 7191; WAN024BN6-3_at; Start 773; Stop 797
cccttggtggtgattattggcgtca

SEQ ID NO: 86536 - DNA, 25 bp, Artificial
  probe
  misc_feature (1)..(25): SEQ ID NO: 7191; WAN024BN6-3_at; Start 1672; Stop 1696
gattattggcgtcaagcagtcttct

SEQ ID NO: 86537 - DNA, 25 bp, Artificial
  probe
  misc_feature (1)..(25): SEQ ID NO: 7191; WAN024BN6-3_at; Start 1232; Stop 1256
cagctggattatcagcaggagcaaa

SEQ ID NO: 86538 - DNA, 25 bp, Artificial
  probe
  misc_feature (1)..(25): SEQ ID NO: 7191; WAN024BN6-3_at; Start 157; Stop 181
tctgtagataaagtggtaatgccga

SEQ ID NO: 86539 - DNA, 25 bp, Artificial
  probe
  misc_feature (1)..(25): SEQ ID NO: 7191; WAN024BN6-3_at; Start 299; Stop 323
catctgaaacaaacgaagctatggt

SEQ ID NO: 86540 - DNA, 25 bp, Artificial
  probe
  misc_feature (1)..(25): SEQ ID NO: 7191; WAN024BN6-3_at; Start 829; Stop 853
gccggtatcgatatttctgacaaag

SEQ ID NO: 86541 - DNA, 25 bp, Artificial
  probe
  misc_feature (1)..(25): SEQ ID NO: 7191; WAN024BN6-3_at; Start 1179; Stop 1203
cctgcgttgtccgaagagtatctac

SEQ ID NO: 86542 - DNA, 25 bp, Artificial
  probe
  misc_feature (1)..(25): SEQ ID NO: 7191; WAN024BN6-3_at; Start 1623; Stop 1647
taagacaggttctgctcaaagaggt

SEQ ID NO: 86543 - DNA, 25 bp, Artificial
  probe
  misc_feature (1)..(25): SEQ ID NO: 7191; WAN024BN6-3_at; Start 687; Stop 711
cggcaatatagtgtgtctagtcgac

SEQ ID NO: 86544 - DNA, 25 bp, Artificial
  probe
  misc_feature (1)..(25): SEQ ID NO: 7191; WAN024BN6-3_at; Start 1114; Stop 1138
gttgcgacttatcaacaaacacggg

SEQ ID NO: 86545 - DNA, 25 bp, Artificial
  probe
  misc_feature (1)..(25): SEQ ID NO: 6519; WAN024BN6-5_at; Start 1111; Stop 1135
gcagcaggcgctaacaaagattatg

SEQ ID NO: 86546 - DNA, 25 bp, Artificial
  probe
  misc_feature (1)..(25): SEQ ID NO: 6519; WAN024BN6-5_at; Start 324; Stop 348
ctctgaaattttcggtggacaacca

SEQ ID NO: 86547 - DNA, 25 bp, Artificial
  probe
  misc_feature (1)..(25): SEQ ID NO: 6519; WAN024BN6-5_at; Start 358; Stop 382
tcaacagcagccaaatatgaaatcc

SEQ ID NO: 86548 - DNA, 25 bp, Artificial
  probe
  misc_feature (1)..(25): SEQ ID NO: 6519; WAN024BN6-5_at; Start 124; Stop 148
aaaactcaaattctgtcacgtcgtg

SEQ ID NO: 86549 - DNA, 25 bp, Artificial
  probe
  misc_feature (1)..(25): SEQ ID NO: 6519; WAN024BN6-5_at; Start 1508; Stop 1532
tccccactatagcagaaattgatca

SEQ ID NO: 86550 - DNA, 25 bp, Artificial
  probe
  misc_feature (1)..(25): SEQ ID NO: 6519; WAN024BN6-5_at; Start 273; Stop 297
ggtaagagtatcaactatccatgct

SEQ ID NO: 86551 - DNA, 25 bp, Artificial
  probe
  misc_feature (1)..(25): SEQ ID NO: 6519; WAN024BN6-5_at; Start 1913; Stop 1937
cttggccaggaggtgaaaataattc

SEQ ID NO: 86552 - DNA, 25 bp, Artificial
  probe
  misc_feature (1)..(25): SEQ ID NO: 6519; WAN024BN6-5_at; Start 1802; Stop 1826
caggttctccaagtaactgcgttca

SEQ ID NO: 86553 - DNA, 25 bp, Artificial
  probe
  misc_feature (1)..(25): SEQ ID NO: 6519; WAN024BN6-5_at; Start 1899; Stop 1923
gaaaaagagtgaagcttggccagga

SEQ ID NO: 86554 - DNA, 25 bp, Artificial
  probe
  misc_feature (1)..(25): SEQ ID NO: 6519; WAN024BN6-5_at; Start 1937; Stop 1961
caggtagattctcttatccaccaag

SEQ ID NO: 86555 - DNA, 25 bp, Artificial
  probe
  misc_feature (1)..(25): SEQ ID NO: 6519; WAN024BN6-5_at; Start 1396; Stop 1420
ccatcaagagatgttagagaacttc

SEQ ID NO: 86556 - DNA, 25 bp, Artificial
  probe
  misc_feature (1)..(25): SEQ ID NO: 6519; WAN024BN6-5_at; Start 1584; Stop 1608
gcctatgtatgtccttagcgatgta

SEQ ID NO: 86557 - DNA, 25 bp, Artificial
  probe
  misc_feature (1)..(25): SEQ ID NO: 6519; WAN024BN6-5_at; Start 1036; Stop 1060
cgttcttcccaagctatcattgacg

SEQ ID NO: 86558 - DNA, 25 bp, Artificial
  probe
  misc_feature (1)..(25): SEQ ID NO: 6519; WAN024BN6-5_at; Start 1787; Stop 1811
caattgaagatatctcaggttctcc

SEQ ID NO: 86559 - DNA, 25 bp, Artificial
  probe
  misc_feature (1)..(25): SEQ ID NO: 6519; WAN024BN6-5_at; Start 949; Stop 973
tatcgtttccaaggagtaagtgcga

SEQ ID NO: 86560 - DNA, 25 bp, Artificial
  probe
  misc_feature (1)..(25): SEQ ID NO: 6519; WAN024BN6-5_at; Start 96; Stop 120
tatggttattgctggtcctggaaca

SEQ ID NO: 86561 - DNA, 25 bp, Artificial
  probe
  misc_feature (1)..(25): SEQ ID NO: 6519; WAN024BN6-5_at; Start 1155; Stop 1179
gaaatcctacgaaaatgcaaaagct

SEQ ID NO: 86562 - DNA, 25 bp, Artificial
  probe
  misc_feature (1)..(25): SEQ ID NO: 6519; WAN024BN6-5_at; Start 1270; Stop 1294
tacggagaagagtttgcgaagattc

SEQ ID NO: 86563 - DNA, 25 bp, Artificial
  probe
  misc_feature (1)..(25): SEQ ID NO: 6519; WAN024BN6-5_at; Start 1219; Stop 1243
gattcgggtgtttctcctaatgaaa

SEQ ID NO: 86564 - DNA, 25 bp, Artificial
  probe
  misc_feature (1)..(25): SEQ ID NO: 6519; WAN024BN6-5_at; Start 1081; Stop 1105
cataatccaagagaagagaaacttc

SEQ ID NO: 86565 - DNA, 25 bp, Artificial
  probe
  misc_feature (1)..(25): SEQ ID NO: 6519; WAN024BN6-5_at; Start 200; Stop 224
taacatatacagaggctggtgcatc

SEQ ID NO: 86566 - DNA, 25 bp, Artificial
  probe
  misc_feature (1)..(25): SEQ ID NO: 6519; WAN024BN6-5_at; Start 1056; Stop 1080
tgacgcttcaagacaactaatcagt

SEQ ID NO: 86567 - DNA, 25 bp, Artificial
  probe
  misc_feature (1)..(25): SEQ ID NO: 6519; WAN024BN6-5_at; Start 1829; Stop 1853
taatgacagctcatggttccaaagg

SEQ ID NO: 86568 - DNA, 25 bp, Artificial
  probe
  misc_feature (1)..(25): SEQ ID NO: 6519; WAN024BN6-5_at; Start 481; Stop 505
tataaaatgaaacgcgaaaacctga

SEQ ID NO: 86569 - DNA, 25 bp, Artificial
  probe
  misc_feature (1)..(25): SEQ ID NO: 6519; WAN024BN6-5_at; Start 140; Stop 164
cacgtcgtgtcgcaaatattttaac

SEQ ID NO: 86570 - DNA, 25 bp, Artificial
  probe
  misc_feature (1)..(25): SEQ ID NO: 6519; WAN024BN6-5_at; Start 1846; Stop 1870
tccaaaggactcgagtttgatcatg

SEQ ID NO: 86571 - DNA, 25 bp, Artificial
  probe
  misc_feature (1)..(25): SEQ ID NO: 6519; WAN024BN6-5_at; Start 1180; Stop 1204
gaaatgtttggtgtgcttactgaga

SEQ ID NO: 86572 - DNA, 25 bp, Artificial
  probe
  misc_feature (1)..(25): SEQ ID NO: 6519; WAN024BN6-5_at; Start 441; Stop 465
taaacgttattctgctaaagaccag

SEQ ID NO: 86573 - DNA, 25 bp, Artificial
  probe
  misc_feature (1)..(25): SEQ ID NO: 6519; WAN024BN6-5_at; Start 67; Stop 91
aaagcagttgatacggtggaaggac

SEQ ID NO: 86574 - DNA, 25 bp, Artificial
  probe
  misc_feature (1)..(25): SEQ ID NO: 6519; WAN024BN6-5_at; Start 1689; Stop 1713
caagttaatgttgatggaatgccac

SEQ ID NO: 86575 - DNA, 25 bp, Artificial
  probe
  misc_feature (1)..(25): SEQ ID NO: 6519; WAN024BN6-5_at; Start 1447; Stop 1471
gaggtagtactatcacaaatcgtaa

SEQ ID NO: 86576 - DNA, 25 bp, Artificial
  probe
  misc_feature (1)..(25): SEQ ID NO: 6519; WAN024BN6-5_at; Start 1096; Stop 1120
gagaaacttcttattgcagcaggcg

SEQ ID NO: 86577 - DNA, 25 bp, Artificial
  probe
  misc_feature (1)..(25): SEQ ID NO: 6519; WAN024BN6-5_at; Start 1704; Stop 1728
ggaatgccacatccatcctaaattg

SEQ ID NO: 86578 - DNA, 25 bp, Artificial
  probe
  misc_feature (1)..(25): SEQ ID NO: 6519; WAN024BN6-5_at; Start 676; Stop 700
caaaagttacttgctggagttgaaa

SEQ ID NO: 86579 - DNA, 25 bp, Artificial
  probe
  misc_feature (1)..(25): SEQ ID NO: 6803; WAN024BN7_at; Start 110; Stop 134
tgtacatatacaaacgttctaaaaa

SEQ ID NO: 86580 - DNA, 25 bp, Artificial
  probe
  misc_feature (1)..(25): SEQ ID NO: 6803; WAN024BN7_at; Start 43; Stop 67
tataaagagaaggatattggtcata

SEQ ID NO: 86581 - DNA, 25 bp, Artificial
  probe
  misc_feature (1)..(25): SEQ ID NO: 6803; WAN024BN7_at; Start 180; Stop 204
agagccagattttttagagtttaag

SEQ ID NO: 86582 - DNA, 25 bp, Artificial
  probe
  misc_feature (1)..(25): SEQ ID NO: 6803; WAN024BN7_at; Start 165; Stop 189
tattgattattatgaagagccagat

SEQ ID NO: 86583 - DNA, 25 bp, Artificial
  probe
  misc_feature (1)..(25): SEQ ID NO: 6803; WAN024BN7_at; Start 93; Stop 117
aaatcatcctcatagcttgtacata

SEQ ID NO: 86584 - DNA, 25 bp, Artificial
  probe
  misc_feature (1)..(25): SEQ ID NO: 6803; WAN024BN7_at; Start 222; Stop 246
aaatattacgtatatattttggcag

SEQ ID NO: 86585 - DNA, 25 bp, Artificial
  probe
  misc_feature (1)..(25): SEQ ID NO: 6803; WAN024BN7_at; Start 84; Stop 108
gggtaacaaaaatcatcctcatagc

SEQ ID NO: 86586 - DNA, 25 bp, Artificial
  probe
  misc_feature (1)..(25): SEQ ID NO: 6803; WAN024BN7_at; Start 163; Stop 187
tctattgattattatgaagagccag

SEQ ID NO: 86587 - DNA, 25 bp, Artificial
  probe
  misc_feature (1)..(25): SEQ ID NO: 6803; WAN024BN7_at; Start 85; Stop 109
ggtaacaaaaatcatcctcatagct

SEQ ID NO: 86588 - DNA, 25 bp, Artificial
  probe
  misc_feature (1)..(25): SEQ ID NO: 6803; WAN024BN7_at; Start 16; Stop 40
gctgttaatcaatttatagagagac

SEQ ID NO: 86589 - DNA, 25 bp, Artificial
  probe
  misc_feature (1)..(25): SEQ ID NO: 6803; WAN024BN7_at; Start 207; Stop 231
tatcgttcatttagaaaatattacg

SEQ ID NO: 86590 - DNA, 25 bp, Artificial
  probe
  misc_feature (1)..(25): SEQ ID NO: 6803; WAN024BN7_at; Start 19; Stop 43
gttaatcaatttatagagagacatt

SEQ ID NO: 86591 - DNA, 25 bp, Artificial
  probe
  misc_feature (1)..(25): SEQ ID NO: 6803; WAN024BN7_at; Start 68; Stop 92
tagagatagatttttggggtaacaa

SEQ ID NO: 86592 - DNA, 25 bp, Artificial
  probe
  misc_feature (1)..(25): SEQ ID NO: 6803; WAN024BN7_at; Start 97; Stop 121
catcctcatagcttgtacatataca

SEQ ID NO: 86593 - DNA, 25 bp, Artificial
  probe
  misc_feature (1)..(25): SEQ ID NO: 6803; WAN024BN7_at; Start 91; Stop 115
aaaaatcatcctcatagcttgtaca

SEQ ID NO: 86594 - DNA, 25 bp, Artificial
  probe
  misc_feature (1)..(25): SEQ ID NO: 6803; WAN024BN7_at; Start 51; Stop 75
gaaggatattggtcatatagagata

SEQ ID NO: 86595 - DNA, 25 bp, Artificial
  probe
  misc_feature (1)..(25): SEQ ID NO: 6803; WAN024BN7_at; Start 210; Stop 234
cgttcatttagaaaatattacgtat

SEQ ID NO: 86596 - DNA, 25 bp, Artificial
  probe
  misc_feature (1)..(25): SEQ ID NO: 6803; WAN024BN7_at; Start 40; Stop 64
cattataaagagaaggatattggtc

SEQ ID NO: 86597 - DNA, 25 bp, Artificial
  probe
  misc_feature (1)..(25): SEQ ID NO: 6803; WAN024BN7_at; Start 192; Stop 216
tttagagtttaagtatatcgttcat

SEQ ID NO: 86598 - DNA, 25 bp, Artificial
  probe
  misc_feature (1)..(25): SEQ ID NO: 6803; WAN024BN7_at; Start 107; Stop 131
gcttgtacatatacaaacgttctaa

SEQ ID NO: 86599 - DNA, 25 bp, Artificial
  probe
  misc_feature (1)..(25): SEQ ID NO: 6803; WAN024BN7_at; Start 2; Stop 26
tggaatatgttgaggctgttaatca

SEQ ID NO: 86600 - DNA, 25 bp, Artificial
  probe
  misc_feature (1)..(25): SEQ ID NO: 6803; WAN024BN7_at; Start 102; Stop 126
tcatagcttgtacatatacaaacgt

SEQ ID NO: 86601 - DNA, 25 bp, Artificial
  probe
  misc_feature (1)..(25): SEQ ID NO: 6803; WAN024BN7_at; Start 54; Stop 78
ggatattggtcatatagagatagat

SEQ ID NO: 86602 - DNA, 25 bp, Artificial
  probe
  misc_feature (1)..(25): SEQ ID NO: 6803; WAN024BN7_at; Start 61; Stop 85
ggtcatatagagatagatttttggg

SEQ ID NO: 86603 - DNA, 25 bp, Artificial
  probe
  misc_feature (1)..(25): SEQ ID NO: 6803; WAN024BN7_at; Start 3; Stop 27
ggaatatgttgaggctgttaatcaa

SEQ ID NO: 86604 - DNA, 25 bp, Artificial
  probe
  misc_feature (1)..(25): SEQ ID NO: 6803; WAN024BN7_at; Start 90; Stop 114
caaaaatcatcctcatagcttgtac

SEQ ID NO: 86605 - DNA, 25 bp, Artificial
  probe
  misc_feature (1)..(25): SEQ ID NO: 6803; WAN024BN7_at; Start 49; Stop 73
gagaaggatattggtcatatagaga

SEQ ID NO: 86606 - DNA, 25 bp, Artificial
  probe
  misc_feature (1)..(25): SEQ ID NO: 6803; WAN024BN7_at; Start 13; Stop 37
gaggctgttaatcaatttatagaga

SEQ ID NO: 86607 - DNA, 25 bp, Artificial
  probe
  misc_feature (1)..(25): SEQ ID NO: 6803; WAN024BN7_at; Start 32; Stop 56
tagagagacattataaagagaagga

SEQ ID NO: 86608 - DNA, 25 bp, Artificial
  probe
  misc_feature (1)..(25): SEQ ID NO: 6803; WAN024BN7_at; Start 124; Stop 148
cgttctaaaaaaattgagtatgatt

SEQ ID NO: 86609 - DNA, 25 bp, Artificial
  probe
  misc_feature (1)..(25): SEQ ID NO: 6803; WAN024BN7_at; Start 87; Stop 111
taacaaaaatcatcctcatagcttg

SEQ ID NO: 86610 - DNA, 25 bp, Artificial
  probe
  misc_feature (1)..(25): SEQ ID NO: 6803; WAN024BN7_at; Start 178; Stop 202
gaagagccagattttttagagttta

SEQ ID NO: 86611 - DNA, 25 bp, Artificial
  probe
  misc_feature (1)..(25): SEQ ID NO: 6803; WAN024BN7_at; Start 169; Stop 193
gattattatgaagagccagattttt

SEQ ID NO: 86612 - DNA, 25 bp, Artificial
  probe
  misc_feature (1)..(25): SEQ ID NO: 6803; WAN024BN7_at; Start 175; Stop 199
tatgaagagccagattttttagagt

SEQ ID NO: 86613 - DNA, 25 bp, Artificial
  probe
  misc_feature (1)..(25): SEQ ID NO: 6928; WAN024BN8_at; Start 300; Stop 324
gaccgctttaccacatcatcagtta

SEQ ID NO: 86614 - DNA, 25 bp, Artificial
  probe
  misc_feature (1)..(25): SEQ ID NO: 6928; WAN024BN8_at; Start 366; Stop 390
tactattgactgtgaaagatttcgc

SEQ ID NO: 86615 - DNA, 25 bp, Artificial
  probe
  misc_feature (1)..(25): SEQ ID NO: 6928; WAN024BN8_at; Start 828; Stop 852
taaaaaatggcgagaagttcaaatc

SEQ ID NO: 86616 - DNA, 25 bp, Artificial
  probe
  misc_feature (1)..(25): SEQ ID NO: 6928; WAN024BN8_at; Start 1099; Stop 1123
tcaggtgattcaacaatttcagaag

SEQ ID NO: 86617 - DNA, 25 bp, Artificial
  probe
  misc_feature (1)..(25): SEQ ID NO: 6928; WAN024BN8_at; Start 933; Stop 957
gcatgctaagattactggtgtacca

SEQ ID NO: 86618 - DNA, 25 bp, Artificial
  probe
  misc_feature (1)..(25): SEQ ID NO: 6928; WAN024BN8_at; Start 1064; Stop 1088
caaccacgttgaatacatatagtca

SEQ ID NO: 86619 - DNA, 25 bp, Artificial
  probe
  misc_feature (1)..(25): SEQ ID NO: 6928; WAN024BN8_at; Start 1160; Stop 1184
tttacctaccaaattcctgccagag

SEQ ID NO: 86620 - DNA, 25 bp, Artificial
  probe
  misc_feature (1)..(25): SEQ ID NO: 6928; WAN024BN8_at; Start 708; Stop 732
gattcatgttcattcgacaattgag

SEQ ID NO: 86621 - DNA, 25 bp, Artificial
  probe
  misc_feature (1)..(25): SEQ ID NO: 6928; WAN024BN8_at; Start 639; Stop 663
tatgactggcttaagagttagtgag

SEQ ID NO: 86622 - DNA, 25 bp, Artificial
  probe
  misc_feature (1)..(25): SEQ ID NO: 6928; WAN024BN8_at; Start 601; Stop 625
gagggactccataattacatgacga

SEQ ID NO: 86623 - DNA, 25 bp, Artificial
  probe
  misc_feature (1)..(25): SEQ ID NO: 6928; WAN024BN8_at; Start 586; Stop 610
gatattagtgagtatgagggactcc

SEQ ID NO: 86624 - DNA, 25 bp, Artificial
  probe
  misc_feature (1)..(25): SEQ ID NO: 6928; WAN024BN8_at; Start 969; Stop 993
gaaaggattaagacatagtcatgca

SEQ ID NO: 86625 - DNA, 25 bp, Artificial
  probe
  misc_feature (1)..(25): SEQ ID NO: 6928; WAN024BN8_at; Start 1033; Stop 1057
gtttcatatcgattaggacacgctg

SEQ ID NO: 86626 - DNA, 25 bp, Artificial
  probe
  misc_feature (1)..(25): SEQ ID NO: 6928; WAN024BN8_at; Start 85; Stop 109
gatccaataactgggaaaagaattc

SEQ ID NO: 86627 - DNA, 25 bp, Artificial
  probe
  misc_feature (1)..(25): SEQ ID NO: 6928; WAN024BN8_at; Start 458; Stop 482
tgggctatgcagaaagattgggtta

SEQ ID NO: 86628 - DNA, 25 bp, Artificial
  probe
  misc_feature (1)..(25): SEQ ID NO: 6928; WAN024BN8_at; Start 916; Stop 940
tctaggataataaagaggcatgcta

SEQ ID NO: 86629 - DNA, 25 bp, Artificial
  probe
  misc_feature (1)..(25): SEQ ID NO: 6928; WAN024BN8_at; Start 770; Stop 794
caaagacagtagcagggaatcgtaa

SEQ ID NO: 86630 - DNA, 25 bp, Artificial
  probe
  misc_feature (1)..(25): SEQ ID NO: 6928; WAN024BN8_at; Start 740; Stop 764
aaaacggtgtatggtatgctaaaca

SEQ ID NO: 86631 - DNA, 25 bp, Artificial
  probe
  misc_feature (1)..(25): SEQ ID NO: 6928; WAN024BN8_at; Start 1048; Stop 1072
ggacacgctgataagtcaaccacgt

SEQ ID NO: 86632 - DNA, 25 bp, Artificial
  probe
  misc_feature (1)..(25): SEQ ID NO: 6928; WAN024BN8_at; Start 754; Stop 778
tatgctaaacaacaaacaaagacag

SEQ ID NO: 86633 - DNA, 25 bp, Artificial
  probe
  misc_feature (1)..(25): SEQ ID NO: 6928; WAN024BN8_at; Start 282; Stop 306
tcaatttgtaacttatcagaccgct

SEQ ID NO: 86634 - DNA, 25 bp, Artificial
  probe
  misc_feature (1)..(25): SEQ ID NO: 6928; WAN024BN8_at; Start 67; Stop 91
caaattgaattaggagttgatccaa

SEQ ID NO: 86635 - DNA, 25 bp, Artificial
  probe
  misc_feature (1)..(25): SEQ ID NO: 6928; WAN024BN8_at; Start 889; Stop 913
ggtgcccctttgtgtaagtctacaa

SEQ ID NO: 86636 - DNA, 25 bp, Artificial
  probe
  misc_feature (1)..(25): SEQ ID NO: 6928; WAN024BN8_at; Start 159; Stop 183
ggaagcatatgaagagatacttcgt

SEQ ID NO: 86637 - DNA, 25 bp, Artificial
  probe
  misc_feature (1)..(25): SEQ ID NO: 6928; WAN024BN8_at; Start 401; Stop 425
tagacaagtattctagtaactacgc

SEQ ID NO: 86638 - DNA, 25 bp, Artificial
  probe
  misc_feature (1)..(25): SEQ ID NO: 6928; WAN024BN8_at; Start 725; Stop 749
caattgagaaagacaaaaacggtgt

SEQ ID NO: 86639 - DNA, 25 bp, Artificial
  probe
  misc_feature (1)..(25): SEQ ID NO: 6928; WAN024BN8_at; Start 526; Stop 550
aagcaccctgatacaaaattttgga

SEQ ID NO: 86640 - DNA, 25 bp, Artificial
  probe
  misc_feature (1)..(25): SEQ ID NO: 6928; WAN024BN8_at; Start 416; Stop 440
gtaactacgctaaaaatatgtggtc

SEQ ID NO: 86641 - DNA, 25 bp, Artificial
  probe
  misc_feature (1)..(25): SEQ ID NO: 6928; WAN024BN8_at; Start 31; Stop 55
ggtgtatacaaagattcaaaaggaa

SEQ ID NO: 86642 - DNA, 25 bp, Artificial
  probe
  misc_feature (1)..(25): SEQ ID NO: 6928; WAN024BN8_at; Start 1117; Stop 1141
tcagaagagattacaaacagtttag

SEQ ID NO: 86643 - DNA, 25 bp, Artificial
  probe
  misc_feature (1)..(25): SEQ ID NO: 6928; WAN024BN8_at; Start 440; Stop 464
ctagatttaaagcatgtctgggcta

SEQ ID NO: 86644 - DNA, 25 bp, Artificial
  probe
  misc_feature (1)..(25): SEQ ID NO: 6928; WAN024BN8_at; Start 660; Stop 684
tgagggtattgcacttaaatgggaa

SEQ ID NO: 86645 - DNA, 25 bp, Artificial
  probe
  misc_feature (1)..(25): SEQ ID NO: 6928; WAN024BN8_at; Start 511; Stop 535
gataatcctagaggaaagcaccctg

SEQ ID NO: 86646 - DNA, 25 bp, Artificial
  probe
  misc_feature (1)..(25): SEQ ID NO: 6928; WAN024BN8_at; Start 873; Stop 897
tgtaatatcacgttttggtgcccct

SEQ ID NO: 86647 - DNA, 25 bp, Artificial
  probe
  misc_feature (1)..(25): SEQ ID NO: 7408; WAN024BN9_at; Start 43; Stop 67
tatgagatgttctctagtttaattt

SEQ ID NO: 86648 - DNA, 25 bp, Artificial
  probe
  misc_feature (1)..(25): SEQ ID NO: 7408; WAN024BN9_at; Start 18; Stop 42
tttttataaaatcaagatgcaaggc

SEQ ID NO: 86649 - DNA, 25 bp, Artificial
  probe
  misc_feature (1)..(25): SEQ ID NO: 7408; WAN024BN9_at; Start 57; Stop 81
tagtttaatttttcatacttcgaga

SEQ ID NO: 86650 - DNA, 25 bp, Artificial
  probe
  misc_feature (1)..(25): SEQ ID NO: 7408; WAN024BN9_at; Start 22; Stop 46
tataaaatcaagatgcaaggctatg

SEQ ID NO: 86651 - DNA, 25 bp, Artificial
  probe
  misc_feature (1)..(25): SEQ ID NO: 7408; WAN024BN9_at; Start 21; Stop 45
ttataaaatcaagatgcaaggctat

SEQ ID NO: 86652 - DNA, 25 bp, Artificial
  probe
  misc_feature (1)..(25): SEQ ID NO: 7408; WAN024BN9_at; Start 31; Stop 55
aagatgcaaggctatgagatgttct

SEQ ID NO: 86653 - DNA, 25 bp, Artificial
  probe
  misc_feature (1)..(25): SEQ ID NO: 7408; WAN024BN9_at; Start 40; Stop 64
ggctatgagatgttctctagtttaa

SEQ ID NO: 86654 - DNA, 25 bp, Artificial
  probe
  misc_feature (1)..(25): SEQ ID NO: 7408; WAN024BN9_at; Start 35; Stop 59
tgcaaggctatgagatgttctctag

SEQ ID NO: 86655 - DNA, 25 bp, Artificial
  probe
  misc_feature (1)..(25): SEQ ID NO: 7408; WAN024BN9_at; Start 46; Stop 70
gagatgttctctagtttaatttttc

SEQ ID NO: 86656 - DNA, 25 bp, Artificial
  probe
  misc_feature (1)..(25): SEQ ID NO: 7408; WAN024BN9_at; Start 38; Stop 62
aaggctatgagatgttctctagttt

SEQ ID NO: 86657 - DNA, 25 bp, Artificial
  probe
  misc_feature (1)..(25): SEQ ID NO: 7408; WAN024BN9_at; Start 36; Stop 60
gcaaggctatgagatgttctctagt

SEQ ID NO: 86658 - DNA, 25 bp, Artificial
  probe
  misc_feature (1)..(25): SEQ ID NO: 7408; WAN024BN9_at; Start 33; Stop 57
gatgcaaggctatgagatgttctct

SEQ ID NO: 86659 - DNA, 25 bp, Artificial
  probe
  misc_feature (1)..(25): SEQ ID NO: 7408; WAN024BN9_at; Start 48; Stop 72
gatgttctctagtttaatttttcat

SEQ ID NO: 86660 - DNA, 25 bp, Artificial
  probe
  misc_feature (1)..(25): SEQ ID NO: 7408; WAN024BN9_at; Start 27; Stop 51
aatcaagatgcaaggctatgagatg

SEQ ID NO: 86661 - DNA, 25 bp, Artificial
  probe
  misc_feature (1)..(25): SEQ ID NO: 7408; WAN024BN9_at; Start 55; Stop 79
tctagtttaatttttcatacttcga

SEQ ID NO: 86662 - DNA, 25 bp, Artificial
  probe
  misc_feature (1)..(25): SEQ ID NO: 7408; WAN024BN9_at; Start 56; Stop 80
ctagtttaatttttcatacttcgag

SEQ ID NO: 86663 - DNA, 25 bp, Artificial
  probe
  misc_feature (1)..(25): SEQ ID NO: 7408; WAN024BN9_at; Start 39; Stop 63
aggctatgagatgttctctagttta

SEQ ID NO: 86664 - DNA, 25 bp, Artificial
  probe
  misc_feature (1)..(25): SEQ ID NO: 7408; WAN024BN9_at; Start 19; Stop 43
ttttataaaatcaagatgcaaggct

SEQ ID NO: 86665 - DNA, 25 bp, Artificial
  probe
  misc_feature (1)..(25): SEQ ID NO: 7408; WAN024BN9_at; Start 24; Stop 48
taaaatcaagatgcaaggctatgag

SEQ ID NO: 86666 - DNA, 25 bp, Artificial
  probe
  misc_feature (1)..(25): SEQ ID NO: 7408; WAN024BN9_at; Start 54; Stop 78
ctctagtttaatttttcatacttcg

SEQ ID NO: 86667 - DNA, 25 bp, Artificial
  probe
  misc_feature (1)..(25): SEQ ID NO: 7408; WAN024BN9_at; Start 26; Stop 50
aaatcaagatgcaaggctatgagat

SEQ ID NO: 86668 - DNA, 25 bp, Artificial
  probe
  misc_feature (1)..(25): SEQ ID NO: 7408; WAN024BN9_at; Start 30; Stop 54
caagatgcaaggctatgagatgttc

SEQ ID NO: 86669 - DNA, 25 bp, Artificial
  probe
  misc_feature (1)..(25): SEQ ID NO: 7408; WAN024BN9_at; Start 28; Stop 52
atcaagatgcaaggctatgagatgt

SEQ ID NO: 86670 - DNA, 25 bp, Artificial
  probe
  misc_feature (1)..(25): SEQ ID NO: 7408; WAN024BN9_at; Start 47; Stop 71
agatgttctctagtttaatttttca

SEQ ID NO: 86671 - DNA, 25 bp, Artificial
  probe
  misc_feature (1)..(25): SEQ ID NO: 7408; WAN024BN9_at; Start 34; Stop 58
atgcaaggctatgagatgttctcta

SEQ ID NO: 86672 - DNA, 25 bp, Artificial
  probe
  misc_feature (1)..(25): SEQ ID NO: 7408; WAN024BN9_at; Start 23; Stop 47
ataaaatcaagatgcaaggctatga

SEQ ID NO: 86673 - DNA, 25 bp, Artificial
  probe
  misc_feature (1)..(25): SEQ ID NO: 7408; WAN024BN9_at; Start 32; Stop 56
agatgcaaggctatgagatgttctc

SEQ ID NO: 86674 - DNA, 25 bp, Artificial
  probe
  misc_feature (1)..(25): SEQ ID NO: 7408; WAN024BN9_at; Start 50; Stop 74
tgttctctagtttaatttttcatac

SEQ ID NO: 86675 - DNA, 25 bp, Artificial
  probe
  misc_feature (1)..(25): SEQ ID NO: 7408; WAN024BN9_at; Start 42; Stop 66
ctatgagatgttctctagtttaatt

SEQ ID NO: 86676 - DNA, 25 bp, Artificial
  probe
  misc_feature (1)..(25): SEQ ID NO: 7408; WAN024BN9_at; Start 41; Stop 65
gctatgagatgttctctagtttaat

SEQ ID NO: 86677 - DNA, 25 bp, Artificial
  probe
  misc_feature (1)..(25): SEQ ID NO: 7408; WAN024BN9_at; Start 37; Stop 61
caaggctatgagatgttctctagtt

SEQ ID NO: 86678 - DNA, 25 bp, Artificial
  probe
  misc_feature (1)..(25): SEQ ID NO: 7408; WAN024BN9_at; Start 20; Stop 44
tttataaaatcaagatgcaaggcta

SEQ ID NO: 86679 - DNA, 25 bp, Artificial
  probe
  misc_feature (1)..(25): SEQ ID NO: 7408; WAN024BN9_at; Start 25; Stop 49
aaaatcaagatgcaaggctatgaga

SEQ ID NO: 86680 - DNA, 25 bp, Artificial
  probe
  misc_feature (1)..(25): SEQ ID NO: 7408; WAN024BN9_at; Start 60; Stop 84
tttaatttttcatacttcgagaata

SEQ ID NO: 86681 - DNA, 25 bp, Artificial
  probe
  misc_feature (1)..(25): SEQ ID NO: 6705; WAN024BNA_at; Start 281; Stop 305
tatatatcatttctatcttacgaca

SEQ ID NO: 86682 - DNA, 25 bp, Artificial
  probe
  misc_feature (1)..(25): SEQ ID NO: 6705; WAN024BNA_at; Start 129; Stop 153
tgtacgacacgaggaatcctatccc

SEQ ID NO: 86683 - DNA, 25 bp, Artificial
  probe
  misc_feature (1)..(25): SEQ ID NO: 6705; WAN024BNA_at; Start 291; Stop 315
ttctatcttacgacatattggagta

SEQ ID NO: 86684 - DNA, 25 bp, Artificial
  probe
  misc_feature (1)..(25): SEQ ID NO: 6705; WAN024BNA_at; Start 471; Stop 495
agttctactcttctttatattacag

SEQ ID NO: 86685 - DNA, 25 bp, Artificial
  probe
  misc_feature (1)..(25): SEQ ID NO: 6705; WAN024BNA_at; Start 187; Stop 211
tattggaaaaatttaggagcagcat

SEQ ID NO: 86686 - DNA, 25 bp, Artificial
  probe
  misc_feature (1)..(25): SEQ ID NO: 6705; WAN024BNA_at; Start 456; Stop 480
tattgaaattatcccagttctactc

SEQ ID NO: 86687 - DNA, 25 bp, Artificial
  probe
  misc_feature (1)..(25): SEQ ID NO: 6705; WAN024BNA_at; Start 439; Stop 463
gccgttcttattagaattattgaaa

SEQ ID NO: 86688 - DNA, 25 bp, Artificial
  probe
  misc_feature (1)..(25): SEQ ID NO: 6705; WAN024BNA_at; Start 335; Stop 359
taatagcaacaacatttctaattcc

SEQ ID NO: 86689 - DNA, 25 bp, Artificial
  probe
  misc_feature (1)..(25): SEQ ID NO: 6705; WAN024BNA_at; Start 91; Stop 115
tcaggtgaaagtgccctaatagcaa

SEQ ID NO: 86690 - DNA, 25 bp, Artificial
  probe
  misc_feature (1)..(25): SEQ ID NO: 6705; WAN024BNA_at; Start 324; Stop 348
catacttcatttaatagcaacaaca

SEQ ID NO: 86691 - DNA, 25 bp, Artificial
  probe
  misc_feature (1)..(25): SEQ ID NO: 6705; WAN024BNA_at; Start 138; Stop 162
cgaggaatcctatccctatagagac

SEQ ID NO: 86692 - DNA, 25 bp, Artificial
  probe
  misc_feature (1)..(25): SEQ ID NO: 6705; WAN024BNA_at; Start 533; Stop 557
tacttccctcaataacaaaatatgc

SEQ ID NO: 86693 - DNA, 25 bp, Artificial
  probe
  misc_feature (1)..(25): SEQ ID NO: 6705; WAN024BNA_at; Start 246; Stop 270
cagtttgttcttcctaccctacata

SEQ ID NO: 86694 - DNA, 25 bp, Artificial
  probe
  misc_feature (1)..(25): SEQ ID NO: 6705; WAN024BNA_at; Start 203; Stop 227
gagcagcattaatatctaatttacc

SEQ ID NO: 86695 - DNA, 25 bp, Artificial
  probe
  misc_feature (1)..(25): SEQ ID NO: 6705; WAN024BNA_at; Start 260; Stop 284
taccctacataccattacctatata

SEQ ID NO: 86696 - DNA, 25 bp, Artificial
  probe
  misc_feature (1)..(25): SEQ ID NO: 6705; WAN024BNA_at; Start 152; Stop 176
cctatagagacttcgcaaacagttt

SEQ ID NO: 86697 - DNA, 25 bp, Artificial
  probe
  misc_feature (1)..(25): SEQ ID NO: 6705; WAN024BNA_at; Start 301; Stop 325
cgacatattggagtaatatatatca

SEQ ID NO: 86698 - DNA, 25 bp, Artificial
  probe
  misc_feature (1)..(25): SEQ ID NO: 6705; WAN024BNA_at; Start 112; Stop 136
gcaactctaataaaaattgtacgac

SEQ ID NO: 86699 - DNA, 25 bp, Artificial
  probe
  misc_feature (1)..(25): SEQ ID NO: 6705; WAN024BNA_at; Start 539; Stop 563
cctcaataacaaaatatgctaatgc

SEQ ID NO: 86700 - DNA, 25 bp, Artificial
  probe
  misc_feature (1)..(25): SEQ ID NO: 6705; WAN024BNA_at; Start 347; Stop 371
catttctaattcctttaatcggtag

SEQ ID NO: 86701 - DNA, 25 bp, Artificial
  probe
  misc_feature (1)..(25): SEQ ID NO: 6705; WAN024BNA_at; Start 493; Stop 517
cagaatcaattactagtttggataa

SEQ ID NO: 86702 - DNA, 25 bp, Artificial
  probe
  misc_feature (1)..(25): SEQ ID NO: 6705; WAN024BNA_at; Start 521; Stop 545
taatgatttttatacttccctcaat

SEQ ID NO: 86703 - DNA, 25 bp, Artificial
  probe
  misc_feature (1)..(25): SEQ ID NO: 6705; WAN024BNA_at; Start 122; Stop 146
taaaaattgtacgacacgaggaatc

SEQ ID NO: 86704 - DNA, 25 bp, Artificial
  probe
  misc_feature (1)..(25): SEQ ID NO: 6705; WAN024BNA_at; Start 59; Stop 83
tagcgtcagtagtaacagttattgc

SEQ ID NO: 86705 - DNA, 25 bp, Artificial
  probe
  misc_feature (1)..(25): SEQ ID NO: 6705; WAN024BNA_at; Start 97; Stop 121
gaaagtgccctaatagcaactctaa

SEQ ID NO: 86706 - DNA, 25 bp, Artificial
  probe
  misc_feature (1)..(25): SEQ ID NO: 6705; WAN024BNA_at; Start 39; Stop 63
aatgttaaatctactctatgtagcg

SEQ ID NO: 86707 - DNA, 25 bp, Artificial
  probe
  misc_feature (1)..(25): SEQ ID NO: 6705; WAN024BNA_at; Start 402; Stop 426
caattcaatcatgttagcctataaa

SEQ ID NO: 86708 - DNA, 25 bp, Artificial
  probe
  misc_feature (1)..(25): SEQ ID NO: 6705; WAN024BNA_at; Start 71; Stop 95
taacagttattgctatcggatcagg

SEQ ID NO: 86709 - DNA, 25 bp, Artificial
  probe
  misc_feature (1)..(25): SEQ ID NO: 6705; WAN024BNA_at; Start 390; Stop 414
aaattctctacacaattcaatcatg

SEQ ID NO: 86710 - DNA, 25 bp, Artificial
  probe
  misc_feature (1)..(25): SEQ ID NO: 6705; WAN024BNA_at; Start 51; Stop 75
actctatgtagcgtcagtagtaaca

SEQ ID NO: 86711 - DNA, 25 bp, Artificial
  probe
  misc_feature (1)..(25): SEQ ID NO: 6705; WAN024BNA_at; Start 573; Stop 597
taactttatattctcgaagtatgaa

SEQ ID NO: 86712 - DNA, 25 bp, Artificial
  probe
  misc_feature (1)..(25): SEQ ID NO: 6705; WAN024BNA_at; Start 239; Stop 263
tattattcagtttgttcttcctacc

SEQ ID NO: 86713 - DNA, 25 bp, Artificial
  probe
  misc_feature (1)..(25): SEQ ID NO: 6705; WAN024BNA_at; Start 362; Stop 386
taatcggtagatataataacacttt

SEQ ID NO: 86714 - DNA, 25 bp, Artificial
  probe
  misc_feature (1)..(25): SEQ ID NO: 6705; WAN024BNA_at; Start 82; Stop 106
gctatcggatcaggtgaaagtgccc

SEQ ID NO: 86715 - DNA, 25 bp, Artificial
  probe
  misc_feature (1)..(25): SEQ ID NO: 6467; WAN024BNB_at; Start 44; Stop 68
acgataatcttactaaatcagagaa

SEQ ID NO: 86716 - DNA, 25 bp, Artificial
  probe
  misc_feature (1)..(25): SEQ ID NO: 6467; WAN024BNB_at; Start 37; Stop 61
tatgaatacgataatcttactaaat

SEQ ID NO: 86717 - DNA, 25 bp, Artificial
  probe
  misc_feature (1)..(25): SEQ ID NO: 6467; WAN024BNB_at; Start 40; Stop 64
gaatacgataatcttactaaatcag

SEQ ID NO: 86718 - DNA, 25 bp, Artificial
  probe
  misc_feature (1)..(25): SEQ ID NO: 6467; WAN024BNB_at; Start 30; Stop 54
aattcattatgaatacgataatctt

SEQ ID NO: 86719 - DNA, 25 bp, Artificial
  probe
  misc_feature (1)..(25): SEQ ID NO: 6467; WAN024BNB_at; Start 49; Stop 73
aatcttactaaatcagagaaaaaat

SEQ ID NO: 86720 - DNA, 25 bp, Artificial
  probe
  misc_feature (1)..(25): SEQ ID NO: 6467; WAN024BNB_at; Start 24; Stop 48
agaaagaattcattatgaatacgat

SEQ ID NO: 86721 - DNA, 25 bp, Artificial
  probe
  misc_feature (1)..(25): SEQ ID NO: 6467; WAN024BNB_at; Start 39; Stop 63
tgaatacgataatcttactaaatca

SEQ ID NO: 86722 - DNA, 25 bp, Artificial
  probe
  misc_feature (1)..(25): SEQ ID NO: 6467; WAN024BNB_at; Start 23; Stop 47
aagaaagaattcattatgaatacga

SEQ ID NO: 86723 - DNA, 25 bp, Artificial
  probe
  misc_feature (1)..(25): SEQ ID NO: 6467; WAN024BNB_at; Start 38; Stop 62
atgaatacgataatcttactaaatc

SEQ ID NO: 86724 - DNA, 25 bp, Artificial
  probe
  misc_feature (1)..(25): SEQ ID NO: 6467; WAN024BNB_at; Start 21; Stop 45
taaagaaagaattcattatgaatac

SEQ ID NO: 86725 - DNA, 25 bp, Artificial
  probe
  misc_feature (1)..(25): SEQ ID NO: 6467; WAN024BNB_at; Start 48; Stop 72
taatcttactaaatcagagaaaaaa

SEQ ID NO: 86726 - DNA, 25 bp, Artificial
  probe
  misc_feature (1)..(25): SEQ ID NO: 6467; WAN024BNB_at; Start 52; Stop 76
cttactaaatcagagaaaaaattgc

SEQ ID NO: 86727 - DNA, 25 bp, Artificial
  probe
  misc_feature (1)..(25): SEQ ID NO: 6467; WAN024BNB_at; Start 22; Stop 46
aaagaaagaattcattatgaatacg

SEQ ID NO: 86728 - DNA, 25 bp, Artificial
  probe
  misc_feature (1)..(25): SEQ ID NO: 6467; WAN024BNB_at; Start 42; Stop 66
atacgataatcttactaaatcagag

SEQ ID NO: 86729 - DNA, 25 bp, Artificial
  probe
  misc_feature (1)..(25): SEQ ID NO: 6467; WAN024BNB_at; Start 32; Stop 56
ttcattatgaatacgataatcttac

SEQ ID NO: 86730 - DNA, 25 bp, Artificial
  probe
  misc_feature (1)..(25): SEQ ID NO: 6467; WAN024BNB_at; Start 47; Stop 71
ataatcttactaaatcagagaaaaa

SEQ ID NO: 86731 - DNA, 25 bp, Artificial
  probe
  misc_feature (1)..(25): SEQ ID NO: 6467; WAN024BNB_at; Start 36; Stop 60
ttatgaatacgataatcttactaaa

SEQ ID NO: 86732 - DNA, 25 bp, Artificial
  probe
  misc_feature (1)..(25): SEQ ID NO: 6467; WAN024BNB_at; Start 35; Stop 59
attatgaatacgataatcttactaa

SEQ ID NO: 86733 - DNA, 25 bp, Artificial
  probe
  misc_feature (1)..(25): SEQ ID NO: 6467; WAN024BNB_at; Start 33; Stop 57
tcattatgaatacgataatcttact

SEQ ID NO: 86734 - DNA, 25 bp, Artificial
  probe
  misc_feature (1)..(25): SEQ ID NO: 6467; WAN024BNB_at; Start 43; Stop 67
tacgataatcttactaaatcagaga

SEQ ID NO: 86735 - DNA, 25 bp, Artificial
  probe
  misc_feature (1)..(25): SEQ ID NO: 6467; WAN024BNB_at; Start 26; Stop 50
aaagaattcattatgaatacgataa

SEQ ID NO: 86736 - DNA, 25 bp, Artificial
  probe
  misc_feature (1)..(25): SEQ ID NO: 6467; WAN024BNB_at; Start 1; Stop 25
atgaataaatccaaaaaatataaag

SEQ ID NO: 86737 - DNA, 25 bp, Artificial
  probe
  misc_feature (1)..(25): SEQ ID NO: 6467; WAN024BNB_at; Start 46; Stop 70
gataatcttactaaatcagagaaaa

SEQ ID NO: 86738 - DNA, 25 bp, Artificial
  probe
  misc_feature (1)..(25): SEQ ID NO: 6467; WAN024BNB_at; Start 25; Stop 49
gaaagaattcattatgaatacgata

SEQ ID NO: 86739 - DNA, 25 bp, Artificial
  probe
  misc_feature (1)..(25): SEQ ID NO: 6467; WAN024BNB_at; Start 31; Stop 55
attcattatgaatacgataatctta

SEQ ID NO: 86740 - DNA, 25 bp, Artificial
  probe
  misc_feature (1)..(25): SEQ ID NO: 6467; WAN024BNB_at; Start 54; Stop 78
tactaaatcagagaaaaaattgctg

SEQ ID NO: 86741 - DNA, 25 bp, Artificial
  probe
  misc_feature (1)..(25): SEQ ID NO: 6467; WAN024BNB_at; Start 28; Stop 52
agaattcattatgaatacgataatc

SEQ ID NO: 86742 - DNA, 25 bp, Artificial
  probe
  misc_feature (1)..(25): SEQ ID NO: 6467; WAN024BNB_at; Start 45; Stop 69
cgataatcttactaaatcagagaaa

SEQ ID NO: 86743 - DNA, 25 bp, Artificial
  probe
  misc_feature (1)..(25): SEQ ID NO: 6467; WAN024BNB_at; Start 34; Stop 58
cattatgaatacgataatcttacta

SEQ ID NO: 86744 - DNA, 25 bp, Artificial
  probe
  misc_feature (1)..(25): SEQ ID NO: 6467; WAN024BNB_at; Start 29; Stop 53
gaattcattatgaatacgataatct

SEQ ID NO: 86745 - DNA, 25 bp, Artificial
  probe
  misc_feature (1)..(25): SEQ ID NO: 6467; WAN024BNB_at; Start 41; Stop 65
aatacgataatcttactaaatcaga

SEQ ID NO: 86746 - DNA, 25 bp, Artificial
  probe
  misc_feature (1)..(25): SEQ ID NO: 6467; WAN024BNB_at; Start 53; Stop 77
ttactaaatcagagaaaaaattgct

SEQ ID NO: 86747 - DNA, 25 bp, Artificial
  probe
  misc_feature (1)..(25): SEQ ID NO: 6467; WAN024BNB_at; Start 51; Stop 75
tcttactaaatcagagaaaaaattg

SEQ ID NO: 86748 - DNA, 25 bp, Artificial
  probe
  misc_feature (1)..(25): SEQ ID NO: 6467; WAN024BNB_at; Start 55; Stop 79
actaaatcagagaaaaaattgctga

SEQ ID NO: 86749 - DNA, 25 bp, Artificial
  probe
  misc_feature (1)..(25): SEQ ID NO: 7378; WAN024BNC_at; Start 32; Stop 56
caaagtttgagctgaggagaaatca

SEQ ID NO: 86750 - DNA, 25 bp, Artificial
  probe
  misc_feature (1)..(25): SEQ ID NO: 7378; WAN024BNC_at; Start 36; Stop 60
gtttgagctgaggagaaatcaagta

SEQ ID NO: 86751 - DNA, 25 bp, Artificial
  probe
  misc_feature (1)..(25): SEQ ID NO: 7378; WAN024BNC_at; Start 48; Stop 72
gagaaatcaagtaagttttgacaca

SEQ ID NO: 86752 - DNA, 25 bp, Artificial
  probe
  misc_feature (1)..(25): SEQ ID NO: 7378; WAN024BNC_at; Start 21; Stop 45
taaagatgagacaaagtttgagctg

SEQ ID NO: 86753 - DNA, 25 bp, Artificial
  probe
  misc_feature (1)..(25): SEQ ID NO: 7378; WAN024BNC_at; Start 12; Stop 36
taataaaaataaagatgagacaaag

SEQ ID NO: 86754 - DNA, 25 bp, Artificial
  probe
  misc_feature (1)..(25): SEQ ID NO: 7378; WAN024BNC_at; Start 65; Stop 89
ttgacacaatagaacgcatattatc

SEQ ID NO: 86755 - DNA, 25 bp, Artificial
  probe
  misc_feature (1)..(25): SEQ ID NO: 7378; WAN024BNC_at; Start 29; Stop 53
agacaaagtttgagctgaggagaaa

SEQ ID NO: 86756 - DNA, 25 bp, Artificial
  probe
  misc_feature (1)..(25): SEQ ID NO: 7378; WAN024BNC_at; Start 42; Stop 66
gctgaggagaaatcaagtaagtttt

SEQ ID NO: 86757 - DNA, 25 bp, Artificial
  probe
  misc_feature (1)..(25): SEQ ID NO: 7378; WAN024BNC_at; Start 39; Stop 63
tgagctgaggagaaatcaagtaagt

SEQ ID NO: 86758 - DNA, 25 bp, Artificial
  probe
  misc_feature (1)..(25): SEQ ID NO: 7378; WAN024BNC_at; Start 71; Stop 95
caatagaacgcatattatcaggtat

SEQ ID NO: 86759 - DNA, 25 bp, Artificial
  probe
  misc_feature (1)..(25): SEQ ID NO: 7378; WAN024BNC_at; Start 78; Stop 102
acgcatattatcaggtataaaaact

SEQ ID NO: 86760 - DNA, 25 bp, Artificial
  probe
  misc_feature (1)..(25): SEQ ID NO: 7378; WAN024BNC_at; Start 28; Stop 52
gagacaaagtttgagctgaggagaa

SEQ ID NO: 86761 - DNA, 25 bp, Artificial
  probe
  misc_feature (1)..(25): SEQ ID NO: 7378; WAN024BNC_at; Start 60; Stop 84
aagttttgacacaatagaacgcata

SEQ ID NO: 86762 - DNA, 25 bp, Artificial
  probe
  misc_feature (1)..(25): SEQ ID NO: 7378; WAN024BNC_at; Start 63; Stop 87
ttttgacacaatagaacgcatatta

SEQ ID NO: 86763 - DNA, 25 bp, Artificial
  probe
  misc_feature (1)..(25): SEQ ID NO: 7378; WAN024BNC_at; Start 30; Stop 54
gacaaagtttgagctgaggagaaat

SEQ ID NO: 86764 - DNA, 25 bp, Artificial
  probe
  misc_feature (1)..(25): SEQ ID NO: 7378; WAN024BNC_at; Start 59; Stop 83
taagttttgacacaatagaacgcat

SEQ ID NO: 86765 - DNA, 25 bp, Artificial
  probe
  misc_feature (1)..(25): SEQ ID NO: 7378; WAN024BNC_at; Start 25; Stop 49
gatgagacaaagtttgagctgagga

SEQ ID NO: 86766 - DNA, 25 bp, Artificial
  probe
  misc_feature (1)..(25): SEQ ID NO: 7378; WAN024BNC_at; Start 67; Stop 91
gacacaatagaacgcatattatcag

SEQ ID NO: 86767 - DNA, 25 bp, Artificial
  probe
  misc_feature (1)..(25): SEQ ID NO: 7378; WAN024BNC_at; Start 74; Stop 98
tagaacgcatattatcaggtataaa

SEQ ID NO: 86768 - DNA, 25 bp, Artificial
  probe
  misc_feature (1)..(25): SEQ ID NO: 7378; WAN024BNC_at; Start 31; Stop 55
acaaagtttgagctgaggagaaatc

SEQ ID NO: 86769 - DNA, 25 bp, Artificial
  probe
  misc_feature (1)..(25): SEQ ID NO: 7378; WAN024BNC_at; Start 47; Stop 71
ggagaaatcaagtaagttttgacac

SEQ ID NO: 86770 - DNA, 25 bp, Artificial
  probe
  misc_feature (1)..(25): SEQ ID NO: 7378; WAN024BNC_at; Start 37; Stop 61
tttgagctgaggagaaatcaagtaa

SEQ ID NO: 86771 - DNA, 25 bp, Artificial
  probe
  misc_feature (1)..(25): SEQ ID NO: 7378; WAN024BNC_at; Start 55; Stop 79
caagtaagttttgacacaatagaac

SEQ ID NO: 86772 - DNA, 25 bp, Artificial
  probe
  misc_feature (1)..(25): SEQ ID NO: 7378; WAN024BNC_at; Start 70; Stop 94
acaatagaacgcatattatcaggta

SEQ ID NO: 86773 - DNA, 25 bp, Artificial
  probe
  misc_feature (1)..(25): SEQ ID NO: 7378; WAN024BNC_at; Start 45; Stop 69
gaggagaaatcaagtaagttttgac

SEQ ID NO: 86774 - DNA, 25 bp, Artificial
  probe
  misc_feature (1)..(25): SEQ ID NO: 7378; WAN024BNC_at; Start 76; Stop 100
gaacgcatattatcaggtataaaaa

SEQ ID NO: 86775 - DNA, 25 bp, Artificial
  probe
  misc_feature (1)..(25): SEQ ID NO: 7378; WAN024BNC_at; Start 40; Stop 64
gagctgaggagaaatcaagtaagtt

SEQ ID NO: 86776 - DNA, 25 bp, Artificial
  probe
  misc_feature (1)..(25): SEQ ID NO: 7378; WAN024BNC_at; Start 62; Stop 86
gttttgacacaatagaacgcatatt

SEQ ID NO: 86777 - DNA, 25 bp, Artificial
  probe
  misc_feature (1)..(25): SEQ ID NO: 7378; WAN024BNC_at; Start 50; Stop 74
gaaatcaagtaagttttgacacaat

SEQ ID NO: 86778 - DNA, 25 bp, Artificial
  probe
  misc_feature (1)..(25): SEQ ID NO: 7378; WAN024BNC_at; Start 58; Stop 82
gtaagttttgacacaatagaacgca

SEQ ID NO: 86779 - DNA, 25 bp, Artificial
  probe
  misc_feature (1)..(25): SEQ ID NO: 7378; WAN024BNC_at; Start 57; Stop 81
agtaagttttgacacaatagaacgc

SEQ ID NO: 86780 - DNA, 25 bp, Artificial
  probe
  misc_feature (1)..(25): SEQ ID NO: 7378; WAN024BNC_at; Start 19; Stop 43
aataaagatgagacaaagtttgagc

SEQ ID NO: 86781 - DNA, 25 bp, Artificial
  probe
  misc_feature (1)..(25): SEQ ID NO: 7378; WAN024BNC_at; Start 34; Stop 58
aagtttgagctgaggagaaatcaag

SEQ ID NO: 86782 - DNA, 25 bp, Artificial
  probe
  misc_feature (1)..(25): SEQ ID NO: 7378; WAN024BNC_at; Start 23; Stop 47
aagatgagacaaagtttgagctgag

SEQ ID NO: 86783 - DNA, 25 bp, Artificial
  probe
  misc_feature (1)..(25): SEQ ID NO: 6994; WAN024BND_at; Start 13; Stop 37
tacttgtgggaggtaaaaatctcta

SEQ ID NO: 86784 - DNA, 25 bp, Artificial
  probe
  misc_feature (1)..(25): SEQ ID NO: 6994; WAN024BND_at; Start 32; Stop 56
tctctaattaccgccaaaaccacaa

SEQ ID NO: 86785 - DNA, 25 bp, Artificial
  probe
  misc_feature (1)..(25): SEQ ID NO: 6994; WAN024BND_at; Start 15; Stop 39
cttgtgggaggtaaaaatctctaat

SEQ ID NO: 86786 - DNA, 25 bp, Artificial
  probe
  misc_feature (1)..(25): SEQ ID NO: 6994; WAN024BND_at; Start 11; Stop 35
catacttgtgggaggtaaaaatctc

SEQ ID NO: 86787 - DNA, 25 bp, Artificial
  probe
  misc_feature (1)..(25): SEQ ID NO: 6994; WAN024BND_at; Start 17; Stop 41
tgtgggaggtaaaaatctctaatta

SEQ ID NO: 86788 - DNA, 25 bp, Artificial
  probe
  misc_feature (1)..(25): SEQ ID NO: 6994; WAN024BND_at; Start 12; Stop 36
atacttgtgggaggtaaaaatctct

SEQ ID NO: 86789 - DNA, 25 bp, Artificial
  probe
  misc_feature (1)..(25): SEQ ID NO: 6994; WAN024BND_at; Start 1; Stop 25
atgtgtaaagcatacttgtgggagg

SEQ ID NO: 86790 - DNA, 25 bp, Artificial
  probe
  misc_feature (1)..(25): SEQ ID NO: 6994; WAN024BND_at; Start 2; Stop 26
tgtgtaaagcatacttgtgggaggt

SEQ ID NO: 86791 - DNA, 25 bp, Artificial
  probe
  misc_feature (1)..(25): SEQ ID NO: 6994; WAN024BND_at; Start 8; Stop 32
aagcatacttgtgggaggtaaaaat

SEQ ID NO: 86792 - DNA, 25 bp, Artificial
  probe
  misc_feature (1)..(25): SEQ ID NO: 6994; WAN024BND_at; Start 31; Stop 55
atctctaattaccgccaaaaccaca

SEQ ID NO: 86793 - DNA, 25 bp, Artificial
  probe
  misc_feature (1)..(25): SEQ ID NO: 6994; WAN024BND_at; Start 9; Stop 33
agcatacttgtgggaggtaaaaatc

SEQ ID NO: 86794 - DNA, 25 bp, Artificial
  probe
  misc_feature (1)..(25): SEQ ID NO: 6994; WAN024BND_at; Start 6; Stop 30
taaagcatacttgtgggaggtaaaa

SEQ ID NO: 86795 - DNA, 25 bp, Artificial
  probe
  misc_feature (1)..(25): SEQ ID NO: 6994; WAN024BND_at; Start 4; Stop 28
tgtaaagcatacttgtgggaggtaa

SEQ ID NO: 86796 - DNA, 25 bp, Artificial
  probe
  misc_feature (1)..(25): SEQ ID NO: 6994; WAN024BND_at; Start 10; Stop 34
gcatacttgtgggaggtaaaaatct

SEQ ID NO: 86797 - DNA, 25 bp, Artificial
  probe
  misc_feature (1)..(25): SEQ ID NO: 6994; WAN024BND_at; Start 3; Stop 27
gtgtaaagcatacttgtgggaggta

SEQ ID NO: 86798 - DNA, 25 bp, Artificial
  probe
  misc_feature (1)..(25): SEQ ID NO: 6994; WAN024BND_at; Start 5; Stop 29
gtaaagcatacttgtgggaggtaaa

SEQ ID NO: 86799 - DNA, 25 bp, Artificial
  probe
  misc_feature (1)..(25): SEQ ID NO: 7262; WAN024BNE_at; Start 44; Stop 68
ttatccgtatcatgcaacatacgga

SEQ ID NO: 86800 - DNA, 25 bp, Artificial
  probe
  misc_feature (1)..(25): SEQ ID NO: 7262; WAN024BNE_at; Start 75; Stop 99
ccaaagaatatttttatattatagc

SEQ ID NO: 86801 - DNA, 25 bp, Artificial
  probe
  misc_feature (1)..(25): SEQ ID NO: 7262; WAN024BNE_at; Start 59; Stop 83
aacatacggataacctccaaagaat

SEQ ID NO: 86802 - DNA, 25 bp, Artificial
  probe
  misc_feature (1)..(25): SEQ ID NO: 7262; WAN024BNE_at; Start 61; Stop 85
catacggataacctccaaagaatat

SEQ ID NO: 86803 - DNA, 25 bp, Artificial
  probe
  misc_feature (1)..(25): SEQ ID NO: 7262; WAN024BNE_at; Start 45; Stop 69
tatccgtatcatgcaacatacggat

SEQ ID NO: 86804 - DNA, 25 bp, Artificial
  probe
  misc_feature (1)..(25): SEQ ID NO: 7262; WAN024BNE_at; Start 10; Stop 34
gaatcacacattctattttactatt

SEQ ID NO: 86805 - DNA, 25 bp, Artificial
  probe
  misc_feature (1)..(25): SEQ ID NO: 7262; WAN024BNE_at; Start 50; Stop 74
gtatcatgcaacatacggataacct

SEQ ID NO: 86806 - DNA, 25 bp, Artificial
  probe
  misc_feature (1)..(25): SEQ ID NO: 7262; WAN024BNE_at; Start 57; Stop 81
gcaacatacggataacctccaaaga

SEQ ID NO: 86807 - DNA, 25 bp, Artificial
  probe
  misc_feature (1)..(25): SEQ ID NO: 7262; WAN024BNE_at; Start 26; Stop 50
tttactattatatgaaaattatccg

SEQ ID NO: 86808 - DNA, 25 bp, Artificial
  probe
  misc_feature (1)..(25): SEQ ID NO: 7262; WAN024BNE_at; Start 48; Stop 72
ccgtatcatgcaacatacggataac

SEQ ID NO: 86809 - DNA, 25 bp, Artificial
  probe
  misc_feature (1)..(25): SEQ ID NO: 7262; WAN024BNE_at; Start 3; Stop 27
gattattgaatcacacattctattt

SEQ ID NO: 86810 - DNA, 25 bp, Artificial
  probe
  misc_feature (1)..(25): SEQ ID NO: 7262; WAN024BNE_at; Start 80; Stop 104
gaatatttttatattatagcaaagc

SEQ ID NO: 86811 - DNA, 25 bp, Artificial
  probe
  misc_feature (1)..(25): SEQ ID NO: 7262; WAN024BNE_at; Start 43; Stop 67
attatccgtatcatgcaacatacgg

SEQ ID NO: 86812 - DNA, 25 bp, Artificial
  probe
  misc_feature (1)..(25): SEQ ID NO: 7262; WAN024BNE_at; Start 55; Stop 79
atgcaacatacggataacctccaaa

SEQ ID NO: 86813 - DNA, 25 bp, Artificial
  probe
  misc_feature (1)..(25): SEQ ID NO: 7262; WAN024BNE_at; Start 40; Stop 64
aaaattatccgtatcatgcaacata

SEQ ID NO: 86814 - DNA, 25 bp, Artificial
  probe
  misc_feature (1)..(25): SEQ ID NO: 7262; WAN024BNE_at; Start 36; Stop 60
tatgaaaattatccgtatcatgcaa

SEQ ID NO: 86815 - DNA, 25 bp, Artificial
  probe
  misc_feature (1)..(25): SEQ ID NO: 7262; WAN024BNE_at; Start 1; Stop 25
gtgattattgaatcacacattctat

SEQ ID NO: 86816 - DNA, 25 bp, Artificial
  probe
  misc_feature (1)..(25): SEQ ID NO: 7262; WAN024BNE_at; Start 86; Stop 110
ttttatattatagcaaagctttaaa

SEQ ID NO: 86817 - DNA, 25 bp, Artificial
  probe
  misc_feature (1)..(25): SEQ ID NO: 7262; WAN024BNE_at; Start 42; Stop 66
aattatccgtatcatgcaacatacg

SEQ ID NO: 86818 - DNA, 25 bp, Artificial
  probe
  misc_feature (1)..(25): SEQ ID NO: 7262; WAN024BNE_at; Start 38; Stop 62
tgaaaattatccgtatcatgcaaca

SEQ ID NO: 86819 - DNA, 25 bp, Artificial
  probe
  misc_feature (1)..(25): SEQ ID NO: 7262; WAN024BNE_at; Start 56; Stop 80
tgcaacatacggataacctccaaag

SEQ ID NO: 86820 - DNA, 25 bp, Artificial
  probe
  misc_feature (1)..(25): SEQ ID NO: 7262; WAN024BNE_at; Start 53; Stop 77
tcatgcaacatacggataacctcca

SEQ ID NO: 86821 - DNA, 25 bp, Artificial
  probe
  misc_feature (1)..(25): SEQ ID NO: 7262; WAN024BNE_at; Start 30; Stop 54
ctattatatgaaaattatccgtatc

SEQ ID NO: 86822 - DNA, 25 bp, Artificial
  probe
  misc_feature (1)..(25): SEQ ID NO: 7262; WAN024BNE_at; Start 52; Stop 76
atcatgcaacatacggataacctcc

SEQ ID NO: 86823 - DNA, 25 bp, Artificial
  probe
  misc_feature (1)..(25): SEQ ID NO: 7262; WAN024BNE_at; Start 49; Stop 73
cgtatcatgcaacatacggataacc

SEQ ID NO: 86824 - DNA, 25 bp, Artificial
  probe
  misc_feature (1)..(25): SEQ ID NO: 7262; WAN024BNE_at; Start 34; Stop 58
tatatgaaaattatccgtatcatgc

SEQ ID NO: 86825 - DNA, 25 bp, Artificial
  probe
  misc_feature (1)..(25): SEQ ID NO: 7262; WAN024BNE_at; Start 62; Stop 86
atacggataacctccaaagaatatt

SEQ ID NO: 86826 - DNA, 25 bp, Artificial
  probe
  misc_feature (1)..(25): SEQ ID NO: 7262; WAN024BNE_at; Start 39; Stop 63
gaaaattatccgtatcatgcaacat

SEQ ID NO: 86827 - DNA, 25 bp, Artificial
  probe
  misc_feature (1)..(25): SEQ ID NO: 7262; WAN024BNE_at; Start 51; Stop 75
tatcatgcaacatacggataacctc

SEQ ID NO: 86828 - DNA, 25 bp, Artificial
  probe
  misc_feature (1)..(25): SEQ ID NO: 7262; WAN024BNE_at; Start 58; Stop 82
caacatacggataacctccaaagaa

SEQ ID NO: 86829 - DNA, 25 bp, Artificial
  probe
  misc_feature (1)..(25): SEQ ID NO: 7262; WAN024BNE_at; Start 60; Stop 84
acatacggataacctccaaagaata

SEQ ID NO: 86830 - DNA, 25 bp, Artificial
  probe
  misc_feature (1)..(25): SEQ ID NO: 7262; WAN024BNE_at; Start 41; Stop 65
aaattatccgtatcatgcaacatac

SEQ ID NO: 86831 - DNA, 25 bp, Artificial
  probe
  misc_feature (1)..(25): SEQ ID NO: 7262; WAN024BNE_at; Start 6; Stop 30
tattgaatcacacattctattttac

SEQ ID NO: 86832 - DNA, 25 bp, Artificial
  probe
  misc_feature (1)..(25): SEQ ID NO: 7262; WAN024BNE_at; Start 47; Stop 71
tccgtatcatgcaacatacggataa

SEQ ID NO: 86833 - DNA, 25 bp, Artificial
  probe
  misc_feature (1)..(25): SEQ ID NO: 7434; WAN024BNF_at; Start 1; Stop 25
ttgaattatcaatatcttcaagggg

SEQ ID NO: 86834 - DNA, 25 bp, Artificial
  probe
  misc_feature (1)..(25): SEQ ID NO: 7434; WAN024BNF_at; Start 10; Stop 34
caatatcttcaaggggttttgttgt

SEQ ID NO: 86835 - DNA, 25 bp, Artificial
  probe
  misc_feature (1)..(25): SEQ ID NO: 7434; WAN024BNF_at; Start 33; Stop 57
gtgttatgaaatcaaaaaggggcaa

SEQ ID NO: 86836 - DNA, 25 bp, Artificial
  probe
  misc_feature (1)..(25): SEQ ID NO: 7434; WAN024BNF_at; Start 23; Stop 47
gggttttgttgtgttatgaaatcaa

SEQ ID NO: 86837 - DNA, 25 bp, Artificial
  probe
  misc_feature (1)..(25): SEQ ID NO: 7434; WAN024BNF_at; Start 28; Stop 52
ttgttgtgttatgaaatcaaaaagg

SEQ ID NO: 86838 - DNA, 25 bp, Artificial
  probe
  misc_feature (1)..(25): SEQ ID NO: 7434; WAN024BNF_at; Start 4; Stop 28
aattatcaatatcttcaaggggttt

SEQ ID NO: 86839 - DNA, 25 bp, Artificial
  probe
  misc_feature (1)..(25): SEQ ID NO: 7434; WAN024BNF_at; Start 34; Stop 58
tgttatgaaatcaaaaaggggcaac

SEQ ID NO: 86840 - DNA, 25 bp, Artificial
  probe
  misc_feature (1)..(25): SEQ ID NO: 7434; WAN024BNF_at; Start 12; Stop 36
atatcttcaaggggttttgttgtgt

SEQ ID NO: 86841 - DNA, 25 bp, Artificial
  probe
  misc_feature (1)..(25): SEQ ID NO: 7434; WAN024BNF_at; Start 9; Stop 33
tcaatatcttcaaggggttttgttg

SEQ ID NO: 86842 - DNA, 25 bp, Artificial
  probe
  misc_feature (1)..(25): SEQ ID NO: 7434; WAN024BNF_at; Start 5; Stop 29
attatcaatatcttcaaggggtttt

SEQ ID NO: 86843 - DNA, 25 bp, Artificial
  probe
  misc_feature (1)..(25): SEQ ID NO: 7434; WAN024BNF_at; Start 27; Stop 51
tttgttgtgttatgaaatcaaaaag

SEQ ID NO: 86844 - DNA, 25 bp, Artificial
  probe
  misc_feature (1)..(25): SEQ ID NO: 7434; WAN024BNF_at; Start 26; Stop 50
ttttgttgtgttatgaaatcaaaaa

SEQ ID NO: 86845 - DNA, 25 bp, Artificial
  probe
  misc_feature (1)..(25): SEQ ID NO: 7434; WAN024BNF_at; Start 37; Stop 61
tatgaaatcaaaaaggggcaaccaa

SEQ ID NO: 86846 - DNA, 25 bp, Artificial
  probe
  misc_feature (1)..(25): SEQ ID NO: 7434; WAN024BNF_at; Start 25; Stop 49
gttttgttgtgttatgaaatcaaaa

SEQ ID NO: 86847 - DNA, 25 bp, Artificial
  probe
  misc_feature (1)..(25): SEQ ID NO: 7434; WAN024BNF_at; Start 8; Stop 32
atcaatatcttcaaggggttttgtt

SEQ ID NO: 86848 - DNA, 25 bp, Artificial
  probe
  misc_feature (1)..(25): SEQ ID NO: 7434; WAN024BNF_at; Start 16; Stop 40
cttcaaggggttttgttgtgttatg

SEQ ID NO: 86849 - DNA, 25 bp, Artificial
  probe
  misc_feature (1)..(25): SEQ ID NO: 7434; WAN024BNF_at; Start 17; Stop 41
ttcaaggggttttgttgtgttatga

SEQ ID NO: 86850 - DNA, 25 bp, Artificial
  probe
  misc_feature (1)..(25): SEQ ID NO: 7434; WAN024BNF_at; Start 32; Stop 56
tgtgttatgaaatcaaaaaggggca

SEQ ID NO: 86851 - DNA, 25 bp, Artificial
  probe
  misc_feature (1)..(25): SEQ ID NO: 7434; WAN024BNF_at; Start 31; Stop 55
ttgtgttatgaaatcaaaaaggggc

SEQ ID NO: 86852 - DNA, 25 bp, Artificial
  probe
  misc_feature (1)..(25): SEQ ID NO: 7434; WAN024BNF_at; Start 38; Stop 62
atgaaatcaaaaaggggcaaccaag

SEQ ID NO: 86853 - DNA, 25 bp, Artificial
  probe
  misc_feature (1)..(25): SEQ ID NO: 7434; WAN024BNF_at; Start 2; Stop 26
tgaattatcaatatcttcaaggggt

SEQ ID NO: 86854 - DNA, 25 bp, Artificial
  probe
  misc_feature (1)..(25): SEQ ID NO: 7434; WAN024BNF_at; Start 7; Stop 31
tatcaatatcttcaaggggttttgt

SEQ ID NO: 86855 - DNA, 25 bp, Artificial
  probe
  misc_feature (1)..(25): SEQ ID NO: 7434; WAN024BNF_at; Start 18; Stop 42
tcaaggggttttgttgtgttatgaa

SEQ ID NO: 86856 - DNA, 25 bp, Artificial
  probe
  misc_feature (1)..(25): SEQ ID NO: 7434; WAN024BNF_at; Start 6; Stop 30
ttatcaatatcttcaaggggttttg

SEQ ID NO: 86857 - DNA, 25 bp, Artificial
  probe
  misc_feature (1)..(25): SEQ ID NO: 7434; WAN024BNF_at; Start 36; Stop 60
ttatgaaatcaaaaaggggcaacca

SEQ ID NO: 86858 - DNA, 25 bp, Artificial
  probe
  misc_feature (1)..(25): SEQ ID NO: 7434; WAN024BNF_at; Start 22; Stop 46
ggggttttgttgtgttatgaaatca

SEQ ID NO: 86859 - DNA, 25 bp, Artificial
  probe
  misc_feature (1)..(25): SEQ ID NO: 7434; WAN024BNF_at; Start 24; Stop 48
ggttttgttgtgttatgaaatcaaa

SEQ ID NO: 86860 - DNA, 25 bp, Artificial
  probe
  misc_feature (1)..(25): SEQ ID NO: 7434; WAN024BNF_at; Start 3; Stop 27
gaattatcaatatcttcaaggggtt

SEQ ID NO: 86861 - DNA, 25 bp, Artificial
  probe
  misc_feature (1)..(25): SEQ ID NO: 7434; WAN024BNF_at; Start 11; Stop 35
aatatcttcaaggggttttgttgtg

SEQ ID NO: 86862 - DNA, 25 bp, Artificial
  probe
  misc_feature (1)..(25): SEQ ID NO: 7434; WAN024BNF_at; Start 29; Stop 53
tgttgtgttatgaaatcaaaaaggg

SEQ ID NO: 86863 - DNA, 25 bp, Artificial
  probe
  misc_feature (1)..(25): SEQ ID NO: 6493; WAN024BNG_at; Start 184; Stop 208
aaagatgtgactttcttacaacaag

SEQ ID NO: 86864 - DNA, 25 bp, Artificial
  probe
  misc_feature (1)..(25): SEQ ID NO: 6493; WAN024BNG_at; Start 21; Stop 45
cataattgttatttttgttggaggt

SEQ ID NO: 86865 - DNA, 25 bp, Artificial
  probe
  misc_feature (1)..(25): SEQ ID NO: 6493; WAN024BNG_at; Start 39; Stop 63
tggaggtgtcataggtgcagtaatt

SEQ ID NO: 86866 - DNA, 25 bp, Artificial
  probe
  misc_feature (1)..(25): SEQ ID NO: 6493; WAN024BNG_at; Start 187; Stop 211
gatgtgactttcttacaacaagaca

SEQ ID NO: 86867 - DNA, 25 bp, Artificial
  probe
  misc_feature (1)..(25): SEQ ID NO: 6493; WAN024BNG_at; Start 271; Stop 295
gctttagctggatttgctggcaaaa

SEQ ID NO: 86868 - DNA, 25 bp, Artificial
  probe
  misc_feature (1)..(25): SEQ ID NO: 6493; WAN024BNG_at; Start 123; Stop 147
tcaagagaagaaaaagcaagagaaa

SEQ ID NO: 86869 - DNA, 25 bp, Artificial
  probe
  misc_feature (1)..(25): SEQ ID NO: 6493; WAN024BNG_at; Start 317; Stop 341
gccaaaattgcggaaatttctttga

SEQ ID NO: 86870 - DNA, 25 bp, Artificial
  probe
  misc_feature (1)..(25): SEQ ID NO: 6493; WAN024BNG_at; Start 106; Stop 130
gaaacatttagagcaaatcaagaga

SEQ ID NO: 86871 - DNA, 25 bp, Artificial
  probe
  misc_feature (1)..(25): SEQ ID NO: 6493; WAN024BNG_at; Start 79; Stop 103
tctccagagcagagagaacgtgaac

SEQ ID NO: 86872 - DNA, 25 bp, Artificial
  probe
  misc_feature (1)..(25): SEQ ID NO: 6493; WAN024BNG_at; Start 222; Stop 246
ttctgttggaaaggccgttggtgga

SEQ ID NO: 86873 - DNA, 25 bp, Artificial
  probe
  misc_feature (1)..(25): SEQ ID NO: 6493; WAN024BNG_at; Start 296; Stop 320
aaggaaataaacagtggcattgcca

SEQ ID NO: 86874 - DNA, 25 bp, Artificial
  probe
  misc_feature (1)..(25): SEQ ID NO: 6493; WAN024BNG_at; Start 146; Stop 170
aaaagcagaatatcatcacttgccc

SEQ ID NO: 86875 - DNA, 25 bp, Artificial
  probe
  misc_feature (1)..(25): SEQ ID NO: 6493; WAN024BNG_at; Start 81; Stop 105
tccagagcagagagaacgtgaactt

SEQ ID NO: 86876 - DNA, 25 bp, Artificial
  probe
  misc_feature (1)..(25): SEQ ID NO: 6493; WAN024BNG_at; Start 116; Stop 140
gagcaaatcaagagaagaaaaagca

SEQ ID NO: 86877 - DNA, 25 bp, Artificial
  probe
  misc_feature (1)..(25): SEQ ID NO: 6493; WAN024BNG_at; Start 284; Stop 308
ttgctggcaaaaaaggaaataaaca

SEQ ID NO: 86878 - DNA, 25 bp, Artificial
  probe
  misc_feature (1)..(25): SEQ ID NO: 6493; WAN024BNG_at; Start 263; Stop 287
gagttggtgctttagctggatttgc

SEQ ID NO: 86879 - DNA, 25 bp, Artificial
  probe
  misc_feature (1)..(25): SEQ ID NO: 6493; WAN024BNG_at; Start 74; Stop 98
aaaaatctccagagcagagagaacg

SEQ ID NO: 86880 - DNA, 25 bp, Artificial
  probe
  misc_feature (1)..(25): SEQ ID NO: 6493; WAN024BNG_at; Start 251; Stop 275
ttttgactggtggagttggtgcttt

SEQ ID NO: 86881 - DNA, 25 bp, Artificial
  probe
  misc_feature (1)..(25): SEQ ID NO: 6493; WAN024BNG_at; Start 47; Stop 71
tcataggtgcagtaattgataacca

SEQ ID NO: 86882 - DNA, 25 bp, Artificial
  probe
  misc_feature (1)..(25): SEQ ID NO: 6493; WAN024BNG_at; Start 169; Stop 193
cctaattgtaagtctaaagatgtga

SEQ ID NO: 86883 - DNA, 25 bp, Artificial
  probe
  misc_feature (1)..(25): SEQ ID NO: 6493; WAN024BNG_at; Start 202; Stop 226
caacaagacaaaaaagccttttctg

SEQ ID NO: 86884 - DNA, 25 bp, Artificial
  probe
  misc_feature (1)..(25): SEQ ID NO: 6493; WAN024BNG_at; Start 166; Stop 190
tgccctaattgtaagtctaaagatg

SEQ ID NO: 86885 - DNA, 25 bp, Artificial
  probe
  misc_feature (1)..(25): SEQ ID NO: 6493; WAN024BNG_at; Start 277; Stop 301
gctggatttgctggcaaaaaaggaa

SEQ ID NO: 86886 - DNA, 25 bp, Artificial
  probe
  misc_feature (1)..(25): SEQ ID NO: 6493; WAN024BNG_at; Start 158; Stop 182
tcatcacttgccctaattgtaagtc

SEQ ID NO: 86887 - DNA, 25 bp, Artificial
  probe
  misc_feature (1)..(25): SEQ ID NO: 6493; WAN024BNG_at; Start 52; Stop 76
ggtgcagtaattgataaccaaaaaa

SEQ ID NO: 86888 - DNA, 25 bp, Artificial
  probe
  misc_feature (1)..(25): SEQ ID NO: 6493; WAN024BNG_at; Start 33; Stop 57
ttttgttggaggtgtcataggtgca

SEQ ID NO: 86889 - DNA, 25 bp, Artificial
  probe
  misc_feature (1)..(25): SEQ ID NO: 6493; WAN024BNG_at; Start 235; Stop 259
gccgttggtggagctgttttgactg

SEQ ID NO: 86890 - DNA, 25 bp, Artificial
  probe
  misc_feature (1)..(25): SEQ ID NO: 6493; WAN024BNG_at; Start 97; Stop 121
cgtgaacttgaaacatttagagcaa

SEQ ID NO: 86891 - DNA, 25 bp, Artificial
  probe
  misc_feature (1)..(25): SEQ ID NO: 6493; WAN024BNG_at; Start 94; Stop 118
gaacgtgaacttgaaacatttagag

SEQ ID NO: 86892 - DNA, 25 bp, Artificial
  probe
  misc_feature (1)..(25): SEQ ID NO: 6493; WAN024BNG_at; Start 139; Stop 163
caagagaaaaagcagaatatcatca

SEQ ID NO: 86893 - DNA, 25 bp, Artificial
  probe
  misc_feature (1)..(25): SEQ ID NO: 6493; WAN024BNG_at; Start 307; Stop 331
cagtggcattgccaaaattgcggaa

SEQ ID NO: 86894 - DNA, 25 bp, Artificial
  probe
  misc_feature (1)..(25): SEQ ID NO: 6493; WAN024BNG_at; Start 153; Stop 177
gaatatcatcacttgccctaattgt

SEQ ID NO: 86895 - DNA, 25 bp, Artificial
  probe
  misc_feature (1)..(25): SEQ ID NO: 6493; WAN024BNG_at; Start 310; Stop 334
tggcattgccaaaattgcggaaatt

SEQ ID NO: 86896 - DNA, 25 bp, Artificial
  probe
  misc_feature (1)..(25): SEQ ID NO: 6493; WAN024BNG_at; Start 290; Stop 314
gcaaaaaaggaaataaacagtggca

SEQ ID NO: 86897 - DNA, 25 bp, Artificial
  probe
  misc_feature (1)..(25): SEQ ID NO: 6556; WAN024BNH_at; Start 84; Stop 108
catcccagccctcaaaactatgttt

SEQ ID NO: 86898 - DNA, 25 bp, Artificial
  probe
  misc_feature (1)..(25): SEQ ID NO: 6556; WAN024BNH_at; Start 350; Stop 374
tcaaagaagaatatttagcactact

SEQ ID NO: 86899 - DNA, 25 bp, Artificial
  probe
  misc_feature (1)..(25): SEQ ID NO: 6556; WAN024BNH_at; Start 110; Stop 134
tgagtgatgctatatctgatgaaaa

SEQ ID NO: 86900 - DNA, 25 bp, Artificial
  probe
  misc_feature (1)..(25): SEQ ID NO: 6556; WAN024BNH_at; Start 217; Stop 241
cttgaggctaataggaatatgatcc

SEQ ID NO: 86901 - DNA, 25 bp, Artificial
  probe
  misc_feature (1)..(25): SEQ ID NO: 6556; WAN024BNH_at; Start 142; Stop 166
caagtcgctttacatgagataggcc

SEQ ID NO: 86902 - DNA, 25 bp, Artificial
  probe
  misc_feature (1)..(25): SEQ ID NO: 6556; WAN024BNH_at; Start 37; Stop 61
gatatagagatttttgaagatggtc

SEQ ID NO: 86903 - DNA, 25 bp, Artificial
  probe
  misc_feature (1)..(25): SEQ ID NO: 6556; WAN024BNH_at; Start 118; Stop 142
gctatatctgatgaaaaaagggtac

SEQ ID NO: 86904 - DNA, 25 bp, Artificial
  probe
  misc_feature (1)..(25): SEQ ID NO: 6556; WAN024BNH_at; Start 163; Stop 187
ggccatagaaaccacgcgccagata

SEQ ID NO: 86905 - DNA, 25 bp, Artificial
  probe
  misc_feature (1)..(25): SEQ ID NO: 6556; WAN024BNH_at; Start 295; Stop 319
tacctggtatttatggaaaagtata

SEQ ID NO: 86906 - DNA, 25 bp, Artificial
  probe
  misc_feature (1)..(25): SEQ ID NO: 6556; WAN024BNH_at; Start 205; Stop 229
gaaaagtgtgagcttgaggctaata

SEQ ID NO: 86907 - DNA, 25 bp, Artificial
  probe
  misc_feature (1)..(25): SEQ ID NO: 6556; WAN024BNH_at; Start 182; Stop 206
cagatacttatcagctttttaggga

SEQ ID NO: 86908 - DNA, 25 bp, Artificial
  probe
  misc_feature (1)..(25): SEQ ID NO: 6556; WAN024BNH_at; Start 55; Stop 79
gatggtctatttccagatgaagcct

SEQ ID NO: 86909 - DNA, 25 bp, Artificial
  probe
  misc_feature (1)..(25): SEQ ID NO: 6556; WAN024BNH_at; Start 171; Stop 195
aaaccacgcgccagatacttatcag

SEQ ID NO: 86910 - DNA, 25 bp, Artificial
  probe
  misc_feature (1)..(25): SEQ ID NO: 6556; WAN024BNH_at; Start 13; Stop 37
gaattttctcaaaatctaggcatag

SEQ ID NO: 86911 - DNA, 25 bp, Artificial
  probe
  misc_feature (1)..(25): SEQ ID NO: 6556; WAN024BNH_at; Start 258; Stop 282
tgagttggatatagccgaagatgcc

SEQ ID NO: 86912 - DNA, 25 bp, Artificial
  probe
  misc_feature (1)..(25): SEQ ID NO: 6556; WAN024BNH_at; Start 237; Stop 261
gatccatcaccttatgaaagctgag

SEQ ID NO: 86913 - DNA, 25 bp, Artificial
  probe
  misc_feature (1)..(25): SEQ ID NO: 6556; WAN024BNH_at; Start 244; Stop 268
caccttatgaaagctgagttggata

SEQ ID NO: 86914 - DNA, 25 bp, Artificial
  probe
  misc_feature (1)..(25): SEQ ID NO: 6556; WAN024BNH_at; Start 69; Stop 93
agatgaagccttttacatcccagcc

SEQ ID NO: 86915 - DNA, 25 bp, Artificial
  probe
  misc_feature (1)..(25): SEQ ID NO: 6556; WAN024BNH_at; Start 327; Stop 351
aaccattgccgatgaaatcatggtc

SEQ ID NO: 86916 - DNA, 25 bp, Artificial
  probe
  misc_feature (1)..(25): SEQ ID NO: 6556; WAN024BNH_at; Start 231; Stop 255
gaatatgatccatcaccttatgaaa

SEQ ID NO: 86917 - DNA, 25 bp, Artificial
  probe
  misc_feature (1)..(25): SEQ ID NO: 6556; WAN024BNH_at; Start 96; Stop 120
caaaactatgtttttgagtgatgct

SEQ ID NO: 86918 - DNA, 25 bp, Artificial
  probe
  misc_feature (1)..(25): SEQ ID NO: 6556; WAN024BNH_at; Start 267; Stop 291
tatagccgaagatgccactacattt

SEQ ID NO: 86919 - DNA, 25 bp, Artificial
  probe
  misc_feature (1)..(25): SEQ ID NO: 6556; WAN024BNH_at; Start 146; Stop 170
tcgctttacatgagataggccatag

SEQ ID NO: 86920 - DNA, 25 bp, Artificial
  probe
  misc_feature (1)..(25): SEQ ID NO: 6556; WAN024BNH_at; Start 263; Stop 287
tggatatagccgaagatgccactac

SEQ ID NO: 86921 - DNA, 25 bp, Artificial
  probe
  misc_feature (1)..(25): SEQ ID NO: 6556; WAN024BNH_at; Start 135; Stop 159
aagggtacaagtcgctttacatgag

SEQ ID NO: 86922 - DNA, 25 bp, Artificial
  probe
  misc_feature (1)..(25): SEQ ID NO: 6556; WAN024BNH_at; Start 156; Stop 180
tgagataggccatagaaaccacgcg

SEQ ID NO: 86923 - DNA, 25 bp, Artificial
  probe
  misc_feature (1)..(25): SEQ ID NO: 6556; WAN024BNH_at; Start 52; Stop 76
gaagatggtctatttccagatgaag

SEQ ID NO: 86924 - DNA, 25 bp, Artificial
  probe
  misc_feature (1)..(25): SEQ ID NO: 6556; WAN024BNH_at; Start 277; Stop 301
gatgccactacatttaattacctgg

SEQ ID NO: 86925 - DNA, 25 bp, Artificial
  probe
  misc_feature (1)..(25): SEQ ID NO: 6556; WAN024BNH_at; Start 334; Stop 358
gccgatgaaatcatggtcaaagaag

SEQ ID NO: 86926 - DNA, 25 bp, Artificial
  probe
  misc_feature (1)..(25): SEQ ID NO: 6556; WAN024BNH_at; Start 316; Stop 340
tataatttaaaaaccattgccgatg

SEQ ID NO: 86927 - DNA, 25 bp, Artificial
  probe
  misc_feature (1)..(25): SEQ ID NO: 6556; WAN024BNH_at; Start 125; Stop 149
ctgatgaaaaaagggtacaagtcgc

SEQ ID NO: 86928 - DNA, 25 bp, Artificial
  probe
  misc_feature (1)..(25): SEQ ID NO: 6556; WAN024BNH_at; Start 193; Stop 217
cagctttttagggaaaagtgtgagc

SEQ ID NO: 86929 - DNA, 25 bp, Artificial
  probe
  misc_feature (1)..(25): SEQ ID NO: 6556; WAN024BNH_at; Start 252; Stop 276
gaaagctgagttggatatagccgaa

SEQ ID NO: 86930 - DNA, 25 bp, Artificial
  probe
  misc_feature (1)..(25): SEQ ID NO: 6556; WAN024BNH_at; Start 22; Stop 46
caaaatctaggcatagatatagaga

SEQ ID NO: 86931 - DNA, 25 bp, Artificial
  probe
  misc_feature (1)..(25): SEQ ID NO: 7039; WAN024BNI_at; Start 167; Stop 191
tatctacagactacttacttggtcg

SEQ ID NO: 86932 - DNA, 25 bp, Artificial
  probe
  misc_feature (1)..(25): SEQ ID NO: 7039; WAN024BNI_at; Start 247; Stop 271
gaagtcgatgttgaggaacttgcct

SEQ ID NO: 86933 - DNA, 25 bp, Artificial
  probe
  misc_feature (1)..(25): SEQ ID NO: 7039; WAN024BNI_at; Start 127; Stop 151
tctgctgaacatatatccaaaatcg

SEQ ID NO: 86934 - DNA, 25 bp, Artificial
  probe
  misc_feature (1)..(25): SEQ ID NO: 7039; WAN024BNI_at; Start 284; Stop 308
gcttcaatggtaaaccactaactga

SEQ ID NO: 86935 - DNA, 25 bp, Artificial
  probe
  misc_feature (1)..(25): SEQ ID NO: 7039; WAN024BNI_at; Start 153; Stop 177
tgactacttcaatgtatctacagac

SEQ ID NO: 86936 - DNA, 25 bp, Artificial
  probe
  misc_feature (1)..(25): SEQ ID NO: 7039; WAN024BNI_at; Start 140; Stop 164
tatccaaaatcgctgactacttcaa

SEQ ID NO: 86937 - DNA, 25 bp, Artificial
  probe
  misc_feature (1)..(25): SEQ ID NO: 7039; WAN024BNI_at; Start 114; Stop 138
taaaaagactccatctgctgaacat

SEQ ID NO: 86938 - DNA, 25 bp, Artificial
  probe
  misc_feature (1)..(25): SEQ ID NO: 7039; WAN024BNI_at; Start 120; Stop 144
gactccatctgctgaacatatatcc

SEQ ID NO: 86939 - DNA, 25 bp, Artificial
  probe
  misc_feature (1)..(25): SEQ ID NO: 7039; WAN024BNI_at; Start 144; Stop 168
caaaatcgctgactacttcaatgta

SEQ ID NO: 86940 - DNA, 25 bp, Artificial
  probe
  misc_feature (1)..(25): SEQ ID NO: 7039; WAN024BNI_at; Start 260; Stop 284
aggaacttgcctctactgctatgcg

SEQ ID NO: 86941 - DNA, 25 bp, Artificial
  probe
  misc_feature (1)..(25): SEQ ID NO: 7039; WAN024BNI_at; Start 299; Stop 323
cactaactgaagaagataaaaaagc

SEQ ID NO: 86942 - DNA, 25 bp, Artificial
  probe
  misc_feature (1)..(25): SEQ ID NO: 7039; WAN024BNI_at; Start 191; Stop 215
gcacagataatcctaccatcgctaa

SEQ ID NO: 86943 - DNA, 25 bp, Artificial
  probe
  misc_feature (1)..(25): SEQ ID NO: 7039; WAN024BNI_at; Start 226; Stop 250
caattctttttcgaaggcaaagaag

SEQ ID NO: 86944 - DNA, 25 bp, Artificial
  probe
  misc_feature (1)..(25): SEQ ID NO: 7039; WAN024BNI_at; Start 274; Stop 298
actgctatgcgcttcaatggtaaac

SEQ ID NO: 86945 - DNA, 25 bp, Artificial
  probe
  misc_feature (1)..(25): SEQ ID NO: 7039; WAN024BNI_at; Start 107; Stop 131
ttaaaaataaaaagactccatctgc

SEQ ID NO: 86946 - DNA, 25 bp, Artificial
  probe
  misc_feature (1)..(25): SEQ ID NO: 7039; WAN024BNI_at; Start 319; Stop 343
aaagcaattcaaaacataatagaga

SEQ ID NO: 86947 - DNA, 25 bp, Artificial
  probe
  misc_feature (1)..(25): SEQ ID NO: 7039; WAN024BNI_at; Start 187; Stop 211
ggtcgcacagataatcctaccatcg

SEQ ID NO: 86948 - DNA, 25 bp, Artificial
  probe
  misc_feature (1)..(25): SEQ ID NO: 7039; WAN024BNI_at; Start 173; Stop 197
cagactacttacttggtcgcacaga

SEQ ID NO: 86949 - DNA, 25 bp, Artificial
  probe
  misc_feature (1)..(25): SEQ ID NO: 7039; WAN024BNI_at; Start 335; Stop 359
taatagagatttatctcagaaaaca

SEQ ID NO: 86950 - DNA, 25 bp, Artificial
  probe
  misc_feature (1)..(25): SEQ ID NO: 7039; WAN024BNI_at; Start 277; Stop 301
gctatgcgcttcaatggtaaaccac

SEQ ID NO: 86951 - DNA, 25 bp, Artificial
  probe
  misc_feature (1)..(25): SEQ ID NO: 7039; WAN024BNI_at; Start 233; Stop 257
ttttcgaaggcaaagaagtcgatgt

SEQ ID NO: 86952 - DNA, 25 bp, Artificial
  probe
  misc_feature (1)..(25): SEQ ID NO: 7039; WAN024BNI_at; Start 242; Stop 266
gcaaagaagtcgatgttgaggaact

SEQ ID NO: 86953 - DNA, 25 bp, Artificial
  probe
  misc_feature (1)..(25): SEQ ID NO: 7039; WAN024BNI_at; Start 201; Stop 225
tcctaccatcgctaataaaaaagaa

SEQ ID NO: 86954 - DNA, 25 bp, Artificial
  probe
  misc_feature (1)..(25): SEQ ID NO: 7039; WAN024BNI_at; Start 304; Stop 328
actgaagaagataaaaaagcaattc

SEQ ID NO: 86955 - DNA, 25 bp, Artificial
  probe
  misc_feature (1)..(25): SEQ ID NO: 7039; WAN024BNI_at; Start 43; Stop 67
cagggaatttctctaaacactttag

SEQ ID NO: 86956 - DNA, 25 bp, Artificial
  probe
  misc_feature (1)..(25): SEQ ID NO: 7039; WAN024BNI_at; Start 52; Stop 76
tctctaaacactttagaagataggg

SEQ ID NO: 86957 - DNA, 25 bp, Artificial
  probe
  misc_feature (1)..(25): SEQ ID NO: 7039; WAN024BNI_at; Start 130; Stop 154
gctgaacatatatccaaaatcgctg

SEQ ID NO: 86958 - DNA, 25 bp, Artificial
  probe
  misc_feature (1)..(25): SEQ ID NO: 7039; WAN024BNI_at; Start 207; Stop 231
catcgctaataaaaaagaacaattc

SEQ ID NO: 86959 - DNA, 25 bp, Artificial
  probe
  misc_feature (1)..(25): SEQ ID NO: 7039; WAN024BNI_at; Start 268; Stop 292
gcctctactgctatgcgcttcaatg

SEQ ID NO: 86960 - DNA, 25 bp, Artificial
  probe
  misc_feature (1)..(25): SEQ ID NO: 7039; WAN024BNI_at; Start 291; Stop 315
tggtaaaccactaactgaagaagat

SEQ ID NO: 86961 - DNA, 25 bp, Artificial
  probe
  misc_feature (1)..(25): SEQ ID NO: 7039; WAN024BNI_at; Start 262; Stop 286
gaacttgcctctactgctatgcgct

SEQ ID NO: 86962 - DNA, 25 bp, Artificial
  probe
  misc_feature (1)..(25): SEQ ID NO: 7039; WAN024BNI_at; Start 133; Stop 157
gaacatatatccaaaatcgctgact

SEQ ID NO: 86963 - DNA, 25 bp, Artificial
  probe
  misc_feature (1)..(25): SEQ ID NO: 7039; WAN024BNI_at; Start 182; Stop 206
tacttggtcgcacagataatcctac

SEQ ID NO: 86964 - DNA, 25 bp, Artificial
  probe
  misc_feature (1)..(25): SEQ ID NO: 7039; WAN024BNI_at; Start 251; Stop 275
tcgatgttgaggaacttgcctctac

SEQ ID NO: 86965 - DNA, 25 bp, Artificial
  probe
  misc_feature (1)..(25): SEQ ID NO: 7148; WAN024BNJ_at; Start 262; Stop 286
gaagcaatagaaaagttatccacag

SEQ ID NO: 86966 - DNA, 25 bp, Artificial
  probe
  misc_feature (1)..(25): SEQ ID NO: 7148; WAN024BNJ_at; Start 180; Stop 204
tcgaggtgttcagactttcagattc

SEQ ID NO: 86967 - DNA, 25 bp, Artificial
  probe
  misc_feature (1)..(25): SEQ ID NO: 7148; WAN024BNJ_at; Start 83; Stop 107
aacgaaaaggtgtcggccgtgacat

SEQ ID NO: 86968 - DNA, 25 bp, Artificial
  probe
  misc_feature (1)..(25): SEQ ID NO: 7148; WAN024BNJ_at; Start 174; Stop 198
tagaggtcgaggtgttcagactttc

SEQ ID NO: 86969 - DNA, 25 bp, Artificial
  probe
  misc_feature (1)..(25): SEQ ID NO: 7148; WAN024BNJ_at; Start 138; Stop 162
tgctggttatatgcgtgtgatcaaa

SEQ ID NO: 86970 - DNA, 25 bp, Artificial
  probe
  misc_feature (1)..(25): SEQ ID NO: 7148; WAN024BNJ_at; Start 33; Stop 57
tgttctagctaaccacccaaactgg

SEQ ID NO: 86971 - DNA, 25 bp, Artificial
  probe
  misc_feature (1)..(25): SEQ ID NO: 7148; WAN024BNJ_at; Start 57; Stop 81
gcaagtctatccagatgagatagct

SEQ ID NO: 86972 - DNA, 25 bp, Artificial
  probe
  misc_feature (1)..(25): SEQ ID NO: 7148; WAN024BNJ_at; Start 11; Stop 35
cagcggtaggtattatgatggttgt

SEQ ID NO: 86973 - DNA, 25 bp, Artificial
  probe
  misc_feature (1)..(25): SEQ ID NO: 7148; WAN024BNJ_at; Start 66; Stop 90
tccagatgagatagctaaacgaaaa

SEQ ID NO: 86974 - DNA, 25 bp, Artificial
  probe
  misc_feature (1)..(25): SEQ ID NO: 7148; WAN024BNJ_at; Start 51; Stop 75
aaactggcaagtctatccagatgag

SEQ ID NO: 86975 - DNA, 25 bp, Artificial
  probe
  misc_feature (1)..(25): SEQ ID NO: 7148; WAN024BNJ_at; Start 95; Stop 119
tcggccgtgacatgattgatcgtca

SEQ ID NO: 86976 - DNA, 25 bp, Artificial
  probe
  misc_feature (1)..(25): SEQ ID NO: 7148; WAN024BNJ_at; Start 192; Stop 216
gactttcagattcttctcagataca

SEQ ID NO: 86977 - DNA, 25 bp, Artificial
  probe
  misc_feature (1)..(25): SEQ ID NO: 7148; WAN024BNJ_at; Start 75; Stop 99
gatagctaaacgaaaaggtgtcggc

SEQ ID NO: 86978 - DNA, 25 bp, Artificial
  probe
  misc_feature (1)..(25): SEQ ID NO: 7148; WAN024BNJ_at; Start 131; Stop 155
tagaggatgctggttatatgcgtgt

SEQ ID NO: 86979 - DNA, 25 bp, Artificial
  probe
  misc_feature (1)..(25): SEQ ID NO: 7148; WAN024BNJ_at; Start 91; Stop 115
ggtgtcggccgtgacatgattgatc

SEQ ID NO: 86980 - DNA, 25 bp, Artificial
  probe
  misc_feature (1)..(25): SEQ ID NO: 7148; WAN024BNJ_at; Start 209; Stop 233
cagatacaaagataactgactttca

SEQ ID NO: 86981 - DNA, 25 bp, Artificial
  probe
  misc_feature (1)..(25): SEQ ID NO: 7148; WAN024BNJ_at; Start 238; Stop 262
gaaatcatgttacaacggcttgatg

SEQ ID NO: 86982 - DNA, 25 bp, Artificial
  probe
  misc_feature (1)..(25): SEQ ID NO: 7148; WAN024BNJ_at; Start 38; Stop 62
tagctaaccacccaaactggcaagt

SEQ ID NO: 86983 - DNA, 25 bp, Artificial
  probe
  misc_feature (1)..(25): SEQ ID NO: 7148; WAN024BNJ_at; Start 163; Stop 187
aaaagccttggtagaggtcgaggtg

SEQ ID NO: 86984 - DNA, 25 bp, Artificial
  probe
  misc_feature (1)..(25): SEQ ID NO: 7148; WAN024BNJ_at; Start 247; Stop 271
ttacaacggcttgatgaagcaatag

SEQ ID NO: 86985 - DNA, 25 bp, Artificial
  probe
  misc_feature (1)..(25): SEQ ID NO: 7148; WAN024BNJ_at; Start 27; Stop 51
gatggttgttctagctaaccaccca

SEQ ID NO: 86986 - DNA, 25 bp, Artificial
  probe
  misc_feature (1)..(25): SEQ ID NO: 7148; WAN024BNJ_at; Start 149; Stop 173
tgcgtgtgatcaaaaaaagccttgg

SEQ ID NO: 86987 - DNA, 25 bp, Artificial
  probe
  misc_feature (1)..(25): SEQ ID NO: 7148; WAN024BNJ_at; Start 72; Stop 96
tgagatagctaaacgaaaaggtgtc

SEQ ID NO: 86988 - DNA, 25 bp, Artificial
  probe
  misc_feature (1)..(25): SEQ ID NO: 7148; WAN024BNJ_at; Start 100; Stop 124
cgtgacatgattgatcgtcatctaa

SEQ ID NO: 86989 - DNA, 25 bp, Artificial
  probe
  misc_feature (1)..(25): SEQ ID NO: 7148; WAN024BNJ_at; Start 4; Stop 28
gggtttacagcggtaggtattatga

SEQ ID NO: 86990 - DNA, 25 bp, Artificial
  probe
  misc_feature (1)..(25): SEQ ID NO: 7148; WAN024BNJ_at; Start 184; Stop 208
ggtgttcagactttcagattcttct

SEQ ID NO: 86991 - DNA, 25 bp, Artificial
  probe
  misc_feature (1)..(25): SEQ ID NO: 7148; WAN024BNJ_at; Start 203; Stop 227
tcttctcagatacaaagataactga

SEQ ID NO: 86992 - DNA, 25 bp, Artificial
  probe
  misc_feature (1)..(25): SEQ ID NO: 7148; WAN024BNJ_at; Start 21; Stop 45
tattatgatggttgttctagctaac

SEQ ID NO: 86993 - DNA, 25 bp, Artificial
  probe
  misc_feature (1)..(25): SEQ ID NO: 7148; WAN024BNJ_at; Start 250; Stop 274
caacggcttgatgaagcaatagaaa

SEQ ID NO: 86994 - DNA, 25 bp, Artificial
  probe
  misc_feature (1)..(25): SEQ ID NO: 7148; WAN024BNJ_at; Start 42; Stop 66
taaccacccaaactggcaagtctat

SEQ ID NO: 86995 - DNA, 25 bp, Artificial
  probe
  misc_feature (1)..(25): SEQ ID NO: 7148; WAN024BNJ_at; Start 232; Stop 256
caatttgaaatcatgttacaacggc

SEQ ID NO: 86996 - DNA, 25 bp, Artificial
  probe
  misc_feature (1)..(25): SEQ ID NO: 7148; WAN024BNJ_at; Start 217; Stop 241
aagataactgactttcaatttgaaa

SEQ ID NO: 86997 - DNA, 25 bp, Artificial
  probe
  misc_feature (1)..(25): SEQ ID NO: 7148; WAN024BNJ_at; Start 111; Stop 135
tgatcgtcatctaaaaaagttagag

SEQ ID NO: 86998 - DNA, 25 bp, Artificial
  probe
  misc_feature (1)..(25): SEQ ID NO: 7148; WAN024BNJ_at; Start 120; Stop 144
tctaaaaaagttagaggatgctggt

SEQ ID NO: 86999 - DNA, 25 bp, Artificial
  probe
  misc_feature (1)..(25): SEQ ID NO: 6784; WAN024BNK_at; Start 158; Stop 182
gaaacgatggtcagcttgtcacaat

SEQ ID NO: 87000 - DNA, 25 bp, Artificial
  probe
  misc_feature (1)..(25): SEQ ID NO: 6784; WAN024BNK_at; Start 66; Stop 90
agaactagagcgcatctttggatgt

SEQ ID NO: 87001 - DNA, 25 bp, Artificial
  probe
  misc_feature (1)..(25): SEQ ID NO: 6784; WAN024BNK_at; Start 56; Stop 80
caaacgatgaagaactagagcgcat

SEQ ID NO: 87002 - DNA, 25 bp, Artificial
  probe
  misc_feature (1)..(25): SEQ ID NO: 6784; WAN024BNK_at; Start 88; Stop 112
tgttcaaaacggcaagcgggagata

SEQ ID NO: 87003 - DNA, 25 bp, Artificial
  probe
  misc_feature (1)..(25): SEQ ID NO: 6784; WAN024BNK_at; Start 192; Stop 216
tgatgcttatctgcaatatcgaggc

SEQ ID NO: 87004 - DNA, 25 bp, Artificial
  probe
  misc_feature (1)..(25): SEQ ID NO: 6784; WAN024BNK_at; Start 18; Stop 42
cgtgagaattaaagatgtgatcatc

SEQ ID NO: 87005 - DNA, 25 bp, Artificial
  probe
  misc_feature (1)..(25): SEQ ID NO: 6784; WAN024BNK_at; Start 71; Stop 95
tagagcgcatctttggatgttcaaa

SEQ ID NO: 87006 - DNA, 25 bp, Artificial
  probe
  misc_feature (1)..(25): SEQ ID NO: 6784; WAN024BNK_at; Start 196; Stop 220
gcttatctgcaatatcgaggcagtc

SEQ ID NO: 87007 - DNA, 25 bp, Artificial
  probe
  misc_feature (1)..(25): SEQ ID NO: 6784; WAN024BNK_at; Start 148; Stop 172
aaataccttagaaacgatggtcagc

SEQ ID NO: 87008 - DNA, 25 bp, Artificial
  probe
  misc_feature (1)..(25): SEQ ID NO: 6784; WAN024BNK_at; Start 122; Stop 146
agatgaaaaaattgcctagtcagca

SEQ ID NO: 87009 - DNA, 25 bp, Artificial
  probe
  misc_feature (1)..(25): SEQ ID NO: 6784; WAN024BNK_at; Start 163; Stop 187
gatggtcagcttgtcacaatcaaag

SEQ ID NO: 87010 - DNA, 25 bp, Artificial
  probe
  misc_feature (1)..(25): SEQ ID NO: 6784; WAN024BNK_at; Start 166; Stop 190
ggtcagcttgtcacaatcaaaggtt

SEQ ID NO: 87011 - DNA, 25 bp, Artificial
  probe
  misc_feature (1)..(25): SEQ ID NO: 6784; WAN024BNK_at; Start 2; Stop 26
tggaaacagttcaaatcgtgagaat

SEQ ID NO: 87012 - DNA, 25 bp, Artificial
  probe
  misc_feature (1)..(25): SEQ ID NO: 6784; WAN024BNK_at; Start 219; Stop 243
tcaatcatggaagaaagaaatggct

SEQ ID NO: 87013 - DNA, 25 bp, Artificial
  probe
  misc_feature (1)..(25): SEQ ID NO: 6784; WAN024BNK_at; Start 52; Stop 76
tctgcaaacgatgaagaactagagc

SEQ ID NO: 87014 - DNA, 25 bp, Artificial
  probe
  misc_feature (1)..(25): SEQ ID NO: 6784; WAN024BNK_at; Start 43; Stop 67
gagaagatttctgcaaacgatgaag

SEQ ID NO: 87015 - DNA, 25 bp, Artificial
  probe
  misc_feature (1)..(25): SEQ ID NO: 6784; WAN024BNK_at; Start 38; Stop 62
tcatcgagaagatttctgcaaacga

SEQ ID NO: 87016 - DNA, 25 bp, Artificial
  probe
  misc_feature (1)..(25): SEQ ID NO: 6784; WAN024BNK_at; Start 170; Stop 194
agcttgtcacaatcaaaggttttga

SEQ ID NO: 87017 - DNA, 25 bp, Artificial
  probe
  misc_feature (1)..(25): SEQ ID NO: 6784; WAN024BNK_at; Start 153; Stop 177
ccttagaaacgatggtcagcttgtc

SEQ ID NO: 87018 - DNA, 25 bp, Artificial
  probe
  misc_feature (1)..(25): SEQ ID NO: 6784; WAN024BNK_at; Start 239; Stop 263
tggctaaaaccgttaagatgacacg

SEQ ID NO: 87019 - DNA, 25 bp, Artificial
  probe
  misc_feature (1)..(25): SEQ ID NO: 6784; WAN024BNK_at; Start 183; Stop 207
caaaggttttgatgcttatctgcaa

SEQ ID NO: 87020 - DNA, 25 bp, Artificial
  probe
  misc_feature (1)..(25): SEQ ID NO: 6784; WAN024BNK_at; Start 142; Stop 166
cagcaaaaataccttagaaacgatg

SEQ ID NO: 87021 - DNA, 25 bp, Artificial
  probe
  misc_feature (1)..(25): SEQ ID NO: 6784; WAN024BNK_at; Start 224; Stop 248
catggaagaaagaaatggctaaaac

SEQ ID NO: 87022 - DNA, 25 bp, Artificial
  probe
  misc_feature (1)..(25): SEQ ID NO: 6784; WAN024BNK_at; Start 91; Stop 115
tcaaaacggcaagcgggagatatga

SEQ ID NO: 87023 - DNA, 25 bp, Artificial
  probe
  misc_feature (1)..(25): SEQ ID NO: 6784; WAN024BNK_at; Start 78; Stop 102
catctttggatgttcaaaacggcaa

SEQ ID NO: 87024 - DNA, 25 bp, Artificial
  probe
  misc_feature (1)..(25): SEQ ID NO: 6784; WAN024BNK_at; Start 61; Stop 85
gatgaagaactagagcgcatctttg

SEQ ID NO: 87025 - DNA, 25 bp, Artificial
  probe
  misc_feature (1)..(25): SEQ ID NO: 6784; WAN024BNK_at; Start 212; Stop 236
gaggcagtcaatcatggaagaaaga

SEQ ID NO: 87026 - DNA, 25 bp, Artificial
  probe
  misc_feature (1)..(25): SEQ ID NO: 6784; WAN024BNK_at; Start 134; Stop 158
tgcctagtcagcaaaaataccttag

SEQ ID NO: 87027 - DNA, 25 bp, Artificial
  probe
  misc_feature (1)..(25): SEQ ID NO: 6784; WAN024BNK_at; Start 107; Stop 131
gagatatgaggcgagagatgaaaaa

SEQ ID NO: 87028 - DNA, 25 bp, Artificial
  probe
  misc_feature (1)..(25): SEQ ID NO: 6784; WAN024BNK_at; Start 204; Stop 228
gcaatatcgaggcagtcaatcatgg

SEQ ID NO: 87029 - DNA, 25 bp, Artificial
  probe
  misc_feature (1)..(25): SEQ ID NO: 6784; WAN024BNK_at; Start 8; Stop 32
cagttcaaatcgtgagaattaaaga

SEQ ID NO: 87030 - DNA, 25 bp, Artificial
  probe
  misc_feature (1)..(25): SEQ ID NO: 6784; WAN024BNK_at; Start 84; Stop 108
tggatgttcaaaacggcaagcggga

SEQ ID NO: 87031 - DNA, 25 bp, Artificial
  probe
  misc_feature (1)..(25): SEQ ID NO: 6784; WAN024BNK_at; Start 31; Stop 55
gatgtgatcatcgagaagatttctg

SEQ ID NO: 87032 - DNA, 25 bp, Artificial
  probe
  misc_feature (1)..(25): SEQ ID NO: 6784; WAN024BNK_at; Start 208; Stop 232
tatcgaggcagtcaatcatggaaga

SEQ ID NO: 87033 - DNA, 25 bp, Artificial
  probe
  misc_feature (1)..(25): SEQ ID NO: 6301; WAN024BNL_at; Start 400; Stop 424
tccgttaatgaattatctgataaag

SEQ ID NO: 87034 - DNA, 25 bp, Artificial
  probe
  misc_feature (1)..(25): SEQ ID NO: 6301; WAN024BNL_at; Start 496; Stop 520
gaaactaatgtctttggaggaggaa

SEQ ID NO: 87035 - DNA, 25 bp, Artificial
  probe
  misc_feature (1)..(25): SEQ ID NO: 6301; WAN024BNL_at; Start 432; Stop 456
gataattgtctcaatatttgatgcc

SEQ ID NO: 87036 - DNA, 25 bp, Artificial
  probe
  misc_feature (1)..(25): SEQ ID NO: 6301; WAN024BNL_at; Start 446; Stop 470
tatttgatgccttgaaaattccagc

SEQ ID NO: 87037 - DNA, 25 bp, Artificial
  probe
  misc_feature (1)..(25): SEQ ID NO: 6301; WAN024BNL_at; Start 17; Stop 41
ccgcaatgaatgtgagtgtttctga

SEQ ID NO: 87038 - DNA, 25 bp, Artificial
  probe
  misc_feature (1)..(25): SEQ ID NO: 6301; WAN024BNL_at; Start 311; Stop 335
gtggaaagaatcgaattccctctaa

SEQ ID NO: 87039 - DNA, 25 bp, Artificial
  probe
  misc_feature (1)..(25): SEQ ID NO: 6301; WAN024BNL_at; Start 128; Stop 152
taaatcaatatcaacgcctgacagg

SEQ ID NO: 87040 - DNA, 25 bp, Artificial
  probe
  misc_feature (1)..(25): SEQ ID NO: 6301; WAN024BNL_at; Start 305; Stop 329
tcgagagtggaaagaatcgaattcc

SEQ ID NO: 87041 - DNA, 25 bp, Artificial
  probe
  misc_feature (1)..(25): SEQ ID NO: 6301; WAN024BNL_at; Start 136; Stop 160
tatcaacgcctgacaggtgcgacgt

SEQ ID NO: 87042 - DNA, 25 bp, Artificial
  probe
  misc_feature (1)..(25): SEQ ID NO: 6301; WAN024BNL_at; Start 77; Stop 101
gacattcaaccccagtaaatccaaa

SEQ ID NO: 87043 - DNA, 25 bp, Artificial
  probe
  misc_feature (1)..(25): SEQ ID NO: 6301; WAN024BNL_at; Start 40; Stop 64
gatctctttacacaggataccccta

SEQ ID NO: 87044 - DNA, 25 bp, Artificial
  probe
  misc_feature (1)..(25): SEQ ID NO: 6301; WAN024BNL_at; Start 30; Stop 54
gagtgtttctgatctctttacacag

SEQ ID NO: 87045 - DNA, 25 bp, Artificial
  probe
  misc_feature (1)..(25): SEQ ID NO: 6301; WAN024BNL_at; Start 44; Stop 68
tctttacacaggatacccctattaa

SEQ ID NO: 87046 - DNA, 25 bp, Artificial
  probe
  misc_feature (1)..(25): SEQ ID NO: 6301; WAN024BNL_at; Start 172; Stop 196
tctaatatcatagggaagtcaaatt

SEQ ID NO: 87047 - DNA, 25 bp, Artificial
  probe
  misc_feature (1)..(25): SEQ ID NO: 6301; WAN024BNL_at; Start 215; Stop 239
tcgataaacagagaaagagtacact

SEQ ID NO: 87048 - DNA, 25 bp, Artificial
  probe
  misc_feature (1)..(25): SEQ ID NO: 6301; WAN024BNL_at; Start 223; Stop 247
cagagaaagagtacacttagtataa

SEQ ID NO: 87049 - DNA, 25 bp, Artificial
  probe
  misc_feature (1)..(25): SEQ ID NO: 6301; WAN024BNL_at; Start 367; Stop 391
gaagtggtgtttagatttaatggtc

SEQ ID NO: 87050 - DNA, 25 bp, Artificial
  probe
  misc_feature (1)..(25): SEQ ID NO: 6301; WAN024BNL_at; Start 385; Stop 409
aatggtctaataaaatccgttaatg

SEQ ID NO: 87051 - DNA, 25 bp, Artificial
  probe
  misc_feature (1)..(25): SEQ ID NO: 6301; WAN024BNL_at; Start 8; Stop 32
aaatcgctaccgcaatgaatgtgag

SEQ ID NO: 87052 - DNA, 25 bp, Artificial
  probe
  misc_feature (1)..(25): SEQ ID NO: 6301; WAN024BNL_at; Start 163; Stop 187
gaaaaaatttctaatatcataggga

SEQ ID NO: 87053 - DNA, 25 bp, Artificial
  probe
  misc_feature (1)..(25): SEQ ID NO: 6301; WAN024BNL_at; Start 271; Stop 295
gggtctatgattttaagacaagaaa

SEQ ID NO: 87054 - DNA, 25 bp, Artificial
  probe
  misc_feature (1)..(25): SEQ ID NO: 6301; WAN024BNL_at; Start 180; Stop 204
catagggaagtcaaattcatatatt

SEQ ID NO: 87055 - DNA, 25 bp, Artificial
  probe
  misc_feature (1)..(25): SEQ ID NO: 6301; WAN024BNL_at; Start 337; Stop 361
ttaacctatcaaacaatagatagag

SEQ ID NO: 87056 - DNA, 25 bp, Artificial
  probe
  misc_feature (1)..(25): SEQ ID NO: 6301; WAN024BNL_at; Start 123; Stop 147
taatgtaaatcaatatcaacgcctg

SEQ ID NO: 87057 - DNA, 25 bp, Artificial
  probe
  misc_feature (1)..(25): SEQ ID NO: 6301; WAN024BNL_at; Start 350; Stop 374
caatagatagagatagtgaagtggt

SEQ ID NO: 87058 - DNA, 25 bp, Artificial
  probe
  misc_feature (1)..(25): SEQ ID NO: 6301; WAN024BNL_at; Start 236; Stop 260
cacttagtataaaaagtaacgccag

SEQ ID NO: 87059 - DNA, 25 bp, Artificial
  probe
  misc_feature (1)..(25): SEQ ID NO: 6301; WAN024BNL_at; Start 142; Stop 166
cgcctgacaggtgcgacgtatgaaa

SEQ ID NO: 87060 - DNA, 25 bp, Artificial
  probe
  misc_feature (1)..(25): SEQ ID NO: 6301; WAN024BNL_at; Start 465; Stop 489
tccagctaagatttcaaaaattgaa

SEQ ID NO: 87061 - DNA, 25 bp, Artificial
  probe
  misc_feature (1)..(25): SEQ ID NO: 6301; WAN024BNL_at; Start 72; Stop 96
aaatagacattcaaccccagtaaat

SEQ ID NO: 87062 - DNA, 25 bp, Artificial
  probe
  misc_feature (1)..(25): SEQ ID NO: 6301; WAN024BNL_at; Start 149; Stop 173
caggtgcgacgtatgaaaaaatttc

SEQ ID NO: 87063 - DNA, 25 bp, Artificial
  probe
  misc_feature (1)..(25): SEQ ID NO: 6301; WAN024BNL_at; Start 289; Stop 313
caagaaattgaaaaaatcgagagtg

SEQ ID NO: 87064 - DNA, 25 bp, Artificial
  probe
  misc_feature (1)..(25): SEQ ID NO: 6301; WAN024BNL_at; Start 323; Stop 347
gaattccctctaaattaacctatca

SEQ ID NO: 87065 - DNA, 25 bp, Artificial
  probe
  misc_feature (1)..(25): SEQ ID NO: 6301; WAN024BNL_at; Start 204; Stop 228
ttatgacgttatcgataaacagaga

SEQ ID NO: 87066 - DNA, 25 bp, Artificial
  probe
  misc_feature (1)..(25): SEQ ID NO: 6301; WAN024BNL_at; Start 451; Stop 475
gatgccttgaaaattccagctaaga

SEQ ID NO: 87067 - DNA, 25 bp, Artificial
  probe
  misc_feature (1)..(25): SEQ ID NO: 6515; WAN024BNM_at; Start 38; Stop 62
ttaaaggaggaaagaaatatgccaa

SEQ ID NO: 87068 - DNA, 25 bp, Artificial
  probe
  misc_feature (1)..(25): SEQ ID NO: 6515; WAN024BNM_at; Start 43; Stop 67
ggaggaaagaaatatgccaaattgg

SEQ ID NO: 87069 - DNA, 25 bp, Artificial
  probe
  misc_feature (1)..(25): SEQ ID NO: 6515; WAN024BNM_at; Start 37; Stop 61
tttaaaggaggaaagaaatatgcca

SEQ ID NO: 87070 - DNA, 25 bp, Artificial
  probe
  misc_feature (1)..(25): SEQ ID NO: 6515; WAN024BNM_at; Start 40; Stop 64
aaaggaggaaagaaatatgccaaat

SEQ ID NO: 87071 - DNA, 25 bp, Artificial
  probe
  misc_feature (1)..(25): SEQ ID NO: 6515; WAN024BNM_at; Start 45; Stop 69
aggaaagaaatatgccaaattgggc

SEQ ID NO: 87072 - DNA, 25 bp, Artificial
  probe
  misc_feature (1)..(25): SEQ ID NO: 6515; WAN024BNM_at; Start 11; Stop 35
ccatttacaaaaaattactcaatgt

SEQ ID NO: 87073 - DNA, 25 bp, Artificial
  probe
  misc_feature (1)..(25): SEQ ID NO: 6515; WAN024BNM_at; Start 44; Stop 68
gaggaaagaaatatgccaaattggg

SEQ ID NO: 87074 - DNA, 25 bp, Artificial
  probe
  misc_feature (1)..(25): SEQ ID NO: 6515; WAN024BNM_at; Start 1; Stop 25
atgacaaataccatttacaaaaaat

SEQ ID NO: 87075 - DNA, 25 bp, Artificial
  probe
  misc_feature (1)..(25): SEQ ID NO: 6515; WAN024BNM_at; Start 41; Stop 65
aaggaggaaagaaatatgccaaatt

SEQ ID NO: 87076 - DNA, 25 bp, Artificial
  probe
  misc_feature (1)..(25): SEQ ID NO: 6515; WAN024BNM_at; Start 39; Stop 63
taaaggaggaaagaaatatgccaaa

SEQ ID NO: 87077 - DNA, 25 bp, Artificial
  probe
  misc_feature (1)..(25): SEQ ID NO: 6515; WAN024BNM_at; Start 12; Stop 36
catttacaaaaaattactcaatgtt

SEQ ID NO: 87078 - DNA, 25 bp, Artificial
  probe
  misc_feature (1)..(25): SEQ ID NO: 6515; WAN024BNM_at; Start 42; Stop 66
aggaggaaagaaatatgccaaattg

SEQ ID NO: 87079 - DNA, 25 bp, Artificial
  probe
  misc_feature (1)..(25): SEQ ID NO: 6515; WAN024BNM_at; Start 10; Stop 34
accatttacaaaaaattactcaatg

SEQ ID NO: 87080 - DNA, 25 bp, Artificial
  probe
  misc_feature (1)..(25): SEQ ID NO: 6515; WAN024BNM_at; Start 46; Stop 70
ggaaagaaatatgccaaattgggca

SEQ ID NO: 87081 - DNA, 25 bp, Artificial
  probe
  misc_feature (1)..(25): SEQ ID NO: 6718; WAN024BNN_at; Start 157; Stop 181
tatataaacggtacaaggcgtgcgt

SEQ ID NO: 87082 - DNA, 25 bp, Artificial
  probe
  misc_feature (1)..(25): SEQ ID NO: 6718; WAN024BNN_at; Start 262; Stop 286
gcagcattagctgacaattacacag

SEQ ID NO: 87083 - DNA, 25 bp, Artificial
  probe
  misc_feature (1)..(25): SEQ ID NO: 6718; WAN024BNN_at; Start 240; Stop 264
tgaagatttcgaacaagcatgggca

SEQ ID NO: 87084 - DNA, 25 bp, Artificial
  probe
  misc_feature (1)..(25): SEQ ID NO: 6718; WAN024BNN_at; Start 323; Stop 347
tcacttttgaaatgggtatggaatt

SEQ ID NO: 87085 - DNA, 25 bp, Artificial
  probe
  misc_feature (1)..(25): SEQ ID NO: 6718; WAN024BNN_at; Start 426; Stop 450
tgtgccttttagtagacttggagga

SEQ ID NO: 87086 - DNA, 25 bp, Artificial
  probe
  misc_feature (1)..(25): SEQ ID NO: 6718; WAN024BNN_at; Start 31; Stop 55
ttaagaggcagacgcgaaaacgttg

SEQ ID NO: 87087 - DNA, 25 bp, Artificial
  probe
  misc_feature (1)..(25): SEQ ID NO: 6718; WAN024BNN_at; Start 419; Stop 443
catgggatgtgccttttagtagact

SEQ ID NO: 87088 - DNA, 25 bp, Artificial
  probe
  misc_feature (1)..(25): SEQ ID NO: 6718; WAN024BNN_at; Start 244; Stop 268
gatttcgaacaagcatgggcagcat

SEQ ID NO: 87089 - DNA, 25 bp, Artificial
  probe
  misc_feature (1)..(25): SEQ ID NO: 6718; WAN024BNN_at; Start 98; Stop 122
cacttgaagaagaatacgatggcac

SEQ ID NO: 87090 - DNA, 25 bp, Artificial
  probe
  misc_feature (1)..(25): SEQ ID NO: 6718; WAN024BNN_at; Start 119; Stop 143
gcactctactaatatttaaaaacga

SEQ ID NO: 87091 - DNA, 25 bp, Artificial
  probe
  misc_feature (1)..(25): SEQ ID NO: 6718; WAN024BNN_at; Start 282; Stop 306
cacagaaatttctagtaagtttgat

SEQ ID NO: 87092 - DNA, 25 bp, Artificial
  probe
  misc_feature (1)..(25): SEQ ID NO: 6718; WAN024BNN_at; Start 59; Stop 83
cagctttaaaagaaatgctattagg

SEQ ID NO: 87093 - DNA, 25 bp, Artificial
  probe
  misc_feature (1)..(25): SEQ ID NO: 6718; WAN024BNN_at; Start 269; Stop 293
tagctgacaattacacagaaatttc

SEQ ID NO: 87094 - DNA, 25 bp, Artificial
  probe
  misc_feature (1)..(25): SEQ ID NO: 6718; WAN024BNN_at; Start 408; Stop 432
tactaactattcatgggatgtgcct

SEQ ID NO: 87095 - DNA, 25 bp, Artificial
  probe
  misc_feature (1)..(25): SEQ ID NO: 6718; WAN024BNN_at; Start 367; Stop 391
tcaaaaggtgaaatcatcaagaata

SEQ ID NO: 87096 - DNA, 25 bp, Artificial
  probe
  misc_feature (1)..(25): SEQ ID NO: 6718; WAN024BNN_at; Start 381; Stop 405
catcaagaatattgtaaacgaaaac

SEQ ID NO: 87097 - DNA, 25 bp, Artificial
  probe
  misc_feature (1)..(25): SEQ ID NO: 6718; WAN024BNN_at; Start 87; Stop 111
taaaggcgcaacacttgaagaagaa

SEQ ID NO: 87098 - DNA, 25 bp, Artificial
  probe
  misc_feature (1)..(25): SEQ ID NO: 6718; WAN024BNN_at; Start 24; Stop 48
tcttaaattaagaggcagacgcgaa

SEQ ID NO: 87099 - DNA, 25 bp, Artificial
  probe
  misc_feature (1)..(25): SEQ ID NO: 6718; WAN024BNN_at; Start 253; Stop 277
caagcatgggcagcattagctgaca

SEQ ID NO: 87100 - DNA, 25 bp, Artificial
  probe
  misc_feature (1)..(25): SEQ ID NO: 6718; WAN024BNN_at; Start 248; Stop 272
tcgaacaagcatgggcagcattagc

SEQ ID NO: 87101 - DNA, 25 bp, Artificial
  probe
  misc_feature (1)..(25): SEQ ID NO: 6718; WAN024BNN_at; Start 331; Stop 355
gaaatgggtatggaatttacacagg

SEQ ID NO: 87102 - DNA, 25 bp, Artificial
  probe
  misc_feature (1)..(25): SEQ ID NO: 6718; WAN024BNN_at; Start 114; Stop 138
cgatggcactctactaatatttaaa

SEQ ID NO: 87103 - DNA, 25 bp, Artificial
  probe
  misc_feature (1)..(25): SEQ ID NO: 6718; WAN024BNN_at; Start 46; Stop 70
gaaaacgttgcatcagctttaaaag

SEQ ID NO: 87104 - DNA, 25 bp, Artificial
  probe
  misc_feature (1)..(25): SEQ ID NO: 6718; WAN024BNN_at; Start 175; Stop 199
cgtgcgtttatttctagtaaagata

SEQ ID NO: 87105 - DNA, 25 bp, Artificial
  probe
  misc_feature (1)..(25): SEQ ID NO: 6718; WAN024BNN_at; Start 77; Stop 101
tattaggaaataaaggcgcaacact

SEQ ID NO: 87106 - DNA, 25 bp, Artificial
  probe
  misc_feature (1)..(25): SEQ ID NO: 6718; WAN024BNN_at; Start 170; Stop 194
caaggcgtgcgtttatttctagtaa

SEQ ID NO: 87107 - DNA, 25 bp, Artificial
  probe
  misc_feature (1)..(25): SEQ ID NO: 6718; WAN024BNN_at; Start 225; Stop 249
tgtgattatcgaacttgaagatttc

SEQ ID NO: 87108 - DNA, 25 bp, Artificial
  probe
  misc_feature (1)..(25): SEQ ID NO: 6718; WAN024BNN_at; Start 196; Stop 220
gatattgaaatttggttggatgatg

SEQ ID NO: 87109 - DNA, 25 bp, Artificial
  probe
  misc_feature (1)..(25): SEQ ID NO: 6718; WAN024BNN_at; Start 337; Stop 361
ggtatggaatttacacaggaaattg

SEQ ID NO: 87110 - DNA, 25 bp, Artificial
  probe
  misc_feature (1)..(25): SEQ ID NO: 6718; WAN024BNN_at; Start 399; Stop 423
cgaaaactttactaactattcatgg

SEQ ID NO: 87111 - DNA, 25 bp, Artificial
  probe
  misc_feature (1)..(25): SEQ ID NO: 6718; WAN024BNN_at; Start 103; Stop 127
gaagaagaatacgatggcactctac

SEQ ID NO: 87112 - DNA, 25 bp, Artificial
  probe
  misc_feature (1)..(25): SEQ ID NO: 6718; WAN024BNN_at; Start 352; Stop 376
caggaaattgaaatttcaaaaggtg

SEQ ID NO: 87113 - DNA, 25 bp, Artificial
  probe
  misc_feature (1)..(25): SEQ ID NO: 6718; WAN024BNN_at; Start 41; Stop 65
gacgcgaaaacgttgcatcagcttt

SEQ ID NO: 87114 - DNA, 25 bp, Artificial
  probe
  misc_feature (1)..(25): SEQ ID NO: 6718; WAN024BNN_at; Start 214; Stop 238
gatgatgattttgtgattatcgaac

SEQ ID NO: 87115 - DNA, 25 bp, Artificial
  probe
  misc_feature (1)..(25): SEQ ID NO: 6886; WAN024BNO_at; Start 566; Stop 590
cgcttgctaactatgtactatctga

SEQ ID NO: 87116 - DNA, 25 bp, Artificial
  probe
  misc_feature (1)..(25): SEQ ID NO: 6886; WAN024BNO_at; Start 229; Stop 253
gaaaaagctattggatgggctagag

SEQ ID NO: 87117 - DNA, 25 bp, Artificial
  probe
  misc_feature (1)..(25): SEQ ID NO: 6886; WAN024BNO_at; Start 139; Stop 163
tcatttccagaagatgacatcattc

SEQ ID NO: 87118 - DNA, 25 bp, Artificial
  probe
  misc_feature (1)..(25): SEQ ID NO: 6886; WAN024BNO_at; Start 123; Stop 147
tagcggttggagtgtatcatttcca

SEQ ID NO: 87119 - DNA, 25 bp, Artificial
  probe
  misc_feature (1)..(25): SEQ ID NO: 6886; WAN024BNO_at; Start 107; Stop 131
aatttaagtctttggatagcggttg

SEQ ID NO: 87120 - DNA, 25 bp, Artificial
  probe
  misc_feature (1)..(25): SEQ ID NO: 6886; WAN024BNO_at; Start 339; Stop 363
tgctagaaaatatgctttacaaggt

SEQ ID NO: 87121 - DNA, 25 bp, Artificial
  probe
  misc_feature (1)..(25): SEQ ID NO: 6886; WAN024BNO_at; Start 534; Stop 558
tattgcaaaaattaaagggatgccg

SEQ ID NO: 87122 - DNA, 25 bp, Artificial
  probe
  misc_feature (1)..(25): SEQ ID NO: 6886; WAN024BNO_at; Start 459; Stop 483
gcaagcccaaggacaaaatcaagta

SEQ ID NO: 87123 - DNA, 25 bp, Artificial
  probe
  misc_feature (1)..(25): SEQ ID NO: 6886; WAN024BNO_at; Start 83; Stop 107
gaaccgcagaggacataaataataa

SEQ ID NO: 87124 - DNA, 25 bp, Artificial
  probe
  misc_feature (1)..(25): SEQ ID NO: 6886; WAN024BNO_at; Start 289; Stop 313
gatgtgaaacagatgcaagatccac

SEQ ID NO: 87125 - DNA, 25 bp, Artificial
  probe
  misc_feature (1)..(25): SEQ ID NO: 6886; WAN024BNO_at; Start 657; Stop 681
tttaactgaacaactagcaaaggca

SEQ ID NO: 87126 - DNA, 25 bp, Artificial
  probe
  misc_feature (1)..(25): SEQ ID NO: 6886; WAN024BNO_at; Start 615; Stop 639
tcatagagtacaagttggtgactac

SEQ ID NO: 87127 - DNA, 25 bp, Artificial
  probe
  misc_feature (1)..(25): SEQ ID NO: 6886; WAN024BNO_at; Start 358; Stop 382
caaggtttatttgccattggaggtg

SEQ ID NO: 87128 - DNA, 25 bp, Artificial
  probe
  misc_feature (1)..(25): SEQ ID NO: 6886; WAN024BNO_at; Start 259; Stop 283
gatgtaccaatttttcacacacaaa

SEQ ID NO: 87129 - DNA, 25 bp, Artificial
  probe
  misc_feature (1)..(25): SEQ ID NO: 6886; WAN024BNO_at; Start 69; Stop 93
gaaatatccgtttagaaccgcagag

SEQ ID NO: 87130 - DNA, 25 bp, Artificial
  probe
  misc_feature (1)..(25): SEQ ID NO: 6886; WAN024BNO_at; Start 11; Stop 35
taacatttgcagaattacagcgaaa

SEQ ID NO: 87131 - DNA, 25 bp, Artificial
  probe
  misc_feature (1)..(25): SEQ ID NO: 6886; WAN024BNO_at; Start 478; Stop 502
caagtaaggtatattgacaacactc

SEQ ID NO: 87132 - DNA, 25 bp, Artificial
  probe
  misc_feature (1)..(25): SEQ ID NO: 6886; WAN024BNO_at; Start 397; Stop 421
tatccagtagaagaaagccaagagc

SEQ ID NO: 87133 - DNA, 25 bp, Artificial
  probe
  misc_feature (1)..(25): SEQ ID NO: 6886; WAN024BNO_at; Start 201; Stop 225
tgttaaaagagaaagtgatggcacg

SEQ ID NO: 87134 - DNA, 25 bp, Artificial
  probe
  misc_feature (1)..(25): SEQ ID NO: 6886; WAN024BNO_at; Start 174; Stop 198
caaactgtattataaagcggtagct

SEQ ID NO: 87135 - DNA, 25 bp, Artificial
  probe
  misc_feature (1)..(25): SEQ ID NO: 6886; WAN024BNO_at; Start 429; Stop 453
gaataatcagcaacagaaaccaaac

SEQ ID NO: 87136 - DNA, 25 bp, Artificial
  probe
  misc_feature (1)..(25): SEQ ID NO: 6886; WAN024BNO_at; Start 551; Stop 575
ggatgccgttcgatacgcttgctaa

SEQ ID NO: 87137 - DNA, 25 bp, Artificial
  probe
  misc_feature (1)..(25): SEQ ID NO: 6886; WAN024BNO_at; Start 516; Stop 540
taacgaccttataaatgatattgca

SEQ ID NO: 87138 - DNA, 25 bp, Artificial
  probe
  misc_feature (1)..(25): SEQ ID NO: 6886; WAN024BNO_at; Start 320; Stop 344
caggtgcggttggttcttatgctag

SEQ ID NO: 87139 - DNA, 25 bp, Artificial
  probe
  misc_feature (1)..(25): SEQ ID NO: 6886; WAN024BNO_at; Start 630; Stop 654
tggtgactacgaggtattgaaaaac

SEQ ID NO: 87140 - DNA, 25 bp, Artificial
  probe
  misc_feature (1)..(25): SEQ ID NO: 6886; WAN024BNO_at; Start 413; Stop 437
gccaagagcaaggacagaataatca

SEQ ID NO: 87141 - DNA, 25 bp, Artificial
  probe
  misc_feature (1)..(25): SEQ ID NO: 6886; WAN024BNO_at; Start 217; Stop 241
gatggcacgattgaaaaagctattg

SEQ ID NO: 87142 - DNA, 25 bp, Artificial
  probe
  misc_feature (1)..(25): SEQ ID NO: 6886; WAN024BNO_at; Start 242; Stop 266
gatgggctagagaagaagatgtacc

SEQ ID NO: 87143 - DNA, 25 bp, Artificial
  probe
  misc_feature (1)..(25): SEQ ID NO: 6886; WAN024BNO_at; Start 678; Stop 702
ggcaaaagcaaaagcaaagagaggt

SEQ ID NO: 87144 - DNA, 25 bp, Artificial
  probe
  misc_feature (1)..(25): SEQ ID NO: 6886; WAN024BNO_at; Start 444; Stop 468
gaaaccaaacaatcagcaagcccaa

SEQ ID NO: 87145 - DNA, 25 bp, Artificial
  probe
  misc_feature (1)..(25): SEQ ID NO: 6886; WAN024BNO_at; Start 304; Stop 328
caagatccacaatggacaggtgcgg

SEQ ID NO: 87146 - DNA, 25 bp, Artificial
  probe
  misc_feature (1)..(25): SEQ ID NO: 6886; WAN024BNO_at; Start 154; Stop 178
gacatcattcaaaaaggtgacaaac

SEQ ID NO: 87147 - DNA, 25 bp, Artificial
  probe
  misc_feature (1)..(25): SEQ ID NO: 6886; WAN024BNO_at; Start 187; Stop 211
aaagcggtagctgttgttaaaagag

SEQ ID NO: 87148 - DNA, 25 bp, Artificial
  probe
  misc_feature (1)..(25): SEQ ID NO: 6886; WAN024BNO_at; Start 54; Stop 78
aacgaaacagggagtgaaatatccg

SEQ ID NO: 87149 - DNA, 25 bp, Artificial
  probe
  misc_feature (1)..(25): SEQ ID NO: 6909; WAN024BNP_at; Start 60; Stop 84
aattaatgttgaccgtgaggcgatc

SEQ ID NO: 87150 - DNA, 25 bp, Artificial
  probe
  misc_feature (1)..(25): SEQ ID NO: 6909; WAN024BNP_at; Start 151; Stop 175
gaagtttatgaagagcgaacccgct

SEQ ID NO: 87151 - DNA, 25 bp, Artificial
  probe
  misc_feature (1)..(25): SEQ ID NO: 6909; WAN024BNP_at; Start 304; Stop 328
gctatgtcagcaggacttaatgcga

SEQ ID NO: 87152 - DNA, 25 bp, Artificial
  probe
  misc_feature (1)..(25): SEQ ID NO: 6909; WAN024BNP_at; Start 671; Stop 695
gagatgctgagattgcacgcaagga

SEQ ID NO: 87153 - DNA, 25 bp, Artificial
  probe
  misc_feature (1)..(25): SEQ ID NO: 6909; WAN024BNP_at; Start 800; Stop 824
caggcgagattttggaacagggtac

SEQ ID NO: 87154 - DNA, 25 bp, Artificial
  probe
  misc_feature (1)..(25): SEQ ID NO: 6909; WAN024BNP_at; Start 866; Stop 890
aatttgagcctagcgagcctttggt

SEQ ID NO: 87155 - DNA, 25 bp, Artificial
  probe
  misc_feature (1)..(25): SEQ ID NO: 6909; WAN024BNP_at; Start 423; Stop 447
tgacaaatacgatgagtacagcctc

SEQ ID NO: 87156 - DNA, 25 bp, Artificial
  probe
  misc_feature (1)..(25): SEQ ID NO: 6909; WAN024BNP_at; Start 828; Stop 852
tacaccagaacctcaaaacaatgcg

SEQ ID NO: 87157 - DNA, 25 bp, Artificial
  probe
  misc_feature (1)..(25): SEQ ID NO: 6909; WAN024BNP_at; Start 544; Stop 568
tacaaggctaacaagcaagctatcc

SEQ ID NO: 87158 - DNA, 25 bp, Artificial
  probe
  misc_feature (1)..(25): SEQ ID NO: 6909; WAN024BNP_at; Start 724; Stop 748
gctgaacgacttgaagaaattgctc

SEQ ID NO: 87159 - DNA, 25 bp, Artificial
  probe
  misc_feature (1)..(25): SEQ ID NO: 6909; WAN024BNP_at; Start 283; Stop 307
cctattgaggccgtaacagatgcta

SEQ ID NO: 87160 - DNA, 25 bp, Artificial
  probe
  misc_feature (1)..(25): SEQ ID NO: 6909; WAN024BNP_at; Start 580; Stop 604
caagagtacgatttgccagctgata

SEQ ID NO: 87161 - DNA, 25 bp, Artificial
  probe
  misc_feature (1)..(25): SEQ ID NO: 6909; WAN024BNP_at; Start 390; Stop 414
tatggtcgcagggattgaaaaatcc

SEQ ID NO: 87162 - DNA, 25 bp, Artificial
  probe
  misc_feature (1)..(25): SEQ ID NO: 6909; WAN024BNP_at; Start 528; Stop 552
tgatgccctggaagaatacaaggct

SEQ ID NO: 87163 - DNA, 25 bp, Artificial
  probe
  misc_feature (1)..(25): SEQ ID NO: 6909; WAN024BNP_at; Start 104; Stop 128
ccattgcacagtatagcggtcgcga

SEQ ID NO: 87164 - DNA, 25 bp, Artificial
  probe
  misc_feature (1)..(25): SEQ ID NO: 6909; WAN024BNP_at; Start 75; Stop 99
tgaggcgatcgaggcacaagtagcc

SEQ ID NO: 87165 - DNA, 25 bp, Artificial
  probe
  misc_feature (1)..(25): SEQ ID NO: 6909; WAN024BNP_at; Start 216; Stop 240
ttttaaccgacaaatcaatgagccg

SEQ ID NO: 87166 - DNA, 25 bp, Artificial
  probe
  misc_feature (1)..(25): SEQ ID NO: 6909; WAN024BNP_at; Start 488; Stop 512
caacacttgatgaaatggatggctt

SEQ ID NO: 87167 - DNA, 25 bp, Artificial
  probe
  misc_feature (1)..(25): SEQ ID NO: 6909; WAN024BNP_at; Start 781; Stop 805
aaggcttacgatgccgaaacaggcg

SEQ ID NO: 87168 - DNA, 25 bp, Artificial
  probe
  misc_feature (1)..(25): SEQ ID NO: 6909; WAN024BNP_at; Start 36; Stop 60
caaggtggattttcaacctgcagta

SEQ ID NO: 87169 - DNA, 25 bp, Artificial
  probe
  misc_feature (1)..(25): SEQ ID NO: 6909; WAN024BNP_at; Start 331; Stop 355
gatgaacatgaacgattgatgcgcg

SEQ ID NO: 87170 - DNA, 25 bp, Artificial
  probe
  misc_feature (1)..(25): SEQ ID NO: 6909; WAN024BNP_at; Start 472; Stop 496
tatgagctgaaaaagacaacacttg

SEQ ID NO: 87171 - DNA, 25 bp, Artificial
  probe
  misc_feature (1)..(25): SEQ ID NO: 6909; WAN024BNP_at; Start 90; Stop 114
acaagtagccgcagccattgcacag

SEQ ID NO: 87172 - DNA, 25 bp, Artificial
  probe
  misc_feature (1)..(25): SEQ ID NO: 6909; WAN024BNP_at; Start 686; Stop 710
cacgcaaggagcagaaagaaatcca

SEQ ID NO: 87173 - DNA, 25 bp, Artificial
  probe
  misc_feature (1)..(25): SEQ ID NO: 6909; WAN024BNP_at; Start 231; Stop 255
caatgagccggcaaaagactttgat

SEQ ID NO: 87174 - DNA, 25 bp, Artificial
  probe
  misc_feature (1)..(25): SEQ ID NO: 6909; WAN024BNP_at; Start 744; Stop 768
tgctcaatcggccaagaaaaatgct

SEQ ID NO: 87175 - DNA, 25 bp, Artificial
  probe
  misc_feature (1)..(25): SEQ ID NO: 6909; WAN024BNP_at; Start 352; Stop 376
cgcgtggatgtcgtgcgtgctacat

SEQ ID NO: 87176 - DNA, 25 bp, Artificial
  probe
  misc_feature (1)..(25): SEQ ID NO: 6909; WAN024BNP_at; Start 255; Stop 279
taagtgggtcaaagaaaaagtcatc

SEQ ID NO: 87177 - DNA, 25 bp, Artificial
  probe
  misc_feature (1)..(25): SEQ ID NO: 6909; WAN024BNP_at; Start 192; Stop 216
gggcttagacactcaacgcaaagat

SEQ ID NO: 87178 - DNA, 25 bp, Artificial
  probe
  misc_feature (1)..(25): SEQ ID NO: 6909; WAN024BNP_at; Start 766; Stop 790
gctaatgcgaatatcaaggcttacg

SEQ ID NO: 87179 - DNA, 25 bp, Artificial
  probe
  misc_feature (1)..(25): SEQ ID NO: 6909; WAN024BNP_at; Start 119; Stop 143
gcggtcgcgaggttactgttgataa

SEQ ID NO: 87180 - DNA, 25 bp, Artificial
  probe
  misc_feature (1)..(25): SEQ ID NO: 6909; WAN024BNP_at; Start 896; Stop 920
tagtacgtcttgaattgcacggtgg

SEQ ID NO: 87181 - DNA, 25 bp, Artificial
  probe
  misc_feature (1)..(25): SEQ ID NO: 6909; WAN024BNP_at; Start 657; Stop 681
gatgaaaactgatcgagatgctgag

SEQ ID NO: 87182 - DNA, 25 bp, Artificial
  probe
  misc_feature (1)..(25): SEQ ID NO: 6909; WAN024BNP_at; Start 843; Stop 867
aaacaatgcgcgagaggtggcaaaa

SEQ ID NO: 87183 - DNA, 25 bp, Artificial
  probe
  misc_feature (1)..(25): SEQ ID NO: 6580; WAN024BNQ_at; Start 31; Stop 55
gcagatcttgatttggggtcagaaa

SEQ ID NO: 87184 - DNA, 25 bp, Artificial
  probe
  misc_feature (1)..(25): SEQ ID NO: 6580; WAN024BNQ_at; Start 79; Stop 103
gctgctattgagtttgtgaaacgat

SEQ ID NO: 87185 - DNA, 25 bp, Artificial
  probe
  misc_feature (1)..(25): SEQ ID NO: 6580; WAN024BNQ_at; Start 93; Stop 117
tgtgaaacgatataccgacttatta

SEQ ID NO: 87186 - DNA, 25 bp, Artificial
  probe
  misc_feature (1)..(25): SEQ ID NO: 6580; WAN024BNQ_at; Start 84; Stop 108
tattgagtttgtgaaacgatatacc

SEQ ID NO: 87187 - DNA, 25 bp, Artificial
  probe
  misc_feature (1)..(25): SEQ ID NO: 6580; WAN024BNQ_at; Start 135; Stop 159
aatcaaggtatcagaagtagaggag

SEQ ID NO: 87188 - DNA, 25 bp, Artificial
  probe
  misc_feature (1)..(25): SEQ ID NO: 6580; WAN024BNQ_at; Start 124; Stop 148
ggttcaaatgaaatcaaggtatcag

SEQ ID NO: 87189 - DNA, 25 bp, Artificial
  probe
  misc_feature (1)..(25): SEQ ID NO: 6580; WAN024BNQ_at; Start 137; Stop 161
tcaaggtatcagaagtagaggaggt

SEQ ID NO: 87190 - DNA, 25 bp, Artificial
  probe
  misc_feature (1)..(25): SEQ ID NO: 6580; WAN024BNQ_at; Start 143; Stop 167
tatcagaagtagaggaggtgcaaaa

SEQ ID NO: 87191 - DNA, 25 bp, Artificial
  probe
  misc_feature (1)..(25): SEQ ID NO: 6580; WAN024BNQ_at; Start 62; Stop 86
cagaaaattcatttatggctgctat

SEQ ID NO: 87192 - DNA, 25 bp, Artificial
  probe
  misc_feature (1)..(25): SEQ ID NO: 6580; WAN024BNQ_at; Start 71; Stop 95
catttatggctgctattgagtttgt

SEQ ID NO: 87193 - DNA, 25 bp, Artificial
  probe
  misc_feature (1)..(25): SEQ ID NO: 6580; WAN024BNQ_at; Start 100; Stop 124
cgatataccgacttattaaagtttg

SEQ ID NO: 87194 - DNA, 25 bp, Artificial
  probe
  misc_feature (1)..(25): SEQ ID NO: 6580; WAN024BNQ_at; Start 3; Stop 27
gagatgtttttatgtcagcggtaaa

SEQ ID NO: 87195 - DNA, 25 bp, Artificial
  probe
  misc_feature (1)..(25): SEQ ID NO: 6580; WAN024BNQ_at; Start 48; Stop 72
gtcagaaatcaatgcagaaaattca

SEQ ID NO: 87196 - DNA, 25 bp, Artificial
  probe
  misc_feature (1)..(25): SEQ ID NO: 6580; WAN024BNQ_at; Start 18; Stop 42
cagcggtaaaattgcagatcttgat

SEQ ID NO: 87197 - DNA, 25 bp, Artificial
  probe
  misc_feature (1)..(25): SEQ ID NO: 6580; WAN024BNQ_at; Start 142; Stop 166
gtatcagaagtagaggaggtgcaaa

SEQ ID NO: 87198 - DNA, 25 bp, Artificial
  probe
  misc_feature (1)..(25): SEQ ID NO: 6580; WAN024BNQ_at; Start 46; Stop 70
gggtcagaaatcaatgcagaaaatt

SEQ ID NO: 87199 - DNA, 25 bp, Artificial
  probe
  misc_feature (1)..(25): SEQ ID NO: 6580; WAN024BNQ_at; Start 133; Stop 157
gaaatcaaggtatcagaagtagagg

SEQ ID NO: 87200 - DNA, 25 bp, Artificial
  probe
  misc_feature (1)..(25): SEQ ID NO: 6580; WAN024BNQ_at; Start 88; Stop 112
gagtttgtgaaacgatataccgact

SEQ ID NO: 87201 - DNA, 25 bp, Artificial
  probe
  misc_feature (1)..(25): SEQ ID NO: 6580; WAN024BNQ_at; Start 95; Stop 119
tgaaacgatataccgacttattaaa

SEQ ID NO: 87202 - DNA, 25 bp, Artificial
  probe
  misc_feature (1)..(25): SEQ ID NO: 6580; WAN024BNQ_at; Start 90; Stop 114
gtttgtgaaacgatataccgactta

SEQ ID NO: 87203 - DNA, 25 bp, Artificial
  probe
  misc_feature (1)..(25): SEQ ID NO: 6580; WAN024BNQ_at; Start 75; Stop 99
tatggctgctattgagtttgtgaaa

SEQ ID NO: 87204 - DNA, 25 bp, Artificial
  probe
  misc_feature (1)..(25): SEQ ID NO: 6580; WAN024BNQ_at; Start 150; Stop 174
agtagaggaggtgcaaaatgataaa

SEQ ID NO: 87205 - DNA, 25 bp, Artificial
  probe
  misc_feature (1)..(25): SEQ ID NO: 6580; WAN024BNQ_at; Start 66; Stop 90
aaattcatttatggctgctattgag

SEQ ID NO: 87206 - DNA, 25 bp, Artificial
  probe
  misc_feature (1)..(25): SEQ ID NO: 6580; WAN024BNQ_at; Start 116; Stop 140
taaagtttggttcaaatgaaatcaa

SEQ ID NO: 87207 - DNA, 25 bp, Artificial
  probe
  misc_feature (1)..(25): SEQ ID NO: 6580; WAN024BNQ_at; Start 15; Stop 39
tgtcagcggtaaaattgcagatctt

SEQ ID NO: 87208 - DNA, 25 bp, Artificial
  probe
  misc_feature (1)..(25): SEQ ID NO: 6580; WAN024BNQ_at; Start 128; Stop 152
caaatgaaatcaaggtatcagaagt

SEQ ID NO: 87209 - DNA, 25 bp, Artificial
  probe
  misc_feature (1)..(25): SEQ ID NO: 6580; WAN024BNQ_at; Start 56; Stop 80
tcaatgcagaaaattcatttatggc

SEQ ID NO: 87210 - DNA, 25 bp, Artificial
  probe
  misc_feature (1)..(25): SEQ ID NO: 6580; WAN024BNQ_at; Start 145; Stop 169
tcagaagtagaggaggtgcaaaatg

SEQ ID NO: 87211 - DNA, 25 bp, Artificial
  probe
  misc_feature (1)..(25): SEQ ID NO: 6580; WAN024BNQ_at; Start 11; Stop 35
tttatgtcagcggtaaaattgcaga

SEQ ID NO: 87212 - DNA, 25 bp, Artificial
  probe
  misc_feature (1)..(25): SEQ ID NO: 6580; WAN024BNQ_at; Start 77; Stop 101
tggctgctattgagtttgtgaaacg

SEQ ID NO: 87213 - DNA, 25 bp, Artificial
  probe
  misc_feature (1)..(25): SEQ ID NO: 6580; WAN024BNQ_at; Start 13; Stop 37
tatgtcagcggtaaaattgcagatc

SEQ ID NO: 87214 - DNA, 25 bp, Artificial
  probe
  misc_feature (1)..(25): SEQ ID NO: 6580; WAN024BNQ_at; Start 1; Stop 25
atgagatgtttttatgtcagcggta

SEQ ID NO: 87215 - DNA, 25 bp, Artificial
  probe
  misc_feature (1)..(25): SEQ ID NO: 6580; WAN024BNQ_at; Start 23; Stop 47
gtaaaattgcagatcttgatttggg

SEQ ID NO: 87216 - DNA, 25 bp, Artificial
  probe
  misc_feature (1)..(25): SEQ ID NO: 6580; WAN024BNQ_at; Start 148; Stop 172
gaagtagaggaggtgcaaaatgata

SEQ ID NO: 87217 - DNA, 25 bp, Artificial
  probe
  misc_feature (1)..(25): SEQ ID NO: 7386; WAN024BNR_at; Start 59; Stop 83
tgtctatcacatgggcagcgattgt

SEQ ID NO: 87218 - DNA, 25 bp, Artificial
  probe
  misc_feature (1)..(25): SEQ ID NO: 7386; WAN024BNR_at; Start 108; Stop 132
caaaaagcacaaggcaaaagtggat

SEQ ID NO: 87219 - DNA, 25 bp, Artificial
  probe
  misc_feature (1)..(25): SEQ ID NO: 7386; WAN024BNR_at; Start 160; Stop 184
gagattgcacgtcatgtacttaaaa

SEQ ID NO: 87220 - DNA, 25 bp, Artificial
  probe
  misc_feature (1)..(25): SEQ ID NO: 7386; WAN024BNR_at; Start 122; Stop 146
caaaagtggattattatcagaaacc

SEQ ID NO: 87221 - DNA, 25 bp, Artificial
  probe
  misc_feature (1)..(25): SEQ ID NO: 7386; WAN024BNR_at; Start 63; Stop 87
tatcacatgggcagcgattgttaca

SEQ ID NO: 87222 - DNA, 25 bp, Artificial
  probe
  misc_feature (1)..(25): SEQ ID NO: 7386; WAN024BNR_at; Start 56; Stop 80
tgatgtctatcacatgggcagcgat

SEQ ID NO: 87223 - DNA, 25 bp, Artificial
  probe
  misc_feature (1)..(25): SEQ ID NO: 7386; WAN024BNR_at; Start 54; Stop 78
tttgatgtctatcacatgggcagcg

SEQ ID NO: 87224 - DNA, 25 bp, Artificial
  probe
  misc_feature (1)..(25): SEQ ID NO: 7386; WAN024BNR_at; Start 129; Stop 153
ggattattatcagaaaccacaagtg

SEQ ID NO: 87225 - DNA, 25 bp, Artificial
  probe
  misc_feature (1)..(25): SEQ ID NO: 7386; WAN024BNR_at; Start 82; Stop 106
gttacaattcacactatgcaagcta

SEQ ID NO: 87226 - DNA, 25 bp, Artificial
  probe
  misc_feature (1)..(25): SEQ ID NO: 7386; WAN024BNR_at; Start 180; Stop 204
taaaaacaaatggtactcagatggt

SEQ ID NO: 87227 - DNA, 25 bp, Artificial
  probe
  misc_feature (1)..(25): SEQ ID NO: 7386; WAN024BNR_at; Start 30; Stop 54
tgaaatcgttatggtacttacaact

SEQ ID NO: 87228 - DNA, 25 bp, Artificial
  probe
  misc_feature (1)..(25): SEQ ID NO: 7386; WAN024BNR_at; Start 2; Stop 26
tgaaaaggaaacagaaaatgacaaa

SEQ ID NO: 87229 - DNA, 25 bp, Artificial
  probe
  misc_feature (1)..(25): SEQ ID NO: 7386; WAN024BNR_at; Start 183; Stop 207
aaacaaatggtactcagatggtggg

SEQ ID NO: 87230 - DNA, 25 bp, Artificial
  probe
  misc_feature (1)..(25): SEQ ID NO: 7386; WAN024BNR_at; Start 13; Stop 37
cagaaaatgacaaaaattgaaatcg

SEQ ID NO: 87231 - DNA, 25 bp, Artificial
  probe
  misc_feature (1)..(25): SEQ ID NO: 7386; WAN024BNR_at; Start 77; Stop 101
cgattgttacaattcacactatgca

SEQ ID NO: 87232 - DNA, 25 bp, Artificial
  probe
  misc_feature (1)..(25): SEQ ID NO: 7386; WAN024BNR_at; Start 98; Stop 122
tgcaagctatcaaaaagcacaaggc

SEQ ID NO: 87233 - DNA, 25 bp, Artificial
  probe
  misc_feature (1)..(25): SEQ ID NO: 7386; WAN024BNR_at; Start 136; Stop 160
tatcagaaaccacaagtgcaatgtg

SEQ ID NO: 87234 - DNA, 25 bp, Artificial
  probe
  misc_feature (1)..(25): SEQ ID NO: 7386; WAN024BNR_at; Start 169; Stop 193
cgtcatgtacttaaaaacaaatggt

SEQ ID NO: 87235 - DNA, 25 bp, Artificial
  probe
  misc_feature (1)..(25): SEQ ID NO: 7386; WAN024BNR_at; Start 133; Stop 157
tattatcagaaaccacaagtgcaat

SEQ ID NO: 87236 - DNA, 25 bp, Artificial
  probe
  misc_feature (1)..(25): SEQ ID NO: 7386; WAN024BNR_at; Start 86; Stop 110
caattcacactatgcaagctatcaa

SEQ ID NO: 87237 - DNA, 25 bp, Artificial
  probe
  misc_feature (1)..(25): SEQ ID NO: 7386; WAN024BNR_at; Start 165; Stop 189
tgcacgtcatgtacttaaaaacaaa

SEQ ID NO: 87238 - DNA, 25 bp, Artificial
  probe
  misc_feature (1)..(25): SEQ ID NO: 7386; WAN024BNR_at; Start 34; Stop 58
atcgttatggtacttacaactttga

SEQ ID NO: 87239 - DNA, 25 bp, Artificial
  probe
  misc_feature (1)..(25): SEQ ID NO: 7386; WAN024BNR_at; Start 105; Stop 129
tatcaaaaagcacaaggcaaaagtg

SEQ ID NO: 87240 - DNA, 25 bp, Artificial
  probe
  misc_feature (1)..(25): SEQ ID NO: 7386; WAN024BNR_at; Start 90; Stop 114
tcacactatgcaagctatcaaaaag

SEQ ID NO: 87241 - DNA, 25 bp, Artificial
  probe
  misc_feature (1)..(25): SEQ ID NO: 7386; WAN024BNR_at; Start 115; Stop 139
cacaaggcaaaagtggattattatc

SEQ ID NO: 87242 - DNA, 25 bp, Artificial
  probe
  misc_feature (1)..(25): SEQ ID NO: 7386; WAN024BNR_at; Start 68; Stop 92
catgggcagcgattgttacaattca

SEQ ID NO: 87243 - DNA, 25 bp, Artificial
  probe
  misc_feature (1)..(25): SEQ ID NO: 7386; WAN024BNR_at; Start 154; Stop 178
caatgtgagattgcacgtcatgtac

SEQ ID NO: 87244 - DNA, 25 bp, Artificial
  probe
  misc_feature (1)..(25): SEQ ID NO: 7386; WAN024BNR_at; Start 72; Stop 96
ggcagcgattgttacaattcacact

SEQ ID NO: 87245 - DNA, 25 bp, Artificial
  probe
  misc_feature (1)..(25): SEQ ID NO: 7386; WAN024BNR_at; Start 100; Stop 124
caagctatcaaaaagcacaaggcaa

SEQ ID NO: 87246 - DNA, 25 bp, Artificial
  probe
  misc_feature (1)..(25): SEQ ID NO: 7386; WAN024BNR_at; Start 23; Stop 47
caaaaattgaaatcgttatggtact

SEQ ID NO: 87247 - DNA, 25 bp, Artificial
  probe
  misc_feature (1)..(25): SEQ ID NO: 7386; WAN024BNR_at; Start 144; Stop 168
accacaagtgcaatgtgagattgca

SEQ ID NO: 87248 - DNA, 25 bp, Artificial
  probe
  misc_feature (1)..(25): SEQ ID NO: 7386; WAN024BNR_at; Start 139; Stop 163
cagaaaccacaagtgcaatgtgaga

SEQ ID NO: 87249 - DNA, 25 bp, Artificial
  probe
  misc_feature (1)..(25): SEQ ID NO: 7386; WAN024BNR_at; Start 66; Stop 90
cacatgggcagcgattgttacaatt

SEQ ID NO: 87250 - DNA, 25 bp, Artificial
  probe
  misc_feature (1)..(25): SEQ ID NO: 7386; WAN024BNR_at; Start 50; Stop 74
caactttgatgtctatcacatgggc

SEQ ID NO: 87251 - DNA, 25 bp, Artificial
  probe
  misc_feature (1)..(25): SEQ ID NO: 6833; WAN024BNS_at; Start 355; Stop 379
caaccagtggcagaaattgaacaac

SEQ ID NO: 87252 - DNA, 25 bp, Artificial
  probe
  misc_feature (1)..(25): SEQ ID NO: 6833; WAN024BNS_at; Start 65; Stop 89
tagacaaagagcttgaaaaagtctt

SEQ ID NO: 87253 - DNA, 25 bp, Artificial
  probe
  misc_feature (1)..(25): SEQ ID NO: 6833; WAN024BNS_at; Start 379; Stop 403
caagcagaaacaaaatcagatatta

SEQ ID NO: 87254 - DNA, 25 bp, Artificial
  probe
  misc_feature (1)..(25): SEQ ID NO: 6833; WAN024BNS_at; Start 232; Stop 256
gctacaacaattcttattgggcgtg

SEQ ID NO: 87255 - DNA, 25 bp, Artificial
  probe
  misc_feature (1)..(25): SEQ ID NO: 6833; WAN024BNS_at; Start 365; Stop 389
cagaaattgaacaacaagcagaaac

SEQ ID NO: 87256 - DNA, 25 bp, Artificial
  probe
  misc_feature (1)..(25): SEQ ID NO: 6833; WAN024BNS_at; Start 152; Stop 176
caatgtcagcaaatgaagagcgtac

SEQ ID NO: 87257 - DNA, 25 bp, Artificial
  probe
  misc_feature (1)..(25): SEQ ID NO: 6833; WAN024BNS_at; Start 344; Stop 368
cggatattgggcaaccagtggcaga

SEQ ID NO: 87258 - DNA, 25 bp, Artificial
  probe
  misc_feature (1)..(25): SEQ ID NO: 6833; WAN024BNS_at; Start 310; Stop 334
caaatgtattttgatgaaaacggag

SEQ ID NO: 87259 - DNA, 25 bp, Artificial
  probe
  misc_feature (1)..(25): SEQ ID NO: 6833; WAN024BNS_at; Start 321; Stop 345
tgatgaaaacggagaaattctgacg

SEQ ID NO: 87260 - DNA, 25 bp, Artificial
  probe
  misc_feature (1)..(25): SEQ ID NO: 6833; WAN024BNS_at; Start 124; Stop 148
gcaaaacgaaaagtgactatcacac

SEQ ID NO: 87261 - DNA, 25 bp, Artificial
  probe
  misc_feature (1)..(25): SEQ ID NO: 6833; WAN024BNS_at; Start 209; Stop 233
aatttgcgcctcaaaatggagtagc

SEQ ID NO: 87262 - DNA, 25 bp, Artificial
  probe
  misc_feature (1)..(25): SEQ ID NO: 6833; WAN024BNS_at; Start 184; Stop 208
gatactaccatggaggtgaaatcaa

SEQ ID NO: 87263 - DNA, 25 bp, Artificial
  probe
  misc_feature (1)..(25): SEQ ID NO: 6833; WAN024BNS_at; Start 176; Stop 200
cagttgttgatactaccatggaggt

SEQ ID NO: 87264 - DNA, 25 bp, Artificial
  probe
  misc_feature (1)..(25): SEQ ID NO: 6833; WAN024BNS_at; Start 117; Stop 141
tgcgaaagcaaaacgaaaagtgact

SEQ ID NO: 87265 - DNA, 25 bp, Artificial
  probe
  misc_feature (1)..(25): SEQ ID NO: 6833; WAN024BNS_at; Start 169; Stop 193
gagcgtacagttgttgatactacca

SEQ ID NO: 87266 - DNA, 25 bp, Artificial
  probe
  misc_feature (1)..(25): SEQ ID NO: 6833; WAN024BNS_at; Start 27; Stop 51
tctaacccacattgcagatggagga

SEQ ID NO: 87267 - DNA, 25 bp, Artificial
  probe
  misc_feature (1)..(25): SEQ ID NO: 6833; WAN024BNS_at; Start 285; Stop 309
cgagctgaaaagtacagtacctggt

SEQ ID NO: 87268 - DNA, 25 bp, Artificial
  probe
  misc_feature (1)..(25): SEQ ID NO: 6833; WAN024BNS_at; Start 40; Stop 64
gcagatggaggattacaggagaaac

SEQ ID NO: 87269 - DNA, 25 bp, Artificial
  probe
  misc_feature (1)..(25): SEQ ID NO: 6833; WAN024BNS_at; Start 298; Stop 322
acagtacctggtcaaatgtattttg

SEQ ID NO: 87270 - DNA, 25 bp, Artificial
  probe
  misc_feature (1)..(25): SEQ ID NO: 6833; WAN024BNS_at; Start 138; Stop 162
gactatcacacttacaatgtcagca

SEQ ID NO: 87271 - DNA, 25 bp, Artificial
  probe
  misc_feature (1)..(25): SEQ ID NO: 6833; WAN024BNS_at; Start 258; Stop 282
ttttgatacaggacaagtacatgct

SEQ ID NO: 87272 - DNA, 25 bp, Artificial
  probe
  misc_feature (1)..(25): SEQ ID NO: 6833; WAN024BNS_at; Start 20; Stop 44
ggttagatctaacccacattgcaga

SEQ ID NO: 87273 - DNA, 25 bp, Artificial
  probe
  misc_feature (1)..(25): SEQ ID NO: 6833; WAN024BNS_at; Start 266; Stop 290
caggacaagtacatgctaacgagct

SEQ ID NO: 87274 - DNA, 25 bp, Artificial
  probe
  misc_feature (1)..(25): SEQ ID NO: 6833; WAN024BNS_at; Start 277; Stop 301
catgctaacgagctgaaaagtacag

SEQ ID NO: 87275 - DNA, 25 bp, Artificial
  probe
  misc_feature (1)..(25): SEQ ID NO: 6833; WAN024BNS_at; Start 79; Stop 103
gaaaaagtctttgataacatccttg

SEQ ID NO: 87276 - DNA, 25 bp, Artificial
  probe
  misc_feature (1)..(25): SEQ ID NO: 6833; WAN024BNS_at; Start 336; Stop 360
aattctgacggatattgggcaacca

SEQ ID NO: 87277 - DNA, 25 bp, Artificial
  probe
  misc_feature (1)..(25): SEQ ID NO: 6833; WAN024BNS_at; Start 216; Stop 240
gcctcaaaatggagtagctacaaca

SEQ ID NO: 87278 - DNA, 25 bp, Artificial
  probe
  misc_feature (1)..(25): SEQ ID NO: 6833; WAN024BNS_at; Start 157; Stop 181
tcagcaaatgaagagcgtacagttg

SEQ ID NO: 87279 - DNA, 25 bp, Artificial
  probe
  misc_feature (1)..(25): SEQ ID NO: 6833; WAN024BNS_at; Start 194; Stop 218
tggaggtgaaatcaaaatttgcgcc

SEQ ID NO: 87280 - DNA, 25 bp, Artificial
  probe
  misc_feature (1)..(25): SEQ ID NO: 6833; WAN024BNS_at; Start 91; Stop 115
gataacatccttgacctaaatacag

SEQ ID NO: 87281 - DNA, 25 bp, Artificial
  probe
  misc_feature (1)..(25): SEQ ID NO: 6833; WAN024BNS_at; Start 102; Stop 126
tgacctaaatacagatgcgaaagca

SEQ ID NO: 87282 - DNA, 25 bp, Artificial
  probe
  misc_feature (1)..(25): SEQ ID NO: 6833; WAN024BNS_at; Start 403; Stop 427
attgatttcaacaaaaagaaagtag

SEQ ID NO: 87283 - DNA, 25 bp, Artificial
  probe
  misc_feature (1)..(25): SEQ ID NO: 6833; WAN024BNS_at; Start 53; Stop 77
tacaggagaaactagacaaagagct

SEQ ID NO: 87284 - DNA, 25 bp, Artificial
  probe
  misc_feature (1)..(25): SEQ ID NO: 6833; WAN024BNS_at; Start 247; Stop 271
attgggcgtgattttgatacaggac

SEQ ID NO: 87285 - DNA, 25 bp, Artificial
  probe
  misc_feature (1)..(25): SEQ ID NO: 6518; WAN024BNT_at; Start 383; Stop 407
caaactttattgacgataacgatcg

SEQ ID NO: 87286 - DNA, 25 bp, Artificial
  probe
  misc_feature (1)..(25): SEQ ID NO: 6518; WAN024BNT_at; Start 312; Stop 336
taaggcacgcatcccagagttatct

SEQ ID NO: 87287 - DNA, 25 bp, Artificial
  probe
  misc_feature (1)..(25): SEQ ID NO: 6518; WAN024BNT_at; Start 561; Stop 585
tacatttagcgaggttgagcaaccg

SEQ ID NO: 87288 - DNA, 25 bp, Artificial
  probe
  misc_feature (1)..(25): SEQ ID NO: 6518; WAN024BNT_at; Start 576; Stop 600
tgagcaaccggcaagcctatttgtc

SEQ ID NO: 87289 - DNA, 25 bp, Artificial
  probe
  misc_feature (1)..(25): SEQ ID NO: 6518; WAN024BNT_at; Start 265; Stop 289
tggtctgaaaatgatgagatcgaac

SEQ ID NO: 87290 - DNA, 25 bp, Artificial
  probe
  misc_feature (1)..(25): SEQ ID NO: 6518; WAN024BNT_at; Start 424; Stop 448
tttgctagcgcattgaaaattgaga

SEQ ID NO: 87291 - DNA, 25 bp, Artificial
  probe
  misc_feature (1)..(25): SEQ ID NO: 6518; WAN024BNT_at; Start 549; Stop 573
gcgcccatatcgtacatttagcgag

SEQ ID NO: 87292 - DNA, 25 bp, Artificial
  probe
  misc_feature (1)..(25): SEQ ID NO: 6518; WAN024BNT_at; Start 468; Stop 492
taatggagtatctcaagtagcaaca

SEQ ID NO: 87293 - DNA, 25 bp, Artificial
  probe
  misc_feature (1)..(25): SEQ ID NO: 6518; WAN024BNT_at; Start 597; Stop 621
tgtctttaggattgataagcaagcc

SEQ ID NO: 87294 - DNA, 25 bp, Artificial
  probe
  misc_feature (1)..(25): SEQ ID NO: 6518; WAN024BNT_at; Start 135; Stop 159
taaacgctatcctaaaactctggag

SEQ ID NO: 87295 - DNA, 25 bp, Artificial
  probe
  misc_feature (1)..(25): SEQ ID NO: 6518; WAN024BNT_at; Start 688; Stop 712
tatctaaaagagcaactagcagacc

SEQ ID NO: 87296 - DNA, 25 bp, Artificial
  probe
  misc_feature (1)..(25): SEQ ID NO: 6518; WAN024BNT_at; Start 296; Stop 320
cattgcttgttgatgttaaggcacg

SEQ ID NO: 87297 - DNA, 25 bp, Artificial
  probe
  misc_feature (1)..(25): SEQ ID NO: 6518; WAN024BNT_at; Start 659; Stop 683
tagctgatgcagtaggaaacattgc

SEQ ID NO: 87298 - DNA, 25 bp, Artificial
  probe
  misc_feature (1)..(25): SEQ ID NO: 6518; WAN024BNT_at; Start 517; Stop 541
gctaaaggcaaagcacctaatccgg

SEQ ID NO: 87299 - DNA, 25 bp, Artificial
  probe
  misc_feature (1)..(25): SEQ ID NO: 6518; WAN024BNT_at; Start 340; Stop 364
ggccgtttcctatcattggaacagt

SEQ ID NO: 87300 - DNA, 25 bp, Artificial
  probe
  misc_feature (1)..(25): SEQ ID NO: 6518; WAN024BNT_at; Start 480; Stop 504
tcaagtagcaacagttaaaacaggg

SEQ ID NO: 87301 - DNA, 25 bp, Artificial
  probe
  misc_feature (1)..(25): SEQ ID NO: 6518; WAN024BNT_at; Start 534; Stop 558
taatccggttacattgcgcccatat

SEQ ID NO: 87302 - DNA, 25 bp, Artificial
  probe
  misc_feature (1)..(25): SEQ ID NO: 6518; WAN024BNT_at; Start 19; Stop 43
aaatcagcattggaatacgcagtag

SEQ ID NO: 87303 - DNA, 25 bp, Artificial
  probe
  misc_feature (1)..(25): SEQ ID NO: 6518; WAN024BNT_at; Start 120; Stop 144
caaagaacttgaccctaaacgctat

SEQ ID NO: 87304 - DNA, 25 bp, Artificial
  probe
  misc_feature (1)..(25): SEQ ID NO: 6518; WAN024BNT_at; Start 100; Stop 124
gatgccaacaaattcaacctcaaag

SEQ ID NO: 87305 - DNA, 25 bp, Artificial
  probe
  misc_feature (1)..(25): SEQ ID NO: 6518; WAN024BNT_at; Start 150; Stop 174
aactctggagctatcaaccttgaca

SEQ ID NO: 87306 - DNA, 25 bp, Artificial
  probe
  misc_feature (1)..(25): SEQ ID NO: 6518; WAN024BNT_at; Start 34; Stop 58
tacgcagtagaactaaatgagcatg

SEQ ID NO: 87307 - DNA, 25 bp, Artificial
  probe
  misc_feature (1)..(25): SEQ ID NO: 6518; WAN024BNT_at; Start 704; Stop 728
tagcagaccaaaaacatatcacagt

SEQ ID NO: 87308 - DNA, 25 bp, Artificial
  probe
  misc_feature (1)..(25): SEQ ID NO: 6518; WAN024BNT_at; Start 280; Stop 304
gagatcgaacatcgcacattgcttg

SEQ ID NO: 87309 - DNA, 25 bp, Artificial
  probe
  misc_feature (1)..(25): SEQ ID NO: 6518; WAN024BNT_at; Start 674; Stop 698
gaaacattgcatcctatctaaaaga

SEQ ID NO: 87310 - DNA, 25 bp, Artificial
  probe
  misc_feature (1)..(25): SEQ ID NO: 6518; WAN024BNT_at; Start 233; Stop 257
tagcagttgagaaaaacgatgaggt

SEQ ID NO: 87311 - DNA, 25 bp, Artificial
  probe
  misc_feature (1)..(25): SEQ ID NO: 6518; WAN024BNT_at; Start 399; Stop 423
taacgatcgtggcacattgctagaa

SEQ ID NO: 87312 - DNA, 25 bp, Artificial
  probe
  misc_feature (1)..(25): SEQ ID NO: 6518; WAN024BNT_at; Start 171; Stop 195
gacaagccttgttgactatctcaaa

SEQ ID NO: 87313 - DNA, 25 bp, Artificial
  probe
  misc_feature (1)..(25): SEQ ID NO: 6518; WAN024BNT_at; Start 503; Stop 527
gggtggcaagccttgctaaaggcaa

SEQ ID NO: 87314 - DNA, 25 bp, Artificial
  probe
  misc_feature (1)..(25): SEQ ID NO: 6518; WAN024BNT_at; Start 326; Stop 350
cagagttatcttttggccgtttcct

SEQ ID NO: 87315 - DNA, 25 bp, Artificial
  probe
  misc_feature (1)..(25): SEQ ID NO: 6518; WAN024BNT_at; Start 620; Stop 644
ccaatatggctttatttgaggcaga

SEQ ID NO: 87316 - DNA, 25 bp, Artificial
  probe
  misc_feature (1)..(25): SEQ ID NO: 6518; WAN024BNT_at; Start 214; Stop 238
aaaaaccaacgcttgattgtagcag

SEQ ID NO: 87317 - DNA, 25 bp, Artificial
  probe
  misc_feature (1)..(25): SEQ ID NO: 6518; WAN024BNT_at; Start 63; Stop 87
ggaaattttaacagctgcagatgga

SEQ ID NO: 87318 - DNA, 25 bp, Artificial
  probe
  misc_feature (1)..(25): SEQ ID NO: 6518; WAN024BNT_at; Start 85; Stop 109
ggaacagagtattatgatgccaaca

SEQ ID NO: 87319 - DNA, 25 bp, Artificial
  probe
  misc_feature (1)..(25): SEQ ID NO: 6734; WAN024BNU_at; Start 92; Stop 116
gcttaatccaccataaacaaaggat

SEQ ID NO: 87320 - DNA, 25 bp, Artificial
  probe
  misc_feature (1)..(25): SEQ ID NO: 6734; WAN024BNU_at; Start 91; Stop 115
cgcttaatccaccataaacaaagga

SEQ ID NO: 87321 - DNA, 25 bp, Artificial
  probe
  misc_feature (1)..(25): SEQ ID NO: 6734; WAN024BNU_at; Start 73; Stop 97
tataatgccctttttcctcgcttaa

SEQ ID NO: 87322 - DNA, 25 bp, Artificial
  probe
  misc_feature (1)..(25): SEQ ID NO: 6734; WAN024BNU_at; Start 95; Stop 119
taatccaccataaacaaaggataac

SEQ ID NO: 87323 - DNA, 25 bp, Artificial
  probe
  misc_feature (1)..(25): SEQ ID NO: 6734; WAN024BNU_at; Start 2; Stop 26
tgcgcttcaaaattatcgaatttta

SEQ ID NO: 87324 - DNA, 25 bp, Artificial
  probe
  misc_feature (1)..(25): SEQ ID NO: 6734; WAN024BNU_at; Start 97; Stop 121
atccaccataaacaaaggataactt

SEQ ID NO: 87325 - DNA, 25 bp, Artificial
  probe
  misc_feature (1)..(25): SEQ ID NO: 6734; WAN024BNU_at; Start 35; Stop 59
tcaatcactttaaacctcctctata

SEQ ID NO: 87326 - DNA, 25 bp, Artificial
  probe
  misc_feature (1)..(25): SEQ ID NO: 6734; WAN024BNU_at; Start 83; Stop 107
tttttcctcgcttaatccaccataa

SEQ ID NO: 87327 - DNA, 25 bp, Artificial
  probe
  misc_feature (1)..(25): SEQ ID NO: 6734; WAN024BNU_at; Start 72; Stop 96
ctataatgccctttttcctcgctta

SEQ ID NO: 87328 - DNA, 25 bp, Artificial
  probe
  misc_feature (1)..(25): SEQ ID NO: 6734; WAN024BNU_at; Start 77; Stop 101
atgccctttttcctcgcttaatcca

SEQ ID NO: 87329 - DNA, 25 bp, Artificial
  probe
  misc_feature (1)..(25): SEQ ID NO: 6734; WAN024BNU_at; Start 32; Stop 56
acttcaatcactttaaacctcctct

SEQ ID NO: 87330 - DNA, 25 bp, Artificial
  probe
  misc_feature (1)..(25): SEQ ID NO: 6734; WAN024BNU_at; Start 36; Stop 60
caatcactttaaacctcctctatat

SEQ ID NO: 87331 - DNA, 25 bp, Artificial
  probe
  misc_feature (1)..(25): SEQ ID NO: 6734; WAN024BNU_at; Start 51; Stop 75
tcctctatatcaaactctaatctat

SEQ ID NO: 87332 - DNA, 25 bp, Artificial
  probe
  misc_feature (1)..(25): SEQ ID NO: 6734; WAN024BNU_at; Start 40; Stop 64
cactttaaacctcctctatatcaaa

SEQ ID NO: 87333 - DNA, 25 bp, Artificial
  probe
  misc_feature (1)..(25): SEQ ID NO: 6734; WAN024BNU_at; Start 44; Stop 68
ttaaacctcctctatatcaaactct

SEQ ID NO: 87334 - DNA, 25 bp, Artificial
  probe
  misc_feature (1)..(25): SEQ ID NO: 6734; WAN024BNU_at; Start 75; Stop 99
taatgccctttttcctcgcttaatc

SEQ ID NO: 87335 - DNA, 25 bp, Artificial
  probe
  misc_feature (1)..(25): SEQ ID NO: 6734; WAN024BNU_at; Start 64; Stop 88
actctaatctataatgccctttttc

SEQ ID NO: 87336 - DNA, 25 bp, Artificial
  probe
  misc_feature (1)..(25): SEQ ID NO: 6734; WAN024BNU_at; Start 87; Stop 111
tcctcgcttaatccaccataaacaa

SEQ ID NO: 87337 - DNA, 25 bp, Artificial
  probe
  misc_feature (1)..(25): SEQ ID NO: 6734; WAN024BNU_at; Start 49; Stop 73
cctcctctatatcaaactctaatct

SEQ ID NO: 87338 - DNA, 25 bp, Artificial
  probe
  misc_feature (1)..(25): SEQ ID NO: 6734; WAN024BNU_at; Start 58; Stop 82
tatcaaactctaatctataatgccc

SEQ ID NO: 87339 - DNA, 25 bp, Artificial
  probe
  misc_feature (1)..(25): SEQ ID NO: 6734; WAN024BNU_at; Start 86; Stop 110
ttcctcgcttaatccaccataaaca

SEQ ID NO: 87340 - DNA, 25 bp, Artificial
  probe
  misc_feature (1)..(25): SEQ ID NO: 6734; WAN024BNU_at; Start 46; Stop 70
aaacctcctctatatcaaactctaa

SEQ ID NO: 87341 - DNA, 25 bp, Artificial
  probe
  misc_feature (1)..(25): SEQ ID NO: 6734; WAN024BNU_at; Start 93; Stop 117
cttaatccaccataaacaaaggata

SEQ ID NO: 87342 - DNA, 25 bp, Artificial
  probe
  misc_feature (1)..(25): SEQ ID NO: 6734; WAN024BNU_at; Start 60; Stop 84
tcaaactctaatctataatgccctt

SEQ ID NO: 87343 - DNA, 25 bp, Artificial
  probe
  misc_feature (1)..(25): SEQ ID NO: 6734; WAN024BNU_at; Start 18; Stop 42
cgaattttatattaacttcaatcac

SEQ ID NO: 87344 - DNA, 25 bp, Artificial
  probe
  misc_feature (1)..(25): SEQ ID NO: 6734; WAN024BNU_at; Start 84; Stop 108
ttttcctcgcttaatccaccataaa

SEQ ID NO: 87345 - DNA, 25 bp, Artificial
  probe
  misc_feature (1)..(25): SEQ ID NO: 6734; WAN024BNU_at; Start 82; Stop 106
ctttttcctcgcttaatccaccata

SEQ ID NO: 87346 - DNA, 25 bp, Artificial
  probe
  misc_feature (1)..(25): SEQ ID NO: 6734; WAN024BNU_at; Start 67; Stop 91
ctaatctataatgccctttttcctc

SEQ ID NO: 87347 - DNA, 25 bp, Artificial
  probe
  misc_feature (1)..(25): SEQ ID NO: 6734; WAN024BNU_at; Start 45; Stop 69
taaacctcctctatatcaaactcta

SEQ ID NO: 87348 - DNA, 25 bp, Artificial
  probe
  misc_feature (1)..(25): SEQ ID NO: 6734; WAN024BNU_at; Start 3; Stop 27
gcgcttcaaaattatcgaattttat

SEQ ID NO: 87349 - DNA, 25 bp, Artificial
  probe
  misc_feature (1)..(25): SEQ ID NO: 6734; WAN024BNU_at; Start 90; Stop 114
tcgcttaatccaccataaacaaagg

SEQ ID NO: 87350 - DNA, 25 bp, Artificial
  probe
  misc_feature (1)..(25): SEQ ID NO: 6734; WAN024BNU_at; Start 71; Stop 95
tctataatgccctttttcctcgctt

SEQ ID NO: 87351 - DNA, 25 bp, Artificial
  probe
  misc_feature (1)..(25): SEQ ID NO: 6734; WAN024BNU_at; Start 61; Stop 85
caaactctaatctataatgcccttt

SEQ ID NO: 87352 - DNA, 25 bp, Artificial
  probe
  misc_feature (1)..(25): SEQ ID NO: 6734; WAN024BNU_at; Start 66; Stop 90
tctaatctataatgccctttttcct

SEQ ID NO: 87353 - DNA, 25 bp, Artificial
  probe
  misc_feature (1)..(25): SEQ ID NO: 7264; WAN024BNV_at; Start 90; Stop 114
catatctcaaatgaataatgggcat

SEQ ID NO: 87354 - DNA, 25 bp, Artificial
  probe
  misc_feature (1)..(25): SEQ ID NO: 7264; WAN024BNV_at; Start 33; Stop 57
tgaagcgcatggcttttaccaagat

SEQ ID NO: 87355 - DNA, 25 bp, Artificial
  probe
  misc_feature (1)..(25): SEQ ID NO: 7264; WAN024BNV_at; Start 102; Stop 126
gaataatgggcatgtggttgtttta

SEQ ID NO: 87356 - DNA, 25 bp, Artificial
  probe
  misc_feature (1)..(25): SEQ ID NO: 7264; WAN024BNV_at; Start 92; Stop 116
tatctcaaatgaataatgggcatgt

SEQ ID NO: 87357 - DNA, 25 bp, Artificial
  probe
  misc_feature (1)..(25): SEQ ID NO: 7264; WAN024BNV_at; Start 63; Stop 87
taaactaggaaaaattagagatgca

SEQ ID NO: 87358 - DNA, 25 bp, Artificial
  probe
  misc_feature (1)..(25): SEQ ID NO: 7264; WAN024BNV_at; Start 180; Stop 204
taaggttgtagaagataaccagatc

SEQ ID NO: 87359 - DNA, 25 bp, Artificial
  probe
  misc_feature (1)..(25): SEQ ID NO: 7264; WAN024BNV_at; Start 169; Stop 193
agtgtacaatttaaggttgtagaag

SEQ ID NO: 87360 - DNA, 25 bp, Artificial
  probe
  misc_feature (1)..(25): SEQ ID NO: 7264; WAN024BNV_at; Start 25; Stop 49
gataattttgaagcgcatggctttt

SEQ ID NO: 87361 - DNA, 25 bp, Artificial
  probe
  misc_feature (1)..(25): SEQ ID NO: 7264; WAN024BNV_at; Start 40; Stop 64
catggcttttaccaagatgatacta

SEQ ID NO: 87362 - DNA, 25 bp, Artificial
  probe
  misc_feature (1)..(25): SEQ ID NO: 7264; WAN024BNV_at; Start 37; Stop 61
gcgcatggcttttaccaagatgata

SEQ ID NO: 87363 - DNA, 25 bp, Artificial
  probe
  misc_feature (1)..(25): SEQ ID NO: 7264; WAN024BNV_at; Start 43; Stop 67
ggcttttaccaagatgatactaaac

SEQ ID NO: 87364 - DNA, 25 bp, Artificial
  probe
  misc_feature (1)..(25): SEQ ID NO: 7264; WAN024BNV_at; Start 128; Stop 152
gggaagatagaggtattctattaaa

SEQ ID NO: 87365 - DNA, 25 bp, Artificial
  probe
  misc_feature (1)..(25): SEQ ID NO: 7264; WAN024BNV_at; Start 17; Stop 41
taaaattcgataattttgaagcgca

SEQ ID NO: 87366 - DNA, 25 bp, Artificial
  probe
  misc_feature (1)..(25): SEQ ID NO: 7264; WAN024BNV_at; Start 67; Stop 91
ctaggaaaaattagagatgcaatca

SEQ ID NO: 87367 - DNA, 25 bp, Artificial
  probe
  misc_feature (1)..(25): SEQ ID NO: 7264; WAN024BNV_at; Start 20; Stop 44
aattcgataattttgaagcgcatgg

SEQ ID NO: 87368 - DNA, 25 bp, Artificial
  probe
  misc_feature (1)..(25): SEQ ID NO: 7264; WAN024BNV_at; Start 112; Stop 136
catgtggttgttttaggggaagata

SEQ ID NO: 87369 - DNA, 25 bp, Artificial
  probe
  misc_feature (1)..(25): SEQ ID NO: 7264; WAN024BNV_at; Start 39; Stop 63
gcatggcttttaccaagatgatact

SEQ ID NO: 87370 - DNA, 25 bp, Artificial
  probe
  misc_feature (1)..(25): SEQ ID NO: 7264; WAN024BNV_at; Start 55; Stop 79
gatgatactaaactaggaaaaatta

SEQ ID NO: 87371 - DNA, 25 bp, Artificial
  probe
  misc_feature (1)..(25): SEQ ID NO: 7264; WAN024BNV_at; Start 82; Stop 106
gatgcaatcatatctcaaatgaata

SEQ ID NO: 87372 - DNA, 25 bp, Artificial
  probe
  misc_feature (1)..(25): SEQ ID NO: 7264; WAN024BNV_at; Start 71; Stop 95
gaaaaattagagatgcaatcatatc

SEQ ID NO: 87373 - DNA, 25 bp, Artificial
  probe
  misc_feature (1)..(25): SEQ ID NO: 7264; WAN024BNV_at; Start 28; Stop 52
aattttgaagcgcatggcttttacc

SEQ ID NO: 87374 - DNA, 25 bp, Artificial
  probe
  misc_feature (1)..(25): SEQ ID NO: 7264; WAN024BNV_at; Start 97; Stop 121
caaatgaataatgggcatgtggttg

SEQ ID NO: 87375 - DNA, 25 bp, Artificial
  probe
  misc_feature (1)..(25): SEQ ID NO: 7264; WAN024BNV_at; Start 136; Stop 160
agaggtattctattaaatcctaaag

SEQ ID NO: 87376 - DNA, 25 bp, Artificial
  probe
  misc_feature (1)..(25): SEQ ID NO: 7264; WAN024BNV_at; Start 23; Stop 47
tcgataattttgaagcgcatggctt

SEQ ID NO: 87377 - DNA, 25 bp, Artificial
  probe
  misc_feature (1)..(25): SEQ ID NO: 7264; WAN024BNV_at; Start 49; Stop 73
taccaagatgatactaaactaggaa

SEQ ID NO: 87378 - DNA, 25 bp, Artificial
  probe
  misc_feature (1)..(25): SEQ ID NO: 7264; WAN024BNV_at; Start 78; Stop 102
tagagatgcaatcatatctcaaatg

SEQ ID NO: 87379 - DNA, 25 bp, Artificial
  probe
  misc_feature (1)..(25): SEQ ID NO: 7264; WAN024BNV_at; Start 47; Stop 71
tttaccaagatgatactaaactagg

SEQ ID NO: 87380 - DNA, 25 bp, Artificial
  probe
  misc_feature (1)..(25): SEQ ID NO: 7264; WAN024BNV_at; Start 22; Stop 46
ttcgataattttgaagcgcatggct

SEQ ID NO: 87381 - DNA, 25 bp, Artificial
  probe
  misc_feature (1)..(25): SEQ ID NO: 7264; WAN024BNV_at; Start 104; Stop 128
ataatgggcatgtggttgttttagg

SEQ ID NO: 87382 - DNA, 25 bp, Artificial
  probe
  misc_feature (1)..(25): SEQ ID NO: 7264; WAN024BNV_at; Start 51; Stop 75
ccaagatgatactaaactaggaaaa

SEQ ID NO: 87383 - DNA, 25 bp, Artificial
  probe
  misc_feature (1)..(25): SEQ ID NO: 7264; WAN024BNV_at; Start 94; Stop 118
tctcaaatgaataatgggcatgtgg

SEQ ID NO: 87384 - DNA, 25 bp, Artificial
  probe
  misc_feature (1)..(25): SEQ ID NO: 7264; WAN024BNV_at; Start 31; Stop 55
tttgaagcgcatggcttttaccaag

SEQ ID NO: 87385 - DNA, 25 bp, Artificial
  probe
  misc_feature (1)..(25): SEQ ID NO: 7264; WAN024BNV_at; Start 35; Stop 59
aagcgcatggcttttaccaagatga

SEQ ID NO: 87386 - DNA, 25 bp, Artificial
  probe
  misc_feature (1)..(25): SEQ ID NO: 7264; WAN024BNV_at; Start 1; Stop 25
gtgattgaagttaatataaaattcg

SEQ ID NO: 87387 - DNA, 25 bp, Artificial
  probe
  misc_feature (1)..(25): SEQ ID NO: 7470; WAN024BNW_at; Start 64; Stop 88
tcgcagggaaatcaattggctaaag

SEQ ID NO: 87388 - DNA, 25 bp, Artificial
  probe
  misc_feature (1)..(25): SEQ ID NO: 7470; WAN024BNW_at; Start 60; Stop 84
tccatcgcagggaaatcaattggct

SEQ ID NO: 87389 - DNA, 25 bp, Artificial
  probe
  misc_feature (1)..(25): SEQ ID NO: 7470; WAN024BNW_at; Start 69; Stop 93
gggaaatcaattggctaaagtggta

SEQ ID NO: 87390 - DNA, 25 bp, Artificial
  probe
  misc_feature (1)..(25): SEQ ID NO: 7470; WAN024BNW_at; Start 48; Stop 72
gcttgtcagttatccatcgcaggga

SEQ ID NO: 87391 - DNA, 25 bp, Artificial
  probe
  misc_feature (1)..(25): SEQ ID NO: 7470; WAN024BNW_at; Start 65; Stop 89
cgcagggaaatcaattggctaaagt

SEQ ID NO: 87392 - DNA, 25 bp, Artificial
  probe
  misc_feature (1)..(25): SEQ ID NO: 7470; WAN024BNW_at; Start 67; Stop 91
cagggaaatcaattggctaaagtgg

SEQ ID NO: 87393 - DNA, 25 bp, Artificial
  probe
  misc_feature (1)..(25): SEQ ID NO: 7470; WAN024BNW_at; Start 51; Stop 75
tgtcagttatccatcgcagggaaat

SEQ ID NO: 87394 - DNA, 25 bp, Artificial
  probe
  misc_feature (1)..(25): SEQ ID NO: 7470; WAN024BNW_at; Start 40; Stop 64
aatagagcgcttgtcagttatccat

SEQ ID NO: 87395 - DNA, 25 bp, Artificial
  probe
  misc_feature (1)..(25): SEQ ID NO: 7470; WAN024BNW_at; Start 38; Stop 62
aaaatagagcgcttgtcagttatcc

SEQ ID NO: 87396 - DNA, 25 bp, Artificial
  probe
  misc_feature (1)..(25): SEQ ID NO: 7470; WAN024BNW_at; Start 62; Stop 86
catcgcagggaaatcaattggctaa

SEQ ID NO: 87397 - DNA, 25 bp, Artificial
  probe
  misc_feature (1)..(25): SEQ ID NO: 7470; WAN024BNW_at; Start 71; Stop 95
gaaatcaattggctaaagtggtatt

SEQ ID NO: 87398 - DNA, 25 bp, Artificial
  probe
  misc_feature (1)..(25): SEQ ID NO: 7470; WAN024BNW_at; Start 76; Stop 100
caattggctaaagtggtattttttg

SEQ ID NO: 87399 - DNA, 25 bp, Artificial
  probe
  misc_feature (1)..(25): SEQ ID NO: 7470; WAN024BNW_at; Start 53; Stop 77
tcagttatccatcgcagggaaatca

SEQ ID NO: 87400 - DNA, 25 bp, Artificial
  probe
  misc_feature (1)..(25): SEQ ID NO: 7470; WAN024BNW_at; Start 44; Stop 68
gagcgcttgtcagttatccatcgca

SEQ ID NO: 87401 - DNA, 25 bp, Artificial
  probe
  misc_feature (1)..(25): SEQ ID NO: 7470; WAN024BNW_at; Start 14; Stop 38
taaagaaggaagatgacgaagaaaa

SEQ ID NO: 87402 - DNA, 25 bp, Artificial
  probe
  misc_feature (1)..(25): SEQ ID NO: 7470; WAN024BNW_at; Start 12; Stop 36
gataaagaaggaagatgacgaagaa

SEQ ID NO: 87403 - DNA, 25 bp, Artificial
  probe
  misc_feature (1)..(25): SEQ ID NO: 7470; WAN024BNW_at; Start 42; Stop 66
tagagcgcttgtcagttatccatcg

SEQ ID NO: 87404 - DNA, 25 bp, Artificial
  probe
  misc_feature (1)..(25): SEQ ID NO: 7470; WAN024BNW_at; Start 49; Stop 73
cttgtcagttatccatcgcagggaa

SEQ ID NO: 87405 - DNA, 25 bp, Artificial
  probe
  misc_feature (1)..(25): SEQ ID NO: 7470; WAN024BNW_at; Start 30; Stop 54
cgaagaaaaaaatagagcgcttgtc

SEQ ID NO: 87406 - DNA, 25 bp, Artificial
  probe
  misc_feature (1)..(25): SEQ ID NO: 7470; WAN024BNW_at; Start 8; Stop 32
gatggataaagaaggaagatgacga

SEQ ID NO: 87407 - DNA, 25 bp, Artificial
  probe
  misc_feature (1)..(25): SEQ ID NO: 7470; WAN024BNW_at; Start 10; Stop 34
tggataaagaaggaagatgacgaag

SEQ ID NO: 87408 - DNA, 25 bp, Artificial
  probe
  misc_feature (1)..(25): SEQ ID NO: 7470; WAN024BNW_at; Start 39; Stop 63
aaatagagcgcttgtcagttatcca

SEQ ID NO: 87409 - DNA, 25 bp, Artificial
  probe
  misc_feature (1)..(25): SEQ ID NO: 7470; WAN024BNW_at; Start 57; Stop 81
ttatccatcgcagggaaatcaattg

SEQ ID NO: 87410 - DNA, 25 bp, Artificial
  probe
  misc_feature (1)..(25): SEQ ID NO: 7470; WAN024BNW_at; Start 6; Stop 30
gagatggataaagaaggaagatgac

SEQ ID NO: 87411 - DNA, 25 bp, Artificial
  probe
  misc_feature (1)..(25): SEQ ID NO: 7470; WAN024BNW_at; Start 45; Stop 69
agcgcttgtcagttatccatcgcag

SEQ ID NO: 87412 - DNA, 25 bp, Artificial
  probe
  misc_feature (1)..(25): SEQ ID NO: 7470; WAN024BNW_at; Start 78; Stop 102
attggctaaagtggtattttttgag

SEQ ID NO: 87413 - DNA, 25 bp, Artificial
  probe
  misc_feature (1)..(25): SEQ ID NO: 7470; WAN024BNW_at; Start 37; Stop 61
aaaaatagagcgcttgtcagttatc

SEQ ID NO: 87414 - DNA, 25 bp, Artificial
  probe
  misc_feature (1)..(25): SEQ ID NO: 7470; WAN024BNW_at; Start 47; Stop 71
cgcttgtcagttatccatcgcaggg

SEQ ID NO: 87415 - DNA, 25 bp, Artificial
  probe
  misc_feature (1)..(25): SEQ ID NO: 7470; WAN024BNW_at; Start 50; Stop 74
ttgtcagttatccatcgcagggaaa

SEQ ID NO: 87416 - DNA, 25 bp, Artificial
  probe
  misc_feature (1)..(25): SEQ ID NO: 7470; WAN024BNW_at; Start 59; Stop 83
atccatcgcagggaaatcaattggc

SEQ ID NO: 87417 - DNA, 25 bp, Artificial
  probe
  misc_feature (1)..(25): SEQ ID NO: 7470; WAN024BNW_at; Start 52; Stop 76
gtcagttatccatcgcagggaaatc

SEQ ID NO: 87418 - DNA, 25 bp, Artificial
  probe
  misc_feature (1)..(25): SEQ ID NO: 7470; WAN024BNW_at; Start 43; Stop 67
agagcgcttgtcagttatccatcgc

SEQ ID NO: 87419 - DNA, 25 bp, Artificial
  probe
  misc_feature (1)..(25): SEQ ID NO: 7470; WAN024BNW_at; Start 61; Stop 85
ccatcgcagggaaatcaattggcta

SEQ ID NO: 87420 - DNA, 25 bp, Artificial
  probe
  misc_feature (1)..(25): SEQ ID NO: 7470; WAN024BNW_at; Start 55; Stop 79
agttatccatcgcagggaaatcaat

SEQ ID NO: 87421 - DNA, 25 bp, Artificial
  probe
  misc_feature (1)..(25): SEQ ID NO: 7472; WAN024BNX_at; Start 7; Stop 31
gataagaaaaatccaaagagaacca

SEQ ID NO: 87422 - DNA, 25 bp, Artificial
  probe
  misc_feature (1)..(25): SEQ ID NO: 7472; WAN024BNX_at; Start 283; Stop 307
tacacagaattactagaaaacgcca

SEQ ID NO: 87423 - DNA, 25 bp, Artificial
  probe
  misc_feature (1)..(25): SEQ ID NO: 7472; WAN024BNX_at; Start 251; Stop 275
atgcgtggtttaacgattattttcg

SEQ ID NO: 87424 - DNA, 25 bp, Artificial
  probe
  misc_feature (1)..(25): SEQ ID NO: 7472; WAN024BNX_at; Start 274; Stop 298
cgtgcgacttacacagaattactag

SEQ ID NO: 87425 - DNA, 25 bp, Artificial
  probe
  misc_feature (1)..(25): SEQ ID NO: 7472; WAN024BNX_at; Start 163; Stop 187
gaggtttatgtttacgaaaacatga

SEQ ID NO: 87426 - DNA, 25 bp, Artificial
  probe
  misc_feature (1)..(25): SEQ ID NO: 7472; WAN024BNX_at; Start 197; Stop 221
gagcttgtcaaaaaatactatttta

SEQ ID NO: 87427 - DNA, 25 bp, Artificial
  probe
  misc_feature (1)..(25): SEQ ID NO: 7472; WAN024BNX_at; Start 62; Stop 86
tcaaaactgataggcttgaagctaa

SEQ ID NO: 87428 - DNA, 25 bp, Artificial
  probe
  misc_feature (1)..(25): SEQ ID NO: 7472; WAN024BNX_at; Start 222; Stop 246
tagtccgactcaagcctatgtatta

SEQ ID NO: 87429 - DNA, 25 bp, Artificial
  probe
  misc_feature (1)..(25): SEQ ID NO: 7472; WAN024BNX_at; Start 289; Stop 313
gaattactagaaaacgccatcttag

SEQ ID NO: 87430 - DNA, 25 bp, Artificial
  probe
  misc_feature (1)..(25): SEQ ID NO: 7472; WAN024BNX_at; Start 2; Stop 26
tgagggataagaaaaatccaaagag

SEQ ID NO: 87431 - DNA, 25 bp, Artificial
  probe
  misc_feature (1)..(25): SEQ ID NO: 7472; WAN024BNX_at; Start 265; Stop 289
gattattttcgtgcgacttacacag

SEQ ID NO: 87432 - DNA, 25 bp, Artificial
  probe
  misc_feature (1)..(25): SEQ ID NO: 7472; WAN024BNX_at; Start 129; Stop 153
taagtctgatcctaaatatttgcgg

SEQ ID NO: 87433 - DNA, 25 bp, Artificial
  probe
  misc_feature (1)..(25): SEQ ID NO: 7472; WAN024BNX_at; Start 36; Stop 60
ggagcaaaagattatagtttctcat

SEQ ID NO: 87434 - DNA, 25 bp, Artificial
  probe
  misc_feature (1)..(25): SEQ ID NO: 7472; WAN024BNX_at; Start 148; Stop 172
ttgcgggcaataaaagaggtttatg

SEQ ID NO: 87435 - DNA, 25 bp, Artificial
  probe
  misc_feature (1)..(25): SEQ ID NO: 7472; WAN024BNX_at; Start 132; Stop 156
gtctgatcctaaatatttgcgggca

SEQ ID NO: 87436 - DNA, 25 bp, Artificial
  probe
  misc_feature (1)..(25): SEQ ID NO: 7472; WAN024BNX_at; Start 235; Stop 259
gcctatgtattacttaatgcgtggt

SEQ ID NO: 87437 - DNA, 25 bp, Artificial
  probe
  misc_feature (1)..(25): SEQ ID NO: 7472; WAN024BNX_at; Start 110; Stop 134
caactgaagattttatagataagtc

SEQ ID NO: 87438 - DNA, 25 bp, Artificial
  probe
  misc_feature (1)..(25): SEQ ID NO: 7472; WAN024BNX_at; Start 212; Stop 236
tactattttatagtccgactcaagc

SEQ ID NO: 87439 - DNA, 25 bp, Artificial
  probe
  misc_feature (1)..(25): SEQ ID NO: 7472; WAN024BNX_at; Start 192; Stop 216
cattggagcttgtcaaaaaatacta

SEQ ID NO: 87440 - DNA, 25 bp, Artificial
  probe
  misc_feature (1)..(25): SEQ ID NO: 7472; WAN024BNX_at; Start 245; Stop 269
tacttaatgcgtggtttaacgatta

SEQ ID NO: 87441 - DNA, 25 bp, Artificial
  probe
  misc_feature (1)..(25): SEQ ID NO: 7472; WAN024BNX_at; Start 136; Stop 160
gatcctaaatatttgcgggcaataa

SEQ ID NO: 87442 - DNA, 25 bp, Artificial
  probe
  misc_feature (1)..(25): SEQ ID NO: 7472; WAN024BNX_at; Start 217; Stop 241
ttttatagtccgactcaagcctatg

SEQ ID NO: 87443 - DNA, 25 bp, Artificial
  probe
  misc_feature (1)..(25): SEQ ID NO: 7472; WAN024BNX_at; Start 183; Stop 207
catgaatgtcattggagcttgtcaa

SEQ ID NO: 87444 - DNA, 25 bp, Artificial
  probe
  misc_feature (1)..(25): SEQ ID NO: 7472; WAN024BNX_at; Start 52; Stop 76
gtttctcatatcaaaactgataggc

SEQ ID NO: 87445 - DNA, 25 bp, Artificial
  probe
  misc_feature (1)..(25): SEQ ID NO: 7472; WAN024BNX_at; Start 177; Stop 201
cgaaaacatgaatgtcattggagct

SEQ ID NO: 87446 - DNA, 25 bp, Artificial
  probe
  misc_feature (1)..(25): SEQ ID NO: 7472; WAN024BNX_at; Start 294; Stop 318
actagaaaacgccatcttagataaa

SEQ ID NO: 87447 - DNA, 25 bp, Artificial
  probe
  misc_feature (1)..(25): SEQ ID NO: 7472; WAN024BNX_at; Start 20; Stop 44
caaagagaaccattttggagcaaaa

SEQ ID NO: 87448 - DNA, 25 bp, Artificial
  probe
  misc_feature (1)..(25): SEQ ID NO: 7472; WAN024BNX_at; Start 268; Stop 292
tattttcgtgcgacttacacagaat

SEQ ID NO: 87449 - DNA, 25 bp, Artificial
  probe
  misc_feature (1)..(25): SEQ ID NO: 7472; WAN024BNX_at; Start 118; Stop 142
gattttatagataagtctgatccta

SEQ ID NO: 87450 - DNA, 25 bp, Artificial
  probe
  misc_feature (1)..(25): SEQ ID NO: 7472; WAN024BNX_at; Start 29; Stop 53
ccattttggagcaaaagattatagt

SEQ ID NO: 87451 - DNA, 25 bp, Artificial
  probe
  misc_feature (1)..(25): SEQ ID NO: 7472; WAN024BNX_at; Start 277; Stop 301
gcgacttacacagaattactagaaa

SEQ ID NO: 87452 - DNA, 25 bp, Artificial
  probe
  misc_feature (1)..(25): SEQ ID NO: 7472; WAN024BNX_at; Start 186; Stop 210
gaatgtcattggagcttgtcaaaaa

SEQ ID NO: 87453 - DNA, 25 bp, Artificial
  probe
  misc_feature (1)..(25): SEQ ID NO: 7472; WAN024BNX_at; Start 231; Stop 255
tcaagcctatgtattacttaatgcg

SEQ ID NO: 87454 - DNA, 25 bp, Artificial
  probe
  misc_feature (1)..(25): SEQ ID NO: 7472; WAN024BNX_at; Start 75; Stop 99
gcttgaagctaagtttttaagcaac

SEQ ID NO: 87455 - DNA, 25 bp, Artificial
  probe
  misc_feature (1)..(25): SEQ ID NO: 6824; WAN024BNY_at; Start 752; Stop 776
tatggaacatttacaggtcaaggct

SEQ ID NO: 87456 - DNA, 25 bp, Artificial
  probe
  misc_feature (1)..(25): SEQ ID NO: 6824; WAN024BNY_at; Start 591; Stop 615
taaaccagattacagctcatgcgtg

SEQ ID NO: 87457 - DNA, 25 bp, Artificial
  probe
  misc_feature (1)..(25): SEQ ID NO: 6824; WAN024BNY_at; Start 42; Stop 66
taaaccatatcacaaaaacgctagg

SEQ ID NO: 87458 - DNA, 25 bp, Artificial
  probe
  misc_feature (1)..(25): SEQ ID NO: 6824; WAN024BNY_at; Start 273; Stop 297
taatcgagttgctgagtattcaacg

SEQ ID NO: 87459 - DNA, 25 bp, Artificial
  probe
  misc_feature (1)..(25): SEQ ID NO: 6824; WAN024BNY_at; Start 293; Stop 317
caacgtgggactcagaattattaaa

SEQ ID NO: 87460 - DNA, 25 bp, Artificial
  probe
  misc_feature (1)..(25): SEQ ID NO: 6824; WAN024BNY_at; Start 520; Stop 544
tataacatgcctaaaatcgagggcg

SEQ ID NO: 87461 - DNA, 25 bp, Artificial
  probe
  misc_feature (1)..(25): SEQ ID NO: 6824; WAN024BNY_at; Start 537; Stop 561
cgagggcgtggatcatattcctaaa

SEQ ID NO: 87462 - DNA, 25 bp, Artificial
  probe
  misc_feature (1)..(25): SEQ ID NO: 6824; WAN024BNY_at; Start 736; Stop 760
cctatcgctatgcaagtatggaaca

SEQ ID NO: 87463 - DNA, 25 bp, Artificial
  probe
  misc_feature (1)..(25): SEQ ID NO: 6824; WAN024BNY_at; Start 815; Stop 839
tccctactgtatcgtgggctagtga

SEQ ID NO: 87464 - DNA, 25 bp, Artificial
  probe
  misc_feature (1)..(25): SEQ ID NO: 6824; WAN024BNY_at; Start 441; Stop 465
tgctgaggattttcatagagatacc

SEQ ID NO: 87465 - DNA, 25 bp, Artificial
  probe
  misc_feature (1)..(25): SEQ ID NO: 6824; WAN024BNY_at; Start 205; Stop 229
gacacaatacctatcgctcacgctg

SEQ ID NO: 87466 - DNA, 25 bp, Artificial
  probe
  misc_feature (1)..(25): SEQ ID NO: 6824; WAN024BNY_at; Start 885; Stop 909
gctagcaatcagtacaataggcgta

SEQ ID NO: 87467 - DNA, 25 bp, Artificial
  probe
  misc_feature (1)..(25): SEQ ID NO: 6824; WAN024BNY_at; Start 694; Stop 718
gatagcgccttagctccggatttta

SEQ ID NO: 87468 - DNA, 25 bp, Artificial
  probe
  misc_feature (1)..(25): SEQ ID NO: 6824; WAN024BNY_at; Start 67; Stop 91
cataatgacggagaggcaacagaga

SEQ ID NO: 87469 - DNA, 25 bp, Artificial
  probe
  misc_feature (1)..(25): SEQ ID NO: 6824; WAN024BNY_at; Start 796; Stop 820
gattacggccttacagttatcccta

SEQ ID NO: 87470 - DNA, 25 bp, Artificial
  probe
  misc_feature (1)..(25): SEQ ID NO: 6824; WAN024BNY_at; Start 850; Stop 874
gatttttgttttgacggcttgccta

SEQ ID NO: 87471 - DNA, 25 bp, Artificial
  probe
  misc_feature (1)..(25): SEQ ID NO: 6824; WAN024BNY_at; Start 406; Stop 430
gagcagcaagaggaaactgaaaacg

SEQ ID NO: 87472 - DNA, 25 bp, Artificial
  probe
  misc_feature (1)..(25): SEQ ID NO: 6824; WAN024BNY_at; Start 234; Stop 258
cctcacagatgagcagataaaagct

SEQ ID NO: 87473 - DNA, 25 bp, Artificial
  probe
  misc_feature (1)..(25): SEQ ID NO: 6824; WAN024BNY_at; Start 421; Stop 445
actgaaaacgaggaggaagatgctg

SEQ ID NO: 87474 - DNA, 25 bp, Artificial
  probe
  misc_feature (1)..(25): SEQ ID NO: 6824; WAN024BNY_at; Start 643; Stop 667
gaaagaatatggcaaagaccagact

SEQ ID NO: 87475 - DNA, 25 bp, Artificial
  probe
  misc_feature (1)..(25): SEQ ID NO: 6824; WAN024BNY_at; Start 167; Stop 191
gacatactaggctaaaggctgctct

SEQ ID NO: 87476 - DNA, 25 bp, Artificial
  probe
  misc_feature (1)..(25): SEQ ID NO: 6824; WAN024BNY_at; Start 389; Stop 413
actttggtaacgaggaggagcagca

SEQ ID NO: 87477 - DNA, 25 bp, Artificial
  probe
  misc_feature (1)..(25): SEQ ID NO: 6824; WAN024BNY_at; Start 781; Stop 805
ggtcagattatgcaagattacggcc

SEQ ID NO: 87478 - DNA, 25 bp, Artificial
  probe
  misc_feature (1)..(25): SEQ ID NO: 6824; WAN024BNY_at; Start 366; Stop 390
tgagttatcagttacagggttcaac

SEQ ID NO: 87479 - DNA, 25 bp, Artificial
  probe
  misc_feature (1)..(25): SEQ ID NO: 6824; WAN024BNY_at; Start 220; Stop 244
gctcacgctgtaaacctcacagatg

SEQ ID NO: 87480 - DNA, 25 bp, Artificial
  probe
  misc_feature (1)..(25): SEQ ID NO: 6824; WAN024BNY_at; Start 977; Stop 1001
caaaaagaattgtagtatatggcgg

SEQ ID NO: 87481 - DNA, 25 bp, Artificial
  probe
  misc_feature (1)..(25): SEQ ID NO: 6824; WAN024BNY_at; Start 1044; Stop 1068
tgaaaatgcaacaacggaaaggatg

SEQ ID NO: 87482 - DNA, 25 bp, Artificial
  probe
  misc_feature (1)..(25): SEQ ID NO: 6824; WAN024BNY_at; Start 902; Stop 926
taggcgtaaagcaaaacaaagagca

SEQ ID NO: 87483 - DNA, 25 bp, Artificial
  probe
  misc_feature (1)..(25): SEQ ID NO: 6824; WAN024BNY_at; Start 765; Stop 789
caggtcaaggctgataggtcagatt

SEQ ID NO: 87484 - DNA, 25 bp, Artificial
  probe
  misc_feature (1)..(25): SEQ ID NO: 6824; WAN024BNY_at; Start 678; Stop 702
aaagctgctagaatttgatagcgcc

SEQ ID NO: 87485 - DNA, 25 bp, Artificial
  probe
  misc_feature (1)..(25): SEQ ID NO: 6824; WAN024BNY_at; Start 90; Stop 114
gaaagttgctgcatccataaaagct

SEQ ID NO: 87486 - DNA, 25 bp, Artificial
  probe
  misc_feature (1)..(25): SEQ ID NO: 6824; WAN024BNY_at; Start 256; Stop 280
gcttatagactagcagataatcgag

SEQ ID NO: 87487 - DNA, 25 bp, Artificial
  probe
  misc_feature (1)..(25): SEQ ID NO: 6824; WAN024BNY_at; Start 1058; Stop 1082
cggaaaggatgaaagaaagtggcac

SEQ ID NO: 87488 - DNA, 25 bp, Artificial
  probe
  misc_feature (1)..(25): SEQ ID NO: 6824; WAN024BNY_at; Start 865; Stop 889
ggcttgcctaaaaactcaacgctag

SEQ ID NO: 87489 - DNA, 25 bp, Artificial
  probe
  misc_feature (1)..(25): SEQ ID NO: 7302; WAN024BNZ_at; Start 103; Stop 127
gaaacagaaacaagcaaacaatacc

SEQ ID NO: 87490 - DNA, 25 bp, Artificial
  probe
  misc_feature (1)..(25): SEQ ID NO: 7302; WAN024BNZ_at; Start 648; Stop 672
gagcaagtcacgttttactacaaaa

SEQ ID NO: 87491 - DNA, 25 bp, Artificial
  probe
  misc_feature (1)..(25): SEQ ID NO: 7302; WAN024BNZ_at; Start 485; Stop 509
cagcaatacataaccatccgaatgg

SEQ ID NO: 87492 - DNA, 25 bp, Artificial
  probe
  misc_feature (1)..(25): SEQ ID NO: 7302; WAN024BNZ_at; Start 421; Stop 445
gctcataattatgtacacggtggga

SEQ ID NO: 87493 - DNA, 25 bp, Artificial
  probe
  misc_feature (1)..(25): SEQ ID NO: 7302; WAN024BNZ_at; Start 46; Stop 70
tcaagtattgatctaggtaaagaga

SEQ ID NO: 87494 - DNA, 25 bp, Artificial
  probe
  misc_feature (1)..(25): SEQ ID NO: 7302; WAN024BNZ_at; Start 401; Stop 425
cagttgactctcaaggctttgctca

SEQ ID NO: 87495 - DNA, 25 bp, Artificial
  probe
  misc_feature (1)..(25): SEQ ID NO: 7302; WAN024BNZ_at; Start 238; Stop 262
aagtatccgggttttagaggtgctg

SEQ ID NO: 87496 - DNA, 25 bp, Artificial
  probe
  misc_feature (1)..(25): SEQ ID NO: 7302; WAN024BNZ_at; Start 634; Stop 658
tttgataaagctgtgagcaagtcac

SEQ ID NO: 87497 - DNA, 25 bp, Artificial
  probe
  misc_feature (1)..(25): SEQ ID NO: 7302; WAN024BNZ_at; Start 79; Stop 103
gaagatcttgagctttacaataaag

SEQ ID NO: 87498 - DNA, 25 bp, Artificial
  probe
  misc_feature (1)..(25): SEQ ID NO: 7302; WAN024BNZ_at; Start 336; Stop 360
tgttgagggagctattcagggattt

SEQ ID NO: 87499 - DNA, 25 bp, Artificial
  probe
  misc_feature (1)..(25): SEQ ID NO: 7302; WAN024BNZ_at; Start 455; Stop 479
tacaaattttgcctatctctggtgg

SEQ ID NO: 87500 - DNA, 25 bp, Artificial
  probe
  misc_feature (1)..(25): SEQ ID NO: 7302; WAN024BNZ_at; Start 470; Stop 494
tctctggtggatttacagcaataca

SEQ ID NO: 87501 - DNA, 25 bp, Artificial
  probe
  misc_feature (1)..(25): SEQ ID NO: 7302; WAN024BNZ_at; Start 525; Stop 549
tacagatttacatagctttgcagca

SEQ ID NO: 87502 - DNA, 25 bp, Artificial
  probe
  misc_feature (1)..(25): SEQ ID NO: 7302; WAN024BNZ_at; Start 386; Stop 410
cagaatacagtacagcagttgactc

SEQ ID NO: 87503 - DNA, 25 bp, Artificial
  probe
  misc_feature (1)..(25): SEQ ID NO: 7302; WAN024BNZ_at; Start 304; Stop 328
gcatctttaaacaatcaagggcgct

SEQ ID NO: 87504 - DNA, 25 bp, Artificial
  probe
  misc_feature (1)..(25): SEQ ID NO: 7302; WAN024BNZ_at; Start 584; Stop 608
gctctaaagcgtatcgaattacaaa

SEQ ID NO: 87505 - DNA, 25 bp, Artificial
  probe
  misc_feature (1)..(25): SEQ ID NO: 7302; WAN024BNZ_at; Start 210; Stop 234
tgcaaattttgagaaagggaaagac

SEQ ID NO: 87506 - DNA, 25 bp, Artificial
  probe
  misc_feature (1)..(25): SEQ ID NO: 7302; WAN024BNZ_at; Start 119; Stop 143
aacaataccaatctatcgaggaggc

SEQ ID NO: 87507 - DNA, 25 bp, Artificial
  probe
  misc_feature (1)..(25): SEQ ID NO: 7302; WAN024BNZ_at; Start 718; Stop 742
aaatacgggtacacttactcatacg

SEQ ID NO: 87508 - DNA, 25 bp, Artificial
  probe
  misc_feature (1)..(25): SEQ ID NO: 7302; WAN024BNZ_at; Start 611; Stop 635
gggctaactttgatgctaaaggctt

SEQ ID NO: 87509 - DNA, 25 bp, Artificial
  probe
  misc_feature (1)..(25): SEQ ID NO: 7302; WAN024BNZ_at; Start 501; Stop 525
tccgaatggcagcaatttctcaagt

SEQ ID NO: 87510 - DNA, 25 bp, Artificial
  probe
  misc_feature (1)..(25): SEQ ID NO: 7302; WAN024BNZ_at; Start 539; Stop 563
gctttgcagcattaaaaggtatgaa

SEQ ID NO: 87511 - DNA, 25 bp, Artificial
  probe
  misc_feature (1)..(25): SEQ ID NO: 7302; WAN024BNZ_at; Start 370; Stop 394
cacggtggctctagaacagaataca

SEQ ID NO: 87512 - DNA, 25 bp, Artificial
  probe
  misc_feature (1)..(25): SEQ ID NO: 7302; WAN024BNZ_at; Start 676; Stop 700
tacaataaaggagctgacctatggc

SEQ ID NO: 87513 - DNA, 25 bp, Artificial
  probe
  misc_feature (1)..(25): SEQ ID NO: 7302; WAN024BNZ_at; Start 182; Stop 206
tcaatttcactctaggcggtggacg

SEQ ID NO: 87514 - DNA, 25 bp, Artificial
  probe
  misc_feature (1)..(25): SEQ ID NO: 7302; WAN024BNZ_at; Start 434; Stop 458
tacacggtgggaaaaacagcgtaca

SEQ ID NO: 87515 - DNA, 25 bp, Artificial
  probe
  misc_feature (1)..(25): SEQ ID NO: 7302; WAN024BNZ_at; Start 569; Stop 593
tagttgcaacgaatagctctaaagc

SEQ ID NO: 87516 - DNA, 25 bp, Artificial
  probe
  misc_feature (1)..(25): SEQ ID NO: 7302; WAN024BNZ_at; Start 360; Stop 384
tattaaaaaacacggtggctctaga

SEQ ID NO: 87517 - DNA, 25 bp, Artificial
  probe
  misc_feature (1)..(25): SEQ ID NO: 7302; WAN024BNZ_at; Start 691; Stop 715
gacctatggctcaagaaaaacgcta

SEQ ID NO: 87518 - DNA, 25 bp, Artificial
  probe
  misc_feature (1)..(25): SEQ ID NO: 7302; WAN024BNZ_at; Start 282; Stop 306
gagctcaaaagccttacatccagca

SEQ ID NO: 87519 - DNA, 25 bp, Artificial
  probe
  misc_feature (1)..(25): SEQ ID NO: 7302; WAN024BNZ_at; Start 319; Stop 343
caagggcgcttttcaagtgttgagg

SEQ ID NO: 87520 - DNA, 25 bp, Artificial
  probe
  misc_feature (1)..(25): SEQ ID NO: 7302; WAN024BNZ_at; Start 132; Stop 156
tatcgaggaggcagaaaatgaccta

SEQ ID NO: 87521 - DNA, 25 bp, Artificial
  probe
  misc_feature (1)..(25): SEQ ID NO: 7302; WAN024BNZ_at; Start 556; Stop 580
ggtatgaatacactagttgcaacga

SEQ ID NO: 87522 - DNA, 25 bp, Artificial
  probe
  misc_feature (1)..(25): SEQ ID NO: 7302; WAN024BNZ_at; Start 267; Stop 291
tgcaagagatagtgggagctcaaaa

SEQ ID NO: 87523 - DNA, 25 bp, Artificial
  probe
  misc_feature (1)..(25): SEQ ID NO: 7404; WAN024BO2_at; Start 417; Stop 441
tatcgagatagtggatgcatgggct

SEQ ID NO: 87524 - DNA, 25 bp, Artificial
  probe
  misc_feature (1)..(25): SEQ ID NO: 7404; WAN024BO2_at; Start 328; Stop 352
tacgatatacaagaacagaaagagc

SEQ ID NO: 87525 - DNA, 25 bp, Artificial
  probe
  misc_feature (1)..(25): SEQ ID NO: 7404; WAN024BO2_at; Start 197; Stop 221
aacaacttgaggagatgggtatggc

SEQ ID NO: 87526 - DNA, 25 bp, Artificial
  probe
  misc_feature (1)..(25): SEQ ID NO: 7404; WAN024BO2_at; Start 349; Stop 373
gagcgtattaaagcactcaaatatg

SEQ ID NO: 87527 - DNA, 25 bp, Artificial
  probe
  misc_feature (1)..(25): SEQ ID NO: 7404; WAN024BO2_at; Start 132; Stop 156
agctgatctcaaaaaagcatttgaa

SEQ ID NO: 87528 - DNA, 25 bp, Artificial
  probe
  misc_feature (1)..(25): SEQ ID NO: 7404; WAN024BO2_at; Start 49; Stop 73
ccagttacagaacgaaccaaagatg

SEQ ID NO: 87529 - DNA, 25 bp, Artificial
  probe
  misc_feature (1)..(25): SEQ ID NO: 7404; WAN024BO2_at; Start 397; Stop 421
gagaaaggctcaagtgaaactatcg

SEQ ID NO: 87530 - DNA, 25 bp, Artificial
  probe
  misc_feature (1)..(25): SEQ ID NO: 7404; WAN024BO2_at; Start 1; Stop 25
ttgaaaggagggtggaaattgccta

SEQ ID NO: 87531 - DNA, 25 bp, Artificial
  probe
  misc_feature (1)..(25): SEQ ID NO: 7404; WAN024BO2_at; Start 158; Stop 182
ccctcttatctttggatgtgacgga

SEQ ID NO: 87532 - DNA, 25 bp, Artificial
  probe
  misc_feature (1)..(25): SEQ ID NO: 7404; WAN024BO2_at; Start 309; Stop 333
gacaaatactaaagataaatacgat

SEQ ID NO: 87533 - DNA, 25 bp, Artificial
  probe
  misc_feature (1)..(25): SEQ ID NO: 7404; WAN024BO2_at; Start 299; Stop 323
taatcaagctgacaaatactaaaga

SEQ ID NO: 87534 - DNA, 25 bp, Artificial
  probe
  misc_feature (1)..(25): SEQ ID NO: 7404; WAN024BO2_at; Start 61; Stop 85
cgaaccaaagatgaagcaagagcta

SEQ ID NO: 87535 - DNA, 25 bp, Artificial
  probe
  misc_feature (1)..(25): SEQ ID NO: 7404; WAN024BO2_at; Start 68; Stop 92
aagatgaagcaagagctattagctc

SEQ ID NO: 87536 - DNA, 25 bp, Artificial
  probe
  misc_feature (1)..(25): SEQ ID NO: 7404; WAN024BO2_at; Start 257; Stop 281
ttcagcaagctgtaaaaggcaatca

SEQ ID NO: 87537 - DNA, 25 bp, Artificial
  probe
  misc_feature (1)..(25): SEQ ID NO: 7404; WAN024BO2_at; Start 186; Stop 210
taaaatcaagaaacaacttgaggag

SEQ ID NO: 87538 - DNA, 25 bp, Artificial
  probe
  misc_feature (1)..(25): SEQ ID NO: 7404; WAN024BO2_at; Start 403; Stop 427
ggctcaagtgaaactatcgagatag

SEQ ID NO: 87539 - DNA, 25 bp, Artificial
  probe
  misc_feature (1)..(25): SEQ ID NO: 7404; WAN024BO2_at; Start 14; Stop 38
ggaaattgcctagagatggaactaa

SEQ ID NO: 87540 - DNA, 25 bp, Artificial
  probe
  misc_feature (1)..(25): SEQ ID NO: 7404; WAN024BO2_at; Start 91; Stop 115
tcaaaaggaggtaaagcatctggca

SEQ ID NO: 87541 - DNA, 25 bp, Artificial
  probe
  misc_feature (1)..(25): SEQ ID NO: 7404; WAN024BO2_at; Start 98; Stop 122
gaggtaaagcatctggcatagcaag

SEQ ID NO: 87542 - DNA, 25 bp, Artificial
  probe
  misc_feature (1)..(25): SEQ ID NO: 7404; WAN024BO2_at; Start 288; Stop 312
gactgagaacataatcaagctgaca

SEQ ID NO: 87543 - DNA, 25 bp, Artificial
  probe
  misc_feature (1)..(25): SEQ ID NO: 7404; WAN024BO2_at; Start 148; Stop 172
gcatttgaaaccctcttatctttgg

SEQ ID NO: 87544 - DNA, 25 bp, Artificial
  probe
  misc_feature (1)..(25): SEQ ID NO: 7404; WAN024BO2_at; Start 242; Stop 266
tagcctttgcaacctttcagcaagc

SEQ ID NO: 87545 - DNA, 25 bp, Artificial
  probe
  misc_feature (1)..(25): SEQ ID NO: 7404; WAN024BO2_at; Start 384; Stop 408
gcgtgctgaagctgagaaaggctca

SEQ ID NO: 87546 - DNA, 25 bp, Artificial
  probe
  misc_feature (1)..(25): SEQ ID NO: 7404; WAN024BO2_at; Start 282; Stop 306
gaaagcgactgagaacataatcaag

SEQ ID NO: 87547 - DNA, 25 bp, Artificial
  probe
  misc_feature (1)..(25): SEQ ID NO: 7404; WAN024BO2_at; Start 80; Stop 104
gagctattagctcaaaaggaggtaa

SEQ ID NO: 87548 - DNA, 25 bp, Artificial
  probe
  misc_feature (1)..(25): SEQ ID NO: 7404; WAN024BO2_at; Start 267; Stop 291
tgtaaaaggcaatcagaaagcgact

SEQ ID NO: 87549 - DNA, 25 bp, Artificial
  probe
  misc_feature (1)..(25): SEQ ID NO: 7404; WAN024BO2_at; Start 216; Stop 240
tatggctggcaataacgaggctttg

SEQ ID NO: 87550 - DNA, 25 bp, Artificial
  probe
  misc_feature (1)..(25): SEQ ID NO: 7404; WAN024BO2_at; Start 20; Stop 44
tgcctagagatggaactaaaaattt

SEQ ID NO: 87551 - DNA, 25 bp, Artificial
  probe
  misc_feature (1)..(25): SEQ ID NO: 7404; WAN024BO2_at; Start 372; Stop 396
tgaaaatagagagcgtgctgaagct

SEQ ID NO: 87552 - DNA, 25 bp, Artificial
  probe
  misc_feature (1)..(25): SEQ ID NO: 7404; WAN024BO2_at; Start 106; Stop 130
gcatctggcatagcaagaagaaaaa

SEQ ID NO: 87553 - DNA, 25 bp, Artificial
  probe
  misc_feature (1)..(25): SEQ ID NO: 7404; WAN024BO2_at; Start 228; Stop 252
taacgaggctttgctagcctttgca

SEQ ID NO: 87554 - DNA, 25 bp, Artificial
  probe
  misc_feature (1)..(25): SEQ ID NO: 7404; WAN024BO2_at; Start 172; Stop 196
gatgtgacggatagtaaaatcaaga

SEQ ID NO: 87555 - DNA, 25 bp, Artificial
  probe
  misc_feature (1)..(25): SEQ ID NO: 7404; WAN024BO2_at; Start 365; Stop 389
tcaaatatgaaaatagagagcgtgc

SEQ ID NO: 87556 - DNA, 25 bp, Artificial
  probe
  misc_feature (1)..(25): SEQ ID NO: 7404; WAN024BO2_at; Start 343; Stop 367
cagaaagagcgtattaaagcactca

SEQ ID NO: 87557 - DNA, 25 bp, Artificial
  probe
  misc_feature (1)..(25): SEQ ID NO: 6537; WAN024BO3_at; Start 437; Stop 461
caaacgtgacgttcatgaggcagaa

SEQ ID NO: 87558 - DNA, 25 bp, Artificial
  probe
  misc_feature (1)..(25): SEQ ID NO: 6537; WAN024BO3_at; Start 895; Stop 919
caagtggtaaagaaagcgcctagtc

SEQ ID NO: 87559 - DNA, 25 bp, Artificial
  probe
  misc_feature (1)..(25): SEQ ID NO: 6537; WAN024BO3_at; Start 145; Stop 169
tatattatcgctggagaggcggcca

SEQ ID NO: 87560 - DNA, 25 bp, Artificial
  probe
  misc_feature (1)..(25): SEQ ID NO: 6537; WAN024BO3_at; Start 1052; Stop 1076
ggcatccagtcgctaaacttagaaa

SEQ ID NO: 87561 - DNA, 25 bp, Artificial
  probe
  misc_feature (1)..(25): SEQ ID NO: 6537; WAN024BO3_at; Start 636; Stop 660
tatagagcgtatcaaagagaatgac

SEQ ID NO: 87562 - DNA, 25 bp, Artificial
  probe
  misc_feature (1)..(25): SEQ ID NO: 6537; WAN024BO3_at; Start 177; Stop 201
tgttatccgtaaggtggccaatact

SEQ ID NO: 87563 - DNA, 25 bp, Artificial
  probe
  misc_feature (1)..(25): SEQ ID NO: 6537; WAN024BO3_at; Start 957; Stop 981
tattgagaagtacagagtacaagcc

SEQ ID NO: 87564 - DNA, 25 bp, Artificial
  probe
  misc_feature (1)..(25): SEQ ID NO: 6537; WAN024BO3_at; Start 800; Stop 824
gacatcaacagtcagcaaccgcttg

SEQ ID NO: 87565 - DNA, 25 bp, Artificial
  probe
  misc_feature (1)..(25): SEQ ID NO: 6537; WAN024BO3_at; Start 1213; Stop 1237
cctagcgttatcaaagaagatgacc

SEQ ID NO: 87566 - DNA, 25 bp, Artificial
  probe
  misc_feature (1)..(25): SEQ ID NO: 6537; WAN024BO3_at; Start 409; Stop 433
tttaatgaccaagaggactttgacc

SEQ ID NO: 87567 - DNA, 25 bp, Artificial
  probe
  misc_feature (1)..(25): SEQ ID NO: 6537; WAN024BO3_at; Start 779; Stop 803
tatcatttgcgctagatggcggaca

SEQ ID NO: 87568 - DNA, 25 bp, Artificial
  probe
  misc_feature (1)..(25): SEQ ID NO: 6537; WAN024BO3_at; Start 495; Stop 519
gagttacaatccacctagaaatcca

SEQ ID NO: 87569 - DNA, 25 bp, Artificial
  probe
  misc_feature (1)..(25): SEQ ID NO: 6537; WAN024BO3_at; Start 160; Stop 184
gaggcggccaatatcgttgttatcc

SEQ ID NO: 87570 - DNA, 25 bp, Artificial
  probe
  misc_feature (1)..(25): SEQ ID NO: 6537; WAN024BO3_at; Start 877; Stop 901
tattattcaccagctggacaagtgg

SEQ ID NO: 87571 - DNA, 25 bp, Artificial
  probe
  misc_feature (1)..(25): SEQ ID NO: 6537; WAN024BO3_at; Start 240; Stop 264
gaacctttttggtatagctgagcag

SEQ ID NO: 87572 - DNA, 25 bp, Artificial
  probe
  misc_feature (1)..(25): SEQ ID NO: 6537; WAN024BO3_at; Start 1005; Stop 1029
tgagggagcgttaagaaaccagatg

SEQ ID NO: 87573 - DNA, 25 bp, Artificial
  probe
  misc_feature (1)..(25): SEQ ID NO: 6537; WAN024BO3_at; Start 601; Stop 625
gaactcggattcgttactgagcaga

SEQ ID NO: 87574 - DNA, 25 bp, Artificial
  probe
  misc_feature (1)..(25): SEQ ID NO: 6537; WAN024BO3_at; Start 296; Stop 320
tacacaaaacgaccggctcaacatt

SEQ ID NO: 87575 - DNA, 25 bp, Artificial
  probe
  misc_feature (1)..(25): SEQ ID NO: 6537; WAN024BO3_at; Start 973; Stop 997
gtacaagccttgcaatacacaatag

SEQ ID NO: 87576 - DNA, 25 bp, Artificial
  probe
  misc_feature (1)..(25): SEQ ID NO: 6537; WAN024BO3_at; Start 678; Stop 702
cttatatctaggtgaggcagtggga

SEQ ID NO: 87577 - DNA, 25 bp, Artificial
  probe
  misc_feature (1)..(25): SEQ ID NO: 6537; WAN024BO3_at; Start 463; Stop 487
cacccacgcgccaagtttgtacaat

SEQ ID NO: 87578 - DNA, 25 bp, Artificial
  probe
  misc_feature (1)..(25): SEQ ID NO: 6537; WAN024BO3_at; Start 745; Stop 769
gatgctttgcctagcgatgataagc

SEQ ID NO: 87579 - DNA, 25 bp, Artificial
  probe
  misc_feature (1)..(25): SEQ ID NO: 6537; WAN024BO3_at; Start 1177; Stop 1201
tatcgttgggatgaaaagactatca

SEQ ID NO: 87580 - DNA, 25 bp, Artificial
  probe
  misc_feature (1)..(25): SEQ ID NO: 6537; WAN024BO3_at; Start 261; Stop 285
gcagttcacaaaaacagttagcccg

SEQ ID NO: 87581 - DNA, 25 bp, Artificial
  probe
  misc_feature (1)..(25): SEQ ID NO: 6537; WAN024BO3_at; Start 1099; Stop 1123
caatctttgcttgctcaaggtcgct

SEQ ID NO: 87582 - DNA, 25 bp, Artificial
  probe
  misc_feature (1)..(25): SEQ ID NO: 6537; WAN024BO3_at; Start 815; Stop 839
caaccgcttgttgcgcttttggaat

SEQ ID NO: 87583 - DNA, 25 bp, Artificial
  probe
  misc_feature (1)..(25): SEQ ID NO: 6537; WAN024BO3_at; Start 1114; Stop 1138
caaggtcgcttttactatctcaaca

SEQ ID NO: 87584 - DNA, 25 bp, Artificial
  probe
  misc_feature (1)..(25): SEQ ID NO: 6537; WAN024BO3_at; Start 378; Stop 402
catagcggtttggtatgaagaggct

SEQ ID NO: 87585 - DNA, 25 bp, Artificial
  probe
  misc_feature (1)..(25): SEQ ID NO: 6537; WAN024BO3_at; Start 9; Stop 33
taatgtccagaagaacatcaaccct

SEQ ID NO: 87586 - DNA, 25 bp, Artificial
  probe
  misc_feature (1)..(25): SEQ ID NO: 6537; WAN024BO3_at; Start 990; Stop 1014
cacaatagatagtgctgagggagcg

SEQ ID NO: 87587 - DNA, 25 bp, Artificial
  probe
  misc_feature (1)..(25): SEQ ID NO: 6537; WAN024BO3_at; Start 394; Stop 418
gaagaggctgctgaatttaatgacc

SEQ ID NO: 87588 - DNA, 25 bp, Artificial
  probe
  misc_feature (1)..(25): SEQ ID NO: 6537; WAN024BO3_at; Start 910; Stop 934
gcgcctagtcagttatctaaagaga

SEQ ID NO: 87589 - DNA, 25 bp, Artificial
  probe
  misc_feature (1)..(25): SEQ ID NO: 6537; WAN024BO3_at; Start 1036; Stop 1060
gactttggtttgaaatggcatccag

SEQ ID NO: 87590 - DNA, 25 bp, Artificial
  probe
  misc_feature (1)..(25): SEQ ID NO: 6537; WAN024BO3_at; Start 1234; Stop 1258
gaccatacatgcgacacaacacagt

SEQ ID NO: 87591 - DNA, 25 bp, Artificial
  probe
  misc_feature (1)..(25): SEQ ID NO: 6585; WAN024BO4_at; Start 165; Stop 189
tgttcagtacaagaatacggatgga

SEQ ID NO: 87592 - DNA, 25 bp, Artificial
  probe
  misc_feature (1)..(25): SEQ ID NO: 6585; WAN024BO4_at; Start 457; Stop 481
tttccactagaaagcaacacacaag

SEQ ID NO: 87593 - DNA, 25 bp, Artificial
  probe
  misc_feature (1)..(25): SEQ ID NO: 6585; WAN024BO4_at; Start 89; Stop 113
caaaaattgcagtgactcaagagga

SEQ ID NO: 87594 - DNA, 25 bp, Artificial
  probe
  misc_feature (1)..(25): SEQ ID NO: 6585; WAN024BO4_at; Start 578; Stop 602
cagacggacaagaaacaggtagcac

SEQ ID NO: 87595 - DNA, 25 bp, Artificial
  probe
  misc_feature (1)..(25): SEQ ID NO: 6585; WAN024BO4_at; Start 36; Stop 60
tcgagggaggtattacatgcagaca

SEQ ID NO: 87596 - DNA, 25 bp, Artificial
  probe
  misc_feature (1)..(25): SEQ ID NO: 6585; WAN024BO4_at; Start 965; Stop 989
gaccacggtttgatgttgagcagaa

SEQ ID NO: 87597 - DNA, 25 bp, Artificial
  probe
  misc_feature (1)..(25): SEQ ID NO: 6585; WAN024BO4_at; Start 929; Stop 953
gacaatatcaacgtccagatggaac

SEQ ID NO: 87598 - DNA, 25 bp, Artificial
  probe
  misc_feature (1)..(25): SEQ ID NO: 6585; WAN024BO4_at; Start 670; Stop 694
caacgtgtgaacttgagtgaactag

SEQ ID NO: 87599 - DNA, 25 bp, Artificial
  probe
  misc_feature (1)..(25): SEQ ID NO: 6585; WAN024BO4_at; Start 1522; Stop 1546
tatggtatgcatgaccaaaacgagg

SEQ ID NO: 87600 - DNA, 25 bp, Artificial
  probe
  misc_feature (1)..(25): SEQ ID NO: 6585; WAN024BO4_at; Start 777; Stop 801
gaataacaaagacatcaacagccct

SEQ ID NO: 87601 - DNA, 25 bp, Artificial
  probe
  misc_feature (1)..(25): SEQ ID NO: 6585; WAN024BO4_at; Start 316; Stop 340
gatgacatgctaactaacgaccgat

SEQ ID NO: 87602 - DNA, 25 bp, Artificial
  probe
  misc_feature (1)..(25): SEQ ID NO: 6585; WAN024BO4_at; Start 1360; Stop 1384
catgcagaacttgattattgggcta

SEQ ID NO: 87603 - DNA, 25 bp, Artificial
  probe
  misc_feature (1)..(25): SEQ ID NO: 6585; WAN024BO4_at; Start 442; Stop 466
caagcgcctgtgttctttccactag

SEQ ID NO: 87604 - DNA, 25 bp, Artificial
  probe
  misc_feature (1)..(25): SEQ ID NO: 6585; WAN024BO4_at; Start 478; Stop 502
caagatgtttcaagtgctgcaatcc

SEQ ID NO: 87605 - DNA, 25 bp, Artificial
  probe
  misc_feature (1)..(25): SEQ ID NO: 6585; WAN024BO4_at; Start 425; Stop 449
tcagagtggcatttattcaagcgcc

SEQ ID NO: 87606 - DNA, 25 bp, Artificial
  probe
  misc_feature (1)..(25): SEQ ID NO: 6585; WAN024BO4_at; Start 562; Stop 586
cacgaatgggtaacagcagacggac

SEQ ID NO: 87607 - DNA, 25 bp, Artificial
  probe
  misc_feature (1)..(25): SEQ ID NO: 6585; WAN024BO4_at; Start 104; Stop 128
ctcaagaggagtatgaccggattaa

SEQ ID NO: 87608 - DNA, 25 bp, Artificial
  probe
  misc_feature (1)..(25): SEQ ID NO: 6585; WAN024BO4_at; Start 1169; Stop 1193
cagaaattgtcagcgagaactcaga

SEQ ID NO: 87609 - DNA, 25 bp, Artificial
  probe
  misc_feature (1)..(25): SEQ ID NO: 6585; WAN024BO4_at; Start 1002; Stop 1026
aattggcggctctagcatggatgcc

SEQ ID NO: 87610 - DNA, 25 bp, Artificial
  probe
  misc_feature (1)..(25): SEQ ID NO: 6585; WAN024BO4_at; Start 392; Stop 416
tagctatgcgcccttatattgacgg

SEQ ID NO: 87611 - DNA, 25 bp, Artificial
  probe
  misc_feature (1)..(25): SEQ ID NO: 6585; WAN024BO4_at; Start 358; Stop 382
cggtatctagaaagctgtttggcac

SEQ ID NO: 87612 - DNA, 25 bp, Artificial
  probe
  misc_feature (1)..(25): SEQ ID NO: 6585; WAN024BO4_at; Start 792; Stop 816
caacagccctcttggattgtctatc

SEQ ID NO: 87613 - DNA, 25 bp, Artificial
  probe
  misc_feature (1)..(25): SEQ ID NO: 6585; WAN024BO4_at; Start 1536; Stop 1560
ccaaaacgaggagaaagcagatgac

SEQ ID NO: 87614 - DNA, 25 bp, Artificial
  probe
  misc_feature (1)..(25): SEQ ID NO: 6585; WAN024BO4_at; Start 1493; Stop 1517
tacctatgaatgatgccgaacttgc

SEQ ID NO: 87615 - DNA, 25 bp, Artificial
  probe
  misc_feature (1)..(25): SEQ ID NO: 6585; WAN024BO4_at; Start 1185; Stop 1209
gaactcagacacttatcagatgcga

SEQ ID NO: 87616 - DNA, 25 bp, Artificial
  probe
  misc_feature (1)..(25): SEQ ID NO: 6585; WAN024BO4_at; Start 187; Stop 211
ggagatattaaatcccgtccaatga

SEQ ID NO: 87617 - DNA, 25 bp, Artificial
  probe
  misc_feature (1)..(25): SEQ ID NO: 6585; WAN024BO4_at; Start 892; Stop 916
caaagacgagttattgtgcccgaac

SEQ ID NO: 87618 - DNA, 25 bp, Artificial
  probe
  misc_feature (1)..(25): SEQ ID NO: 6585; WAN024BO4_at; Start 218; Stop 242
tgccaattgcaagaacagcatcgaa

SEQ ID NO: 87619 - DNA, 25 bp, Artificial
  probe
  misc_feature (1)..(25): SEQ ID NO: 6585; WAN024BO4_at; Start 987; Stop 1011
gaatgtttatatgcaaattggcggc

SEQ ID NO: 87620 - DNA, 25 bp, Artificial
  probe
  misc_feature (1)..(25): SEQ ID NO: 6585; WAN024BO4_at; Start 1257; Stop 1281
ttcaatgtgtgagctcggtaaggcg

SEQ ID NO: 87621 - DNA, 25 bp, Artificial
  probe
  misc_feature (1)..(25): SEQ ID NO: 6585; WAN024BO4_at; Start 1385; Stop 1409
aaatggtagccgcaggattctcaac

SEQ ID NO: 87622 - DNA, 25 bp, Artificial
  probe
  misc_feature (1)..(25): SEQ ID NO: 6585; WAN024BO4_at; Start 819; Stop 843
tgataacgcaaagacgactattgac

SEQ ID NO: 87623 - DNA, 25 bp, Artificial
  probe
  misc_feature (1)..(25): SEQ ID NO: 6585; WAN024BO4_at; Start 1142; Stop 1166
tcgatggtcaaggaatgaaaaccgc

SEQ ID NO: 87624 - DNA, 25 bp, Artificial
  probe
  misc_feature (1)..(25): SEQ ID NO: 6585; WAN024BO4_at; Start 376; Stop 400
ttggcacttggtggcctagctatgc

SEQ ID NO: 87625 - DNA, 25 bp, Artificial
  probe
  misc_feature (1)..(25): SEQ ID NO: 6701; WAN024BO5_at; Start 975; Stop 999
tgacaagatgatacaagctgagcgt

SEQ ID NO: 87626 - DNA, 25 bp, Artificial
  probe
  misc_feature (1)..(25): SEQ ID NO: 6701; WAN024BO5_at; Start 326; Stop 350
cttattcgaggcaagcagttagtga

SEQ ID NO: 87627 - DNA, 25 bp, Artificial
  probe
  misc_feature (1)..(25): SEQ ID NO: 6701; WAN024BO5_at; Start 592; Stop 616
gaaatgcgtactagacctgctgagg

SEQ ID NO: 87628 - DNA, 25 bp, Artificial
  probe
  misc_feature (1)..(25): SEQ ID NO: 6701; WAN024BO5_at; Start 549; Stop 573
tgcgagggctattatcaagagcaca

SEQ ID NO: 87629 - DNA, 25 bp, Artificial
  probe
  misc_feature (1)..(25): SEQ ID NO: 6701; WAN024BO5_at; Start 238; Stop 262
tataaggacactaaacagcaacttg

SEQ ID NO: 87630 - DNA, 25 bp, Artificial
  probe
  misc_feature (1)..(25): SEQ ID NO: 6701; WAN024BO5_at; Start 133; Stop 157
gatatgcacatgctcaatgaacaga

SEQ ID NO: 87631 - DNA, 25 bp, Artificial
  probe
  misc_feature (1)..(25): SEQ ID NO: 6701; WAN024BO5_at; Start 672; Stop 696
tagtccgttacaagggcagatagtt

SEQ ID NO: 87632 - DNA, 25 bp, Artificial
  probe
  misc_feature (1)..(25): SEQ ID NO: 6701; WAN024BO5_at; Start 292; Stop 316
gagatttcaaatggcgtaacggaca

SEQ ID NO: 87633 - DNA, 25 bp, Artificial
  probe
  misc_feature (1)..(25): SEQ ID NO: 6701; WAN024BO5_at; Start 951; Stop 975
gcattacgctcataccttgcaagat

SEQ ID NO: 87634 - DNA, 25 bp, Artificial
  probe
  misc_feature (1)..(25): SEQ ID NO: 6701; WAN024BO5_at; Start 371; Stop 395
cattacctaagagcttgcaagtagc

SEQ ID NO: 87635 - DNA, 25 bp, Artificial
  probe
  misc_feature (1)..(25): SEQ ID NO: 6701; WAN024BO5_at; Start 449; Stop 473
caagcgatgttgctttgcatgatac

SEQ ID NO: 87636 - DNA, 25 bp, Artificial
  probe
  misc_feature (1)..(25): SEQ ID NO: 6701; WAN024BO5_at; Start 403; Stop 427
tcgattgtggaggagacagtcgcac

SEQ ID NO: 87637 - DNA, 25 bp, Artificial
  probe
  misc_feature (1)..(25): SEQ ID NO: 6701; WAN024BO5_at; Start 635; Stop 659
tttactattcgatgaaagcaatggc

SEQ ID NO: 87638 - DNA, 25 bp, Artificial
  probe
  misc_feature (1)..(25): SEQ ID NO: 6701; WAN024BO5_at; Start 831; Stop 855
gttaccgaacttaccagactatctg

SEQ ID NO: 87639 - DNA, 25 bp, Artificial
  probe
  misc_feature (1)..(25): SEQ ID NO: 6701; WAN024BO5_at; Start 764; Stop 788
cagcagcaggatgtttaggaatcca

SEQ ID NO: 87640 - DNA, 25 bp, Artificial
  probe
  misc_feature (1)..(25): SEQ ID NO: 6701; WAN024BO5_at; Start 653; Stop 677
caatggctagaccagcttgtagtcc

SEQ ID NO: 87641 - DNA, 25 bp, Artificial
  probe
  misc_feature (1)..(25): SEQ ID NO: 6701; WAN024BO5_at; Start 1058; Stop 1082
taacaagagattacagacgagagaa

SEQ ID NO: 87642 - DNA, 25 bp, Artificial
  probe
  misc_feature (1)..(25): SEQ ID NO: 6701; WAN024BO5_at; Start 687; Stop 711
gcagatagttacaaaagggactggt

SEQ ID NO: 87643 - DNA, 25 bp, Artificial
  probe
  misc_feature (1)..(25): SEQ ID NO: 6701; WAN024BO5_at; Start 871; Stop 895
gaacaagctgaagaaaatgcacgca

SEQ ID NO: 87644 - DNA, 25 bp, Artificial
  probe
  misc_feature (1)..(25): SEQ ID NO: 6701; WAN024BO5_at; Start 1025; Stop 1049
agatccgcaacttgataaatcagca

SEQ ID NO: 87645 - DNA, 25 bp, Artificial
  probe
  misc_feature (1)..(25): SEQ ID NO: 6701; WAN024BO5_at; Start 98; Stop 122
gaaacccttatatctggcagttaga

SEQ ID NO: 87646 - DNA, 25 bp, Artificial
  probe
  misc_feature (1)..(25): SEQ ID NO: 6701; WAN024BO5_at; Start 476; Stop 500
tcatgaaatggcagaagaacgcttt

SEQ ID NO: 87647 - DNA, 25 bp, Artificial
  probe
  misc_feature (1)..(25): SEQ ID NO: 6701; WAN024BO5_at; Start 417; Stop 441
gacagtcgcacaggtagttgcagga

SEQ ID NO: 87648 - DNA, 25 bp, Artificial
  probe
  misc_feature (1)..(25): SEQ ID NO: 6701; WAN024BO5_at; Start 907; Stop 931
caaagaggccttgagagacttatca

SEQ ID NO: 87649 - DNA, 25 bp, Artificial
  probe
  misc_feature (1)..(25): SEQ ID NO: 6701; WAN024BO5_at; Start 894; Stop 918
cattgaagcaggtcaaagaggcctt

SEQ ID NO: 87650 - DNA, 25 bp, Artificial
  probe
  misc_feature (1)..(25): SEQ ID NO: 6701; WAN024BO5_at; Start 434; Stop 458
ttgcaggaactaaaacaagcgatgt

SEQ ID NO: 87651 - DNA, 25 bp, Artificial
  probe
  misc_feature (1)..(25): SEQ ID NO: 6701; WAN024BO5_at; Start 813; Stop 837
tattgttggagttcatgagttaccg

SEQ ID NO: 87652 - DNA, 25 bp, Artificial
  probe
  misc_feature (1)..(25): SEQ ID NO: 6701; WAN024BO5_at; Start 308; Stop 332
taacggacagcttagaggcttattc

SEQ ID NO: 87653 - DNA, 25 bp, Artificial
  probe
  misc_feature (1)..(25): SEQ ID NO: 6701; WAN024BO5_at; Start 933; Stop 957
gacacataaagagcggttgcattac

SEQ ID NO: 87654 - DNA, 25 bp, Artificial
  probe
  misc_feature (1)..(25): SEQ ID NO: 6701; WAN024BO5_at; Start 748; Stop 772
gattatgggtatggaacagcagcag

SEQ ID NO: 87655 - DNA, 25 bp, Artificial
  probe
  misc_feature (1)..(25): SEQ ID NO: 6701; WAN024BO5_at; Start 168; Stop 192
tatttcagagcgtacaggaattgct

SEQ ID NO: 87656 - DNA, 25 bp, Artificial
  probe
  misc_feature (1)..(25): SEQ ID NO: 6701; WAN024BO5_at; Start 524; Stop 548
ggaggcattggaaagctgatagcta

SEQ ID NO: 87657 - DNA, 25 bp, Artificial
  probe
  misc_feature (1)..(25): SEQ ID NO: 6701; WAN024BO5_at; Start 1008; Stop 1032
tagagggtatcaaactaagatccgc

SEQ ID NO: 87658 - DNA, 25 bp, Artificial
  probe
  misc_feature (1)..(25): SEQ ID NO: 6701; WAN024BO5_at; Start 855; Stop 879
gaagaatctaacaccagaacaagct

SEQ ID NO: 87659 - DNA, 25 bp, Artificial
  probe
  misc_feature (1)..(25): SEQ ID NO: 6867; WAN024BO6_at; Start 230; Stop 254
tgcaagctgaatatgacaagtataa

SEQ ID NO: 87660 - DNA, 25 bp, Artificial
  probe
  misc_feature (1)..(25): SEQ ID NO: 6867; WAN024BO6_at; Start 2; Stop 26
tggcatttacaactgaagaactact

SEQ ID NO: 87661 - DNA, 25 bp, Artificial
  probe
  misc_feature (1)..(25): SEQ ID NO: 6867; WAN024BO6_at; Start 90; Stop 114
tgaggacaaatcagccttagaaact

SEQ ID NO: 87662 - DNA, 25 bp, Artificial
  probe
  misc_feature (1)..(25): SEQ ID NO: 6867; WAN024BO6_at; Start 289; Stop 313
aaggttagtgctatcagtctagctc

SEQ ID NO: 87663 - DNA, 25 bp, Artificial
  probe
  misc_feature (1)..(25): SEQ ID NO: 6867; WAN024BO6_at; Start 259; Stop 283
gaagctgcagctgaacttgcacaga

SEQ ID NO: 87664 - DNA, 25 bp, Artificial
  probe
  misc_feature (1)..(25): SEQ ID NO: 6867; WAN024BO6_at; Start 195; Stop 219
tatcagcgctgaacaaaaagatgcg

SEQ ID NO: 87665 - DNA, 25 bp, Artificial
  probe
  misc_feature (1)..(25): SEQ ID NO: 6867; WAN024BO6_at; Start 153; Stop 177
aaaagcagaggagcaagttgaacac

SEQ ID NO: 87666 - DNA, 25 bp, Artificial
  probe
  misc_feature (1)..(25): SEQ ID NO: 6867; WAN024BO6_at; Start 246; Stop 270
caagtataaaaacgaagctgcagct

SEQ ID NO: 87667 - DNA, 25 bp, Artificial
  probe
  misc_feature (1)..(25): SEQ ID NO: 6867; WAN024BO6_at; Start 134; Stop 158
gtctcaaatcacagttgcaaaaagc

SEQ ID NO: 87668 - DNA, 25 bp, Artificial
  probe
  misc_feature (1)..(25): SEQ ID NO: 6867; WAN024BO6_at; Start 214; Stop 238
gatgcgattgataaattgcaagctg

SEQ ID NO: 87669 - DNA, 25 bp, Artificial
  probe
  misc_feature (1)..(25): SEQ ID NO: 6867; WAN024BO6_at; Start 62; Stop 86
tctttgctttgcgaggaaaagagct

SEQ ID NO: 87670 - DNA, 25 bp, Artificial
  probe
  misc_feature (1)..(25): SEQ ID NO: 6867; WAN024BO6_at; Start 77; Stop 101
gaaaagagctgaatgaggacaaatc

SEQ ID NO: 87671 - DNA, 25 bp, Artificial
  probe
  misc_feature (1)..(25): SEQ ID NO: 6867; WAN024BO6_at; Start 495; Stop 519
taatccggcaggagagggtacaagt

SEQ ID NO: 87672 - DNA, 25 bp, Artificial
  probe
  misc_feature (1)..(25): SEQ ID NO: 6867; WAN024BO6_at; Start 16; Stop 40
gaagaactactcaatcttgggttga

SEQ ID NO: 87673 - DNA, 25 bp, Artificial
  probe
  misc_feature (1)..(25): SEQ ID NO: 6867; WAN024BO6_at; Start 436; Stop 460
gatccatatctgttcaaagctgaag

SEQ ID NO: 87674 - DNA, 25 bp, Artificial
  probe
  misc_feature (1)..(25): SEQ ID NO: 6867; WAN024BO6_at; Start 515; Stop 539
caagtgatgttgatccgttccaagc

SEQ ID NO: 87675 - DNA, 25 bp, Artificial
  probe
  misc_feature (1)..(25): SEQ ID NO: 6867; WAN024BO6_at; Start 121; Stop 145
caagagcgagatagtctcaaatcac

SEQ ID NO: 87676 - DNA, 25 bp, Artificial
  probe
  misc_feature (1)..(25): SEQ ID NO: 6867; WAN024BO6_at; Start 420; Stop 444
cggtttaaaagaaagtgatccatat

SEQ ID NO: 87677 - DNA, 25 bp, Artificial
  probe
  misc_feature (1)..(25): SEQ ID NO: 6867; WAN024BO6_at; Start 319; Stop 343
gatacaaatgctttcaatccagaca

SEQ ID NO: 87678 - DNA, 25 bp, Artificial
  probe
  misc_feature (1)..(25): SEQ ID NO: 6867; WAN024BO6_at; Start 390; Stop 414
cgggaaacctcagattgatgaagta

SEQ ID NO: 87679 - DNA, 25 bp, Artificial
  probe
  misc_feature (1)..(25): SEQ ID NO: 6867; WAN024BO6_at; Start 31; Stop 55
cttgggttgacagaagaacaggcta

SEQ ID NO: 87680 - DNA, 25 bp, Artificial
  probe
  misc_feature (1)..(25): SEQ ID NO: 6867; WAN024BO6_at; Start 454; Stop 478
gctgaagaaagtaagcctagcccca

SEQ ID NO: 87681 - DNA, 25 bp, Artificial
  probe
  misc_feature (1)..(25): SEQ ID NO: 6867; WAN024BO6_at; Start 353; Stop 377
aattcattgatgttgatgctatcca

SEQ ID NO: 87682 - DNA, 25 bp, Artificial
  probe
  misc_feature (1)..(25): SEQ ID NO: 6867; WAN024BO6_at; Start 106; Stop 130
ttagaaactatcaaacaagagcgag

SEQ ID NO: 87683 - DNA, 25 bp, Artificial
  probe
  misc_feature (1)..(25): SEQ ID NO: 6867; WAN024BO6_at; Start 485; Stop 509
tacctcaaggtaatccggcaggaga

SEQ ID NO: 87684 - DNA, 25 bp, Artificial
  probe
  misc_feature (1)..(25): SEQ ID NO: 6867; WAN024BO6_at; Start 168; Stop 192
agttgaacacttgaaatcacttgag

SEQ ID NO: 87685 - DNA, 25 bp, Artificial
  probe
  misc_feature (1)..(25): SEQ ID NO: 6867; WAN024BO6_at; Start 369; Stop 393
tgctatccagttagacgacaacggg

SEQ ID NO: 87686 - DNA, 25 bp, Artificial
  probe
  misc_feature (1)..(25): SEQ ID NO: 6867; WAN024BO6_at; Start 382; Stop 406
gacgacaacgggaaacctcagattg

SEQ ID NO: 87687 - DNA, 25 bp, Artificial
  probe
  misc_feature (1)..(25): SEQ ID NO: 6867; WAN024BO6_at; Start 180; Stop 204
gaaatcacttgagaatatcagcgct

SEQ ID NO: 87688 - DNA, 25 bp, Artificial
  probe
  misc_feature (1)..(25): SEQ ID NO: 6867; WAN024BO6_at; Start 274; Stop 298
cttgcacagacaaaaaaggttagtg

SEQ ID NO: 87689 - DNA, 25 bp, Artificial
  probe
  misc_feature (1)..(25): SEQ ID NO: 6867; WAN024BO6_at; Start 470; Stop 494
ctagccccaatattttacctcaagg

SEQ ID NO: 87690 - DNA, 25 bp, Artificial
  probe
  misc_feature (1)..(25): SEQ ID NO: 6867; WAN024BO6_at; Start 535; Stop 559
caagcgattattgacgggtatggca

SEQ ID NO: 87691 - DNA, 25 bp, Artificial
  probe
  misc_feature (1)..(25): SEQ ID NO: 6867; WAN024BO6_at; Start 46; Stop 70
gaacaggctaagtcagtctttgctt

SEQ ID NO: 87692 - DNA, 25 bp, Artificial
  probe
  misc_feature (1)..(25): SEQ ID NO: 6867; WAN024BO6_at; Start 305; Stop 329
gtctagctctgaaagatacaaatgc

SEQ ID NO: 87693 - DNA, 25 bp, Artificial
  probe
  misc_feature (1)..(25): SEQ ID NO: 6720; WAN024BO7_at; Start 44; Stop 68
aatatgcgggcattcttgagacagt

SEQ ID NO: 87694 - DNA, 25 bp, Artificial
  probe
  misc_feature (1)..(25): SEQ ID NO: 6720; WAN024BO7_at; Start 802; Stop 826
caagctgctgctaagggtggtactt

SEQ ID NO: 87695 - DNA, 25 bp, Artificial
  probe
  misc_feature (1)..(25): SEQ ID NO: 6720; WAN024BO7_at; Start 521; Stop 545
caaacaacgaagttacagcgccgat

SEQ ID NO: 87696 - DNA, 25 bp, Artificial
  probe
  misc_feature (1)..(25): SEQ ID NO: 6720; WAN024BO7_at; Start 355; Stop 379
gctgctgttgccgaccgcttgaagt

SEQ ID NO: 87697 - DNA, 25 bp, Artificial
  probe
  misc_feature (1)..(25): SEQ ID NO: 6720; WAN024BO7_at; Start 688; Stop 712
tactttgagacaggagttatcgcta

SEQ ID NO: 87698 - DNA, 25 bp, Artificial
  probe
  misc_feature (1)..(25): SEQ ID NO: 6720; WAN024BO7_at; Start 787; Stop 811
gatggtgtgaaattgcaagctgctg

SEQ ID NO: 87699 - DNA, 25 bp, Artificial
  probe
  misc_feature (1)..(25): SEQ ID NO: 6720; WAN024BO7_at; Start 23; Stop 47
cagtgcgccgctatgagaaacaata

SEQ ID NO: 87700 - DNA, 25 bp, Artificial
  probe
  misc_feature (1)..(25): SEQ ID NO: 6720; WAN024BO7_at; Start 306; Stop 330
tacaatccatgagggtcttgaccgt

SEQ ID NO: 87701 - DNA, 25 bp, Artificial
  probe
  misc_feature (1)..(25): SEQ ID NO: 6720; WAN024BO7_at; Start 435; Stop 459
tgacaacgctactaagacggaagcc

SEQ ID NO: 87702 - DNA, 25 bp, Artificial
  probe
  misc_feature (1)..(25): SEQ ID NO: 6720; WAN024BO7_at; Start 385; Stop 409
tccgaggcacaaactcgaacagtga

SEQ ID NO: 87703 - DNA, 25 bp, Artificial
  probe
  misc_feature (1)..(25): SEQ ID NO: 6720; WAN024BO7_at; Start 673; Stop 697
gaaacgccagcacaatactttgaga

SEQ ID NO: 87704 - DNA, 25 bp, Artificial
  probe
  misc_feature (1)..(25): SEQ ID NO: 6720; WAN024BO7_at; Start 78; Stop 102
gcgggcagcattttcaaacgctcta

SEQ ID NO: 87705 - DNA, 25 bp, Artificial
  probe
  misc_feature (1)..(25): SEQ ID NO: 6720; WAN024BO7_at; Start 337; Stop 361
gtaaacaatgatcttaacgctgctg

SEQ ID NO: 87706 - DNA, 25 bp, Artificial
  probe
  misc_feature (1)..(25): SEQ ID NO: 6720; WAN024BO7_at; Start 101; Stop 125
tagcacctattcagattttggatgg

SEQ ID NO: 87707 - DNA, 25 bp, Artificial
  probe
  misc_feature (1)..(25): SEQ ID NO: 6720; WAN024BO7_at; Start 584; Stop 608
tagatatggcatcagttacaagcgc

SEQ ID NO: 87708 - DNA, 25 bp, Artificial
  probe
  misc_feature (1)..(25): SEQ ID NO: 6720; WAN024BO7_at; Start 761; Stop 785
cccgtgtaattgaggctgaaaactt

SEQ ID NO: 87709 - DNA, 25 bp, Artificial
  probe
  misc_feature (1)..(25): SEQ ID NO: 6720; WAN024BO7_at; Start 452; Stop 476
cggaagcccttgctgattttacaga

SEQ ID NO: 87710 - DNA, 25 bp, Artificial
  probe
  misc_feature (1)..(25): SEQ ID NO: 6720; WAN024BO7_at; Start 64; Stop 88
acagtttttggagtgcgggcagcat

SEQ ID NO: 87711 - DNA, 25 bp, Artificial
  probe
  misc_feature (1)..(25): SEQ ID NO: 6720; WAN024BO7_at; Start 8; Stop 32
gtaatcaaaacaacgcagtgcgccg

SEQ ID NO: 87712 - DNA, 25 bp, Artificial
  probe
  misc_feature (1)..(25): SEQ ID NO: 6720; WAN024BO7_at; Start 242; Stop 266
cacgctttggtggtgtgacagaagt

SEQ ID NO: 87713 - DNA, 25 bp, Artificial
  probe
  misc_feature (1)..(25): SEQ ID NO: 6720; WAN024BO7_at; Start 745; Stop 769
gttggtatctcaacagcccgtgtaa

SEQ ID NO: 87714 - DNA, 25 bp, Artificial
  probe
  misc_feature (1)..(25): SEQ ID NO: 6720; WAN024BO7_at; Start 370; Stop 394
cgcttgaagttgcaatccgaggcac

SEQ ID NO: 87715 - DNA, 25 bp, Artificial
  probe
  misc_feature (1)..(25): SEQ ID NO: 6720; WAN024BO7_at; Start 659; Stop 683
gctttaccttggaagaaacgccagc

SEQ ID NO: 87716 - DNA, 25 bp, Artificial
  probe
  misc_feature (1)..(25): SEQ ID NO: 6720; WAN024BO7_at; Start 192; Stop 216
caaaaccggtgaaaatgatggtggt

SEQ ID NO: 87717 - DNA, 25 bp, Artificial
  probe
  misc_feature (1)..(25): SEQ ID NO: 6720; WAN024BO7_at; Start 704; Stop 728
ttatcgctatcttctcaccaaacgg

SEQ ID NO: 87718 - DNA, 25 bp, Artificial
  probe
  misc_feature (1)..(25): SEQ ID NO: 6720; WAN024BO7_at; Start 400; Stop 424
cgaacagtgaacaagcgaattggta

SEQ ID NO: 87719 - DNA, 25 bp, Artificial
  probe
  misc_feature (1)..(25): SEQ ID NO: 6720; WAN024BO7_at; Start 536; Stop 560
cagcgccgattactgtttacttgcg

SEQ ID NO: 87720 - DNA, 25 bp, Artificial
  probe
  misc_feature (1)..(25): SEQ ID NO: 6720; WAN024BO7_at; Start 817; Stop 841
ggtggtacttacactcttgatgaca

SEQ ID NO: 87721 - DNA, 25 bp, Artificial
  probe
  misc_feature (1)..(25): SEQ ID NO: 6720; WAN024BO7_at; Start 562; Stop 586
tctgaattttacaacgccatcgtag

SEQ ID NO: 87722 - DNA, 25 bp, Artificial
  probe
  misc_feature (1)..(25): SEQ ID NO: 6720; WAN024BO7_at; Start 179; Stop 203
taatcggtgagtacaaaaccggtga

SEQ ID NO: 87723 - DNA, 25 bp, Artificial
  probe
  misc_feature (1)..(25): SEQ ID NO: 6720; WAN024BO7_at; Start 165; Stop 189
caacacaccagttgtaatcggtgag

SEQ ID NO: 87724 - DNA, 25 bp, Artificial
  probe
  misc_feature (1)..(25): SEQ ID NO: 6720; WAN024BO7_at; Start 625; Stop 649
tcccttgatgaaaacgggctaccaa

SEQ ID NO: 87725 - DNA, 25 bp, Artificial
  probe
  misc_feature (1)..(25): SEQ ID NO: 6720; WAN024BO7_at; Start 506; Stop 530
tgtcggctttttacacaaacaacga

SEQ ID NO: 87726 - DNA, 25 bp, Artificial
  probe
  misc_feature (1)..(25): SEQ ID NO: 6720; WAN024BO7_at; Start 614; Stop 638
gggcaactatctcccttgatgaaaa

SEQ ID NO: 87727 - DNA, 25 bp, Artificial
  probe
  misc_feature (1)..(25): SEQ ID NO: 6861; WAN024BO8_at; Start 5; Stop 29
cactttacaaagcaacaaaaaatct

SEQ ID NO: 87728 - DNA, 25 bp, Artificial
  probe
  misc_feature (1)..(25): SEQ ID NO: 6861; WAN024BO8_at; Start 116; Stop 140
taaaaaatgcttttccagatgtgaa

SEQ ID NO: 87729 - DNA, 25 bp, Artificial
  probe
  misc_feature (1)..(25): SEQ ID NO: 6861; WAN024BO8_at; Start 45; Stop 69
caacatggatgtgattgtcgatgac

SEQ ID NO: 87730 - DNA, 25 bp, Artificial
  probe
  misc_feature (1)..(25): SEQ ID NO: 6861; WAN024BO8_at; Start 91; Stop 115
tatgctaaagaagtcaacaagaaac

SEQ ID NO: 87731 - DNA, 25 bp, Artificial
  probe
  misc_feature (1)..(25): SEQ ID NO: 6861; WAN024BO8_at; Start 207; Stop 231
tgcatctcaggcaactgttgaagat

SEQ ID NO: 87732 - DNA, 25 bp, Artificial
  probe
  misc_feature (1)..(25): SEQ ID NO: 6861; WAN024BO8_at; Start 2; Stop 26
tggcactttacaaagcaacaaaaaa

SEQ ID NO: 87733 - DNA, 25 bp, Artificial
  probe
  misc_feature (1)..(25): SEQ ID NO: 6861; WAN024BO8_at; Start 204; Stop 228
tgatgcatctcaggcaactgttgaa

SEQ ID NO: 87734 - DNA, 25 bp, Artificial
  probe
  misc_feature (1)..(25): SEQ ID NO: 6861; WAN024BO8_at; Start 64; Stop 88
gatgacattattgaacttgatgaag

SEQ ID NO: 87735 - DNA, 25 bp, Artificial
  probe
  misc_feature (1)..(25): SEQ ID NO: 6861; WAN024BO8_at; Start 187; Stop 211
gatgccccatctgtagatgatgcat

SEQ ID NO: 87736 - DNA, 25 bp, Artificial
  probe
  misc_feature (1)..(25): SEQ ID NO: 6861; WAN024BO8_at; Start 34; Stop 58
tttgagcaactcaacatggatgtga

SEQ ID NO: 87737 - DNA, 25 bp, Artificial
  probe
  misc_feature (1)..(25): SEQ ID NO: 6861; WAN024BO8_at; Start 151; Stop 175
gaacttgttgacaaaaatggaacgc

SEQ ID NO: 87738 - DNA, 25 bp, Artificial
  probe
  misc_feature (1)..(25): SEQ ID NO: 6861; WAN024BO8_at; Start 171; Stop 195
aacgcttgaaccagaagatgcccca

SEQ ID NO: 87739 - DNA, 25 bp, Artificial
  probe
  misc_feature (1)..(25): SEQ ID NO: 6861; WAN024BO8_at; Start 94; Stop 118
gctaaagaagtcaacaagaaactaa

SEQ ID NO: 87740 - DNA, 25 bp, Artificial
  probe
  misc_feature (1)..(25): SEQ ID NO: 6861; WAN024BO8_at; Start 194; Stop 218
catctgtagatgatgcatctcaggc

SEQ ID NO: 87741 - DNA, 25 bp, Artificial
  probe
  misc_feature (1)..(25): SEQ ID NO: 6861; WAN024BO8_at; Start 166; Stop 190
aatggaacgcttgaaccagaagatg

SEQ ID NO: 87742 - DNA, 25 bp, Artificial
  probe
  misc_feature (1)..(25): SEQ ID NO: 6861; WAN024BO8_at; Start 174; Stop 198
gcttgaaccagaagatgccccatct

SEQ ID NO: 87743 - DNA, 25 bp, Artificial
  probe
  misc_feature (1)..(25): SEQ ID NO: 6861; WAN024BO8_at; Start 163; Stop 187
aaaaatggaacgcttgaaccagaag

SEQ ID NO: 87744 - DNA, 25 bp, Artificial
  probe
  misc_feature (1)..(25): SEQ ID NO: 6861; WAN024BO8_at; Start 130; Stop 154
ccagatgtgaaaaatgttttagaac

SEQ ID NO: 87745 - DNA, 25 bp, Artificial
  probe
  misc_feature (1)..(25): SEQ ID NO: 6861; WAN024BO8_at; Start 190; Stop 214
gccccatctgtagatgatgcatctc

SEQ ID NO: 87746 - DNA, 25 bp, Artificial
  probe
  misc_feature (1)..(25): SEQ ID NO: 6861; WAN024BO8_at; Start 67; Stop 91
gacattattgaacttgatgaagatt

SEQ ID NO: 87747 - DNA, 25 bp, Artificial
  probe
  misc_feature (1)..(25): SEQ ID NO: 6861; WAN024BO8_at; Start 102; Stop 126
agtcaacaagaaactaaaaaatgct

SEQ ID NO: 87748 - DNA, 25 bp, Artificial
  probe
  misc_feature (1)..(25): SEQ ID NO: 6861; WAN024BO8_at; Start 48; Stop 72
catggatgtgattgtcgatgacatt

SEQ ID NO: 87749 - DNA, 25 bp, Artificial
  probe
  misc_feature (1)..(25): SEQ ID NO: 6861; WAN024BO8_at; Start 177; Stop 201
tgaaccagaagatgccccatctgta

SEQ ID NO: 87750 - DNA, 25 bp, Artificial
  probe
  misc_feature (1)..(25): SEQ ID NO: 6861; WAN024BO8_at; Start 184; Stop 208
gaagatgccccatctgtagatgatg

SEQ ID NO: 87751 - DNA, 25 bp, Artificial
  probe
  misc_feature (1)..(25): SEQ ID NO: 6861; WAN024BO8_at; Start 40; Stop 64
caactcaacatggatgtgattgtcg

SEQ ID NO: 87752 - DNA, 25 bp, Artificial
  probe
  misc_feature (1)..(25): SEQ ID NO: 6861; WAN024BO8_at; Start 202; Stop 226
gatgatgcatctcaggcaactgttg

SEQ ID NO: 87753 - DNA, 25 bp, Artificial
  probe
  misc_feature (1)..(25): SEQ ID NO: 6861; WAN024BO8_at; Start 200; Stop 224
tagatgatgcatctcaggcaactgt

SEQ ID NO: 87754 - DNA, 25 bp, Artificial
  probe
  misc_feature (1)..(25): SEQ ID NO: 6861; WAN024BO8_at; Start 169; Stop 193
ggaacgcttgaaccagaagatgccc

SEQ ID NO: 87755 - DNA, 25 bp, Artificial
  probe
  misc_feature (1)..(25): SEQ ID NO: 6861; WAN024BO8_at; Start 158; Stop 182
ttgacaaaaatggaacgcttgaacc

SEQ ID NO: 87756 - DNA, 25 bp, Artificial
  probe
  misc_feature (1)..(25): SEQ ID NO: 6861; WAN024BO8_at; Start 60; Stop 84
tgtcgatgacattattgaacttgat

SEQ ID NO: 87757 - DNA, 25 bp, Artificial
  probe
  misc_feature (1)..(25): SEQ ID NO: 6861; WAN024BO8_at; Start 182; Stop 206
cagaagatgccccatctgtagatga

SEQ ID NO: 87758 - DNA, 25 bp, Artificial
  probe
  misc_feature (1)..(25): SEQ ID NO: 6861; WAN024BO8_at; Start 22; Stop 46
aaaaatcttttctttgagcaactca

SEQ ID NO: 87759 - DNA, 25 bp, Artificial
  probe
  misc_feature (1)..(25): SEQ ID NO: 6861; WAN024BO8_at; Start 154; Stop 178
cttgttgacaaaaatggaacgcttg

SEQ ID NO: 87760 - DNA, 25 bp, Artificial
  probe
  misc_feature (1)..(25): SEQ ID NO: 6861; WAN024BO8_at; Start 160; Stop 184
gacaaaaatggaacgcttgaaccag

SEQ ID NO: 87761 - DNA, 25 bp, Artificial
  probe
  misc_feature (1)..(25): SEQ ID NO: 6563; WAN024BO9_at; Start 366; Stop 390
agttgttggagttgcctatgatcga

SEQ ID NO: 87762 - DNA, 25 bp, Artificial
  probe
  misc_feature (1)..(25): SEQ ID NO: 6563; WAN024BO9_at; Start 179; Stop 203
tggcattccaaatagcctatctcga

SEQ ID NO: 87763 - DNA, 25 bp, Artificial
  probe
  misc_feature (1)..(25): SEQ ID NO: 6563; WAN024BO9_at; Start 218; Stop 242
tgtcagccgatgacaaacagctagc

SEQ ID NO: 87764 - DNA, 25 bp, Artificial
  probe
  misc_feature (1)..(25): SEQ ID NO: 6563; WAN024BO9_at; Start 102; Stop 126
cactaacggtatttatcagaaagac

SEQ ID NO: 87765 - DNA, 25 bp, Artificial
  probe
  misc_feature (1)..(25): SEQ ID NO: 6563; WAN024BO9_at; Start 86; Stop 110
tagcgattgacctatacactaacgg

SEQ ID NO: 87766 - DNA, 25 bp, Artificial
  probe
  misc_feature (1)..(25): SEQ ID NO: 6563; WAN024BO9_at; Start 277; Stop 301
tatagcacctcacaaagcacattag

SEQ ID NO: 87767 - DNA, 25 bp, Artificial
  probe
  misc_feature (1)..(25): SEQ ID NO: 6563; WAN024BO9_at; Start 151; Stop 175
tatcgcaaatctgctgtaaagcttg

SEQ ID NO: 87768 - DNA, 25 bp, Artificial
  probe
  misc_feature (1)..(25): SEQ ID NO: 6563; WAN024BO9_at; Start 340; Stop 364
gctttgagacaagccggctttagcc

SEQ ID NO: 87769 - DNA, 25 bp, Artificial
  probe
  misc_feature (1)..(25): SEQ ID NO: 6563; WAN024BO9_at; Start 48; Stop 72
agttacagactttgaaaaattggca

SEQ ID NO: 87770 - DNA, 25 bp, Artificial
  probe
  misc_feature (1)..(25): SEQ ID NO: 6563; WAN024BO9_at; Start 322; Stop 346
tctatggatgctgaaaatgctttga

SEQ ID NO: 87771 - DNA, 25 bp, Artificial
  probe
  misc_feature (1)..(25): SEQ ID NO: 6563; WAN024BO9_at; Start 117; Stop 141
tcagaaagacattgattttgaaaaa

SEQ ID NO: 87772 - DNA, 25 bp, Artificial
  probe
  misc_feature (1)..(25): SEQ ID NO: 6563; WAN024BO9_at; Start 299; Stop 323
tagcaggtcagcgatttaatttgtc

SEQ ID NO: 87773 - DNA, 25 bp, Artificial
  probe
  misc_feature (1)..(25): SEQ ID NO: 6563; WAN024BO9_at; Start 362; Stop 386
gcctagttgttggagttgcctatga

SEQ ID NO: 87774 - DNA, 25 bp, Artificial
  probe
  misc_feature (1)..(25): SEQ ID NO: 6563; WAN024BO9_at; Start 5; Stop 29
cttatttgacacaagaggagttcga

SEQ ID NO: 87775 - DNA, 25 bp, Artificial
  probe
  misc_feature (1)..(25): SEQ ID NO: 6563; WAN024BO9_at; Start 231; Stop 255
caaacagctagccaatagtgtctct

SEQ ID NO: 87776 - DNA, 25 bp, Artificial
  probe
  misc_feature (1)..(25): SEQ ID NO: 6563; WAN024BO9_at; Start 347; Stop 371
gacaagccggctttagcctagttgt

SEQ ID NO: 87777 - DNA, 25 bp, Artificial
  probe
  misc_feature (1)..(25): SEQ ID NO: 6563; WAN024BO9_at; Start 269; Stop 293
caatctcttatagcacctcacaaag

SEQ ID NO: 87778 - DNA, 25 bp, Artificial
  probe
  misc_feature (1)..(25): SEQ ID NO: 6563; WAN024BO9_at; Start 76; Stop 100
cgggcaaagatagcgattgacctat

SEQ ID NO: 87779 - DNA, 25 bp, Artificial
  probe
  misc_feature (1)..(25): SEQ ID NO: 6563; WAN024BO9_at; Start 287; Stop 311
cacaaagcacattagcaggtcagcg

SEQ ID NO: 87780 - DNA, 25 bp, Artificial
  probe
  misc_feature (1)..(25): SEQ ID NO: 6563; WAN024BO9_at; Start 69; Stop 93
ggcaaaacgggcaaagatagcgatt

SEQ ID NO: 87781 - DNA, 25 bp, Artificial
  probe
  misc_feature (1)..(25): SEQ ID NO: 6563; WAN024BO9_at; Start 307; Stop 331
cagcgatttaatttgtctatggatg

SEQ ID NO: 87782 - DNA, 25 bp, Artificial
  probe
  misc_feature (1)..(25): SEQ ID NO: 6563; WAN024BO9_at; Start 202; Stop 226
gatgcctctggtattatgtcagccg

SEQ ID NO: 87783 - DNA, 25 bp, Artificial
  probe
  misc_feature (1)..(25): SEQ ID NO: 6563; WAN024BO9_at; Start 53; Stop 77
cagactttgaaaaattggcaaaacg

SEQ ID NO: 87784 - DNA, 25 bp, Artificial
  probe
  misc_feature (1)..(25): SEQ ID NO: 6563; WAN024BO9_at; Start 33; Stop 57
gttagattttgatgaagttacagac

SEQ ID NO: 87785 - DNA, 25 bp, Artificial
  probe
  misc_feature (1)..(25): SEQ ID NO: 6563; WAN024BO9_at; Start 226; Stop 250
gatgacaaacagctagccaatagtg

SEQ ID NO: 87786 - DNA, 25 bp, Artificial
  probe
  misc_feature (1)..(25): SEQ ID NO: 6563; WAN024BO9_at; Start 293; Stop 317
gcacattagcaggtcagcgatttaa

SEQ ID NO: 87787 - DNA, 25 bp, Artificial
  probe
  misc_feature (1)..(25): SEQ ID NO: 6563; WAN024BO9_at; Start 334; Stop 358
gaaaatgctttgagacaagccggct

SEQ ID NO: 87788 - DNA, 25 bp, Artificial
  probe
  misc_feature (1)..(25): SEQ ID NO: 6563; WAN024BO9_at; Start 188; Stop 212
aaatagcctatctcgatgcctctgg

SEQ ID NO: 87789 - DNA, 25 bp, Artificial
  probe
  misc_feature (1)..(25): SEQ ID NO: 6563; WAN024BO9_at; Start 165; Stop 189
tgtaaagcttgctatggcattccaa

SEQ ID NO: 87790 - DNA, 25 bp, Artificial
  probe
  misc_feature (1)..(25): SEQ ID NO: 6563; WAN024BO9_at; Start 246; Stop 270
tagtgtctctattggccgtacatca

SEQ ID NO: 87791 - DNA, 25 bp, Artificial
  probe
  misc_feature (1)..(25): SEQ ID NO: 6563; WAN024BO9_at; Start 144; Stop 168
aattgcctatcgcaaatctgctgta

SEQ ID NO: 87792 - DNA, 25 bp, Artificial
  probe
  misc_feature (1)..(25): SEQ ID NO: 6563; WAN024BO9_at; Start 259; Stop 283
ggccgtacatcaatctcttatagca

SEQ ID NO: 87793 - DNA, 25 bp, Artificial
  probe
  misc_feature (1)..(25): SEQ ID NO: 6563; WAN024BO9_at; Start 14; Stop 38
cacaagaggagttcgatgagttaga

SEQ ID NO: 87794 - DNA, 25 bp, Artificial
  probe
  misc_feature (1)..(25): SEQ ID NO: 6563; WAN024BO9_at; Start 208; Stop 232
tctggtattatgtcagccgatgaca

SEQ ID NO: 87795 - DNA, 25 bp, Artificial
  probe
  misc_feature (1)..(25): SEQ ID NO: 7700; WAN024BOA_at; Start 226; Stop 250
tggatgggtgcaaaagtaaacgatg

SEQ ID NO: 87796 - DNA, 25 bp, Artificial
  probe
  misc_feature (1)..(25): SEQ ID NO: 7700; WAN024BOA_at; Start 15; Stop 39
cctaaccataaaaaaagtagctgat

SEQ ID NO: 87797 - DNA, 25 bp, Artificial
  probe
  misc_feature (1)..(25): SEQ ID NO: 7700; WAN024BOA_at; Start 303; Stop 327
gatattcagtcaagaaattgaggtg

SEQ ID NO: 87798 - DNA, 25 bp, Artificial
  probe
  misc_feature (1)..(25): SEQ ID NO: 7700; WAN024BOA_at; Start 30; Stop 54
agtagctgataaaaacgattatggg

SEQ ID NO: 87799 - DNA, 25 bp, Artificial
  probe
  misc_feature (1)..(25): SEQ ID NO: 7700; WAN024BOA_at; Start 222; Stop 246
cagttggatgggtgcaaaagtaaac

SEQ ID NO: 87800 - DNA, 25 bp, Artificial
  probe
  misc_feature (1)..(25): SEQ ID NO: 7700; WAN024BOA_at; Start 190; Stop 214
tatccctcgctatcttttgtgacag

SEQ ID NO: 87801 - DNA, 25 bp, Artificial
  probe
  misc_feature (1)..(25): SEQ ID NO: 7700; WAN024BOA_at; Start 89; Stop 113
atgtacgttttgatagatcagtggg

SEQ ID NO: 87802 - DNA, 25 bp, Artificial
  probe
  misc_feature (1)..(25): SEQ ID NO: 7700; WAN024BOA_at; Start 152; Stop 176
attcaaaatcaaggcaaaaacaagg

SEQ ID NO: 87803 - DNA, 25 bp, Artificial
  probe
  misc_feature (1)..(25): SEQ ID NO: 7700; WAN024BOA_at; Start 306; Stop 330
attcagtcaagaaattgaggtgatc

SEQ ID NO: 87804 - DNA, 25 bp, Artificial
  probe
  misc_feature (1)..(25): SEQ ID NO: 7700; WAN024BOA_at; Start 212; Stop 236
cagttgataacagttggatgggtgc

SEQ ID NO: 87805 - DNA, 25 bp, Artificial
  probe
  misc_feature (1)..(25): SEQ ID NO: 7700; WAN024BOA_at; Start 2; Stop 26
tgttaaaggatgtcctaaccataaa

SEQ ID NO: 87806 - DNA, 25 bp, Artificial
  probe
  misc_feature (1)..(25): SEQ ID NO: 7700; WAN024BOA_at; Start 242; Stop 266
taaacgatgggataggagattacac

SEQ ID NO: 87807 - DNA, 25 bp, Artificial
  probe
  misc_feature (1)..(25): SEQ ID NO: 7700; WAN024BOA_at; Start 280; Stop 304
caaactaactattatgatggtgaga

SEQ ID NO: 87808 - DNA, 25 bp, Artificial
  probe
  misc_feature (1)..(25): SEQ ID NO: 7700; WAN024BOA_at; Start 252; Stop 276
gataggagattacacaattaatgga

SEQ ID NO: 87809 - DNA, 25 bp, Artificial
  probe
  misc_feature (1)..(25): SEQ ID NO: 7700; WAN024BOA_at; Start 246; Stop 270
cgatgggataggagattacacaatt

SEQ ID NO: 87810 - DNA, 25 bp, Artificial
  probe
  misc_feature (1)..(25): SEQ ID NO: 7700; WAN024BOA_at; Start 68; Stop 92
cagaaccgttgactattaaaaatgt

SEQ ID NO: 87811 - DNA, 25 bp, Artificial
  probe
  misc_feature (1)..(25): SEQ ID NO: 7700; WAN024BOA_at; Start 236; Stop 260
caaaagtaaacgatgggataggaga

SEQ ID NO: 87812 - DNA, 25 bp, Artificial
  probe
  misc_feature (1)..(25): SEQ ID NO: 7700; WAN024BOA_at; Start 264; Stop 288
cacaattaatggatttcaaactaac

SEQ ID NO: 87813 - DNA, 25 bp, Artificial
  probe
  misc_feature (1)..(25): SEQ ID NO: 7700; WAN024BOA_at; Start 126; Stop 150
tcgtaattcaaaaactggtacagga

SEQ ID NO: 87814 - DNA, 25 bp, Artificial
  probe
  misc_feature (1)..(25): SEQ ID NO: 7700; WAN024BOA_at; Start 200; Stop 224
tatcttttgtgacagttgataacag

SEQ ID NO: 87815 - DNA, 25 bp, Artificial
  probe
  misc_feature (1)..(25): SEQ ID NO: 7700; WAN024BOA_at; Start 119; Stop 143
ctggtaatcgtaattcaaaaactgg

SEQ ID NO: 87816 - DNA, 25 bp, Artificial
  probe
  misc_feature (1)..(25): SEQ ID NO: 7700; WAN024BOA_at; Start 138; Stop 162
aactggtacaggaaattcaaaatca

SEQ ID NO: 87817 - DNA, 25 bp, Artificial
  probe
  misc_feature (1)..(25): SEQ ID NO: 7700; WAN024BOA_at; Start 53; Stop 77
gggatgaagtatattcagaaccgtt

SEQ ID NO: 87818 - DNA, 25 bp, Artificial
  probe
  misc_feature (1)..(25): SEQ ID NO: 7700; WAN024BOA_at; Start 58; Stop 82
gaagtatattcagaaccgttgacta

SEQ ID NO: 87819 - DNA, 25 bp, Artificial
  probe
  misc_feature (1)..(25): SEQ ID NO: 7700; WAN024BOA_at; Start 194; Stop 218
cctcgctatcttttgtgacagttga

SEQ ID NO: 87820 - DNA, 25 bp, Artificial
  probe
  misc_feature (1)..(25): SEQ ID NO: 7700; WAN024BOA_at; Start 133; Stop 157
tcaaaaactggtacaggaaattcaa

SEQ ID NO: 87821 - DNA, 25 bp, Artificial
  probe
  misc_feature (1)..(25): SEQ ID NO: 7700; WAN024BOA_at; Start 85; Stop 109
aaaaatgtacgttttgatagatcag

SEQ ID NO: 87822 - DNA, 25 bp, Artificial
  probe
  misc_feature (1)..(25): SEQ ID NO: 7700; WAN024BOA_at; Start 177; Stop 201
ggttatatacctctatccctcgcta

SEQ ID NO: 87823 - DNA, 25 bp, Artificial
  probe
  misc_feature (1)..(25): SEQ ID NO: 7700; WAN024BOA_at; Start 217; Stop 241
gataacagttggatgggtgcaaaag

SEQ ID NO: 87824 - DNA, 25 bp, Artificial
  probe
  misc_feature (1)..(25): SEQ ID NO: 7700; WAN024BOA_at; Start 230; Stop 254
tgggtgcaaaagtaaacgatgggat

SEQ ID NO: 87825 - DNA, 25 bp, Artificial
  probe
  misc_feature (1)..(25): SEQ ID NO: 7700; WAN024BOA_at; Start 207; Stop 231
tgtgacagttgataacagttggatg

SEQ ID NO: 87826 - DNA, 25 bp, Artificial
  probe
  misc_feature (1)..(25): SEQ ID NO: 7700; WAN024BOA_at; Start 114; Stop 138
gggatctggtaatcgtaattcaaaa

SEQ ID NO: 87827 - DNA, 25 bp, Artificial
  probe
  misc_feature (1)..(25): SEQ ID NO: 7700; WAN024BOA_at; Start 295; Stop 319
gatggtgagatattcagtcaagaaa

SEQ ID NO: 87828 - DNA, 25 bp, Artificial
  probe
  misc_feature (1)..(25): SEQ ID NO: 7700; WAN024BOA_at; Start 289; Stop 313
tattatgatggtgagatattcagtc

SEQ ID NO: 87829 - DNA, 25 bp, Artificial
  probe
  misc_feature (1)..(25): SEQ ID NO: 6494; WAN024BOB_at; Start 274; Stop 298
tgggatcaagttgctactagtaaac

SEQ ID NO: 87830 - DNA, 25 bp, Artificial
  probe
  misc_feature (1)..(25): SEQ ID NO: 6494; WAN024BOB_at; Start 169; Stop 193
ggtgatgctgttgtctatggaacag

SEQ ID NO: 87831 - DNA, 25 bp, Artificial
  probe
  misc_feature (1)..(25): SEQ ID NO: 6494; WAN024BOB_at; Start 42; Stop 66
gaaactttcgaacgaatccatgaca

SEQ ID NO: 87832 - DNA, 25 bp, Artificial
  probe
  misc_feature (1)..(25): SEQ ID NO: 6494; WAN024BOB_at; Start 252; Stop 276
cactccaggtacaggaaaacgatgg

SEQ ID NO: 87833 - DNA, 25 bp, Artificial
  probe
  misc_feature (1)..(25): SEQ ID NO: 6494; WAN024BOB_at; Start 206; Stop 230
cgcaattttacggatcaaacggcat

SEQ ID NO: 87834 - DNA, 25 bp, Artificial
  probe
  misc_feature (1)..(25): SEQ ID NO: 6494; WAN024BOB_at; Start 153; Stop 177
ccgaattgttggacaaggtgatgct

SEQ ID NO: 87835 - DNA, 25 bp, Artificial
  probe
  misc_feature (1)..(25): SEQ ID NO: 6494; WAN024BOB_at; Start 266; Stop 290
gaaaacgatgggatcaagttgctac

SEQ ID NO: 87836 - DNA, 25 bp, Artificial
  probe
  misc_feature (1)..(25): SEQ ID NO: 6494; WAN024BOB_at; Start 136; Stop 160
gagttgagagcttctggccgaattg

SEQ ID NO: 87837 - DNA, 25 bp, Artificial
  probe
  misc_feature (1)..(25): SEQ ID NO: 6494; WAN024BOB_at; Start 213; Stop 237
ttacggatcaaacggcattgtcacc

SEQ ID NO: 87838 - DNA, 25 bp, Artificial
  probe
  misc_feature (1)..(25): SEQ ID NO: 6494; WAN024BOB_at; Start 27; Stop 51
gcagaaagctaaacagaaactttcg

SEQ ID NO: 87839 - DNA, 25 bp, Artificial
  probe
  misc_feature (1)..(25): SEQ ID NO: 6494; WAN024BOB_at; Start 3; Stop 27
gaatatcgccattaaagttgacttg

SEQ ID NO: 87840 - DNA, 25 bp, Artificial
  probe
  misc_feature (1)..(25): SEQ ID NO: 6494; WAN024BOB_at; Start 307; Stop 331
gaatgggctagagcttttgtgaaag

SEQ ID NO: 87841 - DNA, 25 bp, Artificial
  probe
  misc_feature (1)..(25): SEQ ID NO: 6494; WAN024BOB_at; Start 198; Stop 222
tgctagagcgcaattttacggatca

SEQ ID NO: 87842 - DNA, 25 bp, Artificial
  probe
  misc_feature (1)..(25): SEQ ID NO: 6494; WAN024BOB_at; Start 143; Stop 167
gagcttctggccgaattgttggaca

SEQ ID NO: 87843 - DNA, 25 bp, Artificial
  probe
  misc_feature (1)..(25): SEQ ID NO: 6494; WAN024BOB_at; Start 221; Stop 245
caaacggcattgtcacctttaggag

SEQ ID NO: 87844 - DNA, 25 bp, Artificial
  probe
  misc_feature (1)..(25): SEQ ID NO: 6494; WAN024BOB_at; Start 77; Stop 101
ttgcagtcgctagcaaaatcttgct

SEQ ID NO: 87845 - DNA, 25 bp, Artificial
  probe
  misc_feature (1)..(25): SEQ ID NO: 6494; WAN024BOB_at; Start 106; Stop 130
aatgagcaatatatccccttgaggg

SEQ ID NO: 87846 - DNA, 25 bp, Artificial
  probe
  misc_feature (1)..(25): SEQ ID NO: 6494; WAN024BOB_at; Start 99; Stop 123
gctagacaatgagcaatatatcccc

SEQ ID NO: 87847 - DNA, 25 bp, Artificial
  probe
  misc_feature (1)..(25): SEQ ID NO: 6494; WAN024BOB_at; Start 184; Stop 208
tatggaacagtttatgctagagcgc

SEQ ID NO: 87848 - DNA, 25 bp, Artificial
  probe
  misc_feature (1)..(25): SEQ ID NO: 6494; WAN024BOB_at; Start 70; Stop 94
ggaaagattgcagtcgctagcaaaa

SEQ ID NO: 87849 - DNA, 25 bp, Artificial
  probe
  misc_feature (1)..(25): SEQ ID NO: 6494; WAN024BOB_at; Start 22; Stop 46
gacttgcagaaagctaaacagaaac

SEQ ID NO: 87850 - DNA, 25 bp, Artificial
  probe
  misc_feature (1)..(25): SEQ ID NO: 6494; WAN024BOB_at; Start 47; Stop 71
tttcgaacgaatccatgacaagagg

SEQ ID NO: 87851 - DNA, 25 bp, Artificial
  probe
  misc_feature (1)..(25): SEQ ID NO: 6494; WAN024BOB_at; Start 89; Stop 113
gcaaaatcttgctagacaatgagca

SEQ ID NO: 87852 - DNA, 25 bp, Artificial
  probe
  misc_feature (1)..(25): SEQ ID NO: 6494; WAN024BOB_at; Start 243; Stop 267
gagatataccactccaggtacagga

SEQ ID NO: 87853 - DNA, 25 bp, Artificial
  probe
  misc_feature (1)..(25): SEQ ID NO: 6494; WAN024BOB_at; Start 298; Stop 322
catgctgaagaatgggctagagctt

SEQ ID NO: 87854 - DNA, 25 bp, Artificial
  probe
  misc_feature (1)..(25): SEQ ID NO: 6494; WAN024BOB_at; Start 317; Stop 341
gagcttttgtgaaaggaatgggact

SEQ ID NO: 87855 - DNA, 25 bp, Artificial
  probe
  misc_feature (1)..(25): SEQ ID NO: 6494; WAN024BOB_at; Start 11; Stop 35
ccattaaagttgacttgcagaaagc

SEQ ID NO: 87856 - DNA, 25 bp, Artificial
  probe
  misc_feature (1)..(25): SEQ ID NO: 6494; WAN024BOB_at; Start 166; Stop 190
caaggtgatgctgttgtctatggaa

SEQ ID NO: 87857 - DNA, 25 bp, Artificial
  probe
  misc_feature (1)..(25): SEQ ID NO: 6494; WAN024BOB_at; Start 257; Stop 281
caggtacaggaaaacgatgggatca

SEQ ID NO: 87858 - DNA, 25 bp, Artificial
  probe
  misc_feature (1)..(25): SEQ ID NO: 6494; WAN024BOB_at; Start 232; Stop 256
gtcacctttaggagatataccactc

SEQ ID NO: 87859 - DNA, 25 bp, Artificial
  probe
  misc_feature (1)..(25): SEQ ID NO: 6494; WAN024BOB_at; Start 187; Stop 211
ggaacagtttatgctagagcgcaat

SEQ ID NO: 87860 - DNA, 25 bp, Artificial
  probe
  misc_feature (1)..(25): SEQ ID NO: 6494; WAN024BOB_at; Start 283; Stop 307
gttgctactagtaaacatgctgaag

SEQ ID NO: 87861 - DNA, 25 bp, Artificial
  probe
  misc_feature (1)..(25): SEQ ID NO: 6494; WAN024BOB_at; Start 65; Stop 89
caagaggaaagattgcagtcgctag

SEQ ID NO: 87862 - DNA, 25 bp, Artificial
  probe
  misc_feature (1)..(25): SEQ ID NO: 6494; WAN024BOB_at; Start 58; Stop 82
tccatgacaagaggaaagattgcag

SEQ ID NO: 87863 - DNA, 25 bp, Artificial
  probe
  misc_feature (1)..(25): SEQ ID NO: 7504; WAN024BOC_at; Start 157; Stop 181
ggcacacaagaagtttctttgccgt

SEQ ID NO: 87864 - DNA, 25 bp, Artificial
  probe
  misc_feature (1)..(25): SEQ ID NO: 7504; WAN024BOC_at; Start 39; Stop 63
gcatatcaagactttaaatttacca

SEQ ID NO: 87865 - DNA, 25 bp, Artificial
  probe
  misc_feature (1)..(25): SEQ ID NO: 7504; WAN024BOC_at; Start 378; Stop 402
ggcgaaaatcgtaatagagaggaac

SEQ ID NO: 87866 - DNA, 25 bp, Artificial
  probe
  misc_feature (1)..(25): SEQ ID NO: 7504; WAN024BOC_at; Start 114; Stop 138
caatcagataccaggcgggaaagtg

SEQ ID NO: 87867 - DNA, 25 bp, Artificial
  probe
  misc_feature (1)..(25): SEQ ID NO: 7504; WAN024BOC_at; Start 150; Stop 174
tatggatggcacacaagaagtttct

SEQ ID NO: 87868 - DNA, 25 bp, Artificial
  probe
  misc_feature (1)..(25): SEQ ID NO: 7504; WAN024BOC_at; Start 73; Stop 97
cgctttgattactttgaggatgaca

SEQ ID NO: 87869 - DNA, 25 bp, Artificial
  probe
  misc_feature (1)..(25): SEQ ID NO: 7504; WAN024BOC_at; Start 67; Stop 91
gaaccacgctttgattactttgagg

SEQ ID NO: 87870 - DNA, 25 bp, Artificial
  probe
  misc_feature (1)..(25): SEQ ID NO: 7504; WAN024BOC_at; Start 365; Stop 389
caattgaaattgtggcgaaaatcgt

SEQ ID NO: 87871 - DNA, 25 bp, Artificial
  probe
  misc_feature (1)..(25): SEQ ID NO: 7504; WAN024BOC_at; Start 327; Stop 351
catgaaaggcaaggatgagcaaggc

SEQ ID NO: 87872 - DNA, 25 bp, Artificial
  probe
  misc_feature (1)..(25): SEQ ID NO: 7504; WAN024BOC_at; Start 223; Stop 247
gacactatttggttagtcacctcag

SEQ ID NO: 87873 - DNA, 25 bp, Artificial
  probe
  misc_feature (1)..(25): SEQ ID NO: 7504; WAN024BOC_at; Start 272; Stop 296
taccaagtgacaataattcttatga

SEQ ID NO: 87874 - DNA, 25 bp, Artificial
  probe
  misc_feature (1)..(25): SEQ ID NO: 7504; WAN024BOC_at; Start 204; Stop 228
aaagaactcagtagccaatgacact

SEQ ID NO: 87875 - DNA, 25 bp, Artificial
  probe
  misc_feature (1)..(25): SEQ ID NO: 7504; WAN024BOC_at; Start 211; Stop 235
tcagtagccaatgacactatttggt

SEQ ID NO: 87876 - DNA, 25 bp, Artificial
  probe
  misc_feature (1)..(25): SEQ ID NO: 7504; WAN024BOC_at; Start 233; Stop 257
ggttagtcacctcagaactagcaaa

SEQ ID NO: 87877 - DNA, 25 bp, Artificial
  probe
  misc_feature (1)..(25): SEQ ID NO: 7504; WAN024BOC_at; Start 317; Stop 341
gcaggcctgccatgaaaggcaagga

SEQ ID NO: 87878 - DNA, 25 bp, Artificial
  probe
  misc_feature (1)..(25): SEQ ID NO: 7504; WAN024BOC_at; Start 343; Stop 367
gagcaaggctattattattacacaa

SEQ ID NO: 87879 - DNA, 25 bp, Artificial
  probe
  misc_feature (1)..(25): SEQ ID NO: 7504; WAN024BOC_at; Start 55; Stop 79
aatttaccagttgaaccacgctttg

SEQ ID NO: 87880 - DNA, 25 bp, Artificial
  probe
  misc_feature (1)..(25): SEQ ID NO: 7504; WAN024BOC_at; Start 194; Stop 218
taaaggcaaaaaagaactcagtagc

SEQ ID NO: 87881 - DNA, 25 bp, Artificial
  probe
  misc_feature (1)..(25): SEQ ID NO: 7504; WAN024BOC_at; Start 172; Stop 196
tctttgccgtttgaaatcgccgtaa

SEQ ID NO: 87882 - DNA, 25 bp, Artificial
  probe
  misc_feature (1)..(25): SEQ ID NO: 7504; WAN024BOC_at; Start 330; Stop 354
gaaaggcaaggatgagcaaggctat

SEQ ID NO: 87883 - DNA, 25 bp, Artificial
  probe
  misc_feature (1)..(25): SEQ ID NO: 7504; WAN024BOC_at; Start 139; Stop 163
gatagagagtatatggatggcacac

SEQ ID NO: 87884 - DNA, 25 bp, Artificial
  probe
  misc_feature (1)..(25): SEQ ID NO: 7504; WAN024BOC_at; Start 177; Stop 201
gccgtttgaaatcgccgtaaaggca

SEQ ID NO: 87885 - DNA, 25 bp, Artificial
  probe
  misc_feature (1)..(25): SEQ ID NO: 7504; WAN024BOC_at; Start 298; Stop 322
tatatgggaatggaagtcagcaggc

SEQ ID NO: 87886 - DNA, 25 bp, Artificial
  probe
  misc_feature (1)..(25): SEQ ID NO: 7504; WAN024BOC_at; Start 291; Stop 315
ttatgaatatatgggaatggaagtc

SEQ ID NO: 87887 - DNA, 25 bp, Artificial
  probe
  misc_feature (1)..(25): SEQ ID NO: 7504; WAN024BOC_at; Start 108; Stop 132
ggttatcaatcagataccaggcggg

SEQ ID NO: 87888 - DNA, 25 bp, Artificial
  probe
  misc_feature (1)..(25): SEQ ID NO: 7504; WAN024BOC_at; Start 7; Stop 31
cgagagaatgactttcaaaatgtac

SEQ ID NO: 87889 - DNA, 25 bp, Artificial
  probe
  misc_feature (1)..(25): SEQ ID NO: 7504; WAN024BOC_at; Start 87; Stop 111
tgaggatgacaaagatgatctggtt

SEQ ID NO: 87890 - DNA, 25 bp, Artificial
  probe
  misc_feature (1)..(25): SEQ ID NO: 7504; WAN024BOC_at; Start 2; Stop 26
tgatgcgagagaatgactttcaaaa

SEQ ID NO: 87891 - DNA, 25 bp, Artificial
  probe
  misc_feature (1)..(25): SEQ ID NO: 7504; WAN024BOC_at; Start 244; Stop 268
tcagaactagcaaagatagacttag

SEQ ID NO: 87892 - DNA, 25 bp, Artificial
  probe
  misc_feature (1)..(25): SEQ ID NO: 7504; WAN024BOC_at; Start 305; Stop 329
gaatggaagtcagcaggcctgccat

SEQ ID NO: 87893 - DNA, 25 bp, Artificial
  probe
  misc_feature (1)..(25): SEQ ID NO: 7504; WAN024BOC_at; Start 260; Stop 284
tagacttagttttaccaagtgacaa

SEQ ID NO: 87894 - DNA, 25 bp, Artificial
  probe
  misc_feature (1)..(25): SEQ ID NO: 7504; WAN024BOC_at; Start 96; Stop 120
caaagatgatctggttatcaatcag

SEQ ID NO: 87895 - DNA, 25 bp, Artificial
  probe
  misc_feature (1)..(25): SEQ ID NO: 7504; WAN024BOC_at; Start 311; Stop 335
aagtcagcaggcctgccatgaaagg

SEQ ID NO: 87896 - DNA, 25 bp, Artificial
  probe
  misc_feature (1)..(25): SEQ ID NO: 7504; WAN024BOC_at; Start 384; Stop 408
aatcgtaatagagaggaacaaacaa

SEQ ID NO: 87897 - DNA, 25 bp, Artificial
  probe
  misc_feature (1)..(25): SEQ ID NO: 7261; WAN024BOD_at; Start 28; Stop 52
gacatattttttacctgctatttct

SEQ ID NO: 87898 - DNA, 25 bp, Artificial
  probe
  misc_feature (1)..(25): SEQ ID NO: 7261; WAN024BOD_at; Start 77; Stop 101
tgttcttgattggagtgacttttcc

SEQ ID NO: 87899 - DNA, 25 bp, Artificial
  probe
  misc_feature (1)..(25): SEQ ID NO: 7261; WAN024BOD_at; Start 81; Stop 105
cttgattggagtgacttttcccttg

SEQ ID NO: 87900 - DNA, 25 bp, Artificial
  probe
  misc_feature (1)..(25): SEQ ID NO: 7261; WAN024BOD_at; Start 72; Stop 96
cttgttgttcttgattggagtgact

SEQ ID NO: 87901 - DNA, 25 bp, Artificial
  probe
  misc_feature (1)..(25): SEQ ID NO: 7261; WAN024BOD_at; Start 26; Stop 50
tagacatattttttacctgctattt

SEQ ID NO: 87902 - DNA, 25 bp, Artificial
  probe
  misc_feature (1)..(25): SEQ ID NO: 7261; WAN024BOD_at; Start 3; Stop 27
gattaaggcatcatttaatttcata

SEQ ID NO: 87903 - DNA, 25 bp, Artificial
  probe
  misc_feature (1)..(25): SEQ ID NO: 7261; WAN024BOD_at; Start 9; Stop 33
ggcatcatttaatttcatagacata

SEQ ID NO: 87904 - DNA, 25 bp, Artificial
  probe
  misc_feature (1)..(25): SEQ ID NO: 7261; WAN024BOD_at; Start 76; Stop 100
ttgttcttgattggagtgacttttc

SEQ ID NO: 87905 - DNA, 25 bp, Artificial
  probe
  misc_feature (1)..(25): SEQ ID NO: 7261; WAN024BOD_at; Start 79; Stop 103
ttcttgattggagtgacttttccct

SEQ ID NO: 87906 - DNA, 25 bp, Artificial
  probe
  misc_feature (1)..(25): SEQ ID NO: 7261; WAN024BOD_at; Start 73; Stop 97
ttgttgttcttgattggagtgactt

SEQ ID NO: 87907 - DNA, 25 bp, Artificial
  probe
  misc_feature (1)..(25): SEQ ID NO: 7261; WAN024BOD_at; Start 11; Stop 35
catcatttaatttcatagacatatt

SEQ ID NO: 87908 - DNA, 25 bp, Artificial
  probe
  misc_feature (1)..(25): SEQ ID NO: 7261; WAN024BOD_at; Start 24; Stop 48
catagacatattttttacctgctat

SEQ ID NO: 87909 - DNA, 25 bp, Artificial
  probe
  misc_feature (1)..(25): SEQ ID NO: 7261; WAN024BOD_at; Start 67; Stop 91
tgtttcttgttgttcttgattggag

SEQ ID NO: 87910 - DNA, 25 bp, Artificial
  probe
  misc_feature (1)..(25): SEQ ID NO: 7261; WAN024BOD_at; Start 8; Stop 32
aggcatcatttaatttcatagacat

SEQ ID NO: 87911 - DNA, 25 bp, Artificial
  probe
  misc_feature (1)..(25): SEQ ID NO: 7261; WAN024BOD_at; Start 80; Stop 104
tcttgattggagtgacttttccctt

SEQ ID NO: 87912 - DNA, 25 bp, Artificial
  probe
  misc_feature (1)..(25): SEQ ID NO: 7261; WAN024BOD_at; Start 82; Stop 106
ttgattggagtgacttttcccttgt

SEQ ID NO: 87913 - DNA, 25 bp, Artificial
  probe
  misc_feature (1)..(25): SEQ ID NO: 7261; WAN024BOD_at; Start 23; Stop 47
tcatagacatattttttacctgcta

SEQ ID NO: 87914 - DNA, 25 bp, Artificial
  probe
  misc_feature (1)..(25): SEQ ID NO: 7261; WAN024BOD_at; Start 71; Stop 95
tcttgttgttcttgattggagtgac

SEQ ID NO: 87915 - DNA, 25 bp, Artificial
  probe
  misc_feature (1)..(25): SEQ ID NO: 7261; WAN024BOD_at; Start 78; Stop 102
gttcttgattggagtgacttttccc

SEQ ID NO: 87916 - DNA, 25 bp, Artificial
  probe
  misc_feature (1)..(25): SEQ ID NO: 7261; WAN024BOD_at; Start 18; Stop 42
taatttcatagacatattttttacc

SEQ ID NO: 87917 - DNA, 25 bp, Artificial
  probe
  misc_feature (1)..(25): SEQ ID NO: 7261; WAN024BOD_at; Start 70; Stop 94
ttcttgttgttcttgattggagtga

SEQ ID NO: 87918 - DNA, 25 bp, Artificial
  probe
  misc_feature (1)..(25): SEQ ID NO: 7261; WAN024BOD_at; Start 20; Stop 44
atttcatagacatattttttacctg

SEQ ID NO: 87919 - DNA, 25 bp, Artificial
  probe
  misc_feature (1)..(25): SEQ ID NO: 7261; WAN024BOD_at; Start 7; Stop 31
aaggcatcatttaatttcatagaca

SEQ ID NO: 87920 - DNA, 25 bp, Artificial
  probe
  misc_feature (1)..(25): SEQ ID NO: 7261; WAN024BOD_at; Start 75; Stop 99
gttgttcttgattggagtgactttt

SEQ ID NO: 87921 - DNA, 25 bp, Artificial
  probe
  misc_feature (1)..(25): SEQ ID NO: 7261; WAN024BOD_at; Start 74; Stop 98
tgttgttcttgattggagtgacttt

SEQ ID NO: 87922 - DNA, 25 bp, Artificial
  probe
  misc_feature (1)..(25): SEQ ID NO: 7261; WAN024BOD_at; Start 69; Stop 93
tttcttgttgttcttgattggagtg

SEQ ID NO: 87923 - DNA, 25 bp, Artificial
  probe
  misc_feature (1)..(25): SEQ ID NO: 7261; WAN024BOD_at; Start 27; Stop 51
agacatattttttacctgctatttc

SEQ ID NO: 87924 - DNA, 25 bp, Artificial
  probe
  misc_feature (1)..(25): SEQ ID NO: 7261; WAN024BOD_at; Start 22; Stop 46
ttcatagacatattttttacctgct

SEQ ID NO: 87925 - DNA, 25 bp, Artificial
  probe
  misc_feature (1)..(25): SEQ ID NO: 7261; WAN024BOD_at; Start 68; Stop 92
gtttcttgttgttcttgattggagt

SEQ ID NO: 87926 - DNA, 25 bp, Artificial
  probe
  misc_feature (1)..(25): SEQ ID NO: 7261; WAN024BOD_at; Start 10; Stop 34
gcatcatttaatttcatagacatat

SEQ ID NO: 87927 - DNA, 25 bp, Artificial
  probe
  misc_feature (1)..(25): SEQ ID NO: 7261; WAN024BOD_at; Start 30; Stop 54
catattttttacctgctatttcttt

SEQ ID NO: 87928 - DNA, 25 bp, Artificial
  probe
  misc_feature (1)..(25): SEQ ID NO: 7261; WAN024BOD_at; Start 6; Stop 30
taaggcatcatttaatttcatagac

SEQ ID NO: 87929 - DNA, 25 bp, Artificial
  probe
  misc_feature (1)..(25): SEQ ID NO: 7261; WAN024BOD_at; Start 83; Stop 107
tgattggagtgacttttcccttgtt

SEQ ID NO: 87930 - DNA, 25 bp, Artificial
  probe
  misc_feature (1)..(25): SEQ ID NO: 7261; WAN024BOD_at; Start 1; Stop 25
gtgattaaggcatcatttaatttca

SEQ ID NO: 87931 - DNA, 25 bp, Artificial
  probe
  misc_feature (1)..(25): SEQ ID NO: 6411; WAN024BOE_at; Start 42; Stop 66
tgataaagagtacgacatagacctg

SEQ ID NO: 87932 - DNA, 25 bp, Artificial
  probe
  misc_feature (1)..(25): SEQ ID NO: 6411; WAN024BOE_at; Start 99; Stop 123
cctaaaagaggatgaaatgacgcgt

SEQ ID NO: 87933 - DNA, 25 bp, Artificial
  probe
  misc_feature (1)..(25): SEQ ID NO: 6411; WAN024BOE_at; Start 33; Stop 57
ttctattgctgataaagagtacgac

SEQ ID NO: 87934 - DNA, 25 bp, Artificial
  probe
  misc_feature (1)..(25): SEQ ID NO: 6411; WAN024BOE_at; Start 250; Stop 274
tatgatttgctaggcaatcccatgc

SEQ ID NO: 87935 - DNA, 25 bp, Artificial
  probe
  misc_feature (1)..(25): SEQ ID NO: 6411; WAN024BOE_at; Start 501; Stop 525
gaataaaatgcgtaaattacaagct

SEQ ID NO: 87936 - DNA, 25 bp, Artificial
  probe
  misc_feature (1)..(25): SEQ ID NO: 6411; WAN024BOE_at; Start 313; Stop 337
gattttgaacaagatgcagagtaca

SEQ ID NO: 87937 - DNA, 25 bp, Artificial
  probe
  misc_feature (1)..(25): SEQ ID NO: 6411; WAN024BOE_at; Start 13; Stop 37
gatgccttaatcacaaatttttcta

SEQ ID NO: 87938 - DNA, 25 bp, Artificial
  probe
  misc_feature (1)..(25): SEQ ID NO: 6411; WAN024BOE_at; Start 85; Stop 109
gatgtctttgaaatcctaaaagagg

SEQ ID NO: 87939 - DNA, 25 bp, Artificial
  probe
  misc_feature (1)..(25): SEQ ID NO: 6411; WAN024BOE_at; Start 345; Stop 369
tagttttttacaagcctacggcatc

SEQ ID NO: 87940 - DNA, 25 bp, Artificial
  probe
  misc_feature (1)..(25): SEQ ID NO: 6411; WAN024BOE_at; Start 224; Stop 248
tagggatcgaaaaagaaactgttca

SEQ ID NO: 87941 - DNA, 25 bp, Artificial
  probe
  misc_feature (1)..(25): SEQ ID NO: 6411; WAN024BOE_at; Start 322; Stop 346
caagatgcagagtacatttatgcta

SEQ ID NO: 87942 - DNA, 25 bp, Artificial
  probe
  misc_feature (1)..(25): SEQ ID NO: 6411; WAN024BOE_at; Start 209; Stop 233
taaaagaacactttctagggatcga

SEQ ID NO: 87943 - DNA, 25 bp, Artificial
  probe
  misc_feature (1)..(25): SEQ ID NO: 6411; WAN024BOE_at; Start 413; Stop 437
aagcacttttgaacgctttgccaga

SEQ ID NO: 87944 - DNA, 25 bp, Artificial
  probe
  misc_feature (1)..(25): SEQ ID NO: 6411; WAN024BOE_at; Start 111; Stop 135
tgaaatgacgcgtctagaacaagct

SEQ ID NO: 87945 - DNA, 25 bp, Artificial
  probe
  misc_feature (1)..(25): SEQ ID NO: 6411; WAN024BOE_at; Start 240; Stop 264
aactgttcagtatgatttgctaggc

SEQ ID NO: 87946 - DNA, 25 bp, Artificial
  probe
  misc_feature (1)..(25): SEQ ID NO: 6411; WAN024BOE_at; Start 275; Stop 299
caaaggcaaaaggtgaagaagaaca

SEQ ID NO: 87947 - DNA, 25 bp, Artificial
  probe
  misc_feature (1)..(25): SEQ ID NO: 6411; WAN024BOE_at; Start 461; Stop 485
tagaaatccgagcatggaaaccaga

SEQ ID NO: 87948 - DNA, 25 bp, Artificial
  probe
  misc_feature (1)..(25): SEQ ID NO: 6411; WAN024BOE_at; Start 446; Stop 470
tcatgcaacagattatagaaatccg

SEQ ID NO: 87949 - DNA, 25 bp, Artificial
  probe
  misc_feature (1)..(25): SEQ ID NO: 6411; WAN024BOE_at; Start 471; Stop 495
agcatggaaaccagaatatggtggg

SEQ ID NO: 87950 - DNA, 25 bp, Artificial
  probe
  misc_feature (1)..(25): SEQ ID NO: 6411; WAN024BOE_at; Start 420; Stop 444
tttgaacgctttgccagataacaca

SEQ ID NO: 87951 - DNA, 25 bp, Artificial
  probe
  misc_feature (1)..(25): SEQ ID NO: 6411; WAN024BOE_at; Start 193; Stop 217
gattgttggatttacataaaagaac

SEQ ID NO: 87952 - DNA, 25 bp, Artificial
  probe
  misc_feature (1)..(25): SEQ ID NO: 6411; WAN024BOE_at; Start 55; Stop 79
gacatagacctgtcttttaataaag

SEQ ID NO: 87953 - DNA, 25 bp, Artificial
  probe
  misc_feature (1)..(25): SEQ ID NO: 6411; WAN024BOE_at; Start 260; Stop 284
taggcaatcccatgccaaaggcaaa

SEQ ID NO: 87954 - DNA, 25 bp, Artificial
  probe
  misc_feature (1)..(25): SEQ ID NO: 6411; WAN024BOE_at; Start 358; Stop 382
gcctacggcatcaatcttttgaaag

SEQ ID NO: 87955 - DNA, 25 bp, Artificial
  probe
  misc_feature (1)..(25): SEQ ID NO: 6411; WAN024BOE_at; Start 119; Stop 143
cgcgtctagaacaagctcagttgat

SEQ ID NO: 87956 - DNA, 25 bp, Artificial
  probe
  misc_feature (1)..(25): SEQ ID NO: 6411; WAN024BOE_at; Start 432; Stop 456
gccagataacacaatcatgcaacag

SEQ ID NO: 87957 - DNA, 25 bp, Artificial
  probe
  misc_feature (1)..(25): SEQ ID NO: 6411; WAN024BOE_at; Start 166; Stop 190
gaattatacgacatcaaagaggttg

SEQ ID NO: 87958 - DNA, 25 bp, Artificial
  probe
  misc_feature (1)..(25): SEQ ID NO: 6411; WAN024BOE_at; Start 177; Stop 201
catcaaagaggttgtagattgttgg

SEQ ID NO: 87959 - DNA, 25 bp, Artificial
  probe
  misc_feature (1)..(25): SEQ ID NO: 6411; WAN024BOE_at; Start 382; Stop 406
gttcaaaatgagttgacatggacag

SEQ ID NO: 87960 - DNA, 25 bp, Artificial
  probe
  misc_feature (1)..(25): SEQ ID NO: 6411; WAN024BOE_at; Start 520; Stop 544
caagctaaatatagtttaggaaagg

SEQ ID NO: 87961 - DNA, 25 bp, Artificial
  probe
  misc_feature (1)..(25): SEQ ID NO: 6411; WAN024BOE_at; Start 153; Stop 177
gctaactggccaagaattatacgac

SEQ ID NO: 87962 - DNA, 25 bp, Artificial
  probe
  misc_feature (1)..(25): SEQ ID NO: 6411; WAN024BOE_at; Start 396; Stop 420
gacatggacagaatttaaagcactt

SEQ ID NO: 87963 - DNA, 25 bp, Artificial
  probe
  misc_feature (1)..(25): SEQ ID NO: 6411; WAN024BOE_at; Start 133; Stop 157
gctcagttgattgtccatttgctaa

SEQ ID NO: 87964 - DNA, 25 bp, Artificial
  probe
  misc_feature (1)..(25): SEQ ID NO: 6411; WAN024BOE_at; Start 141; Stop 165
gattgtccatttgctaactggccaa

SEQ ID NO: 87965 - DNA, 25 bp, Artificial
  probe
  misc_feature (1)..(25): SEQ ID NO: 6274; WAN024BOF-3_at; Start 1203; Stop 1227
gcgaccatcaagagcgcactagata

SEQ ID NO: 87966 - DNA, 25 bp, Artificial
  probe
  misc_feature (1)..(25): SEQ ID NO: 6274; WAN024BOF-3_at; Start 479; Stop 503
tgtcgatgaaatgattgccaacctc

SEQ ID NO: 87967 - DNA, 25 bp, Artificial
  probe
  misc_feature (1)..(25): SEQ ID NO: 6274; WAN024BOF-3_at; Start 35; Stop 59
caaagctcgtatctcagcgatggag

SEQ ID NO: 87968 - DNA, 25 bp, Artificial
  probe
  misc_feature (1)..(25): SEQ ID NO: 6274; WAN024BOF-3_at; Start 1463; Stop 1487
tatggacaagtctagcgaactactc

SEQ ID NO: 87969 - DNA, 25 bp, Artificial
  probe
  misc_feature (1)..(25): SEQ ID NO: 6274; WAN024BOF-3_at; Start 712; Stop 736
taactgctggtatggatacgggtgc

SEQ ID NO: 87970 - DNA, 25 bp, Artificial
  probe
  misc_feature (1)..(25): SEQ ID NO: 6274; WAN024BOF-3_at; Start 1479; Stop 1503
gaactactcgaaaaagccctggatg

SEQ ID NO: 87971 - DNA, 25 bp, Artificial
  probe
  misc_feature (1)..(25): SEQ ID NO: 6274; WAN024BOF-3_at; Start 1511; Stop 1535
gacggccgttagacgaccaaatgaa

SEQ ID NO: 87972 - DNA, 25 bp, Artificial
  probe
  misc_feature (1)..(25): SEQ ID NO: 6274; WAN024BOF-3_at; Start 1226; Stop 1250
tattcactcgccatctagagcaatg

SEQ ID NO: 87973 - DNA, 25 bp, Artificial
  probe
  misc_feature (1)..(25): SEQ ID NO: 6274; WAN024BOF-3_at; Start 278; Stop 302
aaaaacgtctcaagttcaacaggcg

SEQ ID NO: 87974 - DNA, 25 bp, Artificial
  probe
  misc_feature (1)..(25): SEQ ID NO: 6274; WAN024BOF-3_at; Start 787; Stop 811
gcttacaagaggaaattgcagctgc

SEQ ID NO: 87975 - DNA, 25 bp, Artificial
  probe
  misc_feature (1)..(25): SEQ ID NO: 6274; WAN024BOF-3_at; Start 293; Stop 317
tcaacaggcggcatctgaagcgatg

SEQ ID NO: 87976 - DNA, 25 bp, Artificial
  probe
  misc_feature (1)..(25): SEQ ID NO: 6274; WAN024BOF-3_at; Start 1590; Stop 1614
tatcaatcggaacaactaagacgag

SEQ ID NO: 87977 - DNA, 25 bp, Artificial
  probe
  misc_feature (1)..(25): SEQ ID NO: 6274; WAN024BOF-3_at; Start 542; Stop 566
cctcaatacattggccgaacgtggg

SEQ ID NO: 87978 - DNA, 25 bp, Artificial
  probe
  misc_feature (1)..(25): SEQ ID NO: 6274; WAN024BOF-3_at; Start 1187; Stop 1211
tgctgaaagggtaaaagcgaccatc

SEQ ID NO: 87979 - DNA, 25 bp, Artificial
  probe
  misc_feature (1)..(25): SEQ ID NO: 6274; WAN024BOF-3_at; Start 75; Stop 99
gagacatcccagaagaacctgcttg

SEQ ID NO: 87980 - DNA, 25 bp, Artificial
  probe
  misc_feature (1)..(25): SEQ ID NO: 6274; WAN024BOF-3_at; Start 1550; Stop 1574
tggtactttagtcgccagaacaggc

SEQ ID NO: 87981 - DNA, 25 bp, Artificial
  probe
  misc_feature (1)..(25): SEQ ID NO: 6274; WAN024BOF-3_at; Start 804; Stop 828
gcagctgctgacttccctgaaaaag

SEQ ID NO: 87982 - DNA, 25 bp, Artificial
  probe
  misc_feature (1)..(25): SEQ ID NO: 6274; WAN024BOF-3_at; Start 728; Stop 752
tacgggtgctttgggtatcacagac

SEQ ID NO: 87983 - DNA, 25 bp, Artificial
  probe
  misc_feature (1)..(25): SEQ ID NO: 6274; WAN024BOF-3_at; Start 1384; Stop 1408
gcttaaacaagaaactaggtgctca

SEQ ID NO: 87984 - DNA, 25 bp, Artificial
  probe
  misc_feature (1)..(25): SEQ ID NO: 6274; WAN024BOF-3_at; Start 370; Stop 394
tgtctaaagctcaacaaaaagcggt

SEQ ID NO: 87985 - DNA, 25 bp, Artificial
  probe
  misc_feature (1)..(25): SEQ ID NO: 6274; WAN024BOF-3_at; Start 208; Stop 232
gactgcaagaactcaacgacaagga

SEQ ID NO: 87986 - DNA, 25 bp, Artificial
  probe
  misc_feature (1)..(25): SEQ ID NO: 6274; WAN024BOF-3_at; Start 605; Stop 629
gcctcaaggtgggttgtacgttcaa

SEQ ID NO: 87987 - DNA, 25 bp, Artificial
  probe
  misc_feature (1)..(25): SEQ ID NO: 6274; WAN024BOF-3_at; Start 1070; Stop 1094
gaaaccatttgatagtctgcagagt

SEQ ID NO: 87988 - DNA, 25 bp, Artificial
  probe
  misc_feature (1)..(25): SEQ ID NO: 6274; WAN024BOF-3_at; Start 1361; Stop 1385
tactagaccagaaattgcacttggc

SEQ ID NO: 87989 - DNA, 25 bp, Artificial
  probe
  misc_feature (1)..(25): SEQ ID NO: 6274; WAN024BOF-3_at; Start 108; Stop 132
caaaagcgtgctgaaattggcgaac

SEQ ID NO: 87990 - DNA, 25 bp, Artificial
  probe
  misc_feature (1)..(25): SEQ ID NO: 6274; WAN024BOF-3_at; Start 1242; Stop 1266
agagcaatgcgtgatgaagtcggac

SEQ ID NO: 87991 - DNA, 25 bp, Artificial
  probe
  misc_feature (1)..(25): SEQ ID NO: 6274; WAN024BOF-3_at; Start 1258; Stop 1282
aagtcggacgtttcattcctcaagg

SEQ ID NO: 87992 - DNA, 25 bp, Artificial
  probe
  misc_feature (1)..(25): SEQ ID NO: 6274; WAN024BOF-3_at; Start 178; Stop 202
ccaatgttagcgatagtgtccgtaa

SEQ ID NO: 87993 - DNA, 25 bp, Artificial
  probe
  misc_feature (1)..(25): SEQ ID NO: 6274; WAN024BOF-3_at; Start 1496; Stop 1520
cctggatgtagctgagacggccgtt

SEQ ID NO: 87994 - DNA, 25 bp, Artificial
  probe
  misc_feature (1)..(25): SEQ ID NO: 6274; WAN024BOF-3_at; Start 627; Stop 651
caagaactcgttaatgcatcagacg

SEQ ID NO: 87995 - DNA, 25 bp, Artificial
  probe
  misc_feature (1)..(25): SEQ ID NO: 6274; WAN024BOF-3_at; Start 1133; Stop 1157
taatgcagggctttggagtggctct

SEQ ID NO: 87996 - DNA, 25 bp, Artificial
  probe
  misc_feature (1)..(25): SEQ ID NO: 6274; WAN024BOF-3_at; Start 310; Stop 334
aagcgatggctgctgctgccgaaaa

SEQ ID NO: 87997 - DNA, 25 bp, Artificial
  probe
  misc_feature (1)..(25): SEQ ID NO: 6274; WAN024BOF-3_at; Start 667; Stop 691
tgaacgaagtctttactcaaggtgg

SEQ ID NO: 87998 - DNA, 25 bp, Artificial
  probe
  misc_feature (1)..(25): SEQ ID NO: 6274; WAN024BOF-3_at; Start 59; Stop 83
ggcggaatcaacatgggagacatcc

SEQ ID NO: 87999 - DNA, 25 bp, Artificial
  probe
  misc_feature (1)..(25): SEQ ID NO: 6885; WAN024BOF-5_at; Start 59; Stop 83
taaacgatgagttagataaagcggc

SEQ ID NO: 88000 - DNA, 25 bp, Artificial
  probe
  misc_feature (1)..(25): SEQ ID NO: 6885; WAN024BOF-5_at; Start 1085; Stop 1109
tcaatctaatgacagctgcccaagc

SEQ ID NO: 88001 - DNA, 25 bp, Artificial
  probe
  misc_feature (1)..(25): SEQ ID NO: 6885; WAN024BOF-5_at; Start 1358; Stop 1382
taactgccgagagtgaggagaccaa

SEQ ID NO: 88002 - DNA, 25 bp, Artificial
  probe
  misc_feature (1)..(25): SEQ ID NO: 6885; WAN024BOF-5_at; Start 788; Stop 812
caaaggcagcaacaggtaagacgat

SEQ ID NO: 88003 - DNA, 25 bp, Artificial
  probe
  misc_feature (1)..(25): SEQ ID NO: 6885; WAN024BOF-5_at; Start 325; Stop 349
gaagtggtaggcacagctcaacgcc

SEQ ID NO: 88004 - DNA, 25 bp, Artificial
  probe
  misc_feature (1)..(25): SEQ ID NO: 6885; WAN024BOF-5_at; Start 869; Stop 893
tcaacgtaattaaagctagcacacc

SEQ ID NO: 88005 - DNA, 25 bp, Artificial
  probe
  misc_feature (1)..(25): SEQ ID NO: 6885; WAN024BOF-5_at; Start 1140; Stop 1164
ggttgctaacttggccaataacgga

SEQ ID NO: 88006 - DNA, 25 bp, Artificial
  probe
  misc_feature (1)..(25): SEQ ID NO: 6885; WAN024BOF-5_at; Start 1236; Stop 1260
tgctgcgactgctgcaactactgca

SEQ ID NO: 88007 - DNA, 25 bp, Artificial
  probe
  misc_feature (1)..(25): SEQ ID NO: 6885; WAN024BOF-5_at; Start 1257; Stop 1281
tgcatttaaagcagcactgaccgct

SEQ ID NO: 88008 - DNA, 25 bp, Artificial
  probe
  misc_feature (1)..(25): SEQ ID NO: 6885; WAN024BOF-5_at; Start 1047; Stop 1071
gacattcaaaacaacagccacagga

SEQ ID NO: 88009 - DNA, 25 bp, Artificial
  probe
  misc_feature (1)..(25): SEQ ID NO: 6885; WAN024BOF-5_at; Start 443; Stop 467
caagccgtggtttacaacagttcag

SEQ ID NO: 88010 - DNA, 25 bp, Artificial
  probe
  misc_feature (1)..(25): SEQ ID NO: 6885; WAN024BOF-5_at; Start 505; Stop 529
tggaaaacgttacaggaaaccatgc

SEQ ID NO: 88011 - DNA, 25 bp, Artificial
  probe
  misc_feature (1)..(25): SEQ ID NO: 6885; WAN024BOF-5_at; Start 694; Stop 718
tcaaacagtaaagggatccagacat

SEQ ID NO: 88012 - DNA, 25 bp, Artificial
  probe
  misc_feature (1)..(25): SEQ ID NO: 6885; WAN024BOF-5_at; Start 540; Stop 564
gcaaaagactgctgattcattcggt

SEQ ID NO: 88013 - DNA, 25 bp, Artificial
  probe
  misc_feature (1)..(25): SEQ ID NO: 6885; WAN024BOF-5_at; Start 1114; Stop 1138
tgtggctcagtaacaaaggctcaac

SEQ ID NO: 88014 - DNA, 25 bp, Artificial
  probe
  misc_feature (1)..(25): SEQ ID NO: 6885; WAN024BOF-5_at; Start 992; Stop 1016
tgcgtgccgctaatgaagctataac

SEQ ID NO: 88015 - DNA, 25 bp, Artificial
  probe
  misc_feature (1)..(25): SEQ ID NO: 6885; WAN024BOF-5_at; Start 1219; Stop 1243
cagactgctgctactattgctgcga

SEQ ID NO: 88016 - DNA, 25 bp, Artificial
  probe
  misc_feature (1)..(25): SEQ ID NO: 6885; WAN024BOF-5_at; Start 677; Stop 701
tcgctgagcttgcaaaatcaaacag

SEQ ID NO: 88017 - DNA, 25 bp, Artificial
  probe
  misc_feature (1)..(25): SEQ ID NO: 6885; WAN024BOF-5_at; Start 1063; Stop 1087
gccacaggagcgattcagatcatca

SEQ ID NO: 88018 - DNA, 25 bp, Artificial
  probe
  misc_feature (1)..(25): SEQ ID NO: 6885; WAN024BOF-5_at; Start 1274; Stop 1298
tgaccgctttaactggcccgattgg

SEQ ID NO: 88019 - DNA, 25 bp, Artificial
  probe
  misc_feature (1)..(25): SEQ ID NO: 6885; WAN024BOF-5_at; Start 142; Stop 166
tttaaactggcatctaaagcggtag

SEQ ID NO: 88020 - DNA, 25 bp, Artificial
  probe
  misc_feature (1)..(25): SEQ ID NO: 6885; WAN024BOF-5_at; Start 562; Stop 586
ggttttgctggccaatctgctcaga

SEQ ID NO: 88021 - DNA, 25 bp, Artificial
  probe
  misc_feature (1)..(25): SEQ ID NO: 6885; WAN024BOF-5_at; Start 402; Stop 426
taataatgcctttcttgcctctgga

SEQ ID NO: 88022 - DNA, 25 bp, Artificial
  probe
  misc_feature (1)..(25): SEQ ID NO: 6885; WAN024BOF-5_at; Start 274; Stop 298
tcaactaagaaactagcggcaggta

SEQ ID NO: 88023 - DNA, 25 bp, Artificial
  probe
  misc_feature (1)..(25): SEQ ID NO: 6885; WAN024BOF-5_at; Start 427; Stop 451
tcttctagtgctgatgcaagccgtg

SEQ ID NO: 88024 - DNA, 25 bp, Artificial
  probe
  misc_feature (1)..(25): SEQ ID NO: 6885; WAN024BOF-5_at; Start 250; Stop 274
catagtacagaagatgtcacgcgct

SEQ ID NO: 88025 - DNA, 25 bp, Artificial
  probe
  misc_feature (1)..(25): SEQ ID NO: 6885; WAN024BOF-5_at; Start 223; Stop 247
tatccaagagtgatgcaagctatgg

SEQ ID NO: 88026 - DNA, 25 bp, Artificial
  probe
  misc_feature (1)..(25): SEQ ID NO: 6885; WAN024BOF-5_at; Start 476; Stop 500
tatcagctggtaaggttgacatgca

SEQ ID NO: 88027 - DNA, 25 bp, Artificial
  probe
  misc_feature (1)..(25): SEQ ID NO: 6885; WAN024BOF-5_at; Start 293; Stop 317
caggtattgagggtttgcctacgac

SEQ ID NO: 88028 - DNA, 25 bp, Artificial
  probe
  misc_feature (1)..(25): SEQ ID NO: 6885; WAN024BOF-5_at; Start 1399; Stop 1423
caagaggagttagtcaagagtacgg

SEQ ID NO: 88029 - DNA, 25 bp, Artificial
  probe
  misc_feature (1)..(25): SEQ ID NO: 6885; WAN024BOF-5_at; Start 168; Stop 192
tcttctaacagattccttgggcgga

SEQ ID NO: 88030 - DNA, 25 bp, Artificial
  probe
  misc_feature (1)..(25): SEQ ID NO: 6885; WAN024BOF-5_at; Start 75; Stop 99
taaagcggcacagaaaggtgacaga

SEQ ID NO: 88031 - DNA, 25 bp, Artificial
  probe
  misc_feature (1)..(25): SEQ ID NO: 6885; WAN024BOF-5_at; Start 181; Stop 205
tccttgggcggagcgattcaacgtt

SEQ ID NO: 88032 - DNA, 25 bp, Artificial
  probe
  misc_feature (1)..(25): SEQ ID NO: 6885; WAN024BOF-5_at; Start 1155; Stop 1179
caataacggagctttgacagcatcc

SEQ ID NO: 88033 - DNA, 25 bp, Artificial
  probe
  misc_feature (1)..(25): SEQ ID NO: 6513; WAN024BOG_at; Start 874; Stop 898
gcagcagtcgctaatcaatatggtt

SEQ ID NO: 88034 - DNA, 25 bp, Artificial
  probe
  misc_feature (1)..(25): SEQ ID NO: 6513; WAN024BOG_at; Start 96; Stop 120
aactgataacgctcccttattgggc

SEQ ID NO: 88035 - DNA, 25 bp, Artificial
  probe
  misc_feature (1)..(25): SEQ ID NO: 6513; WAN024BOG_at; Start 681; Stop 705
taataaggagcgtcttgttggcact

SEQ ID NO: 88036 - DNA, 25 bp, Artificial
  probe
  misc_feature (1)..(25): SEQ ID NO: 6513; WAN024BOG_at; Start 293; Stop 317
ggttgccggtagatgagattactcc

SEQ ID NO: 88037 - DNA, 25 bp, Artificial
  probe
  misc_feature (1)..(25): SEQ ID NO: 6513; WAN024BOG_at; Start 944; Stop 968
gggtggaaacttacaaacgctatca

SEQ ID NO: 88038 - DNA, 25 bp, Artificial
  probe
  misc_feature (1)..(25): SEQ ID NO: 6513; WAN024BOG_at; Start 321; Stop 345
aaatttgacaagatggttccagcgc

SEQ ID NO: 88039 - DNA, 25 bp, Artificial
  probe
  misc_feature (1)..(25): SEQ ID NO: 6513; WAN024BOG_at; Start 472; Stop 496
gagccagcttatccaattattagaa

SEQ ID NO: 88040 - DNA, 25 bp, Artificial
  probe
  misc_feature (1)..(25): SEQ ID NO: 6513; WAN024BOG_at; Start 1369; Stop 1393
gacgggatatctaaagtaagcgaag

SEQ ID NO: 88041 - DNA, 25 bp, Artificial
  probe
  misc_feature (1)..(25): SEQ ID NO: 6513; WAN024BOG_at; Start 265; Stop 289
ggcgatgagccagacaaatactata

SEQ ID NO: 88042 - DNA, 25 bp, Artificial
  probe
  misc_feature (1)..(25): SEQ ID NO: 6513; WAN024BOG_at; Start 54; Stop 78
aacagatattatccgccctatcggg

SEQ ID NO: 88043 - DNA, 25 bp, Artificial
  probe
  misc_feature (1)..(25): SEQ ID NO: 6513; WAN024BOG_at; Start 985; Stop 1009
tatagttttttcaccactgacggca

SEQ ID NO: 88044 - DNA, 25 bp, Artificial
  probe
  misc_feature (1)..(25): SEQ ID NO: 6513; WAN024BOG_at; Start 645; Stop 669
tcaaaatggcactaaaggagtagct

SEQ ID NO: 88045 - DNA, 25 bp, Artificial
  probe
  misc_feature (1)..(25): SEQ ID NO: 6513; WAN024BOG_at; Start 1003; Stop 1027
gacggcaaaggtggatacaagttta

SEQ ID NO: 88046 - DNA, 25 bp, Artificial
  probe
  misc_feature (1)..(25): SEQ ID NO: 6513; WAN024BOG_at; Start 557; Stop 581
taggaaatcgtgaagaggctgatac

SEQ ID NO: 88047 - DNA, 25 bp, Artificial
  probe
  misc_feature (1)..(25): SEQ ID NO: 6513; WAN024BOG_at; Start 785; Stop 809
cacaaagtttgacatgggctattcc

SEQ ID NO: 88048 - DNA, 25 bp, Artificial
  probe
  misc_feature (1)..(25): SEQ ID NO: 6513; WAN024BOG_at; Start 71; Stop 95
ctatcgggaacaagaggagcgtatc

SEQ ID NO: 88049 - DNA, 25 bp, Artificial
  probe
  misc_feature (1)..(25): SEQ ID NO: 6513; WAN024BOG_at; Start 1337; Stop 1361
taatcaacagtgaggacgatagtgt

SEQ ID NO: 88050 - DNA, 25 bp, Artificial
  probe
  misc_feature (1)..(25): SEQ ID NO: 6513; WAN024BOG_at; Start 1064; Stop 1088
taggcaaacttgatccatttagcgc

SEQ ID NO: 88051 - DNA, 25 bp, Artificial
  probe
  misc_feature (1)..(25): SEQ ID NO: 6513; WAN024BOG_at; Start 1394; Stop 1418
ttgtagacggttcacattggccagc

SEQ ID NO: 88052 - DNA, 25 bp, Artificial
  probe
  misc_feature (1)..(25): SEQ ID NO: 6513; WAN024BOG_at; Start 860; Stop 884
gacaagtttttatggcagcagtcgc

SEQ ID NO: 88053 - DNA, 25 bp, Artificial
  probe
  misc_feature (1)..(25): SEQ ID NO: 6513; WAN024BOG_at; Start 840; Stop 864
gaatgactatctgctttggagacaa

SEQ ID NO: 88054 - DNA, 25 bp, Artificial
  probe
  misc_feature (1)..(25): SEQ ID NO: 6513; WAN024BOG_at; Start 738; Stop 762
tatcgaattatcaaaccgtggtaca

SEQ ID NO: 88055 - DNA, 25 bp, Artificial
  probe
  misc_feature (1)..(25): SEQ ID NO: 6513; WAN024BOG_at; Start 369; Stop 393
tgatggagtggctcacagcacgact

SEQ ID NO: 88056 - DNA, 25 bp, Artificial
  probe
  misc_feature (1)..(25): SEQ ID NO: 6513; WAN024BOG_at; Start 1206; Stop 1230
tatcacgcttggagcactcagagac

SEQ ID NO: 88057 - DNA, 25 bp, Artificial
  probe
  misc_feature (1)..(25): SEQ ID NO: 6513; WAN024BOG_at; Start 428; Stop 452
gcgcaccggataggatagtatttaa

SEQ ID NO: 88058 - DNA, 25 bp, Artificial
  probe
  misc_feature (1)..(25): SEQ ID NO: 6513; WAN024BOG_at; Start 116; Stop 140
tgggcgtgaatatccaacaggttaa

SEQ ID NO: 88059 - DNA, 25 bp, Artificial
  probe
  misc_feature (1)..(25): SEQ ID NO: 6513; WAN024BOG_at; Start 1079; Stop 1103
catttagcgcggaaaagggctggtc

SEQ ID NO: 88060 - DNA, 25 bp, Artificial
  probe
  misc_feature (1)..(25): SEQ ID NO: 6513; WAN024BOG_at; Start 412; Stop 436
gatacaaatgaaacaagcgcaccgg

SEQ ID NO: 88061 - DNA, 25 bp, Artificial
  probe
  misc_feature (1)..(25): SEQ ID NO: 6513; WAN024BOG_at; Start 455; Stop 479
taacaaatacaggaacagagccagc

SEQ ID NO: 88062 - DNA, 25 bp, Artificial
  probe
  misc_feature (1)..(25): SEQ ID NO: 6513; WAN024BOG_at; Start 205; Stop 229
caattaaagcatgatttggcaggca

SEQ ID NO: 88063 - DNA, 25 bp, Artificial
  probe
  misc_feature (1)..(25): SEQ ID NO: 6513; WAN024BOG_at; Start 529; Stop 553
gttgttaacaacagagcggcgtttg

SEQ ID NO: 88064 - DNA, 25 bp, Artificial
  probe
  misc_feature (1)..(25): SEQ ID NO: 6513; WAN024BOG_at; Start 912; Stop 936
tgtatcggatacagacggcaatttc

SEQ ID NO: 88065 - DNA, 25 bp, Artificial
  probe
  misc_feature (1)..(25): SEQ ID NO: 6513; WAN024BOG_at; Start 1223; Stop 1247
tcagagactggcctcttgtatcaca

SEQ ID NO: 88066 - DNA, 25 bp, Artificial
  probe
  misc_feature (1)..(25): SEQ ID NO: 6513; WAN024BOG_at; Start 251; Stop 275
taaagattacttatggcgatgagcc

SEQ ID NO: 88067 - DNA, 25 bp, Artificial
  probe
  misc_feature (1)..(25): SEQ ID NO: 7554; WAN024BOH_at; Start 3; Stop 27
gcatcatggattgtcaaaagcatct

SEQ ID NO: 88068 - DNA, 25 bp, Artificial
  probe
  misc_feature (1)..(25): SEQ ID NO: 7554; WAN024BOH_at; Start 10; Stop 34
ggattgtcaaaagcatcttatatcc

SEQ ID NO: 88069 - DNA, 25 bp, Artificial
  probe
  misc_feature (1)..(25): SEQ ID NO: 7554; WAN024BOH_at; Start 16; Stop 40
tcaaaagcatcttatatccaccttt

SEQ ID NO: 88070 - DNA, 25 bp, Artificial
  probe
  misc_feature (1)..(25): SEQ ID NO: 7554; WAN024BOH_at; Start 8; Stop 32
atggattgtcaaaagcatcttatat

SEQ ID NO: 88071 - DNA, 25 bp, Artificial
  probe
  misc_feature (1)..(25): SEQ ID NO: 7554; WAN024BOH_at; Start 27; Stop 51
ttatatccacctttcttcaaattcg

SEQ ID NO: 88072 - DNA, 25 bp, Artificial
  probe
  misc_feature (1)..(25): SEQ ID NO: 7554; WAN024BOH_at; Start 33; Stop 57
ccacctttcttcaaattcgattgtt

SEQ ID NO: 88073 - DNA, 25 bp, Artificial
  probe
  misc_feature (1)..(25): SEQ ID NO: 7554; WAN024BOH_at; Start 15; Stop 39
gtcaaaagcatcttatatccacctt

SEQ ID NO: 88074 - DNA, 25 bp, Artificial
  probe
  misc_feature (1)..(25): SEQ ID NO: 7554; WAN024BOH_at; Start 1; Stop 25
ttgcatcatggattgtcaaaagcat

SEQ ID NO: 88075 - DNA, 25 bp, Artificial
  probe
  misc_feature (1)..(25): SEQ ID NO: 7554; WAN024BOH_at; Start 4; Stop 28
catcatggattgtcaaaagcatctt

SEQ ID NO: 88076 - DNA, 25 bp, Artificial
  probe
  misc_feature (1)..(25): SEQ ID NO: 7554; WAN024BOH_at; Start 28; Stop 52
tatatccacctttcttcaaattcga

SEQ ID NO: 88077 - DNA, 25 bp, Artificial
  probe
  misc_feature (1)..(25): SEQ ID NO: 7554; WAN024BOH_at; Start 23; Stop 47
catcttatatccacctttcttcaaa

SEQ ID NO: 88078 - DNA, 25 bp, Artificial
  probe
  misc_feature (1)..(25): SEQ ID NO: 7554; WAN024BOH_at; Start 77; Stop 101
caaaacgtgaaaaatacaactctag

SEQ ID NO: 88079 - DNA, 25 bp, Artificial
  probe
  misc_feature (1)..(25): SEQ ID NO: 7554; WAN024BOH_at; Start 12; Stop 36
attgtcaaaagcatcttatatccac

SEQ ID NO: 88080 - DNA, 25 bp, Artificial
  probe
  misc_feature (1)..(25): SEQ ID NO: 7554; WAN024BOH_at; Start 13; Stop 37
ttgtcaaaagcatcttatatccacc

SEQ ID NO: 88081 - DNA, 25 bp, Artificial
  probe
  misc_feature (1)..(25): SEQ ID NO: 7554; WAN024BOH_at; Start 29; Stop 53
atatccacctttcttcaaattcgat

SEQ ID NO: 88082 - DNA, 25 bp, Artificial
  probe
  misc_feature (1)..(25): SEQ ID NO: 7554; WAN024BOH_at; Start 32; Stop 56
tccacctttcttcaaattcgattgt

SEQ ID NO: 88083 - DNA, 25 bp, Artificial
  probe
  misc_feature (1)..(25): SEQ ID NO: 7554; WAN024BOH_at; Start 2; Stop 26
tgcatcatggattgtcaaaagcatc

SEQ ID NO: 88084 - DNA, 25 bp, Artificial
  probe
  misc_feature (1)..(25): SEQ ID NO: 7554; WAN024BOH_at; Start 17; Stop 41
caaaagcatcttatatccacctttc

SEQ ID NO: 88085 - DNA, 25 bp, Artificial
  probe
  misc_feature (1)..(25): SEQ ID NO: 7554; WAN024BOH_at; Start 31; Stop 55
atccacctttcttcaaattcgattg

SEQ ID NO: 88086 - DNA, 25 bp, Artificial
  probe
  misc_feature (1)..(25): SEQ ID NO: 7554; WAN024BOH_at; Start 25; Stop 49
tcttatatccacctttcttcaaatt

SEQ ID NO: 88087 - DNA, 25 bp, Artificial
  probe
  misc_feature (1)..(25): SEQ ID NO: 7554; WAN024BOH_at; Start 34; Stop 58
cacctttcttcaaattcgattgtta

SEQ ID NO: 88088 - DNA, 25 bp, Artificial
  probe
  misc_feature (1)..(25): SEQ ID NO: 7554; WAN024BOH_at; Start 19; Stop 43
aaagcatcttatatccacctttctt

SEQ ID NO: 88089 - DNA, 25 bp, Artificial
  probe
  misc_feature (1)..(25): SEQ ID NO: 7554; WAN024BOH_at; Start 24; Stop 48
atcttatatccacctttcttcaaat

SEQ ID NO: 88090 - DNA, 25 bp, Artificial
  probe
  misc_feature (1)..(25): SEQ ID NO: 7554; WAN024BOH_at; Start 11; Stop 35
gattgtcaaaagcatcttatatcca

SEQ ID NO: 88091 - DNA, 25 bp, Artificial
  probe
  misc_feature (1)..(25): SEQ ID NO: 7554; WAN024BOH_at; Start 6; Stop 30
tcatggattgtcaaaagcatcttat

SEQ ID NO: 88092 - DNA, 25 bp, Artificial
  probe
  misc_feature (1)..(25): SEQ ID NO: 7554; WAN024BOH_at; Start 7; Stop 31
catggattgtcaaaagcatcttata

SEQ ID NO: 88093 - DNA, 25 bp, Artificial
  probe
  misc_feature (1)..(25): SEQ ID NO: 7554; WAN024BOH_at; Start 18; Stop 42
aaaagcatcttatatccacctttct

SEQ ID NO: 88094 - DNA, 25 bp, Artificial
  probe
  misc_feature (1)..(25): SEQ ID NO: 7554; WAN024BOH_at; Start 9; Stop 33
tggattgtcaaaagcatcttatatc

SEQ ID NO: 88095 - DNA, 25 bp, Artificial
  probe
  misc_feature (1)..(25): SEQ ID NO: 7554; WAN024BOH_at; Start 14; Stop 38
tgtcaaaagcatcttatatccacct

SEQ ID NO: 88096 - DNA, 25 bp, Artificial
  probe
  misc_feature (1)..(25): SEQ ID NO: 7554; WAN024BOH_at; Start 20; Stop 44
aagcatcttatatccacctttcttc

SEQ ID NO: 88097 - DNA, 25 bp, Artificial
  probe
  misc_feature (1)..(25): SEQ ID NO: 7554; WAN024BOH_at; Start 30; Stop 54
tatccacctttcttcaaattcgatt

SEQ ID NO: 88098 - DNA, 25 bp, Artificial
  probe
  misc_feature (1)..(25): SEQ ID NO: 7554; WAN024BOH_at; Start 5; Stop 29
atcatggattgtcaaaagcatctta

SEQ ID NO: 88099 - DNA, 25 bp, Artificial
  probe
  misc_feature (1)..(25): SEQ ID NO: 7554; WAN024BOH_at; Start 22; Stop 46
gcatcttatatccacctttcttcaa

SEQ ID NO: 88100 - DNA, 25 bp, Artificial
  probe
  misc_feature (1)..(25): SEQ ID NO: 7554; WAN024BOH_at; Start 21; Stop 45
agcatcttatatccacctttcttca

SEQ ID NO: 88101 - DNA, 25 bp, Artificial
  probe
  misc_feature (1)..(25): SEQ ID NO: 6776; WAN024BOI_at; Start 745; Stop 769
gataagggctccaaaagcgaaactg

SEQ ID NO: 88102 - DNA, 25 bp, Artificial
  probe
  misc_feature (1)..(25): SEQ ID NO: 6776; WAN024BOI_at; Start 1508; Stop 1532
tcaaattatcaacggacaatggtgt

SEQ ID NO: 88103 - DNA, 25 bp, Artificial
  probe
  misc_feature (1)..(25): SEQ ID NO: 6776; WAN024BOI_at; Start 1535; Stop 1559
tctttaaaaatcagatcggccagag

SEQ ID NO: 88104 - DNA, 25 bp, Artificial
  probe
  misc_feature (1)..(25): SEQ ID NO: 6776; WAN024BOI_at; Start 1640; Stop 1664
taacaacagggatgacttacttagt

SEQ ID NO: 88105 - DNA, 25 bp, Artificial
  probe
  misc_feature (1)..(25): SEQ ID NO: 6776; WAN024BOI_at; Start 1684; Stop 1708
gatacagttactctgacagttgcag

SEQ ID NO: 88106 - DNA, 25 bp, Artificial
  probe
  misc_feature (1)..(25): SEQ ID NO: 6776; WAN024BOI_at; Start 930; Stop 954
tgttacaaccagcaaaaaaggcgga

SEQ ID NO: 88107 - DNA, 25 bp, Artificial
  probe
  misc_feature (1)..(25): SEQ ID NO: 6776; WAN024BOI_at; Start 1202; Stop 1226
cagatgagccaaacgagttaagacg

SEQ ID NO: 88108 - DNA, 25 bp, Artificial
  probe
  misc_feature (1)..(25): SEQ ID NO: 6776; WAN024BOI_at; Start 485; Stop 509
taagcctagccaaacgatttgatgc

SEQ ID NO: 88109 - DNA, 25 bp, Artificial
  probe
  misc_feature (1)..(25): SEQ ID NO: 6776; WAN024BOI_at; Start 1455; Stop 1479
tgatatccagtcagcctttgagaga

SEQ ID NO: 88110 - DNA, 25 bp, Artificial
  probe
  misc_feature (1)..(25): SEQ ID NO: 6776; WAN024BOI_at; Start 686; Stop 710
ttttcaatacaatcagaccgactgg

SEQ ID NO: 88111 - DNA, 25 bp, Artificial
  probe
  misc_feature (1)..(25): SEQ ID NO: 6776; WAN024BOI_at; Start 1357; Stop 1381
caagcacgggttactgatcaaaaaa

SEQ ID NO: 88112 - DNA, 25 bp, Artificial
  probe
  misc_feature (1)..(25): SEQ ID NO: 6776; WAN024BOI_at; Start 1099; Stop 1123
caagcactgtatgcgcctatttcaa

SEQ ID NO: 88113 - DNA, 25 bp, Artificial
  probe
  misc_feature (1)..(25): SEQ ID NO: 6776; WAN024BOI_at; Start 718; Stop 742
ccaacggttgaagaagaactgagcg

SEQ ID NO: 88114 - DNA, 25 bp, Artificial
  probe
  misc_feature (1)..(25): SEQ ID NO: 6776; WAN024BOI_at; Start 1548; Stop 1572
gatcggccagagtctagtaacccca

SEQ ID NO: 88115 - DNA, 25 bp, Artificial
  probe
  misc_feature (1)..(25): SEQ ID NO: 6776; WAN024BOI_at; Start 309; Stop 333
gttaatcaatgagcttgcgaaccct

SEQ ID NO: 88116 - DNA, 25 bp, Artificial
  probe
  misc_feature (1)..(25): SEQ ID NO: 6776; WAN024BOI_at; Start 882; Stop 906
gatcacaacgaccacaacgactcgt

SEQ ID NO: 88117 - DNA, 25 bp, Artificial
  probe
  misc_feature (1)..(25): SEQ ID NO: 6776; WAN024BOI_at; Start 699; Stop 723
cagaccgactggtaaaatgccaacg

SEQ ID NO: 88118 - DNA, 25 bp, Artificial
  probe
  misc_feature (1)..(25): SEQ ID NO: 6776; WAN024BOI_at; Start 459; Stop 483
gcaagaaaccaaactagcccgtcta

SEQ ID NO: 88119 - DNA, 25 bp, Artificial
  probe
  misc_feature (1)..(25): SEQ ID NO: 6776; WAN024BOI_at; Start 95; Stop 119
caagaagtcttgcaacaggttcgtc

SEQ ID NO: 88120 - DNA, 25 bp, Artificial
  probe
  misc_feature (1)..(25): SEQ ID NO: 6776; WAN024BOI_at; Start 898; Stop 922
acgactcgttctgatggttccatag

SEQ ID NO: 88121 - DNA, 25 bp, Artificial
  probe
  misc_feature (1)..(25): SEQ ID NO: 6776; WAN024BOI_at; Start 771; Stop 795
aaaaaatgcagatggttcaacgacg

SEQ ID NO: 88122 - DNA, 25 bp, Artificial
  probe
  misc_feature (1)..(25): SEQ ID NO: 6776; WAN024BOI_at; Start 1168; Stop 1192
gaccagtggacaagaaaagattttc

SEQ ID NO: 88123 - DNA, 25 bp, Artificial
  probe
  misc_feature (1)..(25): SEQ ID NO: 6776; WAN024BOI_at; Start 733; Stop 757
gaactgagcggagataagggctcca

SEQ ID NO: 88124 - DNA, 25 bp, Artificial
  probe
  misc_feature (1)..(25): SEQ ID NO: 6776; WAN024BOI_at; Start 1084; Stop 1108
ttttatcaaagagggcaagcactgt

SEQ ID NO: 88125 - DNA, 25 bp, Artificial
  probe
  misc_feature (1)..(25): SEQ ID NO: 6776; WAN024BOI_at; Start 810; Stop 834
tacagcctcagatgggactaagagc

SEQ ID NO: 88126 - DNA, 25 bp, Artificial
  probe
  misc_feature (1)..(25): SEQ ID NO: 6776; WAN024BOI_at; Start 860; Stop 884
caaagttagcggacaagacacggat

SEQ ID NO: 88127 - DNA, 25 bp, Artificial
  probe
  misc_feature (1)..(25): SEQ ID NO: 6776; WAN024BOI_at; Start 1764; Stop 1788
tgatggaaaacttggtacacctgga

SEQ ID NO: 88128 - DNA, 25 bp, Artificial
  probe
  misc_feature (1)..(25): SEQ ID NO: 6776; WAN024BOI_at; Start 1342; Stop 1366
cctctattgatgattcaagcacggg

SEQ ID NO: 88129 - DNA, 25 bp, Artificial
  probe
  misc_feature (1)..(25): SEQ ID NO: 6776; WAN024BOI_at; Start 945; Stop 969
aaaaggcggagcatcaacgtctgaa

SEQ ID NO: 88130 - DNA, 25 bp, Artificial
  probe
  misc_feature (1)..(25): SEQ ID NO: 6776; WAN024BOI_at; Start 1608; Stop 1632
tgttacttggcgatgggcacttgat

SEQ ID NO: 88131 - DNA, 25 bp, Artificial
  probe
  misc_feature (1)..(25): SEQ ID NO: 6776; WAN024BOI_at; Start 1286; Stop 1310
gctttgtcgatgctgatattggaga

SEQ ID NO: 88132 - DNA, 25 bp, Artificial
  probe
  misc_feature (1)..(25): SEQ ID NO: 6776; WAN024BOI_at; Start 1319; Stop 1343
aagtccatgatgacggttttgcccc

SEQ ID NO: 88133 - DNA, 25 bp, Artificial
  probe
  misc_feature (1)..(25): SEQ ID NO: 6776; WAN024BOI_at; Start 430; Stop 454
gattataagcgtactctggaatggg

SEQ ID NO: 88134 - DNA, 25 bp, Artificial
  probe
  misc_feature (1)..(25): SEQ ID NO: 6776; WAN024BOI_at; Start 579; Stop 603
tgaaaacgatgacaaccatcaaggg

SEQ ID NO: 88135 - DNA, 25 bp, Artificial
  probe
  misc_feature (1)..(25): SEQ ID NO: 6545; WAN024BOJ_at; Start 260; Stop 284
cacacagtggtgacggaactaagac

SEQ ID NO: 88136 - DNA, 25 bp, Artificial
  probe
  misc_feature (1)..(25): SEQ ID NO: 6545; WAN024BOJ_at; Start 99; Stop 123
gaaagctactgttgaccgtgatgga

SEQ ID NO: 88137 - DNA, 25 bp, Artificial
  probe
  misc_feature (1)..(25): SEQ ID NO: 6545; WAN024BOJ_at; Start 1212; Stop 1236
taattcagctgctaacatggcaggt

SEQ ID NO: 88138 - DNA, 25 bp, Artificial
  probe
  misc_feature (1)..(25): SEQ ID NO: 6545; WAN024BOJ_at; Start 1500; Stop 1524
taatacgatgaaagagactggaacg

SEQ ID NO: 88139 - DNA, 25 bp, Artificial
  probe
  misc_feature (1)..(25): SEQ ID NO: 6545; WAN024BOJ_at; Start 1172; Stop 1196
gtagagcttctggtatttggacaac

SEQ ID NO: 88140 - DNA, 25 bp, Artificial
  probe
  misc_feature (1)..(25): SEQ ID NO: 6545; WAN024BOJ_at; Start 325; Stop 349
catggaaacattaccgtgtcagcaa

SEQ ID NO: 88141 - DNA, 25 bp, Artificial
  probe
  misc_feature (1)..(25): SEQ ID NO: 6545; WAN024BOJ_at; Start 1594; Stop 1618
cctaatccaggctctcatgaacgta

SEQ ID NO: 88142 - DNA, 25 bp, Artificial
  probe
  misc_feature (1)..(25): SEQ ID NO: 6545; WAN024BOJ_at; Start 591; Stop 615
cacgatggacatatgtgttcgaaca

SEQ ID NO: 88143 - DNA, 25 bp, Artificial
  probe
  misc_feature (1)..(25): SEQ ID NO: 6545; WAN024BOJ_at; Start 1672; Stop 1696
gataacaactggagaccatggcgct

SEQ ID NO: 88144 - DNA, 25 bp, Artificial
  probe
  misc_feature (1)..(25): SEQ ID NO: 6545; WAN024BOJ_at; Start 1405; Stop 1429
gatgtcttgggagatatctacgcta

SEQ ID NO: 88145 - DNA, 25 bp, Artificial
  probe
  misc_feature (1)..(25): SEQ ID NO: 6545; WAN024BOJ_at; Start 1017; Stop 1041
tacagcttttaggacgcgggaaaca

SEQ ID NO: 88146 - DNA, 25 bp, Artificial
  probe
  misc_feature (1)..(25): SEQ ID NO: 6545; WAN024BOJ_at; Start 1127; Stop 1151
tcaaagtagctcgactaggtagtac

SEQ ID NO: 88147 - DNA, 25 bp, Artificial
  probe
  misc_feature (1)..(25): SEQ ID NO: 6545; WAN024BOJ_at; Start 944; Stop 968
gccgaggcaggcaatcagatactag

SEQ ID NO: 88148 - DNA, 25 bp, Artificial
  probe
  misc_feature (1)..(25): SEQ ID NO: 6545; WAN024BOJ_at; Start 361; Stop 385
tcaagcattcctcgatctagtagtg

SEQ ID NO: 88149 - DNA, 25 bp, Artificial
  probe
  misc_feature (1)..(25): SEQ ID NO: 6545; WAN024BOJ_at; Start 1688; Stop 1712
catggcgctatctggtgcaacaatc

SEQ ID NO: 88150 - DNA, 25 bp, Artificial
  probe
  misc_feature (1)..(25): SEQ ID NO: 6545; WAN024BOJ_at; Start 1756; Stop 1780
gaaagcactccgactccttggcaaa

SEQ ID NO: 88151 - DNA, 25 bp, Artificial
  probe
  misc_feature (1)..(25): SEQ ID NO: 6545; WAN024BOJ_at; Start 245; Stop 269
gggaagtaaccatcccacacagtgg

SEQ ID NO: 88152 - DNA, 25 bp, Artificial
  probe
  misc_feature (1)..(25): SEQ ID NO: 6545; WAN024BOJ_at; Start 399; Stop 423
tctttcaggaaataggcggctcgga

SEQ ID NO: 88153 - DNA, 25 bp, Artificial
  probe
  misc_feature (1)..(25): SEQ ID NO: 6545; WAN024BOJ_at; Start 67; Stop 91
gatatcgctaacaattcctcaagag

SEQ ID NO: 88154 - DNA, 25 bp, Artificial
  probe
  misc_feature (1)..(25): SEQ ID NO: 6545; WAN024BOJ_at; Start 575; Stop 599
caaaagcaaagtctggcacgatgga

SEQ ID NO: 88155 - DNA, 25 bp, Artificial
  probe
  misc_feature (1)..(25): SEQ ID NO: 6545; WAN024BOJ_at; Start 1342; Stop 1366
tatgacaaagatggccgtgtgggca

SEQ ID NO: 88156 - DNA, 25 bp, Artificial
  probe
  misc_feature (1)..(25): SEQ ID NO: 6545; WAN024BOJ_at; Start 906; Stop 930
caatggttcagcaacgattcgagct

SEQ ID NO: 88157 - DNA, 25 bp, Artificial
  probe
  misc_feature (1)..(25): SEQ ID NO: 6545; WAN024BOJ_at; Start 203; Stop 227
caaactttgacacatccgggcaaga

SEQ ID NO: 88158 - DNA, 25 bp, Artificial
  probe
  misc_feature (1)..(25): SEQ ID NO: 6545; WAN024BOJ_at; Start 376; Stop 400
tctagtagtgtaagcgacaatgctc

SEQ ID NO: 88159 - DNA, 25 bp, Artificial
  probe
  misc_feature (1)..(25): SEQ ID NO: 6545; WAN024BOJ_at; Start 121; Stop 145
ggagcttaccgcacatatacttatg

SEQ ID NO: 88160 - DNA, 25 bp, Artificial
  probe
  misc_feature (1)..(25): SEQ ID NO: 6545; WAN024BOJ_at; Start 83; Stop 107
cctcaagagttagttggaaagctac

SEQ ID NO: 88161 - DNA, 25 bp, Artificial
  probe
  misc_feature (1)..(25): SEQ ID NO: 6545; WAN024BOJ_at; Start 810; Stop 834
ggcttatggttcgactatcacagga

SEQ ID NO: 88162 - DNA, 25 bp, Artificial
  probe
  misc_feature (1)..(25): SEQ ID NO: 6545; WAN024BOJ_at; Start 1874; Stop 1898
catgtaagggcggaaagattgcacg

SEQ ID NO: 88163 - DNA, 25 bp, Artificial
  probe
  misc_feature (1)..(25): SEQ ID NO: 6545; WAN024BOJ_at; Start 182; Stop 206
caagtgtgcatagtagtcatccaaa

SEQ ID NO: 88164 - DNA, 25 bp, Artificial
  probe
  misc_feature (1)..(25): SEQ ID NO: 6545; WAN024BOJ_at; Start 511; Stop 535
ttaggaaaaaatcacgcaacaggcg

SEQ ID NO: 88165 - DNA, 25 bp, Artificial
  probe
  misc_feature (1)..(25): SEQ ID NO: 6545; WAN024BOJ_at; Start 304; Stop 328
tttgacccaaacaacggagtacatg

SEQ ID NO: 88166 - DNA, 25 bp, Artificial
  probe
  misc_feature (1)..(25): SEQ ID NO: 6545; WAN024BOJ_at; Start 1809; Stop 1833
tcacagggattacggaggtgtccaa

SEQ ID NO: 88167 - DNA, 25 bp, Artificial
  probe
  misc_feature (1)..(25): SEQ ID NO: 6545; WAN024BOJ_at; Start 1523; Stop 1547
cgtggtggataaatggtagctctca

SEQ ID NO: 88168 - DNA, 25 bp, Artificial
  probe
  misc_feature (1)..(25): SEQ ID NO: 6545; WAN024BOJ_at; Start 279; Stop 303
taagacttttgcagtatgggcatcg

SEQ ID NO: 88169 - DNA, 25 bp, Artificial
  probe
  misc_feature (1)..(25): SEQ ID NO: 6522; WAN024BOK_at; Start 2; Stop 26
tgacaatgttaaaagtcactaaaac

SEQ ID NO: 88170 - DNA, 25 bp, Artificial
  probe
  misc_feature (1)..(25): SEQ ID NO: 6522; WAN024BOK_at; Start 118; Stop 142
tcaacaatatctgaaacgctgcatg

SEQ ID NO: 88171 - DNA, 25 bp, Artificial
  probe
  misc_feature (1)..(25): SEQ ID NO: 6522; WAN024BOK_at; Start 162; Stop 186
caatcgtatcagtatgcgtaagcat

SEQ ID NO: 88172 - DNA, 25 bp, Artificial
  probe
  misc_feature (1)..(25): SEQ ID NO: 6522; WAN024BOK_at; Start 90; Stop 114
tgtaatcaacacagacaataaagct

SEQ ID NO: 88173 - DNA, 25 bp, Artificial
  probe
  misc_feature (1)..(25): SEQ ID NO: 6522; WAN024BOK_at; Start 137; Stop 161
tgcatgacccggatctgtacgctaa

SEQ ID NO: 88174 - DNA, 25 bp, Artificial
  probe
  misc_feature (1)..(25): SEQ ID NO: 6522; WAN024BOK_at; Start 206; Stop 230
tgcgctataagattgaagatgccat

SEQ ID NO: 88175 - DNA, 25 bp, Artificial
  probe
  misc_feature (1)..(25): SEQ ID NO: 6522; WAN024BOK_at; Start 39; Stop 63
aactgaatttttcgcacaagatggc

SEQ ID NO: 88176 - DNA, 25 bp, Artificial
  probe
  misc_feature (1)..(25): SEQ ID NO: 6522; WAN024BOK_at; Start 157; Stop 181
gctaacaatcgtatcagtatgcgta

SEQ ID NO: 88177 - DNA, 25 bp, Artificial
  probe
  misc_feature (1)..(25): SEQ ID NO: 6522; WAN024BOK_at; Start 186; Stop 210
tgagcaagagttacgagaaatgcgc

SEQ ID NO: 88178 - DNA, 25 bp, Artificial
  probe
  misc_feature (1)..(25): SEQ ID NO: 6522; WAN024BOK_at; Start 108; Stop 132
taaagctgtttcaacaatatctgaa

SEQ ID NO: 88179 - DNA, 25 bp, Artificial
  probe
  misc_feature (1)..(25): SEQ ID NO: 6522; WAN024BOK_at; Start 67; Stop 91
caacaaaaattggtcaaaactactg

SEQ ID NO: 88180 - DNA, 25 bp, Artificial
  probe
  misc_feature (1)..(25): SEQ ID NO: 6522; WAN024BOK_at; Start 21; Stop 45
taaaacacgtcagctagtaactgaa

SEQ ID NO: 88181 - DNA, 25 bp, Artificial
  probe
  misc_feature (1)..(25): SEQ ID NO: 6522; WAN024BOK_at; Start 99; Stop 123
cacagacaataaagctgtttcaaca

SEQ ID NO: 88182 - DNA, 25 bp, Artificial
  probe
  misc_feature (1)..(25): SEQ ID NO: 6522; WAN024BOK_at; Start 147; Stop 171
ggatctgtacgctaacaatcgtatc

SEQ ID NO: 88183 - DNA, 25 bp, Artificial
  probe
  misc_feature (1)..(25): SEQ ID NO: 6522; WAN024BOK_at; Start 174; Stop 198
tatgcgtaagcatgagcaagagtta

SEQ ID NO: 88184 - DNA, 25 bp, Artificial
  probe
  misc_feature (1)..(25): SEQ ID NO: 6522; WAN024BOK_at; Start 125; Stop 149
tatctgaaacgctgcatgacccgga

SEQ ID NO: 88185 - DNA, 25 bp, Artificial
  probe
  misc_feature (1)..(25): SEQ ID NO: 6522; WAN024BOK_at; Start 167; Stop 191
gtatcagtatgcgtaagcatgagca

SEQ ID NO: 88186 - DNA, 25 bp, Artificial
  probe
  misc_feature (1)..(25): SEQ ID NO: 6522; WAN024BOK_at; Start 231; Stop 255
tttggcagagctggaagcagattct

SEQ ID NO: 88187 - DNA, 25 bp, Artificial
  probe
  misc_feature (1)..(25): SEQ ID NO: 6522; WAN024BOK_at; Start 180; Stop 204
taagcatgagcaagagttacgagaa

SEQ ID NO: 88188 - DNA, 25 bp, Artificial
  probe
  misc_feature (1)..(25): SEQ ID NO: 6522; WAN024BOK_at; Start 236; Stop 260
cagagctggaagcagattctgagca

SEQ ID NO: 88189 - DNA, 25 bp, Artificial
  probe
  misc_feature (1)..(25): SEQ ID NO: 6522; WAN024BOK_at; Start 11; Stop 35
taaaagtcactaaaacacgtcagct

SEQ ID NO: 88190 - DNA, 25 bp, Artificial
  probe
  misc_feature (1)..(25): SEQ ID NO: 6522; WAN024BOK_at; Start 199; Stop 223
cgagaaatgcgctataagattgaag

SEQ ID NO: 88191 - DNA, 25 bp, Artificial
  probe
  misc_feature (1)..(25): SEQ ID NO: 6522; WAN024BOK_at; Start 131; Stop 155
aaacgctgcatgacccggatctgta

SEQ ID NO: 88192 - DNA, 25 bp, Artificial
  probe
  misc_feature (1)..(25): SEQ ID NO: 6522; WAN024BOK_at; Start 52; Stop 76
gcacaagatggcgaccaacaaaaat

SEQ ID NO: 88193 - DNA, 25 bp, Artificial
  probe
  misc_feature (1)..(25): SEQ ID NO: 6522; WAN024BOK_at; Start 243; Stop 267
ggaagcagattctgagcataaggaa

SEQ ID NO: 88194 - DNA, 25 bp, Artificial
  probe
  misc_feature (1)..(25): SEQ ID NO: 6522; WAN024BOK_at; Start 58; Stop 82
gatggcgaccaacaaaaattggtca

SEQ ID NO: 88195 - DNA, 25 bp, Artificial
  probe
  misc_feature (1)..(25): SEQ ID NO: 6522; WAN024BOK_at; Start 227; Stop 251
ccattttggcagagctggaagcaga

SEQ ID NO: 88196 - DNA, 25 bp, Artificial
  probe
  misc_feature (1)..(25): SEQ ID NO: 6522; WAN024BOK_at; Start 43; Stop 67
gaatttttcgcacaagatggcgacc

SEQ ID NO: 88197 - DNA, 25 bp, Artificial
  probe
  misc_feature (1)..(25): SEQ ID NO: 6522; WAN024BOK_at; Start 141; Stop 165
tgacccggatctgtacgctaacaat

SEQ ID NO: 88198 - DNA, 25 bp, Artificial
  probe
  misc_feature (1)..(25): SEQ ID NO: 6522; WAN024BOK_at; Start 193; Stop 217
gagttacgagaaatgcgctataaga

SEQ ID NO: 88199 - DNA, 25 bp, Artificial
  probe
  misc_feature (1)..(25): SEQ ID NO: 6522; WAN024BOK_at; Start 31; Stop 55
cagctagtaactgaatttttcgcac

SEQ ID NO: 88200 - DNA, 25 bp, Artificial
  probe
  misc_feature (1)..(25): SEQ ID NO: 6522; WAN024BOK_at; Start 77; Stop 101
tggtcaaaactactgtaatcaacac

SEQ ID NO: 88201 - DNA, 25 bp, Artificial
  probe
  misc_feature (1)..(25): SEQ ID NO: 6522; WAN024BOK_at; Start 213; Stop 237
taagattgaagatgccattttggca

SEQ ID NO: 88202 - DNA, 25 bp, Artificial
  probe
  misc_feature (1)..(25): SEQ ID NO: 6522; WAN024BOK_at; Start 220; Stop 244
gaagatgccattttggcagagctgg

SEQ ID NO: 88203 - DNA, 25 bp, Artificial
  probe
  misc_feature (1)..(25): SEQ ID NO: 7580; WAN024BOL_at; Start 62; Stop 86
gtttgcaaacatgttacatctatct

SEQ ID NO: 88204 - DNA, 25 bp, Artificial
  probe
  misc_feature (1)..(25): SEQ ID NO: 7580; WAN024BOL_at; Start 74; Stop 98
gttacatctatctatttttggataa

SEQ ID NO: 88205 - DNA, 25 bp, Artificial
  probe
  misc_feature (1)..(25): SEQ ID NO: 7580; WAN024BOL_at; Start 3; Stop 27
gctaagagggctctattctagtttc

SEQ ID NO: 88206 - DNA, 25 bp, Artificial
  probe
  misc_feature (1)..(25): SEQ ID NO: 7580; WAN024BOL_at; Start 50; Stop 74
ttcgtatgctttgtttgcaaacatg

SEQ ID NO: 88207 - DNA, 25 bp, Artificial
  probe
  misc_feature (1)..(25): SEQ ID NO: 7580; WAN024BOL_at; Start 43; Stop 67
ctaaaggttcgtatgctttgtttgc

SEQ ID NO: 88208 - DNA, 25 bp, Artificial
  probe
  misc_feature (1)..(25): SEQ ID NO: 7580; WAN024BOL_at; Start 19; Stop 43
tctagtttcatggaaatgattttac

SEQ ID NO: 88209 - DNA, 25 bp, Artificial
  probe
  misc_feature (1)..(25): SEQ ID NO: 7580; WAN024BOL_at; Start 47; Stop 71
aggttcgtatgctttgtttgcaaac

SEQ ID NO: 88210 - DNA, 25 bp, Artificial
  probe
  misc_feature (1)..(25): SEQ ID NO: 7580; WAN024BOL_at; Start 52; Stop 76
cgtatgctttgtttgcaaacatgtt

SEQ ID NO: 88211 - DNA, 25 bp, Artificial
  probe
  misc_feature (1)..(25): SEQ ID NO: 7580; WAN024BOL_at; Start 71; Stop 95
catgttacatctatctatttttgga

SEQ ID NO: 88212 - DNA, 25 bp, Artificial
  probe
  misc_feature (1)..(25): SEQ ID NO: 7580; WAN024BOL_at; Start 54; Stop 78
tatgctttgtttgcaaacatgttac

SEQ ID NO: 88213 - DNA, 25 bp, Artificial
  probe
  misc_feature (1)..(25): SEQ ID NO: 7580; WAN024BOL_at; Start 59; Stop 83
tttgtttgcaaacatgttacatcta

SEQ ID NO: 88214 - DNA, 25 bp, Artificial
  probe
  misc_feature (1)..(25): SEQ ID NO: 7580; WAN024BOL_at; Start 27; Stop 51
catggaaatgattttactaaaggtt

SEQ ID NO: 88215 - DNA, 25 bp, Artificial
  probe
  misc_feature (1)..(25): SEQ ID NO: 7580; WAN024BOL_at; Start 6; Stop 30
aagagggctctattctagtttcatg

SEQ ID NO: 88216 - DNA, 25 bp, Artificial
  probe
  misc_feature (1)..(25): SEQ ID NO: 7580; WAN024BOL_at; Start 7; Stop 31
agagggctctattctagtttcatgg

SEQ ID NO: 88217 - DNA, 25 bp, Artificial
  probe
  misc_feature (1)..(25): SEQ ID NO: 7580; WAN024BOL_at; Start 45; Stop 69
aaaggttcgtatgctttgtttgcaa

SEQ ID NO: 88218 - DNA, 25 bp, Artificial
  probe
  misc_feature (1)..(25): SEQ ID NO: 7580; WAN024BOL_at; Start 13; Stop 37
ctctattctagtttcatggaaatga

SEQ ID NO: 88219 - DNA, 25 bp, Artificial
  probe
  misc_feature (1)..(25): SEQ ID NO: 7580; WAN024BOL_at; Start 5; Stop 29
taagagggctctattctagtttcat

SEQ ID NO: 88220 - DNA, 25 bp, Artificial
  probe
  misc_feature (1)..(25): SEQ ID NO: 7580; WAN024BOL_at; Start 48; Stop 72
ggttcgtatgctttgtttgcaaaca

SEQ ID NO: 88221 - DNA, 25 bp, Artificial
  probe
  misc_feature (1)..(25): SEQ ID NO: 7580; WAN024BOL_at; Start 46; Stop 70
aaggttcgtatgctttgtttgcaaa

SEQ ID NO: 88222 - DNA, 25 bp, Artificial
  probe
  misc_feature (1)..(25): SEQ ID NO: 7580; WAN024BOL_at; Start 10; Stop 34
gggctctattctagtttcatggaaa

SEQ ID NO: 88223 - DNA, 25 bp, Artificial
  probe
  misc_feature (1)..(25): SEQ ID NO: 7580; WAN024BOL_at; Start 12; Stop 36
gctctattctagtttcatggaaatg

SEQ ID NO: 88224 - DNA, 25 bp, Artificial
  probe
  misc_feature (1)..(25): SEQ ID NO: 7580; WAN024BOL_at; Start 4; Stop 28
ctaagagggctctattctagtttca

SEQ ID NO: 88225 - DNA, 25 bp, Artificial
  probe
  misc_feature (1)..(25): SEQ ID NO: 7580; WAN024BOL_at; Start 11; Stop 35
ggctctattctagtttcatggaaat

SEQ ID NO: 88226 - DNA, 25 bp, Artificial
  probe
  misc_feature (1)..(25): SEQ ID NO: 7580; WAN024BOL_at; Start 61; Stop 85
tgtttgcaaacatgttacatctatc

SEQ ID NO: 88227 - DNA, 25 bp, Artificial
  probe
  misc_feature (1)..(25): SEQ ID NO: 7580; WAN024BOL_at; Start 66; Stop 90
gcaaacatgttacatctatctattt

SEQ ID NO: 88228 - DNA, 25 bp, Artificial
  probe
  misc_feature (1)..(25): SEQ ID NO: 7580; WAN024BOL_at; Start 44; Stop 68
taaaggttcgtatgctttgtttgca

SEQ ID NO: 88229 - DNA, 25 bp, Artificial
  probe
  misc_feature (1)..(25): SEQ ID NO: 7580; WAN024BOL_at; Start 49; Stop 73
gttcgtatgctttgtttgcaaacat

SEQ ID NO: 88230 - DNA, 25 bp, Artificial
  probe
  misc_feature (1)..(25): SEQ ID NO: 7580; WAN024BOL_at; Start 8; Stop 32
gagggctctattctagtttcatgga

SEQ ID NO: 88231 - DNA, 25 bp, Artificial
  probe
  misc_feature (1)..(25): SEQ ID NO: 7580; WAN024BOL_at; Start 35; Stop 59
tgattttactaaaggttcgtatgct

SEQ ID NO: 88232 - DNA, 25 bp, Artificial
  probe
  misc_feature (1)..(25): SEQ ID NO: 7580; WAN024BOL_at; Start 26; Stop 50
tcatggaaatgattttactaaaggt

SEQ ID NO: 88233 - DNA, 25 bp, Artificial
  probe
  misc_feature (1)..(25): SEQ ID NO: 7580; WAN024BOL_at; Start 57; Stop 81
gctttgtttgcaaacatgttacatc

SEQ ID NO: 88234 - DNA, 25 bp, Artificial
  probe
  misc_feature (1)..(25): SEQ ID NO: 7580; WAN024BOL_at; Start 9; Stop 33
agggctctattctagtttcatggaa

SEQ ID NO: 88235 - DNA, 25 bp, Artificial
  probe
  misc_feature (1)..(25): SEQ ID NO: 7580; WAN024BOL_at; Start 14; Stop 38
tctattctagtttcatggaaatgat

SEQ ID NO: 88236 - DNA, 25 bp, Artificial
  probe
  misc_feature (1)..(25): SEQ ID NO: 7580; WAN024BOL_at; Start 2; Stop 26
tgctaagagggctctattctagttt

SEQ ID NO: 88237 - DNA, 25 bp, Artificial
  probe
  misc_feature (1)..(25): SEQ ID NO: 7409; WAN024BOM_at; Start 585; Stop 609
taaaagcttgcaacttaaagagcat

SEQ ID NO: 88238 - DNA, 25 bp, Artificial
  probe
  misc_feature (1)..(25): SEQ ID NO: 7409; WAN024BOM_at; Start 980; Stop 1004
tagaattggtttttatgggctggtc

SEQ ID NO: 88239 - DNA, 25 bp, Artificial
  probe
  misc_feature (1)..(25): SEQ ID NO: 7409; WAN024BOM_at; Start 360; Stop 384
tgcaacagcaatagatatttcttgg

SEQ ID NO: 88240 - DNA, 25 bp, Artificial
  probe
  misc_feature (1)..(25): SEQ ID NO: 7409; WAN024BOM_at; Start 232; Stop 256
caaaaattctgggaaatctttgtca

SEQ ID NO: 88241 - DNA, 25 bp, Artificial
  probe
  misc_feature (1)..(25): SEQ ID NO: 7409; WAN024BOM_at; Start 82; Stop 106
gcttctagggtcttaggtgcagaaa

SEQ ID NO: 88242 - DNA, 25 bp, Artificial
  probe
  misc_feature (1)..(25): SEQ ID NO: 7409; WAN024BOM_at; Start 1324; Stop 1348
caaggaacagttggtttaatggtat

SEQ ID NO: 88243 - DNA, 25 bp, Artificial
  probe
  misc_feature (1)..(25): SEQ ID NO: 7409; WAN024BOM_at; Start 776; Stop 800
cagtaatttttccaagactggcgaa

SEQ ID NO: 88244 - DNA, 25 bp, Artificial
  probe
  misc_feature (1)..(25): SEQ ID NO: 7409; WAN024BOM_at; Start 1308; Stop 1332
tatgaaactctgtgttcaaggaaca

SEQ ID NO: 88245 - DNA, 25 bp, Artificial
  probe
  misc_feature (1)..(25): SEQ ID NO: 7409; WAN024BOM_at; Start 1157; Stop 1181
gagaggcgacaatagctttggtgca

SEQ ID NO: 88246 - DNA, 25 bp, Artificial
  probe
  misc_feature (1)..(25): SEQ ID NO: 7409; WAN024BOM_at; Start 723; Stop 747
tagtgcagacaaagtgatacgaatt

SEQ ID NO: 88247 - DNA, 25 bp, Artificial
  probe
  misc_feature (1)..(25): SEQ ID NO: 7409; WAN024BOM_at; Start 791; Stop 815
gactggcgaatagctttaatagagg

SEQ ID NO: 88248 - DNA, 25 bp, Artificial
  probe
  misc_feature (1)..(25): SEQ ID NO: 7409; WAN024BOM_at; Start 629; Stop 653
tatttatacctcaattggcaacaac

SEQ ID NO: 88249 - DNA, 25 bp, Artificial
  probe
  misc_feature (1)..(25): SEQ ID NO: 7409; WAN024BOM_at; Start 1244; Stop 1268
tagtttctagtctcataatgggaac

SEQ ID NO: 88250 - DNA, 25 bp, Artificial
  probe
  misc_feature (1)..(25): SEQ ID NO: 7409; WAN024BOM_at; Start 709; Stop 733
tctggctattttgatagtgcagaca

SEQ ID NO: 88251 - DNA, 25 bp, Artificial
  probe
  misc_feature (1)..(25): SEQ ID NO: 7409; WAN024BOM_at; Start 66; Stop 90
ggtgaccattccatatgcttctagg

SEQ ID NO: 88252 - DNA, 25 bp, Artificial
  probe
  misc_feature (1)..(25): SEQ ID NO: 7409; WAN024BOM_at; Start 1126; Stop 1150
gcttctggagcttcaatttcatcag

SEQ ID NO: 88253 - DNA, 25 bp, Artificial
  probe
  misc_feature (1)..(25): SEQ ID NO: 7409; WAN024BOM_at; Start 1355; Stop 1379
taatgatttggtatagcaggactga

SEQ ID NO: 88254 - DNA, 25 bp, Artificial
  probe
  misc_feature (1)..(25): SEQ ID NO: 7409; WAN024BOM_at; Start 1113; Stop 1137
tcctatgttaggagcttctggagct

SEQ ID NO: 88255 - DNA, 25 bp, Artificial
  probe
  misc_feature (1)..(25): SEQ ID NO: 7409; WAN024BOM_at; Start 753; Stop 777
gacatttatcacagctattgggaca

SEQ ID NO: 88256 - DNA, 25 bp, Artificial
  probe
  misc_feature (1)..(25): SEQ ID NO: 7409; WAN024BOM_at; Start 1370; Stop 1394
gcaggactgaaattgtaaatactat

SEQ ID NO: 88257 - DNA, 25 bp, Artificial
  probe
  misc_feature (1)..(25): SEQ ID NO: 7409; WAN024BOM_at; Start 1044; Stop 1068
gacgaagggcttaactgtttcagtg

SEQ ID NO: 88258 - DNA, 25 bp, Artificial
  probe
  misc_feature (1)..(25): SEQ ID NO: 7409; WAN024BOM_at; Start 1144; Stop 1168
tcatcagttataggagaggcgacaa

SEQ ID NO: 88259 - DNA, 25 bp, Artificial
  probe
  misc_feature (1)..(25): SEQ ID NO: 7409; WAN024BOM_at; Start 1257; Stop 1281
cataatgggaacgacttgtttggta

SEQ ID NO: 88260 - DNA, 25 bp, Artificial
  probe
  misc_feature (1)..(25): SEQ ID NO: 7409; WAN024BOM_at; Start 191; Stop 215
gaacgatttcgtatactagagattc

SEQ ID NO: 88261 - DNA, 25 bp, Artificial
  probe
  misc_feature (1)..(25): SEQ ID NO: 7409; WAN024BOM_at; Start 343; Stop 367
cagtctattcaaatccttgcaacag

SEQ ID NO: 88262 - DNA, 25 bp, Artificial
  probe
  misc_feature (1)..(25): SEQ ID NO: 7409; WAN024BOM_at; Start 692; Stop 716
tatcaacattatctcaatctggcta

SEQ ID NO: 88263 - DNA, 25 bp, Artificial
  probe
  misc_feature (1)..(25): SEQ ID NO: 7409; WAN024BOM_at; Start 49; Stop 73
gctattattttaccattggtgacca

SEQ ID NO: 88264 - DNA, 25 bp, Artificial
  probe
  misc_feature (1)..(25): SEQ ID NO: 7409; WAN024BOM_at; Start 807; Stop 831
taatagaggagaaaaaagaaatgtc

SEQ ID NO: 88265 - DNA, 25 bp, Artificial
  probe
  misc_feature (1)..(25): SEQ ID NO: 7409; WAN024BOM_at; Start 156; Stop 180
gattgcaaatgttggattaactact

SEQ ID NO: 88266 - DNA, 25 bp, Artificial
  probe
  misc_feature (1)..(25): SEQ ID NO: 7409; WAN024BOM_at; Start 995; Stop 1019
tgggctggtcatcagtcttaggtaa

SEQ ID NO: 88267 - DNA, 25 bp, Artificial
  probe
  misc_feature (1)..(25): SEQ ID NO: 7409; WAN024BOM_at; Start 902; Stop 926
taatcggaaggccattttcaatcct

SEQ ID NO: 88268 - DNA, 25 bp, Artificial
  probe
  misc_feature (1)..(25): SEQ ID NO: 7409; WAN024BOM_at; Start 645; Stop 669
ggcaacaactctttttctcacatta

SEQ ID NO: 88269 - DNA, 25 bp, Artificial
  probe
  misc_feature (1)..(25): SEQ ID NO: 7409; WAN024BOM_at; Start 890; Stop 914
ttggtattatggtaatcggaaggcc

SEQ ID NO: 88270 - DNA, 25 bp, Artificial
  probe
  misc_feature (1)..(25): SEQ ID NO: 7409; WAN024BOM_at; Start 177; Stop 201
tacttatgggaatagaacgatttcg

SEQ ID NO: 88271 - DNA, 25 bp, Artificial
  probe
  misc_feature (1)..(25): SEQ ID NO: 6364; WAN024BON_at; Start 1124; Stop 1148
tgatatgtgcatatgcctcaatggc

SEQ ID NO: 88272 - DNA, 25 bp, Artificial
  probe
  misc_feature (1)..(25): SEQ ID NO: 6364; WAN024BON_at; Start 848; Stop 872
actctcccctgtattttcaatttgg

SEQ ID NO: 88273 - DNA, 25 bp, Artificial
  probe
  misc_feature (1)..(25): SEQ ID NO: 6364; WAN024BON_at; Start 437; Stop 461
tccgctttggaataggtagttttca

SEQ ID NO: 88274 - DNA, 25 bp, Artificial
  probe
  misc_feature (1)..(25): SEQ ID NO: 6364; WAN024BON_at; Start 1022; Stop 1046
ctatgtataaaaatcaagtggtatc

SEQ ID NO: 88275 - DNA, 25 bp, Artificial
  probe
  misc_feature (1)..(25): SEQ ID NO: 6364; WAN024BON_at; Start 602; Stop 626
catttggagttattgccctactgct

SEQ ID NO: 88276 - DNA, 25 bp, Artificial
  probe
  misc_feature (1)..(25): SEQ ID NO: 6364; WAN024BON_at; Start 219; Stop 243
cctttcagatcttagccgccctttg

SEQ ID NO: 88277 - DNA, 25 bp, Artificial
  probe
  misc_feature (1)..(25): SEQ ID NO: 6364; WAN024BON_at; Start 478; Stop 502
ccaggattttttctagccttgatgg

SEQ ID NO: 88278 - DNA, 25 bp, Artificial
  probe
  misc_feature (1)..(25): SEQ ID NO: 6364; WAN024BON_at; Start 827; Stop 851
gcaacgctgcttatgtgtattactc

SEQ ID NO: 88279 - DNA, 25 bp, Artificial
  probe
  misc_feature (1)..(25): SEQ ID NO: 6364; WAN024BON_at; Start 990; Stop 1014
catggctattatgaaggatttattc

SEQ ID NO: 88280 - DNA, 25 bp, Artificial
  probe
  misc_feature (1)..(25): SEQ ID NO: 6364; WAN024BON_at; Start 814; Stop 838
gcttcatatgggagcaacgctgctt

SEQ ID NO: 88281 - DNA, 25 bp, Artificial
  probe
  misc_feature (1)..(25): SEQ ID NO: 6364; WAN024BON_at; Start 422; Stop 446
gcatgacctatgatatccgctttgg

SEQ ID NO: 88282 - DNA, 25 bp, Artificial
  probe
  misc_feature (1)..(25): SEQ ID NO: 6364; WAN024BON_at; Start 99; Stop 123
actattaacgttgatgatacttccg

SEQ ID NO: 88283 - DNA, 25 bp, Artificial
  probe
  misc_feature (1)..(25): SEQ ID NO: 6364; WAN024BON_at; Start 57; Stop 81
aatgtggattccaagtgttcctata

SEQ ID NO: 88284 - DNA, 25 bp, Artificial
  probe
  misc_feature (1)..(25): SEQ ID NO: 6364; WAN024BON_at; Start 202; Stop 226
ggattaatatcaacatacctttcag

SEQ ID NO: 88285 - DNA, 25 bp, Artificial
  probe
  misc_feature (1)..(25): SEQ ID NO: 6364; WAN024BON_at; Start 406; Stop 430
tatagttttgaactaggcatgacct

SEQ ID NO: 88286 - DNA, 25 bp, Artificial
  probe
  misc_feature (1)..(25): SEQ ID NO: 6364; WAN024BON_at; Start 946; Stop 970
gcacagtttggttttattggttcta

SEQ ID NO: 88287 - DNA, 25 bp, Artificial
  probe
  misc_feature (1)..(25): SEQ ID NO: 6364; WAN024BON_at; Start 667; Stop 691
cacttatttatattgattccgtcga

SEQ ID NO: 88288 - DNA, 25 bp, Artificial
  probe
  misc_feature (1)..(25): SEQ ID NO: 6364; WAN024BON_at; Start 916; Stop 940
gctaatgataacttttggccgatga

SEQ ID NO: 88289 - DNA, 25 bp, Artificial
  probe
  misc_feature (1)..(25): SEQ ID NO: 6364; WAN024BON_at; Start 932; Stop 956
ggccgatgatttttgcacagtttgg

SEQ ID NO: 88290 - DNA, 25 bp, Artificial
  probe
  misc_feature (1)..(25): SEQ ID NO: 6364; WAN024BON_at; Start 1070; Stop 1094
tgttaatttcctcagttggtgcaaa

SEQ ID NO: 88291 - DNA, 25 bp, Artificial
  probe
  misc_feature (1)..(25): SEQ ID NO: 6364; WAN024BON_at; Start 722; Stop 746
catatttcggtgatttggaaacacc

SEQ ID NO: 88292 - DNA, 25 bp, Artificial
  probe
  misc_feature (1)..(25): SEQ ID NO: 6364; WAN024BON_at; Start 1138; Stop 1162
gcctcaatggctcatgttttagatg

SEQ ID NO: 88293 - DNA, 25 bp, Artificial
  probe
  misc_feature (1)..(25): SEQ ID NO: 6364; WAN024BON_at; Start 746; Stop 770
ctagaaaacttctattccagggagg

SEQ ID NO: 88294 - DNA, 25 bp, Artificial
  probe
  misc_feature (1)..(25): SEQ ID NO: 6364; WAN024BON_at; Start 1084; Stop 1108
gttggtgcaaatataattactggtg

SEQ ID NO: 88295 - DNA, 25 bp, Artificial
  probe
  misc_feature (1)..(25): SEQ ID NO: 6364; WAN024BON_at; Start 804; Stop 828
ggcaggttttgcttcatatgggagc

SEQ ID NO: 88296 - DNA, 25 bp, Artificial
  probe
  misc_feature (1)..(25): SEQ ID NO: 6364; WAN024BON_at; Start 588; Stop 612
tctacgatcagtggcatttggagtt

SEQ ID NO: 88297 - DNA, 25 bp, Artificial
  probe
  misc_feature (1)..(25): SEQ ID NO: 6364; WAN024BON_at; Start 460; Stop 484
cagtttatatataataacccaggat

SEQ ID NO: 88298 - DNA, 25 bp, Artificial
  probe
  misc_feature (1)..(25): SEQ ID NO: 6364; WAN024BON_at; Start 1109; Stop 1133
tgttaggtgtaagtatgatatgtgc

SEQ ID NO: 88299 - DNA, 25 bp, Artificial
  probe
  misc_feature (1)..(25): SEQ ID NO: 6364; WAN024BON_at; Start 616; Stop 640
gccctactgctagttttgagtgtgt

SEQ ID NO: 88300 - DNA, 25 bp, Artificial
  probe
  misc_feature (1)..(25): SEQ ID NO: 6364; WAN024BON_at; Start 235; Stop 259
cgccctttgatagctatagtatcgg

SEQ ID NO: 88301 - DNA, 25 bp, Artificial
  probe
  misc_feature (1)..(25): SEQ ID NO: 6364; WAN024BON_at; Start 709; Stop 733
ggtgctataagtacatatttcggtg

SEQ ID NO: 88302 - DNA, 25 bp, Artificial
  probe
  misc_feature (1)..(25): SEQ ID NO: 6364; WAN024BON_at; Start 114; Stop 138
gatacttccgtatgtgattatgaat

SEQ ID NO: 88303 - DNA, 25 bp, Artificial
  probe
  misc_feature (1)..(25): SEQ ID NO: 6364; WAN024BON_at; Start 493; Stop 517
gccttgatggttgtttgttattcac

SEQ ID NO: 88304 - DNA, 25 bp, Artificial
  probe
  misc_feature (1)..(25): SEQ ID NO: 6364; WAN024BON_at; Start 578; Stop 602
tggttgcaactctacgatcagtggc

SEQ ID NO: 88305 - DNA, 25 bp, Artificial
  probe
  misc_feature (1)..(25): SEQ ID NO: 6708; WAN024BOO_at; Start 893; Stop 917
taagagaaatatcgaaaggtttaca

SEQ ID NO: 88306 - DNA, 25 bp, Artificial
  probe
  misc_feature (1)..(25): SEQ ID NO: 6708; WAN024BOO_at; Start 538; Stop 562
ggaattcctacatatacaccaagag

SEQ ID NO: 88307 - DNA, 25 bp, Artificial
  probe
  misc_feature (1)..(25): SEQ ID NO: 6708; WAN024BOO_at; Start 646; Stop 670
cataaaaagcagttgtttttctggg

SEQ ID NO: 88308 - DNA, 25 bp, Artificial
  probe
  misc_feature (1)..(25): SEQ ID NO: 6708; WAN024BOO_at; Start 410; Stop 434
aaaatgaccctgaaaataatcgacg

SEQ ID NO: 88309 - DNA, 25 bp, Artificial
  probe
  misc_feature (1)..(25): SEQ ID NO: 6708; WAN024BOO_at; Start 249; Stop 273
gcctatatatgggatgctttttaaa

SEQ ID NO: 88310 - DNA, 25 bp, Artificial
  probe
  misc_feature (1)..(25): SEQ ID NO: 6708; WAN024BOO_at; Start 218; Stop 242
tagatactccttataaattatgtga

SEQ ID NO: 88311 - DNA, 25 bp, Artificial
  probe
  misc_feature (1)..(25): SEQ ID NO: 6708; WAN024BOO_at; Start 689; Stop 713
gaggatttatcaacccatatacaca

SEQ ID NO: 88312 - DNA, 25 bp, Artificial
  probe
  misc_feature (1)..(25): SEQ ID NO: 6708; WAN024BOO_at; Start 26; Stop 50
tagcatattttggtgaattacctga

SEQ ID NO: 88313 - DNA, 25 bp, Artificial
  probe
  misc_feature (1)..(25): SEQ ID NO: 6708; WAN024BOO_at; Start 681; Stop 705
gatttttagaggatttatcaaccca

SEQ ID NO: 88314 - DNA, 25 bp, Artificial
  probe
  misc_feature (1)..(25): SEQ ID NO: 6708; WAN024BOO_at; Start 708; Stop 732
tacacataaaatagagtacgattct

SEQ ID NO: 88315 - DNA, 25 bp, Artificial
  probe
  misc_feature (1)..(25): SEQ ID NO: 6708; WAN024BOO_at; Start 370; Stop 394
tacagcaaaatatatgaatatggtc

SEQ ID NO: 88316 - DNA, 25 bp, Artificial
  probe
  misc_feature (1)..(25): SEQ ID NO: 6708; WAN024BOO_at; Start 579; Stop 603
cccttggaagtatcagttaaataga

SEQ ID NO: 88317 - DNA, 25 bp, Artificial
  probe
  misc_feature (1)..(25): SEQ ID NO: 6708; WAN024BOO_at; Start 111; Stop 135
gacggatcaatgtgtaaatataaac

SEQ ID NO: 88318 - DNA, 25 bp, Artificial
  probe
  misc_feature (1)..(25): SEQ ID NO: 6708; WAN024BOO_at; Start 591; Stop 615
tcagttaaatagagtagaaacaggt

SEQ ID NO: 88319 - DNA, 25 bp, Artificial
  probe
  misc_feature (1)..(25): SEQ ID NO: 6708; WAN024BOO_at; Start 6; Stop 30
taaaaagttagctctaataatagca

SEQ ID NO: 88320 - DNA, 25 bp, Artificial
  probe
  misc_feature (1)..(25): SEQ ID NO: 6708; WAN024BOO_at; Start 329; Stop 353
gagatgtgttttcgtttttacctga

SEQ ID NO: 88321 - DNA, 25 bp, Artificial
  probe
  misc_feature (1)..(25): SEQ ID NO: 6708; WAN024BOO_at; Start 548; Stop 572
catatacaccaagagattgtgctga

SEQ ID NO: 88322 - DNA, 25 bp, Artificial
  probe
  misc_feature (1)..(25): SEQ ID NO: 6708; WAN024BOO_at; Start 919; Stop 943
cgatattatttcatctggaaaagga

SEQ ID NO: 88323 - DNA, 25 bp, Artificial
  probe
  misc_feature (1)..(25): SEQ ID NO: 6708; WAN024BOO_at; Start 352; Stop 376
gaaaatatattggataattacagca

SEQ ID NO: 88324 - DNA, 25 bp, Artificial
  probe
  misc_feature (1)..(25): SEQ ID NO: 6708; WAN024BOO_at; Start 756; Stop 780
aagagaaatgaagataacctttcct

SEQ ID NO: 88325 - DNA, 25 bp, Artificial
  probe
  misc_feature (1)..(25): SEQ ID NO: 6708; WAN024BOO_at; Start 236; Stop 260
tatgtgattacaagcctatatatgg

SEQ ID NO: 88326 - DNA, 25 bp, Artificial
  probe
  misc_feature (1)..(25): SEQ ID NO: 6708; WAN024BOO_at; Start 602; Stop 626
gagtagaaacaggtatttccaaaga

SEQ ID NO: 88327 - DNA, 25 bp, Artificial
  probe
  misc_feature (1)..(25): SEQ ID NO: 6708; WAN024BOO_at; Start 317; Stop 341
atatggtgctgggagatgtgttttc

SEQ ID NO: 88328 - DNA, 25 bp, Artificial
  probe
  misc_feature (1)..(25): SEQ ID NO: 6708; WAN024BOO_at; Start 37; Stop 61
ggtgaattacctgaatactctaaag

SEQ ID NO: 88329 - DNA, 25 bp, Artificial
  probe
  misc_feature (1)..(25): SEQ ID NO: 6708; WAN024BOO_at; Start 562; Stop 586
gattgtgctgatataaacccttgga

SEQ ID NO: 88330 - DNA, 25 bp, Artificial
  probe
  misc_feature (1)..(25): SEQ ID NO: 6708; WAN024BOO_at; Start 93; Stop 117
gattgatttatttctagtgacggat

SEQ ID NO: 88331 - DNA, 25 bp, Artificial
  probe
  misc_feature (1)..(25): SEQ ID NO: 6708; WAN024BOO_at; Start 816; Stop 840
tcaagggattgtagagaagaagcag

SEQ ID NO: 88332 - DNA, 25 bp, Artificial
  probe
  misc_feature (1)..(25): SEQ ID NO: 6708; WAN024BOO_at; Start 799; Stop 823
gcattttttattactaatcaaggga

SEQ ID NO: 88333 - DNA, 25 bp, Artificial
  probe
  misc_feature (1)..(25): SEQ ID NO: 6708; WAN024BOO_at; Start 424; Stop 448
aataatcgacgtttcatgtatgaag

SEQ ID NO: 88334 - DNA, 25 bp, Artificial
  probe
  misc_feature (1)..(25): SEQ ID NO: 6708; WAN024BOO_at; Start 445; Stop 469
gaagttggaatgaattaccaagacg

SEQ ID NO: 88335 - DNA, 25 bp, Artificial
  probe
  misc_feature (1)..(25): SEQ ID NO: 6708; WAN024BOO_at; Start 504; Stop 528
gacagaaggaattcagagaaaatat

SEQ ID NO: 88336 - DNA, 25 bp, Artificial
  probe
  misc_feature (1)..(25): SEQ ID NO: 6708; WAN024BOO_at; Start 304; Stop 328
tattgtgatttggatatggtgctgg

SEQ ID NO: 88337 - DNA, 25 bp, Artificial
  probe
  misc_feature (1)..(25): SEQ ID NO: 6708; WAN024BOO_at; Start 521; Stop 545
gaaaatatgaattaatgggaattcc

SEQ ID NO: 88338 - DNA, 25 bp, Artificial
  probe
  misc_feature (1)..(25): SEQ ID NO: 6708; WAN024BOO_at; Start 489; Stop 513
taaagtatttgatgagacagaagga

SEQ ID NO: 88339 - DNA, 25 bp, Artificial
  probe
  misc_feature (1)..(25): SEQ ID NO: 6848; WAN024BOP_at; Start 452; Stop 476
cacacctgtctgatttgttgagatt

SEQ ID NO: 88340 - DNA, 25 bp, Artificial
  probe
  misc_feature (1)..(25): SEQ ID NO: 6848; WAN024BOP_at; Start 543; Stop 567
ccctgattatatgttgttttctgaa

SEQ ID NO: 88341 - DNA, 25 bp, Artificial
  probe
  misc_feature (1)..(25): SEQ ID NO: 6848; WAN024BOP_at; Start 587; Stop 611
tgaaaccagggttagatggaaatcc

SEQ ID NO: 88342 - DNA, 25 bp, Artificial
  probe
  misc_feature (1)..(25): SEQ ID NO: 6848; WAN024BOP_at; Start 264; Stop 288
taaggtgtggatattgtggttacag

SEQ ID NO: 88343 - DNA, 25 bp, Artificial
  probe
  misc_feature (1)..(25): SEQ ID NO: 6848; WAN024BOP_at; Start 250; Stop 274
cgtcaatcttctagtaaggtgtgga

SEQ ID NO: 88344 - DNA, 25 bp, Artificial
  probe
  misc_feature (1)..(25): SEQ ID NO: 6848; WAN024BOP_at; Start 418; Stop 442
caacagaagattgataaaggaatca

SEQ ID NO: 88345 - DNA, 25 bp, Artificial
  probe
  misc_feature (1)..(25): SEQ ID NO: 6848; WAN024BOP_at; Start 289; Stop 313
gggatgaacaatgctcctgagatcg

SEQ ID NO: 88346 - DNA, 25 bp, Artificial
  probe
  misc_feature (1)..(25): SEQ ID NO: 6848; WAN024BOP_at; Start 511; Stop 535
gatgcgactgtttttatatcttccg

SEQ ID NO: 88347 - DNA, 25 bp, Artificial
  probe
  misc_feature (1)..(25): SEQ ID NO: 6848; WAN024BOP_at; Start 767; Stop 791
cacaagaatggaataaagtgattcc

SEQ ID NO: 88348 - DNA, 25 bp, Artificial
  probe
  misc_feature (1)..(25): SEQ ID NO: 6848; WAN024BOP_at; Start 637; Stop 661
tgtgcgaagtctaatcatccaatac

SEQ ID NO: 88349 - DNA, 25 bp, Artificial
  probe
  misc_feature (1)..(25): SEQ ID NO: 6848; WAN024BOP_at; Start 669; Stop 693
taccaaggagttgttgtatcaatat

SEQ ID NO: 88350 - DNA, 25 bp, Artificial
  probe
  misc_feature (1)..(25): SEQ ID NO: 6848; WAN024BOP_at; Start 606; Stop 630
aaatcctaagagaatttcaagttgg

SEQ ID NO: 88351 - DNA, 25 bp, Artificial
  probe
  misc_feature (1)..(25): SEQ ID NO: 6848; WAN024BOP_at; Start 698; Stop 722
cggaacacaattatatgatggacta

SEQ ID NO: 88352 - DNA, 25 bp, Artificial
  probe
  misc_feature (1)..(25): SEQ ID NO: 6848; WAN024BOP_at; Start 436; Stop 460
ggaatcatttctaaaacacacctgt

SEQ ID NO: 88353 - DNA, 25 bp, Artificial
  probe
  misc_feature (1)..(25): SEQ ID NO: 6848; WAN024BOP_at; Start 328; Stop 352
aattctgtggttcaaaatctccctg

SEQ ID NO: 88354 - DNA, 25 bp, Artificial
  probe
  misc_feature (1)..(25): SEQ ID NO: 6848; WAN024BOP_at; Start 527; Stop 551
tatcttccgataaaatccctgatta

SEQ ID NO: 88355 - DNA, 25 bp, Artificial
  probe
  misc_feature (1)..(25): SEQ ID NO: 6848; WAN024BOP_at; Start 782; Stop 806
aagtgattccattctctagttctcc

SEQ ID NO: 88356 - DNA, 25 bp, Artificial
  probe
  misc_feature (1)..(25): SEQ ID NO: 6848; WAN024BOP_at; Start 495; Stop 519
tggaggtatttggattgatgcgact

SEQ ID NO: 88357 - DNA, 25 bp, Artificial
  probe
  misc_feature (1)..(25): SEQ ID NO: 6848; WAN024BOP_at; Start 835; Stop 859
gaaacatttgataagaggatgctag

SEQ ID NO: 88358 - DNA, 25 bp, Artificial
  probe
  misc_feature (1)..(25): SEQ ID NO: 6848; WAN024BOP_at; Start 623; Stop 647
caagttggtatatttgtgcgaagtc

SEQ ID NO: 88359 - DNA, 25 bp, Artificial
  probe
  misc_feature (1)..(25): SEQ ID NO: 6848; WAN024BOP_at; Start 235; Stop 259
cgggaatcggctgaacgtcaatctt

SEQ ID NO: 88360 - DNA, 25 bp, Artificial
  probe
  misc_feature (1)..(25): SEQ ID NO: 6848; WAN024BOP_at; Start 476; Stop 500
tagaactgctaactctgtatggagg

SEQ ID NO: 88361 - DNA, 25 bp, Artificial
  probe
  misc_feature (1)..(25): SEQ ID NO: 6848; WAN024BOP_at; Start 340; Stop 364
caaaatctccctgataaagaggcag

SEQ ID NO: 88362 - DNA, 25 bp, Artificial
  probe
  misc_feature (1)..(25): SEQ ID NO: 6848; WAN024BOP_at; Start 753; Stop 777
aattgagacatatccacaagaatgg

SEQ ID NO: 88363 - DNA, 25 bp, Artificial
  probe
  misc_feature (1)..(25): SEQ ID NO: 6848; WAN024BOP_at; Start 301; Stop 325
gctcctgagatcgtaaagttatgtt

SEQ ID NO: 88364 - DNA, 25 bp, Artificial
  probe
  misc_feature (1)..(25): SEQ ID NO: 6848; WAN024BOP_at; Start 714; Stop 738
gatggactactttttaatgcatgat

SEQ ID NO: 88365 - DNA, 25 bp, Artificial
  probe
  misc_feature (1)..(25): SEQ ID NO: 6848; WAN024BOP_at; Start 402; Stop 426
ctttccaaatcatgttcaacagaag

SEQ ID NO: 88366 - DNA, 25 bp, Artificial
  probe
  misc_feature (1)..(25): SEQ ID NO: 6848; WAN024BOP_at; Start 222; Stop 246
agatagaattttacgggaatcggct

SEQ ID NO: 88367 - DNA, 25 bp, Artificial
  probe
  misc_feature (1)..(25): SEQ ID NO: 6848; WAN024BOP_at; Start 947; Stop 971
tactaagtgaaggagagattgatgc

SEQ ID NO: 88368 - DNA, 25 bp, Artificial
  probe
  misc_feature (1)..(25): SEQ ID NO: 6848; WAN024BOP_at; Start 909; Stop 933
tactgatatctgttatactgaaacc

SEQ ID NO: 88369 - DNA, 25 bp, Artificial
  probe
  misc_feature (1)..(25): SEQ ID NO: 6848; WAN024BOP_at; Start 683; Stop 707
tgtatcaatattggtcggaacacaa

SEQ ID NO: 88370 - DNA, 25 bp, Artificial
  probe
  misc_feature (1)..(25): SEQ ID NO: 6848; WAN024BOP_at; Start 851; Stop 875
ggatgctagaatatgtttatcaaca

SEQ ID NO: 88371 - DNA, 25 bp, Artificial
  probe
  misc_feature (1)..(25): SEQ ID NO: 6848; WAN024BOP_at; Start 654; Stop 678
tccaatacttgttcttaccaaggag

SEQ ID NO: 88372 - DNA, 25 bp, Artificial
  probe
  misc_feature (1)..(25): SEQ ID NO: 6848; WAN024BOP_at; Start 358; Stop 382
gaggcagttcttttaacggaagata

SEQ ID NO: 88373 - DNA, 25 bp, Artificial
  probe
  misc_feature (1)..(25): SEQ ID NO: 6402; WAN024BOQ_at; Start 653; Stop 677
caatttcgatttacaatacgctaga

SEQ ID NO: 88374 - DNA, 25 bp, Artificial
  probe
  misc_feature (1)..(25): SEQ ID NO: 6402; WAN024BOQ_at; Start 712; Stop 736
gatgttggaatttatacccaagctg

SEQ ID NO: 88375 - DNA, 25 bp, Artificial
  probe
  misc_feature (1)..(25): SEQ ID NO: 6402; WAN024BOQ_at; Start 811; Stop 835
catgctcaaggtaaaaaggaggaag

SEQ ID NO: 88376 - DNA, 25 bp, Artificial
  probe
  misc_feature (1)..(25): SEQ ID NO: 6402; WAN024BOQ_at; Start 728; Stop 752
cccaagctgtgaatataaactctgt

SEQ ID NO: 88377 - DNA, 25 bp, Artificial
  probe
  misc_feature (1)..(25): SEQ ID NO: 6402; WAN024BOQ_at; Start 832; Stop 856
gaagttcgcagggtaatgtccgcat

SEQ ID NO: 88378 - DNA, 25 bp, Artificial
  probe
  misc_feature (1)..(25): SEQ ID NO: 6402; WAN024BOQ_at; Start 1244; Stop 1268
aaccactggttacgagtgtagtgac

SEQ ID NO: 88379 - DNA, 25 bp, Artificial
  probe
  misc_feature (1)..(25): SEQ ID NO: 6402; WAN024BOQ_at; Start 998; Stop 1022
cgattgctttttcagagattgtggg

SEQ ID NO: 88380 - DNA, 25 bp, Artificial
  probe
  misc_feature (1)..(25): SEQ ID NO: 6402; WAN024BOQ_at; Start 538; Stop 562
tcgcaaggcattatgtggttaagtg

SEQ ID NO: 88381 - DNA, 25 bp, Artificial
  probe
  misc_feature (1)..(25): SEQ ID NO: 6402; WAN024BOQ_at; Start 797; Stop 821
gaatgaccaatttgcatgctcaagg

SEQ ID NO: 88382 - DNA, 25 bp, Artificial
  probe
  misc_feature (1)..(25): SEQ ID NO: 6402; WAN024BOQ_at; Start 49; Stop 73
acgatgattcttccttttgtaacgg

SEQ ID NO: 88383 - DNA, 25 bp, Artificial
  probe
  misc_feature (1)..(25): SEQ ID NO: 6402; WAN024BOQ_at; Start 193; Stop 217
caaattgcaaaagtaagtcataagg

SEQ ID NO: 88384 - DNA, 25 bp, Artificial
  probe
  misc_feature (1)..(25): SEQ ID NO: 6402; WAN024BOQ_at; Start 281; Stop 305
taacgatactggtatatctagccta

SEQ ID NO: 88385 - DNA, 25 bp, Artificial
  probe
  misc_feature (1)..(25): SEQ ID NO: 6402; WAN024BOQ_at; Start 763; Stop 787
ttagtagtgactctcagtgctgtac

SEQ ID NO: 88386 - DNA, 25 bp, Artificial
  probe
  misc_feature (1)..(25): SEQ ID NO: 6402; WAN024BOQ_at; Start 437; Stop 461
cagtagtcaagctaattggtgtcgt

SEQ ID NO: 88387 - DNA, 25 bp, Artificial
  probe
  misc_feature (1)..(25): SEQ ID NO: 6402; WAN024BOQ_at; Start 1039; Stop 1063
ccgacggataatgttcgatacttta

SEQ ID NO: 88388 - DNA, 25 bp, Artificial
  probe
  misc_feature (1)..(25): SEQ ID NO: 6402; WAN024BOQ_at; Start 89; Stop 113
gagtttttaatccaacattgatggg

SEQ ID NO: 88389 - DNA, 25 bp, Artificial
  probe
  misc_feature (1)..(25): SEQ ID NO: 6402; WAN024BOQ_at; Start 1022; Stop 1046
ggcgtcaaactctgattccgacgga

SEQ ID NO: 88390 - DNA, 25 bp, Artificial
  probe
  misc_feature (1)..(25): SEQ ID NO: 6402; WAN024BOQ_at; Start 423; Stop 447
tgttatgcgaaatacagtagtcaag

SEQ ID NO: 88391 - DNA, 25 bp, Artificial
  probe
  misc_feature (1)..(25): SEQ ID NO: 6402; WAN024BOQ_at; Start 868; Stop 892
aatagcatactaacctttccggtag

SEQ ID NO: 88392 - DNA, 25 bp, Artificial
  probe
  misc_feature (1)..(25): SEQ ID NO: 6402; WAN024BOQ_at; Start 66; Stop 90
tgtaacggttccctatgtaactaga

SEQ ID NO: 88393 - DNA, 25 bp, Artificial
  probe
  misc_feature (1)..(25): SEQ ID NO: 6402; WAN024BOQ_at; Start 1138; Stop 1162
ggagcggcgcttgtacatgtactcg

SEQ ID NO: 88394 - DNA, 25 bp, Artificial
  probe
  misc_feature (1)..(25): SEQ ID NO: 6402; WAN024BOQ_at; Start 1157; Stop 1181
tactcgttgagattattgtatgcgc

SEQ ID NO: 88395 - DNA, 25 bp, Artificial
  probe
  misc_feature (1)..(25): SEQ ID NO: 6402; WAN024BOQ_at; Start 781; Stop 805
gctgtacttcaacctagaatgacca

SEQ ID NO: 88396 - DNA, 25 bp, Artificial
  probe
  misc_feature (1)..(25): SEQ ID NO: 6402; WAN024BOQ_at; Start 1107; Stop 1131
ttttattgtcatacctttcggagga

SEQ ID NO: 88397 - DNA, 25 bp, Artificial
  probe
  misc_feature (1)..(25): SEQ ID NO: 6402; WAN024BOQ_at; Start 523; Stop 547
ttttctacgttaatttcgcaaggca

SEQ ID NO: 88398 - DNA, 25 bp, Artificial
  probe
  misc_feature (1)..(25): SEQ ID NO: 6402; WAN024BOQ_at; Start 120; Stop 144
taattataccgcctctatagtcgcc

SEQ ID NO: 88399 - DNA, 25 bp, Artificial
  probe
  misc_feature (1)..(25): SEQ ID NO: 6402; WAN024BOQ_at; Start 268; Stop 292
ttttcaacaactctaacgatactgg

SEQ ID NO: 88400 - DNA, 25 bp, Artificial
  probe
  misc_feature (1)..(25): SEQ ID NO: 6402; WAN024BOQ_at; Start 1383; Stop 1407
gacaagaacaataactcagaaagag

SEQ ID NO: 88401 - DNA, 25 bp, Artificial
  probe
  misc_feature (1)..(25): SEQ ID NO: 6402; WAN024BOQ_at; Start 575; Stop 599
tcaatttggttcgagttggagtaaa

SEQ ID NO: 88402 - DNA, 25 bp, Artificial
  probe
  misc_feature (1)..(25): SEQ ID NO: 6402; WAN024BOQ_at; Start 937; Stop 961
ttgggaaaagagtatgctgaaacat

SEQ ID NO: 88403 - DNA, 25 bp, Artificial
  probe
  misc_feature (1)..(25): SEQ ID NO: 6402; WAN024BOQ_at; Start 137; Stop 161
tagtcgcctatttttcaacatttgg

SEQ ID NO: 88404 - DNA, 25 bp, Artificial
  probe
  misc_feature (1)..(25): SEQ ID NO: 6402; WAN024BOQ_at; Start 1121; Stop 1145
ctttcggaggatataaaggagcggc

SEQ ID NO: 88405 - DNA, 25 bp, Artificial
  probe
  misc_feature (1)..(25): SEQ ID NO: 6402; WAN024BOQ_at; Start 1229; Stop 1253
tcagaatagcaattaaaccactggt

SEQ ID NO: 88406 - DNA, 25 bp, Artificial
  probe
  misc_feature (1)..(25): SEQ ID NO: 6402; WAN024BOQ_at; Start 1062; Stop 1086
tacaatttcagtaatgtcaggtgct

SEQ ID NO: 88407 - DNA, 25 bp, Artificial
  probe
  misc_feature (1)..(25): SEQ ID NO: 6746; WAN024BOR_at; Start 563; Stop 587
aaagccttcctttgttgacacatgc

SEQ ID NO: 88408 - DNA, 25 bp, Artificial
  probe
  misc_feature (1)..(25): SEQ ID NO: 6746; WAN024BOR_at; Start 923; Stop 947
tagcgttttttctaaagcatgagtc

SEQ ID NO: 88409 - DNA, 25 bp, Artificial
  probe
  misc_feature (1)..(25): SEQ ID NO: 6746; WAN024BOR_at; Start 494; Stop 518
gagagttagctgtgcaatatgacat

SEQ ID NO: 88410 - DNA, 25 bp, Artificial
  probe
  misc_feature (1)..(25): SEQ ID NO: 6746; WAN024BOR_at; Start 463; Stop 487
tactttgtaattggatgcgctgcta

SEQ ID NO: 88411 - DNA, 25 bp, Artificial
  probe
  misc_feature (1)..(25): SEQ ID NO: 6746; WAN024BOR_at; Start 878; Stop 902
gagcctactcattcggatatcctaa

SEQ ID NO: 88412 - DNA, 25 bp, Artificial
  probe
  misc_feature (1)..(25): SEQ ID NO: 6746; WAN024BOR_at; Start 479; Stop 503
gcgctgctattaatagagagttagc

SEQ ID NO: 88413 - DNA, 25 bp, Artificial
  probe
  misc_feature (1)..(25): SEQ ID NO: 6746; WAN024BOR_at; Start 673; Stop 697
gatagatatctccaagcaattgaaa

SEQ ID NO: 88414 - DNA, 25 bp, Artificial
  probe
  misc_feature (1)..(25): SEQ ID NO: 6746; WAN024BOR_at; Start 221; Stop 245
gatcatctggcttagcaaatgctaa

SEQ ID NO: 88415 - DNA, 25 bp, Artificial
  probe
  misc_feature (1)..(25): SEQ ID NO: 6746; WAN024BOR_at; Start 320; Stop 344
ttgattcacaaaatccagacattgt

SEQ ID NO: 88416 - DNA, 25 bp, Artificial
  probe
  misc_feature (1)..(25): SEQ ID NO: 6746; WAN024BOR_at; Start 861; Stop 885
tgatgcaggattccgcagagcctac

SEQ ID NO: 88417 - DNA, 25 bp, Artificial
  probe
  misc_feature (1)..(25): SEQ ID NO: 6746; WAN024BOR_at; Start 813; Stop 837
tgcaagctctgttagagagggcagt

SEQ ID NO: 88418 - DNA, 25 bp, Artificial
  probe
  misc_feature (1)..(25): SEQ ID NO: 6746; WAN024BOR_at; Start 372; Stop 396
cggtgtgaaacatgtgaatccatac

SEQ ID NO: 88419 - DNA, 25 bp, Artificial
  probe
  misc_feature (1)..(25): SEQ ID NO: 6746; WAN024BOR_at; Start 829; Stop 853
gagggcagtgagtatcttcaaacaa

SEQ ID NO: 88420 - DNA, 25 bp, Artificial
  probe
  misc_feature (1)..(25): SEQ ID NO: 6746; WAN024BOR_at; Start 359; Stop 383
ttaaggagagaaacggtgtgaaaca

SEQ ID NO: 88421 - DNA, 25 bp, Artificial
  probe
  misc_feature (1)..(25): SEQ ID NO: 6746; WAN024BOR_at; Start 624; Stop 648
aatggtttacaatcctgattcagca

SEQ ID NO: 88422 - DNA, 25 bp, Artificial
  probe
  misc_feature (1)..(25): SEQ ID NO: 6746; WAN024BOR_at; Start 733; Stop 757
ggtgaggaagaactacaaaatgatt

SEQ ID NO: 88423 - DNA, 25 bp, Artificial
  probe
  misc_feature (1)..(25): SEQ ID NO: 6746; WAN024BOR_at; Start 936; Stop 960
aaagcatgagtcatatgtcgttgcg

SEQ ID NO: 88424 - DNA, 25 bp, Artificial
  probe
  misc_feature (1)..(25): SEQ ID NO: 6746; WAN024BOR_at; Start 401; Stop 425
caaaggaaatgctctttgaggaaga

SEQ ID NO: 88425 - DNA, 25 bp, Artificial
  probe
  misc_feature (1)..(25): SEQ ID NO: 6746; WAN024BOR_at; Start 847; Stop 871
caaacaattggtagtgatgcaggat

SEQ ID NO: 88426 - DNA, 25 bp, Artificial
  probe
  misc_feature (1)..(25): SEQ ID NO: 6746; WAN024BOR_at; Start 786; Stop 810
ttcttatgcattcgcagggtgtagg

SEQ ID NO: 88427 - DNA, 25 bp, Artificial
  probe
  misc_feature (1)..(25): SEQ ID NO: 6746; WAN024BOR_at; Start 115; Stop 139
gatgcctctccagatcattcgcttg

SEQ ID NO: 88428 - DNA, 25 bp, Artificial
  probe
  misc_feature (1)..(25): SEQ ID NO: 6746; WAN024BOR_at; Start 236; Stop 260
caaatgctaaaggagattacgttgt

SEQ ID NO: 88429 - DNA, 25 bp, Artificial
  probe
  misc_feature (1)..(25): SEQ ID NO: 6746; WAN024BOR_at; Start 149; Stop 173
caaaaatagctgaaaaggattcacg

SEQ ID NO: 88430 - DNA, 25 bp, Artificial
  probe
  misc_feature (1)..(25): SEQ ID NO: 6746; WAN024BOR_at; Start 274; Stop 298
gatgatcaactaattccagaagcgt

SEQ ID NO: 88431 - DNA, 25 bp, Artificial
  probe
  misc_feature (1)..(25): SEQ ID NO: 6746; WAN024BOR_at; Start 387; Stop 411
gaatccatacttctcaaaggaaatg

SEQ ID NO: 88432 - DNA, 25 bp, Artificial
  probe
  misc_feature (1)..(25): SEQ ID NO: 6746; WAN024BOR_at; Start 575; Stop 599
tgttgacacatgcaaaaaggatttt

SEQ ID NO: 88433 - DNA, 25 bp, Artificial
  probe
  misc_feature (1)..(25): SEQ ID NO: 6746; WAN024BOR_at; Start 547; Stop 571
ggtgaggatttattgcaaagccttc

SEQ ID NO: 88434 - DNA, 25 bp, Artificial
  probe
  misc_feature (1)..(25): SEQ ID NO: 6746; WAN024BOR_at; Start 514; Stop 538
gacattgctcatgaattgaaagaga

SEQ ID NO: 88435 - DNA, 25 bp, Artificial
  probe
  misc_feature (1)..(25): SEQ ID NO: 6746; WAN024BOR_at; Start 188; Stop 212
acaaagagaagaatgaaggtgtggc

SEQ ID NO: 88436 - DNA, 25 bp, Artificial
  probe
  misc_feature (1)..(25): SEQ ID NO: 6746; WAN024BOR_at; Start 2; Stop 26
tgctaaagttttctgtcattgtacc

SEQ ID NO: 88437 - DNA, 25 bp, Artificial
  probe
  misc_feature (1)..(25): SEQ ID NO: 6746; WAN024BOR_at; Start 104; Stop 128
ttttggtgaatgatgcctctccaga

SEQ ID NO: 88438 - DNA, 25 bp, Artificial
  probe
  misc_feature (1)..(25): SEQ ID NO: 6746; WAN024BOR_at; Start 640; Stop 664
gattcagcaacaaggagtaaagcat

SEQ ID NO: 88439 - DNA, 25 bp, Artificial
  probe
  misc_feature (1)..(25): SEQ ID NO: 6746; WAN024BOR_at; Start 207; Stop 231
tgtggcgttagcaagatcatctggc

SEQ ID NO: 88440 - DNA, 25 bp, Artificial
  probe
  misc_feature (1)..(25): SEQ ID NO: 6746; WAN024BOR_at; Start 165; Stop 189
ggattcacgcattgtaattatagac

SEQ ID NO: 88441 - DNA, 25 bp, Artificial
  probe
  misc_feature (1)..(25): SEQ ID NO: 6618; WAN024BOS_at; Start 304; Stop 328
gccaccgttattgatagattcacaa

SEQ ID NO: 88442 - DNA, 25 bp, Artificial
  probe
  misc_feature (1)..(25): SEQ ID NO: 6618; WAN024BOS_at; Start 802; Stop 826
catatttcatatatagcagtcggta

SEQ ID NO: 88443 - DNA, 25 bp, Artificial
  probe
  misc_feature (1)..(25): SEQ ID NO: 6618; WAN024BOS_at; Start 506; Stop 530
taaaattcccagaaattgagggaga

SEQ ID NO: 88444 - DNA, 25 bp, Artificial
  probe
  misc_feature (1)..(25): SEQ ID NO: 6618; WAN024BOS_at; Start 351; Stop 375
tgcaggcatcgcttttaatcgagga

SEQ ID NO: 88445 - DNA, 25 bp, Artificial
  probe
  misc_feature (1)..(25): SEQ ID NO: 6618; WAN024BOS_at; Start 140; Stop 164
caacggtagttcagcaatttttatc

SEQ ID NO: 88446 - DNA, 25 bp, Artificial
  probe
  misc_feature (1)..(25): SEQ ID NO: 6618; WAN024BOS_at; Start 580; Stop 604
cacaaattacgatggttcaatgaga

SEQ ID NO: 88447 - DNA, 25 bp, Artificial
  probe
  misc_feature (1)..(25): SEQ ID NO: 6618; WAN024BOS_at; Start 9; Stop 33
aaaagttacagtatttacagctaca

SEQ ID NO: 88448 - DNA, 25 bp, Artificial
  probe
  misc_feature (1)..(25): SEQ ID NO: 6618; WAN024BOS_at; Start 366; Stop 390
taatcgaggatattcagagacagta

SEQ ID NO: 88449 - DNA, 25 bp, Artificial
  probe
  misc_feature (1)..(25): SEQ ID NO: 6618; WAN024BOS_at; Start 754; Stop 778
tatcatcagatccaacagaattctg

SEQ ID NO: 88450 - DNA, 25 bp, Artificial
  probe
  misc_feature (1)..(25): SEQ ID NO: 6618; WAN024BOS_at; Start 374; Stop 398
gatattcagagacagtaatcgttgg

SEQ ID NO: 88451 - DNA, 25 bp, Artificial
  probe
  misc_feature (1)..(25): SEQ ID NO: 6618; WAN024BOS_at; Start 333; Stop 357
tcaagataatcccaaatatgcaggc

SEQ ID NO: 88452 - DNA, 25 bp, Artificial
  probe
  misc_feature (1)..(25): SEQ ID NO: 6618; WAN024BOS_at; Start 771; Stop 795
gaattctgttcaagagacagctaga

SEQ ID NO: 88453 - DNA, 25 bp, Artificial
  probe
  misc_feature (1)..(25): SEQ ID NO: 6618; WAN024BOS_at; Start 67; Stop 91
gactctctagtgaagcaaactagta

SEQ ID NO: 88454 - DNA, 25 bp, Artificial
  probe
  misc_feature (1)..(25): SEQ ID NO: 6618; WAN024BOS_at; Start 817; Stop 841
gcagtcggtattattgtagcaatgg

SEQ ID NO: 88455 - DNA, 25 bp, Artificial
  probe
  misc_feature (1)..(25): SEQ ID NO: 6618; WAN024BOS_at; Start 24; Stop 48
tacagctacatataataggatgaac

SEQ ID NO: 88456 - DNA, 25 bp, Artificial
  probe
  misc_feature (1)..(25): SEQ ID NO: 6618; WAN024BOS_at; Start 223; Stop 247
gttaatgagggattggacagagcta

SEQ ID NO: 88457 - DNA, 25 bp, Artificial
  probe
  misc_feature (1)..(25): SEQ ID NO: 6618; WAN024BOS_at; Start 566; Stop 590
tagcaaggagaggacacaaattacg

SEQ ID NO: 88458 - DNA, 25 bp, Artificial
  probe
  misc_feature (1)..(25): SEQ ID NO: 6618; WAN024BOS_at; Start 459; Stop 483
tcttggtgataaagctgaagtctac

SEQ ID NO: 88459 - DNA, 25 bp, Artificial
  probe
  misc_feature (1)..(25): SEQ ID NO: 6618; WAN024BOS_at; Start 113; Stop 137
tagatgatggttcaacggatgatac

SEQ ID NO: 88460 - DNA, 25 bp, Artificial
  probe
  misc_feature (1)..(25): SEQ ID NO: 6618; WAN024BOS_at; Start 236; Stop 260
tggacagagctaagggacagttgtt

SEQ ID NO: 88461 - DNA, 25 bp, Artificial
  probe
  misc_feature (1)..(25): SEQ ID NO: 6618; WAN024BOS_at; Start 200; Stop 224
aaaatagtgggaagcatagagcggt

SEQ ID NO: 88462 - DNA, 25 bp, Artificial
  probe
  misc_feature (1)..(25): SEQ ID NO: 6618; WAN024BOS_at; Start 831; Stop 855
tgtagcaatgggaaaagtaaaagat

SEQ ID NO: 88463 - DNA, 25 bp, Artificial
  probe
  misc_feature (1)..(25): SEQ ID NO: 6618; WAN024BOS_at; Start 291; Stop 315
tccgaaagctatagccaccgttatt

SEQ ID NO: 88464 - DNA, 25 bp, Artificial
  probe
  misc_feature (1)..(25): SEQ ID NO: 6618; WAN024BOS_at; Start 277; Stop 301
gatgatgctctccttccgaaagcta

SEQ ID NO: 88465 - DNA, 25 bp, Artificial
  probe
  misc_feature (1)..(25): SEQ ID NO: 6618; WAN024BOS_at; Start 472; Stop 496
gctgaagtctacagaacagaaattt

SEQ ID NO: 88466 - DNA, 25 bp, Artificial
  probe
  misc_feature (1)..(25): SEQ ID NO: 6618; WAN024BOS_at; Start 610; Stop 634
tacatatctgattacctagaggacg

SEQ ID NO: 88467 - DNA, 25 bp, Artificial
  probe
  misc_feature (1)..(25): SEQ ID NO: 6618; WAN024BOS_at; Start 264; Stop 288
tatagtcgactcagatgatgctctc

SEQ ID NO: 88468 - DNA, 25 bp, Artificial
  probe
  misc_feature (1)..(25): SEQ ID NO: 6618; WAN024BOS_at; Start 558; Stop 582
gaatgaagtagcaaggagaggacac

SEQ ID NO: 88469 - DNA, 25 bp, Artificial
  probe
  misc_feature (1)..(25): SEQ ID NO: 6618; WAN024BOS_at; Start 672; Stop 696
tccaattgctcataaaatgatgaca

SEQ ID NO: 88470 - DNA, 25 bp, Artificial
  probe
  misc_feature (1)..(25): SEQ ID NO: 6618; WAN024BOS_at; Start 58; Stop 82
aaattgtatgactctctagtgaagc

SEQ ID NO: 88471 - DNA, 25 bp, Artificial
  probe
  misc_feature (1)..(25): SEQ ID NO: 6618; WAN024BOS_at; Start 422; Stop 446
tagattgtgataatttgcatcgagt

SEQ ID NO: 88472 - DNA, 25 bp, Artificial
  probe
  misc_feature (1)..(25): SEQ ID NO: 6618; WAN024BOS_at; Start 125; Stop 149
caacggatgatacctcaacggtagt

SEQ ID NO: 88473 - DNA, 25 bp, Artificial
  probe
  misc_feature (1)..(25): SEQ ID NO: 6618; WAN024BOS_at; Start 619; Stop 643
gattacctagaggacggcttgacga

SEQ ID NO: 88474 - DNA, 25 bp, Artificial
  probe
  misc_feature (1)..(25): SEQ ID NO: 6618; WAN024BOS_at; Start 634; Stop 658
ggcttgacgaagaatagtacgacta

SEQ ID NO: 88475 - DNA, 25 bp, Artificial
  probe
  misc_feature (1)..(25): SEQ ID NO: 7219; WAN024BOT_at; Start 973; Stop 997
gaagcaatcttgattagcagtgcct

SEQ ID NO: 88476 - DNA, 25 bp, Artificial
  probe
  misc_feature (1)..(25): SEQ ID NO: 7219; WAN024BOT_at; Start 1052; Stop 1076
tatttgtggattttgtgggtagaag

SEQ ID NO: 88477 - DNA, 25 bp, Artificial
  probe
  misc_feature (1)..(25): SEQ ID NO: 7219; WAN024BOT_at; Start 761; Stop 785
ccaatagaatttacagtggtaatgt

SEQ ID NO: 88478 - DNA, 25 bp, Artificial
  probe
  misc_feature (1)..(25): SEQ ID NO: 7219; WAN024BOT_at; Start 345; Stop 369
agtagttttatttgctaatgcagga

SEQ ID NO: 88479 - DNA, 25 bp, Artificial
  probe
  misc_feature (1)..(25): SEQ ID NO: 7219; WAN024BOT_at; Start 229; Stop 253
caaggattagtttatctggaattgc

SEQ ID NO: 88480 - DNA, 25 bp, Artificial
  probe
  misc_feature (1)..(25): SEQ ID NO: 7219; WAN024BOT_at; Start 518; Stop 542
tctactgcggtcttcttatatttaa

SEQ ID NO: 88481 - DNA, 25 bp, Artificial
  probe
  misc_feature (1)..(25): SEQ ID NO: 7219; WAN024BOT_at; Start 34; Stop 58
aatatattgttctccgtgtcaacag

SEQ ID NO: 88482 - DNA, 25 bp, Artificial
  probe
  misc_feature (1)..(25): SEQ ID NO: 7219; WAN024BOT_at; Start 424; Stop 448
gggtttgtccatccgaattcactag

SEQ ID NO: 88483 - DNA, 25 bp, Artificial
  probe
  misc_feature (1)..(25): SEQ ID NO: 7219; WAN024BOT_at; Start 482; Stop 506
tgtacgtctttaaccccaatagata

SEQ ID NO: 88484 - DNA, 25 bp, Artificial
  probe
  misc_feature (1)..(25): SEQ ID NO: 7219; WAN024BOT_at; Start 667; Stop 691
tatatagtaattgtagtaagttcgc

SEQ ID NO: 88485 - DNA, 25 bp, Artificial
  probe
  misc_feature (1)..(25): SEQ ID NO: 7219; WAN024BOT_at; Start 381; Stop 405
tgtattcatttttcgaactggaggg

SEQ ID NO: 88486 - DNA, 25 bp, Artificial
  probe
  misc_feature (1)..(25): SEQ ID NO: 7219; WAN024BOT_at; Start 435; Stop 459
tccgaattcactaggtctcatggct

SEQ ID NO: 88487 - DNA, 25 bp, Artificial
  probe
  misc_feature (1)..(25): SEQ ID NO: 7219; WAN024BOT_at; Start 780; Stop 804
taatgtttttgtagctgaatatgga

SEQ ID NO: 88488 - DNA, 25 bp, Artificial
  probe
  misc_feature (1)..(25): SEQ ID NO: 7219; WAN024BOT_at; Start 556; Stop 580
gccataacggactctagaacttctt

SEQ ID NO: 88489 - DNA, 25 bp, Artificial
  probe
  misc_feature (1)..(25): SEQ ID NO: 7219; WAN024BOT_at; Start 148; Stop 172
cacacagtgatttacggctttaata

SEQ ID NO: 88490 - DNA, 25 bp, Artificial
  probe
  misc_feature (1)..(25): SEQ ID NO: 7219; WAN024BOT_at; Start 410; Stop 434
taagaggatcattagggtttgtcca

SEQ ID NO: 88491 - DNA, 25 bp, Artificial
  probe
  misc_feature (1)..(25): SEQ ID NO: 7219; WAN024BOT_at; Start 507; Stop 531
caaaattattttctactgcggtctt

SEQ ID NO: 88492 - DNA, 25 bp, Artificial
  probe
  misc_feature (1)..(25): SEQ ID NO: 7219; WAN024BOT_at; Start 177; Stop 201
gaagctattttgtctatccttcgta

SEQ ID NO: 88493 - DNA, 25 bp, Artificial
  probe
  misc_feature (1)..(25): SEQ ID NO: 7219; WAN024BOT_at; Start 1010; Stop 1034
tgtttgaatcctatgggttttctgg

SEQ ID NO: 88494 - DNA, 25 bp, Artificial
  probe
  misc_feature (1)..(25): SEQ ID NO: 7219; WAN024BOT_at; Start 816; Stop 840
tgggaattttatagagggaacacta

SEQ ID NO: 88495 - DNA, 25 bp, Artificial
  probe
  misc_feature (1)..(25): SEQ ID NO: 7219; WAN024BOT_at; Start 47; Stop 71
ccgtgtcaacagttttgtatatgct

SEQ ID NO: 88496 - DNA, 25 bp, Artificial
  probe
  misc_feature (1)..(25): SEQ ID NO: 7219; WAN024BOT_at; Start 829; Stop 853
gagggaacactacctactttagcag

SEQ ID NO: 88497 - DNA, 25 bp, Artificial
  probe
  misc_feature (1)..(25): SEQ ID NO: 7219; WAN024BOT_at; Start 396; Stop 420
aactggagggttagtaagaggatca

SEQ ID NO: 88498 - DNA, 25 bp, Artificial
  probe
  misc_feature (1)..(25): SEQ ID NO: 7219; WAN024BOT_at; Start 704; Stop 728
tagcaactacctattttgaagtgag

SEQ ID NO: 88499 - DNA, 25 bp, Artificial
  probe
  misc_feature (1)..(25): SEQ ID NO: 7219; WAN024BOT_at; Start 841; Stop 865
cctactttagcaggagatgtaatta

SEQ ID NO: 88500 - DNA, 25 bp, Artificial
  probe
  misc_feature (1)..(25): SEQ ID NO: 7219; WAN024BOT_at; Start 78; Stop 102
tgtaaatattgcgaaaagtggtagt

SEQ ID NO: 88501 - DNA, 25 bp, Artificial
  probe
  misc_feature (1)..(25): SEQ ID NO: 7219; WAN024BOT_at; Start 715; Stop 739
tattttgaagtgagggaacctttca

SEQ ID NO: 88502 - DNA, 25 bp, Artificial
  probe
  misc_feature (1)..(25): SEQ ID NO: 7219; WAN024BOT_at; Start 448; Stop 472
ggtctcatggcttatgcaattacat

SEQ ID NO: 88503 - DNA, 25 bp, Artificial
  probe
  misc_feature (1)..(25): SEQ ID NO: 7219; WAN024BOT_at; Start 549; Stop 573
tatatttgccataacggactctaga

SEQ ID NO: 88504 - DNA, 25 bp, Artificial
  probe
  misc_feature (1)..(25): SEQ ID NO: 7219; WAN024BOT_at; Start 627; Stop 651
tagaggtattctatacaaggttgtt

SEQ ID NO: 88505 - DNA, 25 bp, Artificial
  probe
  misc_feature (1)..(25): SEQ ID NO: 7219; WAN024BOT_at; Start 266; Stop 290
tgatttactcaactctaagagtgag

SEQ ID NO: 88506 - DNA, 25 bp, Artificial
  probe
  misc_feature (1)..(25): SEQ ID NO: 7219; WAN024BOT_at; Start 130; Stop 154
gtatttttattgctacttcacacag

SEQ ID NO: 88507 - DNA, 25 bp, Artificial
  probe
  misc_feature (1)..(25): SEQ ID NO: 7219; WAN024BOT_at; Start 298; Stop 322
caatttaacaagactcattggtcag

SEQ ID NO: 88508 - DNA, 25 bp, Artificial
  probe
  misc_feature (1)..(25): SEQ ID NO: 7219; WAN024BOT_at; Start 987; Stop 1011
tagcagtgcctttatttcattaatg

SEQ ID NO: 88509 - DNA, 25 bp, Artificial
  probe
  misc_feature (1)..(25): SEQ ID NO: 6672; WAN024BOU_at; Start 140; Stop 164
tccttcacccaaaattaataaatga

SEQ ID NO: 88510 - DNA, 25 bp, Artificial
  probe
  misc_feature (1)..(25): SEQ ID NO: 6672; WAN024BOU_at; Start 148; Stop 172
ccaaaattaataaatgaaattcagg

SEQ ID NO: 88511 - DNA, 25 bp, Artificial
  probe
  misc_feature (1)..(25): SEQ ID NO: 6672; WAN024BOU_at; Start 26; Stop 50
cagccctttgctttgtcttatatag

SEQ ID NO: 88512 - DNA, 25 bp, Artificial
  probe
  misc_feature (1)..(25): SEQ ID NO: 6672; WAN024BOU_at; Start 81; Stop 105
tgaatgtaattttgctcacctagaa

SEQ ID NO: 88513 - DNA, 25 bp, Artificial
  probe
  misc_feature (1)..(25): SEQ ID NO: 6672; WAN024BOU_at; Start 29; Stop 53
ccctttgctttgtcttatataggag

SEQ ID NO: 88514 - DNA, 25 bp, Artificial
  probe
  misc_feature (1)..(25): SEQ ID NO: 6672; WAN024BOU_at; Start 113; Stop 137
ctgattttgcagtgtttgccgtagc

SEQ ID NO: 88515 - DNA, 25 bp, Artificial
  probe
  misc_feature (1)..(25): SEQ ID NO: 6672; WAN024BOU_at; Start 121; Stop 145
gcagtgtttgccgtagctctccttc

SEQ ID NO: 88516 - DNA, 25 bp, Artificial
  probe
  misc_feature (1)..(25): SEQ ID NO: 6672; WAN024BOU_at; Start 6; Stop 30
tctgaaattgagctttgaatcagcc

SEQ ID NO: 88517 - DNA, 25 bp, Artificial
  probe
  misc_feature (1)..(25): SEQ ID NO: 6672; WAN024BOU_at; Start 99; Stop 123
cctagaatctcaatctgattttgca

SEQ ID NO: 88518 - DNA, 25 bp, Artificial
  probe
  misc_feature (1)..(25): SEQ ID NO: 6672; WAN024BOU_at; Start 14; Stop 38
tgagctttgaatcagccctttgctt

SEQ ID NO: 88519 - DNA, 25 bp, Artificial
  probe
  misc_feature (1)..(25): SEQ ID NO: 6672; WAN024BOU_at; Start 76; Stop 100
ctaattgaatgtaattttgctcacc

SEQ ID NO: 88520 - DNA, 25 bp, Artificial
  probe
  misc_feature (1)..(25): SEQ ID NO: 6672; WAN024BOU_at; Start 35; Stop 59
gctttgtcttatataggagtatggg

SEQ ID NO: 88521 - DNA, 25 bp, Artificial
  probe
  misc_feature (1)..(25): SEQ ID NO: 6672; WAN024BOU_at; Start 86; Stop 110
gtaattttgctcacctagaatctca

SEQ ID NO: 88522 - DNA, 25 bp, Artificial
  probe
  misc_feature (1)..(25): SEQ ID NO: 6672; WAN024BOU_at; Start 109; Stop 133
caatctgattttgcagtgtttgccg

SEQ ID NO: 88523 - DNA, 25 bp, Artificial
  probe
  misc_feature (1)..(25): SEQ ID NO: 6672; WAN024BOU_at; Start 118; Stop 142
tttgcagtgtttgccgtagctctcc

SEQ ID NO: 88524 - DNA, 25 bp, Artificial
  probe
  misc_feature (1)..(25): SEQ ID NO: 6672; WAN024BOU_at; Start 8; Stop 32
tgaaattgagctttgaatcagccct

SEQ ID NO: 88525 - DNA, 25 bp, Artificial
  probe
  misc_feature (1)..(25): SEQ ID NO: 6672; WAN024BOU_at; Start 91; Stop 115
tttgctcacctagaatctcaatctg

SEQ ID NO: 88526 - DNA, 25 bp, Artificial
  probe
  misc_feature (1)..(25): SEQ ID NO: 6672; WAN024BOU_at; Start 66; Stop 90
tgaaaaccgactaattgaatgtaat

SEQ ID NO: 88527 - DNA, 25 bp, Artificial
  probe
  misc_feature (1)..(25): SEQ ID NO: 6672; WAN024BOU_at; Start 12; Stop 36
attgagctttgaatcagccctttgc

SEQ ID NO: 88528 - DNA, 25 bp, Artificial
  probe
  misc_feature (1)..(25): SEQ ID NO: 6672; WAN024BOU_at; Start 44; Stop 68
tatataggagtatgggttactttga

SEQ ID NO: 88529 - DNA, 25 bp, Artificial
  probe
  misc_feature (1)..(25): SEQ ID NO: 6672; WAN024BOU_at; Start 102; Stop 126
agaatctcaatctgattttgcagtg

SEQ ID NO: 88530 - DNA, 25 bp, Artificial
  probe
  misc_feature (1)..(25): SEQ ID NO: 6672; WAN024BOU_at; Start 133; Stop 157
gtagctctccttcacccaaaattaa

SEQ ID NO: 88531 - DNA, 25 bp, Artificial
  probe
  misc_feature (1)..(25): SEQ ID NO: 6672; WAN024BOU_at; Start 9; Stop 33
gaaattgagctttgaatcagccctt

SEQ ID NO: 88532 - DNA, 25 bp, Artificial
  probe
  misc_feature (1)..(25): SEQ ID NO: 6672; WAN024BOU_at; Start 16; Stop 40
agctttgaatcagccctttgctttg

SEQ ID NO: 88533 - DNA, 25 bp, Artificial
  probe
  misc_feature (1)..(25): SEQ ID NO: 6672; WAN024BOU_at; Start 71; Stop 95
accgactaattgaatgtaattttgc

SEQ ID NO: 88534 - DNA, 25 bp, Artificial
  probe
  misc_feature (1)..(25): SEQ ID NO: 6672; WAN024BOU_at; Start 22; Stop 46
gaatcagccctttgctttgtcttat

SEQ ID NO: 88535 - DNA, 25 bp, Artificial
  probe
  misc_feature (1)..(25): SEQ ID NO: 6672; WAN024BOU_at; Start 115; Stop 139
gattttgcagtgtttgccgtagctc

SEQ ID NO: 88536 - DNA, 25 bp, Artificial
  probe
  misc_feature (1)..(25): SEQ ID NO: 6672; WAN024BOU_at; Start 93; Stop 117
tgctcacctagaatctcaatctgat

SEQ ID NO: 88537 - DNA, 25 bp, Artificial
  probe
  misc_feature (1)..(25): SEQ ID NO: 6672; WAN024BOU_at; Start 82; Stop 106
gaatgtaattttgctcacctagaat

SEQ ID NO: 88538 - DNA, 25 bp, Artificial
  probe
  misc_feature (1)..(25): SEQ ID NO: 6672; WAN024BOU_at; Start 135; Stop 159
agctctccttcacccaaaattaata

SEQ ID NO: 88539 - DNA, 25 bp, Artificial
  probe
  misc_feature (1)..(25): SEQ ID NO: 6672; WAN024BOU_at; Start 123; Stop 147
agtgtttgccgtagctctccttcac

SEQ ID NO: 88540 - DNA, 25 bp, Artificial
  probe
  misc_feature (1)..(25): SEQ ID NO: 6672; WAN024BOU_at; Start 62; Stop 86
actttgaaaaccgactaattgaatg

SEQ ID NO: 88541 - DNA, 25 bp, Artificial
  probe
  misc_feature (1)..(25): SEQ ID NO: 6672; WAN024BOU_at; Start 122; Stop 146
cagtgtttgccgtagctctccttca

SEQ ID NO: 88542 - DNA, 25 bp, Artificial
  probe
  misc_feature (1)..(25): SEQ ID NO: 6672; WAN024BOU_at; Start 39; Stop 63
tgtcttatataggagtatgggttac

SEQ ID NO: 88543 - DNA, 25 bp, Artificial
  probe
  misc_feature (1)..(25): SEQ ID NO: 6766; WAN024BOV_at; Start 49; Stop 73
ttcgtattccacttcatctttctat

SEQ ID NO: 88544 - DNA, 25 bp, Artificial
  probe
  misc_feature (1)..(25): SEQ ID NO: 6766; WAN024BOV_at; Start 22; Stop 46
atgaatacgaatacccaagaaacgt

SEQ ID NO: 88545 - DNA, 25 bp, Artificial
  probe
  misc_feature (1)..(25): SEQ ID NO: 6766; WAN024BOV_at; Start 37; Stop 61
caagaaacgttattcgtattccact

SEQ ID NO: 88546 - DNA, 25 bp, Artificial
  probe
  misc_feature (1)..(25): SEQ ID NO: 6766; WAN024BOV_at; Start 14; Stop 38
ttgaaaaaatgaatacgaataccca

SEQ ID NO: 88547 - DNA, 25 bp, Artificial
  probe
  misc_feature (1)..(25): SEQ ID NO: 6766; WAN024BOV_at; Start 60; Stop 84
cttcatctttctatctattttttgc

SEQ ID NO: 88548 - DNA, 25 bp, Artificial
  probe
  misc_feature (1)..(25): SEQ ID NO: 6766; WAN024BOV_at; Start 41; Stop 65
aaacgttattcgtattccacttcat

SEQ ID NO: 88549 - DNA, 25 bp, Artificial
  probe
  misc_feature (1)..(25): SEQ ID NO: 6766; WAN024BOV_at; Start 57; Stop 81
ccacttcatctttctatctattttt

SEQ ID NO: 88550 - DNA, 25 bp, Artificial
  probe
  misc_feature (1)..(25): SEQ ID NO: 6766; WAN024BOV_at; Start 15; Stop 39
tgaaaaaatgaatacgaatacccaa

SEQ ID NO: 88551 - DNA, 25 bp, Artificial
  probe
  misc_feature (1)..(25): SEQ ID NO: 6766; WAN024BOV_at; Start 47; Stop 71
tattcgtattccacttcatctttct

SEQ ID NO: 88552 - DNA, 25 bp, Artificial
  probe
  misc_feature (1)..(25): SEQ ID NO: 6766; WAN024BOV_at; Start 21; Stop 45
aatgaatacgaatacccaagaaacg

SEQ ID NO: 88553 - DNA, 25 bp, Artificial
  probe
  misc_feature (1)..(25): SEQ ID NO: 6766; WAN024BOV_at; Start 46; Stop 70
ttattcgtattccacttcatctttc

SEQ ID NO: 88554 - DNA, 25 bp, Artificial
  probe
  misc_feature (1)..(25): SEQ ID NO: 6766; WAN024BOV_at; Start 54; Stop 78
attccacttcatctttctatctatt

SEQ ID NO: 88555 - DNA, 25 bp, Artificial
  probe
  misc_feature (1)..(25): SEQ ID NO: 6766; WAN024BOV_at; Start 58; Stop 82
cacttcatctttctatctatttttt

SEQ ID NO: 88556 - DNA, 25 bp, Artificial
  probe
  misc_feature (1)..(25): SEQ ID NO: 6766; WAN024BOV_at; Start 50; Stop 74
tcgtattccacttcatctttctatc

SEQ ID NO: 88557 - DNA, 25 bp, Artificial
  probe
  misc_feature (1)..(25): SEQ ID NO: 6766; WAN024BOV_at; Start 48; Stop 72
attcgtattccacttcatctttcta

SEQ ID NO: 88558 - DNA, 25 bp, Artificial
  probe
  misc_feature (1)..(25): SEQ ID NO: 6766; WAN024BOV_at; Start 56; Stop 80
tccacttcatctttctatctatttt

SEQ ID NO: 88559 - DNA, 25 bp, Artificial
  probe
  misc_feature (1)..(25): SEQ ID NO: 6766; WAN024BOV_at; Start 40; Stop 64
gaaacgttattcgtattccacttca

SEQ ID NO: 88560 - DNA, 25 bp, Artificial
  probe
  misc_feature (1)..(25): SEQ ID NO: 6766; WAN024BOV_at; Start 53; Stop 77
tattccacttcatctttctatctat

SEQ ID NO: 88561 - DNA, 25 bp, Artificial
  probe
  misc_feature (1)..(25): SEQ ID NO: 6766; WAN024BOV_at; Start 45; Stop 69
gttattcgtattccacttcatcttt

SEQ ID NO: 88562 - DNA, 25 bp, Artificial
  probe
  misc_feature (1)..(25): SEQ ID NO: 6766; WAN024BOV_at; Start 55; Stop 79
ttccacttcatctttctatctattt

SEQ ID NO: 88563 - DNA, 25 bp, Artificial
  probe
  misc_feature (1)..(25): SEQ ID NO: 6766; WAN024BOV_at; Start 44; Stop 68
cgttattcgtattccacttcatctt

SEQ ID NO: 88564 - DNA, 25 bp, Artificial
  probe
  misc_feature (1)..(25): SEQ ID NO: 6766; WAN024BOV_at; Start 42; Stop 66
aacgttattcgtattccacttcatc

SEQ ID NO: 88565 - DNA, 25 bp, Artificial
  probe
  misc_feature (1)..(25): SEQ ID NO: 6766; WAN024BOV_at; Start 51; Stop 75
cgtattccacttcatctttctatct

SEQ ID NO: 88566 - DNA, 25 bp, Artificial
  probe
  misc_feature (1)..(25): SEQ ID NO: 6766; WAN024BOV_at; Start 43; Stop 67
acgttattcgtattccacttcatct

SEQ ID NO: 88567 - DNA, 25 bp, Artificial
  probe
  misc_feature (1)..(25): SEQ ID NO: 6766; WAN024BOV_at; Start 59; Stop 83
acttcatctttctatctattttttg

SEQ ID NO: 88568 - DNA, 25 bp, Artificial
  probe
  misc_feature (1)..(25): SEQ ID NO: 6766; WAN024BOV_at; Start 52; Stop 76
gtattccacttcatctttctatcta

SEQ ID NO: 88569 - DNA, 25 bp, Artificial
  probe
  misc_feature (1)..(25): SEQ ID NO: 7568; WAN024BOW_at; Start 127; Stop 151
tacaacaaatacaatgaagaatcag

SEQ ID NO: 88570 - DNA, 25 bp, Artificial
  probe
  misc_feature (1)..(25): SEQ ID NO: 7568; WAN024BOW_at; Start 8; Stop 32
tcttgtattttattgatgaattgaa

SEQ ID NO: 88571 - DNA, 25 bp, Artificial
  probe
  misc_feature (1)..(25): SEQ ID NO: 7568; WAN024BOW_at; Start 162; Stop 186
ggctattgtaatactcatctgtttt

SEQ ID NO: 88572 - DNA, 25 bp, Artificial
  probe
  misc_feature (1)..(25): SEQ ID NO: 7568; WAN024BOW_at; Start 130; Stop 154
aacaaatacaatgaagaatcaggct

SEQ ID NO: 88573 - DNA, 25 bp, Artificial
  probe
  misc_feature (1)..(25): SEQ ID NO: 7568; WAN024BOW_at; Start 3; Stop 27
gcctgtcttgtattttattgatgaa

SEQ ID NO: 88574 - DNA, 25 bp, Artificial
  probe
  misc_feature (1)..(25): SEQ ID NO: 7568; WAN024BOW_at; Start 138; Stop 162
caatgaagaatcaggctatgtattg

SEQ ID NO: 88575 - DNA, 25 bp, Artificial
  probe
  misc_feature (1)..(25): SEQ ID NO: 7568; WAN024BOW_at; Start 143; Stop 167
aagaatcaggctatgtattggctat

SEQ ID NO: 88576 - DNA, 25 bp, Artificial
  probe
  misc_feature (1)..(25): SEQ ID NO: 7568; WAN024BOW_at; Start 169; Stop 193
gtaatactcatctgttttcaaaaag

SEQ ID NO: 88577 - DNA, 25 bp, Artificial
  probe
  misc_feature (1)..(25): SEQ ID NO: 7568; WAN024BOW_at; Start 149; Stop 173
caggctatgtattggctattgtaat

SEQ ID NO: 88578 - DNA, 25 bp, Artificial
  probe
  misc_feature (1)..(25): SEQ ID NO: 7568; WAN024BOW_at; Start 121; Stop 145
gatatttacaacaaatacaatgaag

SEQ ID NO: 88579 - DNA, 25 bp, Artificial
  probe
  misc_feature (1)..(25): SEQ ID NO: 7568; WAN024BOW_at; Start 82; Stop 106
tttgattgtggatatcaagaattga

SEQ ID NO: 88580 - DNA, 25 bp, Artificial
  probe
  misc_feature (1)..(25): SEQ ID NO: 7568; WAN024BOW_at; Start 145; Stop 169
gaatcaggctatgtattggctattg

SEQ ID NO: 88581 - DNA, 25 bp, Artificial
  probe
  misc_feature (1)..(25): SEQ ID NO: 7568; WAN024BOW_at; Start 85; Stop 109
gattgtggatatcaagaattgaatg

SEQ ID NO: 88582 - DNA, 25 bp, Artificial
  probe
  misc_feature (1)..(25): SEQ ID NO: 7568; WAN024BOW_at; Start 47; Stop 71
catcatctattttaaatgatgggaa

SEQ ID NO: 88583 - DNA, 25 bp, Artificial
  probe
  misc_feature (1)..(25): SEQ ID NO: 7568; WAN024BOW_at; Start 25; Stop 49
gaattgaaattaatcagtacttcat

SEQ ID NO: 88584 - DNA, 25 bp, Artificial
  probe
  misc_feature (1)..(25): SEQ ID NO: 7568; WAN024BOW_at; Start 148; Stop 172
tcaggctatgtattggctattgtaa

SEQ ID NO: 88585 - DNA, 25 bp, Artificial
  probe
  misc_feature (1)..(25): SEQ ID NO: 7568; WAN024BOW_at; Start 59; Stop 83
taaatgatgggaatgttagaacttt

SEQ ID NO: 88586 - DNA, 25 bp, Artificial
  probe
  misc_feature (1)..(25): SEQ ID NO: 7568; WAN024BOW_at; Start 22; Stop 46
gatgaattgaaattaatcagtactt

SEQ ID NO: 88587 - DNA, 25 bp, Artificial
  probe
  misc_feature (1)..(25): SEQ ID NO: 7568; WAN024BOW_at; Start 129; Stop 153
caacaaatacaatgaagaatcaggc

SEQ ID NO: 88588 - DNA, 25 bp, Artificial
  probe
  misc_feature (1)..(25): SEQ ID NO: 7568; WAN024BOW_at; Start 91; Stop 115
ggatatcaagaattgaatgacattt

SEQ ID NO: 88589 - DNA, 25 bp, Artificial
  probe
  misc_feature (1)..(25): SEQ ID NO: 7568; WAN024BOW_at; Start 136; Stop 160
tacaatgaagaatcaggctatgtat

SEQ ID NO: 88590 - DNA, 25 bp, Artificial
  probe
  misc_feature (1)..(25): SEQ ID NO: 7568; WAN024BOW_at; Start 132; Stop 156
caaatacaatgaagaatcaggctat

SEQ ID NO: 88591 - DNA, 25 bp, Artificial
  probe
  misc_feature (1)..(25): SEQ ID NO: 7568; WAN024BOW_at; Start 94; Stop 118
tatcaagaattgaatgacatttttt

SEQ ID NO: 88592 - DNA, 25 bp, Artificial
  probe
  misc_feature (1)..(25): SEQ ID NO: 7568; WAN024BOW_at; Start 105; Stop 129
gaatgacatttttttagatatttac

SEQ ID NO: 88593 - DNA, 25 bp, Artificial
  probe
  misc_feature (1)..(25): SEQ ID NO: 7568; WAN024BOW_at; Start 160; Stop 184
ttggctattgtaatactcatctgtt

SEQ ID NO: 88594 - DNA, 25 bp, Artificial
  probe
  misc_feature (1)..(25): SEQ ID NO: 7568; WAN024BOW_at; Start 141; Stop 165
tgaagaatcaggctatgtattggct

SEQ ID NO: 88595 - DNA, 25 bp, Artificial
  probe
  misc_feature (1)..(25): SEQ ID NO: 7568; WAN024BOW_at; Start 38; Stop 62
tcagtacttcatcatctattttaaa

SEQ ID NO: 88596 - DNA, 25 bp, Artificial
  probe
  misc_feature (1)..(25): SEQ ID NO: 7568; WAN024BOW_at; Start 142; Stop 166
gaagaatcaggctatgtattggcta

SEQ ID NO: 88597 - DNA, 25 bp, Artificial
  probe
  misc_feature (1)..(25): SEQ ID NO: 7568; WAN024BOW_at; Start 125; Stop 149
tttacaacaaatacaatgaagaatc

SEQ ID NO: 88598 - DNA, 25 bp, Artificial
  probe
  misc_feature (1)..(25): SEQ ID NO: 7568; WAN024BOW_at; Start 88; Stop 112
tgtggatatcaagaattgaatgaca

SEQ ID NO: 88599 - DNA, 25 bp, Artificial
  probe
  misc_feature (1)..(25): SEQ ID NO: 7568; WAN024BOW_at; Start 61; Stop 85
aatgatgggaatgttagaacttttg

SEQ ID NO: 88600 - DNA, 25 bp, Artificial
  probe
  misc_feature (1)..(25): SEQ ID NO: 7568; WAN024BOW_at; Start 134; Stop 158
aatacaatgaagaatcaggctatgt

SEQ ID NO: 88601 - DNA, 25 bp, Artificial
  probe
  misc_feature (1)..(25): SEQ ID NO: 7568; WAN024BOW_at; Start 30; Stop 54
gaaattaatcagtacttcatcatct

SEQ ID NO: 88602 - DNA, 25 bp, Artificial
  probe
  misc_feature (1)..(25): SEQ ID NO: 7568; WAN024BOW_at; Start 158; Stop 182
tattggctattgtaatactcatctg

SEQ ID NO: 88603 - DNA, 25 bp, Artificial
  probe
  misc_feature (1)..(25): SEQ ID NO: 6444; WAN024BOX_at; Start 185; Stop 209
ttcgttatgtagatctggtaattcc

SEQ ID NO: 88604 - DNA, 25 bp, Artificial
  probe
  misc_feature (1)..(25): SEQ ID NO: 6444; WAN024BOX_at; Start 342; Stop 366
tactaaagaaatttctactacacag

SEQ ID NO: 88605 - DNA, 25 bp, Artificial
  probe
  misc_feature (1)..(25): SEQ ID NO: 6444; WAN024BOX_at; Start 8; Stop 32
gagtgattacttacgggacttttga

SEQ ID NO: 88606 - DNA, 25 bp, Artificial
  probe
  misc_feature (1)..(25): SEQ ID NO: 6444; WAN024BOX_at; Start 253; Stop 277
tatgctgatatctttgttattggtg

SEQ ID NO: 88607 - DNA, 25 bp, Artificial
  probe
  misc_feature (1)..(25): SEQ ID NO: 6444; WAN024BOX_at; Start 364; Stop 388
cagataaaagaagacttaaacaaga

SEQ ID NO: 88608 - DNA, 25 bp, Artificial
  probe
  misc_feature (1)..(25): SEQ ID NO: 6444; WAN024BOX_at; Start 320; Stop 344
tagaagtagtatatttacctcgtac

SEQ ID NO: 88609 - DNA, 25 bp, Artificial
  probe
  misc_feature (1)..(25): SEQ ID NO: 6444; WAN024BOX_at; Start 264; Stop 288
ctttgttattggtgatgattgggaa

SEQ ID NO: 88610 - DNA, 25 bp, Artificial
  probe
  misc_feature (1)..(25): SEQ ID NO: 6444; WAN024BOX_at; Start 49; Stop 73
catatcaatttattgaagcgtgcta

SEQ ID NO: 88611 - DNA, 25 bp, Artificial
  probe
  misc_feature (1)..(25): SEQ ID NO: 6444; WAN024BOX_at; Start 59; Stop 83
tattgaagcgtgctaaagatttggg

SEQ ID NO: 88612 - DNA, 25 bp, Artificial
  probe
  misc_feature (1)..(25): SEQ ID NO: 6444; WAN024BOX_at; Start 36; Stop 60
gcttcattacggtcatatcaattta

SEQ ID NO: 88613 - DNA, 25 bp, Artificial
  probe
  misc_feature (1)..(25): SEQ ID NO: 6444; WAN024BOX_at; Start 81; Stop 105
gggagattatttaatagtagctcta

SEQ ID NO: 88614 - DNA, 25 bp, Artificial
  probe
  misc_feature (1)..(25): SEQ ID NO: 6444; WAN024BOX_at; Start 165; Stop 189
taaaattttgcttgaatctattcgt

SEQ ID NO: 88615 - DNA, 25 bp, Artificial
  probe
  misc_feature (1)..(25): SEQ ID NO: 6444; WAN024BOX_at; Start 142; Stop 166
tcatatttcaattatcaacagcgta

SEQ ID NO: 88616 - DNA, 25 bp, Artificial
  probe
  misc_feature (1)..(25): SEQ ID NO: 6444; WAN024BOX_at; Start 103; Stop 127
ctatctactgatgaatttaatcttc

SEQ ID NO: 88617 - DNA, 25 bp, Artificial
  probe
  misc_feature (1)..(25): SEQ ID NO: 6444; WAN024BOX_at; Start 154; Stop 178
tatcaacagcgtaaaattttgcttg

SEQ ID NO: 88618 - DNA, 25 bp, Artificial
  probe
  misc_feature (1)..(25): SEQ ID NO: 6444; WAN024BOX_at; Start 278; Stop 302
atgattgggaaggtaagtttgattt

SEQ ID NO: 88619 - DNA, 25 bp, Artificial
  probe
  misc_feature (1)..(25): SEQ ID NO: 6444; WAN024BOX_at; Start 238; Stop 262
gatgtaaagaaatattatgctgata

SEQ ID NO: 88620 - DNA, 25 bp, Artificial
  probe
  misc_feature (1)..(25): SEQ ID NO: 6444; WAN024BOX_at; Start 160; Stop 184
cagcgtaaaattttgcttgaatcta

SEQ ID NO: 88621 - DNA, 25 bp, Artificial
  probe
  misc_feature (1)..(25): SEQ ID NO: 6444; WAN024BOX_at; Start 200; Stop 224
tggtaattcctgagatttcatggga

SEQ ID NO: 88622 - DNA, 25 bp, Artificial
  probe
  misc_feature (1)..(25): SEQ ID NO: 6444; WAN024BOX_at; Start 17; Stop 41
cttacgggacttttgatttgcttca

SEQ ID NO: 88623 - DNA, 25 bp, Artificial
  probe
  misc_feature (1)..(25): SEQ ID NO: 6444; WAN024BOX_at; Start 360; Stop 384
tacacagataaaagaagacttaaac

SEQ ID NO: 88624 - DNA, 25 bp, Artificial
  probe
  misc_feature (1)..(25): SEQ ID NO: 6444; WAN024BOX_at; Start 226; Stop 250
caaaaacgagaagatgtaaagaaat

SEQ ID NO: 88625 - DNA, 25 bp, Artificial
  probe
  misc_feature (1)..(25): SEQ ID NO: 6444; WAN024BOX_at; Start 67; Stop 91
cgtgctaaagatttgggagattatt

SEQ ID NO: 88626 - DNA, 25 bp, Artificial
  probe
  misc_feature (1)..(25): SEQ ID NO: 6444; WAN024BOX_at; Start 123; Stop 147
tcttcaaaaagataagatttcatat

SEQ ID NO: 88627 - DNA, 25 bp, Artificial
  probe
  misc_feature (1)..(25): SEQ ID NO: 6444; WAN024BOX_at; Start 204; Stop 228
aattcctgagatttcatgggaacaa

SEQ ID NO: 88628 - DNA, 25 bp, Artificial
  probe
  misc_feature (1)..(25): SEQ ID NO: 6444; WAN024BOX_at; Start 2; Stop 26
tgaagagagtgattacttacgggac

SEQ ID NO: 88629 - DNA, 25 bp, Artificial
  probe
  misc_feature (1)..(25): SEQ ID NO: 6444; WAN024BOX_at; Start 217; Stop 241
tcatgggaacaaaaacgagaagatg

SEQ ID NO: 88630 - DNA, 25 bp, Artificial
  probe
  misc_feature (1)..(25): SEQ ID NO: 6444; WAN024BOX_at; Start 355; Stop 379
tctactacacagataaaagaagact

SEQ ID NO: 88631 - DNA, 25 bp, Artificial
  probe
  misc_feature (1)..(25): SEQ ID NO: 6444; WAN024BOX_at; Start 326; Stop 350
tagtatatttacctcgtactaaaga

SEQ ID NO: 88632 - DNA, 25 bp, Artificial
  probe
  misc_feature (1)..(25): SEQ ID NO: 6444; WAN024BOX_at; Start 178; Stop 202
gaatctattcgttatgtagatctgg

SEQ ID NO: 88633 - DNA, 25 bp, Artificial
  probe
  misc_feature (1)..(25): SEQ ID NO: 6444; WAN024BOX_at; Start 293; Stop 317
agtttgattttttgaaagatgaggg

SEQ ID NO: 88634 - DNA, 25 bp, Artificial
  probe
  misc_feature (1)..(25): SEQ ID NO: 6444; WAN024BOX_at; Start 190; Stop 214
tatgtagatctggtaattcctgaga

SEQ ID NO: 88635 - DNA, 25 bp, Artificial
  probe
  misc_feature (1)..(25): SEQ ID NO: 6444; WAN024BOX_at; Start 93; Stop 117
aatagtagctctatctactgatgaa

SEQ ID NO: 88636 - DNA, 25 bp, Artificial
  probe
  misc_feature (1)..(25): SEQ ID NO: 6444; WAN024BOX_at; Start 63; Stop 87
gaagcgtgctaaagatttgggagat

SEQ ID NO: 88637 - DNA, 25 bp, Artificial
  probe
  misc_feature (1)..(25): SEQ ID NO: 6661; WAN024BOY_at; Start 369; Stop 393
tatttttccatttgatgaggttcca

SEQ ID NO: 88638 - DNA, 25 bp, Artificial
  probe
  misc_feature (1)..(25): SEQ ID NO: 6661; WAN024BOY_at; Start 643; Stop 667
ccggtaagaaatgtagagtatgttc

SEQ ID NO: 88639 - DNA, 25 bp, Artificial
  probe
  misc_feature (1)..(25): SEQ ID NO: 6661; WAN024BOY_at; Start 449; Stop 473
tatatgtgatgaggatgttgccaac

SEQ ID NO: 88640 - DNA, 25 bp, Artificial
  probe
  misc_feature (1)..(25): SEQ ID NO: 6661; WAN024BOY_at; Start 180; Stop 204
tatgacacgtgagaattatgataac

SEQ ID NO: 88641 - DNA, 25 bp, Artificial
  probe
  misc_feature (1)..(25): SEQ ID NO: 6661; WAN024BOY_at; Start 232; Stop 256
ggagaagagttttatttacaatcac

SEQ ID NO: 88642 - DNA, 25 bp, Artificial
  probe
  misc_feature (1)..(25): SEQ ID NO: 6661; WAN024BOY_at; Start 773; Stop 797
tgaagttgccacctttagaagaacg

SEQ ID NO: 88643 - DNA, 25 bp, Artificial
  probe
  misc_feature (1)..(25): SEQ ID NO: 6661; WAN024BOY_at; Start 760; Stop 784
tatggtgagtacatgaagttgccac

SEQ ID NO: 88644 - DNA, 25 bp, Artificial
  probe
  misc_feature (1)..(25): SEQ ID NO: 6661; WAN024BOY_at; Start 396; Stop 420
taatgagtcagaaaatgagagacag

SEQ ID NO: 88645 - DNA, 25 bp, Artificial
  probe
  misc_feature (1)..(25): SEQ ID NO: 6661; WAN024BOY_at; Start 107; Stop 131
taattggtggaagtgctcttggagc

SEQ ID NO: 88646 - DNA, 25 bp, Artificial
  probe
  misc_feature (1)..(25): SEQ ID NO: 6661; WAN024BOY_at; Start 201; Stop 225
taactttttgagagtagctgaacag

SEQ ID NO: 88647 - DNA, 25 bp, Artificial
  probe
  misc_feature (1)..(25): SEQ ID NO: 6661; WAN024BOY_at; Start 269; Stop 293
gaaaatcaccctattcttacagtaa

SEQ ID NO: 88648 - DNA, 25 bp, Artificial
  probe
  misc_feature (1)..(25): SEQ ID NO: 6661; WAN024BOY_at; Start 9; Stop 33
ttacagcgcagatgaattagacatg

SEQ ID NO: 88649 - DNA, 25 bp, Artificial
  probe
  misc_feature (1)..(25): SEQ ID NO: 6661; WAN024BOY_at; Start 142; Stop 166
gaaggatttataccatgggatgacg

SEQ ID NO: 88650 - DNA, 25 bp, Artificial
  probe
  misc_feature (1)..(25): SEQ ID NO: 6661; WAN024BOY_at; Start 514; Stop 538
gctattctaaggagatgcattcatt

SEQ ID NO: 88651 - DNA, 25 bp, Artificial
  probe
  misc_feature (1)..(25): SEQ ID NO: 6661; WAN024BOY_at; Start 622; Stop 646
gcattggcttgtttagattttccgg

SEQ ID NO: 88652 - DNA, 25 bp, Artificial
  probe
  misc_feature (1)..(25): SEQ ID NO: 6661; WAN024BOY_at; Start 483; Stop 507
ggctcctgagaatttgattcaaggt

SEQ ID NO: 88653 - DNA, 25 bp, Artificial
  probe
  misc_feature (1)..(25): SEQ ID NO: 6661; WAN024BOY_at; Start 320; Stop 344
tagagtatgcccaaaggaatttaaa

SEQ ID NO: 88654 - DNA, 25 bp, Artificial
  probe
  misc_feature (1)..(25): SEQ ID NO: 6661; WAN024BOY_at; Start 823; Stop 847
gatttaggaacatatggaaaggaag

SEQ ID NO: 88655 - DNA, 25 bp, Artificial
  probe
  misc_feature (1)..(25): SEQ ID NO: 6661; WAN024BOY_at; Start 498; Stop 522
gattcaaggtttaaaagctattcta

SEQ ID NO: 88656 - DNA, 25 bp, Artificial
  probe
  misc_feature (1)..(25): SEQ ID NO: 6661; WAN024BOY_at; Start 742; Stop 766
caatacttgactacacattatggtg

SEQ ID NO: 88657 - DNA, 25 bp, Artificial
  probe
  misc_feature (1)..(25): SEQ ID NO: 6661; WAN024BOY_at; Start 469; Stop 493
ccaactgtttctaaggctcctgaga

SEQ ID NO: 88658 - DNA, 25 bp, Artificial
  probe
  misc_feature (1)..(25): SEQ ID NO: 6661; WAN024BOY_at; Start 809; Stop 833
gaccatatttgattgatttaggaac

SEQ ID NO: 88659 - DNA, 25 bp, Artificial
  probe
  misc_feature (1)..(25): SEQ ID NO: 6661; WAN024BOY_at; Start 307; Stop 331
gagactttgttcttagagtatgccc

SEQ ID NO: 88660 - DNA, 25 bp, Artificial
  probe
  misc_feature (1)..(25): SEQ ID NO: 6661; WAN024BOY_at; Start 163; Stop 187
gacgatattgatgttggtatgacac

SEQ ID NO: 88661 - DNA, 25 bp, Artificial
  probe
  misc_feature (1)..(25): SEQ ID NO: 6661; WAN024BOY_at; Start 217; Stop 241
gctgaacagtatttaggagaagagt

SEQ ID NO: 88662 - DNA, 25 bp, Artificial
  probe
  misc_feature (1)..(25): SEQ ID NO: 6661; WAN024BOY_at; Start 123; Stop 147
tcttggagcaatacgtcatgaagga

SEQ ID NO: 88663 - DNA, 25 bp, Artificial
  probe
  misc_feature (1)..(25): SEQ ID NO: 6661; WAN024BOY_at; Start 606; Stop 630
tggaacaaatcaatctgcattggct

SEQ ID NO: 88664 - DNA, 25 bp, Artificial
  probe
  misc_feature (1)..(25): SEQ ID NO: 6661; WAN024BOY_at; Start 727; Stop 751
cctggtgattttcatcaatacttga

SEQ ID NO: 88665 - DNA, 25 bp, Artificial
  probe
  misc_feature (1)..(25): SEQ ID NO: 6661; WAN024BOY_at; Start 382; Stop 406
gatgaggttccagataatgagtcag

SEQ ID NO: 88666 - DNA, 25 bp, Artificial
  probe
  misc_feature (1)..(25): SEQ ID NO: 6661; WAN024BOY_at; Start 788; Stop 812
tagaagaacgtgttgggcatagacc

SEQ ID NO: 88667 - DNA, 25 bp, Artificial
  probe
  misc_feature (1)..(25): SEQ ID NO: 6661; WAN024BOY_at; Start 709; Stop 733
gaaatcacaattttattacctggtg

SEQ ID NO: 88668 - DNA, 25 bp, Artificial
  probe
  misc_feature (1)..(25): SEQ ID NO: 6661; WAN024BOY_at; Start 248; Stop 272
tacaatcaccctcctctgatagaaa

SEQ ID NO: 88669 - DNA, 25 bp, Artificial
  probe
  misc_feature (1)..(25): SEQ ID NO: 6661; WAN024BOY_at; Start 28; Stop 52
gacatgattcagaagcttgaactca

SEQ ID NO: 88670 - DNA, 25 bp, Artificial
  probe
  misc_feature (1)..(25): SEQ ID NO: 6661; WAN024BOY_at; Start 411; Stop 435
tgagagacagtttaaagcggtacag

SEQ ID NO: 88671 - DNA, 25 bp, Artificial
  probe
  misc_feature (1)..(25): SEQ ID NO: 6689; WAN024BOZ_at; Start 978; Stop 1002
gagtgggctttatattattttcgga

SEQ ID NO: 88672 - DNA, 25 bp, Artificial
  probe
  misc_feature (1)..(25): SEQ ID NO: 6689; WAN024BOZ_at; Start 125; Stop 149
tccgagaaggattttcagatttaat

SEQ ID NO: 88673 - DNA, 25 bp, Artificial
  probe
  misc_feature (1)..(25): SEQ ID NO: 6689; WAN024BOZ_at; Start 610; Stop 634
ggtaataattctagctacttgacta

SEQ ID NO: 88674 - DNA, 25 bp, Artificial
  probe
  misc_feature (1)..(25): SEQ ID NO: 6689; WAN024BOZ_at; Start 166; Stop 190
tatgctgtagggaaaagtagtctgt

SEQ ID NO: 88675 - DNA, 25 bp, Artificial
  probe
  misc_feature (1)..(25): SEQ ID NO: 6689; WAN024BOZ_at; Start 644; Stop 668
aactgctagggagcgaggtcactaa

SEQ ID NO: 88676 - DNA, 25 bp, Artificial
  probe
  misc_feature (1)..(25): SEQ ID NO: 6689; WAN024BOZ_at; Start 870; Stop 894
tatgtttagtacagcatttactcgc

SEQ ID NO: 88677 - DNA, 25 bp, Artificial
  probe
  misc_feature (1)..(25): SEQ ID NO: 6689; WAN024BOZ_at; Start 474; Stop 498
catagcgtttctgtttcacggatct

SEQ ID NO: 88678 - DNA, 25 bp, Artificial
  probe
  misc_feature (1)..(25): SEQ ID NO: 6689; WAN024BOZ_at; Start 778; Stop 802
aaaacagtttcaaatgcacctcagg

SEQ ID NO: 88679 - DNA, 25 bp, Artificial
  probe
  misc_feature (1)..(25): SEQ ID NO: 6689; WAN024BOZ_at; Start 698; Stop 722
cgactcgtcttggttttatattgta

SEQ ID NO: 88680 - DNA, 25 bp, Artificial
  probe
  misc_feature (1)..(25): SEQ ID NO: 6689; WAN024BOZ_at; Start 41; Stop 65
tattagtcgttgtcaataggatgcg

SEQ ID NO: 88681 - DNA, 25 bp, Artificial
  probe
  misc_feature (1)..(25): SEQ ID NO: 6689; WAN024BOZ_at; Start 934; Stop 958
gcagctttacaaccatttatgcaac

SEQ ID NO: 88682 - DNA, 25 bp, Artificial
  probe
  misc_feature (1)..(25): SEQ ID NO: 6689; WAN024BOZ_at; Start 187; Stop 211
ctgtatttttcagaccatgcgtata

SEQ ID NO: 88683 - DNA, 25 bp, Artificial
  probe
  misc_feature (1)..(25): SEQ ID NO: 6689; WAN024BOZ_at; Start 793; Stop 817
gcacctcaggaagtgaccaatttta

SEQ ID NO: 88684 - DNA, 25 bp, Artificial
  probe
  misc_feature (1)..(25): SEQ ID NO: 6689; WAN024BOZ_at; Start 490; Stop 514
cacggatctatcatttatttcttac

SEQ ID NO: 88685 - DNA, 25 bp, Artificial
  probe
  misc_feature (1)..(25): SEQ ID NO: 6689; WAN024BOZ_at; Start 924; Stop 948
tatagctattgcagctttacaacca

SEQ ID NO: 88686 - DNA, 25 bp, Artificial
  probe
  misc_feature (1)..(25): SEQ ID NO: 6689; WAN024BOZ_at; Start 634; Stop 658
aaaatatttgaactgctagggagcg

SEQ ID NO: 88687 - DNA, 25 bp, Artificial
  probe
  misc_feature (1)..(25): SEQ ID NO: 6689; WAN024BOZ_at; Start 269; Stop 293
gtatttttctattctcctcagcatg

SEQ ID NO: 88688 - DNA, 25 bp, Artificial
  probe
  misc_feature (1)..(25): SEQ ID NO: 6689; WAN024BOZ_at; Start 110; Stop 134
tctatgcaggaaatatccgagaagg

SEQ ID NO: 88689 - DNA, 25 bp, Artificial
  probe
  misc_feature (1)..(25): SEQ ID NO: 6689; WAN024BOZ_at; Start 151; Stop 175
cattatcgtgcaagatatgctgtag

SEQ ID NO: 88690 - DNA, 25 bp, Artificial
  probe
  misc_feature (1)..(25): SEQ ID NO: 6689; WAN024BOZ_at; Start 459; Stop 483
cataggattgatgttcatagcgttt

SEQ ID NO: 88691 - DNA, 25 bp, Artificial
  probe
  misc_feature (1)..(25): SEQ ID NO: 6689; WAN024BOZ_at; Start 1012; Stop 1036
gctacttgtttttggtggtatctaa

SEQ ID NO: 88692 - DNA, 25 bp, Artificial
  probe
  misc_feature (1)..(25): SEQ ID NO: 6689; WAN024BOZ_at; Start 1025; Stop 1049
ggtggtatctaagagaaaatgtcct

SEQ ID NO: 88693 - DNA, 25 bp, Artificial
  probe
  misc_feature (1)..(25): SEQ ID NO: 6689; WAN024BOZ_at; Start 656; Stop 680
gcgaggtcactaaaagtcgtgttat

SEQ ID NO: 88694 - DNA, 25 bp, Artificial
  probe
  misc_feature (1)..(25): SEQ ID NO: 6689; WAN024BOZ_at; Start 57; Stop 81
taggatgcgtataaattccctagca

SEQ ID NO: 88695 - DNA, 25 bp, Artificial
  probe
  misc_feature (1)..(25): SEQ ID NO: 6689; WAN024BOZ_at; Start 816; Stop 840
tataaatctggtgtatcaacatagt

SEQ ID NO: 88696 - DNA, 25 bp, Artificial
  probe
  misc_feature (1)..(25): SEQ ID NO: 6689; WAN024BOZ_at; Start 1049; Stop 1073
tttatttttatgaggcacttttgcc

SEQ ID NO: 88697 - DNA, 25 bp, Artificial
  probe
  misc_feature (1)..(25): SEQ ID NO: 6689; WAN024BOZ_at; Start 401; Stop 425
caactagtgtagcacttatagcaca

SEQ ID NO: 88698 - DNA, 25 bp, Artificial
  probe
  misc_feature (1)..(25): SEQ ID NO: 6689; WAN024BOZ_at; Start 220; Stop 244
gcagattggttttcacatcactcca

SEQ ID NO: 88699 - DNA, 25 bp, Artificial
  probe
  misc_feature (1)..(25): SEQ ID NO: 6689; WAN024BOZ_at; Start 445; Stop 469
catcgattcatattcataggattga

SEQ ID NO: 88700 - DNA, 25 bp, Artificial
  probe
  misc_feature (1)..(25): SEQ ID NO: 6689; WAN024BOZ_at; Start 555; Stop 579
gctatgggcattggtatttatatct

SEQ ID NO: 88701 - DNA, 25 bp, Artificial
  probe
  misc_feature (1)..(25): SEQ ID NO: 6689; WAN024BOZ_at; Start 540; Stop 564
aaatactagtaagatgctatgggca

SEQ ID NO: 88702 - DNA, 25 bp, Artificial
  probe
  misc_feature (1)..(25): SEQ ID NO: 6689; WAN024BOZ_at; Start 389; Stop 413
ggttctttttagcaactagtgtagc

SEQ ID NO: 88703 - DNA, 25 bp, Artificial
  probe
  misc_feature (1)..(25): SEQ ID NO: 6689; WAN024BOZ_at; Start 587; Stop 611
taattgtgacaaatctattggtagg

SEQ ID NO: 88704 - DNA, 25 bp, Artificial
  probe
  misc_feature (1)..(25): SEQ ID NO: 6689; WAN024BOZ_at; Start 682; Stop 706
tattatacagcgaaatcgactcgtc

SEQ ID NO: 88705 - DNA, 25 bp, Artificial
  probe
  misc_feature (1)..(25): SEQ ID NO: 7466; WAN024BP2_at; Start 68; Stop 92
tattgattactccatatgttgctag

SEQ ID NO: 88706 - DNA, 25 bp, Artificial
  probe
  misc_feature (1)..(25): SEQ ID NO: 7466; WAN024BP2_at; Start 956; Stop 980
catctatggatgctcttaaatggct

SEQ ID NO: 88707 - DNA, 25 bp, Artificial
  probe
  misc_feature (1)..(25): SEQ ID NO: 7466; WAN024BP2_at; Start 632; Stop 656
tatttttaccaagtatcatcacgca

SEQ ID NO: 88708 - DNA, 25 bp, Artificial
  probe
  misc_feature (1)..(25): SEQ ID NO: 7466; WAN024BP2_at; Start 223; Stop 247
gaggaactatcagagacattttgga

SEQ ID NO: 88709 - DNA, 25 bp, Artificial
  probe
  misc_feature (1)..(25): SEQ ID NO: 7466; WAN024BP2_at; Start 974; Stop 998
aatggcttgctcctattgctgttgg

SEQ ID NO: 88710 - DNA, 25 bp, Artificial
  probe
  misc_feature (1)..(25): SEQ ID NO: 7466; WAN024BP2_at; Start 87; Stop 111
tgctagaatattaggcgcacaccag

SEQ ID NO: 88711 - DNA, 25 bp, Artificial
  probe
  misc_feature (1)..(25): SEQ ID NO: 7466; WAN024BP2_at; Start 789; Stop 813
gatgccccgaatagcaaatgaattt

SEQ ID NO: 88712 - DNA, 25 bp, Artificial
  probe
  misc_feature (1)..(25): SEQ ID NO: 7466; WAN024BP2_at; Start 1013; Stop 1037
gagtctcaggtagtcagtattttgt

SEQ ID NO: 88713 - DNA, 25 bp, Artificial
  probe
  misc_feature (1)..(25): SEQ ID NO: 7466; WAN024BP2_at; Start 1360; Stop 1384
ggtttgaacttgttgacacgagatg

SEQ ID NO: 88714 - DNA, 25 bp, Artificial
  probe
  misc_feature (1)..(25): SEQ ID NO: 7466; WAN024BP2_at; Start 998; Stop 1022
gcaatgctttgctaggagtctcagg

SEQ ID NO: 88715 - DNA, 25 bp, Artificial
  probe
  misc_feature (1)..(25): SEQ ID NO: 7466; WAN024BP2_at; Start 941; Stop 965
gcgaaagttttatgccatctatgga

SEQ ID NO: 88716 - DNA, 25 bp, Artificial
  probe
  misc_feature (1)..(25): SEQ ID NO: 7466; WAN024BP2_at; Start 836; Stop 860
tgaaaaagtatctgacaactgcagc

SEQ ID NO: 88717 - DNA, 25 bp, Artificial
  probe
  misc_feature (1)..(25): SEQ ID NO: 7466; WAN024BP2_at; Start 773; Stop 797
tattaaattctgttatgatgccccg

SEQ ID NO: 88718 - DNA, 25 bp, Artificial
  probe
  misc_feature (1)..(25): SEQ ID NO: 7466; WAN024BP2_at; Start 1320; Stop 1344
aactattaagcaaatcgttcttggg

SEQ ID NO: 88719 - DNA, 25 bp, Artificial
  probe
  misc_feature (1)..(25): SEQ ID NO: 7466; WAN024BP2_at; Start 188; Stop 212
gaaatcgcgaatgtgcctatactag

SEQ ID NO: 88720 - DNA, 25 bp, Artificial
  probe
  misc_feature (1)..(25): SEQ ID NO: 7466; WAN024BP2_at; Start 441; Stop 465
taagttattatttacgatagcgacc

SEQ ID NO: 88721 - DNA, 25 bp, Artificial
  probe
  misc_feature (1)..(25): SEQ ID NO: 7466; WAN024BP2_at; Start 456; Stop 480
gatagcgaccttcttatttgtaaaa

SEQ ID NO: 88722 - DNA, 25 bp, Artificial
  probe
  misc_feature (1)..(25): SEQ ID NO: 7466; WAN024BP2_at; Start 1284; Stop 1308
tgtttcattcagaggatatccagca

SEQ ID NO: 88723 - DNA, 25 bp, Artificial
  probe
  misc_feature (1)..(25): SEQ ID NO: 7466; WAN024BP2_at; Start 849; Stop 873
gacaactgcagctgaattttctttg

SEQ ID NO: 88724 - DNA, 25 bp, Artificial
  probe
  misc_feature (1)..(25): SEQ ID NO: 7466; WAN024BP2_at; Start 517; Stop 541
ggtctctctgttttagtagccaatt

SEQ ID NO: 88725 - DNA, 25 bp, Artificial
  probe
  misc_feature (1)..(25): SEQ ID NO: 7466; WAN024BP2_at; Start 376; Stop 400
gattgtacttggctctatcgtggct

SEQ ID NO: 88726 - DNA, 25 bp, Artificial
  probe
  misc_feature (1)..(25): SEQ ID NO: 7466; WAN024BP2_at; Start 205; Stop 229
tatactagagatgataaagaggaac

SEQ ID NO: 88727 - DNA, 25 bp, Artificial
  probe
  misc_feature (1)..(25): SEQ ID NO: 7466; WAN024BP2_at; Start 502; Stop 526
tatgtgctcatatatggtctctctg

SEQ ID NO: 88728 - DNA, 25 bp, Artificial
  probe
  misc_feature (1)..(25): SEQ ID NO: 7466; WAN024BP2_at; Start 391; Stop 415
tatcgtggcttagaggaaatgcagt

SEQ ID NO: 88729 - DNA, 25 bp, Artificial
  probe
  misc_feature (1)..(25): SEQ ID NO: 7466; WAN024BP2_at; Start 100; Stop 124
ggcgcacaccagttaggaatttatg

SEQ ID NO: 88730 - DNA, 25 bp, Artificial
  probe
  misc_feature (1)..(25): SEQ ID NO: 7466; WAN024BP2_at; Start 909; Stop 933
tattgcagatacttttgttccgtgg

SEQ ID NO: 88731 - DNA, 25 bp, Artificial
  probe
  misc_feature (1)..(25): SEQ ID NO: 7466; WAN024BP2_at; Start 1167; Stop 1191
tacctcttctgttatagtgcaatac

SEQ ID NO: 88732 - DNA, 25 bp, Artificial
  probe
  misc_feature (1)..(25): SEQ ID NO: 7466; WAN024BP2_at; Start 733; Stop 757
gcagagaagattatacagataccac

SEQ ID NO: 88733 - DNA, 25 bp, Artificial
  probe
  misc_feature (1)..(25): SEQ ID NO: 7466; WAN024BP2_at; Start 688; Stop 712
gggtctttaagttctggaatcagca

SEQ ID NO: 88734 - DNA, 25 bp, Artificial
  probe
  misc_feature (1)..(25): SEQ ID NO: 7466; WAN024BP2_at; Start 893; Stop 917
cgattggcctttatgctattgcaga

SEQ ID NO: 88735 - DNA, 25 bp, Artificial
  probe
  misc_feature (1)..(25): SEQ ID NO: 7466; WAN024BP2_at; Start 174; Stop 198
tattggtcactatggaaatcgcgaa

SEQ ID NO: 88736 - DNA, 25 bp, Artificial
  probe
  misc_feature (1)..(25): SEQ ID NO: 7466; WAN024BP2_at; Start 668; Stop 692
ctgctgataaaattgttctagggtc

SEQ ID NO: 88737 - DNA, 25 bp, Artificial
  probe
  misc_feature (1)..(25): SEQ ID NO: 7466; WAN024BP2_at; Start 748; Stop 772
cagataccactctctttaatagtag

SEQ ID NO: 88738 - DNA, 25 bp, Artificial
  probe
  misc_feature (1)..(25): SEQ ID NO: 7466; WAN024BP2_at; Start 877; Stop 901
ttagctgttccattgtcgattggcc

SEQ ID NO: 88739 - DNA, 25 bp, Artificial
  probe
  misc_feature (1)..(25): SEQ ID NO: 6310; WAN024BP3_at; Start 593; Stop 617
tatttgttggtagaatcatccctgg

SEQ ID NO: 88740 - DNA, 25 bp, Artificial
  probe
  misc_feature (1)..(25): SEQ ID NO: 6310; WAN024BP3_at; Start 612; Stop 636
ccctggtaaaggtgtggatgttcta

SEQ ID NO: 88741 - DNA, 25 bp, Artificial
  probe
  misc_feature (1)..(25): SEQ ID NO: 6310; WAN024BP3_at; Start 251; Stop 275
tgactaactattcttatcgaacaga

SEQ ID NO: 88742 - DNA, 25 bp, Artificial
  probe
  misc_feature (1)..(25): SEQ ID NO: 6310; WAN024BP3_at; Start 424; Stop 448
cagtccagtgatgatttcttagcgc

SEQ ID NO: 88743 - DNA, 25 bp, Artificial
  probe
  misc_feature (1)..(25): SEQ ID NO: 6310; WAN024BP3_at; Start 1013; Stop 1037
tacgagttcaattatctcaaaatgc

SEQ ID NO: 88744 - DNA, 25 bp, Artificial
  probe
  misc_feature (1)..(25): SEQ ID NO: 6310; WAN024BP3_at; Start 670; Stop 694
caatgtttaattgtaggcccaagtc

SEQ ID NO: 88745 - DNA, 25 bp, Artificial
  probe
  misc_feature (1)..(25): SEQ ID NO: 6310; WAN024BP3_at; Start 868; Stop 892
cagggacttcctgttatttctacat

SEQ ID NO: 88746 - DNA, 25 bp, Artificial
  probe
  misc_feature (1)..(25): SEQ ID NO: 6310; WAN024BP3_at; Start 90; Stop 114
tgtttttgaagcaacaggagctcaa

SEQ ID NO: 88747 - DNA, 25 bp, Artificial
  probe
  misc_feature (1)..(25): SEQ ID NO: 6310; WAN024BP3_at; Start 436; Stop 460
gatttcttagcgcattatcatgtga

SEQ ID NO: 88748 - DNA, 25 bp, Artificial
  probe
  misc_feature (1)..(25): SEQ ID NO: 6310; WAN024BP3_at; Start 323; Stop 347
tagaaattgatggtggtaagatacc

SEQ ID NO: 88749 - DNA, 25 bp, Artificial
  probe
  misc_feature (1)..(25): SEQ ID NO: 6310; WAN024BP3_at; Start 851; Stop 875
taaacgaggcaatgtctcagggact

SEQ ID NO: 88750 - DNA, 25 bp, Artificial
  probe
  misc_feature (1)..(25): SEQ ID NO: 6310; WAN024BP3_at; Start 979; Stop 1003
caaaagttaagcaaagtattacagg

SEQ ID NO: 88751 - DNA, 25 bp, Artificial
  probe
  misc_feature (1)..(25): SEQ ID NO: 6310; WAN024BP3_at; Start 47; Stop 71
tggatttctataatcaacttgggaa

SEQ ID NO: 88752 - DNA, 25 bp, Artificial
  probe
  misc_feature (1)..(25): SEQ ID NO: 6310; WAN024BP3_at; Start 700; Stop 724
agtgaatacaaacaatacttgcttg

SEQ ID NO: 88753 - DNA, 25 bp, Artificial
  probe
  misc_feature (1)..(25): SEQ ID NO: 6310; WAN024BP3_at; Start 25; Stop 49
aatattccatcaccttatcgtgtgg

SEQ ID NO: 88754 - DNA, 25 bp, Artificial
  probe
  misc_feature (1)..(25): SEQ ID NO: 6310; WAN024BP3_at; Start 563; Stop 587
tgggattcagtccaactaagaaaac

SEQ ID NO: 88755 - DNA, 25 bp, Artificial
  probe
  misc_feature (1)..(25): SEQ ID NO: 6310; WAN024BP3_at; Start 1050; Stop 1074
taaacactacactattgaaacaatg

SEQ ID NO: 88756 - DNA, 25 bp, Artificial
  probe
  misc_feature (1)..(25): SEQ ID NO: 6310; WAN024BP3_at; Start 627; Stop 651
ggatgttctaatcaaggctgttcag

SEQ ID NO: 88757 - DNA, 25 bp, Artificial
  probe
  misc_feature (1)..(25): SEQ ID NO: 6310; WAN024BP3_at; Start 551; Stop 575
taagaaagaaactgggattcagtcc

SEQ ID NO: 88758 - DNA, 25 bp, Artificial
  probe
  misc_feature (1)..(25): SEQ ID NO: 6310; WAN024BP3_at; Start 775; Stop 799
tctgaactgaaacaatactacaagc

SEQ ID NO: 88759 - DNA, 25 bp, Artificial
  probe
  misc_feature (1)..(25): SEQ ID NO: 6310; WAN024BP3_at; Start 760; Stop 784
gattttttacagacatctgaactga

SEQ ID NO: 88760 - DNA, 25 bp, Artificial
  probe
  misc_feature (1)..(25): SEQ ID NO: 6310; WAN024BP3_at; Start 642; Stop 666
ggctgttcagaatttatcagacgat

SEQ ID NO: 88761 - DNA, 25 bp, Artificial
  probe
  misc_feature (1)..(25): SEQ ID NO: 6310; WAN024BP3_at; Start 948; Stop 972
tgatagggttgatgactggaaagct

SEQ ID NO: 88762 - DNA, 25 bp, Artificial
  probe
  misc_feature (1)..(25): SEQ ID NO: 6310; WAN024BP3_at; Start 995; Stop 1019
tattacaggatgactcgttacgagt

SEQ ID NO: 88763 - DNA, 25 bp, Artificial
  probe
  misc_feature (1)..(25): SEQ ID NO: 6310; WAN024BP3_at; Start 685; Stop 709
ggcccaagtcccgatagtgaataca

SEQ ID NO: 88764 - DNA, 25 bp, Artificial
  probe
  misc_feature (1)..(25): SEQ ID NO: 6310; WAN024BP3_at; Start 514; Stop 538
cgatatcaaattgtcgatgagaaag

SEQ ID NO: 88765 - DNA, 25 bp, Artificial
  probe
  misc_feature (1)..(25): SEQ ID NO: 6310; WAN024BP3_at; Start 904; Stop 928
gctgcaattgagcttgtttcgaatg

SEQ ID NO: 88766 - DNA, 25 bp, Artificial
  probe
  misc_feature (1)..(25): SEQ ID NO: 6310; WAN024BP3_at; Start 886; Stop 910
tctacatctgcatgtgttgctgcaa

SEQ ID NO: 88767 - DNA, 25 bp, Artificial
  probe
  misc_feature (1)..(25): SEQ ID NO: 6310; WAN024BP3_at; Start 409; Stop 433
tattttagcccaagtcagtccagtg

SEQ ID NO: 88768 - DNA, 25 bp, Artificial
  probe
  misc_feature (1)..(25): SEQ ID NO: 6310; WAN024BP3_at; Start 100; Stop 124
gcaacaggagctcaagatattagat

SEQ ID NO: 88769 - DNA, 25 bp, Artificial
  probe
  misc_feature (1)..(25): SEQ ID NO: 6310; WAN024BP3_at; Start 492; Stop 516
ttccttatcagagaaagacatacga

SEQ ID NO: 88770 - DNA, 25 bp, Artificial
  probe
  misc_feature (1)..(25): SEQ ID NO: 6310; WAN024BP3_at; Start 727; Stop 751
cttattggacaagatagccgttttc

SEQ ID NO: 88771 - DNA, 25 bp, Artificial
  probe
  misc_feature (1)..(25): SEQ ID NO: 6310; WAN024BP3_at; Start 337; Stop 361
ggtaagataccagaaagcgagaatt

SEQ ID NO: 88772 - DNA, 25 bp, Artificial
  probe
  misc_feature (1)..(25): SEQ ID NO: 6310; WAN024BP3_at; Start 115; Stop 139
gatattagatttgattaccgagaga

SEQ ID NO: 88773 - DNA, 25 bp, Artificial
  probe
  misc_feature (1)..(25): SEQ ID NO: 6619; WAN024BP4_at; Start 421; Stop 445
gctactcatctatgggcttgttcag

SEQ ID NO: 88774 - DNA, 25 bp, Artificial
  probe
  misc_feature (1)..(25): SEQ ID NO: 6619; WAN024BP4_at; Start 763; Stop 787
ggcgagtcttctaatgtgaatgaac

SEQ ID NO: 88775 - DNA, 25 bp, Artificial
  probe
  misc_feature (1)..(25): SEQ ID NO: 6619; WAN024BP4_at; Start 574; Stop 598
aagtttgttattggtcatgtaggac

SEQ ID NO: 88776 - DNA, 25 bp, Artificial
  probe
  misc_feature (1)..(25): SEQ ID NO: 6619; WAN024BP4_at; Start 859; Stop 883
caagtcaacggtttaccattagtgg

SEQ ID NO: 88777 - DNA, 25 bp, Artificial
  probe
  misc_feature (1)..(25): SEQ ID NO: 6619; WAN024BP4_at; Start 182; Stop 206
ttcctgctagaggaaagaatcctct

SEQ ID NO: 88778 - DNA, 25 bp, Artificial
  probe
  misc_feature (1)..(25): SEQ ID NO: 6619; WAN024BP4_at; Start 322; Stop 346
cctattcgtatttcacattgccata

SEQ ID NO: 88779 - DNA, 25 bp, Artificial
  probe
  misc_feature (1)..(25): SEQ ID NO: 6619; WAN024BP4_at; Start 32; Stop 56
ctatggatagaggtggtgtatctac

SEQ ID NO: 88780 - DNA, 25 bp, Artificial
  probe
  misc_feature (1)..(25): SEQ ID NO: 6619; WAN024BP4_at; Start 683; Stop 707
tcataggtaagggagaattggaaga

SEQ ID NO: 88781 - DNA, 25 bp, Artificial
  probe
  misc_feature (1)..(25): SEQ ID NO: 6619; WAN024BP4_at; Start 589; Stop 613
catgtaggacgatttgattatcaga

SEQ ID NO: 88782 - DNA, 25 bp, Artificial
  probe
  misc_feature (1)..(25): SEQ ID NO: 6619; WAN024BP4_at; Start 299; Stop 323
ctattgcaaaagagtgtgatattcc

SEQ ID NO: 88783 - DNA, 25 bp, Artificial
  probe
  misc_feature (1)..(25): SEQ ID NO: 6619; WAN024BP4_at; Start 198; Stop 222
gaatcctctaaaaaattatcgccaa

SEQ ID NO: 88784 - DNA, 25 bp, Artificial
  probe
  misc_feature (1)..(25): SEQ ID NO: 6619; WAN024BP4_at; Start 245; Stop 269
gaaattatgatgtagttcatgcgca

SEQ ID NO: 88785 - DNA, 25 bp, Artificial
  probe
  misc_feature (1)..(25): SEQ ID NO: 6619; WAN024BP4_at; Start 667; Stop 691
gatgctcatcttgttctcataggta

SEQ ID NO: 88786 - DNA, 25 bp, Artificial
  probe
  misc_feature (1)..(25): SEQ ID NO: 6619; WAN024BP4_at; Start 882; Stop 906
ggtttctgataatgttccaagtgag

SEQ ID NO: 88787 - DNA, 25 bp, Artificial
  probe
  misc_feature (1)..(25): SEQ ID NO: 6619; WAN024BP4_at; Start 484; Stop 508
gaagttattcctaatgctattgatg

SEQ ID NO: 88788 - DNA, 25 bp, Artificial
  probe
  misc_feature (1)..(25): SEQ ID NO: 6619; WAN024BP4_at; Start 510; Stop 534
tcaaaagttcatctatagtccacaa

SEQ ID NO: 88789 - DNA, 25 bp, Artificial
  probe
  misc_feature (1)..(25): SEQ ID NO: 6619; WAN024BP4_at; Start 125; Stop 149
tatccgaaggtgtacgcgatgagga

SEQ ID NO: 88790 - DNA, 25 bp, Artificial
  probe
  misc_feature (1)..(25): SEQ ID NO: 6619; WAN024BP4_at; Start 439; Stop 463
tgttcagaaaaagcaggagagtggt

SEQ ID NO: 88791 - DNA, 25 bp, Artificial
  probe
  misc_feature (1)..(25): SEQ ID NO: 6619; WAN024BP4_at; Start 650; Stop 674
ttatcaatgaaagagaagatgctca

SEQ ID NO: 88792 - DNA, 25 bp, Artificial
  probe
  misc_feature (1)..(25): SEQ ID NO: 6619; WAN024BP4_at; Start 461; Stop 485
ggttgtatgggaatcactcttttga

SEQ ID NO: 88793 - DNA, 25 bp, Artificial
  probe
  misc_feature (1)..(25): SEQ ID NO: 6619; WAN024BP4_at; Start 844; Stop 868
gctatggtagagatgcaagtcaacg

SEQ ID NO: 88794 - DNA, 25 bp, Artificial
  probe
  misc_feature (1)..(25): SEQ ID NO: 6619; WAN024BP4_at; Start 701; Stop 725
tggaagaggttattaaaaagcaagc

SEQ ID NO: 88795 - DNA, 25 bp, Artificial
  probe
  misc_feature (1)..(25): SEQ ID NO: 6619; WAN024BP4_at; Start 976; Stop 1000
ttggagaccaaaggacgggatactg

SEQ ID NO: 88796 - DNA, 25 bp, Artificial
  probe
  misc_feature (1)..(25): SEQ ID NO: 6619; WAN024BP4_at; Start 795; Stop 819
tgtgtttgatgtaggtgttttccca

SEQ ID NO: 88797 - DNA, 25 bp, Artificial
  probe
  misc_feature (1)..(25): SEQ ID NO: 6619; WAN024BP4_at; Start 257; Stop 281
tagttcatgcgcatgctgatgcagg

SEQ ID NO: 88798 - DNA, 25 bp, Artificial
  probe
  misc_feature (1)..(25): SEQ ID NO: 6619; WAN024BP4_at; Start 405; Stop 429
gcaaattccgagatatgctactcat

SEQ ID NO: 88799 - DNA, 25 bp, Artificial
  probe
  misc_feature (1)..(25): SEQ ID NO: 6619; WAN024BP4_at; Start 721; Stop 745
caagcaaatcacttaggaatattgg

SEQ ID NO: 88800 - DNA, 25 bp, Artificial
  probe
  misc_feature (1)..(25): SEQ ID NO: 6619; WAN024BP4_at; Start 18; Stop 42
tgttaacggcgggactatggataga

SEQ ID NO: 88801 - DNA, 25 bp, Artificial
  probe
  misc_feature (1)..(25): SEQ ID NO: 6619; WAN024BP4_at; Start 112; Stop 136
ttagtccataccttatccgaaggtg

SEQ ID NO: 88802 - DNA, 25 bp, Artificial
  probe
  misc_feature (1)..(25): SEQ ID NO: 6619; WAN024BP4_at; Start 961; Stop 985
tggtgtaaaacgattttggagacca

SEQ ID NO: 88803 - DNA, 25 bp, Artificial
  probe
  misc_feature (1)..(25): SEQ ID NO: 6619; WAN024BP4_at; Start 1024; Stop 1048
aagggttataacctgtctgatatgg

SEQ ID NO: 88804 - DNA, 25 bp, Artificial
  probe
  misc_feature (1)..(25): SEQ ID NO: 6619; WAN024BP4_at; Start 390; Stop 414
tgagcaattcaagaagcaaattccg

SEQ ID NO: 88805 - DNA, 25 bp, Artificial
  probe
  misc_feature (1)..(25): SEQ ID NO: 6619; WAN024BP4_at; Start 270; Stop 294
tgctgatgcaggaaataggacaatt

SEQ ID NO: 88806 - DNA, 25 bp, Artificial
  probe
  misc_feature (1)..(25): SEQ ID NO: 6619; WAN024BP4_at; Start 170; Stop 194
aaatctttagagttcctgctagagg

SEQ ID NO: 88807 - DNA, 25 bp, Artificial
  probe
  misc_feature (1)..(25): SEQ ID NO: 6595; WAN024BP5_at; Start 1198; Stop 1222
gaattcgttgtattatgcgttcaga

SEQ ID NO: 88808 - DNA, 25 bp, Artificial
  probe
  misc_feature (1)..(25): SEQ ID NO: 6595; WAN024BP5_at; Start 701; Stop 725
cgaatcttgataccgttatgctagg

SEQ ID NO: 88809 - DNA, 25 bp, Artificial
  probe
  misc_feature (1)..(25): SEQ ID NO: 6595; WAN024BP5_at; Start 1213; Stop 1237
tgcgttcagatttactatacgagag

SEQ ID NO: 88810 - DNA, 25 bp, Artificial
  probe
  misc_feature (1)..(25): SEQ ID NO: 6595; WAN024BP5_at; Start 106; Stop 130
ccctatgtttctagagtacttcaag

SEQ ID NO: 88811 - DNA, 25 bp, Artificial
  probe
  misc_feature (1)..(25): SEQ ID NO: 6595; WAN024BP5_at; Start 1272; Stop 1296
cattagatatctatgctcggtaggg

SEQ ID NO: 88812 - DNA, 25 bp, Artificial
  probe
  misc_feature (1)..(25): SEQ ID NO: 6595; WAN024BP5_at; Start 345; Stop 369
acagtcaatgtacgtctataaagaa

SEQ ID NO: 88813 - DNA, 25 bp, Artificial
  probe
  misc_feature (1)..(25): SEQ ID NO: 6595; WAN024BP5_at; Start 1094; Stop 1118
tattactttcagtgacttcaggagc

SEQ ID NO: 88814 - DNA, 25 bp, Artificial
  probe
  misc_feature (1)..(25): SEQ ID NO: 6595; WAN024BP5_at; Start 668; Stop 692
tatttgctcagacattggtagtgtc

SEQ ID NO: 88815 - DNA, 25 bp, Artificial
  probe
  misc_feature (1)..(25): SEQ ID NO: 6595; WAN024BP5_at; Start 744; Stop 768
tgatgtgggattatatactgcagca

SEQ ID NO: 88816 - DNA, 25 bp, Artificial
  probe
  misc_feature (1)..(25): SEQ ID NO: 6595; WAN024BP5_at; Start 183; Stop 207
gatgattgcttcacttggtattcca

SEQ ID NO: 88817 - DNA, 25 bp, Artificial
  probe
  misc_feature (1)..(25): SEQ ID NO: 6595; WAN024BP5_at; Start 197; Stop 221
ttggtattccaacgtatggcatacg

SEQ ID NO: 88818 - DNA, 25 bp, Artificial
  probe
  misc_feature (1)..(25): SEQ ID NO: 6595; WAN024BP5_at; Start 1371; Stop 1395
cattttctttggaagttacggtgtg

SEQ ID NO: 88819 - DNA, 25 bp, Artificial
  probe
  misc_feature (1)..(25): SEQ ID NO: 6595; WAN024BP5_at; Start 1170; Stop 1194
tggagcagcatttgccactatgatt

SEQ ID NO: 88820 - DNA, 25 bp, Artificial
  probe
  misc_feature (1)..(25): SEQ ID NO: 6595; WAN024BP5_at; Start 122; Stop 146
tacttcaagttgaggcgaatggtac

SEQ ID NO: 88821 - DNA, 25 bp, Artificial
  probe
  misc_feature (1)..(25): SEQ ID NO: 6595; WAN024BP5_at; Start 862; Stop 886
gatcggtttttggaaatcataacaa

SEQ ID NO: 88822 - DNA, 25 bp, Artificial
  probe
  misc_feature (1)..(25): SEQ ID NO: 6595; WAN024BP5_at; Start 717; Stop 741
tatgctaggaagtatgaaaggaaca

SEQ ID NO: 88823 - DNA, 25 bp, Artificial
  probe
  misc_feature (1)..(25): SEQ ID NO: 6595; WAN024BP5_at; Start 951; Stop 975
ggaaagtattttgctacttgctggg

SEQ ID NO: 88824 - DNA, 25 bp, Artificial
  probe
  misc_feature (1)..(25): SEQ ID NO: 6595; WAN024BP5_at; Start 639; Stop 663
taaaccacatataaagccgattttg

SEQ ID NO: 88825 - DNA, 25 bp, Artificial
  probe
  misc_feature (1)..(25): SEQ ID NO: 6595; WAN024BP5_at; Start 1232; Stop 1256
cgagagatttgctattaaagaggct

SEQ ID NO: 88826 - DNA, 25 bp, Artificial
  probe
  misc_feature (1)..(25): SEQ ID NO: 6595; WAN024BP5_at; Start 550; Stop 574
tctgtttttgctagtgtgggatcaa

SEQ ID NO: 88827 - DNA, 25 bp, Artificial
  probe
  misc_feature (1)..(25): SEQ ID NO: 6595; WAN024BP5_at; Start 843; Stop 867
tgctaataatcaaatgaaagatcgg

SEQ ID NO: 88828 - DNA, 25 bp, Artificial
  probe
  misc_feature (1)..(25): SEQ ID NO: 6595; WAN024BP5_at; Start 1183; Stop 1207
gccactatgattgcagaattcgttg

SEQ ID NO: 88829 - DNA, 25 bp, Artificial
  probe
  misc_feature (1)..(25): SEQ ID NO: 6595; WAN024BP5_at; Start 223; Stop 247
gctgcagcaaaagtacgtgatgata

SEQ ID NO: 88830 - DNA, 25 bp, Artificial
  probe
  misc_feature (1)..(25): SEQ ID NO: 6595; WAN024BP5_at; Start 1154; Stop 1178
cagcttatggtgtaagtggagcagc

SEQ ID NO: 88831 - DNA, 25 bp, Artificial
  probe
  misc_feature (1)..(25): SEQ ID NO: 6595; WAN024BP5_at; Start 1022; Stop 1046
cagttattcctaatgcacttacggg

SEQ ID NO: 88832 - DNA, 25 bp, Artificial
  probe
  misc_feature (1)..(25): SEQ ID NO: 6595; WAN024BP5_at; Start 1249; Stop 1273
aagaggctacatcaaatagttggca

SEQ ID NO: 88833 - DNA, 25 bp, Artificial
  probe
  misc_feature (1)..(25): SEQ ID NO: 6595; WAN024BP5_at; Start 251; Stop 275
gaaaattatctaccattgtccaaga

SEQ ID NO: 88834 - DNA, 25 bp, Artificial
  probe
  misc_feature (1)..(25): SEQ ID NO: 6595; WAN024BP5_at; Start 905; Stop 929
tattcttatcgcttccattgtcagt

SEQ ID NO: 88835 - DNA, 25 bp, Artificial
  probe
  misc_feature (1)..(25): SEQ ID NO: 6595; WAN024BP5_at; Start 209; Stop 233
cgtatggcatacgtgctgcagcaaa

SEQ ID NO: 88836 - DNA, 25 bp, Artificial
  probe
  misc_feature (1)..(25): SEQ ID NO: 6595; WAN024BP5_at; Start 821; Stop 845
tgcttccaagaatgtcctactatgc

SEQ ID NO: 88837 - DNA, 25 bp, Artificial
  probe
  misc_feature (1)..(25): SEQ ID NO: 6595; WAN024BP5_at; Start 137; Stop 161
cgaatggtactgtagcatatgtatc

SEQ ID NO: 88838 - DNA, 25 bp, Artificial
  probe
  misc_feature (1)..(25): SEQ ID NO: 6595; WAN024BP5_at; Start 757; Stop 781
tatactgcagcaacaaaactaaagg

SEQ ID NO: 88839 - DNA, 25 bp, Artificial
  probe
  misc_feature (1)..(25): SEQ ID NO: 6595; WAN024BP5_at; Start 982; Stop 1006
tatttaggtgctgttataggaatgc

SEQ ID NO: 88840 - DNA, 25 bp, Artificial
  probe
  misc_feature (1)..(25): SEQ ID NO: 6595; WAN024BP5_at; Start 1111; Stop 1135
tcaggagcgttaatagatttactac

SEQ ID NO: 88841 - DNA, 25 bp, Artificial
  probe
  misc_feature (1)..(25): SEQ ID NO: 6998; WAN024BP6_at; Start 207; Stop 231
gacatttgcaccagaaacaatggat

SEQ ID NO: 88842 - DNA, 25 bp, Artificial
  probe
  misc_feature (1)..(25): SEQ ID NO: 6998; WAN024BP6_at; Start 572; Stop 596
aatcgaaatatatagctggacagcc

SEQ ID NO: 88843 - DNA, 25 bp, Artificial
  probe
  misc_feature (1)..(25): SEQ ID NO: 6998; WAN024BP6_at; Start 781; Stop 805
tttaatgttgagtttgagggagctg

SEQ ID NO: 88844 - DNA, 25 bp, Artificial
  probe
  misc_feature (1)..(25): SEQ ID NO: 6998; WAN024BP6_at; Start 488; Stop 512
tcattccggttaatggttatggaca

SEQ ID NO: 88845 - DNA, 25 bp, Artificial
  probe
  misc_feature (1)..(25): SEQ ID NO: 6998; WAN024BP6_at; Start 15; Stop 39
gtttcttaaaaagagtcatctgacc

SEQ ID NO: 88846 - DNA, 25 bp, Artificial
  probe
  misc_feature (1)..(25): SEQ ID NO: 6998; WAN024BP6_at; Start 179; Stop 203
tatatgacgatgtgctaggaagagt

SEQ ID NO: 88847 - DNA, 25 bp, Artificial
  probe
  misc_feature (1)..(25): SEQ ID NO: 6998; WAN024BP6_at; Start 904; Stop 928
ggtcctcagaataaggctatgttcg

SEQ ID NO: 88848 - DNA, 25 bp, Artificial
  probe
  misc_feature (1)..(25): SEQ ID NO: 6998; WAN024BP6_at; Start 194; Stop 218
taggaagagtaaagacatttgcacc

SEQ ID NO: 88849 - DNA, 25 bp, Artificial
  probe
  misc_feature (1)..(25): SEQ ID NO: 6998; WAN024BP6_at; Start 435; Stop 459
agcatatatttttgcacaagaaggg

SEQ ID NO: 88850 - DNA, 25 bp, Artificial
  probe
  misc_feature (1)..(25): SEQ ID NO: 6998; WAN024BP6_at; Start 658; Stop 682
cctactatagatacaatgaatgcac

SEQ ID NO: 88851 - DNA, 25 bp, Artificial
  probe
  misc_feature (1)..(25): SEQ ID NO: 6998; WAN024BP6_at; Start 635; Stop 659
tctggagcgatggagaagtaattcc

SEQ ID NO: 88852 - DNA, 25 bp, Artificial
  probe
  misc_feature (1)..(25): SEQ ID NO: 6998; WAN024BP6_at; Start 229; Stop 253
gatatttgtgtcctatcttctggca

SEQ ID NO: 88853 - DNA, 25 bp, Artificial
  probe
  misc_feature (1)..(25): SEQ ID NO: 6998; WAN024BP6_at; Start 729; Stop 753
cagtatcggtgcaattttatttgag

SEQ ID NO: 88854 - DNA, 25 bp, Artificial
  probe
  misc_feature (1)..(25): SEQ ID NO: 6998; WAN024BP6_at; Start 926; Stop 950
tcgaatattataaagaacatccaga

SEQ ID NO: 88855 - DNA, 25 bp, Artificial
  probe
  misc_feature (1)..(25): SEQ ID NO: 6998; WAN024BP6_at; Start 715; Stop 739
tgtgcaattcgcttcagtatcggtg

SEQ ID NO: 88856 - DNA, 25 bp, Artificial
  probe
  misc_feature (1)..(25): SEQ ID NO: 6998; WAN024BP6_at; Start 291; Stop 315
taattggtcgtatttgagtacggaa

SEQ ID NO: 88857 - DNA, 25 bp, Artificial
  probe
  misc_feature (1)..(25): SEQ ID NO: 6998; WAN024BP6_at; Start 603; Stop 627
tatagagagtaatcccgaagtagcg

SEQ ID NO: 88858 - DNA, 25 bp, Artificial
  probe
  misc_feature (1)..(25): SEQ ID NO: 6998; WAN024BP6_at; Start 619; Stop 643
gaagtagcgaagtttttctggagcg

SEQ ID NO: 88859 - DNA, 25 bp, Artificial
  probe
  misc_feature (1)..(25): SEQ ID NO: 6998; WAN024BP6_at; Start 518; Stop 542
gaatcttacaaaaattaggcttgga

SEQ ID NO: 88860 - DNA, 25 bp, Artificial
  probe
  misc_feature (1)..(25): SEQ ID NO: 6998; WAN024BP6_at; Start 697; Stop 721
gagaaaaaagtgaatccgtgtgcaa

SEQ ID NO: 88861 - DNA, 25 bp, Artificial
  probe
  misc_feature (1)..(25): SEQ ID NO: 6998; WAN024BP6_at; Start 586; Stop 610
gctggacagcctcgttttatagaga

SEQ ID NO: 88862 - DNA, 25 bp, Artificial
  probe
  misc_feature (1)..(25): SEQ ID NO: 6998; WAN024BP6_at; Start 502; Stop 526
ggttatggacataaaagaatcttac

SEQ ID NO: 88863 - DNA, 25 bp, Artificial
  probe
  misc_feature (1)..(25): SEQ ID NO: 6998; WAN024BP6_at; Start 675; Stop 699
gaatgcacaattttcaaaagaagag

SEQ ID NO: 88864 - DNA, 25 bp, Artificial
  probe
  misc_feature (1)..(25): SEQ ID NO: 6998; WAN024BP6_at; Start 890; Stop 914
gacatttatcgtttggtcctcagaa

SEQ ID NO: 88865 - DNA, 25 bp, Artificial
  probe
  misc_feature (1)..(25): SEQ ID NO: 6998; WAN024BP6_at; Start 755; Stop 779
gaagcttatgggaactgatggatta

SEQ ID NO: 88866 - DNA, 25 bp, Artificial
  probe
  misc_feature (1)..(25): SEQ ID NO: 6998; WAN024BP6_at; Start 806; Stop 830
gacttggagtggatgaagtccaaat

SEQ ID NO: 88867 - DNA, 25 bp, Artificial
  probe
  misc_feature (1)..(25): SEQ ID NO: 6998; WAN024BP6_at; Start 850; Stop 874
aattcaaaaccattgatggtcagtg

SEQ ID NO: 88868 - DNA, 25 bp, Artificial
  probe
  misc_feature (1)..(25): SEQ ID NO: 6998; WAN024BP6_at; Start 463; Stop 487
tatgcacccggtgtagtagcaccac

SEQ ID NO: 88869 - DNA, 25 bp, Artificial
  probe
  misc_feature (1)..(25): SEQ ID NO: 6998; WAN024BP6_at; Start 31; Stop 55
catctgaccaaaggaatttatcaac

SEQ ID NO: 88870 - DNA, 25 bp, Artificial
  probe
  misc_feature (1)..(25): SEQ ID NO: 6998; WAN024BP6_at; Start 869; Stop 893
tcagtgaaaatgtggttgtgggaca

SEQ ID NO: 88871 - DNA, 25 bp, Artificial
  probe
  misc_feature (1)..(25): SEQ ID NO: 6998; WAN024BP6_at; Start 305; Stop 329
tgagtacggaacagaacaatatatc

SEQ ID NO: 88872 - DNA, 25 bp, Artificial
  probe
  misc_feature (1)..(25): SEQ ID NO: 6998; WAN024BP6_at; Start 344; Stop 368
tagctattaatctacatcctcaagc

SEQ ID NO: 88873 - DNA, 25 bp, Artificial
  probe
  misc_feature (1)..(25): SEQ ID NO: 6998; WAN024BP6_at; Start 103; Stop 127
tatacagggaaatttattgaccgta

SEQ ID NO: 88874 - DNA, 25 bp, Artificial
  probe
  misc_feature (1)..(25): SEQ ID NO: 6998; WAN024BP6_at; Start 474; Stop 498
tgtagtagcaccactcattccggtt

SEQ ID NO: 88875 - DNA, 25 bp, Artificial
  probe
  misc_feature (1)..(25): SEQ ID NO: 6307; WAN024BP7_at; Start 696; Stop 720
gaatttgggtattaagagatactca

SEQ ID NO: 88876 - DNA, 25 bp, Artificial
  probe
  misc_feature (1)..(25): SEQ ID NO: 6307; WAN024BP7_at; Start 767; Stop 791
gtttggtaacttatactattgctta

SEQ ID NO: 88877 - DNA, 25 bp, Artificial
  probe
  misc_feature (1)..(25): SEQ ID NO: 6307; WAN024BP7_at; Start 201; Stop 225
tatggcaatatctggagcatttttc

SEQ ID NO: 88878 - DNA, 25 bp, Artificial
  probe
  misc_feature (1)..(25): SEQ ID NO: 6307; WAN024BP7_at; Start 215; Stop 239
gagcatttttcagaattcaagttga

SEQ ID NO: 88879 - DNA, 25 bp, Artificial
  probe
  misc_feature (1)..(25): SEQ ID NO: 6307; WAN024BP7_at; Start 815; Stop 839
ggatgaataccagaatataccagtt

SEQ ID NO: 88880 - DNA, 25 bp, Artificial
  probe
  misc_feature (1)..(25): SEQ ID NO: 6307; WAN024BP7_at; Start 480; Stop 504
agatacgggttttggaatgttactg

SEQ ID NO: 88881 - DNA, 25 bp, Artificial
  probe
  misc_feature (1)..(25): SEQ ID NO: 6307; WAN024BP7_at; Start 924; Stop 948
ggatttaatgattacacctcatgga

SEQ ID NO: 88882 - DNA, 25 bp, Artificial
  probe
  misc_feature (1)..(25): SEQ ID NO: 6307; WAN024BP7_at; Start 453; Stop 477
tatgattgcctacttcgttttgaaa

SEQ ID NO: 88883 - DNA, 25 bp, Artificial
  probe
  misc_feature (1)..(25): SEQ ID NO: 6307; WAN024BP7_at; Start 243; Stop 267
aaataagtggcaaagtcctttagag

SEQ ID NO: 88884 - DNA, 25 bp, Artificial
  probe
  misc_feature (1)..(25): SEQ ID NO: 6307; WAN024BP7_at; Start 632; Stop 656
tattgaatcataccaagaaatttgt

SEQ ID NO: 88885 - DNA, 25 bp, Artificial
  probe
  misc_feature (1)..(25): SEQ ID NO: 6307; WAN024BP7_at; Start 192; Stop 216
gcctttatttatggcaatatctgga

SEQ ID NO: 88886 - DNA, 25 bp, Artificial
  probe
  misc_feature (1)..(25): SEQ ID NO: 6307; WAN024BP7_at; Start 604; Stop 628
gaacaaaaaagagaagtatacaatc

SEQ ID NO: 88887 - DNA, 25 bp, Artificial
  probe
  misc_feature (1)..(25): SEQ ID NO: 6307; WAN024BP7_at; Start 252; Stop 276
gcaaagtcctttagagttattccag

SEQ ID NO: 88888 - DNA, 25 bp, Artificial
  probe
  misc_feature (1)..(25): SEQ ID NO: 6307; WAN024BP7_at; Start 171; Stop 195
gattatctattactttcatatgcct

SEQ ID NO: 88889 - DNA, 25 bp, Artificial
  probe
  misc_feature (1)..(25): SEQ ID NO: 6307; WAN024BP7_at; Start 28; Stop 52
aaagtcctcacaatattattagtag

SEQ ID NO: 88890 - DNA, 25 bp, Artificial
  probe
  misc_feature (1)..(25): SEQ ID NO: 6307; WAN024BP7_at; Start 279; Stop 303
caaatttagaagactattaatccca

SEQ ID NO: 88891 - DNA, 25 bp, Artificial
  probe
  misc_feature (1)..(25): SEQ ID NO: 6307; WAN024BP7_at; Start 800; Stop 824
caagaaacacgaaatggatgaatac

SEQ ID NO: 88892 - DNA, 25 bp, Artificial
  probe
  misc_feature (1)..(25): SEQ ID NO: 6307; WAN024BP7_at; Start 506; Stop 530
tcctatttgcacttcatttaatgag

SEQ ID NO: 88893 - DNA, 25 bp, Artificial
  probe
  misc_feature (1)..(25): SEQ ID NO: 6307; WAN024BP7_at; Start 317; Stop 341
cgattttgtatactattcctatgaa

SEQ ID NO: 88894 - DNA, 25 bp, Artificial
  probe
  misc_feature (1)..(25): SEQ ID NO: 6307; WAN024BP7_at; Start 349; Stop 373
tcaaactattttatacaaacgagta

SEQ ID NO: 88895 - DNA, 25 bp, Artificial
  probe
  misc_feature (1)..(25): SEQ ID NO: 6307; WAN024BP7_at; Start 378; Stop 402
taatgcgattattggtcaactgttt

SEQ ID NO: 88896 - DNA, 25 bp, Artificial
  probe
  misc_feature (1)..(25): SEQ ID NO: 6307; WAN024BP7_at; Start 47; Stop 71
tagtagtattaggacatagtacgta

SEQ ID NO: 88897 - DNA, 25 bp, Artificial
  probe
  misc_feature (1)..(25): SEQ ID NO: 6307; WAN024BP7_at; Start 402; Stop 426
tttatttgggaacactcatctgtgg

SEQ ID NO: 88898 - DNA, 25 bp, Artificial
  probe
  misc_feature (1)..(25): SEQ ID NO: 6307; WAN024BP7_at; Start 494; Stop 518
gaatgttactgttcctatttgcact

SEQ ID NO: 88899 - DNA, 25 bp, Artificial
  probe
  misc_feature (1)..(25): SEQ ID NO: 6307; WAN024BP7_at; Start 1027; Stop 1051
tttccgaagtataaatggttagtga

SEQ ID NO: 88900 - DNA, 25 bp, Artificial
  probe
  misc_feature (1)..(25): SEQ ID NO: 6307; WAN024BP7_at; Start 937; Stop 961
acacctcatggaattattttgatgg

SEQ ID NO: 88901 - DNA, 25 bp, Artificial
  probe
  misc_feature (1)..(25): SEQ ID NO: 6307; WAN024BP7_at; Start 585; Stop 609
tgcgattggttttaaatttgaacaa

SEQ ID NO: 88902 - DNA, 25 bp, Artificial
  probe
  misc_feature (1)..(25): SEQ ID NO: 6307; WAN024BP7_at; Start 265; Stop 289
gagttattccagaacaaatttagaa

SEQ ID NO: 88903 - DNA, 25 bp, Artificial
  probe
  misc_feature (1)..(25): SEQ ID NO: 6307; WAN024BP7_at; Start 414; Stop 438
cactcatctgtggtatttatatgca

SEQ ID NO: 88904 - DNA, 25 bp, Artificial
  probe
  misc_feature (1)..(25): SEQ ID NO: 6307; WAN024BP7_at; Start 713; Stop 737
gatactcaattattttttcaaagct

SEQ ID NO: 88905 - DNA, 25 bp, Artificial
  probe
  misc_feature (1)..(25): SEQ ID NO: 6307; WAN024BP7_at; Start 835; Stop 859
cagtttattttagtcaatggtctag

SEQ ID NO: 88906 - DNA, 25 bp, Artificial
  probe
  misc_feature (1)..(25): SEQ ID NO: 6307; WAN024BP7_at; Start 906; Stop 930
gggctttattgttgctgaggattta

SEQ ID NO: 88907 - DNA, 25 bp, Artificial
  probe
  misc_feature (1)..(25): SEQ ID NO: 6307; WAN024BP7_at; Start 362; Stop 386
tacaaacgagtatctttaatgcgat

SEQ ID NO: 88908 - DNA, 25 bp, Artificial
  probe
  misc_feature (1)..(25): SEQ ID NO: 6307; WAN024BP7_at; Start 752; Stop 776
tagcattgtatggaagtttggtaac

SEQ ID NO: 88909 - DNA, 25 bp, Artificial
  probe
  misc_feature (1)..(25): SEQ ID NO: 6603; WAN024BP8_at; Start 16; Stop 40
tatattcatgaagagtttggtagtg

SEQ ID NO: 88910 - DNA, 25 bp, Artificial
  probe
  misc_feature (1)..(25): SEQ ID NO: 6603; WAN024BP8_at; Start 952; Stop 976
aatattgaacagttgtccaaaaagg

SEQ ID NO: 88911 - DNA, 25 bp, Artificial
  probe
  misc_feature (1)..(25): SEQ ID NO: 6603; WAN024BP8_at; Start 54; Stop 78
tacaaaagcaccaaatgatttacag

SEQ ID NO: 88912 - DNA, 25 bp, Artificial
  probe
  misc_feature (1)..(25): SEQ ID NO: 6603; WAN024BP8_at; Start 388; Stop 412
tgtcataaccaacgaatgaaggagt

SEQ ID NO: 88913 - DNA, 25 bp, Artificial
  probe
  misc_feature (1)..(25): SEQ ID NO: 6603; WAN024BP8_at; Start 769; Stop 793
tacaataatcctcataaagtgtcgt

SEQ ID NO: 88914 - DNA, 25 bp, Artificial
  probe
  misc_feature (1)..(25): SEQ ID NO: 6603; WAN024BP8_at; Start 965; Stop 989
tgtccaaaaaggtaaggcaaggcta

SEQ ID NO: 88915 - DNA, 25 bp, Artificial
  probe
  misc_feature (1)..(25): SEQ ID NO: 6603; WAN024BP8_at; Start 225; Stop 249
tgctactcatgggaaactaaaaaat

SEQ ID NO: 88916 - DNA, 25 bp, Artificial
  probe
  misc_feature (1)..(25): SEQ ID NO: 6603; WAN024BP8_at; Start 688; Stop 712
atacttgaaggtgattttggattag

SEQ ID NO: 88917 - DNA, 25 bp, Artificial
  probe
  misc_feature (1)..(25): SEQ ID NO: 6603; WAN024BP8_at; Start 31; Stop 55
tttggtagtgattcaacggcggcta

SEQ ID NO: 88918 - DNA, 25 bp, Artificial
  probe
  misc_feature (1)..(25): SEQ ID NO: 6603; WAN024BP8_at; Start 511; Stop 535
aaaacagttgtaattgcagggaatc

SEQ ID NO: 88919 - DNA, 25 bp, Artificial
  probe
  misc_feature (1)..(25): SEQ ID NO: 6603; WAN024BP8_at; Start 607; Stop 631
ggacctaattttacttcatcgacta

SEQ ID NO: 88920 - DNA, 25 bp, Artificial
  probe
  misc_feature (1)..(25): SEQ ID NO: 6603; WAN024BP8_at; Start 373; Stop 397
gctgatgtgattatttgtcataacc

SEQ ID NO: 88921 - DNA, 25 bp, Artificial
  probe
  misc_feature (1)..(25): SEQ ID NO: 6603; WAN024BP8_at; Start 308; Stop 332
tagagtcgttaagatattcgggaaa

SEQ ID NO: 88922 - DNA, 25 bp, Artificial
  probe
  misc_feature (1)..(25): SEQ ID NO: 6603; WAN024BP8_at; Start 798; Stop 822
tatagcttcaaaaataccagttatt

SEQ ID NO: 88923 - DNA, 25 bp, Artificial
  probe
  misc_feature (1)..(25): SEQ ID NO: 6603; WAN024BP8_at; Start 995; Stop 1019
cgaatttagcgattgaaaaatcttt

SEQ ID NO: 88924 - DNA, 25 bp, Artificial
  probe
  misc_feature (1)..(25): SEQ ID NO: 6603; WAN024BP8_at; Start 350; Stop 374
ctaaggaacagtatattaaaaatgc

SEQ ID NO: 88925 - DNA, 25 bp, Artificial
  probe
  misc_feature (1)..(25): SEQ ID NO: 6603; WAN024BP8_at; Start 731; Stop 755
tattaacttgttcagggattactgg

SEQ ID NO: 88926 - DNA, 25 bp, Artificial
  probe
  misc_feature (1)..(25): SEQ ID NO: 6603; WAN024BP8_at; Start 835; Stop 859
tctgccttgagtgattttgttaaag

SEQ ID NO: 88927 - DNA, 25 bp, Artificial
  probe
  misc_feature (1)..(25): SEQ ID NO: 6603; WAN024BP8_at; Start 822; Stop 846
tatttggaaacaatctgccttgagt

SEQ ID NO: 88928 - DNA, 25 bp, Artificial
  probe
  misc_feature (1)..(25): SEQ ID NO: 6603; WAN024BP8_at; Start 622; Stop 646
tcatcgactaacaataatgattgtg

SEQ ID NO: 88929 - DNA, 25 bp, Artificial
  probe
  misc_feature (1)..(25): SEQ ID NO: 6603; WAN024BP8_at; Start 981; Stop 1005
gcaaggctattttacgaatttagcg

SEQ ID NO: 88930 - DNA, 25 bp, Artificial
  probe
  misc_feature (1)..(25): SEQ ID NO: 6603; WAN024BP8_at; Start 88; Stop 112
caagactgtaaatttaaaccattag

SEQ ID NO: 88931 - DNA, 25 bp, Artificial
  probe
  misc_feature (1)..(25): SEQ ID NO: 6603; WAN024BP8_at; Start 650; Stop 674
catataaaggaagtttttcgcctga

SEQ ID NO: 88932 - DNA, 25 bp, Artificial
  probe
  misc_feature (1)..(25): SEQ ID NO: 6603; WAN024BP8_at; Start 42; Stop 66
ttcaacggcggctacaaaagcacca

SEQ ID NO: 88933 - DNA, 25 bp, Artificial
  probe
  misc_feature (1)..(25): SEQ ID NO: 6603; WAN024BP8_at; Start 137; Stop 161
tagtaagaatatttgattacgcgtt

SEQ ID NO: 88934 - DNA, 25 bp, Artificial
  probe
  misc_feature (1)..(25): SEQ ID NO: 6603; WAN024BP8_at; Start 527; Stop 551
cagggaatctttcgcctcaaaaaag

SEQ ID NO: 88935 - DNA, 25 bp, Artificial
  probe
  misc_feature (1)..(25): SEQ ID NO: 6603; WAN024BP8_at; Start 909; Stop 933
tattactaatatgactgaagagcaa

SEQ ID NO: 88936 - DNA, 25 bp, Artificial
  probe
  misc_feature (1)..(25): SEQ ID NO: 6603; WAN024BP8_at; Start 921; Stop 945
gactgaagagcaatatgagattttt

SEQ ID NO: 88937 - DNA, 25 bp, Artificial
  probe
  misc_feature (1)..(25): SEQ ID NO: 6603; WAN024BP8_at; Start 435; Stop 459
cagtgaaaaaatagttgtactcggt

SEQ ID NO: 88938 - DNA, 25 bp, Artificial
  probe
  misc_feature (1)..(25): SEQ ID NO: 6603; WAN024BP8_at; Start 214; Stop 238
caatttccttttgctactcatggga

SEQ ID NO: 88939 - DNA, 25 bp, Artificial
  probe
  misc_feature (1)..(25): SEQ ID NO: 6603; WAN024BP8_at; Start 496; Stop 520
aaagcatcttttgataaaacagttg

SEQ ID NO: 88940 - DNA, 25 bp, Artificial
  probe
  misc_feature (1)..(25): SEQ ID NO: 6603; WAN024BP8_at; Start 704; Stop 728
ttggattagtttgggatggcgattc

SEQ ID NO: 88941 - DNA, 25 bp, Artificial
  probe
  misc_feature (1)..(25): SEQ ID NO: 6603; WAN024BP8_at; Start 784; Stop 808
aaagtgtcgttatttatagcttcaa

SEQ ID NO: 88942 - DNA, 25 bp, Artificial
  probe
  misc_feature (1)..(25): SEQ ID NO: 6603; WAN024BP8_at; Start 716; Stop 740
gggatggcgattctatattaacttg

SEQ ID NO: 88943 - DNA, 25 bp, Artificial
  probe
  misc_feature (1)..(25): SEQ ID NO: 6465; WAN024BP9_at; Start 795; Stop 819
tcttgaacagcctctaattttagta

SEQ ID NO: 88944 - DNA, 25 bp, Artificial
  probe
  misc_feature (1)..(25): SEQ ID NO: 6465; WAN024BP9_at; Start 159; Stop 183
ggaacaggcaaattttgaaatacga

SEQ ID NO: 88945 - DNA, 25 bp, Artificial
  probe
  misc_feature (1)..(25): SEQ ID NO: 6465; WAN024BP9_at; Start 225; Stop 249
tcatggtttggatttagctagaggg

SEQ ID NO: 88946 - DNA, 25 bp, Artificial
  probe
  misc_feature (1)..(25): SEQ ID NO: 6465; WAN024BP9_at; Start 820; Stop 844
tatatggtagtaatgatggctagaa

SEQ ID NO: 88947 - DNA, 25 bp, Artificial
  probe
  misc_feature (1)..(25): SEQ ID NO: 6465; WAN024BP9_at; Start 496; Stop 520
aagagtattaagtttccagtggtag

SEQ ID NO: 88948 - DNA, 25 bp, Artificial
  probe
  misc_feature (1)..(25): SEQ ID NO: 6465; WAN024BP9_at; Start 434; Stop 458
tacatcgagctaaacataatatttt

SEQ ID NO: 88949 - DNA, 25 bp, Artificial
  probe
  misc_feature (1)..(25): SEQ ID NO: 6465; WAN024BP9_at; Start 95; Stop 119
ttgaatggcttattgtagatgatgg

SEQ ID NO: 88950 - DNA, 25 bp, Artificial
  probe
  misc_feature (1)..(25): SEQ ID NO: 6465; WAN024BP9_at; Start 250; Stop 274
gagttattcttcatcgttgattccg

SEQ ID NO: 88951 - DNA, 25 bp, Artificial
  probe
  misc_feature (1)..(25): SEQ ID NO: 6465; WAN024BP9_at; Start 550; Stop 574
ttatggaatgaagttgcaagaaggg

SEQ ID NO: 88952 - DNA, 25 bp, Artificial
  probe
  misc_feature (1)..(25): SEQ ID NO: 6465; WAN024BP9_at; Start 60; Stop 84
gtttcattcattaaacagtcaaaca

SEQ ID NO: 88953 - DNA, 25 bp, Artificial
  probe
  misc_feature (1)..(25): SEQ ID NO: 6465; WAN024BP9_at; Start 448; Stop 472
cataatattttaggagataaggcag

SEQ ID NO: 88954 - DNA, 25 bp, Artificial
  probe
  misc_feature (1)..(25): SEQ ID NO: 6465; WAN024BP9_at; Start 666; Stop 690
taacccagttgcacatcaaatgatg

SEQ ID NO: 88955 - DNA, 25 bp, Artificial
  probe
  misc_feature (1)..(25): SEQ ID NO: 6465; WAN024BP9_at; Start 781; Stop 805
caaactgctattaatcttgaacagc

SEQ ID NO: 88956 - DNA, 25 bp, Artificial
  probe
  misc_feature (1)..(25): SEQ ID NO: 6465; WAN024BP9_at; Start 211; Stop 235
catagagcaattaatcatggtttgg

SEQ ID NO: 88957 - DNA, 25 bp, Artificial
  probe
  misc_feature (1)..(25): SEQ ID NO: 6465; WAN024BP9_at; Start 353; Stop 377
gcatagcatttaatagaggtttctc

SEQ ID NO: 88958 - DNA, 25 bp, Artificial
  probe
  misc_feature (1)..(25): SEQ ID NO: 6465; WAN024BP9_at; Start 536; Stop 560
tgagtgaagttgtcttatggaatga

SEQ ID NO: 88959 - DNA, 25 bp, Artificial
  probe
  misc_feature (1)..(25): SEQ ID NO: 6465; WAN024BP9_at; Start 335; Stop 359
ttaatcatagttttgcaggcatagc

SEQ ID NO: 88960 - DNA, 25 bp, Artificial
  probe
  misc_feature (1)..(25): SEQ ID NO: 6465; WAN024BP9_at; Start 406; Stop 430
gaaggaacatatatagattgtgaca

SEQ ID NO: 88961 - DNA, 25 bp, Artificial
  probe
  misc_feature (1)..(25): SEQ ID NO: 6465; WAN024BP9_at; Start 682; Stop 706
caaatgatgaccaaggaattgttac

SEQ ID NO: 88962 - DNA, 25 bp, Artificial
  probe
  misc_feature (1)..(25): SEQ ID NO: 6465; WAN024BP9_at; Start 764; Stop 788
gaaaccaaagtattaagcaaactgc

SEQ ID NO: 88963 - DNA, 25 bp, Artificial
  probe
  misc_feature (1)..(25): SEQ ID NO: 6465; WAN024BP9_at; Start 511; Stop 535
ccagtggtagatggagaaaacttta

SEQ ID NO: 88964 - DNA, 25 bp, Artificial
  probe
  misc_feature (1)..(25): SEQ ID NO: 6465; WAN024BP9_at; Start 115; Stop 139
gatggttcaatagatcagactggtg

SEQ ID NO: 88965 - DNA, 25 bp, Artificial
  probe
  misc_feature (1)..(25): SEQ ID NO: 6465; WAN024BP9_at; Start 79; Stop 103
caaacaaataaacattttgaatggc

SEQ ID NO: 88966 - DNA, 25 bp, Artificial
  probe
  misc_feature (1)..(25): SEQ ID NO: 6465; WAN024BP9_at; Start 317; Stop 341
actattctggaattgcctttaatca

SEQ ID NO: 88967 - DNA, 25 bp, Artificial
  probe
  misc_feature (1)..(25): SEQ ID NO: 6465; WAN024BP9_at; Start 144; Stop 168
tgttgaaacatttaaggaacaggca

SEQ ID NO: 88968 - DNA, 25 bp, Artificial
  probe
  misc_feature (1)..(25): SEQ ID NO: 6465; WAN024BP9_at; Start 421; Stop 445
gattgtgacaatttacatcgagcta

SEQ ID NO: 88969 - DNA, 25 bp, Artificial
  probe
  misc_feature (1)..(25): SEQ ID NO: 6465; WAN024BP9_at; Start 616; Stop 640
gactatttagaagacggattaacca

SEQ ID NO: 88970 - DNA, 25 bp, Artificial
  probe
  misc_feature (1)..(25): SEQ ID NO: 6465; WAN024BP9_at; Start 389; Stop 413
tagttggagagacttttgaaggaac

SEQ ID NO: 88971 - DNA, 25 bp, Artificial
  probe
  misc_feature (1)..(25): SEQ ID NO: 6465; WAN024BP9_at; Start 130; Stop 154
cagactggtgagcttgttgaaacat

SEQ ID NO: 88972 - DNA, 25 bp, Artificial
  probe
  misc_feature (1)..(25): SEQ ID NO: 6465; WAN024BP9_at; Start 579; Stop 603
taaattacgttggtttaatgacata

SEQ ID NO: 88973 - DNA, 25 bp, Artificial
  probe
  misc_feature (1)..(25): SEQ ID NO: 6465; WAN024BP9_at; Start 196; Stop 220
caaaatggtggtaagcatagagcaa

SEQ ID NO: 88974 - DNA, 25 bp, Artificial
  probe
  misc_feature (1)..(25): SEQ ID NO: 6465; WAN024BP9_at; Start 281; Stop 305
cattgacagatgatgctattgagaa

SEQ ID NO: 88975 - DNA, 25 bp, Artificial
  probe
  misc_feature (1)..(25): SEQ ID NO: 6465; WAN024BP9_at; Start 264; Stop 288
cgttgattccgatgattcattgaca

SEQ ID NO: 88976 - DNA, 25 bp, Artificial
  probe
  misc_feature (1)..(25): SEQ ID NO: 6465; WAN024BP9_at; Start 465; Stop 489
taaggcagaagtatatcgaacagat

SEQ ID NO: 88977 - DNA, 25 bp, Artificial
  probe
  misc_feature (1)..(25): SEQ ID NO: 7410; WAN024BPA_at; Start 231; Stop 255
tggttctacatttctagaaataacg

SEQ ID NO: 88978 - DNA, 25 bp, Artificial
  probe
  misc_feature (1)..(25): SEQ ID NO: 7410; WAN024BPA_at; Start 560; Stop 584
tagcagactctagaacatcaggata

SEQ ID NO: 88979 - DNA, 25 bp, Artificial
  probe
  misc_feature (1)..(25): SEQ ID NO: 7410; WAN024BPA_at; Start 833; Stop 857
gaattgtctcattagttcaaggaac

SEQ ID NO: 88980 - DNA, 25 bp, Artificial
  probe
  misc_feature (1)..(25): SEQ ID NO: 7410; WAN024BPA_at; Start 545; Stop 569
tatggatattacagttagcagactc

SEQ ID NO: 88981 - DNA, 25 bp, Artificial
  probe
  misc_feature (1)..(25): SEQ ID NO: 7410; WAN024BPA_at; Start 131; Stop 155
tattcctgtttgtgatgcatagtct

SEQ ID NO: 88982 - DNA, 25 bp, Artificial
  probe
  misc_feature (1)..(25): SEQ ID NO: 7410; WAN024BPA_at; Start 850; Stop 874
caaggaacagtcataattgacagtg

SEQ ID NO: 88983 - DNA, 25 bp, Artificial
  probe
  misc_feature (1)..(25): SEQ ID NO: 7410; WAN024BPA_at; Start 721; Stop 745
gaagccagtcatattttccaattct

SEQ ID NO: 88984 - DNA, 25 bp, Artificial
  probe
  misc_feature (1)..(25): SEQ ID NO: 7410; WAN024BPA_at; Start 422; Stop 446
taggatttgtacacccgaattcatt

SEQ ID NO: 88985 - DNA, 25 bp, Artificial
  probe
  misc_feature (1)..(25): SEQ ID NO: 7410; WAN024BPA_at; Start 1023; Stop 1047
tggttacaccgtatttctattccca

SEQ ID NO: 88986 - DNA, 25 bp, Artificial
  probe
  misc_feature (1)..(25): SEQ ID NO: 7410; WAN024BPA_at; Start 743; Stop 767
tcttaaataaattgttcactaatcg

SEQ ID NO: 88987 - DNA, 25 bp, Artificial
  probe
  misc_feature (1)..(25): SEQ ID NO: 7410; WAN024BPA_at; Start 952; Stop 976
gaatactcatttacactaagagaag

SEQ ID NO: 88988 - DNA, 25 bp, Artificial
  probe
  misc_feature (1)..(25): SEQ ID NO: 7410; WAN024BPA_at; Start 707; Stop 731
tgtcaattaattttgaagccagtca

SEQ ID NO: 88989 - DNA, 25 bp, Artificial
  probe
  misc_feature (1)..(25): SEQ ID NO: 7410; WAN024BPA_at; Start 455; Stop 479
tgatctattccttaaccgtttgtag

SEQ ID NO: 88990 - DNA, 25 bp, Artificial
  probe
  misc_feature (1)..(25): SEQ ID NO: 7410; WAN024BPA_at; Start 345; Stop 369
aattatattattgtcccatattggc

SEQ ID NO: 88991 - DNA, 25 bp, Artificial
  probe
  misc_feature (1)..(25): SEQ ID NO: 7410; WAN024BPA_at; Start 819; Stop 843
caaaagaattgatggaattgtctca

SEQ ID NO: 88992 - DNA, 25 bp, Artificial
  probe
  misc_feature (1)..(25): SEQ ID NO: 7410; WAN024BPA_at; Start 9; Stop 33
cgaagagaaatataacacattgttc

SEQ ID NO: 88993 - DNA, 25 bp, Artificial
  probe
  misc_feature (1)..(25): SEQ ID NO: 7410; WAN024BPA_at; Start 411; Stop 435
taggaatagtttaggatttgtacac

SEQ ID NO: 88994 - DNA, 25 bp, Artificial
  probe
  misc_feature (1)..(25): SEQ ID NO: 7410; WAN024BPA_at; Start 397; Stop 421
tcaaatggtggtattaggaatagtt

SEQ ID NO: 88995 - DNA, 25 bp, Artificial
  probe
  misc_feature (1)..(25): SEQ ID NO: 7410; WAN024BPA_at; Start 384; Stop 408
tgtgatatatagatcaaatggtggt

SEQ ID NO: 88996 - DNA, 25 bp, Artificial
  probe
  misc_feature (1)..(25): SEQ ID NO: 7410; WAN024BPA_at; Start 435; Stop 459
cccgaattcattagggttaatgatc

SEQ ID NO: 88997 - DNA, 25 bp, Artificial
  probe
  misc_feature (1)..(25): SEQ ID NO: 7410; WAN024BPA_at; Start 973; Stop 997
gaaggtattctactgattagtgtat

SEQ ID NO: 88998 - DNA, 25 bp, Artificial
  probe
  misc_feature (1)..(25): SEQ ID NO: 7410; WAN024BPA_at; Start 572; Stop 596
gaacatcaggatatataagtatttt

SEQ ID NO: 88999 - DNA, 25 bp, Artificial
  probe
  misc_feature (1)..(25): SEQ ID NO: 7410; WAN024BPA_at; Start 805; Stop 829
gttactctatttggcaaaagaattg

SEQ ID NO: 89000 - DNA, 25 bp, Artificial
  probe
  misc_feature (1)..(25): SEQ ID NO: 7410; WAN024BPA_at; Start 323; Stop 347
cacttacagtattcgtgttaacaat

SEQ ID NO: 89001 - DNA, 25 bp, Artificial
  probe
  misc_feature (1)..(25): SEQ ID NO: 7410; WAN024BPA_at; Start 141; Stop 165
tgtgatgcatagtcttaaatatgga

SEQ ID NO: 89002 - DNA, 25 bp, Artificial
  probe
  misc_feature (1)..(25): SEQ ID NO: 7410; WAN024BPA_at; Start 963; Stop 987
tacactaagagaaggtattctactg

SEQ ID NO: 89003 - DNA, 25 bp, Artificial
  probe
  misc_feature (1)..(25): SEQ ID NO: 7410; WAN024BPA_at; Start 97; Stop 121
gatggaatttctattgtaatcctta

SEQ ID NO: 89004 - DNA, 25 bp, Artificial
  probe
  misc_feature (1)..(25): SEQ ID NO: 7410; WAN024BPA_at; Start 881; Stop 905
taggattgctattacaaaaaggaat

SEQ ID NO: 89005 - DNA, 25 bp, Artificial
  probe
  misc_feature (1)..(25): SEQ ID NO: 7410; WAN024BPA_at; Start 1008; Stop 1032
tatgtttgagagctatggttacacc

SEQ ID NO: 89006 - DNA, 25 bp, Artificial
  probe
  misc_feature (1)..(25): SEQ ID NO: 7410; WAN024BPA_at; Start 46; Stop 70
tctctgttaacaatattgtatctac

SEQ ID NO: 89007 - DNA, 25 bp, Artificial
  probe
  misc_feature (1)..(25): SEQ ID NO: 7410; WAN024BPA_at; Start 866; Stop 890
ttgacagtggttatataggattgct

SEQ ID NO: 89008 - DNA, 25 bp, Artificial
  probe
  misc_feature (1)..(25): SEQ ID NO: 7410; WAN024BPA_at; Start 78; Stop 102
tgtaaatattgacagaattgatgga

SEQ ID NO: 89009 - DNA, 25 bp, Artificial
  probe
  misc_feature (1)..(25): SEQ ID NO: 7410; WAN024BPA_at; Start 357; Stop 381
gtcccatattggctatattagtaat

SEQ ID NO: 89010 - DNA, 25 bp, Artificial
  probe
  misc_feature (1)..(25): SEQ ID NO: 7410; WAN024BPA_at; Start 666; Stop 690
taatttggctattacaatgtctgtt

SEQ ID NO: 89011 - DNA, 25 bp, Artificial
  probe
  misc_feature (1)..(25): SEQ ID NO: 7402; WAN024BPB_at; Start 913; Stop 937
tcaacaaaaactcaaggttctgagg

SEQ ID NO: 89012 - DNA, 25 bp, Artificial
  probe
  misc_feature (1)..(25): SEQ ID NO: 7402; WAN024BPB_at; Start 219; Stop 243
gcttgttaagttattaccaccgtca

SEQ ID NO: 89013 - DNA, 25 bp, Artificial
  probe
  misc_feature (1)..(25): SEQ ID NO: 7402; WAN024BPB_at; Start 759; Stop 783
caatctaggagagagccaatatata

SEQ ID NO: 89014 - DNA, 25 bp, Artificial
  probe
  misc_feature (1)..(25): SEQ ID NO: 7402; WAN024BPB_at; Start 350; Stop 374
cgaatgaagatagcttaaaactggc

SEQ ID NO: 89015 - DNA, 25 bp, Artificial
  probe
  misc_feature (1)..(25): SEQ ID NO: 7402; WAN024BPB_at; Start 1005; Stop 1029
gaaagtcattgcgaacaactttgtt

SEQ ID NO: 89016 - DNA, 25 bp, Artificial
  probe
  misc_feature (1)..(25): SEQ ID NO: 7402; WAN024BPB_at; Start 934; Stop 958
gaggttatgtcagaatatttcgaag

SEQ ID NO: 89017 - DNA, 25 bp, Artificial
  probe
  misc_feature (1)..(25): SEQ ID NO: 7402; WAN024BPB_at; Start 27; Stop 51
aactagtttaacaggtggaggagct

SEQ ID NO: 89018 - DNA, 25 bp, Artificial
  probe
  misc_feature (1)..(25): SEQ ID NO: 7402; WAN024BPB_at; Start 435; Stop 459
agaggaattgacttgttatcaaaag

SEQ ID NO: 89019 - DNA, 25 bp, Artificial
  probe
  misc_feature (1)..(25): SEQ ID NO: 7402; WAN024BPB_at; Start 540; Stop 564
ccctaacttgcttaacattgatgaa

SEQ ID NO: 89020 - DNA, 25 bp, Artificial
  probe
  misc_feature (1)..(25): SEQ ID NO: 7402; WAN024BPB_at; Start 751; Stop 775
caaattaacaatctaggagagagcc

SEQ ID NO: 89021 - DNA, 25 bp, Artificial
  probe
  misc_feature (1)..(25): SEQ ID NO: 7402; WAN024BPB_at; Start 516; Stop 540
tccaaagacaaatttagaagtaatc

SEQ ID NO: 89022 - DNA, 25 bp, Artificial
  probe
  misc_feature (1)..(25): SEQ ID NO: 7402; WAN024BPB_at; Start 613; Stop 637
ttttgtgcgataggaagattagaac

SEQ ID NO: 89023 - DNA, 25 bp, Artificial
  probe
  misc_feature (1)..(25): SEQ ID NO: 7402; WAN024BPB_at; Start 139; Stop 163
ggctcaaaattaagtcatttaagga

SEQ ID NO: 89024 - DNA, 25 bp, Artificial
  probe
  misc_feature (1)..(25): SEQ ID NO: 7402; WAN024BPB_at; Start 325; Stop 349
cctacaaaaatcatagcgggatcat

SEQ ID NO: 89025 - DNA, 25 bp, Artificial
  probe
  misc_feature (1)..(25): SEQ ID NO: 7402; WAN024BPB_at; Start 977; Stop 1001
cgagtaacgaattagcaaaagggct

SEQ ID NO: 89026 - DNA, 25 bp, Artificial
  probe
  misc_feature (1)..(25): SEQ ID NO: 7402; WAN024BPB_at; Start 97; Stop 121
gaaattagcattctagtatatacgg

SEQ ID NO: 89027 - DNA, 25 bp, Artificial
  probe
  misc_feature (1)..(25): SEQ ID NO: 7402; WAN024BPB_at; Start 467; Stop 491
caatcttagctgtttctactccaca

SEQ ID NO: 89028 - DNA, 25 bp, Artificial
  probe
  misc_feature (1)..(25): SEQ ID NO: 7402; WAN024BPB_at; Start 962; Stop 986
tccaggtagagcatacgagtaacga

SEQ ID NO: 89029 - DNA, 25 bp, Artificial
  probe
  misc_feature (1)..(25): SEQ ID NO: 7402; WAN024BPB_at; Start 336; Stop 360
catagcgggatcatcgaatgaagat

SEQ ID NO: 89030 - DNA, 25 bp, Artificial
  probe
  misc_feature (1)..(25): SEQ ID NO: 7402; WAN024BPB_at; Start 896; Stop 920
taggcattcctagtatttcaacaaa

SEQ ID NO: 89031 - DNA, 25 bp, Artificial
  probe
  misc_feature (1)..(25): SEQ ID NO: 7402; WAN024BPB_at; Start 866; Stop 890
ttagttatgtattagcagaagcagc

SEQ ID NO: 89032 - DNA, 25 bp, Artificial
  probe
  misc_feature (1)..(25): SEQ ID NO: 7402; WAN024BPB_at; Start 305; Stop 329
ttgcatatatggaaggaaaacctac

SEQ ID NO: 89033 - DNA, 25 bp, Artificial
  probe
  misc_feature (1)..(25): SEQ ID NO: 7402; WAN024BPB_at; Start 249; Stop 273
gaatagatggattatacagagaagt

SEQ ID NO: 89034 - DNA, 25 bp, Artificial
  probe
  misc_feature (1)..(25): SEQ ID NO: 7402; WAN024BPB_at; Start 496; Stop 520
gaatcctttgaggagatttttccaa

SEQ ID NO: 89035 - DNA, 25 bp, Artificial
  probe
  misc_feature (1)..(25): SEQ ID NO: 7402; WAN024BPB_at; Start 883; Stop 907
gaagcagctgctttaggcattccta

SEQ ID NO: 89036 - DNA, 25 bp, Artificial
  probe
  misc_feature (1)..(25): SEQ ID NO: 7402; WAN024BPB_at; Start 481; Stop 505
tctactccacaaaaagaatcctttg

SEQ ID NO: 89037 - DNA, 25 bp, Artificial
  probe
  misc_feature (1)..(25): SEQ ID NO: 7402; WAN024BPB_at; Start 174; Stop 198
tattagaaagaatacaccagctatt

SEQ ID NO: 89038 - DNA, 25 bp, Artificial
  probe
  misc_feature (1)..(25): SEQ ID NO: 7402; WAN024BPB_at; Start 235; Stop 259
ccaccgtcatttgtgaatagatgga

SEQ ID NO: 89039 - DNA, 25 bp, Artificial
  probe
  misc_feature (1)..(25): SEQ ID NO: 7402; WAN024BPB_at; Start 828; Stop 852
tagtgtgggattaattcaaagttca

SEQ ID NO: 89040 - DNA, 25 bp, Artificial
  probe
  misc_feature (1)..(25): SEQ ID NO: 7402; WAN024BPB_at; Start 949; Stop 973
tatttcgaagtaatccaggtagagc

SEQ ID NO: 89041 - DNA, 25 bp, Artificial
  probe
  misc_feature (1)..(25): SEQ ID NO: 7402; WAN024BPB_at; Start 839; Stop 863
taattcaaagttcagtatcagagtc

SEQ ID NO: 89042 - DNA, 25 bp, Artificial
  probe
  misc_feature (1)..(25): SEQ ID NO: 7402; WAN024BPB_at; Start 365; Stop 389
taaaactggcttatatccattgcga

SEQ ID NO: 89043 - DNA, 25 bp, Artificial
  probe
  misc_feature (1)..(25): SEQ ID NO: 7402; WAN024BPB_at; Start 381; Stop 405
ccattgcgatttctcaaaaaattgg

SEQ ID NO: 89044 - DNA, 25 bp, Artificial
  probe
  misc_feature (1)..(25): SEQ ID NO: 7402; WAN024BPB_at; Start 992; Stop 1016
caaaagggctagagaaagtcattgc

SEQ ID NO: 89045 - DNA, 25 bp, Artificial
  probe
  misc_feature (1)..(25): SEQ ID NO: 7003; WAN024BPC_at; Start 50; Stop 74
cctcaaaggattctttttgtggagt

SEQ ID NO: 89046 - DNA, 25 bp, Artificial
  probe
  misc_feature (1)..(25): SEQ ID NO: 7003; WAN024BPC_at; Start 30; Stop 54
atttgtctttggaaaaatctcctca

SEQ ID NO: 89047 - DNA, 25 bp, Artificial
  probe
  misc_feature (1)..(25): SEQ ID NO: 7003; WAN024BPC_at; Start 32; Stop 56
ttgtctttggaaaaatctcctcaaa

SEQ ID NO: 89048 - DNA, 25 bp, Artificial
  probe
  misc_feature (1)..(25): SEQ ID NO: 7003; WAN024BPC_at; Start 68; Stop 92
gtggagtagaaacagctaagattga

SEQ ID NO: 89049 - DNA, 25 bp, Artificial
  probe
  misc_feature (1)..(25): SEQ ID NO: 7003; WAN024BPC_at; Start 78; Stop 102
aacagctaagattgaattaaacttt

SEQ ID NO: 89050 - DNA, 25 bp, Artificial
  probe
  misc_feature (1)..(25): SEQ ID NO: 7003; WAN024BPC_at; Start 36; Stop 60
ctttggaaaaatctcctcaaaggat

SEQ ID NO: 89051 - DNA, 25 bp, Artificial
  probe
  misc_feature (1)..(25): SEQ ID NO: 7003; WAN024BPC_at; Start 61; Stop 85
tctttttgtggagtagaaacagcta

SEQ ID NO: 89052 - DNA, 25 bp, Artificial
  probe
  misc_feature (1)..(25): SEQ ID NO: 7003; WAN024BPC_at; Start 70; Stop 94
ggagtagaaacagctaagattgaat

SEQ ID NO: 89053 - DNA, 25 bp, Artificial
  probe
  misc_feature (1)..(25): SEQ ID NO: 7003; WAN024BPC_at; Start 4; Stop 28
ttaagcaagttagggattacttcta

SEQ ID NO: 89054 - DNA, 25 bp, Artificial
  probe
  misc_feature (1)..(25): SEQ ID NO: 7003; WAN024BPC_at; Start 59; Stop 83
attctttttgtggagtagaaacagc

SEQ ID NO: 89055 - DNA, 25 bp, Artificial
  probe
  misc_feature (1)..(25): SEQ ID NO: 7003; WAN024BPC_at; Start 57; Stop 81
ggattctttttgtggagtagaaaca

SEQ ID NO: 89056 - DNA, 25 bp, Artificial
  probe
  misc_feature (1)..(25): SEQ ID NO: 7003; WAN024BPC_at; Start 53; Stop 77
caaaggattctttttgtggagtaga

SEQ ID NO: 89057 - DNA, 25 bp, Artificial
  probe
  misc_feature (1)..(25): SEQ ID NO: 7003; WAN024BPC_at; Start 35; Stop 59
tctttggaaaaatctcctcaaagga

SEQ ID NO: 89058 - DNA, 25 bp, Artificial
  probe
  misc_feature (1)..(25): SEQ ID NO: 7003; WAN024BPC_at; Start 7; Stop 31
agcaagttagggattacttctaaat

SEQ ID NO: 89059 - DNA, 25 bp, Artificial
  probe
  misc_feature (1)..(25): SEQ ID NO: 7003; WAN024BPC_at; Start 64; Stop 88
ttttgtggagtagaaacagctaaga

SEQ ID NO: 89060 - DNA, 25 bp, Artificial
  probe
  misc_feature (1)..(25): SEQ ID NO: 7003; WAN024BPC_at; Start 63; Stop 87
tttttgtggagtagaaacagctaag

SEQ ID NO: 89061 - DNA, 25 bp, Artificial
  probe
  misc_feature (1)..(25): SEQ ID NO: 7003; WAN024BPC_at; Start 38; Stop 62
ttggaaaaatctcctcaaaggattc

SEQ ID NO: 89062 - DNA, 25 bp, Artificial
  probe
  misc_feature (1)..(25): SEQ ID NO: 7003; WAN024BPC_at; Start 33; Stop 57
tgtctttggaaaaatctcctcaaag

SEQ ID NO: 89063 - DNA, 25 bp, Artificial
  probe
  misc_feature (1)..(25): SEQ ID NO: 7003; WAN024BPC_at; Start 58; Stop 82
gattctttttgtggagtagaaacag

SEQ ID NO: 89064 - DNA, 25 bp, Artificial
  probe
  misc_feature (1)..(25): SEQ ID NO: 7003; WAN024BPC_at; Start 47; Stop 71
tctcctcaaaggattctttttgtgg

SEQ ID NO: 89065 - DNA, 25 bp, Artificial
  probe
  misc_feature (1)..(25): SEQ ID NO: 7003; WAN024BPC_at; Start 76; Stop 100
gaaacagctaagattgaattaaact

SEQ ID NO: 89066 - DNA, 25 bp, Artificial
  probe
  misc_feature (1)..(25): SEQ ID NO: 7003; WAN024BPC_at; Start 49; Stop 73
tcctcaaaggattctttttgtggag

SEQ ID NO: 89067 - DNA, 25 bp, Artificial
  probe
  misc_feature (1)..(25): SEQ ID NO: 7003; WAN024BPC_at; Start 18; Stop 42
gattacttctaaatttgtctttgga

SEQ ID NO: 89068 - DNA, 25 bp, Artificial
  probe
  misc_feature (1)..(25): SEQ ID NO: 7003; WAN024BPC_at; Start 73; Stop 97
gtagaaacagctaagattgaattaa

SEQ ID NO: 89069 - DNA, 25 bp, Artificial
  probe
  misc_feature (1)..(25): SEQ ID NO: 7003; WAN024BPC_at; Start 60; Stop 84
ttctttttgtggagtagaaacagct

SEQ ID NO: 89070 - DNA, 25 bp, Artificial
  probe
  misc_feature (1)..(25): SEQ ID NO: 7003; WAN024BPC_at; Start 2; Stop 26
tgttaagcaagttagggattacttc

SEQ ID NO: 89071 - DNA, 25 bp, Artificial
  probe
  misc_feature (1)..(25): SEQ ID NO: 7003; WAN024BPC_at; Start 65; Stop 89
tttgtggagtagaaacagctaagat

SEQ ID NO: 89072 - DNA, 25 bp, Artificial
  probe
  misc_feature (1)..(25): SEQ ID NO: 7003; WAN024BPC_at; Start 67; Stop 91
tgtggagtagaaacagctaagattg

SEQ ID NO: 89073 - DNA, 25 bp, Artificial
  probe
  misc_feature (1)..(25): SEQ ID NO: 7003; WAN024BPC_at; Start 39; Stop 63
tggaaaaatctcctcaaaggattct

SEQ ID NO: 89074 - DNA, 25 bp, Artificial
  probe
  misc_feature (1)..(25): SEQ ID NO: 7003; WAN024BPC_at; Start 71; Stop 95
gagtagaaacagctaagattgaatt

SEQ ID NO: 89075 - DNA, 25 bp, Artificial
  probe
  misc_feature (1)..(25): SEQ ID NO: 7003; WAN024BPC_at; Start 44; Stop 68
aaatctcctcaaaggattctttttg

SEQ ID NO: 89076 - DNA, 25 bp, Artificial
  probe
  misc_feature (1)..(25): SEQ ID NO: 7003; WAN024BPC_at; Start 31; Stop 55
tttgtctttggaaaaatctcctcaa

SEQ ID NO: 89077 - DNA, 25 bp, Artificial
  probe
  misc_feature (1)..(25): SEQ ID NO: 7003; WAN024BPC_at; Start 69; Stop 93
tggagtagaaacagctaagattgaa

SEQ ID NO: 89078 - DNA, 25 bp, Artificial
  probe
  misc_feature (1)..(25): SEQ ID NO: 7003; WAN024BPC_at; Start 62; Stop 86
ctttttgtggagtagaaacagctaa

SEQ ID NO: 89079 - DNA, 25 bp, Artificial
  probe
  misc_feature (1)..(25): SEQ ID NO: 6468; WAN024BPD_at; Start 82; Stop 106
tggcaattgttaggaaagtttcttg

SEQ ID NO: 89080 - DNA, 25 bp, Artificial
  probe
  misc_feature (1)..(25): SEQ ID NO: 6468; WAN024BPD_at; Start 774; Stop 798
tcaaatgcttgaattagaaaaatct

SEQ ID NO: 89081 - DNA, 25 bp, Artificial
  probe
  misc_feature (1)..(25): SEQ ID NO: 6468; WAN024BPD_at; Start 149; Stop 173
tttgtgaaaaaaggcacaatgtaac

SEQ ID NO: 89082 - DNA, 25 bp, Artificial
  probe
  misc_feature (1)..(25): SEQ ID NO: 6468; WAN024BPD_at; Start 739; Stop 763
gatatagcttacaaatacgatgaga

SEQ ID NO: 89083 - DNA, 25 bp, Artificial
  probe
  misc_feature (1)..(25): SEQ ID NO: 6468; WAN024BPD_at; Start 854; Stop 878
tgtgggataatattacagaaactac

SEQ ID NO: 89084 - DNA, 25 bp, Artificial
  probe
  misc_feature (1)..(25): SEQ ID NO: 6468; WAN024BPD_at; Start 838; Stop 862
gagtttgatcaaaaagtgtgggata

SEQ ID NO: 89085 - DNA, 25 bp, Artificial
  probe
  misc_feature (1)..(25): SEQ ID NO: 6468; WAN024BPD_at; Start 685; Stop 709
tattatagcagatacgatatcgctg

SEQ ID NO: 89086 - DNA, 25 bp, Artificial
  probe
  misc_feature (1)..(25): SEQ ID NO: 6468; WAN024BPD_at; Start 522; Stop 546
gaaagaagagtttgattcatcatta

SEQ ID NO: 89087 - DNA, 25 bp, Artificial
  probe
  misc_feature (1)..(25): SEQ ID NO: 6468; WAN024BPD_at; Start 492; Stop 516
agggacatgggtagatgcgactata

SEQ ID NO: 89088 - DNA, 25 bp, Artificial
  probe
  misc_feature (1)..(25): SEQ ID NO: 6468; WAN024BPD_at; Start 505; Stop 529
gatgcgactatatatatgaaagaag

SEQ ID NO: 89089 - DNA, 25 bp, Artificial
  probe
  misc_feature (1)..(25): SEQ ID NO: 6468; WAN024BPD_at; Start 64; Stop 88
cctaataatgtactaaattggcaat

SEQ ID NO: 89090 - DNA, 25 bp, Artificial
  probe
  misc_feature (1)..(25): SEQ ID NO: 6468; WAN024BPD_at; Start 559; Stop 583
tattatactataaaaacaggaggaa

SEQ ID NO: 89091 - DNA, 25 bp, Artificial
  probe
  misc_feature (1)..(25): SEQ ID NO: 6468; WAN024BPD_at; Start 598; Stop 622
cctaatatttcgaataataggtgga

SEQ ID NO: 89092 - DNA, 25 bp, Artificial
  probe
  misc_feature (1)..(25): SEQ ID NO: 6468; WAN024BPD_at; Start 163; Stop 187
cacaatgtaacaagaggatttttgg

SEQ ID NO: 89093 - DNA, 25 bp, Artificial
  probe
  misc_feature (1)..(25): SEQ ID NO: 6468; WAN024BPD_at; Start 314; Stop 338
tcgatagtataagaaaatttgctga

SEQ ID NO: 89094 - DNA, 25 bp, Artificial
  probe
  misc_feature (1)..(25): SEQ ID NO: 6468; WAN024BPD_at; Start 647; Stop 671
gttcattatttagctttactcgtga

SEQ ID NO: 89095 - DNA, 25 bp, Artificial
  probe
  misc_feature (1)..(25): SEQ ID NO: 6468; WAN024BPD_at; Start 473; Stop 497
cattgctggcaaaatatggagggac

SEQ ID NO: 89096 - DNA, 25 bp, Artificial
  probe
  misc_feature (1)..(25): SEQ ID NO: 6468; WAN024BPD_at; Start 575; Stop 599
caggaggaatagaggattattctcc

SEQ ID NO: 89097 - DNA, 25 bp, Artificial
  probe
  misc_feature (1)..(25): SEQ ID NO: 6468; WAN024BPD_at; Start 886; Stop 910
ttcaaaacaacgtataaattatctg

SEQ ID NO: 89098 - DNA, 25 bp, Artificial
  probe
  misc_feature (1)..(25): SEQ ID NO: 6468; WAN024BPD_at; Start 277; Stop 301
ggatatgaaaatgcgccagaattag

SEQ ID NO: 89099 - DNA, 25 bp, Artificial
  probe
  misc_feature (1)..(25): SEQ ID NO: 6468; WAN024BPD_at; Start 250; Stop 274
aaaattatttggacattgtggatgc

SEQ ID NO: 89100 - DNA, 25 bp, Artificial
  probe
  misc_feature (1)..(25): SEQ ID NO: 6468; WAN024BPD_at; Start 261; Stop 285
gacattgtggatgcaaggatatgaa

SEQ ID NO: 89101 - DNA, 25 bp, Artificial
  probe
  misc_feature (1)..(25): SEQ ID NO: 6468; WAN024BPD_at; Start 359; Stop 383
tattgttagaagagaatacgataga

SEQ ID NO: 89102 - DNA, 25 bp, Artificial
  probe
  misc_feature (1)..(25): SEQ ID NO: 6468; WAN024BPD_at; Start 586; Stop 610
gaggattattctcctaatatttcga

SEQ ID NO: 89103 - DNA, 25 bp, Artificial
  probe
  misc_feature (1)..(25): SEQ ID NO: 6468; WAN024BPD_at; Start 288; Stop 312
tgcgccagaattagtaaaaagtaca

SEQ ID NO: 89104 - DNA, 25 bp, Artificial
  probe
  misc_feature (1)..(25): SEQ ID NO: 6468; WAN024BPD_at; Start 812; Stop 836
tttggttagaaagtcatttaggaga

SEQ ID NO: 89105 - DNA, 25 bp, Artificial
  probe
  misc_feature (1)..(25): SEQ ID NO: 6468; WAN024BPD_at; Start 390; Stop 414
tatagtatttcctaagctgataaag

SEQ ID NO: 89106 - DNA, 25 bp, Artificial
  probe
  misc_feature (1)..(25): SEQ ID NO: 6468; WAN024BPD_at; Start 459; Stop 483
tatattaagagtttcattgctggca

SEQ ID NO: 89107 - DNA, 25 bp, Artificial
  probe
  misc_feature (1)..(25): SEQ ID NO: 6468; WAN024BPD_at; Start 106; Stop 130
ggacaaataccatatcttataggag

SEQ ID NO: 89108 - DNA, 25 bp, Artificial
  probe
  misc_feature (1)..(25): SEQ ID NO: 6468; WAN024BPD_at; Start 826; Stop 850
catttaggagatgagtttgatcaaa

SEQ ID NO: 89109 - DNA, 25 bp, Artificial
  probe
  misc_feature (1)..(25): SEQ ID NO: 6468; WAN024BPD_at; Start 120; Stop 144
tcttataggagaaaataatgcgaga

SEQ ID NO: 89110 - DNA, 25 bp, Artificial
  probe
  misc_feature (1)..(25): SEQ ID NO: 6468; WAN024BPD_at; Start 95; Stop 119
gaaagtttcttggacaaataccata

SEQ ID NO: 89111 - DNA, 25 bp, Artificial
  probe
  misc_feature (1)..(25): SEQ ID NO: 6468; WAN024BPD_at; Start 692; Stop 716
gcagatacgatatcgctgtagatta

SEQ ID NO: 89112 - DNA, 25 bp, Artificial
  probe
  misc_feature (1)..(25): SEQ ID NO: 6468; WAN024BPD_at; Start 402; Stop 426
taagctgataaaggagaaaatggat

SEQ ID NO: 89113 - DNA, 25 bp, Artificial
  probe
  misc_feature (1)..(25): SEQ ID NO: 7051; WAN024BPE_at; Start 714; Stop 738
tacgctcttatctccattgttgcaa

SEQ ID NO: 89114 - DNA, 25 bp, Artificial
  probe
  misc_feature (1)..(25): SEQ ID NO: 7051; WAN024BPE_at; Start 1043; Stop 1067
tacatattggctacaataaaaccca

SEQ ID NO: 89115 - DNA, 25 bp, Artificial
  probe
  misc_feature (1)..(25): SEQ ID NO: 7051; WAN024BPE_at; Start 232; Stop 256
gattggtttgggaacttgatgtcta

SEQ ID NO: 89116 - DNA, 25 bp, Artificial
  probe
  misc_feature (1)..(25): SEQ ID NO: 7051; WAN024BPE_at; Start 1059; Stop 1083
taaaacccatattgaaagagtacaa

SEQ ID NO: 89117 - DNA, 25 bp, Artificial
  probe
  misc_feature (1)..(25): SEQ ID NO: 7051; WAN024BPE_at; Start 41; Stop 65
tatttccaattataactacaccagt

SEQ ID NO: 89118 - DNA, 25 bp, Artificial
  probe
  misc_feature (1)..(25): SEQ ID NO: 7051; WAN024BPE_at; Start 443; Stop 467
tattagctttattaacaatggttgc

SEQ ID NO: 89119 - DNA, 25 bp, Artificial
  probe
  misc_feature (1)..(25): SEQ ID NO: 7051; WAN024BPE_at; Start 1015; Stop 1039
tatcctttagttgccatttcgatga

SEQ ID NO: 89120 - DNA, 25 bp, Artificial
  probe
  misc_feature (1)..(25): SEQ ID NO: 7051; WAN024BPE_at; Start 1118; Stop 1142
tattaaccctatgctttattggtgg

SEQ ID NO: 89121 - DNA, 25 bp, Artificial
  probe
  misc_feature (1)..(25): SEQ ID NO: 7051; WAN024BPE_at; Start 458; Stop 482
caatggttgcaatcgtaaatgttcg

SEQ ID NO: 89122 - DNA, 25 bp, Artificial
  probe
  misc_feature (1)..(25): SEQ ID NO: 7051; WAN024BPE_at; Start 316; Stop 340
tatatattcagtaagacaggtacct

SEQ ID NO: 89123 - DNA, 25 bp, Artificial
  probe
  misc_feature (1)..(25): SEQ ID NO: 7051; WAN024BPE_at; Start 599; Stop 623
caatattaatccattctagtgcagt

SEQ ID NO: 89124 - DNA, 25 bp, Artificial
  probe
  misc_feature (1)..(25): SEQ ID NO: 7051; WAN024BPE_at; Start 248; Stop 272
tgatgtctaaaaatattccgacgga

SEQ ID NO: 89125 - DNA, 25 bp, Artificial
  probe
  misc_feature (1)..(25): SEQ ID NO: 7051; WAN024BPE_at; Start 330; Stop 354
gacaggtacctattcactagttagt

SEQ ID NO: 89126 - DNA, 25 bp, Artificial
  probe
  misc_feature (1)..(25): SEQ ID NO: 7051; WAN024BPE_at; Start 647; Stop 671
tatttccatggtttaaagatgcgag

SEQ ID NO: 89127 - DNA, 25 bp, Artificial
  probe
  misc_feature (1)..(25): SEQ ID NO: 7051; WAN024BPE_at; Start 160; Stop 184
ccgtattttactgatgatggagcct

SEQ ID NO: 89128 - DNA, 25 bp, Artificial
  probe
  misc_feature (1)..(25): SEQ ID NO: 7051; WAN024BPE_at; Start 140; Stop 164
taattgcgctaaggtatattccgta

SEQ ID NO: 89129 - DNA, 25 bp, Artificial
  probe
  misc_feature (1)..(25): SEQ ID NO: 7051; WAN024BPE_at; Start 1251; Stop 1275
ctctttgagtgaagttttaagacga

SEQ ID NO: 89130 - DNA, 25 bp, Artificial
  probe
  misc_feature (1)..(25): SEQ ID NO: 7051; WAN024BPE_at; Start 1130; Stop 1154
gctttattggtggagttatcggaaa

SEQ ID NO: 89131 - DNA, 25 bp, Artificial
  probe
  misc_feature (1)..(25): SEQ ID NO: 7051; WAN024BPE_at; Start 175; Stop 199
gatggagcctatcattataaagcag

SEQ ID NO: 89132 - DNA, 25 bp, Artificial
  probe
  misc_feature (1)..(25): SEQ ID NO: 7051; WAN024BPE_at; Start 1181; Stop 1205
tggtagatttcaatacaatggagat

SEQ ID NO: 89133 - DNA, 25 bp, Artificial
  probe
  misc_feature (1)..(25): SEQ ID NO: 7051; WAN024BPE_at; Start 965; Stop 989
tatcagtactcccatttttaacaat

SEQ ID NO: 89134 - DNA, 25 bp, Artificial
  probe
  misc_feature (1)..(25): SEQ ID NO: 7051; WAN024BPE_at; Start 480; Stop 504
tcgttttacaactagtggtatgagg

SEQ ID NO: 89135 - DNA, 25 bp, Artificial
  probe
  misc_feature (1)..(25): SEQ ID NO: 7051; WAN024BPE_at; Start 58; Stop 82
acaccagtcttattactcccaatag

SEQ ID NO: 89136 - DNA, 25 bp, Artificial
  probe
  misc_feature (1)..(25): SEQ ID NO: 7051; WAN024BPE_at; Start 886; Stop 910
catacaacatttcgttttcagaaga

SEQ ID NO: 89137 - DNA, 25 bp, Artificial
  probe
  misc_feature (1)..(25): SEQ ID NO: 7051; WAN024BPE_at; Start 405; Stop 429
aatctatcgggaatataatatctca

SEQ ID NO: 89138 - DNA, 25 bp, Artificial
  probe
  misc_feature (1)..(25): SEQ ID NO: 7051; WAN024BPE_at; Start 495; Stop 519
tggtatgaggtatcatttagcaggg

SEQ ID NO: 89139 - DNA, 25 bp, Artificial
  probe
  misc_feature (1)..(25): SEQ ID NO: 7051; WAN024BPE_at; Start 346; Stop 370
ctagttagttttacagtcattctga

SEQ ID NO: 89140 - DNA, 25 bp, Artificial
  probe
  misc_feature (1)..(25): SEQ ID NO: 7051; WAN024BPE_at; Start 614; Stop 638
ctagtgcagtaatatttgtagcgac

SEQ ID NO: 89141 - DNA, 25 bp, Artificial
  probe
  misc_feature (1)..(25): SEQ ID NO: 7051; WAN024BPE_at; Start 1196; Stop 1220
caatggagatactcactaaaaatgt

SEQ ID NO: 89142 - DNA, 25 bp, Artificial
  probe
  misc_feature (1)..(25): SEQ ID NO: 7051; WAN024BPE_at; Start 629; Stop 653
ttgtagcgactagattaatatttcc

SEQ ID NO: 89143 - DNA, 25 bp, Artificial
  probe
  misc_feature (1)..(25): SEQ ID NO: 7051; WAN024BPE_at; Start 128; Stop 152
taggtatttccttaattgcgctaag
